United States Patent Application Publication US 2008/0113342 A1 - sequence listing, part 5

SEQ ID NO: 15584 - DNA, 1557 bp, Arabidopsis thaliana columbia
gttttacaccttcatcattgtactcttgacccatccaaactcaattcatcagtcttctttagaccttcttgacgattacttccgaaactaaactcgatagtacacgagttctgtcgtctaaacttagcaacagaactagatgcacgtgagttttgcttcagactcgagtccatcaaagaacccggtaaaacagagctgctctgttctgccctccaagcagtcatactaggtttcttgtggtgaagagcttgacaaaaccggttccatttctttctcagtccactcaattcatcctgaaagttaaacccacaaaaaaaacggtttaagtaactgcacaaacgctaataacaaaacaaagatcattcatttatcaaaaagaagtttgtaccttttggttaatgttgttgttgtctccatgaggttgcagccaaggcggtaagattttgtgctgagctgatataaaagcttttgcttctttctcatagttaaaagcacattctccacagaaattgagtttatcttcttcctcttcttctcttgctccttcttcttcttcttttactctaaatggcttcatctccatcacttgagaagccatctcagaactgtgaccactgaaactaagtaatttagtatccatcacgagtacttaagctagtgattaaattataagaagagaaaaaaaaaaccttgaagcatgaagggttagtgaaagtcctcctgaaggaattgaaacagcttgaagagcccaatgaacatcaagtggaggttgcttcatttgacatctcatgtatgtttggtaagaagctgtccccaatagccaaactttggctcctgtgttgctataatcataaaccaatctccctatctcttccactagatgatccgccgcgctatagttcgaagaagatgcgctgttaccgcctccccaaactgcccaatcaagatctccaagacaaacaatgacacctttgccaccccaagatgtgaaagaatcaatctttctcttcaactctctaacttgtccctctatatcctccttcttcatgaaattcaaaccaacttgtgaaaactgaaacttgatgaaatgtgtttgttttaaatcatctggaacttctcctctctcgattctaccatgagttttgcaaccactccttctgttagagaaacagaatctccaactatgacagtgttcctcttcttgttgttcttcttccctagaagcacttcgatgaccgggtttgcgtcttctctcacgggaaaagcttgatctggagtaaaggtctttcctttagggaaatgaaagaaagggttttgctcaaaagagtgatgattggtcaaatgcgcatgccaaatcttactagggttagggcttaaagtccctcctccttgattgttttcactagaagaaggagagcaaggagaagagaaaacaccaacagaggaagaagagccgtagaaaacaggggaaacaacagaggagtcacctctatgttactcttcacagaacactagagagtcagctctctcatcactctagcacactaggatcacaag

SEQ ID NO: 15585 - DNA, 676 bp, Arabidopsis thaliana
atcggagcttcaggtttcgttcaatcagttaaaagctcttgctgtagaggcaatcaagaagcgcgacgagtctaagcgagaacgtgatgaagcattgaaggagaaggagaatctaacaaatgagcttgagaatgttaataaaggtaaggatgagatgtcgaagaaacttgatgaggctttgagatctagagatggtttaaaagcagagattgagaattcctcgcatatgttggtttctgggattgagaagatatctggtaaagttagcagctttaagaatttttcaaatggtggtcttcccaagtctcagaaatatacaggtttgacttctgtagcttatggagttattaagcgtactaatgaaatcgtggaagagcttgttaggcagattgatacgactgcaaagtcgaggaatgaagctagggagcagatggaccaacggaattatgagatagctattgaggtttctcagttggaatctgcgatcagtaatttaagattagaggttgcggaaaaggcttcgattgttgatgatttagagaggggtgtgagtgagaaagagaagaggattgctgaacttgagaaaggtaatttagagaaggtcagtttgctggaaggtgaagttgtggagctgaaacagttggttgatgagtatgatgggaagttgaagactatg

SEQ ID NO: 15586 - DNA, 623 bp, Arabidopsis thaliana columbia
gatttaagtctcttatttattagggagagaaggtttatcagctgaagagacgcttaggcttgggagttacaatgctttgctcaagaactctttgcctgaagagtttcagtactataagcccgaggaagagagctttgagtcatcacatgacgcctttagatctgctttaccacgcgggtttgcgtgggaaatactctctgtgtactcggggcctcctgttatagccttcaaatttagacactggggatactttgaaggaactttcaaaggtcatgctcctactggggaaatggttcaattcctgggtctaggagttctaaaggtatgtctgaaacatgaatgggtcccttcttataatcttttaatggctaaaactctagcatcaggatttacttacttctagaggttctctatacaggttgacgaatcacttagagcagaggagattgagatttactatgatccaggagagctgttcgggggactactcaagggacctcctatatcagagaccaaaaccacagacagtggagacaacactgcagagaaacaaagctgcccattcacacactaagataataagaaaagtagaagtgtatttgaccgtttaaagaatatattgt

SEQ ID NO: 15587 - DNA, 1927 bp, Arabidopsis thaliana
agattggattccgcggctcgtggtacatgggaaaagtaatcaccatcccatcttcctcagataaggattccgttaaatgccaagtcgagtatacgacgctcttcttcgataaagaggggacgaagccactgaaggaagttgtcgacatgagtcagcttcgtcctccggccccgccaatgtctgagatagagaagaagaagaagatcgtggttggggaagaggtcgacgcgttttacaatgacggttggtgggaaggggatgtgactgaggttctggatgatgggaaattcagtgttttctttaggagctctaaggaacagattcggtttaggaaagatgagttacggtttcatagggaatgggttgatggagcttggaagcctccattagaggaaacagaagaagaggaagatgaatcagaggaagacaaattagacgactcagaagacgaggaggtaggtacacattctcaatgatacttgataacctttctgtggaagttgtttagtggagacttttgctttagttcttctagagcaatttatgagaatgcactttaatcatgatagtaataaaatgcaggatattttagcccgagtggatctagaaactaccagagcaatcgcgaaacaaatgttttccagtggcactgttgtcgaggttagcagcgatgaggaaggtttccaggggtgttggtttgcagctaaagttgttgaacccgttggcgaagacaaatttcttgttgagtaccgagacttgagagaaaaagatggtatagagcctttgaaagaagaaaccgattttctgcacataaggccgccaccaccaagggatgaggatattgattttgctgttggtgacaagattaatgcattttacaatgacggctggtgggtaggtgttgtcatagatggtatgaagcatggaacggttggtatatattttaggcaatcacaagagaagatgcggtttggaaggcaggggcttcgtctgcataaagattgggttgacgggacctggcagctaccactgaaaggagggaagataaagagggaaaaggttctgtatgatttccatattaattatgaactctagacaagttcacatagatcattcttatcccattcttctttatgtgcgacatattcttccccaaatatgtgtgtttaaagtttttattttgatgtgtagactgtttcatgtaaccggaacgtgagacccaagaaagcaactgagaagcaagcgttcagcattggaactccgatcgaggttagccctgaggaagaaggatttgaagattcttggtttcttgcaaaacttattgaatacagaggaaaggacaaatgccttgtagaatatgataatctgaaagctgaagatgggaaagagcctttgagagaagaggttaatgtttcacggataaggcctctgccactagagagtgtcatggttagtccatttgagaggcatgacaaagttaatgctttgtataatgatggatggtgggttggggtgattagaaaggttcttgcaaagtcatcttacctggttctctttaaaaatactcaagagctgctaaaatttcatcactctcaactaaggctacatcaggaatggattgatggaaagtggataacatcttttaaggtatggttctaaaacgatcaactcattttatcacatataacttcgttatttccccttatatctaaggtttcagcatcgttcctgcaatagtcatttttcatcaagcttttactgatgaagttgctgtcattaattttgatttcagtctcagaaggtgtaaatgggctggatactcgtcaggattttgggattcaagttttgtattctttgaggtcttgtactcttagcagttagcttaacctggtgttcctgctattgtagataatgcagtatgatgagt

SEQ ID NO: 15588 - DNA, 1012 bp, Arabidopsis thaliana
aaggctcgatcgataaaaggccttcatcgaagtcaatcgacatattgaacaccttgtgtagggacaagggcaatctggtgttcattgttagtgctaaaagccgagaaactctatcggactggtttagtccttgtgagaagcttggtattgctgctgaacatggctattttctgaggtattcaaccaaaactttttattttctagcattacctttatatcttataactcaagctccatctaactactacacaggctaaggaaggcagtagagtgggaaaactgtgtggcagcagtagattgttcttggaagcaaattgccgagcctgtgatggaactctacaccgagacaaccgatggctcaacaattgaagacaaggagactgctcttgtttggagttatgaggatgctgaccctgattttggctcatgtcaagctaaggaacttctagatcatcttgaaagtgtccttgccaatgaacctgtaacagtgaaacgaggacagaactatgttgaggtcaagccacaggtctgtatctcctcagttcaattccccaaaaaaccttggcatatgtttccatttgtagagtcttcttagttcttgttgttgtcatgcagggcgtgacgaagggacttatagcgagaaggatgctttcgatgatgcaagaaagaggaacacttcctgagtttgttctatgtattggagatgaccggtctgacgaagacatgtttgaggtgatctgcagttccactgaaggcccttcgattgccccaagagctgagattttcgcttgtactgtcggtcaaaagcctagcaaggccaagtattacctggatgacactactgagattgtcaggttaatgcatggtttagcttctgttacagaccagatcacgtcctgtttaaacaatcacagagaaagtatcagagactagagatcttatgtttgtatatctacacggaaaattgtacgaagagagacttatgtttgttgacatcttaggatatatgagt

SEQ ID NO: 15589 - DNA, 881 bp, Arabidopsis thaliana columbia
ctaaacacacagataaaagtctcataaaacaatcttaacttcaaacaacaaccagggtttcacaacaagcatacggttttcaagataacagaaaataagtctgataaaacattcttaaaataagaccaacatagagaggttccacaactagcagataagatctcagctcttgtttagttgacagataagcgtgggatacagaagtcaacaagcagacctgctggctctttcacctgagactcctcaccaccaccaagctggacaaacatacggctcacaagcactttgacaaatgaagtcttcttcttgtaacagatcttcacagtagcaacagtttttccctcggacttatccactgcaactatgattacatccctaagtccaacatagcgtgattccttactagactggctagacaggccctcgtaaaatccctaccacacaaacaaaaaagttgaacaagattagatcaaaactttgtcattgatctctgaaaattcgaaatttatctaacaacacattacctctccaacattatcaagctctggactgaagacatggagtcttgctcccaccggttgtttaatcaacagcttaaacgcttcatccaaactcttagtctcaatcacttctcctttcatgggcacgcgaggaatctgacaggcaaatggtggagccttgaacggacatcccacatgtgcccactgctcacttctcggtagcccttacttgaaagcacattcaaggcagtctttgacagtgagtggttgctccctttctccctgcacatcttccttcttattccagacattttcatccatatactgaagcaagttttggagagtgagctgagagctttgttgatccatttctccctggtt

SEQ ID NO: 15590 - DNA, 562 bp, Arabidopsis thaliana
gtaaaatttgttcaaagccattgcaatcttgaacttgatttgcaaatacctttctcctcgatgaattgacggattaagccattgtcttcaaaaactttgacagtgacaactggtcctgagaatatttgtcgacggccataaatctggaaaatgggttgcaaagctcgtagctgaccactccgaatcagctcttgattcgcgtcacaaacttccgcagttgtcacaaacgccattttcttctttttcctgttctcagctatgatcaaaacatgagacttgcgactgaatcaatcaaaagtaatctgagatcatgatgatatgatatgatcaaacacataatgaaaataatcagattttcagattttcgatatagcttgagtatgatcaccgaatctgttttctatttcatggagaatcaaacaaacccagaagaaaaaggacaaaacttttgaaaatatttctatggaagggatcagatcaagttttgttacctggatcagacaaaattcagatgtaggaaaaactcttcacagtgtgttactatttcagagaagaatataag

SEQ ID NO: 15591 - DNA, 845 bp, Arabidopsis thaliana
cctaatttgttgagctgtgccagatttgagatcgatatacctattttatatgcaagcaattttttgtcagaattataaacagttttaaataaaatactataagattaatttataatcgaataaattatatataacctttgtgcagatgaggtaacaagattaatagtcttgtaaaacaatgaagcttgaatgtctccttggagacatatataggcattaggaaggttactggggacccttatcaataaatcccaatttgcactgagacgagtttgtgtaatattacgcacagtgaaatccatagaagctatttctatattcggcgcgacaggagtttcttggttcgctagcaaaccacaagctagcaatattgcccaggccaaaattagtaaacctagtaaccggagctcgccggaggtgtctcctgatgttcttcgtgtgtcactcattgtgtcacgattgaaggaagatgattgagaaggtttaataattattctcttgtttagaaatctggttttatatgaatatctaattgataataatttttataggcgatgaatatctcttaataatacacaatttgcggcgatgaatatctagaatcaaataaatatgcaaaaaaagagaggaaaaataacaaaaacgtaaaggggaaaaagaaaggaaacatgtaaaaagtaaagtattggtaaccagaagccgaaaccagaagtcgaattagaaacgaaacaaacattttgtcttcaactatttgtaacagagtcgcttgattctcaaagcattggtaagtctctaaatctctctttttcttgtggttaaagtatcacgaaaggagagactttatg

SEQ ID NO: 15592 - DNA, 563 bp, Arabidopsis thaliana columbia
cttaataacctgatcgatcttggctcgacagacgggacatccccaattcttggatttgatctccttcaagcaagacatacatcccgcgacatgtccacacgggacacagactgcttcagatggagcatcgagacatatcgcacacgttccagtgttcccgtcttctttcctttcaccttctgttgaagctggaagagaagcagcagatgggagatcgactggtgttgaatcgattgatgggtaatgaattggaccatcgtctactgtagctatatcatcatctgtcaatggaggagctgatggtgaagattctagcacaatgccaattccatggctattgaatccaaaggcacttgcttttcctgagggaggtgcagttgatgagcttggaccggatgaggaacttgcttgaccgatggaatggtgattgagatttgatgggtcactcatagtagtgtgaagtgaggcgttcattcccatggctagtccatcttctgatggtggtggtggacagatggtggtgcttggaggaagaccggtggatgcatcggctgtatacatat

SEQ ID NO: 15593 - DNA, 540 bp, Arabidopsis thaliana columbia
aaagggtcccatagatgatgcaagaaaaccgcgtctactatagcaaatccaatctcttaaaacaaaaccttaatattctgcctctttcctaaaacctctcattagtttactcatattactatttgagggaatctacagtgcattgatactaaatagataacacttgttacacccacaaaggcccataacaattttgaagtttcctcgaagctaactttggaggctttgagattttaaaacgagtacacaggagtttatctgctgttaagatactaatccacacctataaataagtgctgacagttacaaacattccaacatcaaaatccaaacagacaaaatacaaaatacaaaaacaacaaacactcttgagcaaaaactttgtgtgcgtgtgtgtgtgtgttcatggctggtcttaggaattccggtaacagcgacaaagcgcaaaacgatggcaaaggtgtaccatctgcctacagaggagtccggaagagaaaatgggggaaatgggtgtctgaaatccgtgaaccggggaccaag

SEQ ID NO: 15594 - DNA, 599 bp, Arabidopsis thaliana
aaggctttgaggatattgatgagaaactcccaattgacgttatcataagccttggttagatcaacctgaagacagcctctagaagtatcaccttcagcttggaagttgtccactagctcagacgccaagagaacattttcacatagaagccgccccttaataaatccaacctggttggattgaaccgcttgatcaatgaacagcttgagtctcttagagataaggcgagtaatcaccttgtagattgtggtacaacaagccaccggacgaaagagattgagctgatcagccccgggaaccttaggaataagagtaatggcagtggcattaaaccctttcaacaaatgacctgtcaggaaaaattccttaatagctgcaataacactttcctttacaataggccaagcttccacgaagaattccactggaaacccgtctggaccaggcgccttgttcctaggcatagagaataaggccatagtgatctcttcatcactaggaatagctgttaactgagtagccaaggaggaacacacctaaaaggatgaagagactgaatttcgtcaacggaaaaggggggcacatcatcattaggggtg

SEQ ID NO: 15595 - DNA, 808 bp, Arabidopsis thaliana
aaggaaagagctgcagattgaggtggtttaaccagttagatccgaggattaacaagagagctttcagtgatgaagaagaagagagactacttgctgctcatagagcttttggtaacaaatgggctatgattgctaagcttttcaatggaagaacagataatgccttgaagaatcattggcatgttctcatggcaaggaagatgagacagcaatcaagttcttacgtccaaagattcaatggttctgctcatgaatctaacacagatcacaaaatcttcaatctttctcctggtttgtctcttcttaccttacacatatgcattgagtttaactctgttattgtaatgagatactttcgatatttatcactcaggaacaatgaacttatggtttggtctcaaaagtagtcagattgcaagtttggtgagtctttaagtttcatggttctgtgtgttcttgcaggtaatgtagatgatgatgaagatgtgaatctgaaaaagtgcagctgggaaatgctaaaagagggaactactaacctgaaagctcagtatctccaagaagaatatagttcttcacgcatgccgatgcagggtccacatcatcactactcaaccttccctgcagattccttggcactgacactgcatgtctccatccaggaaccatcatcatcatcgtcattatcactgccatcatcatcaacaactggagaacatacaatggtgaccagatattttgagaccattaaacctccagcatttatagattttctaggagttggtcctaaagctctacatttagagtggga

SEQ ID NO: 15596 - DNA, 396 bp, Arabidopsis thaliana
tgaagttaggagcaaggtgacggcgaacagtatagtgatcctcaccaaacaagtagattaggctatgatcaccgaatagtcgtatgccaaaaggatgtcctagagggtgaaaagcttcaagacgaacgttggagaatatatgacgagaaagctctgtgactctgatgtagatgatgaatttgccgatgaggtagttagcagcgaggccaggggaagtgcctgccgtgtcggattgcttggaccagaaggacgtaggatcacggacgagtgacatggcgtttccgatgatcggagggacaaagagaggaccagagaggttacgtttcttgacgaggtaagagagctgctcgatcagaaagaagagtagtaacgcacagactaagtacggagcgagag

SEQ ID NO: 15597 - DNA, 448 bp, Arabidopsis thaliana columbia
gggaacggccgccagtgtgtggtttttagattgttcggttttaaaatacatttatcaaagtgaaaccgtttgtccaaaaattaaaataaaaaatacttacatgagggagtgactgcaaaccaggaactttggaaagagttaacacaaatttttcgccaggttcaatagagcatggatcctcacccatcacatcactgaggtcgtaatttattatagtgctattcacattttcatatttatacaacacatgtatagttgctctatagatgatgtagcctgtaaacacaaatatattttcttacaagataagatattggaaactataaatgaaaacaattaaaagaatagaaaatattacgtactatcatcacttgtaaagccggatatggtaatggttggctcgtcgtaaggcccaacagggtatggagagatcccacacgtgtgacgt

SEQ ID NO: 15598 - DNA, 576 bp, Arabidopsis thaliana columbia
agcagtattgggtgtgaggaacaaagacaataaacttgttccttttcaattaactgaagatctcaaaccagatgttccaggtaatctacttggcctctacaagccttttttggttataccatctgatttatcaattaaagattgagttttgttgtttccagctgaagcagaaaggattaagagatgcagaggacgtatatttgctcttcgagatgaaccgggagttgcccgtctgtggcttcctaaccacaactcacctggtctagccatggcacgtgcttttggagatttttgcctcaaagacttcggtctaatttctgtacctgacgtctcctaccgacgtctcactgagaaggatgaatttgttgtcttggcaactgatggggtaagaaacatccaagctcaatgtcagaataagtgtggactagtgagctcattctcttaagaactttggatatatgtgttatggacgtagcaacctatactcttctagctgttaagtacatttttctctcttaaaaatttgctagatttgggatgcattgacgaatgaagaggttgtaaagatagtagcga

SEQ ID NO: 15599 - DNA, 644 bp, Arabidopsis thaliana
aagttatcatcaagtgagaatcgcacctgtacatatccattaaacagctttcaagacacatagtggacactgtgagtacttggttatgccgtttggcctgactaatgctcctgctaatttccaaagtctaatgaattcagttttcaagacatttttgaggaagtttattctggttttctttgatgatattctcatctataactcatcactagaagaacatgagcagcatcttaagcttgtctttgaggtaatgcgtgagaacaagttgtatgctaagcgaagtaagtgtgcttttgcggtcagtagagtggagtatttgggccattttattagctcagagggtatttctacagatcctgcaaagattcaggctgttcaagattggccaagaccagcgactttgaagcagttaaggggttttttgggtttggctggctactacaggcggtttgttaaaagtttcggcactatcgcaggacccttacatgctctcacaaagactgaatcgtttctgtggtctgacgaggcagaaacagcttttcatgcacttaaagctgccatgtgtcatgcaccggtactagctttaccctttttgataacagtttgtagtggaactgatgcatgtgggcaagggattggggctg

SEQ ID NO: 15600 - DNA, 793 bp, Arabidopsis thaliana columbia
gacatgtcgaaataagttgatttagttaaaattgtgtggaaaaaaatttgtttatgatatatcgtgggctaattaaatttcggtgtgttgcaatgtatcatactcatttcagctttcttagctaaatattacttgtacttcaataactagctacaaaacaccaaaataccatgaccttggcttcttttgatattctctaataaaacccaacttggtttaaacatctctaaaatctgacttgattccaagattgaccaatcatctaccttcttgagatgcagcctcgtgattatacttcttgactcttcatctagtttctttagatgtagtcccatgatctttgaatgacgtacgacttctctccacatatcatttagaatcttcattagatacctagagactcctcctctatgcaacatcgattgaactcccttgaagtaaagtctcctcctttatcggtacaaaaggttttaatagacaagccgacttgcttctctaaaactcttgaaaagcttttgaaccgatcaaaacttgaatgaatatgtcaacaaggaaccatcttgttcttgttgactgattcaaactcctcttcacatctttcctccattaaagcacatctttagcctcttggctcattacttgttgaaagttgacgtctcttacttttaacataagcttggtggaacaatccataagttgtttcggactgcataacatagtcttcaaggtaccgcgactgacttatttgtcgacccgaccttctcagttgtggtactccttgaactacttcacc

SEQ ID NO: 15601 - DNA, 590 bp, Arabidopsis thaliana
gacaaacacgaatccttccacgtaatcgaacgatgactcgttcttctgacttactagccactcggcgtcttgagtgaactcatcgaactcggtgtatactactcttatccatctcacctaacacaacaatcatttatattatggaccaaatatcttatttttgattggattagagaaaatatatatatatataactgagattgttatttatattgttggttttaagtattcaccatatcaggagctggctgtagcaaaaccctagctctggtgatgataccaaactgaccaagaccacctaaaacagagaagaatagctctgaattctcaatctccgagcaagtaacgacgtcaccatttcccgtaacgacgtccaactccgttacatttgacgtctgtggtccgtaacggaacgcttgaccactaacgccggcatttgacaacgtacctcccaccgttaacccaagataatcagtccaagacctcggagccaaaccgtactccgaaacgcaccgtttcaatacatcttcccataatgccctccggagacatcaacaaacgccgtggcatcaccgccggataaataaccg

SEQ ID NO: 15602 - DNA, 561 bp, Arabidopsis thaliana
ctaaatagctttcagttgaaaagatattagggtgaaagcctttgagggtcacgagggaagagggatgttttccgaatgttgttcagtgcacagaaaagcatgaccactcgctccagccccactccaaatccaccgtgtagaggcgcaccgtacctgtcaacatatatgtagcaatgctctgcttagagaacaactcagataagcaagtaaaaggaaccgagctagtccagttagtaatttacctgaatgaatcaatgtatgtggatattgtcttgacatcaatgccacattctcctgcacgttgctccaagacttctgggatatggacacgttgagctcctgatatgatctcctcacctaggacagaacacgtaaacttagtatcaaatgtgcagtagcataattggtgtgacacacaaggtaaaaaagaatcactcaaagatgtacctctgatgaagacatcaaaagagttgctgtaaagaggattatcggcacaagtcattgtgtagaaaggcctaactgccttaggatacagatgcagaatatagaactcagtgttgt

SEQ ID NO: 15603 - DNA, 1025 bp, Arabidopsis thaliana
ctcgtgtgaatgacttgactaaaaatattgaccaacttcgattattttattttctgataagagattttatctttactacactcggataattgaccacttcgatggaaaattcttgcttcttcaacttctttttcttttacactaccaacttcgattctagaaaacgatcttttttagtataaataacgaattaagtgatactcaatttaatgggcttgggctttcttaacttctcatgaatcagtttgactttctcctcttttcccaacgaatttaggattttcagaagtttctagaatccagagcaacaatggtggcgaatcaagtaatctccggcgttaaagaaaccgcacaaccaatcaccagcgccgctagtccatcgccgacgccaccacacgcgtcacacaaaacctcacacatttccgaatcaatttatcatcctctacttcctcctaaccttctctttaatcacacatcacatcgcggttctagcattcatcgccgttggtttagcttggtacaatgttactttctctacttcgaatcgctagtgttcggaattgcacaattgaattggttcacaattttaaaaccggttaaccaaatcatacatttcaaaaaaaaagctgacactgtaaacatatgattactaaaccggttttcatgagtctaaccgaatggaccggctatatgtactctttttcagctgacactgaacactgcttcgatacggcgagtaaactgtaaacatatagccgatcctaaacatgtaactggtaactttcatgtacatagtagtaatgtaagaaattcgaagacacaaagacctatttacatcaaatgattctacatatactcagtgttattttccaagtaaagagtcaaaattcaaagcatagacttcatttttttcagcgggcttcggcttcactctattatcctaatcatctcctgcaataaggacccccacaggttcataaccatgctcaaacaaaacatcttataaacttgagcaaaatcatgtc

SEQ ID NO: 15604 - DNA, 591 bp, Arabidopsis thaliana columbia
  unsure (1)..(591): unsure at all n locations
caaagaggaaatgtgtcnnnnnnnnnnnnnnnnnnnnnnnnntgaaaatgaagtttcaccttatcagctccagctattatgctctctactattggcacaatcttgctgctccgggcaatgctataccccaggaaatattttatttgagataacccaatcacaatggccgaagcacttgtaaatccagatatgactgagtgactaatgaaacgaataagccatccaagcctggattgaaatcacaaacaagggagacgcaacatgacacaacaataattagaagacttctgctttaacggataacagttactacacaggcaagctatataagtagcagtcaagataataaacgttttccttatctgaattctaaccaaaaatagtagtattaccttaagagccccatgatgcactccaagattccaactaaaagcgccaacaaaatggccaattcaatatgtaattcctcgttcgtatcagcgattccacccaaagcattagagacgagaagagaaaccaatgctacaggtccaattgcaagctgacgggatgagccgatatggcatagacaaatactggcacaaatgaaga

SEQ ID NO: 15605 - DNA, 1570 bp, Arabidopsis thaliana
taacaaccgcaatcacaatcgcagtcatcacaaccataaccaacaatacaaccaccattagagagtacacaagctttgatgcaccgagtacgccgactataaggccgaaccggttattggctcaaaaggaagtaggcgagcgaaaccctaacgctgcagaccattgcaacaggaaccctgagatatgtaccccctacggagggggaggaagcaactcgacgatgacatgctgcaacaataagtgcatagacgtgtccagtgacgacaataactgtggcgcgtgtaagaacaaatgcaagttctcacagacgtgttgtcgcggccaatgtgtttacgtagcttacgataaacgccattgtggacagtgtaaccatccgtgtgagctgggcgagttctgcgtctacggtctatgtaactatgcgtgaataatcgatccatcatcacaagagaggggtgtatatatattacacaacaaattaaactaaagctaattaaaagtctatcactcttttaacaaaaaaaaaaaagagaagaaaaagactctaatacatatatatacaggttaaacaattattcacattggatgatgttatgtccaattaataagtggtgggtgtgggtgtaattttaaatcccataacattttgaaagggtatatataaaagaataaaacaattttgatattgtttatgcaaaataaagattccaataatctcatgaattgatgactatatatatgtcctctcagccttttaatgggaaattggataaaatgaagataaataattgcaattagtattgaacgtgtggaccgtgaattatccaattaaaggccataaactaatttacgtgaaaatcttgtggcccgacaaaatattattcccgaaaaagcccaaatagtactgctccttaataatttaaaggttacaacacatacatagtttaaagataactaaacacctaacgaactgcaccaaaaaaataacttagaaatcgggagcggggacaattatcaaagatagatattaagggagcgagcctttgagagtcgccagggaagagcaatgatattagggagtgagcctttgagagtcacgagggaatagcgaagttttgcggatgttattgagggcacataagagcattaccacacgctccagccccactccgaatccaccgtgaggtggtgcaccgtacctgtaaacatgcagccactcgtcaactcaactcaactcatagtaggaacccaactggatcgatcagtttgtggttacctgaatgcatcaatgtacgtggatattgtcttgacatcaatgccgcattctcttgcgcgcttctccaagagttctgggtcatggatacgttgagctcctgacatgatctcctctcctataagacagaaagctcaaatttagtattattaaatcaagtgtagaagtaacataattgggtgacaaactcatagatgcacgcacctctgatgaagacatcgaaagagttgctgtagttagaatcattttcatagggcatagtgtagaacggtctgacagccgatggatagcgatgcagc

SEQ ID NO: 15606 - DNA, 505 bp, Arabidopsis thaliana
  unsure (1)..(505): unsure at all n locations
nnnnnnnnnnnnnnnnnnnnnnnctaaagcaacccgggcgtcgtgcgcggcaagaaaggcgaagttagtttcggggatattgcccataaaggcgaaaccggcaccggctttggttcactggtgggaactggcagttatatcacgcctgatttcgccttcccgtatggcgcaaacttcgctgaagttgccgtcaacacgcgtacgggtgaaatccgcctggataaattctacgccttgctggactgcggtacaccggtcaatccagagttagcgttgggacaaatctacggtgccaccctgcgtgctatcggccacagtatgagcgaagagatcatttatgacgccgaagtcacccgttaacgcgtgatttacgcagttacggcgcaccgaaaattggtgacattccgcgtgatttccgcgctgtgctggtgccgagcgacgataaagtcggcccgttcgggcgaaatcgatctcggaaatcggtgtcgatggcgccgtccggcga

SEQ ID NO: 15607 - DNA, 803 bp, Arabidopsis thaliana
gataatggtgccaacttcaaaactagtcttgaaatgtaggttgtttcatcaccataacacatgtaatgtgtgaagcagtaacataacaaaattaacaacacacatcattcatctacaataagaacaaaccttaacacacgagaagtacaccaattggcagactaaaagaagaggagaattgagttctttgtctcagtttttttttttttgtttttgtgtctcagccggaatgggtctgaagtagaagtacggacaagacaaagaaaccttgtctgtctctatacaaacattatacacaaattccaaaaaaaaaaagaagaagccttttcttgttatcttttttggtatatgcacatatagatttcctctcagatatatgtgattctcactcaggtcttctactcaaataggctttttcttcttctcaaggtacgaagattatatatataaattcacatcacatgcttctatataataatagtcatatagattaagaattgctaaaaggtgatccagaggacctgcgtatgcgtacccttttctgaggtgatctattcaaaaggatcgacgaatttcacgcccttgtcttgtgattctgctacctgttagaggaagagagctctggctcgagagttgcagctctgagaatggaattgacccaccgctctgggagaaaatcaaacctgccgagatgtttgatgtgcttcttgatgtaggcacacggtcatgtaagcatcttttgcaccgcctgctatgagctctgtcgatgaagaagaaggggcagctgcagagcacccaagaga

SEQ ID NO: 15608 - DNA, 647 bp, Arabidopsis thaliana columbia
agagagattcgccatatctttgttgatgcgattaacagagactgtgatcttatggctttctggagaccagagcttttgggatgacattgaggaaggtcctcgactttgggacctcttggcctacggagtgtttgtacactcattcttgcttctgtatatgtatattcagcgagcatcgaaattgttgtgtacctttgttaacaaacaacctgcatctgtcacagctgtatttggacatgaagtttgtcatatgctttgcatcccaaggtcgctacctatcgaggaatttgcacaggggaactaatgagataatatctaaagccttagcagctttcaccgcaacagggatagatccatataggtacatcggttttgagggtgttttgcaatgttttagcctttatggtaagtataaatgattaaaatgtggttgtgaatgatgtgcagtgagctgccagaagacgattggttcaatgacatatgtgtggatgcgatggaaagattgagtggcaagacaaagggcaacaacggggatgtccacagtccgactgcttcagtgtcagctcagtctgtttcatcagcgagatctcatggcagctattgaaaccatacccatcttacatttgttaagaaggtgaatggtccat

SEQ ID NO: 15609 - DNA, 621 bp, Arabidopsis thaliana
tgttaatagtttcgactatacggctgtttccaacgattcccaagatgcaaaggagattgatcctctgccaccaggtttggtcttcttgaatgtaggagacaacgaaagcttttttacaaacaatttgaagatagcgagggttttgatgtgaactaggatagttttaactacgtgttatctgttgttaactttgactggaaaccatctatagatgataaacagagcaatgaagagctgctcaaattctcatagaaacagccatcaaagaacacgatgaagaatatggaacaaaactcgagtatgtcaattgtcaagtatgtgaatgcaaatattactacatgcatgggtcttatgaattatgtaacactttcggctagagaccttatctcatcaaaaccaagagcttaaactttaccaagcaaaggccaagtttcgtgatgagatataggttgttatggtcaggccaaggccaattcagtaactaagtcgataaggttattccaaggcccgtttgatttccccagtctgttttcggaagcaagaataatttcctagaaaagccctgtaaacttattgttacattgatcattcgaagcttttaaccagattttatacccaaaa

SEQ ID NO: 15610 - DNA, 547 bp, Arabidopsis thaliana columbia
tcgttaatgctttatctgatgatcatagcgaagggattgtgaatttgtgttttttggttcaatagaaaggaagaattgagttttggttcatgtatgatttggaatttgcaggtccacctggttcagggaaaggtacacagtctccggtcataaaggatgagttttgtttgtgtcatttgtctactggtgacatgcttagagctgctgttgctgctaagactcctcttggtgtgaaggcaaaggaagcaatggataagggagagcttgtttctgatgacttggttgttggtatcatggatgaagcaatgaacagacccaaatgtcagaaaggtttcattcttgatgggtcccgcggactgtgactcaagcagagaaggtttctggttcttttatgtggttagttgtttgtgtatctgctcgctcttgtaaatgttctgactttttttgtttataaatcttgtagcttgatgagatgcttaatagaaggggagctcagatagataaggtgcttaattttgcgatcgatgattcggttctcgaagaaaga

SEQ ID NO: 15611 - DNA, 613 bp, Arabidopsis thaliana columbia
ctcaataaagtccgcatctttttttctctgcgattcacaaatctacacttctctctctctctctaaccacaaagcttccatggcgtcagatcagagcacgaatccaccgatcatggaggcaaagacaagacatcctcttcaccagatcgcagatacaccaacacacaagcttctcctgaaacaatggttaaaagaagaagagctaattctaagccgtgtctctcacaaagaatctcagatcgattctgttcgaagagaaatcactcagctctacatcttcttctttctcttccactccatttctctgctacttctcttccacgcttcttcatcctcatcttcctctgcttcttccagtgcttgtaaaagatcatggatcccttcactctgcgctctgctatcttccttggggatcatttgggcggtacggtacaaatctgaagtggaatcgcatcttgagaagttgttggagagggagaaagaagatgcgaacgtgttgcgtaaatgtgttgaagagttgaagaagaaaggtatcgaatttgatttgcttaaggaagtggatgcgcttcgtagagccaagagtttaaagagtgagtcgagccctgtgagaaat

SEQ ID NO: 15612 - DNA, 639 bp, Arabidopsis thaliana columbia
caagtgctattaagcaggtactggaagtcaacttgacttgtggacatttcatattttcatgtgtacagtcttgcttactctaaggaagttattgggaattcttttgttgtcttcatagacattatcaatttgtacttttctaatgatttccagttttcaaaatgaccttttatattatcataggttgcctcagggcgttttggtgtcactccgacgtttttggttaatgcggaccagttggaaattaaagttgctcaaggggcgaacgaggtgaaggtggccaacttcctgggaaaaaagtcagcgcatatattgctagacttagaaattctaaaccaggagttccgcttatttctccacctccacatcatgatatttattccatagaggatctggcacagttgatctttgatctccatcaggtattttactttggctgtaaatatattgccaactttagaatctgggctcctcttaacaaaaaattataatcaggtcaccccaaggcaaaagtgtcagtcaagcttgtatcagaaactggaataggacagttgcaccggagtagcgaaggtaatgcgatatcatcaggtatgccattcttcagagttgtgagaatttgaaatggagaatgtaatatta

SEQ ID NO: 15613 - DNA, 550 bp, Arabidopsis thaliana
gttttagcacaaccgcattaccagctgcaatagctccaatgactggctcgacagacaatactaaggaaaaaaacaaagcaccatgaagacatataaactttaatagtttagaaattgagacaaaattgtcaataaataaaattgagcttacagaaagggaaattccaggctgaaataaccaaaacaactccaagcggttctgagactatttgtgcagacgagggaaatgttgtcacagaagttttgacctgaaaggtccaagcatagaaaaagcaagtggttttagaaaggacacatatcaatgaagcagcaaagcttgaacggtctagttaccgtttctggagccatccagttctttaactctttgattgcaagcatacaggatgattttgtattcgaaatctaaaaaacgagaaaaataccaaagagattcaacagtggataagtggaatgcagtgaagaaacgggacattgaaattatataaaaaacctcagctagaaaagcttcaagctcaggcttagaaagatcttgatacaaagcttcggtgat

SEQ ID NO: 15614 - DNA, 492 bp, Arabidopsis thaliana
tgtagtacttgacaactgcatctccattgacagatatgttaagcctgtgatttaagagaaaagaaggagaatgctcatcagtgtcacaacaagcaaattcaaatgttccagagtaatgctggctaaaacctgttagcaactatttgcctaggaagtaatgaatcttaaactatgtagcaggggaatagattgaaagatcaggttgctaattccaacaaatgcaaaacaaattatgtatgaatggaggcaacgaaaacatacaccagtaagtgattgcaagtacccaagaagagtcgcccatgtggatccattccaaactgtacagctcctctaagtgaggttccatgagcaatcttcggcccctttttgttaatagtgcactctggacaaaaccatggcccatctggtatatacattttgaccacaccaatgcatcttgagtggtatgctaaaggacatccatcacaacaaagcaaggttccatccattcac

SEQ ID NO: 15615 - DNA, 2113 bp, Arabidopsis thaliana
cataacacctttgtctcctaaattcactccatatattctactcggatcaatctacacagaaatcaactatgtaatcactgttaaccagataaaatttgattgtgtaagttgaatccacttgtacaatgacacattgtggtcattattttaagggacaagggttactttacattaagacttcatccaattcgattacgtcgttatctttgaacaaaacaataatatgtttcttcgtcatcttggattcataacaacaaattgttatgagcatccaaagcgagactaaataagtttattaaattgttaaagagttgatcttctatggtatagagatatatcacactgtcaaaaacattttttcgtaaatattggttagttttataatgatacataatacagatgaaactaaatataattcttgtttaaaattctgtacattaagaaatataattatatacatatatgtgaaactagtgataagaaatttaaaccctaactaaagcaagaaaacaaaaagaatcatgtcagtcccaccccatatggaacacaaaccctaataattacatatatgacaattatcttcttataatatatctccatacaaaattattgtatacatatggacatagatatatataaaggttcatccactttaaattttagccatcttcattctcacactcaacccctctctctcctttcattctcattctctctcggctttgttttctctttgatctgattcatctattctatttctatcaccacacaaaaagaagaaaaaaaacaaactttactttaagaattttgaagaataaaatcaaaagagaataaccatggttttctcctccatccaagcctatcttgattcatccaactggcaacaggtaaatgctttacaattccttatatagtagctagacaaacaatttcgtcttgctttgaattagcatgatctaatttcgaatcaaactcaaaaagagtactaatattaattcaaagaatgaaaaagaaaagacacaaaagttcttcttgcttagcatgttcttgaatattcttgttaaatatcaatccttcttgttttgttttgtaactttaggctcctccgagcaattataatcatgacggaacaggcgcctcagcaaatggaggtcatgttcttcgtcctcagctgcagccacagcagcagccacagcagcagccgcatcctaatgggagcgggggcggaggtggaggtggaggcggctcgatccgagcaggatcaatggtggacagagcaagacaagcaaacgtagccttgccagaagcagcactgaaatgtccgagatgcgaatccaccaacaccaagttctgctacttcaacaactacagcctcactcaaccacgccacttctgcaagacctgccggagatactggacacgtggcggagctctccgcaacgtcccagtcggcggtggctgccggagaaacaggcgtaccaaaagcaacagcaacaacaacaataacagcactgctactagcaataacaccagtttctcctccgggaatgcatccaccatcagcacgattctctcctcccactatggaggaaaccaagagagtatcttaagccagattttgtctccggcgaggctaatgaatcctacttacaatcatctcggagatctcacaagtaatacaaaaacagacaacaacatgagcttgttgaactatggaggattgagtcaagacttgaggtcaatccacatgggagcttctggtggctcgcttatgagctgtgttgatgaatggagatcggcgtcttatcatcagcagtcaagtatgggcggtgggaacttggaggattcttctaatcctaatccatccgcaaaacgggatttactctaatgagtcgccgaggataacttcagcgtcaatctcttctgctttagaatcgcagttatcttcggataacgttgaagataatccttacaaatgggataatgtcaatggtaattgctcttcctggcatgatctttcatgctttcggctcttctcgttgagttcaccacacaacacaaaggacacttgagggtatactttggtggggcaaaaactagttaccaggttaat

SEQ ID NO: 15616 - DNA, 538 bp, Arabidopsis thaliana columbia
catctgacctgatcaagtacaacatcggtgatcatatctccagctacctccttagactcagagaccacagctaactcctccgttacccacttcctcccgccaggtctgggaaccatccctccaaatctctgcagatccctcagctccttgtgcatcgttttagccgccttcttcctcgccatagcaaacacaatgtgatccatggcttcatcattcatatacacctcaaaactaatctcatctttacaaggcacgacagagttgaatagccttgagatcagatcgtgtctactcttaagctccaaagtcgccaaaagcccatggcaatacctacgcccactggcatagaacttaaacacattcgtcgcttctttcagcaacaaaggagagtcttctccttcaccaactccaagcaaactgaagttcttctcaaaaatcgtatctttaagaccaaatttggaagcccaagccaaagcgaggttctcattttcacgtttaccagtgaagtaattgatagcgtaccaatcaatatagagac

SEQ ID NO: 15617 - DNA, 592 bp, Arabidopsis thaliana columbia
ccttctcaatataagcttgtattgctaatgattccttttttcctgcaggataataaagagatccattaggagtaaattatctgacaagagaatacaaagggcaatttcattttagttgaattagggatttgggctcgtcatggctcctggaggcagtgctttgaaagaagtcatggaatctaattcaacgggaatggattacgaggttaaaacggcaaaagtggaagttaataataacaaacctacaaagccagggagtgcagggattggaaaatatgggatccattcgaacaatggtgtttacgagcttcttgaatgtcccgtctgtacaaatttaatgtaccctccaattcatcaggtcagtagtatatgagcttgaacagatttgtaattaactaattgcaatgtttcatgttctaaatgtaattaaaatctacagtgtccgaatggccacacattatgttcaaactgcaaactgagagtgcagaacacatgccctacatgtcgctacgagcattggtacataagatgcttagctcttgagaaagttgcagagtctttggaagtccatgccggtacaaaatttggggtg

SEQ ID NO: 15618 - DNA, 518 bp, Arabidopsis thaliana columbia
acaatgtccacaccaaccaacaactctctccttataacttttctagtgcagtgaccacactttttgaattgtcaaggtttaatagccatgtaaaagaaatgtgttgtaaaataggagtgcaccttggcatttctcacaatgagatccacatcttgcaaaaacggtgtacatgtcagatactgcccagtatcaacacgctgcagcagagtagccgtatccattggaatttgaattattgagcgatagtttggagcatcctcgtcagtaactggaaagtggaatgcgctgaatcttttatcatatagtattctgcaaagcaaaagtatccgataagtaacaatatatcttttatcatatagtattctgcaaagctaaagtcagcactgttatatctaataatgttcatctctaggcctcccgttgacaaaaagcaaaaggccttcttgatctacgtataagtgcaacaataataaagcttcacataaacacgcaagcctagcagtagagtgtaatgaaga

SEQ ID NO: 15619 - DNA, 635 bp, Arabidopsis thaliana columbia
  unsure (1)..(635): unsure at all n locations
nnnnnnnnnnnnnnnnnnnnnnctaaagatggatagttactgtaactccaaccgcttgtaccctcggtaattgaatagcaaaccccagtacaacggacatattgtgtaacctatctatgaaccaacctaactccaccgttccatatcccttatcgtaaaacaaagctggttcggttatatttaaaggagaatatgcctcgtctgtcaagaaagcaactctgcacccagcttatttcgttgtgttaccatcaagactctctatcttgatgccaatctgttgcagacggtcagagagtatcttcgcttggcaacatctatagccgttgcagcttctgttccgtcctctctgaccaaaccccacgtcgcaggtagactcgcatcctccaatctgcagcttatcatcagtcatcgaggcattgttgttacagccaactgctactaaagtattacggccggtgaggaagaatgggctcccggtcacattcaaagccaagctgatttcttccatattggaacagcctaaagaagttaccggattcttgattcgggttagccaaagacatcgcttgagtcgtccgggagagagatattcacagtctctgttgatatcttaagaactgcagagggttcctgag

SEQ ID NO: 15620 - DNA, 485 bp, Arabidopsis thaliana columbia
ttttcgactgggtagtctattgtcgatattccaatgtattgcctccgttgtagattcttcatttggcgaagatgacgaagaagatgaatacacaacgggttacgacaaagagaataacaatctgatgtctgatattctgctgcaagtgtcaagtctatgtgatgctaactttttaatcaaaagcggaactgcccattagaaggttctattaggtaccgttctatggtctctgaagatctggctcagaaggtaactcattatttgcaatactcaaattcatataacagaggatgatagaaataaatttctgatgcacctgttgtttttgtttcctctgatatgtgtttataggttgcaaaaagtcttagctttccactatccaaatacttgtacagaagatgatgaaaatgtgaaattcaaatgttttgggaggaaggactaacggtgcactcttaatctagttcttgtattgtactatggatgta

SEQ ID NO: 15621 - DNA, 622 bp, Arabidopsis thaliana
ccgagacaaaaagagaaagagaaacactttctgtcctctttttttttcctctctttttctctctcgctggaaaccttttcatattcaagtgtaattttaatatttcaagcaattttctagctaattatggccttggaggctgtagtttacccgcaagatccgttctcctacatctcttgcaaagattttccgttttacgacttatactttcaagaagaagaagatcaagatccacaagatactaagaacaacattaagctagggcaaggacaaggacatggttttgcgagtaataattacaacggtagaaccggagattatagtgatgattataattacaacgaagaggatctccaatggccacgagaccttccttatggatctgccgtcgacaccgagagccagcctccaccgtcggatgtggcggcgggaggagggaggaggaaaaggaggaggacgaggagtagcaagaacaaagaagagatcgagaaccagaggatgactcacatcgccgttgaaagaaatcgccggaaacagatgaacgagtacctcgccgttctccggtctctcatgccaccttattatgctcaaagggttagtctctacatacaacagttatatg

SEQ ID NO: 15622 - DNA, 542 bp, Arabidopsis thaliana columbia
gtatacttataacctgattggcccggaggatagtgtaatggctatcactttcagaaaagttggtggtgaaggaagagactcgactccatcgctaagtcgaatagaaagcaaataccttggaaagaaaagatctttcacccggactgaacgtgttaaacttaagctagaagtacaagttgaggaggtggactatgacaaagacggcgatgttatgcgcatacgcgggaagaatatcatggagaacgagcatgtaaggattggtgcattccatactttggagattgagcttaaacgaccttttttattgagaaaggaaaattgggactcactggctcttgatacactcaagcaggcctcagatcttgcagctagtgctgatttagctgtagttctaatgcaagaaggactggcacaaatcttccttgccggcaaaagtgtaaaaagttgcggtgccgaataaaaacatcgattccttggaagcatggagctggaacggctggttacgagtcagttttgaagaaattctttgagaatgttgtgca

SEQ ID NO: 15623 - DNA, 733 bp, Arabidopsis thaliana
tgcctataaaaagtatcaactttctctttctcttcgagtaagtgagcgcaatggagcaacttcgacccttctttctgttgttggctatttttgtagcttcacttgtcaatgcagaagttcactttcatgagtttgttgtgtgtttactacttcgaaatctgtgttgttttcgtccttgttacttacaaaagatgctcaacttagtttattctttttgtgtttggttagatccaagaaacgccggtgaagaggctgtgcagagtccataactcgatcacggtgaatggacagtttccagggccaaccttggaggtgaggaacggcgattcccttgtcattacagccataaacaaagctcggtacaacatcagccttcactggtaaactcactctttccttgcatcaaatcaatcaatgttttatcgctagatagtctgctaatcagaccatgtgcaggcatgggatacggcagatgaggaatccatgggcggatggaccagaatacataacccagtgcccaatccaaccaggagggagttacacctacaggtttaccatggaagaccaagaaggtacattgtggtggcatgcccacagtagatggctgcgagccacgtgtatggtgctctcattatccgccctccgctctcttctcctcattacccttttccagttattcccaagagagagattacctcctcttaggagagtggtgggacagaaatccatggat

SEQ ID NO: 15624 - DNA, 569 bp, Arabidopsis thaliana
  unsure (1)..(569): unsure at all n locations
agattttgatgttagaggacaaaactttgagctgatgccatttggttcgggaagaagatcatgcccaggcccttcattggccatgcaaatgcttcatttaggtcttgctcgtttccttcattcatttgaagtgaaaactgtattggataggcctgttgacatgagtgagagccctggcttaaccattactaaagctacgcctcttgaggttctgatcaatccacgtcttaagagagagctttttgtgtgattatctattacagaaacatttgacttcaatacggctattgaagtgcattttttatgtgtttgtgtgtgtgttttttttttttttttaaaaccttcgtttgttgtttcctctttaaaattaactagattcggacttcacatttatgctaagttatgtctgtagacgtattggtattcatatttcaaactcacaccagtctttggtttcaattcggtttagacgaaacaatgatcagacatgtttttgttacacttgaccatcttagcatttgttttaatatagaatttgaaaaaaaaatnaaaaaaaattaaagttagag

SEQ ID NO: 15625 - DNA, 1117 bp, Arabidopsis thaliana
acatcccctgttgttaaagaccttccaaccggtcaatacctcgcacagattcgactcggtgactcaccggatccagtcaagctcgtagtcgatctggccggctcaattctctggtttgattgttcctcaagacatgtttcctcgtcaaggaacctaatatccggtagctctagcggctgcttaaaggcaaagttggaaatgacgagtaacatcatcatcaatcatcgcgtaaagaccaaaacgccgattgcgaattacttgttaaaaacgacgcctttgggattacggcgagaggagagcttttcagtgacgtcatgtcggttggctctgttacttctccgggaaccgttgatctacttttcgcttgtactccaccgtggctgttacgtgggctcgctagtggagcccaaggagtaatgggcttaggaagggcccaaatctcactcccttcacaactcgccgcggaaactaacgaacgtcgtcggttaactgtttacctgtcgccgttgaacggtgtcgtatcaacgagttcggtggaggaggtttttggagtggctgcgtctagatcgctggtttacacgcctttgttaaccggttcgagtggcaactacgtaattaacgtgaaatcgattagagtcaacggggaaaagctctccgtggaaggtccgttggcggtggagctgagcacggtggttccttacacgattttagagagctcgatctacaaggtgttcgcggaacttacgccaaagctgcgggtgaagctacatcggtgcctcctgtcgcaccgtttgggctctgcttcactagtgacgtagattttccggcggtagatctagcgttgcagagtgagatggtgcggtggaggattcatgggaagaatctgatggtggatgttggtggtggagtccgatgctcggggattgttgacggcgggtcaagtcgagtcaacccgattgtaatgggtgggctacaattagaaggctttatattggactttgatttgggtaactcaatgatgggctttggacaaagaacacgctctgattcaacttcgttgtaatacagaaacctttgtaattgtaaccttctaattatctggtagatatcctcaatt

SEQ ID NO: 15626 - DNA, 969 bp, Arabidopsis thaliana
ctcttgcaagctgcttcgacaaaacgggcacgaccgtgcacgcttgtttcatacaacgattactgtaacttaaaaaggctgatgaatagtgaagaaactgagaatcctacaagccacacaccttgactccttgagcaacagagcaatcaagaatgtaggcaacttttttttttttttttttgaaaattggcagttggaaataacttttaaattcttttattggaatgttcagtaagtttctcacattcttgcaggtttattattttcgatagagtaattaaatagtctttctttaagatttattagctagactaaaatatacattccgaaacgaatatattatttaaatgggaatggttaaatgtggtggaaaattcttgacaaatatgggtttggacgggtttcatgtcacgaaatagacatttctactaattaacaaaaaataaaattcgatcactcgttttatctaaaccaaactgaaaccaaacttaatactagactcatttgagttcaaaatataaatactatattaaacaaatacgtttacgaacataataccgcacaaatgtgcggtttgaatctagtttattttaaagagaaaacaaacaaacgtaggttttattcaacaaaagaaaaacacacacacatcaaaatgcaccttcaataaccgtattgaagttatatgtttctggaatagttaatcacacaaaaagttcttccttaatacgtggactgatcagaacctcaagaggcgtggctttaggaatggttaagccagggttctcactcatatcaacaggcatatccataacagttttcacgtcaaatgaatgaaggaaacgagcaagacctaaatgaagcacttgcatggccaatgaagagcctgggcatgatcttcttcctgaaccaaatggcatcagctcaaagttttgtctctcacatcaaactcttttgcttctcctgtaatga

SEQ ID NO: 15627 - DNA, 625 bp, Arabidopsis thaliana
attatatccttttttaatgtaatgagatgtttttgagtaactacgcccatttcgttaatcataacttcttctatctaaaattgatggttgactttgtattcagacagccttgaggtgttgtctcgtgatccgcaagctacgagttctatatatacatatacatacagagagcagtaagtttcttatacgcattagtcaaaataatcatctctcataccgctcataactattcaaataaaatcccttctcagcagctctatggattccgagtcggagctcatgatatctcttatttctcaaatgttaaccatctcattctccggggatgactcaccacagatgcattcaaagtacataagacttgcttgtcaactaatctctctggtcaactctctggatttggattcgcagtcagagccggagtcgaagctcaaatcactaattaagcagataatttatgtcagcaactctgtttcagaaccaggaccagagtcgcagtcggtatcagtggtgactaaaatgatctctatcatcggctctatagattttgatctcaaggagtcagagccggagctcatgtcactcacttctcaaatattcgctctcatcatggcaatggacgagg

SEQ ID NO: 15628 - DNA, 274 bp, Arabidopsis thaliana columbia
ttacaaaaggatcttaaactaccgagccaaaagagcaagacaaacaatcaaataaactaaataaaatcgaaatcaaagccaataaatcataaaataccacagaacaaagaccacaatacaacggttacacaaaaagatgaagacacggttcaagcatactgacacattcatctcagagagtagcagaaagagcgttgtagtaagaacgtatcttagggacatgaagcacatgatcagaccactcaacattccccaaaatttcacaagtattgcg

SEQ ID NO: 15629 - DNA, 959 bp, Arabidopsis thaliana columbia
tgattcaatcattcaaatcctagaagaagatttcaattctcaacaatctgtaaaatacatttttacatacattatcaccgcttacatacatttagaacaaaatttaatccattgaacaactgatatactacaataacggttatattttatatcagtcagttgaaaagcttcgtttaaaaaaaaagagaggttaaattattgttagacaaagtgatattacactaaaatgaacattatatataatctattttcatcaacaacacaaaaatatcttccaatcgttatatatggatgttgttgcatgactttttcaatgtatcttagatttgataagaggacatgtaaataagttatcttcaacttttattgcagtaatatatatttgaatcactatgtcgaataattattgtcgatacaaacgaacaaaaagcaagtatgtatgatcgacgatagaaaaatacattcccaaagggtgacttgcgatccaagatttctccatagagatggctcaaaatctgtaaacacgtaactgataatcgaatcctgtatactatacatacaaacatgtatgtgtctaagtacataaaatttaaaaggcttcagccttcaagaagagtgaagatccatggaacaagatcttgtccaacttcgcttctctgacgtagccctaacctgaagaacacggcaatataaaaaaagtgtcagtgaaagctatttacgtaatatgatttttttcagcatagagttttggaaacttgttttaaacctttgatggtaaaggaggcaaagatgctcgtctcgtaagctcctctctttcctcttgaacagcctttaatctttctcttaacaattccacttcattttcaatctttaacctctcataatcaaccgcagacatcgattttctccttgaacccgaagagctcagcgacttcttgcgtggacgacataagggaggt

SEQ ID NO: 15630 - DNA, 934 bp, Arabidopsis thaliana
cacaaaaacactgtttacgcacaagggtcaaagcctcgagggatttaagactgaaaatcaaggcacaacaataggaaaaaagaaaacaaatttgtgattcaataatgcatctgaaaagatagtcccaaagagtagaagactatttgatctatgcatagtaattctttgaaatataaagtttacatatgactatcctgtcgtgcaacctagttctctctactaaaatctcatttcttccaaactagtatcacaacaaacaaaataaaatatttgatgtcaagaggttcagacttcagagacataactaaactactcaaaatccaagaatcttgggagcaatgtgaagcaaaggctccaaagcactcggagcaaacttcctcgcaaagagataacacatggaagtgttgcgaccattgtaactgcagtttcttccatcaaagatttttccaaagaagttttctgtaatgtccgatcgcccaaacgtagctgggtggggaccgcccctcgaccagtccacccatgtcaagctccggttagccaagactgttggtttctcaatcgtcaacattgttgggaagtaatgctcgtccacatagcaagcaaggcctgcagaactctttgaatttcgggtaatacaatgtgtctttgacaatggtagctgccaggtcccggttaacctcaaaccattgagacccttttcgccatttggtaaggggaacttcaggttccatgttcccgttgtagcggccacgcccaaacggtccagggtcatcaaaagcacccatgaagctgtgttttgatcggcttaagtagctgtaaatggttgtgaagttgtagagtggaatgcatgactctgagacgagaacaaaccattcgttggacacatcaagcagggcgttggcaagaagctgcttctctgcatcgcacatggaca

SEQ ID NO: 15631 - DNA, 966 bp, Arabidopsis thaliana
tttaaaatgatattcaagattctacctttgtccactcaacacggagtctgcgtcctgtgcgaccatattcaaagcgatcaagcgctcgaattgcatcttcagcatccctttcatcttccatatagacaaaagcaaaccctggggagagaaccaaaagggaaagtcagaacatgagaacaatcttatcaagtaaaccaagaaaaagaacctcctccaagaggaattctaatatgaagactctcccttccacggcagtatcaaaacagcctttactacttactgtgacaaataagttttgaacctaaaatctctacaaactataagtagttttacagaccttgcattatggaattaatatgtcaaagaagaagaactgaaaatgaggaggagatgagacggaattgtgaacagaaacgtggtggcgcaaactccatttgatttgctgcctctgctgtgagaggttggtataagtctaccaaagaggcatgtgcatctcgaagaggagaaaagtcaagaggaatgaaatgcaactaaagtcggggttatgggaacgtagtgccattgcgtggatgaggttgactcttttgggcaggaaatggattttccatattgtccatcaatgggctgtgtgggagaatgggcatcccaagatcgaaacaaatcctgcgccaaaatcaaatgttgagtatggcggttttaccctaaaattactcgatcttttctcttctgaggtatgctatgaacttcatgcggggtgcttcaagttccttggcagatgttggaatcagatggtagcgaaccgagggaatacggaatgtgggatgcagaggctagagagcacactttgaaaggacagtcctccagagagtctcatggaatgaacgcacgtaagtggattttaagaacaatgcatttgactgaatttcgcttgttgttcatcggattggtagtggtttacgagacttc

SEQ ID NO: 15632 - DNA, 841 bp, Arabidopsis thaliana
tcaaatcaacggtggagatagaacgatgagcaaatggactacgttaaagcaacggctgagatttgattgggttggttgttgtggtaagcctcttactctgcgtctcagacaagcggagacaccaatcgtcgtcgatgatgatgacgacgaagaagaaagtcaaaaccaggtcgttgacttttcggatccgggtacgggtacggagttggattgtttgacacgtggctcaacgaggaaccttgcagaggctttagcggaggagagattagcgcacgtgacggaggaggagacagcagttactaaagtaccgttgatgaggttgcttgcggaatcggacggttgtgattcgacgacgacgtggttgggtaatgatccgctgtgttgtgtgtgtatgggaagagagaaaggtgcggcttttattccctgtggacatacgtattgtagagtttgttcaagagagatttggatgaatcgtgggacgtgtcctctttgtaaccgttcgatctttgacgttcttgatctttactgaaaaaaaattcatagatcgatctgatcgacggtgatgatatgttaaatttctttgtgcatatttatattagtaattacatgatttggtgatgaatcttgtagtaaagataaataaatggtgactaatcaaaaaggtaccactaattaacgttgtgaacaagtacttatagatctttaaagaaaaatattctatataattttatgattaaatttagtaacttttctcttatcacttcaaaaacaataattcaagtcattatatatttcaaccgttgtacttgtttagtagagtgtttctaatagtaacatagta

SEQ ID NO: 15633 - DNA, 528 bp, Arabidopsis thaliana
atcatcgtgctctaaaggatatcgctcgcgtgccgattatgatcgactcctcaaaatgggacgtcattgaaaaaggtctgaagtgtatccagggcaaaggcattgttaactctatctcgatgaaagagggcgtcgatgcctttatccatcacgcgaaattgttgcgtcgctacggtgcggcagtggtggtaatggcctttgacgaacagggacaggccgatactcgcgcacggaaaatcgagatttgccgtcgggcgtacaaaatcctcaccgaagaggttggcttcccgccagaagatatcatcttcgacccaaacatcttcgcggtcgcaactggcattgaagagcacaacaactacgcgcaggactttatcggcgcgtgtgaagacatcaaacgcgaactgccgcacgcgctgatttccggcggcgtatctaacgtttctttctcgttccgtggcaacgatccggtgcgcgacgcattcacgcagtgttcctctactacgctattcgcaatgggatggatatggg

SEQ ID NO: 15634 - DNA, 503 bp, Arabidopsis thaliana columbia
ttttgcatgtgaggataatgagacgctctttgtcctgacatggttcatggtggaaatgtttgaaaaaagttaatcttctatttacacgtagaacaatttcagtttttagttacacatgcacttgtctttcataaaatctagactaattctatatatgcatgctttactttaacatataagattgatgttatttgagagtaagaaattctaaaaccattaggttattgtcccatcaacatgctttaaaccaatagaagataacaggaccggccaagagcaataattcaagagacaagcatatttaaaagtttcaccatacaaagaattacataattgagctacctggttacgagagagaccagtttgagtggctagcatctgcttatcagaatcagtggggtacctaataacagtattagcaataaaggatatgagaaatcacatcaaaacatcatatcaaataaaatcaaattacatcgataaaattgtgaggctttacggat

SEQ ID NO: 15635 - DNA, 607 bp, Arabidopsis thaliana
caagtggtttcgaatctgttaagtcattaacaatacagtcagtgccactagaccctaagaaaaacagacattacgtcaacgctcttctcgtggtagcggctcttgtagccacagtgacgtttgctgcaggctttacaataccaggtggttatatcagcgatacacaaaaaccaaacttgggcagggcaactttggccactaacccaactctcttcatttttctgctttttgacatcttggcaatgcaaagttctgttgcaacaatatgtactcttatttgggcgcagttgggtgatctagcactcatcctcaaatccttacatgtggccttgcccttactacttttttcattactatgcatgcccgtagcattcctttttggcgtgatcactgcaattgcccatgtgaaatggcttttagtcaccattagcattatatctggtggattcttccttttcgcaatctttatccttggccctcacgtcatgctacagcgctcacaccttccgcccagttctggtatatttctcaagacttttatgctgactatagacatatctgagttgtttgtgattttgatcaaagcttgttttggttgtgtggggtg

SEQ ID NO: 15636 - DNA, 939 bp, Arabidopsis thaliana
gatcagaaaaactaggtgatggtgaaaaatacaaagaccgtgtcaacattcttctactggtggcagctcttgtagccactatgacgtttgctgcaggttttacaatgcccggtggctttagcagctctgctccaaacactggcatggctattttggtcgatgaccgttacctcacaacatttattatgaatgacactattgcaatgcttacctcagttttagcaatagttgctcttatctgggcacagttaggagatccagaactcgcgcacagagcgtttcatttggctttaccagcactcttcgttgctctactcttcatgtgtttcacattcttttatggcgttctggctacaatacagcataacatcgtgctttcacgcatcataagctttgtatttattatcttatttattatgaccggaaccctccttaccccttacgtgatcccgcaggtttacggccttcctattattggagttttgactagttcatatcttgattttctattgctgtttgttaatgaagatgatgatgaaaaacattacaccaccggctcatctcacacgtgtgtgaagagtggggagtccatgggatcttcaagcggggtccaagcggaaaagtcgaaagtgctttaaagagattgcatcgtttcaaattagctttccttatttgggtcactaaagtcttggcatttactttcctgcttgtaataaacgcggctactgttaatgttttttcttggttgtttgtacaattgtacttagtaatgtaatagcaacaaaaaaaaaagaaatcgaagcgaaaaaagatgtagaaaagtctggatttttaattgctactagtctcgacctctatattcgaggacttatgtatgtttagagtaatggaatttttgagtgaagcacggagagatgttgaaaattggatactatatgg

SEQ ID NO: 15637 - DNA, 751 bp, Arabidopsis thaliana
attcagatacataaatcaaacaccatgaattcataaacagcgaatccaacaagaactcaacaacgaaatcgagccaaaaaggatggttttttaaaaccttatcctaaggattttcaataaagtaagcaggaaaaaaaaagcaagagaggaaacgtaatctgacctctcttgaccagcagtatcccaaatctgagctttgacgactttgccttcgactttagtggttttggtagcgaactcaacaccaatagtagacttggattcgagattgaactcgttcttggtgaaccgagagagcagattcgatttgccgacaccagagtcgccgatcaacacgagcttgaagaggtaatcgtactcttcatcggctctgtaaccagccatcagatgagagatcgaattttgggattagggaattgggttttactgtgttgcttgctgctgtattatttgatgataatgaattaatgattcagatgatgacgatgaaagcttttgtcgggttggctctaaatcacccttttttcttcttctttttgtttttgaacagaaaaagtttaaatttttaaaaagatgattccgcttaattagttgcacattttaggaaatcttctccatatattgttaacaacttccactcacaacataatcatttttaacttaatacagttttctaattacaatttaacaagattaacaataaacagtatacacctacttttctaaaatttatcttcaggatgaagatact

SEQ ID NO: 15638 - DNA, 472 bp, Arabidopsis thaliana
tgccataccactgatcatctgtgataaacgatgttgctctctcaactgcaccgaggtagacacccggtccaaggcttggaggtaaaggatgaaacattttctggcttggataatccaaatcaactgcgacatgccgattggtaaggaaaccaacctggtggttacctgttctgcttttcactatagctcccaaggttccatatgtttcttggcttgcaacctacacaacatgaaacaaaactgagactttacgcttataggttgcagaagatggaaggaaaaaacaacgatgtacctgagaaccagagccaatgcagggatcacttcctctcaaaccatctacaagttcattataaacttgttcctttggtgttgcagcaggagcaccgtagtattggaatccacaacatctacatcgcaccatacccctccaggaccctattatgaaatgaacacatcgcttatcatatat

SEQ ID NO: 15639 - DNA, 1762 bp, Arabidopsis thaliana
taactttatttggctgatttatttaggcaaattttcatgtttgtttggtggcttacttgtcacttcatcaattaaaaaaatgatgtcggatgcaacagtccatgtcatcatcatcaaaggaaatacgaaacgttttttttttcaactcgtcttcttcacatgagtttttcacatcatcggaatttccaattcatcaccgtcttcctcattcttctttcatccttctctcgatacgattgggtaaagaatttgtatttaacaccgtcgataaatggtgtagagttgtgcaaatagatacggaaataacgcacgacaagcttgtgaagtcggtgttcgatgactacggattgagtgagttgagctatcagttaaagctaccaagataccgcttctcagagagaccatcatatctagctttttatttttattttgaaagagaacaaaaatctcctttcatcaataaacttttgatgattttttcatacgaagaatgcctttgaataggctacaaactcttaataacaaccacaaaaaagaaactttatcaaagacacaaaaagcccaattatgtctttatactgcataaaagtcacgagaaagtcaccagcgtacttgggagaaacgtatgaccgttgtagcatgacgtgagggccaaggacaaagatcgcccaagaaaagaataaaacagatataatgcaaatgatgactacaagccatttcacatgcccaactgcagtgaccacgccaaaaaggaatgccaagggcatgcagagtaaagcaaaaagcagtaagggcaaagccacatgtaaggatgagcgaatgagcactggatcacctaactgcgcccaaataagaatacctattgttgcaacggaactttgcatggccaagatgtcaagtaccagaaaaatgaagagagttggattagtggccaaagttgccctgcccaagtgtggagcagagctgttaaacccacctggtattgtaaaacctgcagcaaacgtcattgtggctacaagagcagctaccaggagaagagtgttgacgtaatctctgttatttttagggtctagtggcactgacggttttgttaatgagtgtacagattcgaaaccccttgagtgaatagcgtataataagagcgccagtgtccacctctgtaactcaaaaaatgggggtcgagctataaatcatttatgtgatatcaaattttgttgtatgaaacgaaattatacatacctcctgaaagatgtagtggggtttcacctctctctcggcaatatccctagctcttaagccgtttttgttccgcactttcagtatcttgctactcctagcaagccaagtaatggatttaaagtgccagttcatgacggcaagatgcaaaggtgtattcccgtccacatcttgcccaacacccagatgttccgtatctttattaattatcaacatgttcgaaatccaaaatttcccattttttgctgcaatgtggagaacgttctgaccaagtttgttaagtaagtgttttgaacctggacatcgttttataaactcttcaacaatattttcatgacctttctctgcagctgtatgaattggaaaagaaccatcttggtcgcagacataaccaccctttgttgatcgttctaagaggttgcatactccttcataataccctatatgtgctgcgagtgaaagacaagtccaaccatttatatctcgctcgtccataagacttggatattcatcaagaataacatca

SEQ ID NO: 15640 - DNA, 758 bp, Arabidopsis thaliana
tgacccgttagcgagcttccacactttcacggtattatcacatccaccagaagctagcttgtaaaccggatcgagaagaccagagctcacaagagcaccaggcgctgtggctggggcccatgagactgaagtgactccaaccggatgtgcttggtcaatccttgatgtgtcccagccaccgtcagcacgggctgtgaaaaccgaaatgttgccatcagatgacccgcaggccaaggatagtccgatatcatgaggagcccatgcaatggagttgactgaagatttgtggtctgtgaaaacatgatcttgggtccattggttctggttgccttctttccagagtatgacttgaccatcataggagcatgaagcaaggattgatccatactttgggtgtgcccacgcgacttcccagacaggaccacggtggccggttaatgtggctagttgctgcgatccaccgttgttgctgacaccggttatcttgatggtgcagtcagatgatgcagttgcaattcgctttccatagtaatccatctgcacatcatggacaatgtcctcatgacccgtttcaatcttctgacctggcatgtttccgaaatgattgtccctgcaaatagaagtaaaattgcaaaattgttgaatgagatcatctgtgtggaacaacacacacagcaaaatagcctgtaaaacacagctcatggaagaaaagcagagatcataaactacaaggttcacaaatatctcacagctaatag

SEQ ID NO: 15641 - DNA, 517 bp, Arabidopsis thaliana
gttaaaagaagctggacacaccaatataatgaaagccacgatcccacaaaacgcagaagtttaccaatcagccaacgacaagccatcagaaggtgatttccgcaaggatgtcaaacaaacgatgcttgatatcgtcaatttcttccacgaaaacgacttacctttcaccgtcaacatttaccctttccttagtctttacctaaacgagcattttcccgttgagttcgcttttcttgacggtgatggtcagacaatgactgacaaaggaaagaattatgataacgtgtttgacgccaattacgacacacttgtttacgcgttgaagaaggctgggattcacgatatgaagattatcgttggagaggtaacgtgacaagcaagttattaattagatatatttatcaagaatgttattgagtttggtttatgtttttctttaggttggatggccaacggatggtcacaaatatgcatcgccgaagctagcggagaaattctatgcagggcttatgaaaag

SEQ ID NO: 15642 - DNA, 1050 bp, Arabidopsis thaliana
  unsure (1)..(1050): unsure at all n locations
tcgtttagtttaccctcaagaaaccctgaagccaatttgccaagcattcccattaatccaccttcttctccatttccagcctgaagcttacctaagatcactttcataaacttcttcactttcgggctcgaatcatcaccaaacgcatcaaaaaggcttggcctgattttcccaacttcgatattatcattccctgtttgctgcttgagaatatcaatcaaggtctgcagaggaagagatttgtctttggcatggatcgtttctccgtcttcaagctcaatctccttagtctcgatttcttccgcctcatcttcatccttcttgttccctccaatgtgaaaccctcgagactcgatggcgccttccactttgctgcgcaagaacttcctaaacccgaatcttgaagaagattcttcagattcatcttcgtcctcggcttctttcttagtgctctctccaatctgctccttggcttcgtcgattaggccaccactgtgacaagagtctgaaatgattgtcattctgcaacctggaggaaccttgtccacaagatctctaaaatcatcatctggaaacaacaacattacatcagcaaagctccatggacaaattccaaagtcagataccaagaatatattccccttaaagattccttaatttcgtttgatcctagtttttctcagctatgactctatgagagaccaatctcgaaaataagatcaacaattctacaaaaaatcaaaacttttccatcaaaagattcttctgattattataggatcgtcagatcgtagccatcaatcacaaaaaaaagagagagataaaactcaccagtaatcagattcatgtcgcaaggaacaatacactcgtcgaaaccagtgtcatcgtcttcaccagtctcagccggcaacctcgtaccgtgtccactgtaatgaacgacaagaacgtcgccggaatcggcagattcgacgagatcagcaagcgcgcggcggnatgatcttgccagtaggctgagtagaggattcatcggtgtcgatgagnacggtgatg

SEQ ID NO: 15643 - DNA, 2006 bp, Arabidopsis thaliana
tctttgttagctaagttgtcttttggtgtgcgggtacctgacactgttaaatcttacagcgtgcggaagttgagaggactctgaccgatcctcagagggtcgagttcgaggacatgttgcgtgctcttactttagaaaggagtcagataaaagaagctatgggtttcgctttagataatgcagatgcagctggagaggtacaatatgttctgacttatatatttcagtacatttagttggttttttctagacaccacaaaaaatttgaacagaactactcgttaataaaatagatattcatatgcctcttcctacttatatatgtgtacttaattccacaggttgttgaagttttgacggagtccctgactctaaaagagacatcaattccaaccaaagttgctagactcatgcttgtgtctgatattcttcataatagcagtgcacgtgttaaaaatgcatctgcataccgaaccaaattcgaagcaactctacctgatataatggaaagcttcaatgatctgtaccgaagcataactggaagaattactgctgaggctctaaaagtactgtcagaaagaaaaatgatcgttgatggttttcattcccttataaatatacttttctaaactctttctgactttttgcaggaacgggttctcaaagtactgcaagtatgggcagattggtttctcttttcagacgcatacatatatggactacgttccacatttctccgatcaggagtctctggtgttacctcatttcattctatctgcggtgatgcacctgaaatagagaacaaaagttacgctgacaatatgagtgatattggaaagataaatccagatgctgcactggcaataggcaaaggagctgcaaggcaagagctgatgaatttaccaattgctgagcttgagaggcgttgtcggcacaacggactgtctcttgtaggaggtagagtaatgatggttacccggctactaagccttgaagacacagagaaacaacgcggctatgaagcagtggatgaaattccaaagcatccgcaaaaccattcaacttgggaagaagttaagagtgagcgggagcatatcaagaacagctacgcagaggttgaaatgaaagagcctgtgaatctacccacgacaataccaatcccacagcctgagctgaaagcctttgtgggaaaagagaagaatgaactcatattgccagcttcaaaatgggcgagagacgatgatgaagctgatgatgaacaaaagaggagctcctcttcaggaagtgacaatactggtgggataactttcaaggccgatggcgaggatctcaagggaaatgattgtgtccgtgcccaacctgacaacggaatggacgaggaacaaaggtatgatcaatgcatctctttatgaaaagatattaggaaagtaacttaagcaagcaaaatatagattaaaaaacaccaatttgcattattgcttcatgttggtgcttgagcattaagaacaacaaagaattcctcgaaatagtaacatcagcgtaagggtagtttatgttagtgagggaggtgtgttcttgtgaacttcaattgatttggtctttatagagtacacattattttgtattttggctcttacccggttaagttggataattgagagccatagaaagcttttgggcatatgcatcaattgtatgtacccaaatgtgccttacctacccatacatgagcttgcaccaatactgttaaagttaacaagaaaatatgagaacttactttcagtagaagttgctattcaattgtataatctgaaactcaatagacttctcccttgctctgtttattgttactgcagacaaaagcggagtcgcattgatgatgaacaggtacagtccggggcattcgtatagcatagtcagaggtgaaattcttggatttatgaaagacgaacaactgcgaaagatattgccaaggatgtgatcattaatcaagaacgacagttggg

SEQ ID NO: 15644 - DNA, 657 bp, Arabidopsis thaliana
ccccagctcctttgccttctaaccatacacacacaacaacttatctccgccgccgtcactgccgccacctcctcctccgcctctccgtcgacacttacaaaactcatttgcccttcattctcttccaacaactccatcaatgacatcctcgccggctccacttccctctccgccggcgtttcctcttctctagccgataatgctctctcctctgccaacacagctcctaaccgaatccttccctccaccgacgaagcttcctctgttacatttccagagttagaaaggaggaaaccaagttggtggctaacgttatcccggttaggaataggcgtatccaaactcgggatagaattagacgagatccaaacagaaccgttacgtttaagacggagcttttcacggagacttttccaagcggttttatctctactgtgtcggtgctctctttgcatgacttcaacaagtgaccggttagattggctcctcgacggcggtggtgagagaatctgcggcgaggttctgtttttatcagccattagaatagcttcaagagttaaacagctccggctactctcaaccgttgacatacgatctaataaagtcactctcagcctatctccaccatccatttgaataaaccggaaatgccagggg

SEQ ID NO: 15645 - DNA, 647 bp, Arabidopsis thaliana
gtcgactctacctttttttttttttttgttatcacattaagtactgtttgaaaacatttgatatatataaaatatctaatttgatgttagagagaagactaagttcaatcggttaaacgtatgtacgtaggtaactatgttggaacactgggtttacaaggaggatgcaattctaaaccggttgaggccttacctctcttctggtttaggatttggtgccaagaaatggctcgtcgctctacaacgatactgctccaaaactacttatgttccatcaatgactatggggaaccaacttctctctagtagtaaaagattttctgttttatttttgattagttcagattaaccgttttcttatactgacataaccaccatggtatactcatgcagtaactaattccgccggtaagaacaacttgctccaagcatcaaaacgtttggttcacatattttgctccggtacgtgtggggtaatcgggaaccgagggaggtggctcggtgcgggtcgaaggtttgacgtcagagtttccagtctagagagtcgggacatgataaggcacccttatggtattattagcgctagcggtttgactaaaatacatgctaaaccggaaatactatttcctttaatctacggtgtaaag

SEQ ID NO: 15646 - DNA, 974 bp, Arabidopsis thaliana
  unsure (1)..(974): unsure at all n locations
ctattttcccactcctgaagcaaacactcccgaatctcgatcttgatcgcacccaagtcttccccattgagacattaccgttgagaacacagagcttccatcacatagggtaatatatcggaagctgaagcagaaaaggtggatcatcaccaaggaacaacatcttatcctcaagatcgtaaacatcaacccaactctcctctctttccacaaatctatacactttaaatttgactgttctctcattcatataaaacgcaggatgctcgaaaatctcctcaacaaatccaggatccccttccactgcctctaagctcaagtacatatcaacaagcaacatttcaccacaagattcaatcaaaaacttcttatcaccaccaaacacaggactcgcaaccaacgtcaacttcaaggaactgtaatccacaaccacagtcctcccgttgttatcaaccgcaaagaaacgtccatcgaacaacatcacatcatcataaggagaaggcatgtcattaatcacagtccatgctcgatcccaagacctaaacacagctaacttccccgaaacatgaatcgtaagcaacacaaatttataatctccatcacaatctagatacttaacaacagctttctccaaatacaaactctctacaatatcaccaacagtattgaaataatgaagcttgaattcacgacccaattctcgaaccttaaacttggacatatcgagaacacgagggaaattctcaggaattgagtttcttgtatcacataacggatctaaaagagtcaccttacgaggaacattaagatcttcctcgactttgatcaaccatccaaacgaatccgattcgatacacggttcatgaggcttgataagtaagatactccgctgcgagagacggaaaccaacggcggaatcagggaagagactccccncgttatcggggaggatcgggagatgatgtgttggaaga

SEQ ID NO: 15647 - DNA, 923 bp, Arabidopsis thaliana
tcaacgactgcactttgaagctttttgtttagattcgttcgtcgtttccattgattaagtctacttcttttttttcatattttcgagcgggtcaaatggatcaagagatagagattccttccttcttcctttgtccaatctctctagatatcatgaaagatccggtgatagtttccaccggaataacctacgaccgagaaagcatcgagaagtggctcttttccggtaagaaaaactcatgtccagtcaccaaacaagtcataaccgaaactgatcttaccccaaaccacactcttcgccgtttgattcaatcttggtgtacctcaacgcatcatatggtatagagaggatccaactccaaaacctccgatctgtaaatcggagatcgaaaagcttatcaaagagtcgtcatcttcgcatctaaaccaagtcaaatgcctcaaacgacttcgtcaaatagtatctgagaatacaaccaacaaacggtgcttagaagccgcagaagttccggagtttttggcaaatatcgtaagcaactctgtagatacgtataactctccttcttcttcactttcttcttcgaatctcaacgacatgtgtcagtcaaacatgttggagaatcgatttgattcttcaagaagcttgatggacgaagccctaagcgtactctaccatcttgacacatcggagacagccctcaagagtcttttaaacaacaagaaaggaacaaatcttgtgaaaacgttgacgaagattatgcaacgtgggatctacgagtcaagagcctatgcggctttgcttctcaagaagctcctggaagttgcggatccaatgcagatcatattgttggaacgagaacttttcggtgaggtgattcaaatcttgcacgaccagatctctcacaaggcgacaagatcagcaat

SEQ ID NO: 15648 - DNA, 1102 bp, Arabidopsis thaliana
catacctcaacgagactttatacgatgttgatttggtagagagaatcttaggccactttctcgacaccttggaacaatccaacaccgccatagtcgaagttgacggaaaatctccgtcgctgatgctcgtcgggaaattaatcgacggatttctcgcggagatcgcatcggacgctaatctcaaatcggataagttctacaatctagccatctcactcccagatcaagctcgtctctatgatgacggactttacagagccgtcgacgtatatctcaaggtataacaataaaattcaatgtgaagagaagatcggagaatttggatctgatttgttttgaaaatttcgttttcttcaataggcgcatccatgggtatcggaagcagagagagagaaaatatgcggcgtgatggattgtcagaaactgacgttggaagcgtgcacacacgccgcgcaaaacgagcggcttccgctacgagccgtcgtacaagttctcttcttcgagcagttacaactccggcacgcgatcgccgggacgttattagctgctcaatcgccgtctacgtcacagtcaacggagccaagacctgtcagcggcaataaggaatctaacgataacggaagaggacggtgatgaagcggaaggagaaagacaggtggacgctgggaaatggaagaagacggttagagagaatcaggtgcttcgcttggatatggatacgatgaggacgcgtgttcatcggttagagagagagtgctcgaacatgaagaaagtgatcgcgaagattgataaggaaggttcatcaccggcgacgacgactgatcggccgagaagttggtcgattaccaaaaaattcggatgtaaattcaagacacaggtctgcgattcacacgaagcaacgatggttgatcatagatcacgacggtcttgaattgttttcgattgattttactctttttagtacagaatcagaaagcatattgttgtgattcttggattttagtttttgttaatccttcgagattcttgctatgcgactgctctacacaaatgtgcatcgttttgagtcttgtactcgaattagtaaaaccagaaatgacat

SEQ ID NO: 15649 - DNA, 548 bp, Arabidopsis thaliana
tggtggaaccgcaaattacatccatggtcaccattcaaaattataattgcttttggatttgaatagacttttgatgttttgatttcttttttcaggattatacagcgaaactctcggacttcgggctagcaaaagacggaccacaaggcgatgatacacatgtgtcgactcgcgtgatgggcacacaagggtacgcggcgccagagtacataatgacaggtcatttaacggctaagagtgatgtgtacagctttggagtggtgttgcttgagctgttgacaggtcggaaatcggtggacatagcgagatcatcaagaaaagaaaccctcgttgagtgggctcgtccaatgctcaacgacgcacgtaaactcgggagaataatggacccgaggcttgaagatcagtactcagagaccggagcacgaaaggcagcaactctagcttatcaatgcctaaggtaccgaccaaagacaaggccagacattagcactgttgtctccgttctccaagacatcaaagattacaaagatgatattccattgggatat

SEQ ID NO: 15650 - DNA, 724 bp, Arabidopsis thaliana
tcgactctagaccctctagacagggcctaaggaactgactgaagagagcctaggtgtgaactacagggcactggcagatctgtttcttctatcaaatcaaagaaaagacacgaccagctacgaaatctcagttcagatgttggaaatttacaacgagcaagtcagagatctacttgcccaagatggccagactaaaagatatcctttgggttaataaaagtttgactgtgtcttggtcatttaaaatctctgagatacttaggttttgtttgttccttaactcttgattacgttagagatcagaaacaactctcacaatggaatcaatgtaccggaagcaagtctagtgcctgtctcatcgacggatgacgttatacagctaatggatttgggacacatgaatcgtgcagtgagctctacagccatgaatgacagaagtagtcgatctcacaggtttgtttttccttatattcttctattctgacatgagtactctcttgcataactcggtctaacctcaattcttcatatctttggcagttgtgtaactgttcatgttcaaggcagagacctcacatctggctctatcctccatggttctatgcatctggttgatcttgcaggaagcgagagagtggacaagtctgaggtgactggagacagactgaaggaggctcaacacatcaacaagtccctctcggctcttggagatgctagagtctga

SEQ ID NO: 15651 - DNA, 1082 bp, Arabidopsis thaliana columbia
gatttttatgaagtcatcactttggatgttgtggaatcatccagagtcaatatacataagcaacgagaagaaagattgtattaataccgagtgtgagataatgtggcgccaatttcagtttcaagctttcatcttcgtcttcctctttaagttctgagatctagggtttttctgggtttctttgttctcactcttaaattctctttctgactctgtaagattggtcatgcccctgccctttgagcaatttcaagggaagggggttctgggtttcttagattcttcttcttctccgggatacaaaatctgggctaatccagagaagctccatggacgagtagaagaagatctctgctttgttgtcaacaatggtggtttctcggagccgacgtctgttttagactctgttagaagtccaagccctttcgtctcttcttcaaccaccacgctgtcttcttctcacggtggtcccagcggcggcggcgctgctgctgctactttttccggcgccgatgggaaatgcgaccaaatgggtttcgaggatctcgatggtgttctctccggtggctcgccgggacaagaacagagtatttttagattaatcatggctggcgatgtagtggatccgggttcggagtttgtgggtttcgacatcggttctggatccgacccggttattgataatcctaatccactctttggatatggcttcccttttcaaaacgcaccggaagaagaaaagtttcagatttcaataaacccaaatccgggtttcttctcggatcctccgtcgtctcctcctgcgaaacggctcaattcgggtcaacccggatctcaacacctccagtgggttttcccgttctcggatccgggtcacgaatctcacgacccgtttctcacaccgccaaagatagccggagaagaccaaaacgaccaagaccagtcagcggtaatcatcgaccagctattctctgcggcggcggagtcaccacaaacggcggagatacaatcccgttctcggcaagggatattggcgcggctcaatcacaacgttaacaacaacaacgacgacactaacaaca

SEQ ID NO: 15652 - DNA, 1673 bp, Arabidopsis thaliana columbia
cacatactgaatcagaaaagtttgatcttttaagtgatatgaactggtgaaccattagaggatagtaaattatattcaaagtaatagctttaggtaattttgccacttcggcttattatttcaaattcaaaatggaaactaattgaatgatttatctacttaagttttagtgtattcgtggttttcttttgatgacatgttgaatgaatgtcttcttaagcatctcggcatcagacttttatctgaaagttgcttcattaccaaatatatgcattgcccatttctttggcagattgattgatctttgttctctcaactgtgctctttttgaacttattttgttcctatatcttttttattcagcctccttggcatttatagaattgcataacatgtaacatgtaacttgtaagacagctcttgcattttttggtatctcatgctgtcacattcgtctgagttttgtgtcttcttttgttaactcttttgtgagctctgtgatgccttgttggtagataaataacttctctgtgattatggtgatgactttctagatcatctcttgattagctatggtctcacttttcatctcggtctcttgaaacacaaaaatttcaggcctgaaacagagggagagaggatgttgaaggaagagattgaagaactacggaagaaactcgagaaggaggcagccattgcacctgagagcaaggaatctcaacaggaatccgacagtaatcaccaaaatctaccggatctcatacgtgagaaagaaaagaacctagacttactgatccgtgagctggacgacaaagtcaggttcaggccacgagcagttgagaggcctggatccagtgcaagcagaggcggttcctattcagaaagaccacattcacgggctggatcaatcgatgagtctaggagtgttgaatccatggaaagacctagatcacatggcacaggcgataattggccaagaccagtagatgatcgaagaaacttccaaggaagcaaggaacgtggattcttcaacaacagaaacttcgacaggttagccttttacatctgattcaatcccattccaaggaacagacttacaatatactcgcattcaatagcttccttcctacttatctggggttgacatgaacccaaaagttagtataaagatccaaacttgggcattccttataatgtttgcttctgtgtatcaagatcttgagatgcgagtaaactgacatttcagattttcgggtttcacaggtcatcgtcagcaagggaaggatggtaaaaaaggaaaggaaggatgaatgtggaatgagattggagtttggctgacacaccattctcagattttgaagaagacagataagagagaagcttcaataacattaataagaaaaattcatctccttttttaaaaaacctaattaggggttttttctttttttgtttttactggttcatcttcggtattgaagcctaatggtttcttcttctacttgtttttttggtcatttgctcgtgaaacggcagagcacaagacttgtgacaattgatgtgtcttcagaatttttggagacagagactctgttctgttccttcttctctgtttaaacattctatttaccactactgtttctaattgtgtcttattgtcatcttctatttca

SEQ ID NO: 15653 - DNA, 537 bp, Arabidopsis thaliana
ccaaaaacaggattgaaccaaaattggacaattcattacatacgaattatttctataggattaacaatatcgtcgtgtatataatatgtatgatttttcaaatatttatctaaaatcgaaccgaatctaaaccaaaagcaaaactgaaccatggtattttaattgagttcggttaaaccggaaactaaaaccctaggaaattgaaccagaaccaaaccaaagcttccaataattacctctggtgtagattggatgaacaagctctttaatggcgacacgtccaacaaaggaccacaagcaggatcttcttgaactccaggattgtggaaagtcacagtaacttgagaagtcttggcgacgaaggcccaagcgtacacgtcacctccgaaactgttgtaaagtgtttgaagtggcaagtcaccggactgagaaggtacagagactctaagaacttcgtcttgtgcacaagttctcgacgcaccaaacgtgagtgcgtagagagaacctggcttcacttctaacttctgagagattgta

SEQ ID NO: 15654 - DNA, 580 bp, Arabidopsis thaliana
  unsure (1)..(580): unsure at all n locations
gatatctatggagttttctccaccgagtagagtcactagatcgtcgtcggacattgatgatggagtgtgatagtaagtgacttttgggtgcttcattgcacgttggagttgtgattcatttatatcagttgccaccactttctggtagtactcagcgacctaattacacaatatatatttgactcacgtacgattagttcatttaggcttcacataaaaattgatcgtggcttgaagtatttttaaggaaatgtatcaaaacttcaaaaggttcaaagtaacactattgttttagaaagaaaacaaaccccaatagcagcctgaccgttgccggtcccaacatcccaagccaccttatggttgctggttcgaccagccaacactttgtaccatattgtaggatatttcggccttgcgttcaagtactcatcagcttgctttcccgacaaagcagccaattgagccatttttttcgttgtgttttttcccctctctttctttgcttttggttgatagattacaatttcacttcataatttaatattacttatagtagtccganaatttggaaaagaaaaac

SEQ ID NO: 15655 - DNA, 1383 bp, Arabidopsis thaliana
gtaaaaaggataaattggacttaagtatgcttgaagcagaagctgttgcatcgggattgggagctgaagatcttggttctcgtaaagatggcagcatgctcgccttgcgggaagagattgagagtttcgcatatgagtgttggtcgaccaggtggagcctttgttagtggtcttgagacgcgttcaggtgagatggacatgagcatggagttgcctcagaatatgaaccaaatacaacaaagtaaggaattgttgtgcgatacggcgatcgtggtgtaggaaggattggtcgtggagagtactggtgtggagatggcgtgacgctattcctcggtagtttggtgtttaaatctacaatttttaatggattgtctattttggaactgccggggggcgaataaacccaattttcgaagagcaattcgctatatgttgaagaattataaaacagattttcttgctatgtttgagactcattctggagggaacagggctgagaggatctgtcgggggttaggcttcgataattcttatagagtggatgcggtgggtcaaagtggtggtatatggttgttatggaggtcgggttttggagacttaacaatcatagagtcatcagatcagtttgttgttgtacggttgcagagtgattctgaagttttaaatattatcgctgtttatgcggctccgtctgcttcaaggaggagtgggttatgggagaagttaactgagataatagaaaggcttgacggacctgttgtgatcgggggcgactttaatacaatcgttcggcttgatgagagaacatgaggcaatgggagcatgtctccggattcccttgaatttggcgaatggattaacagggtctcgctgattgacatggggttcagtgggaataaatacacatggaaacgagggagagtggaaaatacttttgtggcaaagaggttggatagggttatgtgttgtgctcatgcgaggttgaagtggcaggatgcgcgagtgacacatctacccttcttggcttcagatcatgcgcccttatatgttcaattgtgtcctgttgttgaacgtaatccaagtagaagaccatttcgttttgaggctatgtggctgtagcacccgagctttaaggacttgctcctactgaggcttttactgttttacgcctaaagcttaagaagtggaatcgagatgtgtttggggacgtcaagaagaaaaaagaggagttgatgagggagattcaagtagtgcaggatgctttggatgtgcatcaatccgatgatatgttgcgtaaagaggaggatttaattaaagcttttgacgtagttttggagcaagaggaaataatttagtttcagaaatcaagggagaagtggattg

SEQ ID NO: 15656 - DNA, 611 bp, Arabidopsis thaliana
caccattcgtcttctctctttttggtgcaatagagtcaatctcatcaatgaatatgatagacggggcattcttctcagcctcctcaaatgctttcctgaggttgctctcactctcaccagctagtttcgacatgatttccggtccattgatacagaagaagaatgctccggtttcattagccacagcacgagcaataagagtcttcccggatccaggaggtccgtaaagcagaattccctttggtggcttcacaccaattgatttaaagagttgtggatgcctcaagggaagttcaaccaattccctaatctgagccatctgtttcctgacaccaccaacatcgtcataaccaacctcatcaagcctttcttcgtcctccctcttaactggttcaccctcacagaaaatctctgtatctggagccaccacacagtactcagcaggatcagtctcgatcactttgaactccacactcctcattcctcctctcactaggaaaagatctccttcctcactggacggtacgctccagaaagtaagctggtgaaaaacacaatataagtttagaaacacgaactcaaaagacaagctagctatgatatgaagagag

SEQ ID NO: 15657 - DNA, 580 bp, Arabidopsis thaliana
gaacagcataaattcaggacagatgcctgttccacccgaagaactgagatgtcccatatctttgcaacttatgtgtgatcctgtcattattgcttcagggcagacttatgaacgggtctgtattgagaaatggttcagtgatgggcataatacttgcccaaagactcaacaacagctcccacatatctctttgactcccaataactgtgttaaaggtcttattgcgagctggtgtgaacagaatggaactcaaattcctagtgggccgccggaatctcaagacctcgactactggagactagctctctctgactccgagtccaccaaatcacagtcagtcaacagtatagggtcgtataaattgaagggcgtaaaaattgttccgttggaggagaatggtactactgttgttgaacgacaaaacacagaagaaagttttgtgtctgatgatgatgatgaggaggattctgatataaatgtacttgagaggtatcaagatttattggctgtcttaaacgaagaggagggtttggagaaaaaatgcaaggttgtagaaaaaatcaggctattgctgaaggat

SEQ ID NO: 15658 - DNA, 599 bp, Arabidopsis thaliana
  unsure (1)..(599): unsure at all n locations
cttcccttgaggcatccacagctattcaagtcgattggtgttaagccaccgaaggaattcttctttatggaccacctgggtctggaaagactttgatcgctcgtgctgtggctaatgaaacgggtgcctttttcttctgtatcaacggacctgagatcatgtccaaattggctggtgagagtgagagcaacctcaggaaagcattcgaggaggctgagaaaaatgcgccttcaatcatattcattgatgagatcgactctattgcaccgaaaagagagaagactaatggagaggttgagaggaggattgtctctcagctccttacgctaatggatggactgaaatctcgtgctcatgttatcgtcatgggagcaaccaatcgccccaacagtatcgacccagctttgagaaggtttggaagatttgacagggagatcgatattggagtcctgacgaaattggacgtcttgaagttctgaggatcatacaaagaacatgaagctggctgaagatgtaattttctagtcatagctttttctgtgtntgttgagtgtaatgtttattgaatgctaaattcttcttgtggttgtttccaggtg

SEQ ID NO: 15659 - DNA, 723 bp, Arabidopsis thaliana
  unsure (1)..(723): unsure at all n locations
tggaatcttcatctgttagttcatcggcgtctttaggcggttggatcactttcttcacagctatgatcttcccattgcttcctggtagttcagctttgaaaacttctccacaacctcctcttcctatgatctccagagaagctaacgcttcttcattctccaagaaagctaaatcttcagctttcttgatcaatgggctgaatatggaaggacctggtggtttttctgatcctcttattgcttgaataatcaatttgaacaacaccgagaagacaaacccagagattgttcctcctatggctccaacgacaaaccctaagatccatgccgctactttcttcttcttgctcttcttcttcttcttcttcaacttccctggttttggagctccctttggagcttttgatgtagtgctgttgttgggtttgttcgtgggacttgaagttggagtttcagcaagaatgtgtcttgtttgatgtggagatgtctgaagcttgatactgctcataaccggagccggaccttccaaataccggtttccggagaaatcaaagaaccggagattgtggaacgacacaatttgttccgggattttgcctgagaagagattgtttgcaacagagagattctccagattgcgtagattcttcaagaaattcaagttcncggataacttgttcgaagagagatcaaggattcgaagacggctcaaactagaaaagt

SEQ ID NO: 15660 - DNA, 530 bp, Arabidopsis thaliana
tgaaactgatcctgctgagtactgtgtggttgctccagatacagaaattttctgtgaaggtgaaccgataaagagagaggatgaggagaggttggatgaagttgggtatgatgatgttggtggtgtcaggaaacaaatggctcagattcgtgaacttgttgagctcccattgaggcatccacagctcttcaagtctattggtgtgaaacctcccaaaggaatcttgctctatggccctcctggttctgggaagacacttattgcccgtgctgttgctaatgagactggtgcatttttcttctgtatcaatggtcccgagatcatgtcgaagctagctggtgagagtgaaagtaacctcaggaaagcgtttgaggaagctgagaagaatgccccttcgatcatattcattgatgagatcgattcgattgctccaaaaagagagaagactcacggagaagttgaaagacggattgtatccagctcttgacacttatggatgggcttaaatccagagcccatgtgattgttat

SEQ ID NO: 15661 - DNA, 556 bp, Arabidopsis thaliana
tctagaggatctttttctcctttacaaaacgaaaagtggctaactaaagccctaatttcgagtttccttcttttataggcatactctagggtttccaattaacccaaccaattaaaccggatgatttaaaaacaaaccctaactgattttccggttcacggccgttacacatccactctataaagaattatcaaaccccaggcctcgacagatcctctctgctctgttccctccagcatgagtttcgaacaatgcaagcaggtctgttttataattcttcaacataaatcgaattgctcttcgaaaattgggtttattcgccccccctgcagttccagaatagacaatccattaaaaattgtagagttaaataccaaactaccggggaaaaacgtcatgccattccctcactggaattccccacttccgatccttcatgactcacaacagctatttcagacatcaaatcctcccagctggaaccgctgagacaaagtcgacgatgaatccaagtcgaaactagcctcatgggcatgcgaacccatcgcacttgaat

SEQ ID NO: 15662 - DNA, 564 bp, Arabidopsis thaliana
ttcttttctctttttttcttaatgttgcttagttcatgaagaattgagaatattttcctctcttttttttttttaacttgaagtcttagcttctatgctgccactgacgctggctgagtcaccactcgtctcagctggctcaggacggctcaagccactgaccatagaagaaactgcaggagtcacagcctctttggtgggttcattgctagagcttactggagctgatgagccgctgagtgaggatgatccgattgggtatggcgccacgggcatatcagttagtgatgatgcagacggactgtagctaagcgaagaactcattgagtgatcaaacttacacgccggtccaaacttgcagattccgtgttgagcaaagtgagtgcattgcgctacgccctgtcaaatacattgaaacgtatcatatcaagactcgttgaaaatcttatattggatcgagtttgtatctctagaaaaatgaaaaaagacttacgggacgaagtggaaggccaatggagctgaggacaatgccagtcttaggtggactgcatctacaggatgatg

SEQ ID NO: 15663 - DNA, 528 bp, Arabidopsis thaliana
tttttaaagagatgaattaatttactttttaaattttctttctaatggcatacctatgtaattacttacaaaaaataaggttacatttaaaatgtacttcccaaataatatagtaggatatgtttttcaaaagttaacatatagatttatttttttgtcatctgggatttatatattgatcttttgaaataaccaaaacatcttacaaataccggaacgaagctataccaaaaagagcttccaactacactaagtcatttatagaaacatgacctatacaaaagaatgagactcccaaaaggagcccatgaaagcgatcagatagaggatagaactctctcattagcaaagagatcgttgagccacgaggggtgactagaggcgatataggagcgaattctatatcccttagaaacactttgcgcgatgagacgagctcctctattcgcttggtaacctaccttatcaaacttccaagactgaaacctttccaacaaccccaaaagttccagcgcttcccctttgaag

SEQ ID NO: 15664 - DNA, 867 bp, Arabidopsis thaliana
ggaacagtcaactaataagcaatcaaagatgctttcaccatttccacctaatgttaaaaaggatgatgaggtcatatatagagaggttcttaccattttgttttcagcaaccaatctcttttgttaaattttttccatttattttcctcaggttccccaaatatcaaggaggcaggcagaacaagttctcagtaactgtgctagccagattaaaaagtatctgacagaagcagggaaattgtcgagcgtctccttagctaatcccagtgatgtagtggattcaatatgtggaagggcatttgatgctttaaagcaggaagatgttgttgctaatgaaaaagaagtaagctctctcacatatactagtgcactgtatcaaactacctttattgtttgtagataatatacttgcatcatgtgtctcatacagatgaaggtggtttttgagtaccaatggttatgcaagtcgtctagtttcatttgttctcttacggttctaaaaatttgtgtattctgcaggaccgtcaaggcccaagagaagcgggagtaaaggcatgcttctttcttcctgaaaccagcattgaaacactgaaatctttcatttgtaaaaagaagatgaatgtcatcctcgcttatgttggaagtagatagttaattgcaatcttattttccaatcagcaggaacaacagagagcagcagaagtttctacccctgagctaacttgtgtacctgagaggggactgaacctggagcagtcactaagtgtttgtcctcatgattcatctgtcaaatcagctatttcttctatgaatgagaatggcacaaaatccttgagatggttcacaaccagtggctgaagagaggga

SEQ ID NO: 15665 - DNA, 970 bp, Arabidopsis thaliana
ttgttcgtcccagtcctcaggctgtacaaataaataaaaggatcaatttgtatgatggatggtatctcaggtataatcaaccaagttcatcagagagctttggtatggtttgtggttagttctagtttgctccaaaattgagtataagtggttggttctcagtttagcctggttgttcataagaaatagaataccttcttggcgctggggtccttgatcgtcttgggtgggagaagatcccagtcagagtaaaggctaccagtttgtttctcaacattgtcgatgagaatgctgtaagtagcatctgggcggaggataaatgtgtacacatgggtgagctggtcagtttcacatggaacatctttcttgatcaggtggttggcttcattataggtaaggatagcatgcactttctttgtgctgtagcacagatatcaggaccaaacatgatactgcaggtaaaaaagcagatgggttgttatttttaaacattgatgttaattgataataggttgagatgataagagtgagatgagataggatttgtacctgtatggtgtgtctccaccaaatttcttttggtcaacatcaccacttagtagcttcatgtagccaccaccgcagtcaagcttttgctcgtgcttgactgagaattggaagactaaggtcttgtccttgttactgaattcagggaactcagctgaaatggcgtagaatctgtagtcttcactggtctggatacctgccagacaatggcaattgcaacaacgcattagcacaagcttgtaaaacaataaataatgattctgtgattagctctgaaggctgaatcatacctttatcgttagcgtcaccagaccaatttcccgcagtgtgcttccactccccagcagtgttatcatccttcttccactcagatttaacccatctgttctcgagccatctttagaaatgtgaatacaaagataca

SEQ ID NO: 15666 - DNA, 511 bp, Arabidopsis thaliana
ttttaggatcccagttccaatatgaaccccatgtctcattagcccagacagctcctgaaagaatgccgacggttaaaaagataaatccaagactaataatacgaaaactccaaaaatctaattgttgaatcagttgatacctataataatttctagaaaaactaaaattaatgttttgttgtagtaaaatagaatttctttcatttatgtagtaaagtacatcaaaagaaaataattcatttaataaaaaatttttttttatattctttttccaaaaagtaggtccgactttgcgaaatgtaatcactagaagagctattgataataatgatccgcataacagagcgccatagcctaatatcatcatacttacgtgcatcattaaccactgggactggagagctggtactaatattgcagactgaggcattttgtttaaaagacctgaagtagcaaaaccctgaataaaaataacacttggcgcagttattgtgtttacttattttgttgt

SEQ ID NO: 15667 - DNA, 816 bp, Arabidopsis thaliana
tgtgggactgtacatcggcacaagacagaccgaggagcttcacgcctctcttatcgaactcatgagcgtatttggccatcgcaccaagctccgtggtgcacacgggtgtgaaatcccctgtgtgaccgtcaacaaaaatcaagaaaacaaaaaaggaattgcaacagaagtcaagaactcaagatctatatattaacatatataccgggatgagagaagaggacggtccaagaattggcgaagtagtcatgaagtttgaacttgtcatgtgtcgtctccacttctaggttcggcaccgtgtctcctagtgtgatccctggcattttaccttttatatttatatatagaaaaaactttctgtattgatttgatgtgaatggatgtagtagaagttgaagttgcgtcgaggaccgattaaatagagatcgcaagctggttaggttcgtggatcaaagtcagaaaaagagagagagagacttgatgatgttcaaattgaggtgcatgcaaaagagtatagcgtggcgttgttatgaattgggttcacgccacgtgtcttcgtataatcttcaaagttcaaataaaataactcttttgtttcgagaaaaaacttaaagctaaggcgacgcacgatgtctagagagactcaagtgtttgtatttatttttttacttgtgataatcgacaaaatctttgcgtttaacccaaacattgtcgtattaagtttcgtttgggccgagactatggttaatgggcccatgttttgagaaaaacggcgtcgttactcaaaaagattagttcttcggacagacctaggag

SEQ ID NO: 15668 - DNA, 601 bp, Arabidopsis thaliana
tttttttgctaaaaatgtaaatatttcatataatgaaaaagtttttagaattacatgaagtagatcctatggtttggtcccatggcaaaaaaagataaaaaaacatggaagaaaaacaatcggtccattgaaaaaaaaacatatttagcccttcctcgtctctttggtccccctttcaaagattgagctgaggctgtttctaacgtacttgtcgatgagcttgatcaaacgagtatgagatgagtgattttctccatgtctttaagcatttctctcaagccaaatgtggtataaggttgcttggaaaacataccgtagagagacgtgattatattagacgatcccaatcagtcgaacagtcatttacttgggttagaactcgccaaatttcagctgactactcgtctactcattactggcaagagaagaagagatgacaccttgtctcttcagaatagggaaaattcgactttcaaatatcactaaagccccaactgttgtatcgtttttctcaaacatttttgggtattatttttgcatctgtccacaaacacaacggtttaccacggttgcctttaaataggattgacatgtcacatgt

SEQ ID NO: 15669 - DNA, 1280 bp, Arabidopsis thaliana
tacaatattacaaaaggtggatttttatgttaaaaaaatccaatatatacaaaaaggccaatacaaagttcaatattcatgagtttatttttgtgaaagcttggagagttggtgtacaccaacttttgtagatattttcatgtgttcttgtattcacaatggaaccttgttggtaataattttgttttcaccacattagatggaatttgaaaatgaaaccacatcatagcatgtaagtaattaggaccaagacaaggcacaagaatcctcgatctcaatcttgttagtaattaggactaaatctacgtctttataaaatccaagttttaattaatttgatcctcctactttccaacttctctttacttaacacaactccaacctaacgttacgagcatctcccctctttgcggcctacataaatgatatatcaaaacattttgttaacataccatcaactccacacactgacacacatcaattctatgcttcataacttttgtctttctcaaattagagaaatattgtaacaagagaaaatggaagttttcattgattcgacctttgccgttcaacagcattatctttctctttgaggtgtattatatgcgattcatcaaaattgttgtatcgcttcattgattccaaaagcttaactatttttgttgatgtcgatggaccaattgatatttgctcccatgtttttagtcttttttgccatgggaccaaactataggttttacattcttgtaattcctaacttttttattttctaatgaaatattaacatttttagaaaaaacaaaaaataagaagagaaaatggaagtattattattactattcattttgttttaaatggatgtccaattataagcacctcaataagtaaagaaagaatccatattgaaaaccaacgtagtatagataaatgtaaaacggtctttaaacatgttgatcagtgttgacctttcgttgactttttatattcacaaccgggaaaccaacaaccaccgccgtttccaggaccccatactcctccgttgctatctcctccccatccccatcctcctccgcctcctcctccatatccaccaccccatccacggccatatccatatccatctcctactcctccaccaccgcctccaccacctcctcctccaccaccaccaccaccaggtccactaccaccacctccgccaccgccgcccccacctcctccactccggatccagggctaggttcacctcctatacctataccaataccggggacata

SEQ ID NO: 15670 - DNA, 1667 bp, Arabidopsis thaliana
cattaggattttgcagctcttaggatcaaatagacaaagatcatcatgttgtctacaaagagtagatggttgacactgagaccgccttttgcctctttgattcctggaaattttccttatcttttgttaggcctaggtttgtttattcttttatcttaccaagttcaatgttgaagatctcatactcgtttatacagagtaaaggactccttcatagaacagtagtgatggctttagtttggacctgtcattaccattcacgaaatctggtggatagactgattcgtttggtattcgatgaaagtataatcttgaaatgctttagtttatctctatttttaccctcatttggcgtgagtttggtcacggtattggtttcaagttcaaacctttgtgacttcaatcttatcatgcctcaagtttattgggtggtgcatctcgactctctcgaactttttggaagaaaccgccatcgctattcttgtcacctcaactgttgccaccgtcactaccaaattttgaaaaatgttcaattattaaaaacattttattttattctatactatttcaacatttcattttttttttgctaagaatgtaaatatttcatataatgaaaaagttttaggaattacatgaagtagatcctatggtttggtcctatggcaaaaaaaggattaaaaacatggaagcaaaaacaatcggtccattgatatcgataaaagcagtgacgcttttgaaatcaatgaagcgataaaacgagtctgaagttttctaaattataacacctcaagaagaagcatcatgctgtcaaacggtaaagatcgagtcaaagaaactaaaacgaaaggaagcctttcactggtaacccaagaacctgagccgtcaacggtgttgaaacaaggagcgaacaaacacccactccatctgcgtcatatcaactccgaaacgaggcagcaaacaaaagatcacatcaaaaacaaggcaagacaacatcaaaggggcttggacataaaacggagaagcaggattttaaagtaaaccgagagcaggatcgatgaaacacgagaaatgagaagacacctatgcagtttagccgtaacaagctacacgcttgatcaaaggagccagacgctcgaagctccaaacacacacacccgcaacattcagaaaatacgagaaccagacgccaaaccgatataatccgagcaaaatcaccggattgagagcagcaagagaaccaagctccaaggaagctctcagaactgacgtaaacgcaaagagacctcaacaaccctccaaaaatctactttcgtcgtcacgcaagttggatcagaatggaaagatgcagcaccacttgcctccatgccgtcaagctccggcgaccatcactcacacgcctgaagaaactcggaccctgatgccaaatcgaagaagaaagctgagaacctcagcaacagtaagcctcattaagaggtagccctttcgcagcgccggacactggagaggcaatcggaaaagacgatgaaaagctttggtaaatttgagagaaaaagtcgtcgcttaaagatatatatcattttttaagtttaaaatttattatactgtttttacatagaagtttagaatttagtattttaaagttaaagttaatttgcgtaaattcg

SEQ ID NO: 15671 - DNA, 711 bp, Arabidopsis thaliana
tcaatagatcatatatgtgagttgcatcttcatagaatcatccattgtaggggcaacgttgactttcacaacttctagactatccatattcattaagaaatgactaatgtgtttgacttcctttttttttttttaataatataaatatttcataaaaatgaaaacaatttaagtttacaatcgatgattatagacctatagaaatggttccatagcaaaaaaaagtaaaaacatagaagcataaaccataactaaaattcggtccatccactcaatcaaagcagtaaggctaagggagttagatgaagcgatgacgattttgattgttctttccaaatttgttgctggaaaagaagagtttaatgcaaggagaaagagcctaattgcagaaaactgtaaacactagaagtctttcaccggacgtccgaaattgagccgtcaacgacagataactcaaaatcctcgatcacatgcgtttctccggtatgtgagagcgacctgaaaatcacatccatgagctttcccaaaatggaacctcgcgagccaaattatgcaaacgctgcaagctccctctaccaagttcaatcccgaagtcggctagcacagagcaagataaaacattccaaaaccacaacgatcaccaatggccttactagctcctctaggacacaaaccaaaacgcaacaaaaagcaactaaccccatcacatga

SEQ ID NO: 15672 - DNA, 1507 bp, Arabidopsis thaliana
tttcctcactccgccaccaatgaatgagaaacagatcgagatagtttttgggtacatgtcttacatatccgttaaatgttcttcttggtattgtttttggaagtttgatcattagctttgtgtataactcatgtctcagagatgcaataaaaggccggagtaacgagttgtgccgtccatatgcagaagagttgttaaatctatgcagagagatcaatgtgaaaggtatcgatatttggaccgcgatacagcagcaagatgattggttgaacagctgcttcacgtgagctactaaaccttcatgatacattttgagttctaaaatgattcttgcttaaactaattccttgagttgttttacttcacagagatgggatccatttcactgcgaaggcaagtgagattgttgttaaggagatattgaaggtactgagaggagcggattggaaaccaagtctttactggaaatcattaccggttgaatttccatttgattttgatgctccaaactctataagccttcatgacctagagttaaccagaaacaaccattttgagtcaccgcaccttgtaagcctttgtgaacaagagttaaccagaaacgagcagctggagccgccacaccctgtaagcctttgtgaccatgagttaacccgaaacgagcagctggagccgccacaccctgtaagcctttgtgaccatgagttaacccaaaacgagcagctggagccaccatcacgtacggcgcgcttgtaaaacaagtcgtagttagagattatgcttctacattgacatcttgatggtgtgtaaccagtttcacctttcatttgcatctggatatttgtattgctaatttaacattttgttagacgttttgttttgtatcattagtttcgctgggtctttggattagaatattttgttctcacttgtgtgcttcagatatacaaaacaaaatgctagctcgaaactctgttttccttctgtcaacaatggttgtggttactcggccatgccccatgttttaaaaccttaagactatcataaaaccttatgtgttgttgaatatcacataggaggaagttctatattaagccgatggatatcagcataggcccatacaggcccgtctcaattctgatgggcccatcgcagaacttcagtaagaaaaaatatttcgtaattattaggcctcttagccttaataattttatgaaactgactctgcacatttgccatcccaaaaaatgttcctagcgtatagagttttacatgtttttatttttgctaagaatgtaaatatttcattaaaaatgaaaacatttaggaattacatgagttttacatgtttttgtacaatttttcactacgtatatattctaatcgtaaataataattaggctgaatttggtagatccttcaaggctcatgaaagtaaatcttatagaatctcatgaacatgaggtgctcgtttgattttctatatatttagcaaaagatttcacaa

SEQ ID NO: 15673 - DNA, 575 bp, Arabidopsis thaliana
taggaacatcatgttcttcacatctttcgtcttcaacaacactccaaacccgcaaaaccccatcttcaccagcactcgcaagatacctcccatcaggactaaacttcatagcgagaatcgtccttcatgagcttgtatctcttgacctttaaaaagagcagaaagctccttagcctcttttttatactctttcaccttcactctctcaatcctactcccgcaaaccgcaacttcaccgccattatcatctcctcccgcacttcgcttgttccgcactttgtacaaccgactcaaccatttctccttaaccctcttcataatcccacttacttcccgttcctcctcagcaaccatcgggtctggtaacaacttaggttcaccatgttccttcacaatcttatccgatacaggagatgatgataaagaacaaagactagagctaatatcaccatcatcaacaaaacccaaattcctcaaaaccataccactatctacttctccttcctctttacacaaactctcattcacaactctatctacactctcacttggactaaaagaatacaacgagaaga

SEQ ID NO: 15674 - DNA, 735 bp, Arabidopsis thaliana columbia
atcaggcgcctcttggtgaaaaatctgcttctttaatatgggcggcgagtcaattcggttcaacaggtgatcctgaacaaagaatcacggcgcttcatatccaggctggtagagtgctcgagtctcttgacttgtactaactgtcaaactacttttgttttttccttatttacataataccaagttattattatgtgtaacaatgtaacaacactcatgaaaatagagttgtttaatgatgttccactttcgaataacacatcaaccacaatccacaatcattggacaccaaaacaagaaggattcatcatactagatttgtcatatgaacacaaaatcaaagagtaggacaaattctacatttcaggattgattttgtctcacttttttccttgaatgtagtcaaataactcagtgtcatttcttcctttcattttgcttaagtttggagcgactctattactcttttgtctacgagatcagtaatgctatgaccggttgcatagtcactactagtcaggacattcacaattacaaaatagaaatcattgtaaacatatttatgacacacattaacaatgtgtaatcgttgacccatgagtccatgaccggtcaattgaaattgtttatcttctacttgtgggtcacaaaaatctcgccggcccattatatatattatccggagcttccaggagttgaggttgtgaaccatagatattgacgaaatcacttttt

SEQ ID NO: 15675 - DNA, 533 bp, Arabidopsis thaliana
gaattctaattgatggtaaaaagctagttgttgctaatgttggagactccagagcagtgatgtctaagaatggtgttgcgcatcagctatctgtcgatcatgaaccaagcaaggagaaaaaagaaatagagagccgaggtggctttgtgtcaaatattccaggtaaagctacataatttgttctaactagttatgcttttggtcttcttggattaagtattaacgttcctaaaatgttgcaggggatgttccacgagtggatggacagttagcggttgcaagagcatttggagataagagcttaaagttacatctgagctcagaaccggacataacacaccagacaattgatgatcacactgaattcatccttttcgcaagcgatggtatttggaaagtaagtttaatgactcagtatcttactctgtttctaaccgtggtttagccagtttctggtctacttcttctaacatgatggacgatctttaactgcaggtattatcaaccaagaagcggttgatgctatcaagagt

SEQ ID NO: 15676 - DNA, 1527 bp, Arabidopsis thaliana
ctcgtaccctgctttgccatcaccagaagcaacgatcctcatcccatcagcagaccactgaagatcatcgatccgaccagccaaaaccttaaactcattcttcaacacatgatcgttgtaagctccccagattctaacagtccccgacacatcaccagacgcgatccactctccgttcggagaatatcgcgccacagtagctgggtaagcgtgctcaccatagatagagacctttaaaggattgttaaggtcgagagtcacgacggatcgaccattagtgtagaggatggtatcggacttcgagttaccagagatcagaattcctctacctctctccgtcgatggaacacaagcataggtttctgaaagctccatcagaaccgaggactttgcagagattgtttttgggtttacggggaagaagagagacgaggaaaatggaaggacggatttgagtctttttgagttttgtttgacattacatttgttaatatttagttgttgtaattagaaagataatgtaatgataatcattgttgcaacattcacttctctggcacaaactcattagataacccaaaaataatgtaaagtgtagttgtataatagttttgtgctaatcactttgtttcttaagacttacatatcataatgcagagtagtatataacattaagaataataaacttccattgatttttgttggaaataccttgaattatgaacaattttgaaaaattatatattttctactaaattagaaatgagtggaaccaaattatttctctattatcttcattccattttaatcaattcctcaatctctcatgtttttaccattgtaattttagattagactaatgggtgtgttatttggccaaaaaggtaaatgtgcggcccatgggcaagttagtttagcccagcccagttatatacgcaataatgccaaagtcaatgaatcgctagcagttgattggcgcattagtgaacctctatctaatcactaccacaaaaaaaatgttatgaaatatctttttcataatatttctcaaaggaaaaatctaacgaatggaagcattcgattattgaatgaaatattatttgaactatatgagaaaataaagtgtcagtcgtggggctttttacatctcttggtcgcattgataattcatataaaatatagaatatgatagggatgaatcatgaatgtattattgttataggagcatccgtggttagagagaagataaggaaacataagaacaaagctgtcacaagtctctctgtctctctcaaaccagccacaccacctcgtccccattactcacatgcctttctctgactattattcttctcctcccaaaaactgatatatttatattgattgcgctcatataatttgatatgaccgaaaatattgttgaaatattttcaaattgtgattttcaatatttaattgacaaaatacaacaagatttttttgatgtaataaaatgttaaagaacatggctactaaaacaacaacgac

SEQ ID NO: 15677 - DNA, 490 bp, Arabidopsis thaliana
taacggccgccagtgtgctctaaagtggaagatgttaccgaatacttgtggcttcccaaggtccgacgttcgctttgtgcgttcttgaagcacggccctgcgttgacagctgatcgagtccgctataaccgttgcggatataaggtggtcagggtggattataatcatattctgagcatcgctcacgatgcagtggccgttcatatcgaattcaccgatcaagtgtatataatgatccttatcgcatggactgtcgtaccaagattctcgtagtacaacgacctttttatgcttcgtaacttcgtcttgcactgacaaaacctttatggtgttaatccgggacaagggccatcgggataggaagtgtcaaaccttctctgcctgtacgcgtcctctctgtgtaaaataggtagattcggcaatatcaacgatcaagtaacgttttatagttttgcggcttctataggtctatttatatggtacttagcga

SEQ ID NO: 15678 - DNA, 747 bp, Arabidopsis thaliana
aaagtttccatttgtaatcgtcttatagcttctttagaatcaggactgatttgtgtctagttactgttatgatcagggaaactttgatcttgttgggacaacactccggtgtccttcatccgtgatgggattcagttcccggatgttgtccacgcgttgacacctaacccgaatacatacatccaagagtactggaggattctggactacatgtcccacttgcctgagagtttgctcacatggtgctggatgtttgatgatgtaatattccacaagattacaggcacatggagggtttcggtgtccacacctacactcttattgccaaatctggaaaagttctctttgtgaagttccactggaaaccaacttgtgggatcaagaatctgactgatgaagaggccaaggttgttggaggagccaatcacagccacgccactaaggatctccacgatgccattgcatctggcaactaccccgagtggaaacttttcatccagaccatggatcctgcagatgaggataagtttgactttgacccacttgatgtgaccaagatctggcctgaggatattttgcctctgcaaccggttggtcgcttggttctgaacaggaccattgacaatttcttcaatgaaactgagcagcttgcgttcaacccgggtcttgtggttcctggaatctactactcagacgacaagctgctccagtgtaggatctatgcgtatggtgacactcagagacatc

SEQ ID NO: 15679 - DNA, 881 bp, Arabidopsis thaliana
gatcctcaaatagcagagttagctggtgtgtactgtctctggctggtaccagctttattcggttactctgttctcgagtcgttggttcgatattttcagtcacaaagcttgatttatccaatggtcttgagctctctagctgctctgtctttccatgttcctctctgttggctaatggttcataaatttgattttggagccaaaggagcggctgcgtctatcggtatctcttactggctcaacgcggtttttctttgggtttatatgaaacgctctagtcgttgtgtcgaaacgcggatttatatgtccaaggatgtttttgttcatacaaatatcttctttcaatttgccattccttctgcaatgatgtgttggtaagtatgtacaactttattaaaaatccatatagaattaaccaagtgatggtagtctagtggtggtcattgttttgtggataggtgaaagatttaaaatcttaggttacataaataaatgtgtaatggattttttttcccttcactaatattctattgacacttattttcttattgctcttgcttccttcaatagccttgagtggttagctttcgaggtcattactttgctgtctggtcttctacccaactcaaagctcgaaacatcggttatttcgatttggtaatgtatcgaaccgcaaaactatataatctgtgatacttatattttctttcattttctaagccttaatttttgggattgagcagcctcacgacctcttcattgcattacaatctagtaaatggaattggtgatgcagcaaggtttgttcttactttaatactcttacatcgaattttcacttcattttattttcgaagaattaatgtttcatttttttttgt

SEQ ID NO: 15680 - DNA, 819 bp, Arabidopsis thaliana columbia
gggtaccaggtatctattacccgacttggatgtcattacaggaaacacacctcgagccggggaaggaaacacctcgggaccccgggacagaaccaccatgcgcctcggttgttggtctagtaaacatacccgagccaagctttgacgcctcgtggatcgtttagatctggctcggaagacattaggttgcgtagaatgtgtggcgagccgaagcctagcatctcataggaggaggcggtcactaggcccgaagcaaagacttgcacatgttataaaaaggatccaaagaccatttccgaaaaaacccaaaaatgataatgaagaatcttcgaggatattgtcaaatctggaagtttttctaaagctcccgaaatataaggaaaatctccttattgcgaagacctatataaggcgcctcaaggacttcgcaaaaagggtacacataaaaaggctctcaacataggctataaaaacactccgaatttgaaggctaaaaacacttattctttacttttctataacacttgtacgatcaaatcatcgtttcttatcaataatatcaagaacaccatctgtggttacttaccgattctattgttctttgagattctcgcgaagactgtttctttgtaagaaccctaagatacaatttccattgtgtagatttcgactctcacaatttgtcgctagaaggaggtgaaatttgagatttctcttactacaagaataaagaaccatcaaaccaagcagcaatgaccaacaatcaggtccccgctaacacaatggacatggagggaaacccgatgcctccgttactag

SEQ ID NO: 15681 - DNA, 1389 bp, Arabidopsis thaliana
  unsure (1)..(1389): unsure at all n locations
gtagtagagccatcaatataatcttttgcatatctcattgcagctttgcttatttttttttattttttttttttgttggtttatttatgatacataaatagtttgttctgaattgtttttttttttttttcactgaaaggattataatgattttccagaactgataggttccctttacaaaagattagttagagttaccatgagatgttatttataaccataacatcacaccaaaaaatgacgacaaagattggagaagaggacaaggctagctagaaagagaggttctctcaacctcaaagagaccatgtaaccaatgaggatgccctgctgcgacataagactgagtcctgttgtccctcaccacactctgagcaattagagaagctcccttgtttgcagctaccttttcctccataactttccaatcaccaatcttacccaaaaaatgattaagctctgaaacttgatacgcaaaagacggccaagctttaggccttttgaaagctgaagacaaatctccaggttcaaaagcaaaaagaaccttagtgatcttgtgactgtgtaaactttcaacagcccaattgacacacctcgacaacacatcttttttggtgcattgatcactaaacgcctttctgctatgaagaagcacttcccccagatcgtttcgtaaaacccaggcgcctccacctagcctttttttccccgaccacgcagctcctatgttacacttaacccaacccgagtccggcggttcccatccaatagctgaaggagttgataagcgaacctcctcattaacaatgttctgagtttgagtgtttgctaaaaaccattcagcggtatcatctcttatcttctccatagaaatgagtggacaaaagatggaaccttcgaagaacaacttgtttctgtttttccaaagcctccaaagaatccagggccaagaccttcttatgtgaagaggaatacaatctcttccctgcagttcaaagagataatggatattggcaaagattgatccatcctgaaaacctagctccggcgaaggtactctagaaagagcccatacctgcctggcaatggaacaagtaaacaaaacgtgatttatagactctccttcactgccacaagattgacatcgagaatcaatggacatccctctacgaatgatctgatctgccacaggaagagccgcacaaagaattctccataaaaacattttgatctttggagctgtttttgtagaccaaacacgttcttttagagcatttgttgagggttgaaggcaagcttctgagattaactctggtttatttgattgaaaggccaaccaataaccagagttaactgaatactcccnctgtttttgtgtgcagccaaacc

SEQ ID NO: 15682 - DNA, 932 bp, Arabidopsis thaliana
aggatccccaaccccaacctctcctaccgcagcaccaacattgctaatccacaagaccaagtgtatcctccacagcaacaacaaggtcagaacaaaccctttgttccctacaaccaaggttttgttccccagcagcaatttcaagggaacttcagccgcaaccaccacctgtgtttgcacctcagcaaaaccaaggtcttgctgctcctgatcttgacatgaaacaaatgctacaacagttgcttcacgggaaagcatctggctccatggagatagctaagaaaatatctgagttacacaataagttggacagtagctacaatgatctaaatgtcaaggtggaaacactgaataccaaagtccgatacttagagggacattgcatcttcttcagctccaaaacagataagccaacttccaggcaaagcaattcaaaatccaaaagaatatgctcacttccaacttgagaggaccaaagacagtcactgaggacagtgaagatcaagatggggaggatttcagtctcggtaaagatcgagctgacaaaccactcgagcagccacttgaccagacactcgagcaaccactcgagcagccactcgaccacgttactcgaccaaatactcaaccaaccttcctagcaacatcaccaactgctccaaaaccagttgttgtcaagaacatagaaaaggtctttgttcctcctccttacaaaccacaacttccatttcctggctgtcacaagaaagccttggcagataagtatagagctatgtttgccaagaacatcaaggaggttgagttgcggatacctcttgttgacgctctagcgctaatcccgaactctcacaagtttctgaaagatttgatcgtagagagaattcaagaagtgcaagggatggtagtattgagtcattaatgcagtgctatca

SEQ ID NO: 15683 - DNA, 501 bp, Arabidopsis thaliana columbia
ctctccgaacgatatactctccgggtgggctgtaaaggttctggataatcaagatcaattagattcgactcagagtcggtatgaacaagaccacaggtaccacttgatgttgaaagctgatcatcttcaccggatactgggacctgctcagttataacagcatcacggtaagtagaaggcttcacaggagtgttctgccgtgtgtctcttcttgggggcaacatatgtgcagcatcctggctgggtacagttgttgcaactgatggctcccgattcttaacctcagtatcatcagcttgagggggattctggtgattagttgccagaatatgacgattttcaggctccacataatcacgaactttcgtctcaggttttatgtttggctcctctacctgaacaggtgcgttttgctgtgtgatgccagggtgagggtatggctgccctgggaaaggtatgggaatagagtaattagaagaattgtgatcatgatactgcatt

SEQ ID NO: 15684 - DNA, 607 bp, Arabidopsis thaliana
tcgatcgacacctgcagctgtccagtccagatcagtttacacaccgccttggaaggggaggttgcaacacaagtcctccaccactctacccacatcctgaactccgttaagtcaaggtattgactcaaaacaagcgcttagtgggaggcaacgcattggtttgatttttctggtttttcttttatttttattttatttttccctctctcttcggatttgaatgccactagggaaaatgtcgtttaagtctgggaggttcttactttatttttgatttttattattttcgtttttcagtttagtgagtcatttctcatactaaagaaaaagaaaaaaacgcttttgtttaatttagttaggaaatatgatgtatatttctcttgattattgcctggttgatgactgttgtaggttcgactcaatcctactattggaaaatttagatggcaaaccaacagacttgaggatatcctagtttccaactcaaccactaaggcaggagctaatttcactactcttccttttacctcttcaaacggttagtattcatagaccttgactctttattcatacatgatattgagaccaatgtgatagagaaaaagtg

SEQ ID NO: 15685 - DNA, 869 bp, Arabidopsis thaliana
cccagtattctagtccgtttcttgaccatggtctagttttctcctaaaacaacctggcctctttatgaacgcgggacgcgtcgttacaatttcccctttgtccgagcttatggccagctccttctcgcttgtccgagactccaccttcttctctcggaccaagtcctagccaacgatcctattgaggatcgcgggcgttacaagtctcccccccttgaattggattcgtccttgaatccgcatcaagttgacctttacccatctccttgaaccactccgaaaaattggccttcatcttattctcggtttcccaagtgtattgttcacgacctccacaattccacaagacttttaacaaatcccttgattttccccgagtccctttcgtcattcggtccattatctgtaccggccatgcttccaccgtcatgttctcctttaacccgggaggtacatcttccacgctttcttcttgattacttaaacacttccgtaattgtgacacatggaagacgttgtgaaacgcatttagttttggaggaaggtcaagtttgtatgccaccgcccctactcgttcgatcaccttgtacgggccaacataccttgggcttaactttttccttgaggtgaatcgccctgcccctttgtaggtcatcgcctttaagtacaccaaatcttctacttggaattccaattcctttcgacgtttgttggcgtagcttgtctgtcgatcttgggcttcctttaacttgatttttaagaacttcattctctccgtggtttcatccacgatgataggtccaaacaaccgacgggtcccacgggcgtccaacacaacggtgttctacaagctcggccatacaagcgcc

SEQ ID NO: 15686 - DNA, 595 bp, Arabidopsis thaliana columbia
  unsure (1)..(595): unsure at all n locations
taatcggtagcctcagattaaatgatttcaatgcaacaatgaagtggagtaaaattggagagtttcaaacaaactatgttcaggtaagtcaagttaattatcttgagtttaagatttatcttgattagcatcaaactggtggatatgtgttcttgttgttaggctgctacgtctaggattcttgaagccttgtttttgccgtacgtaaacacacgtctcaagagaggattccctttgccgattcccggcgatttcacgatcaaaaacataaagattgtttatgttaatagtggcattttggtatgtaccgatatcggcactagcacaaaccagtaagcaagtattatatagcttcttagattgcatgtacgtaagcctgaagaaatataatgacaaccataattgtgatttgaaccgtttggaacttcccctctaagaagcgttttgacgagatctctttatttctttggctacttgcattatatctggaacttcccccctaagaccaatgcatctttctgagaggttaaggaaacttccattaggcaattgcaagacacggcccaatgatttatnatacaggcctgttaatatg

SEQ ID NO: 15687 - DNA, 594 bp, Arabidopsis thaliana
gcatctacgtcactgcgaattcgtggagttcgcaatggttggcgacatgcaccgtttcaggtttgagcactctacggataagagagctagcatccttctccccagcccagaggttacacgcataatagagggagataacattgattttaggcctgagcttggaaacctctactatgagaacgctccgccattggatgaggatgatcttatagaagaagctgctgaggatgggatggatgaagacagagcagtggagtttgacactagcatgtatcattttagtgaacatgtacctccagcgagggagagcaagagcttgagtgaagctcataggaacaatagcaagctgcagaagtggtgcaagaagcaggacaagctactcgccaagtgcctcaagactatcaagtttctgacggatacgctgagctgttcctcttacactacaaatgttccacagggacaacctcctctagagatgccatcgaggagatttgatgagcctgagccaagtcagcacaggcctgagcctagtgagcagagagtctacatgtcgctgctagacattcatcatcgagtctcgggacacaagagaag

SEQ ID NO: 15688 - DNA, 532 bp, Arabidopsis thaliana
tcccggaagacgatggaagtttacatagatgatatgttggtcaagtcgttgaagaaaaaggaccacgttaagcatttagaagaatgttttgagattctcaatcaatacaaaatgaagctgaacccggcgaaatgcaccggggaattccttggttatattgtgacgaaaagaggaattgaagccaatctgaatcaaatcaatgcctttctcaacatgtcgtctccaagaaacttcgaagaagtacaacggttaactggtcggattgtagctttaaactgttttatttcaagatcaacaaataaatctttacccttctatcaatttctaaagggaaacaaaggatttctttgggatgagaagtgtgaagaggcatttggacagcttaaggcgtacttaaccacaccacccggtattgtccaaacccgaagtggatgaaaagctcgacttatacgtttctgtatcaaaccatgcagtaagcggagtcttgatacgggaggatcgtggagaacaaaaaccaatttactacatgaca

SEQ ID NO: 15689 - DNA, 875 bp, Arabidopsis thaliana
gtgaatttgatgatcttttggataacaacatcttcagagatccatctgacactgtggacgagattgagctgacatatcagagtgagatgaactcttcactgctggacaccaatggttcaatcaagtcccaaccgaaccaaaagcgtctggagatcgaggagcttactcttcagacaccaacaaacggaaccacattggttcacaacttatctgcagatgtatatgacaaggatcacctactggttagttcactttgactacttgtgtttaaagcatgtgactggtagattggaagttacttaaaaatgccatttaacagataatgggtcctagtgggagtggaaaaacttcgctgctaagagcaatggctggtctttggaggtcagggaaaggaaaaatcacgttctacctcgatcctgaggtagattttacacaggagaaatctgatactcaggaaaattcagggaaaagaggagacgtattgttccttccacaaaggccttatatggttctgggatctttgcgtcacgaattgctttatcctacctggagtgcaactgtggaggagacgacacctggtggcagtaatattgacggtactcagtttaaatttgtgtctagtaacaaccatttctttcaactccatttaagtttatgcaagcagattatagaacccaaaagcaaatcgactgaagaaaaaatgcgttgattttgttaggttcaccacctctgctgattagagaggacggaaatgaaaagccgacaacagatgatctgatgcggactctagagaaggtttgtcttggacatatagcggatcgctttggtggtcttgattcgatacacgagtggtccagtgtcactcacttggtgag

SEQ ID NO: 15690 - DNA, 815 bp, Arabidopsis thaliana
tcccgatttgttcaatcacaagaacccagtttcagacaaggacatgtgatgagtgatacataattggatgatcaatcaattttgactttgaggcacaaaaaacacacactatcactgctaccaagtacaacaactgcgcactagcccaaactgcagagtgctttatgagcaaatctcacacgaacgaacactagaagaagctatattaatattacatgaaaaaaattcagaagaagcagagagtaagaaagaatacatttgtgaatatttggtttctgctgatgatattgtgtagagtgctgcttactcgctgtttctatatgattactagaagaaactgcagaaagctagtagcaacatgagtaggacaagaagcagagatgagagttgtgatgagaccaaacaaacagaggaagaagctggaagaggagatccaactggagaaacttcgagcagaggatcaggagtgacagcatctgggtttggtggactaaggcttgaggggattgtcggcatgatagacgattccgacggggaaggagacatttcgcttgaacctggagtagggaacaggggagaggtatctggagacatggccggggtagaagctgagaaactcgatggagcttcaggcaagaacgaaggtgcagctgatatggtggacagctgaaactcagatgttgaagtgtgtaaacagagtgagagaacggtgaaggcagtgaacagagagacggacatggttactgtgaatgtctctcctgcttctctgagaatgtttctgagagaccttaagaaactgaagaagaaaaaggtat

SEQ ID NO: 15691 - DNA, 865 bp, Arabidopsis thaliana columbia
ctgaccttgtgaagcacttgcagatgtgcgtctgagtatttggatgtcagggtgttgagtctgaatcaaccgatagattagactagggaacatcaggaagaacttggagacagacatcagggctagttgaagaacatgatcatacaccatttctccaaaatcaatcggcattttgtgagcgatgcgatagacaagccttcctctgtcaatgcttgcatacccttcattggtttggggagaccaattccgacacgatatcttaaaaagactcttgcagttttctgaaaacttgttcatcgcaatgttctgcagattttggactcgaccatctgtcaaataccgagccacctcctcatcaaccaaccccgcagtctgaatgcattgagttctggctccaacatgttgcatataaaacagagcattgatctttgcgggtgagaattcacactcgaaaccccttactaacaccttgactaagtctccctccacccgaactgagggtagattggctcagaattcatagaccacttcttcctcaaaaccttggactcccgttactgtgttgagaagactcgcctcagaaatcacatccatgatccattgatccattgatcaaccagaagatccaaattcatttccttgatcatttgtcaatgagagaaatacaagtacctttgttcggcgagaggagaactgaatttgaactcatgaaatagatcgctccttccaagacttgaaacaacaactccctttcctttctgttgtttttgtgacagaaacttctcacttggggtgtctagtttgcgctttgtcagacgcgatgccactgttagtacccttggaactttggcagacatcggcatgg

SEQ ID NO: 15692 - DNA, 860 bp, Arabidopsis thaliana
gtgttacttatctaattttatggatttttaggctgagaaaccagctccatggtgtcctcctgtagatgaaaatttaacctgtggtgcaaactgctataaaacggtaaatttgttattttctcgttgctaagctcatctcctagaaagactggtttaacaaaaagcgttgttttcaatttatcagcttctcaagtctggaagatttccgggatatggcaccattgaaggtaaaactggcacttcatcagatggtgcaggtactaaaaccacacccacgaagttctccagcaaacttaatgggagaaaaccaaagaccttcccaagtgaaagtgcatcgtctcatgtgtcgtgcgcctattctcatgtggtgccactttctgtgttactgaacaagcacttccgtaattcttaggtgatcgagtaaggtttttaggcccttcaacttcttctcttgcttctctccgagctccacctaggtattgttttttgtttttattctcttcttttgttcgaggggttttcatctgatgtagattgttgttgtcaaaactcaatttatttcttttttcgtattattctgtctaggggaccggcaacaggttttcaaggaaaagtactccttgcgtttgaaggcaatggatcttcaaaaatcggggttagatttgatagatcgataccagatggcaatgatcttggtggtctatgcgaagaagaccatggttttttttgtactggtaattttcgtgctaatatctactacacatttgcgtttaaaaggtaattgtagtaatgacattcttcctgtgcagcgagttctcttcggttagaaagttcttccagtgacgatgctgataaacttg

SEQ ID NO: 15693 - DNA, 867 bp, Arabidopsis thaliana
ttctcgttgctaagctcatctcctagaaagactggtttaacaaaaagcgttgttttcaatttatcagcttctcaagtctggaagatttccgggatatggcaccattgaaggtaaaactggcacttcatcagatggtgcaggtactaaaaccacaccgcacgaagttctccagcaaacttaatgggagaaaaccaaagaccttcccaagtgaaagtgcatcgtctaatgaaaagtgcgcactagaaacaagtgactcagagaatggactacagcaggataccaattccgataaagtttcatcatcgccaaaggtgaaaggtagtgggagacgagtaggtcgtaagaggaacaaaaaccgagttgctgagcgagttcctcgtaagactcagaagaggcagaagaagacagaagcctcggatagtgattccatcgccagtggaagttgttcacccagcgatgcaaaacataaagataatgaagatgctacttcctcttctcagaagcatgtaaaatctgggaactccgggaagtcaaggaagaatggcactcctgccgaagtctccaataattctgtgaaggatgacgttcctgtttgccagtcaaatgaggttgcgtcagagcttgatgcgccgggtagtgatgaaagtctaaggaaagaagagtttatgggtgaaactgtatctcgaggaagattggctacaaataagttgtggagaccacttgagaaaagcctttttgataaaggtgttgagatttttggaatgaataggtgggtaattttgatgtatttagctactgctaaattatcattctgcttcaggtttttcaatttgtggaatatagtcatatggattctttgtttctttg

SEQ ID NO: 15694 - DNA, 915 bp, Arabidopsis thaliana
ggttagggttatcttataaggaaaacgtgttgcacaagtaaaatatacaaatactttgtccctttcttattatataaaagaactatgatagtgttgggattggattgggcctactcgtcccaaggcccaaaccaaaccaaaggcccaaaacaggtttcgagcccagggttgagaaaagcggagaaagcccattatgggatgatcaaccacctttgttaaacagagtattaggtcgaggggtagattcttcaaatctcctcgacgtgcgtcctacacagagtggtataaatacggaatagcatgtcttgtcaaagaaagggggatccaggctgacacacaaagacagagagacgctcctcaacgttcacaagctcctcacctcgttccaagctcctcaagcaatcagctcttcctcgtcaacaagctcctcagctcgtcctggacaacaagcgatcagctcgtcttcgtcaacaagctcatcaactcgtcatgcacaacaagcaatcagctcgttttcatccttggatcgtccagctcgcaacccatccttggacacgaagctcatcttcgggaaccaggatcgtccacaagcaatcagcttgttctcatcttggatcgtccagctcgaaatccgtctttggacgcgaagaacaccttcagatgtcaggatcatcttaaggaattaagctcgtccttatacgtcaaggccgtcctcggacatcaagatcgcctttccggccactatcccgtcttgcaccaactatcggctcgttctttctccatccatactcgttaacaaatcatcctttgtaatctgtccgattcgcctaagtcgctagctcgttattaacagaaatattctttttcctgtccccagagatctcattttcatacttgtgtgattagtgcataaac

SEQ ID NO: 15695 - DNA, 629 bp, Arabidopsis thaliana
gagattagtccaactgttgacagagtatctgaacaaggcaaatcatcagaggcagggagtcacatgccaactgatgcaaacggaaatggacatttgcatcatgagattatggatcatggaaaggggaatgaagaacagaaaccaacccctcaaaccgtgaagaaggattctaataccaataccaaattttcagggtctcatcgtgagcttgtcatcggtcttccttgccgtggacaatttgaaatccacaaccggtccagggcatctacgagttcgaagaggttaggaggaggtggagaaaggaatgtgttgtttgcaagtcacaagagagctcagagatctaaggaagatgctggaccatcttcggttgttgctaattccacacctgtaggtcgaccaaagaaaaagaataagactatgaacaaaggacaagttagagaagatgatgagtacacaagaatcaaaaagaaacttcgatactttctaaaccggattaactatgagcaaagcctaattgacgcctattcgttagaaggctggaaaggttcaaggtttgtctcttgatgacatttgttttccctcttattcatgcattatttgagagttataggtatcgtctgtgagatata

SEQ ID NO: 15696 - DNA, 516 bp, Arabidopsis thaliana
ctcaactgtcgctatcgaaaacgctctgactttgagcggctaaaacactgattttctatatgtctaaacacttgtacgatcaaatcatcattatctcaataatataatcaagaacaccgtccgtggtaatcagcaattcagttgttctttgagaatctcacaaatatccgttctttgaaggaacccaagatacaatttcgatggtgcgagttttgactctagcaatttggcgctagaaggagggggacttgagatttctcttactctcagaacacaaaaccaaccaaccaatccacaatggtcaacaatcagatctccgataacactgttgacgcagtgggaaacccgatccctccaatctagacagacgctcccgaagccaccgctcccagaagaagcatgagcttaactccagaagaaggtaaacgatcaagaacaggcgaatcggtctttggtgcaacagctcaaggcagctacctcctaaggacacagcacagcatccgcccacactccgtc

SEQ ID NO: 15697 - DNA, 715 bp, Arabidopsis thaliana
ttcgttcaccatgaaggacgaaacttctctggagcccacaattaccaaactgatacaccccgaggccgaggatgaggccgcggttgaggacgcggatgagaatcctacatttggacgaaggatcaacccgcaggaaacggaccaggaatactgtgagttgcataaaagttacggccatcatatttccagatgtcctagcctctgggcgaagttggcagcaaaattcctagccgtagaaatcggtggaggcttaaccatcgaggacttagaagtagaggatgccaaaaccgaacaggtcaatgctgtggccaatcccgagcaggcgacccccgcggtgaaccttaaaggatccaaaagaggccgaggtaatcgctaagtagatgacgatgagccagaagctgctctaggaaggatcttcacaattttagaagattcggctttctgtcaagacacgatggcatcaatcaaagcctatcaaaggaaggccgactcaaattgtaactggacgcggccatttaacggatcagatgacgaagtaacttttcacgaaagtgataccaacagcttggatcgtccgcacaacgatcctttagtcatcacattaaccattggtgatttcaacgtcgaacgagttctggtcgacacgggaagcacactgaacatcatttttctgacgactctgcgagaaatgaaggtcgacatgacccaaattgta

SEQ ID NO: 15698 - DNA, 969 bp, Arabidopsis thaliana
ctaatgaattttgaaggtcatggtccattccaatggtattagcaaaggtgttgggtttgttgagttctcaacgagcgaagaagcttcgaaagcggtaagtttgtaaaccaagtaatggtcttttagtgttgccttcttaatcaaggaactcacactaattaattttttatccttacacagatgctcaagatgaatgggaaaatggtgggaaataaacctatctatgtttctttggcacaatgcaaagagcaacataagcttcatttacaaactcaatttaataacccaccaccaagtcctcaccaacaacctatcttcagtcaagtggtcgctccggcaacaatgttatctcaacaaactccattaagaggatacaacttccaaccatattctatgtgcggatcaagaatgccaaacagttgccctccaatctctatccctaatttcatggtgccacaaccatttcgtccaacactatatccacctgctccgcttgtcggcctctacggtagtttgccacagccactactgcaaccaaatctatggaacccataccgtagattttagtagcttttaggaattaacattatgcttccaaaagcgaactggttggattgatagtcttcttttattaagttaagtcatgttaggttttcatttacgatattctcgttggtttgaatacggtttatgtttcttgtgtctctacttttcaacattcatgtttactttgagcttgatcaaaccgagattaaattacagaacttgttttaaaagtagacgaaaaaaccaatgcaaataggtttcaacttaagtgatggaaaaactacataaaatgtctctgcatcaaaataaaaccatatccaagaaaatccgaaattgtggttcctcctcaaaactatcaactatctaaaaccattatggtaacattgaagcatcacaacctatttgtaggaggtttaactctgt

SEQ ID NO: 15699 - DNA, 587 bp, Arabidopsis thaliana
tatgatttttttaatgaatgttcatggttagattttcttgaaaaaacctgtcggctttattggttggacaaaattgatcatatttggctttcggacaaatatgattggcaaggcttggttgcaatggtcgtattttggttgagataactagccagagagagttttaggattgtaacatggggaaaacgtatttaaaatgatcaaacttaatttatatcctaattatatcattggtgtgatacataagtatatatatagttaattaccaattacgagagagaggaatgtataaatgtaggtttggcctaatatatagatttcataagtagatgtagaagaggggaataaaagttgatgtagaatgatcatatcatatgattcaaacgccctttaataatctttacgaaatgcctctacaccgatagtatacgttatattcatagacatgcacgtcacatttaagtcaccattttcatgacaagagtgaacttacaattttcatcatttttctacagaaaaaagtaactcgaggcaacgaaactacagaggcgtgaggcaaagaccgtggggaaaatgggcggctgaga

SEQ ID NO: 15700 - DNA, 619 bp, Arabidopsis thaliana
actactactttagcatactcactatcgcttcaacatgtccaattgtatgcgccaaagccacctgaacaatcaaaatcatcatcatacagttccatcaatactacttacacacttaatctaaagacgtgtccctttcaaaatcaaacacacctaaagcaagacaatttatgaagaaacaacagtaatgaaagttagatcctttaacgggaacaaagttttccagaaatagagatcgatttaaagagcatctgcgactccagtgacccaagagacaagcatcatcaaagagccacaagcaagagaaagcgtcaaagttagccacaagtaaggaaaagcattcaaaaccttcttgttgtagttattgaacacaccgttcaatgcccaccaaattgcgaaatagatcccaatctaaactttctgtcccgattgtttgtcaagaacgttgataccaatctacaatttcaatcgaacgagaccgatcagcctcgtaagctccaaccctaaaaacatcactcccctgcgccgccgccgccactaaagcgaaattcgacaaattctgaaatgataaaagatgtttatgaggtaaaggattaggcttttggaagttccgataatgggt

SEQ ID NO: 15701 - DNA, 388 bp, Arabidopsis thaliana
atagcacaagagtgaatgatgagtacatataagtaacgaaatagatcgaattagagttgagattatcgactgatagccatcttgcgtttctgagcatcggtatgtaatctgacattggtggctagaccgatagcctggatgaaccatctgaggtaccacgttatgtctaactgataccagtctagtccgtgcctaaccgtcgtctctcaggcatggtggttgttgtccagctctctcccatagtcaatagcgcgagacatctgctccattccacatgcactcagttttagtttcggttaaggtggtatctatttcgatcaaggtgtattggtctataaagaatagagagggtatatttaatagccaacgttacgtgaggtgtcattgg

SEQ ID NO: 15702 - DNA, 926 bp, Arabidopsis thaliana
tgtcatacatcataatattctgaaattttgttatatattgtaccggttccacgaaatagagctctattattatagaccaaacaaacaaaatattatcttcttgtggttagttcgagagagaggtcaagaagaaacgaaatggatcggcaaacggaagacgtcaaacacacaacgacgaacattttccgatcacccacctaatctcttcccatttttattatttttcaaaactcaaattaattaagaagaaaaaaacagaaacagagagagaaagagttaagatgaatagagatagaaagagtcattaaatgtacgaagcgacattcacaataattcgaaaggtggaagacgacttagatacggccaggcttcacctgtctcctcgtcctcctcaattacccctaacccctttttccgggattcatctccaacccacatccttccaaattctcaccccctcactgagtttttgctttttctctcatcggagatcgtgaagacgatcaagtaatttaagaatcccaccattgataaaagagtctagcttttctactaccaaacctttttctgtttggaaattttcgattttggatttaacccttttcttaccttatttataaccatgcaatctcacgaccaacaacccttcaatctccatggcggaatccggcgatttcaacggtggtcaacctcctcctcatagtcctctgagaacaacttcttccggtagtagcagcagcaacaaccgtggtcctcctcctcctcctcctcctcctttagtgatggtgagaaaaagatctagcttccgagatgtcttctacccctgactacgacacctcctctcgtgatgcacgccgtgagtatgagctttggagtcacttacaacaatactgtcacaccacaacaaccaccagtctcttacggcg

SEQ ID NO: 15703 - DNA, 856 bp, Arabidopsis thaliana
ccggcctggcgctaatagtaataactctgctgctttgtcgcccccttcacggaacaggcgggtatcatgcgacgagaggtagctcaacacgttgaaaccctgcaatttctccgccatttgctgccaggtcgtatccatctgcgccagacagtcgacatgtttcgccgcctgctcctgataatcgaaattgatcatcgcatcgaagccgtggcgatagtagtcactttgcatcacgccgtggccccaggcttcaccggtcatccagaaaggtttgtcatctaatgctttgtcggggttagcttttttccattcgcgaagcgcggcgctggcttcggttttcagttgctgccaggcgggcaactcaacatgtttggcggtatcgacccgaaaaccatcaatcccatagtcgcggacccactgacttaaccagtgggttaagtaatcgcgcggcgtatagccgtcaatggctttggcgtgggtatccattttgtttttatagaacaccggcagaccagaagcggtagttgattcggttttgatatccggcaaaaaggctagcgacatagtgagatcgtcgaatccaggattgtcgtaatcgccgatatccgttctgatccagttttttcccaccatttatcccagcctgttttgtcgctgaaattaatgtaatcgttaaagctatgccaggtttgcccggcggcaggtttccagtcgctccagcgttcacccagcgattttttcacttcgtcaccagaaagatataacgcgccaaactgatactcctgcatatccgccagcgtggcatagcaggtgtggttcacacgacatcaaagagaatacgaatacagcgctgatg

SEQ ID NO: 15704 - DNA, 1216 bp, Arabidopsis thaliana
gactctaatctcttcgccgctgcttactccgtaagtacaattaactaaatttaattttatatgattaatgatgataattcaaagtattaattaattaatgaacaaaactaatggtgattagggggtgatttgttcgggagtggcgtattacgtgcaaggagtagtaatgagagaaagaggaccagtttttgttgcgacatttaatccactttgtgtcgttataactgctgctcttggtgttgttgtcttgtctgaaagcattcatctcggaaggtatttattcttgttatctaaaattagtataaaatttttggacccttttttttttttgtcaaacaaactttgcattaacttaaagcctcaaaagaggtaggttcatacaagttggaaatgagataatacaaatacaagtaggataaaggttccatgagttttccaaagagatactcaaaatagagaatcttgtagtgtttgaaaagtcttttggagccatagtggattcgaccatggagatgagctccgcgaaatcctctaccaagcggtggtcatagacggctcgcgcaactaacaacgcatacgagcttgtggtgaaatgctccatgaaagaggtttcgagataagcaagactaaagaatcttcggtaaccaccactccttggaggtcactgtgtgcaatgcagctgctaaaattttatctgctattacttaattttataatcgcatattacttataattctcttttacttaattttatctgctaaaatttttggaccctattacttaattttatctgctaaaattttcagtgtgattggaacgctatttataatcgtgggcctatacactgttgtatggggtaaaggcaaagacaaaagaatgacggatgatgacgaagattgcaaaggacttccgattaaaagtccggttaaaccggtagataccggtaaaggcttagccgcagaactggagatgaaatcaaaggaaggtcaagaggcaaaggctactactactactcaagttgagatttgaggatgcttatgtactgttgacggaggaagacacaaatctgtctttctttctctgtatattaagtttatgttttttgctttccaaggttacagaaagattttggcacatcagatgtaatatgatgagatgattcaatcatcttgtagttttaactagaagtttttgtgagatatgcaacttcaaaaat

SEQ ID NO: 15705 - DNA, 898 bp, Arabidopsis thaliana columbia
cttcgttataaacaaaggattttctagcccgagatgaactatttcttcttgaatccatgaagtttggtggtgagcttctacagggcaatcaaaaacaattctccaagaagtatcaaagcggaaaggattcggtttttggtgatggagttttgagcttaaaaacttgttaaacactttgaggatcgacttgggaacgatcgagtaagtttggtgaagtatggtgaaattgagaacgaattcttatggagtgatagggagagtttgcaatgaagatttcgatgattgatgagagagatagtggggaatgcggaaatgaaacgatgaaggagagaaggtttcaaagatggtttaacgatttcaatgggtggaggaggaggatggtctttggtttctttttgaaaggataggaaaagtgagttggaaatagtgaggggcatgggtaaatggtttgtccaccgagtaatggagttatgggggaacaagtgggccacgcgacttatgccttggtctccgaataattcaagctcgagtaaatggtcgagcagcctcttgaagtgcgtaatactcgattaaacgctggagaatgctttgctttaaatcactcaatcaaatagtggggatgatttctctcatttggtcattcaatccaatggcttagaacactcctcttcattttactcgatcaacggttaagatctttcttatttactcgatcgttgacttcctcaaggtcaataaacctgaaacacttaaacgaaaacatcaaaaataactaggaaaataaaaatttatatacaaggataaacatgggacttcctcccaagtgagcttgttttaagtcactaagcttgactcttacagagattagtccagaaaaaggctgaagagaggactgaga

SEQ ID NO: 15706 - DNA, 1247 bp, Arabidopsis thaliana
cttcttctttcttcgtcttcttcaccagacaaaccaagaaaacaatcccaaggaaaagaacggccacagagcatccgactacaatggcgattatataagctttactctgtctcctccggacaggatggagattctctgtcaacggtctaggcaaatttgaagacggagagatggctcctccggaacatgcattcagaggtggaccacatagtaatgagtttccgatgaaagaatattccggtgacttcttgagatgctcagggatgggtccacttaagttgttatagctcaaatttacaacttttacactcgggagatcaagagaatcaatgggaccatcaaaagagttgttttgaaggtacaatacagtgatctgagacaagttccggagaccggaaggaatgttaccagataaagagttataagacaagtccaagacaacaagctgcttggagatcgacggcaaagaattagtggtgagttcgccggagaagttgttgtgttggagataaaggtattcaagagaagggagtgagagaatatcagaaggtaaagttccaaagagagagttggatctgaggctaaggactttgagagcgtctagtttgcctaatgtggcaggagggattgagccgtagaggccaactcctggaagacggacagctacaacgcggctggtggggttggattcatcacaagtaatgccgatccatgaagagcagagagagaggttcttgttccagttgagttttggtggatgtgggactgatgctgcaaagttgagaagggcttgttcgtctgatgctaaatcggctgaaaccaaaaccgcggttgcggcgagtaagaggaagaagaaggaagcagcaacgaaggcagtgtgagaagaattcatggttgagctatttggtgactcacaccatgatctgagaaagagagaaaattgagtttcctatgaaagttttgttcttagtgtttgttttcatgtgggtaaagagagtcaaaaagaagaggtgagctcaaataagataaaaaacaatgattagttggtttgaatccattgttaagtaaacataatgggttgtttttaatataacaaaaagtggattcaaattcaaataactatgtaaaggaaaataaaaagcaagacaccgtaaagaaaggagggaaagaaagcaaaagcatcccattttttgcttctttcatttgttctttaagagacgaaacacactacagattaacggaatatt

SEQ ID NO: 15707 - DNA, 1009 bp, Arabidopsis thaliana
cgtcacatccctctacttctaggcattcggcggtagcccagaaacgtctctgtccctgtaccatactccatctagttaggtgggacactagcaaatgatttggttaaacaaatgatttcttcatgtgatcaagtgtaatctaacctgaccaatctgctgcataaagtctttgatgacaggacgtgaaccaattcctgttgaccacacaaccataccataaggttcggagacaatcttgccagtttctctttcctttgtggatatctcatcagcagtcactcccacaaccattgaacctgtcttcagatcaataccatctcgctggaacttttcctcagcaaaagcagtgattctcttgtcaaacctgaagtagaattgaaccaacattggaaaagcagtagatttagccaaagttaatgaagcttgatgggtggaacttacatgttgagaatgtggtcgcctgcttcaagaagagtgatttttgtgaactcttggacctttgggtaaatcttagccacatcctggactaggaaatcatgaagctctgcagagaactcgactccagttggtcctccaccaaccacaacgaaatgcagaatctttttcctctcttcttcagttagattcggaagagaggctctctcgaaacagtcgatgactgaatgacgaatgtttagagcatcctctgcttctttgaggaaataggcatgttcctcaactccaggggtgttgaatgtgttaggcttagcaccaacagctaagatgagaatgtcataatccatgtcaaactctgttgtgcccttaagacttgacccttccttggaccggcagtggattttcttgttcgatgcatcaatcttgacacactctgcttctttgtactcaaatcctttcttgcgcataagccacgaatgggttcacaatgctacgggcttcgcagtacattggtgcacttggaagagagagtgagaggaaaagtacgagagagcacttgacacatagtagggtg

SEQ ID NO: 15708 - DNA, 718 bp, Arabidopsis thaliana
taccatgtccataataacaagagattcgattccattgtctgcaacgacgccggagttgatttcgtcgccgcttccgctaaacacgtcaaactctctgatgttctcttaccaggtgaagacgttcctctgcttttccgtgagtttttcgtcttcgagcgtctcgttagttacaacggtcatcataagcctctcgccgccgttcaagtgacggagctccacgacggtgtcttcatcggatgtaccgtgaatcattccgttactgacggaacttccttctggcacttcttcaacacctttgctgacgtcactagcggtgcttgtaagatcaaacaccttccagatttctcccgccacaccgtcttcgattctccggtcgttcttccagtccctcccggtggtccacgtgtcactttcgacgccgaccaacctctacgggagagaatttttcatttcagcagagaggcgattaccaaactgaaacagaggacgaataacagagttaacggaattgagactgccgttaacgatggaaggaaatgtaacggagagattaacggaaaaataacaaccgttttggatagttttttgaataataagaagagttatgatcggacggctgagatttcatcgttccaatctctcagcgctcagctatggcgatccgttacacgagcgaggaatctcgatccgagcaagacgacgacgtttcgaatggcgg

SEQ ID NO: 15709 - DNA, 958 bp, Arabidopsis thaliana
aacggccgccagtgtgctctaaaggtttggccatagcgtgaaaagcccctatcgcaatcgggtccttttcatacatgtacgcggtgtctcccccgagggaggcgctgatgacgtcgacaccatctgcgatcgcatcatcgaacgccgatagtatgtactccgagctacaacctgctcacgctacaaactgagtcaagtgcgccattctgtagtatctcaggttctgactttgtagaaatgtttgtcggagttggagctagtcgcgtgactacgtttccagccgctgtggatgctgtgtgtgtaccgtggccttcaatgtccctggtgccttcgtttgtatagtctcttgctccaatcaacttgctgaaacattgtaagcagattcattattaatattaactctatagtttatttttgtaaccaaaatattttatgcccaaacacaaaactaatttcttcaaaatacgtccctaatacgactctttattgtaatttaagagaattacttgttgcaagtgaagtttttgccgcctttacaaactcctttccatttcttaggaggaggaccaaatcctttaccggagaagctttctgactctggcgaaatcccagtgtcgaaaactccgacaatagtatcactctcaacggccaagtttcgttttgtattctttccttccttcaatcccatgaagtcccaagatgccgttgtatggagcttgtacttcttgctcgggaacacggacacaactccctccatttctatcaacacaaagggttttaaaacgtttagccttaaaaaacatttcaacagaaaatgtacgtctcgatggaagaacactcaccggctactctttttcgttctgactcagtgagccgggcagagaacccgttgaaactcttcttgtaacttctcaccaaacgaccttccatcgaactaggaaagaaatcacttgttagt

SEQ ID NO: 15710 - DNA, 719 bp, Arabidopsis thaliana
cgccagtgtgctctaaagtggaataagcgcgattgatcgcgttccaggaataccaatgccggtatcccgaatctgcacttcaatctgcactttggtattactcagcgcacgtttttctaccagaatatcaatgttgccattctcggtgaatttaattgcattccccaccaggttagtgatgatttgctgtaatcgcagcgggtcgccgatcacgttatcaggcacgtcgcttttaatattgagcgtcagttctaaccctttatcgtgagaagaatgtgccagcagagtaacgacttcatccagcgtgctgcgtagtgggaatggaatactttccagaatcagcttacctgcttccagtttcgagaagtcgagaacatcattaataattgccagcaaattatttgccgaacgttcaatcgtattcaggtgatcgcgctgcgttggtgttaattctgttttcagcgtcaggcgggtaaagccaataacaccattcagtggtgtacgcagctcgtgtgacatatttgccagaaactcggatttaatacgcgccgcttcctgggcgcgctttttcgccagatctaactcaacgttctgaatttccatcgtgctccagcgtttcacgcagatcggacgtcgcctggtcgatattgtgctgcatctcttcgtgataagcagccagcgacattgccatcgagttgataccgtttttcagcatatcc

SEQ ID NO: 15711 - DNA, 1208 bp, Arabidopsis thaliana
taactttacttgacactggtgagatgaaagaaccatatgactgggcggtgagtagctccattctctgtttccttataactgatccaagatttgacatcttactgttttgactaagagttcattgcatgaattgtgcagccttcaattcttccgattcagatacttcgcattggccaattagtcatcctcagtgttcccggaggtacatcaataagactctctcttccttattcaaaacttcggttttacggtttgcttttgttcagtttttgaatctatttttggatccagagttcacaacaatggctggaagacgtctccgtgacgctatcaagtcttttctcatttcttcggaccccaaggaattcagcaacaacatgcatgtcgtaatcgcaggtctcaccaacacctattctcagtacatcgccactttcgaagagtacgaggttcaaagatacgaggtttgtaaaacacactatctttcttgattcagctttgtctatatgtcacgctactgtgtttaacttaacagctttacttgtgtttttcagggcgcctcaacgttatacggacgacacacactcactgcttatatccaagagttcaagaaactagccacagctttagttaacggtctaacactcccacgtggtccgcaacctcctgaccttttagacaaacagatcagtttactatcccctgtggttgtagactcaactcctctaggagtcaaattcggtgacgtcaaagctgatgtacctccaaagtcaacgttcaggagaggtcaacaagttaacgcaacgttttggtcaggatgtcctcgaaatgatttgatgactgaaggatcattcgctgtggtggagacgctgcgtgagggagggaaatgggctccggtgtatgatgacgatgacttcagtttgaagttcaagtggtcgagaccggcaaagctgagttcggagagccaagccacgattgagtggagggtaccggaatctgcggtagccggagtttatagaataagacattatggagcttctaagtcgttgtttggatccattagtagcttctctggttcttctagtgcctttgtagttgtatgacatactattgtatactttatgaaacaaaaagagaagaaaagagatttgagtcgatttgtcaacgaaatgaagaagccactattggtgttttacacaacttggagaacc

SEQ ID NO: 15712 - DNA, 469 bp, Arabidopsis thaliana
gtactaagttgcctgaaagagagaaaggattgttatatagcacaatctttcaaaacaacaaaggacctcgagaaatttggcgttttgatacacaaaacccacactgccacagataaatcgatgagtaaagaagacagaagtaccgaggattataacttcttgccacatatcttccatgctctgcagtaatttgaacaataagaccaaacggatctttgacatcttccgaaataccagaccaccaccctacctgcaagccatatagagaaaacaatgtaacaccaataagaagctaaaccacagttataaaagaaacgagaaaaaatacaaataatgagctcaccaacccagcaccagctttgtctcgcaagtatactgcatccttgtaacgctcttctagaagagctctctatgacaaatacagaaatggaatctttcagagtcgaaagtaagtatccaaacagtgttg

SEQ ID NO: 15713 - DNA, 364 bp, Arabidopsis thaliana
tattttttagctaataacattttcaaactgttgcaatcatcaggttgtttggtttcttattaacacttgttggacattttattcatcatggtacagtgattctggttttccaaccagctgaggaaggaggagcaggtgcaaagaaaatcgtggaggctggagtattggagaatgtgggtgcaatctttggattacatgtttcgaatctattgggattaggtcaactgagctcaagagagggtctattgatggctggtagtggacgtttcaaagctacgataagcgggaaaggaggtcatgcagctcttcctcaattcgccatagatccagtattggcagcttcaaatgttatcaaaaagagggg

SEQ ID NO: 15714 - DNA, 562 bp, Arabidopsis thaliana
gtgctttaaagcgacgttggccattgagagcaacggcgaatctacggacagtggctcttgttcgaagacatccagcccggcagcgtgaatttcgcctttctgcaatgctgcgatcagtgcattttcgtcaaccaccgggccacgtccggcattaatgaaaatggcggaggatttcattttggcgaattgttctgcgccaaacagatgatgcgtctcatcagttaacggcaggatcaggcaaacgaaatctgactcttgtaacagagtatccaaatcgcagtagcgggcgttgaagcgttcttctgcttctttatggtggcggcgcgcgttatagaggatgggcatgttgaagccaaagtgcgcacgttgtgccagcgccatgccgatccgtcccatcccgacaatgcccagtgttttatggtgaacgtcagtgccgtaccagtccgggcctatgctcgcggtccattcgcctgcttttacccgttctgctacctccacaacccgacgagcggtagacaacaccagcgccatcagctttagagcacactggcggacgttacta

SEQ ID NO: 15715 - DNA, 872 bp, Arabidopsis thaliana
tattacttgtttgaaaatatagttcttatgaatcaaaaattatatgaaaataattgagaagacttgcctggcatctcttatttgaaactctagttttttgtttggtttgttttgagccataatctcatccacttttcccactctgaccacttgacctaatatgtctgccattgtaaaggatactctgttaatattaaaatccataacacttgtttgtttgagttaaaagaatgatagggaatttagaaaatacgtaccaattagaacattctcatcataactctcggtcttaaccccttcaaaatctgctagatcaagaaaaacactatccgatacaggatcacatttaatcacatctgtgttatggttaaaggccattcgataggtcaaactcgatatcttgtacttgccagtcaaaggactcaaagtgaagttatcaatgatcttccaatcaccgacctttattgacctgtgaaacttgccaatataatgctttctaatggtgatatgcatcttagatccctatatcaaaaccaaataaacaaaaacacataagaacatgttaaatgtttcaaaccgaaatatatatagattcatatatttaatcaatagcattctatcatacattttcatcacatataatgacatctaacgtttctcttgatgcatctttggtttgcctccacagatgaaggatcttgactcggacacaccaattcgttttgaaaggcttgacatcactaagatacgttaaacctaaaggtaaagtcattgattatgtgatgctttagaattgatgagattgcttgtgtatttatacggttaggacttagttctgaaacccgagagcgacaccagatttttaggtatat

SEQ ID NO: 15716 - DNA, 911 bp, Arabidopsis thaliana
ttttttttaaaaaccaaatattaatataaatatttcatggtaaacattaaatcagtaattattacaaaaaaaaagaaatagaatttcatgaatcaaccatcaatctataaccattttaatttctttaatttcagaaatctttggattaggaaacgcttttgatatggatccatggctcacaattttcgctccatttggccacccatttgacttcaaaaccttccaccaccctagtgcaacaatcatatttgtctttccatacaatcaagagtttttttcaaagtcgatcgttgtctacccaagagcttcacacgacaatacctctttgctgttgcaataagtatgatcataatcttgtatacaaatttatgcagacaattttatataaacaatataaagttattttacttactagcgatccatgatcttgaacagaagtgtgtaaccattaacgtcttcaacgttgccagtatcatttctcaaactcccaatgataagtgggcattttgcctgttttgagcatacatttatcatcactttagcatcatatcatcacttttttatatcatttgtcatcatttgtcatcactttgcatgtttatgatagttttacatgcatgttgcatatttgtgttgttttcaagtgatttggagctgttggcgagctaatttgaagaaggggacctgatcactgcaaaacactcgaccccctggtcgagtagatgattccacgacttcaacaaaccactcgaccccctggtcgagtagatggcctcatcacttcacaacaccactcgaccccctggtcgagtaccgccaagacaatcatttgatcacatcactcgacctcctggtcgagtatcatcacgtccaccaaatcaccttcactcgatcacactactcaaccacat

SEQ ID NO: 15717 - DNA, 643 bp, Arabidopsis thaliana columbia
tgggggtctttgtcacgacagtcggattgacccggtttttgaatctatcgtcgagggtatctacctttcgcctattagccatgtgatgaacattagagttgcccttatcaatgaatccatccttagaaattccattagatttatttgtatcccctgttgattgcacttttatttacctgttatttgtatctcctatttgtatcccctattgattgcattttagttcttaattttgtcacctgttggttctactcgacccaatgatcgagtacggctcttaaagttctcatttttacttgtttgaatcctgacctaggattgttactagaaacccaccatcatcataatctggcttgacttagttgcttctgtacacatcttaattgctagcaatacagtggactggattgacaccccctatatagcatcgacatgtttgtgttttaggggaattgaactgaatcacacattcaacataagcaggcctaaaaaacatgcttatcagactggctatcgcttccacccactttgacacatagtccactgctaccagtatgtacttgtttccataagaagatggaaatggacccatgaaatcaattcccacacatcaaaaatttcaacttccaagatcgaattttga

SEQ ID NO: 15718 - DNA, 964 bp, Arabidopsis thaliana columbia
cacaagagtgtaaaagtaggctcaagactggatacccaagacgcatagcaactgaacgaggcatcagattcacattagaaccactacaagaaaacaggcaatcaacgacttacaaagtagtcacttagtagtcgttaattctgaatctacgactagtccgcgactaatgacagtagtcgttataccatagtcgttaagtccagctgtcgtcaattagtcgttgatttacgacttatttatgacaacagaccatacaatatacattagtcgttgagtagtcgtattataatggcgactatttggcgacaatttcacgattaataacactgtacagagcgtgtgaaacatatcgtcgtccaatagtcgttaaattcttccgacaatgttatgactatgttccgattaaattcaatgaaccctgggtgtctttcaagtaatcgcaaaatagtcgtaacatattttacgacaatttgccgactattaaacgagtaaatgtaaaataccaatgatatgatatacttagtcatataatagtcgtataaatttatacgactaatggacgtctgtttgatgattaggttatgattattttggtttgtcttaaaatagtcggtaatttgggtgactattttacgactactatacgtttaatttgcgacgtttttacgactattttgcgacttttggtttaaaccgaataaaaatttggtcatcgattgtagggtttctagtttgtagattagtgttatggtttgaagtggtttgtaactcgaaatgctataaatcatgaaaagataaacctatattgaaaattaagttcaaatacacatacaagtatcttattcttaaacaaacatctttattcaaataaacattagttcaagtatagtgtttggatcttaaatctatggagcagtaggtggagtatttgggagacgctcagtggatgtggaagagtgagtgg

SEQ ID NO: 15719 - DNA, 1006 bp, Arabidopsis thaliana columbia
ataaaccctatatctttaatagaaaagatctaaccttgtgaagaaatgacgtcgtttgccggaaaaatctcgtcgcccgaaaatacttgacgccgctaaagaatcgccgccgtcttcttcagcagagggttttctcgaattttcgatttttcacacaagtaaatgattaaatatagatgaaaatcctcaaaaccctaccattaaaaaaaaatattttaaacatagggacccaccaaaatctaacttgagttgataaatccagacatttattccttgagttgatatacagtatgccagctggaattatgcggtatgccagctggaattatcaagttcatccgctaaaattttacacataattgtacagctgaactatcatacacatagatgtacttatcaatgttttcatatattgcagctgaactttaatgtacatacttgataactatgtcgaacccaacctaactgtgatttattttgcatattcaaagttttggcagaatcatatttgatatacgaccatattcacgtaattcacttcatttgaggtgatctcatagtaactactccttatcatataagaggttgtttatgtgaacacataccatgatttcaatttttataaaaaaatatttatcaatgacactttaatagtaatagtagattttttgttgagctagtagtaaacttcaaacgtttctacatattataaaattgttaaacacattttactaagtgattatagttgaacgagctgaacctgttgtactaggcttacagattttgggaattacaaaagaaacatagaaagatttgttattagttaaaataataaagtcagattacaaatttcttcgtttatacgaataatacaaagtacccaaaaactaaaatactacataaattttatcaacttccggaatttccagattaccaaacacctttgacacggggccatgactcacaagcttcggtttagaatgaccgtcacacgccagcaaacgag

SEQ ID NO: 15720 - DNA, 697 bp, Arabidopsis thaliana
aggatccccctggattaatcggaggcgttgacccaaacacagtatctgcaatcgtgatgacaccagcattttgactacttagtccagcaaaggccactgcaggggtcttcccgatattcacttgaaaatggatcattcctatggggaacacaaacacgtcgcccgggttcagcactttagcgaataaacggttgttgtcttgattggaagagacaaaaccaacatataatgttccctcaacaagaacaaggatctcagtggcacgagggtgtgtgtgaggcgggttttgaccatatggcgcatagtctatgcggaccaaggatattcccaaagtgtttaaccctggaatctgatcgacattgactgttgtcacgttggatttgactttattattagtggttcctgcttggttgaggcctgagtaaaagaaatcttctgcctttgcttgctttggatccttgcaaaacttaccattcacaaaaactgcaagtagaaatattgaataaaaaaaacctcttattacaacttccaatttacaatataataaaggagactaataattagttgagagttcaagaattcgagttttatacttaccaccatttttgaggtcgccaatggccacacaaaagtcttgaagtggacttggatcattagcttcggcaaaggaaatgaccaaagccgataaggtaatcag

SEQ ID NO: 15721 - DNA, 460 bp, Arabidopsis thaliana columbia
actaaagaaccagtgacatgtttggcttctttgtatttgtgggtaatatcttttcaggaacttgttgagaaacttagcaaaggtcatttgccaaaacaagattacccttgtatgaatgaaccaaagccaaccttttattctggctctctgtctccatcagcgagtccggtattgcctcattcaagacgaacaccaacatgggcaagacgccatctttctgatgatggatatttcaggtatttccgtttagtttctttgtttatcttttgtttgttggtaatctgagagctggtttattcgtgaatctaatgatagttatatattacaccgaatcttacaatccagtaatttggatgacatatgagggtgttaatgaagattaataaatctctcgatgtgtttcagtgactcggttctaggacgagcatctagtgggttcaagagaaagggacagctgatt

SEQ ID NO: 15722 - DNA, 846 bp, Arabidopsis thaliana
tatttggatacttagaagcaacaacaccaagagtgttaccaactcctcctcccacatcaactaaaacattcacacctttgaagccttggtaaacttcaagagccttcttcacaaccgcaatggtaaaaccggtctggttaaatagtttgctgaatctctcatctgtacccatatagtcaaagagcttcataccaccatgtgcgcggccaaatgcatctcctccttctagaaccacgtctttcaattgtgccctgaaatttatgtatcgataaaggtaagattcattgaatataaaaccacttcttgatgaattataagacatccatgattaatgaaaattaccaagtattgaggaagacgctatcgaaattgacaatgacttgagaagcaagggatccaatatcttgaatgttatccttcaagaaaaacctgcaaattggctctgctctgtagaccctctcaccctttccttctgagaccttaccacacttgaccacagaatagctagcgagtagacgaagcatacggtccaacaaaaccggagcctcagggttacgaggtgtagttggtagcttactcgctatttcagatggtgaaaggaacgagtcgctgcgagaggcttcagcatagagagtgtcaaagacaccgagctcgagggcggctttgagaaccatcggaaaggcagcagcattggctagtctcacggccatcaaacccaactcgttatcatcatcgataacaattggggttttagagttagagcttaaggtttcttctagaaggtatcccatttttatttctttttgtttctttcttctccttcaaggcactctacgtgatcacact

SEQ ID NO: 15723 - DNA, 733 bp, Arabidopsis thaliana
aggcatgccagcgcagaattcaccacagcttctgcctacggaataattagatgattactgatataagaaaaaagacaaaaaagaaaagagttttcatatatagtatcttacctcagaagcaccaagagcaaggcgtttcatgtaatcatttgttacatgctgcttggcagttccagtgacagcatcatggtgctgcgctatccctaaagcatccccaagactgtaagtgtttggacctccagagttcttgcccaccagaaattcaagttgccttgcagcctgttttggaaaaaaaacagacaaatgcaaggccatgtaaattcattttgaatttcactaagaaaatgggaaatcggactccgtaagatgcagtttgataccatgtagtatccgctaagagcccgaacatatcgtttaagagcaggacggctggtgaagtagccagtccagtaagcgtatgccgatccgcatatctgcagagagtagggggaaattattgactattgagaaaatcaagttgttgaacaaaaggaatatgtaaatttatttggtgacagtactaaaggcactcacgggaaaaagtcatgagtcttgagaggccaagtaacattggcaacattcttggcatcaacatagagagatggtgtggagtcaaggcgttcaacggccatcctgttgaatggaattattggtgatgagatctagtctcaaagacagcgagattgatattgag

SEQ ID NO: 15724 - DNA, 708 bp, Arabidopsis thaliana
gggcctgtcgacaatcgtcagaatccattctgctcttattctgtgttggatctatcttcaaactgaaatacgagtctggatttcgaggctcaatgttatgtttgcgacaaaaaggtacccagagatccgcaaagctagcagcttctgccatagcttcaaaggatagaagagctcctccatcatcagaaagatagcatgacaccttctccaccggataatcaacggccaatatggacagaatcgtgttggcggtgacaaggggcggctctttctctggatctgccgttgacacaaaaaggtcaatacctgggagatccgacctccctgttgggttggagggagaaggcatgtcaaatttgtcacgaagaacttccaggtcagtggaccggtttattggacacaacttagggatctggtctagaatccatgaaaatccaaaccaaagctcgcatattatagacatgagccataaccatattgcgtcttcgttaggatttcggatcctccaagttagaaaaaaacatagcacgacaaaacgaatgacgattagtaatctgtaaggactaatgatggcggctggaatagggattcgtcggctcagtggccgccatggcttgtcagctgtttccacatgccgcctctcatcccttcatccatatcatcgccatacatttcgtcttgaggcaatacgcattaccgtaccatatg

SEQ ID NO: 15725 - DNA, 985 bp, Arabidopsis thaliana
gccaaggtgttgttcttgagtagtcttcttcagagttcttgagcgtacagactccctaatacaatttgctgaagcctgaagtgacccctgagtctcccaatcgcgggaacaacacctctttctcaatcaaaacctggaggtgcgatgtgattttgcggaatgaaacccacacaaagggtgcgcaacaaaatgcgtatgcgaaaactgacaaggctctgaccactccatcagggtaccaagggaaggccatgacaaggagagtgccgagaattcctagccatggagtgagaacagggagcgttgggaggaggagagtgttgattgaaatggaagagagagcaaaagaagccatcaagtagagcgaccagccgatgagtgggtggatagtgtgagggatggtgaagaatgggaagatgtaggctgcaactacagagagaagcgcgatcaacttaaaaccagcttggatcgttgttaagttgcggtcagagcggcgataacatagcttggttatgttaggacgagctagtcgtgtaccactatgattccaaggtaaaacattgcttggattataaccaaaggcatttcggctgagtacctattgcaagatcattattattagccactatacagagcttaagagggagttgtcatcatttaaaaatttaaaattaccctatagtggcgcgacgctgctcgtgccatgagaaacctagtggaagaacaggccatgaccaccagtaccatggctttaaccaaacagctcccgggaatgtaatcacactgtttggtccacagggtatgttccatcttagcttaagatctgagagtacaagttaatacattagccaacattaatcattatagacaaaatcttgagagaagaattaagagactacttacagaaataagaagcgtccatttggtagcctaagggaagtctcaagtgaccattaagtacagatccgttactcggaggactaaagag

SEQ ID NO: 15726 - DNA, 636 bp, Arabidopsis thaliana
ttcatccatctccagactacaaagtcagtggtatctccacagcttcgatcctgattcgtaggttttcgagcacaccatgaggatccttactgacctgtcagctaggatgaggatatactgcaggatttgtattgagtgaaccccaatcttttgacgacagagagcggcatgagattgactaatgctcctaaatcacataggcatctgttgaaagccaatggacctaaagagcatggtagagtgaatgaaccaggatcacttagcttcttaggaatgatcttcttctgtatgatagcactgcattcatggctcaataccaccatccttgcacttcttgaattctctccacgatcaactctttcaaaaacttgtgagagtctgggattagcgctagagcgtcaacaagaggtatccgcaactcaacctccataatgttcttggcaaacatagctctatacttatctgccaatgctttcttgtgacggccaggaaatggaagctgtggtttgtaaggaggagggacaaagaccttttctttgttcttgacagcaactggttttggagcagttggtgatgttgctggggaggttgctcgagtagttggtcgagtaaagtggtcgagtggcagctcgagtg

SEQ ID NO: 15727 - DNA, 1084 bp, Arabidopsis thaliana
cataattgattactttggtcaatgttttgactgtccatcaatggagaatcacaattttatcattactatatatatagacaaccatacataattgttgagagactctcttaagaccttcaatgaagctaaggtgctttaatagacaaccatacatacatatttataagtcggagatgtataatctcaaagccgcgaagtaaagtgttcaaccggccgttgaactttagatctaacattgacctcatcctcagcaaccaaacctttagcaatgtctcttagcttaggcttaaggatctttccattcccgtttttgggcaattcatccaaaaacaccacttttctcggacacataaaatgtggaagattttcacggcaatactcaatcaaatctctctctttggtcacaagtttatcttcacgatcttcattattagtctcacccttttctagaacaacaaatgcacatggggtttctcccatgtagggtgaggcatggcacgacggcagttcaagcacttttgggtacttataaataatattctcgacttcaacactactaatgttttcgcctccagatatgattatgtctttggaccgatctttgatctctacgtgtccatcaggatgaatcacacctacgtctcctgagttgagccatccgtgtttaaatgcttcatatgtagctttgggattcttcagatagcctttcattatgctgcttcctttcataacgatttctcccatcgtcttcccatctcgcggaacactctcttgagtttccttgtttctcacgtcaacttcagttaggcctaagatgcttagcccttgccttgcttttaactccatctgttgattctcaggtaatctgtttcaattgagtaataagagtgacatattaatcttaataatatcaataaattaaagaacttttaaattttggtaaatgataatgataagtgaaacctaatactgtatacataagaataaatagtacaaatgatgattacctgttccactcatcttgccactcacaaaacagaaccggaccagtggcctcggtcaaaccataggcatgcatcacttg

SEQ ID NO: 15728 - DNA, 860 bp, Arabidopsis thaliana
gcgcttatttccttgggaaagatacaatgtcatgactagcaatgtggcggagtctttgaacgcagtcttgaaagaagcccgtgaactaccaatcatttccttgtcagagttcactcggaagatctccaattcctagatggatatgccgagtgaagactatatacagaataatgactaactagccacaaagtacagtgaagctgacctatgtaacttggatcaatcaggccgataggcggctcatcgccttgacaggtacgattacgagataagggaggaaggcgcaagtgtctaccacgtgaagcttatggaacacacatgctcctgtagagcatttgatttgcttcacttgccttgcccccacgcaataacggctgcagtggttgagggcgttccaatacaaggactgatggcgccggaatattctgttgaaagctggagaatgtcttacctaggtaccataaaacctgtacccgaggttggtgacgttttcgctttacctgaaccaatagcctctctccacctcttcccgccagccacgcgccgtccatcgggacagccgaaaaagaaaagaattacttcaaggggggaattcacggtaaacgttatacatttggaatttactgtaacacccttagtgttttacattcctaacacttgctcaatcttcatctcagggtccccagcgacaagtaacacgttgttctcgttgcacaggctccgaccataatcgcgccacgtgcaaaatgcccatataaaggtacaatgttattttataccgtatcatgctatagatagaaacaacgttcatacaatctctatggtcgaagggtgactcctcttgattgtggctcgcgtct

SEQ ID NO: 15729 - DNA, 650 bp, Arabidopsis thaliana
tctactatacttaagttttccaaaaaggtcatgtcctccacatacattaaccatgtcgatggtcttataagaacagcttcatatgactagtatggttggtaaaattataattataaataaaagtcaagcaaactcattagaatcaaagtcaactacattctaattagttcattcgcactatcaaatccaaacttctgcaatgaaggaacaattataattcgcaacttgctaatttaacttgggttgtatatatgcaagttgagacgacttcatttgatcatcaaacaaaagtcttgacgaatacattagcggataagcttaaagtcgtcgaaagaattttcttccttgccttattggcatcttcttctaaagttccaatgctttgatcattgatgattttcccagcatcagaaactaaaggctataatctgcaactttcaagaaactttgggtggaaattggatttcccgagaaaagaaaaggagttttgggttattatagaaaataatgttgttgctggtggactgctccagctgtcgtacgccgcttcaccttcctcccggagccacccgaatccgctgcgccatttgtcacgccttcactctcatcgcccccgagccccgtctccaatctcacgcgtcgcgagccct

SEQ ID NO: 15730 - DNA, 615 bp, Arabidopsis thaliana
tgatagttccctttactctgaaaaccgtagggctgaaatttgtaaccttgtgagccagcctgagttgcatacacctgatcctgaggattttcaacattagtactcctgtaagaaaggttgggatggttcctggagttcaggttgaaccctctgttctgatagttcccatacccattcacaaagttcatctctgcctgtagatcttcaaaaccatctccgctgaactcttgatgcaccatacctttgctggaatcctcacaaaaattgacagattttttatctctcctcagaagttgctcaaccttagctgacagttcagcaagctgtttggattctcctcctccacctctattcgacctgtcatagtcaacattgtggttgctgttgctagctgcaaggttctcaattagctctgtagcctcagtttcagtcttggtcatgaattcctcattgctagcagtgtctaatgccatcttgtaggccttgtcaactccccgatagaaagtgctgatcaatgtagcccgtggaaatccatgatgaggacactccctgtagtagtccttaaacctctcccaagcttcatggaatgactatgtgcctctctgttggaagcta

SEQ ID NO: 15731 - DNA, 1064 bp, Arabidopsis thaliana
ctctcttcgaaaccatgttggggcattgtcactgataagatctgtagcggagccatgctgctctaagggactcggttggagcttgagtgaacgaagagatttgtaaacgaagtgcctctgtcacggattcatcgaagaagtgattcatgaaggcgttctttgtatcagtccaatttgttagtgagcctggttctagttgacgcaaccatgatgttcctctgcccgcgagagagtgggagaagagtttgcaaagaaggtaatcagctggtacaccttctgctttgataaaggacattatgtcttctaagacttccaaatgttctaatgatgattcatcgggagctcctttaaactttcctcttgacacaagatcataataggcagggtatatatcaaagtcttctctttcaaatggtggtagcttgattctgatcggttggtgtagaaaagatcagttctgctaaggtcacctattgtaccctgtcagttctacagagggtgtcaatcgacacccagatggtgtcggtcgacactatcattgaattctaacatagaaacgtgtaacaaaatctgaaggtacctgaaacataagaaaacacaaagaaaaaaaaaactgaattagtaatgaaagaaaagaaaagtctagacttaaatcgacacctactctaatggtgaagcaaagagaacttcgacaatggcaccaaatttgatatagctcaaattgccttaagcttactccttcaaataagagatcgtcgttagcacttaacggtcaaattccagtaagtactctatgtacacacaataaacttatggtggttataattaagctagacaaagtatattaatgtaaaaaacaataaagcaagtaaatgagttgtagattcaagtgattaaagcgttgggtctaagaaattgtgtcgggagatcgataaattgtagatttaactaatataaggattgtaatcgcacggttatcgaactcaaactatgattatagagtaaccggtggcgttctacgaaactctctatacttagagctaagataacaggagaagccgaga

SEQ ID NO: 15732 - DNA, 1064 bp, Arabidopsis thaliana
  unsure (1)..(1064): unsure at all n locations
acggatatcgcggagaatcccgtggagcttaatcaatcggagactccgaattgatggattcgatcaacagttttgaatcggaagcaacagagagttttttgaagccccgatctgaggtatgtttgatagcgaggcgaatagcaagggcttcggccataatcggtgatcgggtgtgcgtcgcaattgaagagatctgtcgattaaagctcgtagatcggtttgagaagatacaatccatccttgcatatttggcatgtaatgaggtcgagatcaggtgctttgctgggtcccaaggaacgttttgtgactacttgtttggactgaagttgagcagattgccattcatgtgctaacatgatagcttgtgtaaggatttcacgagggttgtcgtggggattttcaaagatttgctgattgcgagccatctataatttccagagaatccaaggatgaagagggcctgaaccaatttcggatggtggtaggtgataagtgtgcattttacatgttttgagcgtccatttgttatcactattgcatcatatcaccactgttttataccatttctcatcatttgtcatcacttcgcatgtttaggatagttttgcatgcatgttgtatatttgtgttgttttcaagtgatttggagctgttggcgagctaattgaaagaagcggatatgatcatatcaaaccactcgacgccctgttcgagtagatggcttcacgacttcaagacaacactcgaccccctagtcgagtagatggcctcatcacatcacaccaccnactcgaccccatggtcgagtatcttcatctccaccacctgaccatcactcgatcacaccactcgaccccttggtcgagtacctccatcacacccactcgatcactcacttgattacacggctgagtcccaccatcatcacacactcgaccgatcactctaccaccaagccgagtaccaccatctccatcactcgacttcctactcgacttcatactcgactgccagcttcactgtcttctccattccgcactcaaccacacactcgagcacaaggg

SEQ ID NO: 15733 - DNA, 789 bp, Arabidopsis thaliana
atacctctaatccgcatgtcttacacaataaagagttggttgactggttgctgtctcttgtttgctatttcaggttgttggatttgatttggttgatgatgaaagcaaacctgaaagacgtcccacaaaacacatgcccactccagctcaatggactaacgcattcaatcctgcattttcgtattatgtctactattgttatgctaacctctatgtgttaaataaggtaccattcctcttagtcgcttctgtaactaacttggtgttctcaaaactgtgtaatatggagtaactatttttcttcagcttcgagagtcaaagggcatgactactatcacgctacgaccacattctggagaggtgtgttatttcttcctttgtgctagataaacagttttcagttacagttcagtggaattttaacatgtctacaaatttcaggctggtgacattgaccacttggctgctacgtttctaacatgccatagcatcgcacatggaatcaatctgcgaaagtctcctgtgcttcagtatctgtactacctcgcccaggtttgtccagactgcatgcacgcatgacctgactatgaatgtatctgttccaagaagacatctcgtctgacacactcgcctggccatgtctgccactgagccagaactctctgtcaccagaatagcagcggtacccgctgccggtcttcaacgtaaaatcgctcactgcggagctgtcgactgacgagccccttcagagtcccttcactagagaacctctcgtggaagagtatagca

SEQ ID NO: 15734 - DNA, 645 bp, Arabidopsis thaliana
aaggtaactaaactttccctttttattttttgaaattgctaggcttgtgaaaatttgtgtgtagaaaaatgcgaccattatagtgtaactgataatagccaatggaaacgaaaataggagttactatagatgtacaacacaaaagtgcaacgtgaagaaacgagtggagagatcgttccaagatccaacggttgtgattacaacttacgagggtcaacacaaccacccgattccgactaatcttcgaggaagttctgccgcggctgctatgttctccgcagacctcatgactccaagaagctttgcacatgatatgtttaggacggcagcttatactaacggcggttctgtggcggcggctttggattatggatatggacaaagtggttatggtagtgtgaattcaaaccctagttctcaccaagtgtatcatcaagggggtgagtatgagctcttgagggagatttttccttcaattttctttaagcaagagccttgatcgatcattgttataactacatatattatatatattgagagagagaggtagagaaaaaaaaaacttatatgtaacttaagatcttattttgtctctcttatttgcatgtacatattttttcatgaaagaatgagacagtcctctag

SEQ ID NO: 15735 - DNA, 822 bp, Arabidopsis thaliana
atagtgatatggaatattgggagattccagaaactgttagtgaagttatttgtctgccaccttctactcgtgtacctagtggcagatggaagaaaaagaggataccttctgtttgggagcatggaaggtctcagccaaaaccaaaattacacaaatgcagtaggtgtggtcagtcgggtcacaacaaatcaacttgtgttgctgcaatttagatatatctttatctccagagaattgaatattgttgggttttttaatttttccttcattgtgtcgtgttattactctcgtttgttaaaattactatcaaacttttacaagtaattttgaaggttattctaatattttaccttctaaaatctcttgtaaaatcctgtttaaaacgtctgtttaaatccttttaaaataccttgtaaatctttcgttatgccacttacatatacttttcacgattgtaaatcaagttaaacacttttacaagcttttaaattcccttgtaaatcattctctgccactaacttatgattcttaaacgattgttaatcaagtaaaccccttttaaaaacttttaaaatcccttgtaaatcattatttatcactttcttatcctttaaacccgattgcaaacatgtataccctttttaatttttttgcaacgctttacgcttttaaaatgtcttgtaagtcgtttactaaaattactatcaaattttacacgtaattttaatagtaattccaataatttacctttttaaaatctttgtaaaagcctgtttaaaacgtctttgaaaatccttttaaaataccttgtaaatatttcgt

SEQ ID NO: 15736 - DNA, 872 bp, Arabidopsis thaliana columbia
gggtaccgagctcgaattacatgacactctgtttttttatgaaatcattttctgatttttcaaatttttatggtttttctatgccttagatgatgcaaaatttgaaacagataagagaacacaatgttaaacatgtcttgaaccctctcccaaacttaaattagacagtcccttgtgtaataaaaatctgaaagagagttcaagaccaaagcacaaaacacacaaagaaaaataaaaagatgctatggtatgtacaatggttgaggtggtgttatctcagttgtcaggtgaagtagatggagacatagtcatccatactctcttgggtataggctggggctgaagttgaggcgggagggtgttgctcgttctgtccggtcgagcgtgtggaagctcgtctctgcctactccttggctctctcaactcggagatcacttcatgaggctcaaaagatgaagctcggagttaatcgatccgttcagctctccttgcagctgagctcgttgaaccgctccttcttacttcgggggttggagacggtggccttggcttgctctggaagtccttgagttgagcagccatactcttgagcgacttcttcattgttctcatgttcttcttgaaaacccttcattgtcttgctgtgaaggttccccagctcttcacgtacaccgagcttcttgtgaactttagcaaactcatctcctctttggtcaacaccttcttcataatgagcttgctcttgttcgctggtcccatgctccggttgatcaatataatgctcaaactcgatctgctcctcataatcagcttaagtaaagtactcatgctgctcatagtcggttggactatatattggttcatcttcccg

SEQ ID NO: 15737 - DNA, 569 bp, Arabidopsis thaliana columbia
catatagcttcaaaaaatcggtcgagggtaaacaaattccaaagggtttcaccttcgatgaccactttgaagaactcgatttattcttcagtcggaagagtcgcagcaatgaaagctgcacaaaaacaaaaacaaattcgggttaggaaaagaacgtgtaaacgaacagaagacaaatatgtttctgccctaatttctaccaggtttcgtggaccattttgatggaagcacttcggaaaggctctcaattgaagcaatggttttctttattaagaactaaggatggtgcgagttctcgtttttgttcgggagatgggaaatgaggtttctgttggcatttaggtatgccgagaagtaaccaactttcttcgacgaacttcttacgctaagaagctcgttcaattcgggaactccaattatgtacccagccaccaccgcgacggtgataatccctagaatagattggagaaggttggaggttaattgaggtagagcaatttcaagagcggccaaggtacggacgagtgccttgggaagaggataggccagccgtatacgcgagtgaatga

SEQ ID NO: 15738 - DNA, 981 bp, Arabidopsis thaliana
tccttggatcattgagatgagaccactcttgatctcaaagttgttgttctgaactggtggaggcattatcccttgtctttggtgatgattccttgggacatcaccagcaccaatgtttcttggttgatcaacattaggtgggtcttgaacatacactggtctgttctgttgatccatagcagctggtctttgctaatcacaggatgcctttgctttggtttcttgtaactcacgagctattctatctattctgtctctgaattatagtaggtgtgcagaacctttggatcgactttgcatgcacaaagattagtacctataccataaaaacaagcagacgaaaagatgagttagtaacttgataaatgtaaaagaacttgatcttaactttttctaatatcttgaatgtagcaatgcaacattgaattggcaacggcgccaaattgatatgtagatttttaggcctacttatgtgctgaatgtgaggttcagttcaattccccttaaacactaacatgtcgatgcagctatagagagtgtcaatccagtccactgttattgctagcaatcaagatgtgtacagaagcaactaagtcaagccacattataatgatggtgggtttctagtaacaatcctaggtcaggattcaaacaggtaaaaataagaacttaagagccctactcgatcattgggtcaagtataaccaacatgtgacaatattaagaactaaaatgcaatcaacaggggatacaaataacaggtatataaaagtgcaatcagggggtgaataccaataaatctaagaagaatagatgtcctaaggatggattcatttataagggcaactctagggttcatcaagaggctaacaggtgaaaggtaaataccctagacgatagattccacaaccgggtcaatccactctcgtgatagagaccccataactctccacttcctaatatcactctcgttgatgaaca

SEQ ID NO: 15739 - DNA, 875 bp, Arabidopsis thaliana columbia
ttgactattcgcgtttgtaccatccggggtcgtttgatagtttgttgcattccgtggaagggagtttggggatccgaagatagttcttcgaactctagtagaatttcctgcaaaagaacggacacgagactgaatggtactaatattttggctaagtgatacctgggttgtttgcagtgtttcgacggttttttccatgtttgaaaacttctatgctatatcggccatagtttgttgcatggtcttgagggtttcagctatcgaagcgttggtagcatcttctctagacattgcgacttacttcgtgtatgtaatacccagaagaaatctgacgactcaagaatcctccgtccccacagacgacgccaaaatgtggatgtcggattcacacactcaagtatttatttatttagtgagaaggattattcttgaggacaaatatactagaaaatagatagatgattatagagaaaactatgagtattgtaaaagaatgtgtatagctaatttgcaccaaaaaatgcgtgtgtctttacatggtctttgacccataatttatacccaaagaatacatttaatcctcatttacacacaattattctacttaaatgtatctgtttctagtctttgaatcaattactcaacgttcgaatttgaaaccacttcgagcctcctggacttcacccttcggcccatttttcttcttcagttcgagtagtcctaacttcgacgttgcacccactttgcgaatcgacatctcgcccatacccttacttcgaagaatcttacgggcctttcctcttatgggccttccttatttgtgtagcaatctttggccggtcccaagccatagtgcgggatccgcaccaacactg

SEQ ID NO: 15740 - DNA, 1358 bp, Arabidopsis thaliana
ttttcgtttttggcggaaaaatcatgggttttcgtgtttggcgggaaaatcacgggtttacgtttttagtgggaaaatcacgggtttacgtttttggcgagaaaatcacgggttttcgtttttggcgggaaaatcacgggtttacgtttttggcgggaaaatcacggatttttcgttttggcgggaaaatcacggattttcgtttttggcgggaaaatcacgggttttcgtttttggcgggaaaatcacatgtttttcgtttttggcggaaaaatcacgggttttcgtttttggcgggaaaatcactggttttcgtttttagcgggaaaatcacgggtttacgtttttggcgggaaaattacgggttttcacttttggcggaaaaatcatgggttttcgtttttggcgggaaaatcacgggtttacgttttttgcggaaaaatcacggatttatgtttttggcgagaaaatcacgggtttctgttttttggtggaaaaattacgagtttactttttctcaatttcatcgcttgtatatttaagaaatttggaaaaatattatttttattaaattggtttagatgtgttggttaaacttaaattggtattgatttagagattttagttggtttaattcaattttacaaaatttgatgggttaattgggtaaatcattgaaactattaaccattacaacccaactcattttactcatcacaccaattgactcatcaactcatttgacccatcaactcattcgagtcaaaattttcaactcattagggttcatgggttgagttgagttgagttgacccatgaattttgacccattttgacacccctagttgttacacagttgattttattggtaatatgcataataatagcggaatgacattttctaacgtaattatacaaaaaaattatcagtcaaaaatatttgcataacatttaacaaaatagaaaatttgtgttttcacctaaaaacactagtaacaattcattatacaaatatgtagatatatacttgtttatgatataaaatcttattccgcatttttgcaaatgtatctaatcgacacaaatttttattttacaacttttcattctgcaaaattttattatacaaatagagtcattatgcaattacgaaatattaccaatcaaatttatacaattattttctgattcttggagattcctgaccaaatcctaagctaattttcacaacatttataatgttggattaaaacattatggtttggtttaaaacatataatgttggattataatgttggtttaaaacattatggtatggtttggtttataatgttggattaaaacattatggttaaaca

SEQ ID NO: 15741 - DNA, 637 bp, Arabidopsis thaliana
tccataattaattaagttctttagtgagcaacaccaattagaagatctcttgacgaaccttcctttcatgcgaggccttttctctgcattcaatttacgtacctcgtaccttatcttcttggagaacaaccttgtcctccttttctctcggtatcttgaaaccctagcctctcttcctccatccccagcatctcctaggtgtaaccctaggccgcggaagtggttgtgatgatgagcctctgctccactttcacccttaatattcacaacacaaataaattttgttaattagagacaatgctttctttatatcaaaactaaatagtaataacaaaggttgcggtccattgataaaaacttgttgctagtatgatatttgtttgagtttagtcataaactatccggtcgtataaaatatagtagatagaacaaggcaatgcgtgatagacgtaccatggtatgggttgggaaacaaaccatgtcgaggtctatttcagatggcacccgggcggtccatgggatcccttggcctccccaagtggaaatgactgattcatagtccaatctaagcataagagccttctccttcttctcttctttaatcccaccactcatctcattcactcccatctccatc

SEQ ID NO: 15742 - DNA, 903 bp, Arabidopsis thaliana
cttgttgtctagggataatttattgtgcatgtcaatcacctgtaaactgggaaacgaaactactcaattaccccatcctcggaattctttatctgattgattttattgtttactctattgttgtttattgcgtcatgtcatctattgcttagtttatgcaattctttcttgtcactcgacctgatactcaaccaccagttgtctgacaacagactgtgcagtcgagtatctttgttttatttactgtctgttactcgacctgtcattcgacctcacctagtgctctgcaaagagctgtgttggtcgagtgttttactgtttctgtttgattttctgttttctgcatgttcacttaggactgctagaacacaccaaaacctgttattgcttggctggacttagtgacttctgatcacatcttgattgttagcatcacacccatttggattgacaaccttcagtactacaacgacatgatagtgctttaggattaattgatcttaaaaacctattatcacccgtaccgttaatccattgttcatacgcagtgtgtttgaaaggaaacctcttcggtttgatcttgaactgtttgtaatctataacccaataagtcgtgaaccacgggtctagaattatgacgcgtttgttgtggtatgggcatggatctcgctggtgcctcagggtgaggacttttatataaaataaaacctacccagacaaaacacaacattaattcagccgtaaccaagtaaaactcagcttcaacacctaaataaatcagccattatctactttaactcaggcagaacaataccataactcagacataaccaactacaactcagtctgaacaccagaataaaccagctataatttatttaactcagcctgaacaacacgata

SEQ ID NO: 15743 - DNA, 1250 bp, Arabidopsis thaliana columbia
ctgaaaaagttgaataggcgcctacccgcatgaaatgagacgccgtttcagcatacttccgcgactcgagaagagtatccggaggaggaagcaaaggatcggcgcatcccccgaggaggtttgcagaggctacccgatcttcaaaaattgggagctctaattccgccttggcgcccgaggccttcttcttcttactcttcttcttggacgttaaatcatccgtccgagcgcgcttacccaccgccttgtcgctcgctgggcacgcgacaatcgcctcgggcaaaggcgcacgagcagtgggatcaacctcttgagcctcgaaaggcgtcggatcaacaggggctgtaacatcgggaacaatgtcccggtcttgagtctcatcgggagaggccgcctgccgagaatcagccctgcatccgcaaggcgtttctcctttgccaagcgtctctctttatcttctttcttcttcgcgtacacctcccttcaaagtaagtttggttgactgcatatcgaccaagaattgagtacgatggtccgaagattccgacctggaaggacagaaacgccgtgaagaaaacggagggctcgttcgactcgatcccgagagaaatgtttcgaccaatcgcacttccgagatgataacgcgtgaaaagccgaaaggaaatcatctcgaatcggctcaaggaacttgagggtgcgttctgcaacaaagaaaaactaccgttagaaaaagaaactataaaaccgcgtcggacacaaataaattgttagctacaactacccgaagttccccatctcgtcagaaccgtcccgagaaggtcgtcgtgaacagcatctccgagagccacgaagaagaagtgatcggtatacgactcgtccttgtaatactgatccacttcggatttgggaacccgccggatctcaagaagatttctcagatgagcaagcgtaatatcagtttcagactcataactccgaatcaaaatcccgagcagatgtctcaaggattgcatcgtgatctgggagagggcaatctggtacgatgtcacgtattccaaaaccagtctcgggactggcagccacaagaaacaaccgtaaataaatccctcatacagagtatagaaacccagtatgggagttgtcggctcgctcatcgagactcggcacgcgcaaggttactgcaccaagaccgaatctggccctgagatccgaaatggaccgctcaatgcataattttgagccagggggat

SEQ ID NO: 15744 - DNA, 1040 bp, Arabidopsis thaliana
tcaaatcttgtgaactaacttcacatgagagtattcagaccttcctgttatgaaaatctcatcttttaaggcaacggctaactaattcacagaacttagaactagacaattaaccataagatagagtgaggagaaatagataccttggtcttgtttccgattccagtagaaccatcagtcttttcagcctcagccttaagatcaaccttcaaatcctcaacaacagacttactctcgagatcccaaatcctaatgctattctctgttgctgcacacaaccagtacctattgggactgaagcaaagtgaatgaataatagagccagcttcaagagaatacaacttcttcccttcagccaaatcccaaagcaagatcacaccatctttgccaccactggcacacaacgaaccatcaggtgacacagccacagtgttcaagtaaccagagtgaccagcaagagtgttcctaagcttacaattctgaagattccagaccttcacagttttatcccaagaagcagatacaatagttggcacaagagtattaggactaaacctaacacaactaacccattccttgtgaccatcagcttcagagatggtatacttacactcaccaagcgtgttccaaagcttaatcgtacgatcacgagaagcagagacgatctgacggttatcggtagagaaagcaacagagagaacatctttcgtgtgaccaacgaaacgacgagtagattctccggtagcgagatcccagagacgaagctcaccgtcccaagatccggagagagcgaattgtccatcggaggagagaacaacgtcttgaacgaagtatgagtgaccagtcatcctccgctgagcaacaccgtatgacttgtcttcctttgtgagtttcagaggatgattgatttgtcacgcgacgaagttacaatcacgtcggagttatcgccggtgtagcaatggcggtgccatatcagtgtgggcaccattgtgctttcacacgagtcctcagcatggtcagggttgaggcgagattagggt

SEQ ID NO: 15745 - DNA, 1115 bp, Arabidopsis thaliana
gtgtaccaagtcatcacaaagccactgtgtgctgtgcacttcacgattaaaaccttaataagaatcaaagctaaattatgaacaaactacgattgtgttatttgtgttttagtaaactcttgtacatttcaatcgaattcgttcaaattgctcttatgttccctctctgatcaaacatttctcaactatatcacaacaaaaatgctccaacaaaatttatttcagaagaggcccatttatacctgactcggaaactccggcccaaatgagccagtctcctcgcagaaaccacactaaaccctaatttgattcatttttagacctagagtataaataccaaacatttcaatcgacctcgtaatctctcgctctgttacgccattttcgtgagtaagaagaagaaacccgaaaacctcaaaccatggccgagggactcgtattgaagggcattatgcgcgcccacaccgacattgtcacggccatcgctacgccgatcgacaattccgacatcatcgtcacagcgtcgcgtgacaaatccatcatcctctggaaactcacaaaggacgataagtcttacggtgttgctcagcgtaggctcacaggtcactctcacttcgtggaagatgttgttctctcatcggacggtcagtttgcactctccggaagctgggacggtgagctccgtctctgggatcttgccacgggagaaacaactcgtcgattcgttggtcatacgaaagatgtgctctctgttgcattctctactgataaccggcagatcgtgtctgcttctcgtgatcgtacgattaagctttggaacacacttggtgagtgtaagtataccatctctgaaggtgatggtcacaaggaatgggttagttgtgttaggtttagtcctaatactcttgtaccaactattgtatctgcttcttgggataaaactgtgaaagtttggaatctccagaactgtaagctgaggaactctcttgttggtcactctggttacctcaacacggttgctgtctcgcctgatggttcgtatgcgccagtggtgggaaaggtggtgttatcttgttgtgggatttggctgaaggaaagaagctttactcgcttga

SEQ ID NO: 15746 - DNA, 519 bp, Arabidopsis thaliana columbia
catggtatcagagcatgttcttcgattcttaacatgctaaatctcttctacttactctaatctacttactctctacattcttcttaaatctacactttcctcttcaagaaacactctattacccaacggttaaaagagtgtacacatcatggagaacccaaaaccggcgataacgtcggtggtcttgaaaggagagaactatctactatggatgaggacgacaaaaacggtgttatgtggccgagggctttggagccatgttgaaaccaaacatgttcagtttaaggctaccaaagaagacggcgacgaagggttcaagagggaagaagaagaagctgagatcgagaaagaagccaagtggtttcaagaagaccaaaacgttctcgctattcttcaacattctcttgagagctccattcttgaggcttactcttattgtgaaacggcacgcgagctatgggagcactcgagaacgtgtatgggaatgtgtaaacttgactcgagtctttgaagcaagaa

SEQ ID NO: 15747 - DNA, 939 bp, Arabidopsis thaliana
gaccatatacaaaacccaaaccaatcagaagctctttctttggacacggatggctcaagccttggctcaaccaccactggtgtgcaccaccgtcgtcccagacccgccgccgccgccaccaccaccgcacccaaagccgtatgctctacgatacatggcggatcttcttggccggattggtataatggatacagacaaagatggtaacatcagcccacagagtccgaggagtcctaggagcccaagaaacaacattctcatggggaagtacgagcttgggaagcttctcggccacggaacctttgcaaaggtttatttagctcaaaacatcaaatctggagataaagtcgccattaaagtcatcgacaaggagaagattatgaagagtggtttggttgctcacatcaaacgggaaatctctatcctccgccgtgtccgtcacccttacatcgttcatctattcgaggttatggcgacgaagtccaagatttactttgtgatggaagtacgttggaggcggcgagttgttcaacacggttgctaaaggtcgattgcccgaggaaactgctcggagatatttccagcagctgatctcctctgtttcgttctgccatggccgcggtgtttaccaccgtgaccttaaaccagagaatctgcttttagacaacaaagggaaccttaaagtatctgactttggtctcagcgcggtggcagagcagcttcgtcaagacgggctctcgcacacgttttgcgggactccagcgtatattgcacccgaggttttgactagaaaagggtacgatgcagcgaaacgcgatgtttggtcatgtggagtgatcttattcgtgttgatggctggtcacattccgttctacgacaagaacataatggttatgtacaagaagatttacaaaggggaatttaggtgtcttcgttggt

SEQ ID NO: 15748 - DNA, 1105 bp, Arabidopsis thaliana
ggtaatcatgtcttcctcttctattaatctctcaactgtagcttctctatcaaatagtgatatcacggaatctttgcatacacttacgagccactttccatcatccgtcattgctatatctgataccttttgagtcctctgacctttccagcattccttctctctaccatctaaatcccacatgcagatgcttcggtctgtcatcccggcgattatcccctgcccatcaggataccatccgcaagaaatgggactgataccgcctttttcatacatgtgaacacagtctcctgaatcaacatcccagcgtctgataacctcttctgctccacatgtaagaacttgacgatcatcaggactccataagatggcaatcacgggtttgtggtggccaacaagtgtatgcttcaatgaaatgtgcccatctgcgctgatctgaaaagtacattctaagtgaatcagcaaacaggttgcctcaattggaataggtaacaaatcaaaacttgaacaggttaccaaaactcaattcaggcaagccttaattggtcagtcagaattacctcccatataattgcggtttgatccttggaagatgaagccaaatatttgccattatgtgaaaattgcaagaaccaaacttcatcggtatgtgactccaagatctgaaccattcacgtagagagaacttaacgaatgtgatttaagtcagtaagcacacatgcactgcaagtctgactaaactacaaccagaaaaagatgccacacaagtaattagttaatcagaggaacatgggtacaggtgacagcaaaaagaaaagaatgtactacatagccaatgatggaaaaggaataaccgaaaaagaaaataggcatcagattgagacaattatcatcttctatatctttctcaatgacctgtcaaggaagtggaaacgtttgcagaacattgtactgtaaacatctcagctaaagatatgtaaatctcttatagtaccgacaaactcatgaatcagatcccaagaaacgatacaacaacaagaaggagacggaagtaacattcacagcagagtgtttagtctacctgagcagtctgagaaggaatttg

SEQ ID NO: 15749 - DNA, 1241 bp, Arabidopsis thaliana
aagatagtttcatgctcgagcgcggaatcggagtaccgagctatgaggaagctaactaatgaactcacttggctcacgacacttctcaaggactttggtattgaatcatcaagcccgataactatgcactgtgataaccaagccgcaatacacatcgctaccaactcggtctttcatgagagaaccaaacatatcgaggtggactgccacaaggtgcatgagaagatagacgaaggaatgatactatcgtgctatacggacaccaaagataacttgacggatatttttacaaaaggggcaagtcgcaaggtttgtgaacacatttacaacaaacttgggcgtgtcgatctcacacgtccttgatcatcttccctaatccatggtcattacactctttttcccttaacatagttttctccatgcggttttctatgttaaagttttttaatgaggtaatgtatcatgggttccaagcttaaccaattcatcataggctaagcttgagggggagtatcagtcaagcaactcacatggaacatgggcctagacttcaataaggagaagataagaagcttaaccaattgagcccatcaagtccttctagagttgcgaatagagccgttagaagggagaagagagaagagttacaggtagtctaaggtttcacctaaaccatggtcaagtcactatcaacctagagatcaagtcttctcctctctcttcatgtcactttcattcgatttgtttgttgtaaagggaaccctagtgtctccctatataaaagggttgttccctacattgtaaccaatctaatctaagtaaccacttcactttctaatcttggctcttctcttctctataaactccatacttcttcatacttctcatactctattccgcatattctaacatggtatcagagcatgttcttcgattcttaacatgctaaatctcttctacttactctattctacttatcttctatctacttcttaaatctacacatttctcttcaagaaacactctattacccaacggttaaaagagtgcactcatcatggagactccaaaaccggcgatcttgaagggagaaaactatctcctatggaagagaactacaaaaacagtgttatgttgtcgagggatttggagcatgttgagaccaaacatgttcagtttaagctaccaaataagacggcagtgaagggttcaacagggaagaagaagaagcggagatcgag

SEQ ID NO: 15750 - DNA, 338 bp, Arabidopsis thaliana
tatatggtctgctggcagtatattgagaagaaagatagtgttttgatcactcacaaggttcttacgagtgtttgccggaaagcccaaatcaacggctctcttttatgggcttctctattgtaaaaggcccatatgaccccaaaatacaaaggagcgggaagtagacgcgctcattgttcacaaatcaggggcatcgacggagacgatgatacggctacggacactgattgagaaaaatcgaagcgaaacagaaaaaagatcgtctcttctactctcgattcgttgcctgagggatgcatttcaaacataatctctttcacaagtcctgaagacgcttg

SEQ ID NO: 15751 - DNA, 362 bp, Arabidopsis thaliana columbia
ctgtcccacctgcaatttctactttgactcttcctcgtaccttaaaagatcgagactttcgagctatagttcgattatctctcgtgggtctcctttgtttgtctctagctttggatctatgaccgttaaaagattctctagcagagtcggaagcaggagcaatgacggtaacgaacaatttggagcgttggagcaagaatctttcatcaacaactcatcggagatacggaaagacttggtcaccggcggtgggattgaagccattgttaatcgtctggttagttaatggaaatctcattcatgcacgcaatgtgttcgatgaaatgtttcttcagtatcaatgtgtgtttctttctgaccgg

SEQ ID NO: 15752 - DNA, 486 bp, Arabidopsis thaliana columbia
agagaaaactagcgacgacgattcttccttcaatcaatttaattctcgttaaacccttctctcaatccaccaccattcccaaaaaacaggatcgagttcgtgaccatggctacgacaattacatggaagtggagaaaaaaatccgcaaagtcgtcaaatttcacagcttgattctctctcaacccaaccacacaatcgcaatctctcttctagacacgctcgctcgtcgtctaggtctcggcttcaagcaacacgaaccaggtgcttttctcctcaagttcccacacgtgtttgagatatacgagcacccagttcaaagaatcctctattgtcgattaacccgtaaagctttggatcaaatccgtcacgaacacgaagctgttctcgaccaaatacccgacgccgtgacccggttgaggaaactcgttatgatgtcgatacgggtcggatccgtcttgaacatgtcaggattctcggactgagttt

SEQ ID NO: 15753 - DNA, 718 bp, Arabidopsis thaliana
acatgtgtattgttgtcttgggagagcttggccaaaccaaaatctgcaacctggagattaattgaaaaacaaaatattgtcaagagagaaaattgtaattacaagtaaagagtagaagaaacagaatttttaggtcactaaagtatataccttggcttcgaagttatggtcaaggagaatgtttgaagctttaatgtctctatggatgatttttggatgacctaaccacaattttcaggtacaaacatgtaaatatctttggatttatttagagttaaagtgaaaagatgaaatgagataaatcactcacaatcttcatgtagataagcaagaccttttgctgatcctaaggcaatcttgagtctggttggccaatccatcacagtcccacttttccctataattcaattgatttttttatgaaaattttgtgttagtttttttataggtcataatccttaccaagaacacaagaaaactcatcattaattaccatgaaggtggaactcaagtgtgtcattagggagaaactcatagaccaacaacctctgtcctcccgcattactgcagtatcccacaagagacacgagatgtcgatgatgaacgcggctgatgatctcacctctgcctggaactctctctcgccttgcccgctacccgctttaaggctcttcacgctatctccttaacatttggcaagattcctttgtgaacatat

SEQ ID NO: 15754 - DNA, 1192 bp, Arabidopsis thaliana columbia
  unsure (1)..(1192): unsure at all n locations
cctaaggatggattcattgataagggaaactctagggttcatcaggtagctaacaggtgaaaggcaaataccctagacgatagattcaaaattgggtcaatgcactatcgtgacagagaccctcataactctaccacttcctaatctcaactatcattgatgaaacatagtagagcaggctttaagcaacaatctaccaaagtcaataagcagtctaaacaaccaatctcttgggctagaatctacaaatctcaggaattcgtagctcagacatccatttgaacgtcttttggacgctggatacctatggtctaattcccatattagccagcgaaaactgcataggagccaacgaatccagaagggatctaacctaatcttaaccacctgattaacctagagattaccctaatctaatccatcctcaagaaccctaatcactactcaagcaacataattaagaacacaaacccagaaattactctaaatatagcaaaatgtagatctaaacaagataaacaactttgctcagagaactaaatgcaaaaacgaaatagattaagcgtaattaaagtttcaagattctaaaacacaaagaaaaactaagagataaaagcttggtcctttggacaaaccccaaagtgacctatttatactgaaatctcgaaaaccttagatttactagaagacaagagacttgaggcggtttagatgaatgctcaatcttggggaacgagtgttgcaaagtttgcgcctttgcctccatgctccgagtgatcaattggtctagtagttgcttcttcctctcctattcttatgctctgatgtctgtttgagtggggaatgaggaggatcagaagacgctttgaacgatcaacaagtcttgtagagtaggttgcccttgatcgagtaactggtcgagtagaggatcgagtggagggtcgagtagtgttggctgcctcctctgtggcttcctggatcgagaaaaggggtcgactgaattgctctgctgctttcctcttggtttgatagtgtagagggtcgattagattccttgtaagctccttctacacctgaaaacacaccaaaacatgcaatgtatgcaagatgatccaaatacctaagtgtgcaaaataagctaaatgtgatgcaaatgatatgatcaatgagtgatactaagctanatgatgat

SEQ ID NO: 15755 - DNA, 1052 bp, Arabidopsis thaliana
taaaatggtttaaccttacatcgatgactgagtttcttttatatgacggctgagtttgtttatgttatggctgagtttctgttttgatatagctgagtctggtttatgttttaactgagttgttgttatgttatggtttgactgagtttctgttaagatatggctgagttagatttatcttatggctgagttatgttatgtgtggctgagattggtttatgttatgacacagttatgttatctatgcctgagttagatttatgttttgcctgagttatggtatctgtggatgagtttgttttatgttatggctgagttatggaatgcttacggctgatttatggttatataaatgtctgaagaccaagcaagggagtaccctccaagactttaccaagaggaggattctaatctggagggtaaaggcattaatcacaacataaagctgggagagttccctgcaattagagaatcaataggaaaagaaatatgggcagaactgaaagagacagagcttagattaattgctaagcttgttgatagttattttctatggtctggtaagaccgtacattatctactatgcagacaactgagaatactgaagaaggagctttggtgtatcgtggctggtaaacccatccggtttggattgaacgaatttcatcatatcacgggtttaaatatagatgaactgcctacagaaaagtttgtgcctgcagctgactacaaagcgttcttcagtgaattgcatgtgccaaccggtgaaggtcctaatctagatgaacttaggcagggcttagtaatgtgcagagcttggctttctgaaaagcgtagatggtttgggttattgactcttctatccattggactttatggcttgcatacaaactctaggataccatttgagagtgccaaaagagttttcgatgacgaagccatgaagacttatccatggggtcgggcagcatttgaagcccttgtcgtttctataaagttgttgaggcctattggcaagacgtacaccgtcagtggtctggtttttgtgttgc

SEQ ID NO: 15756 - DNA, 992 bp, Arabidopsis thaliana
agaaaaaataataccaacgaatctgaaaacattatgagtttaaaaattataagaacgtaccttagcctcaaaggattcatcaagaagaatgtttgaagctttaatgtctctatgaatgattctcggatgacctaagtcaacaaagtcaagaacacatattttgatcacaacctaatcaaaccactcaaaaagattgaattaataatttagatttttgtattgactcacagtctgcatgtaagtcagcaagtcctttagctgatcccaaagcaatcttgagtcttgtaggccagtcaagaaccttgccacttttaccatggagatggaactcaagtgtgtcattaggtaagaactcataaaccaacatcctctgtcctcctgcaatacaatatccaacaagagacacaagaaaccgatgatgaactcggctaatgatgtcaacctcagcctgaaactcgcgctctccttgcccgcttcccgctttcagactcttcaccgcaatctctttcccattgggaagtattcccttgtgaacatatccgaacccgccttgacctaacaatcttgattgggagaagccttgagttgcagcggctagctcgtcgtaggtgaatgtgctcttgttgaaacctagagccactgaagggtgaggtggtggtaccgacggaccatgtggtcctgagtagtttgagctaaagtcgctactgtttccattcataccgcctgagactggcggtggtggtggaggcggcgatggttgccagcttcctggtggtggtggaggcggtgaattcatccagttattattcccgttggatccaggatactgctgagacagattcattacgtgatcgctctggttattgtattgctgctgttggtattgatcacctaagataaaacagagaattgttttcaccttgtatcttggataacaagaaaatgaaagaaaatcatgataatgtttcttgggtaacaatattttggaatat

SEQ ID NO: 15757 - DNA, 594 bp, Arabidopsis thaliana
ccctaggattgttactaaaaacccaccatcattataatctggcttgacttagtagtttctgtacacatcttgattgctagcaatacagtggactggattgacaccccttataactacatcgacatgtttatgttttaggagcattgaactgaatctcacacacatacaacataagcagacctgaaaaacctccttatcaatttggcgtcgttgccaattcattgttgcattgttacatcaagatatcaaaaacttttaagatcaagttcttttacatttatcaagttactaactcatattttcgtctgcttgtttttgtggtataggtactaatctttgtgcatgcaaactcgatccaaaggttctgcacacctactaccattcagagacagaattgacaaaatagctcgtgagttacaagaaaccaaagcaaaggcagcctgtgatcagaacagaccagctgctatggatcaacagaacagaccggttgatgttcaagacgcacctaatgttgatcaaccaagagatatcggtgctcgagatgccccaaggaatcatcaccatagacctaggatagtgcctctaccagttcag

SEQ ID NO: 15758 - DNA, 603 bp, Arabidopsis thaliana
tagtaacgtccgccagtgtgctctaaagaaaataatcaaaggccggggattataagccggaacgaaagagaaatcgaaaggtattccatactcgccctcctcgggcgagtatgaagattacggtaccggattgaccaacagttgcccaatcgagccacggtccgccatttccagcgtctgactgttgaagtagaacgggaagtgcgcccaggaaggctgaccgaaataaacaagcagctccacttgtccgtcaacccaaacggtatctttccagcctctgtcttccgggaacggcatcgcgccattcacgttacggatctggaacattacgccttcaatatggaacgcttgcggctcgtccgcgcgtaccgtccagcgttcccacgttccttgctgcgcggtgacatcaatacggttgacgtcccacagctgtccattaatacccgggtcatcacccagactgatatcgcgactgcgaattggcgaaccagccatgatttcagttggcagcaagcgcatcggaagactgtctgtgaccagcggcagaaggccggttgggcgcagcgttagcaccagggtagaaaccagaatactggatggctc

SEQ ID NO: 15759 - DNA, 862 bp, Arabidopsis thaliana
cgagatgctctattggaagtcgatactctacgtcataaacacagaactccaagtaccccaaactcccgtctggcctgatttcatcgtcctctaactctccatataagagctattccacagatgaaagaaactgaaaagtctcttcctccattggccgaaaacatgtgaatattcaggctgcactgtttaaacatgtagtctacatcatcatagatgccgagtctctccatggtctcaggatgagagtaccgagttcctaaaaactcattgcgcttcagcagcttgtagtactcgtttcgagttgcacacttttctgattccaaatcatcatcgcctcttttctctgtttgatcatcttcctctggtgaacccatttcttccttggagtcttcatctaccagctccaacctcctccccacgggcttcttcccttgagtgatatctgctttgttccttaagaattctcttgtagaggtcttactcgaccttcgggatcgagtatttccagctggagagctgaaggtctcttcttgcatcacttcctcctcttggctcgattcactatgatcgagcttgaaacttgcttgttctctcatgctcgaccccaagggtgatgattcagaaggtcctcgagcagctgcatgcgaagaaggtgttgggtactcttcgatggggagagagctttgttctgaatccttgacaaaagcgagcgcctattcatcatcaagaacaaaggtgggagaaatcaaaaccaaaattcagtagattaggagattgaatgatggaggaacaatgaatttgtgaaaaagttttgataagaaagggaagtgaaggacgataagagggaattgtaaggatcgag

SEQ ID NO: 15760 - DNA, 966 bp, Arabidopsis thaliana columbia
cactcagaaacccaatcaattttgcaaacagaaatcgaaatcgaatttttcaaattttcccattttcaacttagggacttcttttttttatttgaattatcaattttgatttaatttttgtaatttaggggattttgtttttataatttagaagcccatgaaatatgtcaacaagcccaaatgaaataatcaatttcaatttgctagaagcccaattaaacgacaagcccatgacaatcccattttcctaatcgttcttatcaagagtacatatgggacaagcgaaaggtcacgtctccacttttctcgctctgttattttacacgaaacgagagaatacaagaactcgtactgtacaccggaaaagtgatggatcagcagcggatcatacagtccattagaacctctgcaccttcttctcctgcatctctgacaccttcttctccggattgttcttctccacccccacccccctcgactggttagttgtcgcgggtcgatcccaacgagagctggaattccctcttcaccgtgtaaatcttcctagagcagtcgagccgacgctaccgtggatgagatctcctgtacaaggagaaattgagctggatttcgtcccagaaccaagagatttcatctcgggagaagttgtgtatccgcaaaagttttttgcctatgaggttctatccagcgagatgtgggagacatgacaaatattttggtgtaaggtaaatgtaatgtgtttcgtagttgtttttgctaatgtggtttagggtttagttgtattgatggtttagggtttagttgtattgattgttagaagcgagaaagtaacatttatattgttggacaggtggataatcaacatgcagcgtatcgaaggcgtcacgcgcaactactcgttaagttgcaggacatggagagaggaaatgaggcgaatggaggctcatccgaaagattgggtttgtt

SEQ ID NO: 15761 - DNA, 637 bp, Arabidopsis thaliana
ccttccatcaaacttgaattggcttgcttctaaaggctcttctgcggtgaaagacaacctccagctgttcaggaggcctgtcctgtttattatcacaaacccttctatgtaatcgaatttgtggccctgggcagatattagttgctcttggtccttggcaaaagctgcaaaatccaggtataacactcttatccattttacctgtccattatacagagttaggaggacacacgcgtgttcagtttttaagttttttatttatttattgtttaccatggttggtgctggttccaatgctattcttgcccgcgttatgatgccaaactgacctaaaccaccaagaacaccattaaataagtcgctgttctgcctctttgtacagtttaggatctcgccttttcctgcagtcaataaataggcatgacattagtgggtagctattctcgggaatgctcttcatgttgttaatagtcaccaaccatatagactctatgctttcaacacacgaatactacaactctgaatcctcatctgaagatctcatgtcggtgatcgaagcagaagactcattagtgcgagtattcctctctgccatagaggatagtgcagatttggactgcgacacttcaacatatac

SEQ ID NO: 15762 - DNA, 624 bp, Arabidopsis thaliana columbia
ctctgtcccaaccacaccatccttttgacagtccaatgtcaaatcacatttagcatcttcaaaaccatcatttaatgcatcagagccaccagtctcttgatctattgataaggattttccttcttgcctcaaagatgtatccggagcccttgaaactctcttggagcgtatcttcaatgtcgttgagattggtggaaggctatctattagatcgtgccggtgggttacattttgagaactattagaggccttgtcatcagccactcgacttggtgacccatccagttctggatatcgcttcccaccatttggcaaaccattagagatcaccgtgtcagtgtcaactgccatgtcatctatatctgttttcaattccaaacaactaggtgctgtaacaccatttccacggtgatttgagtcttccttaacattattttcctttccctccgggtcagagcccataagttcatgcgatgatattgcttcacctcttattcgctttgttgtacgagccttaaccattccccatttgactttacttacatctagcccttcaaattggttccaggaacctcgagtctcagtacagccgttcctaaagttggacttggaacacacaagatg

SEQ ID NO: 15763 - DNA, 1230 bp, Arabidopsis thaliana
cgcatcgatctacaccgctctcctggcaccggtcagtactattacccatctaatgtattaccggtcagtgtctatagatcatgtttctgatataaaaagtttatgcttttgtcaacagttcttggttgctcaggtttccgtgaaggtatttccatttccatttccagacactttcaatatctaaaagtttggctttttcctacacatactttcgaaaattgtttactcatctttaaatgtttgtcttttctctttgtttgtggtcggtagatctccgtggcaccgatccaaatggtatacaactttctggtcctagctagtaattatatttagtattgagagattgggtgtttaaaatgagagtaattgtatttgtggatcagacccggcgttaaccggtccggtattgcagccacatccacttgcgttcccacaaccgactatggcctatgagtcgaagcagctcccaaacggcaaactattcgtgcgtgcagacatgccgggtgttcccaaagaaaacttcactgtctctgtcacgaatgggcgagtcaaggtgactggtcaagctcctgcggttagccatgattcaagtggccgtttctactctggtgacgtcgctatgctctccactcctgttgacattcccagccgtcggatcaagaccatcgccaagaacggtgtcattcgtctccttatccctccattttgatgatgaaactattttgtctttctagtatggtggaccctttctctgggatggtgtcgtttgttttgtggatcgtgtcgttttacgttttatcagtacttattttggtaatgtttcaacgacgcaacttatttttggtatgtttcgactttttggctagtttgttatcattttccaaagtctgttttgctatgagtatcaactttaagggccacataactcttttgagcatgaagcaatgccaaatgatttccactatcaaactcaatacacatcctttccacttttctatctgttgaaacatctctaattctctatacacacatatatatagatgacaaaaggggattttcagacctttgaatctctggatcaagtcttctttgtcatctttgtgatttcacaaactaattttagcaatcatcgattgttctcaaaactaaaagtttggtgtgcatattcaagtaggggacaatgggattttagctaccaaacacttctttaacctgaggccatacactgat

SEQ ID NO: 15764 - DNA, 639 bp, Arabidopsis thaliana columbia
ctctagaaaattgctcaaaccttgtctcaagtgggtaaagagcttgatccatgatttggataaagtagtcaatcctaaagctctcctcgggtgataatatcacacttccctccatattttctgattcttcgccataatgtctttttcttttaatcacccgctttgcttttctggcaaatataggatcaatctccaaaggaactacaatttctttagcttccacttttgctttcttgaagcctgactctctatattttctaaaatatgaaaccaaccccttgagttgagaaatcgctacatcgatgttcatgtcttctgactgtaaactcttagtcatgatgttaacaacagatagaagattgtaccaaataaccatggaaactaggaactcaaaacttccaattccctgtgtttcacttgttgcaagacattcagcgtcgctctgctctttcggatcatcactattttcagctatgtacattaacgcattcatgattttagaagcctgaaatcgtattgcctttacactttcaacatggctacccaatgagtctgtgataaaggcttaagagttaggcacccacatgaccctcaatagtttccacgcttactgaagatgaaagaagaataagtcaatga

SEQ ID NO: 15765 - DNA, 582 bp, Arabidopsis thaliana columbia
actctagacgaatagcaaaggatgtgtgagagggatcatcatcaaaaggctgtttagatctctccacgattgcgactgagagtgccttgagccaagttgtaccggatttggggaaagacgcgagaataatgtcggtgtcttgcggctggaagtttctttggtagttgatgactgcttggagagtgttgtggtaataccaacatccttggtacttgcagagcttcacatgagaatcttggtatgtaggaagtgaagagatcagagtttttgtttcttcacttaggttgtcgtctctcgcgatcacaggaagatcactttttccagccatttctttcttaatatgttgtacacaaatgtgttgtttcaatatgcaaacatcacctatatgagtaactcaagtttcttgttggatgaatattttagctttaaaatagtaacaattagtggtggttgagagaatatcttgatgttaaatatgtgttgtggttgtcgtctcttcattgcatagtgcgttttaaccaatttatttgttaatttgtgctactacaacatgttttatttaaaatgcgaacatattattta

SEQ ID NO: 15766 - DNA, 490 bp, Arabidopsis thaliana
ccgaggatctctagagagaagaagattagtggaggtaaaaacagaccactcctagctacgtcagtgtgtggagtcaccatccttagatttgaaagcaaattccatgcctgaaccatcagcaggtggtggtggtggaggaggcaaagggttggactttaacctttcttcaatagcagtttcaatcttttccatagcctctctgtctgcttccctttcttcatcagttaggacagcagaattcgcaatatcgatgttttctttaatcttcgattctccatccttccctgtctcattatcagcactctcaagcttgtcttgctcactctcaggaccttcagcttggttctctttggttccttgactttccttggctttctttgcagtctctattttcttctcaacatattttagcaaatactcctttgttgcttgattaacattcacctaccgaccatatagaagaaaaaaatgagaataaagctaagagaat

SEQ ID NO: 15767 - DNA, 368 bp, Arabidopsis thaliana columbia
  unsure (1)..(368): unsure at all n locations
gctccattttattttcccattgaagctatggttctacagggtgctgaaatactgttttatcccactgctattggttctgaacctcaagaccagggattggattcgcgtgatcattggaggagagttatgcaagggcatgctggagctaacgtggtaagctattattatgtcttaaacatctcagttttcaaagtcattagtgtcttatcggattgctatgagcctaacttataactgaaagctattttacagtaacattagaaatagattacatgtatctagtttgttccgttatttctactgattagaacttgcctnaatgtgcctcaaatggtttgctaatgagtgaggcaataatactttgggtt

SEQ ID NO: 15768 - DNA, 517 bp, Arabidopsis thaliana
cgaccatatagaagaaaaaaatgagaataaagctaagagaataccgtagaagcatacctagatattggttgacacagaagtgcatctattgaagaaacataaatatattttgaaatgagaagagaaatccacaattaccaaaagctcttgtccatctatagtacgttgggtcagcaggcgtattgcgcggagaatcccttcagctgattcaaattcatagaatccaaaacctttaggtttcttggtggtaggatcttccgcacgtaaacagcttttgacatggccacaaaactgcagaaaaaaaatgacaaaatcaattcttataaaatgtatagcaaaagagatggaagtaagtgcctcgaacataaaccttaaaagtagtagaagaggaacatacagatagaaagaagaaaacaaacctcaagaatagacatcataaagtcattttccacggtagctatcttgccaatgtaaattgtggtctggggcttttctgcaggtgttcaacaggaagaga

SEQ ID NO: 15769 - DNA, 629 bp, Arabidopsis thaliana columbia
  unsure (1)..(629): unsure at all n locations
caacccatgtatctcttagtcaaaatgttagcactatacaatctcctgtttgttctatgaataaaggaaaccttgttggagtccgacagactatgttcaattcgccaagctcccttgcgcgaaatggagccagcagacaaaaaactcctgatgccgctaacactatagttcatccggaggatggggaaacacaactcgggaacgaagatcaattcgctattcgcagatcagcacgaacaagaaagcctcgactagttcgagaccatgaggaaggttagccgagaactgaaagaaatgagatcaaagttccatcagaccactagttcggaacctgatatcaatcgggtcattgaaaaagctaggtgaacacctttcatcccacaaattgcaagtttgagaatcataataacatgccgttttggcctatatggcgggacgaatgttacatttggtatcaaagtcggttaaggcactctggttccgaccggagagtcagattttaaaaaaacatcttatgaaaaagattttatataaaacaaaatttgagtgattgattatatgtgttgcttgatctatgactgattgcattgattgaattanaatatttatttgattaagtgaatttcata

SEQ ID NO: 15770 - DNA, 431 bp, Arabidopsis thaliana
ttcagggaattgtctaagagggtgaagcgtaacgagactgcatatgagaactaccataggatctttgtccctgaaggtaagccattgaagtgtgaatcaagagagccattgagagttaacacaatgttccagcacattcagaagatgctctctagtgaaaccgctgtgattgctgaaaccggtgattcttggttcaattgccaaaaactaaagctgccaaaaggatgtgggtaagtgtccagaaaaaaaaagagactctaatctttacacttattatagtgaagtaggcacaagatttgaacctgctttcttcattgtaggtacgagtttcagatgcagtatggatcgattgggtggtctgttggtgcaactctaggatacgcacaggcatcaccagagaagcgagtgttggcatacatcggtgatgggag

SEQ ID NO: 15771 - DNA, 858 bp, Arabidopsis thaliana
ccaagtcaaaaatgattccctgatagcagccacaacactaaccttcacaataggccacgcttcaatgaaaaactcaaccggaaaaccatcagggccctgagctttgttccgagacatagagaaaaggacctgcgtaatttcttcgtcagtaggaaccagagtcaactgagtcgcaagagaagagtcgcagtggaaggatagcagatccttgatcctgccaacaggaaagggagtgacattctccgacggagaacctagcaaatgagagtaataggcgaccagcatccctttaatttgatcaacgttctcaactctagagtcatcctctcctctaaggaacttgatgagattatttgcttgatgagaaatcacagctttatggaagaatctcgtattagcatccccttcatgaagccatcttatccttgatttttgcctaaagaaagactcaagagcagcagcgaagaaatcccattgtttacgcgcaacgtgctcttgtcgaaaaagagagtctgaggggacagtaagaagatctacttggatctcttcaagacgagacagcgcttgggccgtcctctgttggatgttactgaaccgcaacctgttcagcttcctacagcacaacttagcctgtttcaattgctgccttaaggtgaacatgtgagacccgatcattgtgtttcctcccaagcaacagccaaagctgccaaataagtaggatgagaggataggaaggagaaatacttgaagcatttttttgaaggctcaggctggttatcaatcataacaatacaagatgcatggtcggagacacccggagatcaaaaaccgctaatgcagaagggaaggaagaaaaca

SEQ ID NO: 15772 - DNA, 830 bp, Arabidopsis thaliana
agtcaaaaaaccacccatgtattcctcctagtctctaatccaacaactatataaaaacctctcccattctcattttgttactcatcccaaaaataaaaagagtatatctctcacacacatacacaaacttgacagttttttaatttctctgttagtgaactcaaaccttcccatttccatggacaccaaaatcggatcgatcgatgattgcaagccgacgaacggcgacgtctgtagtccaacaaacggcaccgtcgcaacaatccacaactctgttccttcctccgctatcaccatcaactactgcgacgcgactctcggccgtcacttagctcgtcgtctcgtccaagccggcgttacggatgttttctctgttcccggagatttcaacctcactttgcttgatcacctcatggctgagccggacctcaacctaatcggatgttgtaacgagctaaacgccggttacgctgccgacggttacgctagatctcgtggagtcggcgcttgcgttgttaccttcaccgttggtggactcagcgttttaaacgcgatcgctggtgcttacagcgagaatcttcctcttatctgtatcgtcggaggtcctaactctaacgattatggcactaaccggattcttcatcacaccattggattacctgattttagccaagagcttaggtgcttccaaacggtgacttgttatcaggtaatcacaaaaaatcagatctaattagaaatattttgaagattaattagcgtcggattatgaatgattttggttctgtttttgtttctcaggcggtggtgaacaatttagatgatgctca

SEQ ID NO: 15773 - DNA, 498 bp, Arabidopsis thaliana
gtcgactctatcggttttcgacgatgaccggttaattctaccacgttttcttgcttgaggaatgttaaatccatcagtacctaaaccagtatctatgtcttctttcttgcttccatatcgcgtacaaacaaacttggcatcaataaatttcccggtcattcttgaacgacgactagctttaataatggtagtaaaaccaacagagttagcatattctttgtagaactcaaaagcttcctcttttgattcaaattctctcccttcatcaatctctaagttattcttcctatgatcatctaactgcacattgctacactctcctgacgacatttcgaaatcaatacctgattagttaaaagtcttcacccctctaaaccaaagcttgtttgatcaaattatacctgttgaaacactatgatcagtttccaagttgcaaacttttatgaaaaacataaatttgagtatcaatggaccagatgaaacttataatcagcaaaa

SEQ ID NO: 15774 - DNA, 2617 bp, Arabidopsis thaliana
cctaatcatttctgctcctgttggtccttcggatgcttctattggctctgcttcagctgctctggtcgatcttgctgttgtcgatggttcttatactccgtcgccggttggtttaaccctctcggtggctctcggctcagatgggtctagcgctgcacatggtcttgggcttagtactacaatctctactggtattattggtggtgctccagctgctaaggttttctctgttgcggattctcctggtcttactgctcctgttgttggcacactatctggttcaagcacattgttagagagctcctccaatgttgctgctgctgctccctcttccatctcgttgctgtcaggagataacccttcggtcaaacctccgagcaatccctctgctaacgttacagagccttctcctacttctgatctcccttgggctaccaaattcaaggcttctctccgaaacctgaagaagatgagttctccaaccttcatggaggacggaactccggttgtgattgctcctccttccgtgttgctgaagacggctgagttgtggaaaggccatgtggtcgcccagtttcacgggctatgcccctctgctaatcgaattttctctgacttgaatcctatatggggtaatttcggcgacattacgattagaatagtctcagacactgttgctctcatctttattcctgcggttaacactcggctctgggtcacggatattggcttctggcaggctggtaactgctcatgcactgtttatccttggtctccagaaggactccgtgatattaaggagctcaaatcagctcctacttgggcagttctgaagaatgttcctcctcagttatactctcttgaaggaatcagtgtgattgctagtggtattggtgagcctctgcatactgaaaagtcgaggttagatcccataagcatcggctctactaaggttaaggtgattatcaacttggatacacctcttccatcagctattgttatccgcgacatccaaggcaattcttcccgggtcgctgtggaatatccgagacctccccccaaatgcttgaactgtgggaagtatggtcacttgttgagtagatgccctctccctctgtcacaaaagctgcccttcaagaaggatcttccttcgggatcaaaggaagttttacattcctcaactttcctggctggtgctcctgcaaccctcagcttttctgctccagtgatgacaggtgatggtgttgatgccaagataaaaccaaaaaaaaggagatcaaggtctaggtctctgaaacgatctaagagtactcctcctaggatcgctgggtctcttgataccttgcagctggttcaaacctccattagaaagaaggaaaacagtcggaagtgggttcctaagtctattgttgatttatccgcctctttgcctattaactctcccatcactattgattcagagatacctagtcttaaggcgtcaaaacctgaacggtctatgagagattctattaaggatcctgatcctgagttccctcttccaactggctgactgttatgtctaccaagtcaaagaagaaggaactcaagaagtggcacaatcgaatccgttctgcgggtctgggagctcaaggtactgatcgaggtgagtcctcgtgcggttccttacctcactgaaagcttgctttcaccttcaccttttgttgtgtatatgaaggttttttgttggaatattcggggtctaaataatcgcatccgtcagagagtggttcggaggtggattgcttctaataaccttcttgttgggtgtcttttggaaacgcatgtggcagaggcaaatgccagtgcggttttggcctccaccctaccgggttggaggttcgatagcaactattgttgctctgatcttggaaggatctggattgtttgggatccttcaatttcagttttggtctttaagcgcacagagcagctaattctgtgtagtatcaagttacctgacctgcctcaatcttttgtggtagcttttgtctacgggagaaacaccgatttggaaaggagatctttgtgggatgacatttctaccttggcctcttcttctcccctttctcgcaccccgtggcttattttgggggattttaatcaaatagctgcgacaaatgaacacttctccattatccagtctactttttccttaagaggtatgaaagatcttcagatatgcatgagagacaatcttcttgctgatatccctagtaggggtgggtttttacgtggtcaaatcatcaacaggacaatcctatcttgaggaagttggacagggctttggcttctggcacttggttctctcagtttccttcggccttggcagtgtttgatcctcccactgcttctgatcatgctccctgcattgtgttaattgaaaatcagcctgctgtctctaagaaaagctttaagtacttcttctttctatcttctcatcccacctttttggcagccttgattttggcttggagagataacagcattgtgggttcgaagatgttctccttgggcaggcatatgagggctgctaaaagatgttgccggaacttgaataggctccggtttagtaata

SEQ ID NO: 15775 - DNA, 4616 bp, Arabidopsis thaliana
gacagcgtcggagaacccgggagatcaaaaaccgctaatgcagaagggaaggaagaaaaccactcatcattagccaaagccctgtccagcttccttatgatcggattatcctgttgatgatttgaccaagtgaagaacacacccctagtaggcagatcagagagctgattgtccctcaaacaaccctgaaaatcttccataccacgaatattgaaggctgactgtgtgatagagtaatgctcagaagaagctgctatctgattgaagtcccccaacagcaaccaagcggtatgagagagaggggaggacctagacaaaacagaaatatcctcccaaagagatctcctttcaatatcattattccttccatacacaaaagcaaccgcaaaggattgagataaattgggcagctttatcctgcataacataaattgatctgttttcttaaaaaccaaaactgagatggaaggatcccaaacaatccatatcctcccaagatcagagcaacagtagttgctatccatcctccaaccaggaagggttgaggccaaaaccgagtttgcattctcctctgccacgtgagtctccaaaaaacatccgacaagaagattattagaagaaggaccttcatatacacaacaaaaggtgaaggtgaaagcacagctttcaatgagaagaaggaccttcaaggtccttactagcagctaaatcaatagaacctgcctcagaagaacggagacgattatgccactttttgagttctttcttcttagccttagtagacatgactgtccaacccataggcaagggaaaactgggatctggatctttgatggagtcacgcatagacctcttaggttgagcagcttgttgaatagaaccagaaccctgaattactccaaccttgagatcagatgagatcgttcctggttttgcaacccaccttttactagccaaagtctgcgatgaaagagaagactggggagagaaaggtaatagagggtcagtaatccgtggaggagagctaagggatcgcttttttgatctagagcgcctcctttttgatttcgacaaaggtatctcagctgcaataggaggagaaaggtcgacacctctaactgagtcactacttccagctgccggaagaatattggaggaagagccacctctttggctcctgaaggagagtccttcttaaatggcaattttttctgaagagggatgaggcaacgactcaataaatgtccgtatttaccacaatttaaacacttcggcggaggtcgaggatactccacatcaaccctagcagaattaccctgaacacctttacaacaacagaagaaggaagaggcaagtccaccttgatcaccaccttaactttagttgaacctatattgatggggtctaatcttgatttttctgtgtgaagaggacccctatggcactagcaataacactaatcccttcaagcgaatagagctgaggaggaacactcttcaatacagcccatgtcggagcagtcttcaactcatcaatattaaggagaccttctgaagaccaagggtagactgtacaagaacagttaccagcttgccagaatcccacatccaccacccattggcgagtattaagagccggaataaaaatcagagccacagtctcggagacgatgcgaacggtaatatcaccgtaatttccccaaattggattcaaatcagagaagatccgggttgcaggaggacaagagccatgaaattgagctacgacatggcccttccacaaagcagcagacttcaacaagaccgaggaaggagcgatcacaaccggagtaccatcttccaagtaagttggctgactcatttgcttaaggttatgcagtgaagccttaaacttagctacccaaggaagatcaatttttgaatcggagctgggggcctgagaggaagagcccgaaataggagtcgaagactgaggaatagcagatcccaaagagagagacttggtagcaaccatatctgaggagccaacaggccctgagctcggagctaagagaggagctgagccaactgaaggagtcaaaatgggggaaccagcggaggagatctcggacactgatcccaagccaaccgaggaggaaattacagtaggcagaggctgaatggatgacccattcgcttcaatagctaccagaggagtaagagtagacgacttcgggatgagagaaacagtctccgaaataacctcgggagacaaggaattctcttccaagtcgaaaaccagaggaacagggagaaccagagccaaagagccagcgcagggaagaccagaggaaggaggcgaagcagatccggaaggagcagacgacgacagggggacagagccggactgagcgcaagccaaaacccgagcgaactttgaactgacaggaaggagagggatcttctttttcttcttagacatgacaagatctcaaccggcgagaagccggcgaccagcaacgcggcggcagaaacggaaaaaccctaatcgcctaaaagttggtcacattgtttatgtactcaaaatgaatgttgggaatatattaccggcgactctgttggtttgagatattaacaatgattcgaagagatagttttcaaggtaatcactaaacacgttagaatgtctggcaaaaaaaaaatttacacgttgaaatatacattgttgtttaacaacatgttattaacccttttttttggttttaatgttatgaaaacataacaacttgttctcacgcgttaacatgtgctcccacgttaacacattaataatccatttaaatattaatgaaatagcaatgttccatcaccatggagactttttgttgttcatgtgatactttataatgagcgtcgtaagtttactaacatagataagagtgtaatttatgagaacaagaacaatttgttcccaaatcccaagtaacagaattagtatgaatcgtttaactatataagaagcaaggaacaaaaagactcgcaatgttgttaaatatggccacatacacatgtgaagtattatggtatgggatcacgatgtaactctacccttgcgcgcatcacatgtaaattattgaattctaataatttatttcaagttaatacaagtcgtcttgaacaataatacaactgatcagtatatctttataaacaattaaaatatattattttcgtttctttgcacgttgaattaaatgtaagtccagagaggaaaatcagatgattaattctgtatgtctaattgaacattttataatataatcgtatgcattattcgtataaaaaactatataattactaaacaattttattacgaaataaactggtagtgttttgaatctactacaacgcacaaacaactatataatccaacagcattatactgctcacaagaaaaacaaagagagcttcatcatcatatcctaattattaagctcattttccaatggacgtccgaagtctaccaagcaacggcgtcgcaacaatccaagactccgctcccaccgccgcaaccatactcggctcctctgcagcgactcttggacgtcacttatcccgccgtcttgtccaagccggagtcaccgacattttcactgttcccggtgatttcaacctatctctgcttgaccagctcatcgccaacccggagctcaacaacatcgggtgctgtaacgagctaaacgccggttacgccgccgatggatacgctcgatctcgtggagtcggtgcttgcgtcgtgactttcaccgttggtggactcagcgttttgaacgctatcgctggtgcgtacagtgagaacctaccagttatatgtatcgttggaggtcctaactccaacgattttggcactaaccggattcttcatcacaccattggtttacctgattttagccaagagcttaggtgtttccaaactgttacttgctatcaggtataaccacattatcgaatcttgatcatcacattcttagattttgacagtgtgtttgttttcaggctgtggtgaaccatttagaggatgctcatgaacagatcgacaaggcgatagcaacagctctgagagagagcaagcctgtgtacattagcatcagctgtaacttagctgccattcctcatcctacatttgctagttatcctgtcccttttgacctaactccaaggtaaatataactgatcaatcctgttctcttcaagaatcaagctcaaagatgtgtggattgtttcttaaattaggttgagcaacaaggattgtttagaagctgccgtggaagcaacattggagtttctaaacaaggccgtgaagcccgttatggtcggtggtcccaagttgcgtgtggctaaagctagggatgcctttgtggagctagctgatgcttcaggctaccccgtggcagtgatgccatctgccaaaggctttgtcccagagaaccatcctcatttcattggcacttactggggagcagtgagcactcttttctgctctgagattgtcgagtccgcggatgcttacatcttcgcaggtccaatcttcaacgactacagctccgttggttactcacttctcctcaagacagaaaa

SEQ ID NO: 15776 - DNA, 983 bp, Arabidopsis thaliana
tccgggttgcttgggcgtatcctagagtcgcaccaacagaccaaccaatggatccatactgcatctgaaactcgtacctacaatatagagaacaacttttctcaaaacttgtgtttgtttcgctattgtcacaatgttagaaatgtcaaagattcagtttctttgttagacacgtacccacatcctttaggcagctttagcttctgacaattgaaccaagaatcaccagtttcagcaatcacagcggtttcactagagagcatcttctgaatgtgttggaacattgcgttgaccctcaatggctctcctggtttgcatttcaatggcttaccttcaggtacaaagatcctctcatagttctcataagctgtctcgttacgcttaaccctcttagccaactccctgaagaaatcgctcatcagaacgcaaccaaacgttggaccattagccacaacgactcgatcaggatgcacaattattgctttttctttcttgaggagaagagagtaacctacggagctgtagtcgttgaagattggacctgcgaagatgtaagcatccgcagattcgacaatctcagagcagaaaggtgtgcttactgctccccagtaagtgccaatgaaatgaggatggttctctggtacaaggccttttgtagaaggcatcactgcgagagggtagcctgaagcatcagctagctccaaaaaggcctcacttgctttagccacacgcaactttgggccaccaaccataactggcttcactgccttgttcagaaactccaatgttgcttccaccgcagcttctaaacccatcgtgttgctcatcctaagaaacaatacatacaatagtgagaaatctaaaacaaacgttgattcgatgagtctgtttagagtaatgattacctaggagttaggtcaaaagggacaggatcacgagcaaacgtaggatgaggagttgcagctaagttgcaactgatgcta

SEQ ID NO: 15777 - DNA, 1770 bp, Arabidopsis thaliana
ccgagaagaaagatagtctttgtttcattgaagtgattgttcacaaggatgatacgagcaaagagttgcttgagtggggctctcgcgtctcagctgctaatggtcgtcctcccaatcctcagtagaagcaagagaaaagaaacgaatcttgagtgtcgctcaagcatctatcgtttattggcaatctaatcacatcgctacttttgttctttctcttatgtctaattaagtactggtttcgattttttgaccgctggttttaattgattttgcttttaatatccttcatattagggaaccccttgttgacaaagttttcattataaacttcaatatttctgctttttcttaaacgtgaaatgaaaattgttgatggaatcaggatggaatattctaatcttattaatgcctttacgtgcatgtaaattattgagttccaataattatactaacttctcaatataaggtaataaaattcttgaacaatacgaatctagtatttctttaggttctttttcgtttctttggcagctacttaatgtaagttatatcatagttaagacgaaaatcagagacttaatgctgcattaatggttcatcttggcaaacaagttcaaagatacatatatagttaataacaaaaataaaataaaaaatccatgttatactctaatatagtttgaaaataaatttattttcatcatcttctaacgtaaaatgtcttttcgtatcacaaaaaattataaattttttagtgcaaaataaaacgtccgtgtttcgtgtatataagtatcaatttatataagtaaatttctatctgtaaaaaagtaactaaatgtaagatgacagcaagaaaattgcaaaaatatttcagtaaatctttatgcttttggcacaaggaagtcagaaaccgaatgtaatttgcactaatcaacatgtacaactatataacccatctaataattccaatttattactcatcatcaccactaaaataaatactaaaaggtttcattttcttcataataagctttccaatggacaccaaaattggagccatcgacacgtgtaagccaacaactggtgacatcggaagtccaccaagcaacgccgtcgcaacaatccaagactccgctcccatcaccacaacctccgaatcgactctaggacgtcacttatcccgccgtcttgtccaagccggagtcaccgatgttttctctgttcccggtgatttcaacctaactcttctcgaccacctcatcgccgagccagagctcaacaacatcggatgctgtaacgagcttaacgccggttacgccgccgatggatacgctcgatctcgtggagtcggtgcttgcgtcgtgactttcaccgttggtggactcagcgttttgaacgctatcgctggtgcgtacagtgagaacctaccagttatatgtatcgttggaggtcctaactccaacgattttggcactaaccggattcttcatcacaccatcggtttacctgactttagccaagagcttaggtgtttccaaactgttacttgctaccaggtattaacacatttcaatatcaactagtcttgatcatcacatatatatctcctttgcttagattttaactatgtgtttgttttcaggctgtggtgaacaatttggaggatgctcatgaacagatcgacaaggcgatacgaacagctttgaaagagagcaagcctgtgtacattagcatcagttgcaacttagctgcaactcctcatcctacgtt

SEQ ID NO: 15778 - DNA, 613 bp, Arabidopsis thaliana
tgaccctctcatccaacggtcattattcactccaaacccactctgcttcttcttcttccaaacatctctcagcagagctaaccatctctcttttgtaatggcttcacttatttcccttgttcttcttcttttgctcactttatcttcagcagagtccaagactttctggggtgacgtggcagctctcaaagacttcaagaactcagtggatgccaaatccatgagtccaggctcttgcctgagttcttgggatttctccgtcgatccctgcgacaatatattcagcgacacattcacttgtgggttccgctgcgactccgtcgttaccggatcgggtcgggtcacggagctcagtctggaccaagccggttactcaggctccctctcctccgtctctttcaaccttccttatctccagaccctcgatctctccggcaactacttctccggtccacttcccgactcgctctccaatctcacccgtctcacccgcctcactgtgtccggaaactccttttccggatccatacccgattcagtcgggtcaatgacggttcttgaggagctcgtgctagacagcaatccctctacggctccattccggcgagcttca

SEQ ID NO: 15779 - DNA, 769 bp, Arabidopsis thaliana
tattccttgttccatctcttcaaccctcagcttagcaagctccgagtcttgcttcgcctgttgttcttctgtttgtgccttgtccaaattaagcttcaactgttctataagtctctttgtgctttccagctccttaagcacttgcagttttgcagcctctgcagtttctgaatgtgttttgtactcaggaatctcctcatgaatctttttaagctcttcttcaataagctttcgtctctgcaaaaccatacacgaaaatatgaacaagaaaggcaacaacaaattaaaacgagaaataatccaaatgtatccgttagtacaatacctctaccgcttgcattcggtgagacttccagtcagtaattcctccaaattttgatacagcttctttaacagattcaaatggcgctgcggtatcgattaaacctcgatgtgagtccacatttttcggtgttccagtgctcaccggtgatcctgaaaatctaggagatgatacagttctaggtgacccccaccatttcttgctgtacccgtcgcagcctcggtaatcttgacactaggtaaaccaatctcatctggctccatcacttcttctacaattgttgtactcgtactatcttttccggttaacaccgcagcggttgcagcatcagaaggcgaaaacgtgtcatcgacataaatcttcgcattgctggtagtgtcacagtttgagattgttgagcccttcagtacagtttgagattgtgagctctcagtgcagttgagatgt

SEQ ID NO: 15780 - DNA, 1167 bp, Arabidopsis thaliana
cctttacctctctcgcacgattttgccataaaagagagaaatacgacgagtaacgtaactccagcaattaagccaactatgattgcaagtgttttctctatctcatcgtcatcattgttattacgattcccacctaattacatcccaaaaataacacatttttaacaatacaattatcaaaaatattatatgcataaattgtaaattctatgcaaagaagatggagaaaataaacgaaaaaaataaatcttgaaaataaaaatctcacataaccacatgactaagacaatacgttcgtaactattcgataataaaatatatataaatagtaaatactgtacagttaagtttttactgcagttattgattcagttaccactgttaacggctgttaatttgaatatctaattttaacaaaatttaataaaacgaaagttttaaaaagatataaaaattaatttagatattttttgagaaaattaaataatagaggtattaaacagacaaactaaaattagccggagattttttcgggtatttcccttaattaaaaactttaaaatcaaataaaaatctttataaaagaaataaaaagcaacggagcaaagaagacattaccatagccgttggctctagagtgacctccacgcgcagagtaacgcgcgtagcactttgctaagtacacgtcaccccaagcagctcctccgcaatccgttctcagccgtccgatcgcttccatcaaacagtcttgacactcagtcgcactaagatctccggtgcactgcgccacaccttgcagttcccccgacactcctactctgtatgaaccaccgctactcgccgctaaagaacccaccaccgagtctctacgagtcatctcgtccgagttataaccaaccggtggtccacaacgtcgaaccaccaccgtcttatcctcaacaccgaggaacgtcgtgttgtcgtatttaacgaaacagccttcgagctgcaacgcgccatcgcttgccatggcgcagagactccctagacggcttactgctcgcgcgacgcatcttgcacaatctcccgagccgcgagagagatcaccgcgacactggtacaaaccgtagacggaggaactgttgccggagattccgttggtggtgaagttgttgtatgtgtagagag

SEQ ID NO: 15781 - DNA, 1072 bp, Arabidopsis thaliana
agtaacgtccgccagtgtgctcaaccaaatagcttctgaacttctcaaatgcgaatacaatagctagaagctccttctcagttgttgcatatcttccttgagcctcgtctaacgttcaactggcgtaatatatgacatgaagcttgttctctattttctggcctaaaacagctcctactgtgtaatctgaagcttcacacatgatctcaaatggatagtcccgattaggcgcttgaacaacaggagcaaataccaaagcacccttgatggtgtgaaaggatttgaggcagtcctcatcgaattcaaattcggtttccttgcacaatagtctggttaacggcctggctatcttggagaagtctttaataaatcttctgtagaaccctgcatgaccaaggaaacttctgatgtccttcaccgtttttggtggctgcaactgcatcatcacttcaatttttcctttgtcaacctctatacccttctctgatatcttgtgacccaacactatgccttcattcaccatgacatgacacttttcccaattgagaacaagatttgtctcttcgcacctggtcaataccctgcaaagattcaacaaacatgaggagaaagaggggccatagaccgaaaaatcgtccatgaaaacctccaccatctcctcgattaaatctgaaaatatagaggtcatacacctctgaaatgttgcaagagcattgcataaactaaatggtattctcttataagcaaaagttccatatggacatgtgaaagtggttttttcttgatcattagggtgaattggtatttgaaagaaaccactatatccatcaagaaagcaatagtatggatgattagctaaacgttcaagcatttggtcgatgaatggtaaaggaaaatgatctttcctatatgtagcatttaacttcctataatcaatgcacattctatgaccagttatagttctaatagggatcaattcatccttttcatttttgacaacagtcattccacccctttttagggatgcaagggatgcaatgcactggagaaacccaagtactatcagagatag

SEQ ID NO: 15782 - DNA, 664 bp, Arabidopsis thaliana
gtttggacttgatccccgttggcagtctagtgacgaagtccatcgttatgtggtcccacttccattccggtataggtaggttttataacaacccacttggtacttgatgctccgccttgaccagttgacaagtcgggcaattggccacccatctggccacgtctttcttcattcctacccaatggtagtacctttaaggtcgcggtacatttggttcaacccaggatggattgagaactttgattgatgcgcctctcttaggatctcctcctttaatgccctatcgttcggcacacatactcgaccgttcaccacgattgtaccattgttcgaggtttggtactcggtcttgttgtttagtgcccatccttttatctccttgtcccgttcctgagccagccggatcctactaagcaggtcggcctgatcggcggctcccaaccctaagggttcaacttctttagacaaggcattcacatgcaatgtccccatcatgttaaccaagtccacttggctccgttccgcctcaacttccgagcgcctcctactcagggcgtcggcgactagattggccttgcctggatggtacgctatgtccaagtcgtaatccgcacaagttccatccacttctttgccttagattaactccggctgggtgaatatg

SEQ ID NO: 15783 - DNA, 1303 bp, Arabidopsis thaliana
cgacctcatattctccaaccgaatgaatccgcaacttagggggtctcccagcaggtctttttgtttggggaggcattaaacacagtgaccttatttcctgagggacttcaacctccgatggattgcgtacagggagtattggagcttggaccgttggtgaccacattgtgagcctatgcatctctccaaccagggttctgaattccaaacccctatcatgacacgcagccattgcgtgtgcacatgggattctaattgtttgaaactccaagcaagagcaagactgctgttacaaagagatgtgaaactgctcaccgtcctttgcaacaactttgaaatcccaactgccaacagccgaaacagacatccccaaagcacctttaaaccgcttcataagttccctttcaacagcaatgggtatgtcgccaaccgttctggatatttttttcctcctagattcaaaccacctagcaagcattttcctaatgaattcaagcaatgcaacaacggggcttcccctagctggtagtaacgcattgtttaaagactccgcaatattactagacatcaaattatatctctctcccgtaaaatgaaccctactccaattcgcaacacccattccttcaatgtaattccaacaggacatactcctttttttttatcctgtcacgaacaatattaaaatcttagagacaaaatgcgtcacctgcttgccacactagagctgggaggccactcttctttccataccttcctttaacattccttctgatgtggaccaaacaagctccatggtgtgcttgagggaacacaagaccaacggatttgaatattgattgattccggtctgagacaaatgtcaagtcagggccatcttttattatttctgagagcttattcatgaaccatgtccaagaatgatctgtctcgctgtccactacggcaaaggcgattggaaaaatctgaaagtttgcatcctggcaacttgcggtaagaagacagccaagatacttaccaaagaggtgtgtaccatcaacgacaacaaccctccgaatatatttcaacctttttacactagcccccaatgagaggaaaacatacttgaatcggtcatccccaatatcatccaactctgtttccaaatgataaactgtgccagggtttgcaagttgtaagacatgaagataaaccggcaataaagagaaagagctctcatcagtgccttgagctgtctcaacagccaattctttggcttccaacattccagtacgtcatccgacattgtgctcctaagaagaga

SEQ ID NO: 15784 - DNA, 704 bp, Arabidopsis thaliana
acttgtgtgagatgtttgtgttgtgtctctagtgtttgatataaagttctcgtaatcttggcagcttattcattatactttgtgtctgaattcttttgaactttgtttctcatggtttttttgttgtgtccttgtaagtttttgtaatctttgcaggttgctccacgaaagaaagaaaggatttatggggttggatctctgcagtttgaagcatcctcagcccatagtggtccaacgcttcctagtgatgatccggttatactttctcagaagctggctgccgctgaagcatgcattcaatctcaggctgagaggatcaatagcttcgacatcctgtttgactatcttgctgataaagatcctgctttagctgcaattcttcgacgtggttcctcgacacagacaggacaggccaacgcaaatgctccacctgtggctactgctccagaacagcaggtggctaatgaggagacaacagttgctgccctagctaaccttgcaataggatcctctcctccatcaactgtattttgaaaacattgtctttcttttttgccttcttatctctttctttagaacaagttcttatggtttcaaacaatttagtatacattttttacttatgcaatttcagcttcaattgtgtgttttatctctttagaacaagtttttttatgaaatttcagctttgaattgcatacaaa

SEQ ID NO: 15785 - DNA, 751 bp, Arabidopsis thaliana
  unsure (1)..(751): unsure at all n locations
gtcgaccacgacattatccttacagagctccagctatcctgagggaaacttcggagggaaccagctactagatggttcgattagtctgtcgacctacatccaagctcagagaagcgtaagagactcgtgatcggtgtgtataacaaactccttctaccataagtcatgctgcgatgtttgtaaggccggataatttaatgtggcaccaccgagtttctcactaaagtaggctctgagcttcttctcctgcatcaaaacatctccaatacctatacctgaggcatcacattcaatttcaaatgttttaagaaaattctagtaaaataaaaatatgttagtaagcttctctttaagtgcttgaaaagttttctcttgagtttctttccatttgcaccccacatctttcttgattacttcgatgagggttcggctaaggtgctaaaatccttgacgaagcgcctattaaaaccggcaaggctgtgaaagctccaaacttctccaacggttttagggctaggccactccttgattgccttcactttctcctcgtccactttaacgccatctgcacttacaacaaaacctagaaaaacaagattatccgtgcaaaaggtgcacttcttaagattcggaaaaagcttctcttttctaaggactttcatatccgattctagatgatcaatatgctcagtcatgctcttgctagaaaccanaatatcatcgaaataaaccagaacaaattgacttatga

SEQ ID NO: 15786 - DNA, 622 bp, Arabidopsis thaliana
gtgttgtataaaatatataatcaattgtttgtgttaatgtagtatttaagaaattgtacttttttcttttaggaattagataatgttaatgttttgttttgaaagaagaacaaagtaagaacgaaaaaacagagtatgaatgtaatcaatcttattgacttgattgtattacaaaactcgattgttgtgatgtgttacagaaacaagactcgatctatacttatatgaaacgaaacactgtggtgagaagacacgactcttaatgaaaagacataacttataactcatgactcttaacttaataactaacttatacgaatgtgactttgacttatacgagatttgattatacttcaacactcccccttaatcatatctcggcttcactccaagcttccttctgagattttcaaaccttgtaacacttaacgccttggtaagtatatccgcgagttgatctgctcctttgcaatactcaagttgaatgagtcctttgtgctcagcttctctcacgaaatgatacttgatttcgatgtgctttgttcttctatgttgcaccggattccttccaatcgctattgccgacttgttgtcacataagatgggaatccttctttgaact

SEQ ID NO: 15787 - DNA, 634 bp, Arabidopsis thaliana
ccatttgtcatcactctacatttttaggatagttttgcatgcatgttgcatatttgtgttgatttgaggtgatttggagctgttgacgagctaattgggagaagcggacctgatcatgtcaaaccacttgacccccaggtcgagcagatgctccacgacatcaaagggccacttgaccccctggtcgagtagaagacttcaccactcgactacctggccgagtaccaccatgagagtcactcgatcacttcactcgaccaccaggtcgagtatcatcacctccacaacctgaccatcactcgatcacaccactctaccacgaagtcgagtatcaccatcaccatcactcgacaacatactcgattgccagcttcagagtcttctccatttcgcactcaaccagacactcgagcacaaggaagaaaagaagactccaactaatcactcgacctctcactcgaccacctgggtcgagtactgttcttaatccgtcccaatactgcgtcgttttgagtattacggtttcagaaatatttcgctataagtagcatatactttacattttcgtagggctaagttttattttccgcatacattgtgctcttgacattttgtaatccggatttctcttaat

SEQ ID NO: 15788 - DNA, 538 bp, Arabidopsis thaliana
tagtaacggtcgccagtgtgctctaaagttccagcccgtcaggcccggtggctgacgttaactggttgtggtggttatagtaaaacgccgatgccctgccatccggcgtggttatgcgcgtgatgaggcccgtcaccacatccgggctgtactctgttgtcctgcctgcggcatccgtctgtgccctgagcctgcccacggcgtcaaactgactctgcgtgacgctgccgtccgcgtgttcctttttcaccacccgcttcagcccggcttcgccctgcgtgtgcagcacttcacggcggtccaggctgtcggtgatggtgatgcggtctttctcatactgatacgtgtagcttaagcctgccgggtttagctgttctgtcacccgcccgtcgctgtcgtaacggtaacggatttccggccggcccgtgtgacggtgcgccaccatccggccccggtatttatcatcgtaagtaaagctgcgcacctgtttgccactacggtcatacaccaccgctttacagcacactggcggccgtta

SEQ ID NO: 15789 - DNA, 1094 bp, Arabidopsis thaliana
  unsure (1)..(1094): unsure at all n locations
atccccttcttggttttggattgtagtatcttgaaagtgactaggatgatcagctctggttgtgcacgaatctgttcttgccaccacgtcacattgttaaacaatgtcagccacttgtatagtagcatgtaatgaggacttcttctggtcaagatgcacttcgccaagtattgaagcagatcctttttgtgaacaaggacaccaatagtgtaaaggtgtgccaaataccagaacactagatatgcttttattgaaaatcttctatagtgaaccggattcaggtttatggtggtgagaaatggatacatcgggtcataagataaaccaaggagtggtccttgatcaagaccattatccagcatcctctcccgtaagccttgtggcattcttgcgatcatgcttcttaaaaacctattatccatttggcgccgttgccaattgggtgtttgtttgttacatttgagatttcacacttgcttagatcaagttctttttcaattttcaattcagttactaactgtgtgtttttcttgttgtcttcttgatccaggtacaactctgctgcatgcaaactcgatcaacagacaaccagaacctcctcttcaacgacaacttcgaccgcgtaactcgcgaactcagagaaaggagaaacacagtcaaccttttaccctaacaaccactcgaaatggttgacgaacaaaatcaatagaatggccctgccaacattggtgctgaagatgcaccacgagatcaccgtcagaggaaagatattgcacctccttctatccagaataacaacttcaagattaagagtggtctcatctcgatgactcatgggaacaaattccatggtctgccaatggaagattccctcgaccaccttgatgaattcgataggctttacaacctaacaaaaattaatggtgtcagtgaagacggatttaagttccgtttgtttccattctccttgggcgacaaagcacacatctgagagaagaatctaccacatgactcaatcaccacctgggatgattgaagaaggcttttctacaaagttctcntccacgccagaactgcaagactcagaaatgaga

SEQ ID NO: 15790 - DNA, 622 bp, Arabidopsis thaliana
catacaactaaggtcaggggtatgttccaaagcagcagtatcagggcaactatccacagcaacttccaccacttgggttcacacaacaacagcaacaaccagcttcaacaactctagattcagacttgaagaacatgttacagcagattctccagggacaagcagcatgagcaatggatctcgccaaaaagatggcagaaatccacaacaaggttgattgcactttcaacgatctgaacatcaaacttgaggcacttacctctaaggtcagatacatggaaggataaactgcgtcgacctctgctcccaaagtaacaggacttccagggaagtccatacagatgccgaaggactacgccatcgctcacgcaatcattatctgtcatgatcgagagctacctactcgacatgtctccaactcaatcactgaggacagtgatattcaggacggggaggcttctactcagattgaaatttcagttgttggactcgaccattcagatggatcccgttttcaaactcagtccaacctagacgagaaagcagccatcattgagaggatggtaaaacgatttaagccagcaccattaccttcacgtgctcttccaggtcaagagtcgac

SEQ ID NO: 15791 - DNA, 650 bp, Arabidopsis thaliana
aagtaacggtcagaggatccctgactctattagttcgattaagcagcacgagtggaaaggtagcgaaaaaaacaaaagcaagccaagctgacaggcccgaaattttcttttcccaggaagagaccagtgacttgaacaaagctcacgatgatgtccttgtaattatgttggatatagcgaactgcgaagtacaaagggtactcatcgataccggaagttcagtggacctgatttttctcgataccctcgtgcgaatggggattttgaagaatgatataagaggtgtcccaagcccacttgtctccttcacaagcaagacttcgatgtgacttggcacaataacgctccccgtcactgcacaaggagttgttaagatgatcaaattcaccgttttcgaccatccaattgcatacaacatgattctcaggactccgtggctctacgaaatgaaggcagtcccatcaacttatcatcaatgcgtcaaattcccaaatccgattggagttaagcaaattcttgggagtcagcgcacttcgaggatgtgctacatgattgggcacaagctcaaaatcaaatagcaaccacagcttgaggcagctctgaacgcgatcaaaatagtcggagataccctcgtggaaaaagtggttatc

SEQ ID NO: 15792 - DNA, 582 bp, Arabidopsis thaliana
ttatgctcatctttgtgtggttggttacagaaaccattgattcttgcactctcaaacccaacttctcaagccgagtgcacggcggaagaagcttacacatggaccaaggtaacaatcaaaagcttattgatactctcacaaaatgtaaatttgcatatatttgatgcaactatgaaaaaagaattgtgttttgattatagggtcgtgcaatctttgcaagtggaagcccgtttgaccctgttcagtatgatggcaaaaaattcacgcctggccaggttcgttgattttcttttaacattttttctctataattcatggctcatgtccttccaataacattcctttttcaggcaaacaaatgttacattttccctggtctcggtcttggtttgatcatgtccggtgccattcgtgtccgtgatgacatgcttctagcagcttgtaagtacaacacactccttttaaaactgttattaaaaaattgacgcattgtgatataacactgcactctctaagttggccctaaatgggtctatggtactagcctaaaagctaaaatacaactcttttctcataagtttg

SEQ ID NO: 15793 - DNA, 684 bp, Arabidopsis thaliana
gaacagtacttcatagtccaagtcagtccggaaggttggcaaagtgggcggtggagctaagtgagtatgatatagagtaaaaaagccgagttagcatgatggcccaagttttggcagatttcttgactaaaccactagtactttgccgcgccggagcaaccagaaaatcaaacttggaagttgcatattgacggatcttcatcaaaacagagatccagagtggggatcaagttggaatctctcatgtcggaaattcttgagtaatcattccgtttgctatttagtgcttctaacaatgaggcagagtatgaagctctaattgtcggacttatgttggcacaaggagttggagctgaagaagtggttgcttattgtggcagttcaatggagattataaagccaaagattcaagaatggaagcatatcttgaagtagttaaagatctggctaagaacttaaagaaattcgaactcattcgcataccttgaggagaaaatacaaccgcggaccgcttgcagtgatggcgtcaacgtcagatcctgacgtaaaaagagtcattcatgtagaatgcatttcggaacgaagctttaagaaggagaaagagaccctcgtcattacaaagtctcgagcagcgacacgtgatcatgatgaacttgagatagaattacaactgtcaagcggagg

SEQ ID NO: 15794 - DNA, 575 bp, Arabidopsis thaliana
ttccctggtctgggtcttggtttgatcatgtctggggcaattcgtgtccgtgatgacatgctcctcgcagcttgtaagtaaaaataaacttcagaaaatcaaacatggatactgataaagacacttaaagattctcaatgtcatctctctctcatgttttcaacagctgaagcattggccgcacaagtgacagaagagcattacgccaatggtctgatctacccgccattctcaaacatcagagagatctctgctaacattgcagcctgtgtcgccgccaaaacctatgacctcggttagttgaatgaaactgtcttaactcttttaatgagactgtctgaactctctaatctcaagttctaaaatcgatgtattgtggtgtaggattggcgtcgaacctgccacgtgcaaaggatcttgtcaagtttgcagagagcagcatgtacagccctgtgtacagaaactaccgttaaaaaagttttgttgaagaaacctgcagattatactattcacaacccttgatagtttcttaaggcttgtatttaagttttttgtttgtttgtttgttggttgtt

SEQ ID NO: 15795 - DNA, 1069 bp, Arabidopsis thaliana
gatctgtattataaattggtcgtaaagtgatgtaactcaactgtaacgtgatgtaactcagctgtaacgtgatgtaacttagccgtaacatataatttacaataccttttgtcttccctgaatgataactcagctgtgacatgtaatttaccaaacttttcgtcttccctgaagcatataactcagccgtaacatataatttacactcattctttcgtttgcccttgaacatataactgagccgtgacatgtaaatttacagatgtcttcccttaaacatataactcagccgtaatgttattttaccgaatctttcgttttctctagaacatataactcagccgtgacatgtaaattgactgaacgtttcgttctcccttaagcatataactcagccgtaatgtaattttatggaacctttcgtctttcctggaacatataactcagtcgtgacatgtaaattgaccgaacctttcgtctttcttggaacatataactcagccgtgacatgtaaattgactgaacctttcatcttcccttaagcatataactcagtcgtgacatgtaaatttgtcgcgaaacaataagagatgcaacatttcgtctaactttatcatcgagcgacaacttcacaagtttgtcgtgcgttgtttccgcatctatctgcacaagtctacaccctctttcctcagtgttaaatatgtttttgtgtttctatacccaattcccggaaacaacaattacggaaccggatcaaccatatcaggagaaggatgaaagaaattgaaaaaaataaggaaaacgatgaggaattagaagttcaggtgatgtaaaaaactcaggtgaagaagacgagttgaaaaattttggccctatttttttgtcctttgatgatgctctcatggaatgatgacatggaatattacatccgacgtcgttttgaattgatgaggtgacaagtaagcctccaaacgaacatttgataactcagccatcaagcaaatctataagtcagtcgcaacatgaatactattacagtaattaaaacaggtaagtcagccgtgtaatg

SEQ ID NO: 15796 - DNA, 525 bp, Arabidopsis thaliana columbia
tattgcggagtcaagattatctcgacagagccaagtgcccaacgtagaacttgatgaagacgatccgacaagttaatgggagcagaacctttgaaagccgctcgctttggcatacaatatacagatctccatccatggcaatgcatcttgaaacccgttaagatatcctcagtgaccgagccataaatccacccaatctgtgtagtattatatcatccaaaagcataatcagctttcacattaagtacagagaagagaacagagtaaatagctctgcttacctcttttccccattcggttttctcttcgtagccacagctaataacctgaatggatccctcaataaagacgctgggttcacattgctaggcactccaccatttagcagaagagtagaagctactaaaacctggtgattgaccaaatttcttctccagcttcagttgggcagtctcagagttattctcagcatttgtcactgcaaatcaaaccacatcatcaaccaaaggaggatgacataaagat

SEQ ID NO: 15797 - DNA, 586 bp, Arabidopsis thaliana columbia
  unsure (1)..(586): unsure at all n locations
tgacaaagtctgcaacttcagcaagatccagctttagagctaccaaaccacttttcccgcgtttcccaaatagcatatccggtttcacaactagctttgtggacgatagccatgactcctggttggttaactcagtgaaatccgtagattctgtcacctaaaagtatacaacaataaacgaatcacccatcatcagtagttctagtaatcaactaatcatgccatgtccaaagtcatcagtagaaagagatctttcccaagattctcactttcattagctctatctaagtccaagattactctcaataacattcagacaaaacacgattcattcaagagttccaattgaattgtgctatcgaatttccacaaagcagatcgatgaaaacaaaactagaattcgtgagaatgacctgagcagacgaatctgcaggtcaatattagcaagacgcttcaaatgctccttgagaagtctcttggagtcatattctctgatcttcttcctcgccatcgaattacaaacagtgatcgccacaacactanaccacggaaagtgtttcttgcctgaagtagctgagaagaaaag

SEQ ID NO: 15798 - DNA, 644 bp, Arabidopsis thaliana columbia
ctagaggataaagctaattttgatgattgtgatggtttagttatagctaagggttttgttttggtttgttaatttttgtgtgttttgattttttgtagagtgaagaaaacaaaggagagattgcctaatactgtaacagagttagatttgagacatcttgtgcaattggttgagaggaaagatggtggtcaagcttggattcagatgatggatcgttttactcctggtatgagataccaagcttggttgagagaacctaaggtaatatattacttgctcttgtgtgtttgagatagagagatttgtttctttttgttcttgatgggtcttttgtgttttgttttagaatggtcctactgagtatagaagtagaactgtgtttgaagatgcaactcctgtgatgttaagagactttttctgggatgatgagtttagaccacttgggatacaatgctttctaattccactactgttgaagagtgtccagtactggaccatgattgttagatggatcgcaaggttagtactctctgccctctagttacttacttgtgttgtacattttgatgagtggtcttagattgatctttcattcatgtatgtccggtgttcaagtcccgtcatctgcagtgatagagagtatg

SEQ ID NO: 15799 - DNA, 524 bp, Arabidopsis thaliana
cataagcatctgccattttaccagcattagcatatccacttagcaagttagtgtaatcaacaatgtctggctcaaacccagcttcgttcatttgaaccaaaacatatttagcttccatcatcttccctaccctgcaccaaccatacaacaacgaagtaaaataccgcaaattcaccggaaaccgcattctcatatcctcaaaaagctttgcagcatccttaacactaccgtgcttacacaatgcatctagcaaacacccgaatacatactcatctggctcaaaaccgaacttaggcatttcgtcgagcacctcaatggctttcttcaccatatccgcagacgcaaatctctgaaccaaaaccacaaacaattccggttcaatcaactgcggattctccttcctcatttcttcaattaaaccccaaacagctccaaattgacgcattttactaagaatcttcaccattgacttatacacttcgatactgtgacaataacgaggttgcttcgctgccagacgaaga

SEQ ID NO: 15800 - DNA, 499 bp, Arabidopsis thaliana columbia
tagatctagaggatatcatcgtttcatgtctttcaataaaggctgttctaattcttctatgggatttttttcatagttggtatccattgaagaagatgatcttgctggtttggaagatgtgagctctgatggagatgaaagttatgaagctgagtcaacagatggtgaagcagcaggacaaggagttcagacgggtcgacggccgtacagaagaaagggtcgcggtattaccacgtttcggatttaatttaatttgtaatggagctgaaaatgactgatattagaagtgtgcgcagtttattagatgagttttttttctatagataatttggaaccaactccgttgatggaaggtgaggggagatctttcagagtactgggtttcaccagagtcaaagggccatttttgtacagactttgatgaggtatctactttccattaaggcctttagacgccagaagctattctgtctagattttacagtttcatcccccgatg

SEQ ID NO: 15801 - DNA, 503 bp, Arabidopsis thaliana
gagtatcccaaattcggaggaaacttctctctcatatcctcaaaaacctttgaagcctccttaacactaccgttcttacacaaagcatctaacaaacaaccaaaaacatactcgtcaggctctaacccatacttaggcatttcgtcgagcacctcaactgctttcttcaccatgttagcagaagcaaacctccgcatcaatacaacgaacaactccggctcaatcaactccggattcgtcttcctcatctcttcaattaaaccccaaacagctccaaattgtcgcattttactaagaatcatcaccattgatttacacacttcatagctatgaaaataaccaggttgcttcgttgcccacagaaagaatctataacctagattcccagcatcgccacaacgactcaacactcgtatgatcacccgggtcgagatcaatacctgatcgttaagacaagcgtcaattttggactctagaaatggtgatccgcaaaatctgtaatc

SEQ ID NO: 15802 - DNA, 765 bp, Arabidopsis thaliana columbia
caacaaaaataagtattctgctccatcagacatatgtcaatgaaagaaaatactaaagtaagagaaggctcagttaaagtacttattcataaacatcaactcaacttcatcagctgcaccaaatatatacttccggaatagcctacattaaggatattgatatcatcaatcatcacaaggtcaaatccagagaatgaaaaagaatcaaaaggttctctcaacatttgactcccatctttcaaactctaagaataagataagacaaataggttctatcaaagcaatacaaaggtttaacaatttcattggctacaccgtatagaccatgtaaatgtgtatccactgctaaagactttcataatgaatactaaacttccccaatatatacaacttttttcacaacttaatctagattcaagggaagggaaatacctatcatcccagcgtgcaaggcggcatgcaagatgtgctattagttcatgaacggttctcggaatgcaggctccaccagcaataagcatttcctggtaagacagaaggaaccccagaagactgaaaaccagttttgactaattgatcaacgagtaaaggaaaacaatgattcacatcagacgaacaaacctggacttcagtcatacctaacacactaatgttcaaggcaaagcgtttcacgtgcaatgcagtcaccagacaattctgtgcttgccaagaccttaagacaataggtatgtcatcttcttggatgaaaggatcaccgctgattgt

SEQ ID NO: 15803 - DNA, 832 bp, Arabidopsis thaliana
caaccagcgataattgcactccaaggaccggtatggtatttcgaagcccccgaaaatactctaaagcagaggtctacacgtttgcatttagcatacatgctgatcaaagatgtttctataatgatatcggaataaacctgttgcctcaccgcccaaccgtgtaaacatttaccatcattcaccttcaaagcatcaccacacaccgaaacaagagaagctatagtcacagcattaggtcttacgccttcaaactgcatcaatctacacaactctaaagcgttttccacatctccatcttcagtatatccgttaatcatacaagtccacgtgatcacatcccttcgttccatcctgtcaaaaacaaatctcgcttcatccatacgaccacatttcaagtacatattcaccaacgcattcttcacctcaattttatcccctaaccgcttctcttccaccaacttatgaacattcctccccatctccaaatccttcaagtgaccacaaacaggcaacatagaaacaatcgtagcatggtcaagatcaacactttcattaaccatccaatcaaacatcattaacgcatcattcatataaccattcctataatacccactaatcatcgtgttccacgaaatcacatcacggttcttcatcacatcaaacacatccctcgccatttcaaccttcccaaagttcatatacatcgctaacaacgcgttctgcacatacttatccctaccaaaccaactcctcaagatcctcccatgaacaaccaaccccaatttcatcgatttcaattctccagcagctttagaacaaaagggtatgtata

SEQ ID NO: 15804 - DNA, 977 bp, Arabidopsis thaliana
gtaacggccgccagtatgctctaaagaagcacacatgtgtagcagcatcacacaccagtcacacaatgcagtggcatcacacaccaggtacacatgtacatatgtataacaaaatcacacactttgcagacatgtatacatgtatagcagcatcatgtacacaggcggcgatgtatgacgacatcacccgcattccgctggtcatcccgttcgccgctaagggagcggcgacaggtcgatacgccagtcagtcatatcgatttactgccgacaatgatggcgctggcagatattgaaaaaccagagattctgccgggggaaaatatccttgccgtgaaagagccacgcggcgatgatggtggaatttaaccgctacgagattgagcatgacagctttggcggttttattccggtgcgttgctgggtgacggatgactttaaactggtactcaacctcttcaccagtgatgaactttacgatcgccgtaatgacccaaatgaaatgcataacctgatcgatgatatccgttttgcagacgttcgcagcaaaatgcatgacgccttattggattacatggacaaaattcgcgatccgttccgcagttaccaatggagtctgcgtccgtggcgtaaagatgcacggccgcgctggatgggggcgtttcgtccacgtccacaagatggctattcgccagttgtacgcgactatgacaccggcctaccgacacaaggggtgaaggtggaggagaaaaaacagaagttctgacgataatgcccgctgatgatcacccggcgggcattattcaggctgcttaaaccagtgaaccgccggtcaggaaggaaaagataaggaatatcagcaaaatgctgcacacgatgccgataccaaaaagcaaggtatggaaagccagcgtcccgccgccaaaaaccagcgcgccgcgaatgcccagcgatttccttacgcataccgcaataaa

SEQ ID NO: 15805 - DNA, 547 bp, Arabidopsis thaliana columbia
agaggccacaaacaaaaggattagtctttacacataacaaacaaaaaacaagaagtgaaagcaacattttcaccaaaagaatagaacatacatcagaaggctggcctgataatttgacagcttctgaagtagcttcagcatagtttctttcatcaacaagcctcctcacttctgctaatgcttcaggggccttctggttcgtgtagtctgctggtactccagtccaaattgtgtcctctatcaatcaaaatccacaaaatcatcttagcggaaacaagattcagaaatgcttatgcttttgtagcaatgtatttcatttacacaatttatttcaagtctcaagcataatcccctgttcagaaacaagaacattgattgatctctgacaatagattttagagaacacagcagatagcatttattaaccaaatctccaaaataaaaaacaacacaaagaatgggagagaaaaggacaaaaatccaaaaaaaacggacgccgttttaacatttaccattgatgttgagaatccagaggagcgccgcccag

SEQ ID NO: 15806 - DNA, 570 bp, Arabidopsis thaliana
tcgcctcttgacacaggcatattctctatatttctcatacgcacgcatgctaccgggggtgtacctgaatgtgtggattttgatgttggcggcctacaaagtgaagtgaagaagctagtctcagctttaatcctagctcgcggttactagataaccgttgtgttaacgaatactcttttatccgcgtgtgtttatgttctcgcctcgaatcatgcatcttaaactctttgttgagattaactaagataatctccaaacgctttcgctacatttgtcttgtaatcatagtttctgaaatgtttgtatggttatcaattttttatcttgctaacaactgtacgtggatacagtttagctggctattagcaagattatcacgatttatttcattaccggttgctgagtatgattttttaaatattttattgggagtgtacggaaagagggagttgtcacgagttttatctggtaacgatcgtagcagataaaagaatatcctaaaactaacggcagctgggccatgcttagtctattaatttagctgtcaacgtatcaatcttatcaaattaa

SEQ ID NO: 15807 - DNA, 974 bp, Arabidopsis thaliana
ccaaaggtttgtccctctatggttgatcttcttggagttttcttgatgtcaaatttcaacttgatatgcctcccaaggttgagatcgactttcccatttctgacatttatcacagctcctactgaggccaagaaaggtcttcctaaaattagaggatccttagattcatcatccatctcaagcacaacaaagtcagtatgtatttctacttcattgatcattataggcagatcttctaacaggccaaaatgtctcctttcactcctatcagcaagaatcaaggttaggtcgcatggcttatatttgacaaatcccagcttccaggatgactgaagctcttaaatcacatagacagttgctgaaagctagttgcctaatagagcatggtaaagtgaaagatcctggatcttccaacatttcttgaacaatcttcttctggatgattcactacactcgtgacttaatgccattgttccttgaatttctttgatcctctctataatcatgtccttcacacgtttgagtaagtccgatattagcgcaagacagtctactagaggcattgtgatttcaaggtccttcaatggtttttccaagagagcttcatacttctttatcagttgcttcttgaatctccctgaaaatggtagtggaggcttgtagggtggaggaataaagactttatccttgttttagcaacgacatgctttttaacagaaagaggtactgcttgagctcgggatcgactactacgatcgagtatggactcctctattgctatttcagttggatcttcactctgaacgaaatcctctccttcccgaacttcacgtatcccagtgatagaggtaggggcatgtcgagttggcagctcttgatcatggcagatagtgatggcgtgacagtggcatactccttagggttttggattgctttccttggaagctcgcctgggttgttggtaatagatggtg

SEQ ID NO: 15808 - DNA, 724 bp, Arabidopsis thaliana
tttctaatcttttagggcatgacagagtttgtttgtagcggaagaccttttgattgcaacaagtcgcatagtctgctgtatgacttgcttgtttttgaaaacacttcccacatacaacggatgacctgacgtactcaattcaacttctatctcatcgactctaacattggctaaatcatcaaatacatgagcagcattagtatcgagaaactcattctcaccattatgcaatgtagaaaaccctttatacacttcgtaggcttcacatgttgtcactagacggtcgtcatattcaatatttaacccacttgcagaaaccccttctaggacgactataccatcatctccagttacgttctcagctatatcatccacatttgcagcagtgtacttaactaattcaccttcgcatcttgtctcttctgcacagactctagtgtacgtacattggtacaaaccatgttgacacgtcggggatggagcagaggttggtgtactgtcaaccaaaacagcagtgggttctacatgatgtacatgtttacctgtcgacgtacatgatgccaatagacgagtgaattcctttgggggttccacgatttgttgagtggcattcacgacgtcctcctcaacatgaccaattccatattcttccacaatcagatcaccccatttattgtaatcgtaatcttcgctactaccttcactaccgtctattgtagggtcg

SEQ ID NO: 15809 - DNA, 765 bp, Arabidopsis thaliana columbia
agacaaggaaatacggaatggttcttcgtaaatgtgttaactatttaagtgaagagagtgtaatttggtcattgtatactaacttaaatacaaaacaaaaaaaaaacgacgtttacactttttttttttgtcatctgcttttaattataactcaaaagagtcattcctgtggaatgttgtttacataagtgatgtgatgcgattcagaacggacattccgtgccaaattatccgcttttacatttgcgcgtcgtgagattaaagataaagagaagtttgaaaactcatccttgtcgctctgaaattcctagaaatatcctgaaaatgctggccattcggttggggaagacaccatcttcccaggtctgaacagtctgtaaagaacgctacatcttagttatctgcaccgatcatacacttcatcccccaaagaagagcttcaacttctgtatgtaatggggagagacttctacggagattagtagtgcccatgcttgaggtttcttcatttgatgatgtacaaaaccatcctaatcctgaaaactgatcactctctttccaagatccgtctacaaaacaacgaagtcctgcataaacattatcatctgagatatttctcacacgagttcgtgattccaaaaaagaaaccggattttcagaatgtagctcaacttgagctgatttccacgattgtgcttctttttccgctaaacttaaaatatcaagtggatctttatccacattatcaaaaagctttgcattccg

SEQ ID NO: 15810 - DNA, 873 bp, Arabidopsis thaliana
ttttttaatggtttcacagaaatatcttgaagctcacttgctacaattgttttgcagattttaaggaaacagaagcagtgaagatgttctataagggaaaggaacttgacgatgaaaagtctcttgctgcacaaaatgttcaaccaaattccttggttcatcttatacgtactaaagtacatctgtggccatgggcacagaagctacctggcgaaaataaatctttgagacctcctggggcattcaagaagaaatctgacctatctactaaagatggccatgttttcttgatggagtaagatgaccttctatttgagagtcaaattggaaactttgtttagtttttttatgcatgttactttgtggatcttgcggttattttgatctaggaaaagacatttattggacgtctctcttttattgcattgatctccgtaggtactgcgaggagaggccgctgatgctcagcaatgcaggaatgggtgcaaatttgtgcacatattatcagaagtcatcccctgaggatcaacgtggcaacttgctgcgcaatcaaagtgacaccttagggaatgtgatgattctagaacctggggacaaatctcctttccttggggagatacacgctggttgcagtcagtcatctgttgaaacaaatatgtataaagcacctatttttccgcagagattgcagtcaacagattacttgttggtccggtctcctaaaggaaagctctctctaaggcgtattgacaagatagttgttgtcggacaacaggtttgcctttcgcaagatttctctcttagaattttggtccagggaatgtcaactacatatatataccccagacacacacacatacataattaagattg

SEQ ID NO: 15811 - DNA, 546 bp, Arabidopsis thaliana
ggtactcgcgtccttcctccagtaggctgatatctcggcttctcacaaaactgacattcttgcagattttcatcatctttccagaaaatcatgcaacagtcaatgcatacatcaatcatttctgatggtaacccaagacttgaaaccaacttctgtatttcatagtaactctcagccgatatattatctgcttgtaaatattctctaataagttcagcccaagaatccttgcaattttcacttaagttattatcagctgtaattgtcatcatcctagatgccaaagataacttagattgcccttctctacatctctcgtagatgggttgattagcagcatctaacatatcatataagcgttgtgcatctacgttggtttctacaataatatgttcactaaatgcagcagtactttcgagaaatgcatctgtaaccatatcatgaaatctattttcatgggtatacccttgatcaaattcttgatgatgaccataattcttataataatcaataggttcaacaacaccataattcacattactacgg

SEQ ID NO: 15812 - DNA, 1038 bp, Arabidopsis thaliana
ttgaatattaattttttagaagttgagttatataagtggtggaaaatcgcttattagtagtgtaaacgtctggttagacaaaaatattttcttttattagagatagattataaactagaattaatggttggtcggccaaatttttattaaaggatgggaaagaagtgatgattaaatcggtagcttcagcattactaacttatgttatgtcttgtttcagactaccacaaaccattacttctaagcttacaagtgcggtcgctaaattttggtggagttcaaatgtcgattctaaaagcatgcattggatgacttggaataaattatgtgatagtaaggtagatagtggattaggtttttgacatgtagatgatttaattctgcgcgtctagcaaaacaattatggcggttgattacggttccagattcactatttgcaaaggttttcaaaggaaggtattttcggaaatctaatcctatagaaaatattaaatcgtactctccatcttatggatggaaaagtatttgctcagctagatctctggttaaaaaaggattaattaaaagagtcggatctggggcatccatctccgtttgggaggatccttggatttcagctcaattcccgagaccagcaaaaagtaatgggtctgttattgatccatctttaaaagtaagtaaccttattgacagaaggtcaaacttttggaaaatggatattttacatgagatttttgatccaaatgatatcccgttgataagtgccctgcatgtgggtgcgcccaacaaagaggatactctaggttggcattttacaaaatccggaaaatatactttcaaatctggatatcatacttctcggatagaatatatagatacaaatttgtcttttattggtccggagatcacattgcttaaagcatattcttggaaagtgcaatgtccgccaaagctacgccactttttgtggcaaattttagcgagttgcgtgccggtcagagaaaatttacggaaaagaggcataaattgtgatatagg

SEQ ID NO: 15813 - DNA, 809 bp, Arabidopsis thaliana
ctggtagtcctgttaaggaacaaatgaaattttttgctgctcttaatggtcttggtcgtgagtatgaacctattaagacatccatagagggtagtatggaatctacacctgctcctactctagatagtatcactcctaggcttacaggctttgctgaccgtctcaagagctatgaagtggtgtctgtcactccccatctagtcttcactgcagatgctcctgatgctggcaactactatcagaccaactacagtggcagagggaatttttctggcaagggaaacagaggcagaggagcatacaacaccaagggacgtggctttcatcagcagaccacaactggctcttccatgtcaggagaaaacagacctgtctgtcagatctgtggaaagctaggccatcctgctctcaaatgttggcacaggttcaacaatagctaccagcatgaagaactgcctagtgccttgacagctatgcacatcacagaagttacagaacacaatggacaagagtggttccctgatacaggagcttcagctcatgtgaccaacagtcatcagcatctgcaacaatcaagaccatacaatggttcagacgctgtgattgtaggaaatggtgaattccttccaatcacccatactggctccacaaacctgtcatcaacctcaggtaaacttccacttaaagatgttttagtctgtcctgacattgcaaaaccattactgtctgtgccaaacttactagagattaccatgctcctttgaatttgattgtgaaggtgtccgtgtacatgataagggacaaagagg

SEQ ID NO: 15814 - DNA, 556 bp, Arabidopsis thaliana columbia
gcataaatcctctattataaagatgcttattcactacattaaattccaaatattactcattgatacacttacgacatggacataatattgtaccgttctcacgagcaaatggttcgtttgtcgcttgatacatgaaaccgcgtagtctgtcataatactctctcgtcgccttaccggtcgcttgatctctatgattgtacatccaacttcgtaatgtgtaaatctcatgctctccaccccaagacattattattttctttagaagttttttttttgaaaagattaattttgtttgtaagtagatgttatgatttgagttataatttcgtaaatgttatgttggttatttatagaggtccaaaaaaatattgcaagggatttgctaggcaggttgcgagggatttgctaggaactgatattttttgctaggaatttgcgagggaagttccctagcaactagaccggtaaaattatttaaaacgtgcttacctaacttgccaatgactcgcaattccgttgcaatgtttctacaaaataaagtgacgttgcaagtttg

SEQ ID NO: 15815 - DNA, 687 bp, Arabidopsis thaliana
agccaatacttcttcagacatgcaatgggatatgttccttactcacagagcttggtattcgactcacacgtccaccagttatctactgcgataatgttggcgccacgtatctctgtgcaaatccggtgttccactctagaatgaagcacatcgcgatagattaccacttcatcagaaatcaggtacaatccggagctcttcgtgtggttcatgtctctacacacgaccaattagcggacactctaacgaagccgttgtcaagaacagcttttcaaaatttcgcatccaagattggagttacaagagtccctccatcttgagggggcgtattaaggatatcaatcatctccttgattgattccaatcatatcttccatgtttgtaatattgtatatactcacattgattataagtgtgctcagcaagtctctcttgtgtatatatattgtaaatcgttgaatggaataaatcaatcacttctataaacctttatagtatttagggtgtatgcaccttccaactggtcacccttcttcgccatggccatgtagaacccgaaacaaaatgctacacggcctgcgttttggatgcaccactgtttgaaccaggcaccaaccttctccctcgtgtccaagctcttgagatgggtcgttggtgaattgttgaatcttcgccacttgacccgtg

SEQ ID NO: 15816 - DNA, 734 bp, Arabidopsis thaliana columbia
gcgatagagtgattttggtgaagtgatgatatgatgctgcgatagagtgattttgatgaagtgatgatatggagatgagatcgagtatggtgatggaatggggatcgagtagaacttccaaaggatgtgaaagacctttgaacttccgaacttgttcgtgcttggatatgacacaccaaaagcattcacaagatgagatcgtgatattacacacacaaactcaagatcaaacgaattcagaaagagatttgataagaaaatgtttgatgatttgattacaaggagaagaagagattataaagaagaagaagagtctagggaagatgtaaagtcgtcaaagggaaagaaaaacgaaataaacacacaaagactaaattcaaataaaatgggcttctccttggcaatgggctgcgagacaacaatgggctgatgtggtcgagtgtgtgggcttgcctcgttaaaaacctctcttggaaaacccaatgggacaaaaccaagaggagggaaaaagagtgcaagtcacacacctccattgtcgtcgcttaaaccgcttgaatcacaaccaacgtggttggacaagcatcttgtttaagactgccctcaatgtgttgtagaagtgtagtgatagcttgatttagtaatctagtcttcgatcttgtcattggaccattaagaacatgcattacttcctcttttgtagctccaagaagttcatcttcatgttgggtcgagta

SEQ ID NO: 15817 - DNA, 605 bp, Arabidopsis thaliana columbia
gtttgagtttttgtttggttgagaaatgagaagtagaacagaatcaagaatggagactcgtaacaagtttatgctactcgcttgtgccactttctccattatgtctcttgttaagtctcaaaatcaacaaggtatttttactgttttacactttttcattttgtttccttcatgtgtttgatatatgaattatctcaaacaatagaaatcttgttccgattgttacttattgtttgaccaggattcatcagtttggattgcggattaccgtctaaagaatcttatatcgaaccatcgagtaatttaacattcatatcagatgtcaatttcatccgaggaggaaaaactggtaatatccaaaataactcacgtacaaactttatctttaagccattcaaggttttgagatactttccggatggaattagaaactgctacagtttgagtgtgaagcaaggccaaagtatctaatcaggactcttttctattatggaaactatgacggtcttaatacttctccgcgatttgagctctgtctcggaccagatatttggcaagcgtagatgtcgtaatagcggatgtaggtgatggagttgccgaggaga

SEQ ID NO: 15818 - DNA, 656 bp, Arabidopsis thaliana
ggtttaggtacctctggagaataagtcggaataatttcctcctcactcaacaacttgctctccaagcttctttcctctaagtgaactcctttctgatcttctggtgcaaaccattctattgcgaaatcttttgtcctctttgatagctagtgtagtttccatcttctctggatcaatactcattgaaaacttattaaatcttttttcaaacatccatagttgatctttcagcttcatcactattggagctggattttcctccaggaatccacctgcaaaaataccaggccaacccaccaagcccaccaagtagaagacctgcgcaactgatgagcccacgtacgcaaatcggtacttgggcctgataagcccggtcacctgatgaagggagataagcgaataacaacctaggaactaacagggagatattcgcagaatggacctgatatcttggaattgacctgccgaatatctaagagaatctccgcagatcccggacgaagctaccacgtgcgtagatctatataaggaagcaaggacgacttggaagacattaaattcagctttacattcacacttacacttttacacttgtaatctcctttcacagtgtaagagctctgtgataatcaatgcacgagtccattgggtcttag

SEQ ID NO: 15819 - DNA, 605 bp, Arabidopsis thaliana columbia
aaaatattctacttaataagaatcttcaagcttaaataacacaaggctataatatgggttctgacctacgctaattttccttatgattctcctgataggagctgctttatgcaggaggttataatgtaccaagaacggttcatgaggttatagcacacttggcttgccgtctttctcgatgggatgataggtgacaacagttttctgatttacctttactctaatgaacgcttgcctagttttgctgaccagaaaagtgacttgagttttataccatgctcttgtctggaaagtatctaattggttgtccttgattggctatagattattccgtaaatccatatttggtgcagccgatgaaatcgaattgaagtttatgaacaggttcttaaaaatatgtatccgtttgttttgataatacacaatgcatgtttaactaaagatactatcctttcttgttattaggagaaactatgaggatttgaatcttttcagtatcattctcaaccaagagatcagaaaattatcaagcccaggcaccttctcttcattctcaaacctgtcttgatatgttttaaatgagatctgatgtttgtgcgtgggat

SEQ ID NO: 15820 - DNA, 1609 bp, Arabidopsis thaliana
tctcactaagatgacaaacagaaagagcacaatactctgcagcatcaatgttaatcctgagatacaagatatacaaataaaatgttcaccttcgaaaacgtgctctttcctgaaccgttcttccccatcactgcgtgaacctattagcaaccacaaaagaagccatggattacaatcggcagcaatgcaaaacaaatccacacaaatagaattcacaagttatgatatcaaactcaaaactttatcatataatgagacagcactaccaggcaaagctttctgcaaattaaatttcaagtcttaaccataaaattgcattgattaatacgcacctctccttcgtagacaaccaaattgacgcctttcagtatctcttgtctcgattcagcaatcactgctctcaaatccctaacttcaagcaacgggatcctccccacgtcatcacgatcttccaccaacgaatccgaatcgacggctgaggatacggaagacgccgaaacaataactgaacggcgagtagttcgcaggattggagcggcggcggaattagctcggagattgcataatagaacacgagagggtgaagtcccgaggcgaactcgctgagtaggaagaggaggaggagaagaaacagttggaacgaattgagctatggagtatgcgtgacggagctgtaggttaacgccggccatggagacagaaattgcggcggaagaagacggtggaggttttatccggtgaagtgatgtggttagttaggtccagggattcttttaatttcacatgttgaatgccacgtaatatatatatcggctactagcttaattaaaatggaaacaaaaaaaaaatggaaataacaaataaaacgacatcactttgtgttgatacgcatattcttcaaaaccttaaaagcttctttccttgaagtacaagaaactatttacacatatgagaccttgggatgaagaaacagacaaagtccataccctaaagcagatcctaaacccataccgtaatctcaaaatctcttcttacctctctttctatcttatatacatcattcaaacattttttatgttttcatatacagtttgattcatttatttcgtaaaggctttgaactttttgtcctgatatagtgtgatctatatataaacatatatggcggcgattttcaagagaccaaggccgggaggtggccgtcatccgccaccgctggctccgacagtgagtagtttcaagccgagagctcaatggactaactccggatcttccattttcctctacgttaatcttcctggtcttttttcttctctctttctttctttttgtttcttgagatcaaactttaattgataacaaactttatgaatttctcgtttattgtgtggaaccggcagggttttatagggatcaaatagaaataaaaaaggatgagaggacaaggactgtccagattcaaggccagcgaccgctctctgctcagactaaggctcgtttcagtgaagcttaccgtgtccctgatacctgtgacatgaccaaattgagcacctccttctcacatggactcttgaccatcgagtttccagcaattacactataatattag

SEQ ID NO: 15821 - DNA, 424 bp, Arabidopsis thaliana
agcctgatttgaggataacgcttcctgatacgatagtccggtccatgagtagccgacgcctgccggaagtttagcgaccaggtctgccataaatttcatggcgtcaccggtacttttcccggccgccgcttcacctaaaatctccattgacgggatgccgttgtagcgttccagtcgcggtgaaccataggtccattcggtagacgagtaggcagaaagcggtgccatcgtgccagagggttgcgtacataccattggttgatgttatccggcaacatacggaacggcgtgcctgcctggacatacacttttttcacccgcccctggttgaggaagtcgttcacgtagctgctgccgaacgggtggaaattgtctggttgatatcagacagcgccacgcccatcgcttcagctttcgcagcgtt

SEQ ID NO: 15822 - DNA, 508 bp, Arabidopsis thaliana columbia
ctgatcaatcatgtcaacaaacgatccatcaaaagcatgttctggtccagaattaatccccatggactgtgtaccgttcccatttctttgtcgggtcgtaaatctgaacaattataatgcaaaacaataagattcaaagtctagctgagaatgaaaagtgcagagaaaagattatttgagagttacctcccatctggaagcagggaatatatgcttgttcttctcgtaccaatgcctctccacaactttacccgcatgcgacttcattaacaccacattttacaatgctttagaaacaactttccatcatcaaactactctcttttctcatgtgatcgggtcagggaaacatacctcgtctttctctatcgttgcatctgctattgttctcacgtcttcatgcacatcaaagtgaaacagctgttaacaagaacaatgtaggagaagtgagtctaggttacaatttctatataaactgaatttcaaaagtgtcgacaaggcgatccgg

SEQ ID NO: 15823 - DNA, 506 bp, Arabidopsis thaliana columbia
cacgagtaaaaaccttctctagatcagtttattaagcaaccacccttttgctctgtttctaacaaaccagaagaagaaaaaagtttcaatttttcttgaagatgacggagtatgagaatgggaagaagaggaaagtacgaaacaaacaacaagtaaaagtacagttcttgtctcaaaggtatctaatcttatgcttttgttgtttcttcgtcttgctcgtcttcttatcttccgaccgaatctccacactctctgttcgttccgattctctgagaccgtctcttcgtgttcctactctctccgttttatcatcatccatggattcgtttcaccgtggtagattcctccgttgagtgttgaagacagagttcaattccctgaccatttattgctgattctttcgcacggaattgggaaaggtgaaaaaaacctagtttgtgtttatcgtggagtaaaggaagagactttggtgttgccctcgatttctagtgatgaattcgatgagt

SEQ ID NO: 15824 - DNA, 587 bp, Arabidopsis thaliana columbia
  unsure (1)..(587): unsure at all n locations
ctgttcctttttatgttccaagcatctaaattaacatctaaatgtcttttcagtgttctaacatattcttgacaaaagagcaagacatacggcttggtatgttttgtagattcatgtatctttaagcctttttgtcagttactaacgcatccacaatttcggtctcaggtgactttggactcgctaagattctaacttctgatgaccttacatcctctgtaagttctgtacaatgaaactaatttaaattttgtgacactgttattataagtcagtgtgtttataggttgttggaactccaagctacatgtgtcctgagcttcttgctgacataccttacggatcaaagtcagacatttggtcgttgggtataacaacaatacattcttctttgatattttactcctacacttgttcaccttgtgactaccgtttcatggatcatcatggaaaacaggatgctgcatgtatgaaatggctgctcataaacctcctttcaaagcttccgtaagtatccttacagttggtttttgattttggcattaaacacataatgtanaatgtgaaatcttgattgcaggatgtgc

SEQ ID NO: 15825 - DNA, 554 bp, Arabidopsis thaliana
  unsure (1)..(554): unsure at all n locations
nnnnnnnnnnnnnnnnnnnnnnctaaaggttcctgatacgacatacccgtccagtcataaccaatgcccgcaggtaattttgacgcaaggttttccatcaacgccatggcatcgccggaactggttcctggcgcggcttccccctgaatctccattgacggcagaccgttgtagcgttccagtcgcggagagccatacacccaatgtgaagtggtaaaggccgagaatggcaccatttcgccgttgcggtgcggacataaagtttatcgacatcttctggcagcatacggaatttggcatccgcctgaacatacaactttttcacgcggccacggtcgatgaagtcgttaacgtaagtcccacccagcgccgttgaaatggtctgattgatgtcagaaagtgaaacacctaatgcctgcgccttttcctggtcaacttccagtttaaactgcgcggtgtctatcaggccattagggcgcacgctgactanactggcaggatgttgcgccggcataccaagcaactggttacgggcctgggttagggcatcgtga

SEQ ID NO: 15826 - DNA, 608 bp, Arabidopsis thaliana columbia
tgatagcaatgcgatgactattgtcatcccaacgagccaagcaaatccgctccagaatcctatcactggagtttcttcaacactaacctcatcatcatatgcatcatcatcatcctagataccaataaaattgattatagatacattttattcgcatgaaaacatgacgtaactcttaggtacctgttgtgcctcaaacaattggcggtgagtccagagctggaagatgagataagcaatgtaagcaataagcataactatgctgcttgtccgcgacagagtgagcgacattttgttaatcatagaggtcgatacttcgccggttgctgcatattttaacaataatggcagcaaatgacacaacaggcccataagcagcaagaagaagttcacatcggcttgtttctgtaacacaatcaagaagagaaacatcacataaccatctttgattacgggaatgattatttatatccggttcaagtcaacacgatttacttagggttcaaaccggtttggtttggtccaaatacaatttgtatccatgtttcccggttaggttatgttaagttacatataaaataaaataaaactggaggtgtatatgtatg

SEQ ID NO: 15827 - DNA, 957 bp, Arabidopsis thaliana
taaatggatcaaatccactaaagataaataaataatccgacaaagacgatctattcgatagcaacagtactactgttcttgcatggaaatgttccaataatgcaaatctcccaataattagaataacgttttgaaaatgacttgaaaaaaacagagcacaagttcccattctctaatgccacaacttcatacagaatccagatggaacaactgcagacgcaccgctaccaccaaccgcagaacgctttatcgaaacacggtcgtcgaaagtatcaatgagctgctcagccaaagccatgggatcatcaataaatgtatcaatgaatatcttcacaactctaatctcttgtgacgttgctctcaagctataccaagtcagaaacttctgtctgaaattcttatcgatatgtcctgaacactcgagttgtcttatgatcttcacacaatgctctaatccactttctgttcctccattcgctgaatgatcaccgttgttacagttgtctttcatcgatatttcgattctagcttgacggttcttgatttcatctgacctgaagggagtaattggcaaactcgcatctgaactgtttcgattaccaacaagacttttcgtagtaaccacgactggagtttcagattccgtcttatccagaacagcttcttgttcttcatcatccaacaacacaatctgctcaacgtccttctcaatctgtacaatgtctgagtcggttgtcctcttcatccttttcgcagcactttcatcgactgaaggagaattgttgtcttcgttctttgaagatggcttctttgggacaatgtaatcgttgttggactcagcttcaacagaagaaggattagaagacaatgtgctgcaatttgtgagagggcttacgcttctttccactgccgaagagcaattcgctccttcttcagcgctacgtgtcaaaacattga

SEQ ID NO: 15828 - DNA, 480 bp, Arabidopsis thaliana columbia
aaaaaaaattgaattgcatatccgtgaacctgaccttgatttgtatatccgtgattgtaataagcatggtggtagtaatactcagaatggtaaaattgcggttgtggtgacccaaaacacctttgctgtatcttcgttgctgctaccgacgcagatgaactaatgcattccatgtgaacatctaacccgcatggaccgcatttgtaccgccaagatcggattgcaccgcggcaaaccatgcagatgctgctagctccccactgactcagctctaagagatgggccgggtgagggacgtgtcttacgtgctgaggaagctgcgtgcacagtgggtgaacatcaaagccacaaggctcacattggtaatagagcccctcggctgattcatcgcatatgtcgcacatacgtttgttctggtgcgtatctctggtcctctaaagactagccggagctcgtgctgcggatcataaaggtggcgag

SEQ ID NO: 15829 - DNA, 949 bp, Arabidopsis thaliana
tatcttctggtatgttttggttaacatcatgacactggctcgaactctctttgttaggctctgatgaaaatggcaacagatgcgatgaaggactcacgtattccagagttcttaggacaagtaagagccttgattctttctattcaatgtttaaaccatacagtttgacttggtgattgaaaatcttattggaccatctttgtagctgagtgctcttcaatatagaagaatggactttgaggaattctgtgcagcggcattgagtgttcaccagctagaagctcttgatcgatgggaacaacacgctcgttgtgcttatgagcttttcgaaaaggaagggaacgaccaatcatgatcgatgaactcgcttcggtctgtctcttttgcctctttatacaagtctgtttaaagtctttggaaatgctcaaattaactcattggttaaacttacctcaggaacttggtcttggcccttctgtaccggttcacgcagtgcttcacgattggcttagacataccgatgggaagcttagctttctcggatttgtgaaattgctacatggtgtgtctagccgcacgatcaaagctcattagaagggttttgaaactttgaatgatatgtatgaaatttgtctgagctctaaggtctcattctcctaggagttataatatgtggcttttgacttttgttatgaaagctgagaagcaaagattataaaaaaaaatgagtgtagcaaaaaaagagagaagtgtgttagttttgtagagaatgatatgatattttccccaaatttggtaacttatgacgattgatgatatttctgacatttttagattttgctttttttgacaccaatcttatttccaaatttttttctctatcaaattattatttttcaaaaaaatcataatactatgagtttgatgatttcaaattcacattcgctgg

SEQ ID NO: 15830 - DNA, 681 bp, Arabidopsis thaliana columbia
gacaatcacttcccgggaggtcacccatcctgaactattcgagcccaagcatgcttaactgtggcgttctctcaggatgtttgaccgaaaagataagtgcactttgatgacataggtggccaaaccaattcctgaaaccggggtattacaattcaccgcattaacagattgttacgtgttcgttgtgcagtaagaacgtaacccccgatggtgcgagccttcttgactccacactcatttaggttcggctctgataccacttctaatgctctgaccaccactatttgtgggccccacgtaatctctggggccaatggatccacccctatccgacggtcggtgcaccatgcttgggaggctttaattacttgttactgaccctacaaatcaccaaatgagcttttcccatgctttgttctcactcgcatggttccgacaatcacttctcggaaggtcaccaatcttgaaactattccagtccaagcatgcttaactgtggaattctctcaagacctttgaccgaaaagataagtacattttggtgacataggtggccaaataaattatgttaaaacctctccgcatgcaccacaatattcctgaaatcggggtgttcaattcatcccactaacagatcgcaatgacctcgttgcgcccaaggctatacccgatggtgcgagc

SEQ ID NO: 15831 - DNA, 700 bp, Arabidopsis thaliana columbia
cttacgtctatcactgcgacagtttagtcttatgcatcccaaaagactgcgctaggcttgttgtttggaatccgtattggggccaaaccttatggttcaagcccactagtcttcgccattttccgcactggtatatgtatgctattggataccagatgcgaagaggaaaccgagacgcgaaaacttcaaggtggttgttgacttgtagaccgacgaccaaaactatcacaaagaacacgatcgatcacctttgaaagtcaaaagatagatactcgcttcacatctatattttacaactttattatattccacacaaatcatatactatacatacattagtctccttttattaaataccagccgtctattttggtttttcttattacatgcttaaaaataccaaatgcacaaagaaggatacttttacccactacaaaatatggacttatctgaaaatttttatcgaacacatttttcttattgaaatagttacctatgtattagtacatatattttgttacgggaaattcaaaaaattttatatacaaccaatcaaatggctaattaataagtggattaagacctttgacctcaaaacacgaccaagtaaaataacttcaagttgattgataaaggcgtactataaagagtagacaaattgctaacatggcctaagcgcaccctatatatcatttactgt

SEQ ID NO: 15832 - DNA, 834 bp, Arabidopsis thaliana
taaccttttgaaacatttgatcctctgtcattaaggaataattaaaaaagagtacgaatcttgacttagatagatgcacgtatatccacacacacccacttagaatccaagacacgaggcattacacttttgtatgtattcaattatttattacaaaaaaatatgagaaaactaattatgtttgtgaaaaaaatgaacagatatgcatcagtgaaagcaatagagacaagatcattaccagaagatgaacaatggcttacttactgggttctttacgcacttatctctctctttgaactcactttctccaaacctctcgagtggttagtgaattcattaacacttttaatatcttcttaacatgtattcatcataatattagtttttgtttttgttatcataaggtttcctatatggccatacatgaagttgtttgggatctgttggttagtgttaccacaattcaatggagcagaacatatctacaaacatttcattagaccagtctacagagatcctcaaagagctaccaccaaaatttggtatgttcctcacaagaaattcaattgcctccctaaacgcgacgacgacgacattctcactgctgctgaacaatacatggtacaacacggtaccgaagcgtttgagcgaatgactcgttaaggtaagtcgaattcacagtgacatttacatcatcatgttcatatgtagatgtacatttggtaacgaatgttgtgtcttgtgaatgcagaaggatagttattgaaagcggtaggcgtagtagagggacaatactcacatgatctctgatgatgaccataggtactaataagt

SEQ ID NO: 15833 - DNA, 672 bp, Arabidopsis thaliana
aatgaaaatgatattcttctccttggtgatgacccatgggagtaagtaaagtactcttcttctatttgtatacattgctttagatttgagatagatctttaaaagcttgttctgcaggtcatttgtgaataacgtttggtacataaagatactatcaccagaagatgtgcatcaaatgggagatcatggagaaggcagtggtgggttattcccgcaaaacccgacccatctctagaagctgcttcggtgttagtctcatcatgctacaacgcgggagccctttgtttcccatttgaagtcgtttccactcatctttatatgccattcgttcgcatctctctcgttttgacgtttttagaaagaaacataatcatatttgtgagtatgggtcctgaaactttaggacgtactttagcttgtattagacagacactctcgtcataaacataagaacctttatgtagctgtctcagggtaactaaacttttctagtatttattcttattctatttttgtaacaacattgttagacattcagtttggtcagaccaattagattccataaggtgtgaaaccaaaaccaaccaaatctttaaaacacaaccattaatcacaaaatgttaccaaaagcttctactagtaacttaggttgcagaatgacatagatgaagt

SEQ ID NO: 15834 - DNA, 580 bp, Arabidopsis thaliana
gccctattaaaaacttttctctgaaaatctgtctgggcaagccctgatgtggttcacttagttggaactaggatcgatcagtaatttcaacgaactatcggcagtatttttaaaacaatactcaattctgatggataagagcatttcggataccgatctctggaatttgtctcaaaggccgaatgagacacttcgggctttcatcaccaaatttaaaacgtgctttcaaagctcccaaggatctcacaacagtcggctctgtcggctttgcgaaagggattattgcattatttgaggtttaaggaagatctaatacttcacaaacgtgatactattcaagacgcactatttcgagcgaataattggatggaagtcgaggatgaaaaagaaagttttgcaaaaagaaataagcaagcaaaaccagcggtcacttttccgcccaagaagtttgaaccccgggaaaatcagggaccaaggaagtttagttcacaaccattcaataacaacgtcggaaagcagtttcaggggaaaggaaggtcaaacacctgggtctgagatgaaagctcgtattgcgatatac

SEQ ID NO: 15835 - DNA, 716 bp, Arabidopsis thaliana
actcataaactcgcggtgcataggttgccgctttggggatgcggcagtccatttcccccgcgattgtccctttgtccggcctgcttctccgcagtcaacttagggcactctcgctttagatgtccagtctttccgcaatagaaacaagtccttgtctcttcaccgagaaccttggactgccctggttccattctcgggcaactttggatcgcatggtccttgcttccacaccggccacatgcacctatggccttccagcaagttccgctgtggctcttaccacaggtcacgcattccccggtcttagcatcggacttagtgttatccaccttgtcaaatttccttttcttatccgcgggtttggtggattgattgttccggatcggtgctttctcccggttcaagtatctctcctcctcgatcccttcctcaatcattgctgccctttcaaccaattcggaaaccgagttgaatgtccggaccaaacaatggttgcggatctctatccttagtccacggacaaatcggcgcacttgagcttgttcctcctcaagttcacgtcccacataaagccttaggggcttaaattcctcatcatattcacgcaccgtgcggttcccttgaactaggtcgaggtagcacattcaagcctatcccaagcctccggtggaaagtacttcttgttaaactcgtcttcgaaatccgctaaggaccgg

SEQ ID NO: 15836 - DNA, 1202 bp, Arabidopsis thaliana
gaatggtcttattaaaatcagaatcatttgcataaagaaattttatatgctcaaatccaagtaacttagcatcaagagatgagagaagaacatacctccttgacaatgcatcggcaactacattgtccttacctttcttgtatttgataacatagggaaacgtctcaatgaattcgacccacctagcatgtcttttgttaagcttttgctgtcctttgagatgctttagggactcatggtcggtgtgaatgacaaactctttaggccaaagatagtgttgccacgtttgtaaagctctcaccaaagcataaagctctttgtcatatgtaggatagttgagagtacctcctcctagcttttcactgaaataagctattggcttcttattctgcattaagacagcaccaattcctaccccgggggcatcacattcgatttcaaaagttttaaaaaaatcaggaagagataaaacaggggcatgagtaaacttctcttttaaggcttggaatgcatcttcttgagcttgttcccacttgaatcccacgtttttcttgataacttcagtgagtggggctgctagagtgctaaaatctctcacgaaccttctatagaagccgacaagtccatgaaaactccttacttctcctacagattttggacttgaccattcccgaattgctttcactttctcttcatcaaccttaactccatctgtactcacaacaaaacctaaaaagacaaggttatccgttccaaaagtacatttcttaagattggcataaagcttttcctttctaagcacttctaagaccatttttagatgctcaacatgctctcctagactcttgctataaactaagatgtcatcaaagtaaacaacaacaaaatgtcctatataagctctaagaacatgattcattagtctcatgaatgtactaggtgcatttgtcagcccgaatggcatcactaaccattcatataatccttgtttagttttaaatgcagttttccattcatcaccttctttcatcctaatttgatgatatccactttttagatcaactttagaaaagatggtagaaccatgcaattcgtctaacatgtcatctaatctaggtatagggtgtcgatacttcaccgtgatattgttgattgctctacaatcaacacacatacgccaactcccatccttcttaggtaca

SEQ ID NO: 15837 - DNA, 493 bp, Arabidopsis thaliana columbia
tttataatccaaaattaatagtaccttgaagataactgatatacctcgattttctctgcttttagctatgatttaggtatagtttttagagtcattttgttatttgtagagtcttttctagtctttttcaggtctttacatgtttgggatgcatttgaagattatggagcattctggagcaaaacagacaacttaagttgcggcacaatccggagacgaaaattgacgtaggtgtcgatcgacacaacccccggtgtcgagcgacaccaatacctgacgacaagtgaattgcgcaacttattgatgttttgaagatttccaaattcggcccagaactttctcctatttttaaagaagtccttgcacgttttaggtcatatatatatatatatatatatatatatatagttataaaggtcattgtgtagacctaactctgattatctattttattcttggaagcaaaaccctgtggagactccctatagagaag

SEQ ID NO: 15838 - DNA, 735 bp, Arabidopsis thaliana
ccaaatctcttacctgttgcgcttttcaagcgaaatctctgcacaccaaatcatcttctccttatacccactcgcaggtacatacttgtcccacaaaaccaccagcttcccgccatattccgccaattgaacactagaatatctagaaaacttaggtagcccttctaaaccctctattttcccgtaaaccagtatcttaccgtcaagtcctctccaaataaaatttcctttacgataaaaataggctatattctctatcatacaagaagagcgaagatatgaatccaccgtatccaatactaccaatccacatgtcaaatgcttcgatttatagctcaaagatagacctttcccagccctagagtctaaatgaaagctcttgtagtaaatctttttttccaaattttccaatttgaacatccgtttttcggggggcaccggtttccaagtctgagtcattgtgttgtacacttcaacacagttcaaagaatctggactttcaaagcttcctggtaaatacactattccttcaaattcactattagtgtgagccaatctcattcttggagcttcattccaagtgtgagttcgacaatctaggtaaggaacgttagagtacggagccttttcgatgtctgcactaatggcgtagagataatgatcaacagatatgatagctgaccattcccaggatgagaattgagaattgagattggagccacagattacacttga

SEQ ID NO: 15839 - DNA, 667 bp, Arabidopsis thaliana
taaaattgtgtctttttgagtatttaattgtctcctttgagaagtccttgaggcgctttatataggatccttaaaccgcatctctatcgatattcttggaagatttccatttatctttaagtcggttctagaggataatcgtcctaaagatattttccttattcttcagaggctttgggaagatttcctgattcgacattatcttcaaagattctactttatcatttccgaaagtcccataaaagatcctattttaccggaaatgatccattgagaatgaatggtttttacaagtctttgcctcggctcttttcacggctcggtggtcgtttgagaggtggcttcaggcaaacggtatgtaccggttcggggcgcgcttgatgactgtccattaagctcagttggctgtctcccgaggcgatatagttgtttccgcagcgttctcacgattggctcggactgtgtttataggattaacacccgagccattttacgaactctctccgagacggttgattgaataaagtcctgaggtgctttcttctaggctagaggcaatcatatgtttaccatgaggtgattgtactcttagactgtttggctcggcttgcttgtgggggaatcgaccacacacattctctcatacattttcacacatataatgata

SEQ ID NO: 15840 - DNA, 1005 bp, Arabidopsis thaliana
cgccagtgtgctgtaaaggcttctgaaatcaacctttacgcgaaacagtcatggaccgcatcctcaaagatcatcaaatcgtggtcgacattccccacggagaagcgtggctgcgcgatgatgaagagcgtccgatgattttgattgcgggcggcaccgggttctcttatgcccgctcgattttgctgacagcgttggcgcgtaacccaaaccgtgatatcaccatttactggggcgggcgtgaagagcagcatctgtatgatctctgcgagcttgaggcgctttcgttgaagcatcctggtctgcaagtggtgccggtggttgaacaaccggaagcgggctggcgtgggcgtactggcaccgtgttaacggcggtattgcaggatcacggtacgctggcagagcatgatatctatattgccggacgttttgagatggcgaaaattgcccgcgatctgttttgcagtgagcgtaatgcgcgggaagatcgcctgtttggcgatgcgtttgcatttatctgagatataaaaaaacccgcccctgacaggcgggaagaccggcaactaaactgttattcagtggcatttagatctatgacgtatctggcaaaccatgcccgatgcgacgctgtcgcgtcttatcgtgcctacaaatagtccgaaccgtaggccggataaggcgtttacgccgcatccggcaattggtgcatgatgcctgatgcgacgctgtcgcgtcttatcgtgcctacaaatagtccgaaccgtaggccggataaggcgtttacgcgcatccgctaattggtgcatgatgcctgatgcgacgctggcgcgtcttatcaggcctacattggtgccggatcggtagaccggataaggctgttccgcgctatccggcatagtggttaaacccgctcaaacaccgtcgcaataccctgatccagaccgatacacatcgtcgccagaccaaactgaacgtctttgcgttccatcagattcagcagcgtgg

SEQ ID NO: 15841 - DNA, 654 bp, Arabidopsis thaliana
tgccctgggcggtaaaagttcattttcacatccgttagtaacctacataaagtagattttaattaagtttatcatttcaacataagtcattaagatatcaaaatttccaaatattacttacatataattttaaccatccagcgaaattacgatctttgtaagtttcgtcgcaaaaattcccacagaacaatatttgtacttgcaagtccctcgcaatttgcaatgactttgcgaggaattttgtcgtcctcgcaagtttctcgcaaatttcacgcaatattgtgaggaaattatccctcgcaaactttgcgatcggaaaagcgacgtgtctactctccctcgcaaatgtctcacaaatctgtagcaatttgcgaggtattttttccatcgcaaatcgcttgttttcttgtagtgtctccgctataagtacattttctgcttcaaaatgctcctcaggttcaagctgctcctcttcttcaagctctttctcgtctacgagctcttgatcaaatcccaagtcctttgtgctttccatgatcacatcatgtggccatgagaaaatggactattattccatctgatatcgttagaaatggctcaacaacaatctcaggttcttcaggtactccctcgagttctatccatcccataagt

SEQ ID NO: 15842 - DNA, 788 bp, Arabidopsis thaliana columbia
tctgcgtatatatatatatatatatatatatatatttctacaatcatttagtacaagtaatactatatcttttaacaaaataggcccgcaaacttaatctgttgtacatttgagtttcgctaaagatttatgcacctatgattgatgatgaattgcagcaagcttattgcaaatgctcaaacgagtgctttgagataagaagaaagccagaagtgacaactaactgtgttgagctctgtcgtgttcccgttgctaaatctcaacagcaattcgatagcgatatggccaagtttcaggtacaaaaatagtccttaactgatcccattaagcttttgccatgtactgagaaacttgcatttggttaactaatgcaggatagcgatgaacagatctctcatggtatgtcaagacaaattcgaggctgcaaagctactgaatatgaacaggattgatgccgccaaagatatggagggttgcgtaaacgatgcagctgcagcattacttggcggctaagcaaccaacggtgtttattagggcttttaaaagtttttttgtatttctatacagttgatttggatttacttgtgctgagatagactatcgtttaattaaaatcttaaaaccggatcaaaccggattctattttacccggtcttatgtccaaagtcgggtttagttagagataaaaggaaaaaatcaattttaaaaagtcaccatctcaatcgaatgggtctccttcccgtcgtcggaattacttcgccggcgctcatcacccacaaaaatcacgc

SEQ ID NO: 15843 - DNA, 723 bp, Arabidopsis thaliana
catcgggagaccacaaaaatgcatccttcttcgttagcaaggttaatggtctggcaatagctccaaaattcttaacaaaacggcggtaataattagccaagcccagaaaaccccgtaattgcttcaaattagtaggtgcaggccattccttcacagctaaaacttttgatggatcggtagacagtccgtctctgtcaataaaatgacccaagtactcgactcttgatgttgcaaacgcacagttactccgtttggcaaataatttatgctccctcattacttccaataccagttttaagtgctgcaaatgctccttctttgatttgctatagataaggatatcatcaaaaaacaccaagacaaacttccttagaaacttttgaaacactgaattcatcaacccttgaaaagtagctagtgcattggtcaatccaaagggcatcaccaaatactcgaaatgaccactatgagtcttgaaagcagtcttgggaatatccttctccaccattctcacttgatgataaccgctcttagatcaaacttcgagaagatcactgccccacccaactcatccataagatcttcaataagaggaatagggaaacaattcttcactgtaattccattcacctttcggtagtcccacacaatctccaagagccgtctttcttcttcactaaaaccacaggggaggcaaatgaacttgaactaggctggatgata

SEQ ID NO: 15844 - DNA, 903 bp, Arabidopsis thaliana
tacagtggcagttgagtcatcattcagtattggaggtcgggctttaaaccctttcagaaaccgccttcttcctagaaatgttcaagccttgttatgtactaaaaactggttgcatggttttgtagagttggaaggtaaaaaaaagaatagtctatttttttatacttaatattttttatttgttgatttatatcttcaaattgtaggtgacattgaagaatactttaatgatggaattgaagatactacatcgatagcaagtagctttggagtatgagaagaagttgtttagattttttttcactacttttgtatttctgttttaaattagaaactttgatgaaactttcttttgtataatcttttaaattattaatgtttgagtggattttgagtttataaatttgttagaaactttgatgaaagtaaagaattaaaatcaattaagggtaacaaattaagttgtttttacaaaatataaaatacatgattaaatttaaatacatatcagacataataaaagtatgggtatccactggtagttctgaattacatgggtttttctggattttacccacaagtactaaatcttattcgggtttcttttaatctaggttttttatgggcaggtttgttggtttgggttgggctgaggttttttacccaccacaacatccctagacaatatggttgggaaggtctctagaagaaaacgatttattcttttgataactctctagtaccagactactaggccggacctctcttaagagcccacattggttattttcatgtgggtgtctttaaatataaaaccaattaaaaaaatatccgataaattgaagggtgtctttaattttagatttgtgtctttagaaaacattttagacaccgaaaagagag

SEQ ID NO: 15845 - DNA, 482 bp, Arabidopsis thaliana
gtgctctaaagtagccccatactcctatcggaaataggattgactacggagcatttttaaccgcgacaaacttcttacttccttcaccgaagaaatttctaaatctttgatttctactaatttttcagacatttccttcctcctagtcagccagatgggcaaatcccattttttcacggatcttatcatggagatttgcaatcacagctggtttttctacttacggagcatccccatggagaagcgccgtagatcttcctatttccacaggaactggagttacatctcttttccatttccattcaagagttcttatgtgtttcacgcccctttaagaccccgaaaaatcgacaaattcccttttcttaggaccacatgcgagataacgaaaaaaaaaaagagagaatggtaccccacgattaactattttatttatgaatttcatagtaatagaaatacatgtcctaccgaaacagaatttg

SEQ ID NO: 15846 - DNA, 557 bp, Arabidopsis thaliana
agactgcctaaattccttttcttccccaaaattttgccaccaccacaacagtctctctctcttctctcctcttctctccgtcggagtcaccatgagagtcaccgctggagtcaccgccgtctacaccgccggagtcaccgccgtcttcaccgccggagtcaccgccgtaagtctctcgtcatctccttgaaaaatcaaactctagtttcacttgatattagatgtcctttctctcctttgattttagccgtttagtactatcactacttacttttcaggtgtcaagtatcctactgctaatgtgtattttctgcaagtgtggaaaattgagcgtcttttgaaagactatgcagtttgtggtgattttagagtggaagagatggctagtaggatgcaggtaaagtttgataagtattgggatcagtacagtatcattctagctatgggagctattctagatccaaggttgaaagtgcagattcttaaatctgcttataataaggtggattcgagtagttcggaagaaaaggtcaatgttgttgtggacaatttgaaag

SEQ ID NO: 15847 - DNA, 1204 bp, Arabidopsis thaliana
taattggggcatgtaaaaagttttggatcttctttgtacttgagttggggaaaaaactgaagctgccttgtgctagggttacaaatccccatacttagtctacttatgcagatcaagccccgaaccgcattatacactagtttcccattaattttaaagacgttcagatctgtataaggtacacaacatgaagaagaggaagaggaagaggaagatacgtatgggttaggcgacgagactaacataagctttttaccgtgaaagtcctgaaaagcaatgagaagacgtggaggagctgaggaagatgtaatgttcaagtgctgttttttgaaatattggctggtggtgatagaggaccaaagcttggaggcgcaccggaatctcaataaagacttcacaggcaatcttaaaagtgtatagatctgaagatcgagaggaatgtaaatcggtgccggatagaggatcgagtttcttcgctttaacctttttcgcttcccttttcttagccaaaaatttcttttggtggatgcacaatagccgtaaacacaacttcattgtcttcttcaaacgtttcaaaggctattctagcgaaacctaacttaacctaattggagttttagaatttttgtttatatatcaaaattgaacatattcgctaggcctggccataataaccggaaccaaatacccgaaccgaaaaacccgaaaaataatcgaactgaacccgaactcaattttagaattacctgaatggatcctacacttcactacccgaaaaaacccgaaccgaacccggacctaatctaatacccgtagatacccgaatacaaatataaacctaaaaatattagttatatatatatttgtaatacctcaaacaccaaaaattaaaattataaatccgaatatactagatatttttagtaattcatatacatttagatatatttgggataaaagtaaccaatgttatagttttttttagataatttaagtatttttgttacatttggttatatttggataaaaagtaaccaatatatttacgggtaatcgggtatttcggatagatttgggtatatatgagaaaaaacccgaacctaacccgaacctgaaaatattttggatatttttggtcatttttacatttttactaaaataaccgaaccgaccccgaatcgaaaccgaaccgaaatttaagaat

SEQ ID NO: 15848 - DNA, 588 bp, Arabidopsis thaliana
agaaagtatattatatgcaaaaataatacaaattaccatctcttctcttctccggacatatgaaattgacccacatgtatgcttagctatccctaagccaccaagatcgctcttcttattttggagttggctttgcttctcttgatgcttttctcgttttcccaaaaagcaataagactaatccaaagagagttcatcatcttttggacttccccttgtcaacacaatcctccgataatttatactctatttttatattcatcatccgtgttgcagcagataaatgagagtgaccctctttacaaccatcataaatcggtttcttcgctgcatctaacatatcaaaatactttttcgcttctaagtttggttcttcagttccacctttagtcgtttcgtgaaaagcatctgttaccatctatattacaccggcttgagctctagttatattctcttcctcttcattactattattatctccaagttccaacccatgattttcatcatctccactgttttgatcagtactactatttgctaaagtttcaaaatcattcacatgagaaaaccatatgtattatccaggcg

SEQ ID NO: 15849 - DNA, 616 bp, Arabidopsis thaliana
cgtcatttgaatcctgggaacacaagagaagaaagaaggctacactcactcgatctagcagcagatcatgcctcattcactcgaggagatgactcgaccgggtgctggccgcagcagaaggagagaggtcgagtttcctcagagcggtgctggccgccacagagctgatgaggtcgagtacccacccgctggagctgatacagaacaaggcggttcgtctatggcttgggagcaatcgcaggcagccattgacgagcaactacgttcattcttcgactaaggtaagcgcctcacttcaccattgtattatatcatctgtcttgatttgtttcttcattttgtttctgtgattggatttgtcctgagtactctcttccaagtttattcacacagtggactgtgtgatttaagtttgggggagggagggcacaggaagtgtgtgttgcattgattctgcattcatctaaggcatagaaaaaccaaaaaaaatattaaaaatttcacaaaatgatttcacaaaaaaaagagtgttcatgtagttgcattacatttaggatcgagtctagagtatttcatttaggattgttgcatatgcatagggggatgatgatgagat

SEQ ID NO: 15850 - DNA, 876 bp, Arabidopsis thaliana
cgtttaagaaaagaatgaaagatacacttatcaccaagtctaaaaattagattattcatgagattcgtcatattctaaagctaggagaaaaacacaaaatcaaaggagagaaaggacatctaatatcaagtgaaactagagtttgatttttcaaggagatgacgagagacttacggcggtgactccggcggtgactccggcggtgtagacggcggtgactccggcggtgactctcacggtgactccgacggagagaagaggagagaagagagagagactgttgtggtggtggcagaattttggggaagaaaaggaatttagggtttctcaatagaattggcaattgggctattgtgcctttaatatactaaaataataagttaaaacttacgggtatccataacccagtagggtaaaacccgtgtaagactttaacgaaataggacctgcccgtttaaaacccacgttttattttatacaaaaagtagatcaattggtttgaaattttagatgggtttcgggtacccagtggttttaacccatcattaacatccctacttataagttttctcaaagaagtaatgtatcatgaaatacctttttaacttttggcaaaacatagtatcgagagtctcaagaagtggcattgatccttcttctactatccattcttctaattcaagttgtgcaaaaaaattttgagattatcctaaatagttcgttcgatttttagaattttaaaccgatataaacattttataaacaacagatgacgcataattttttaaaacgtaatatgtaacgaaaaggtaatcaatttgataaacagaacagaaagcagaccaaataacttgttttaataatgacttactatac

SEQ ID NO: 15851 - DNA, 624 bp, Arabidopsis thaliana
tttttcatagcaaaataataataatttgtatgtcaaattaaacaagaaaaacttaaaaagtaatcaaatatctgaaaatcaatttaaaacaaaaatacaacatcttctcatattccagagctacttgctaccgatgtagtagcttcaattccatcatcaaagtattcttcaatgtcacctacaattagaagatataaatcaacaaatgaaaaaaaattaagtccaaaaaattagactattctttttttaccttccaactctgcaaaaccacgcaaccagttcctagtacataacaaggcttgaacatttctcggaagaaggcggtttctgaaagggtttaaaacccgacctccaatactgaatgatgactcagctgccaccgtagtgattggaatgctaagtatagcagaagctagagaagctaaatcaccatagcgttgcccatcgcctttccaatagcttagaacctccatgtctgtaaaagacctcaaatctagccttggatcaccaaataattttgcaaattggactttgtgttgtcagaaccaggttgtatgtcctctcaagctcaacacatcctgtatgatatagagtatagcactagttagacaataaagatgatat

SEQ ID NO: 15852 - DNA, 524 bp, Arabidopsis thaliana columbia
cgaaacacaaacctttctaccttgtcaatggcaaacaagtacatgtgccattcatgcaaagctcacaaagtcaatatgttaaggcttacgatggtttcaaggtccttagacaaccataccgacaaggcgttaatgatacaagtcgccaattctcaatgtgtacctatctcccggacgagaaagatggattggataatcttgtggagaaaatgacatctactgatggattcttggacagtcacattccgagttggagagttgaagttggtgaattcagaattccaaagtttaagattgaattcggttttgaagcttcaagcgttttcaatgactttgcgcttgatgtatcattataccaaaaagctatgattgagattgatgaagaaggtactgaagctgcggctgctactgctctagttggtgcttgtggctgcagcctttataggcctcctcctcccatagattttgtggcagatcatccattttttttctttattagagaagacaaaaccggaactgttttg

SEQ ID NO: 15853 - DNA, 571 bp, Arabidopsis thaliana columbia
  unsure (1)..(571): unsure at all n locations
nnnnnnnnnnnnnnnnnnnnctaaagccgacggtaaattctggctgctctacaccgacgtgaagattgtcgactcgccgtggaaaaacggccgcaacttcctcgtcaccgcgccctccatcgaggggccatggagcgagccaatcccgatgggcaacggcgggtttgacccgtccctgttccacgacgacgatggccgcaaatactatatctaccgcccgtgggggccgcgccaccacagcaacccgcacaacaccatcgtgttacaggcgtttgacccgcagaccggcacgctctcgcccgagcgcaaaacgctgtttaccggcacgccgctctgctacaccgaagctgcgcacctgtatcgccgacgcgggatggtactacctgatggccgccgaggcgatccagctacgagcacgccgtcgtggtgctgcgttccaaaaatatcgacgggccgtacgagctgcacccggacgtaacgatgatgaccagctggcacctgctggagaacccgctgcagaagagcggccacggctcgcttctgcagacgcatacgggtgaatggtacatgg

SEQ ID NO: 15854 - DNA, 1331 bp, Arabidopsis thaliana
tgtatgttgtatctttttttttataaactaagctggtatgtaaatatattatgtaaatttcgtttcactgcaaaataataataatttgtatctcaaagtaaacaagagaaacttaaaaagtaataaaaaatctgaaaatcaatttaaaacagaaatacaaaagtagttgaaaaaaatctaaataacatcttctcatactctagagctacttgctactgatgtagtagcttcaattccatcatcaaagtattcttgaatgtcacctacaattagaagatttatatcaacaaatgaaaaaaaaataagtataaaaaaatagactattttttttaccttccaactctgcaaaaccacgcaaccagtttctagtacataacaaaatcaaactagagtttggtttttcaagtgaaactagagtttggtttttcaaggagatgacgagagacttccggcggtgtagacggcggcgactccgacggtgacttcggcggtgactctgacggtgcagacggcggagagaagaagaggtcgagagatatcgggagagagacggatgttgtggtggtggcaaaattttggggaaaaaaaagaatttaggatttttcaataaaattggctattgggctattgggcctttaacatactaaaataataagttaaaacccacgggtacccataacttagtagggtaaaatccgtgtaagactttaatgaaatgggacctgtccatttaaaacccatgttttattttatacaaaaagtagattaatgggcttaaaattttaggtgggtttcgggtactcagtgagttttaacccattattaacatccctagatcatctatatagagtaaaaagtttcatcaaacgttggagaagaagcatgagacgatgagtttagatgactgaaatatttttgatagacaagttatggatgtaagcaagttaacaactatcaaagaatgttgcgcatcacttcgcgaaagaaatgtctatagaggggttagtgaaagttctctcagatttatatgagaaaccttctgccaacatgcaataatgtttttctcatgaagaagctcttctaattgaagatcaaagatggtagtcttgttcccaacgcacgttaatgagttcaacacgattatcaaccaactgtcttcgcttgaaatcgagtaattgatgatgaggtgcgcactttgattttggcattcctaccaaatagttgggagcccttgagagtagcgattagtaactttgttggtaatgagaagcttaaattcattgattttcaagatcgaaatcttggtgaggacaacataggtcatatcctga

SEQ ID NO: 15855 - DNA, 1524 bp, Arabidopsis thaliana
tttatatgttacatgatataacatgttaacatatgttaatgtagatacaaagagctgaataccggaactaaaatccagatccaacacttcaggataagctaatttacccatacaatttttttccttcatatgacatgattctggtataatcactatgatctcattgcaccaacgtggcactactcaagaacacgaaccaacacgtatcaattttctcatgcaaatgaaaaacatattttatatgactctatgacagcgacttttatctatccatattttatcgatcatttcataaaacagaaaccgtatgagaatcctccaaaacaaaacaatgaaagaacaagacaaccaactcaaaatccctgaaccattacgagctgactggttcatggttctagtcaccatccaagctgatctaatctacaacgcactcgtggtattatcctcacctttctttctcctataccgctcttaccgccgcgcagttcgttaccgtctccgcagcagaaaaagcggttaaacgtgctccagcgcagatagctggtggtgcggggcgggttgttaggaggacatggtttggtatattgggtgcatgccacgtgtcaatggtaatggtgttggctttgattttggcggttgttattggtgttgggattgtgagtttgtatgtagaaaagcctgtggttgtgagagacagattgttctttgattacactgaagaaaaccccagtgcggtttttagttttgataagaagaagagatcgtttagtgttcctgttggtcatagtgttcatgtctctttagtgctttggatgcctgaatctgaaattaatcgaagaattggagtatttcaggtaattgtaattctttgttagttatatactaatattcgtgaaatggtatgatggttccataattaggatggaattttttaaaccaatcaaatgattctagctgttagtttatcaccaaatcagatttcatgaccaacagaattatattgaccagctataatcaaaagaattatattattcaatccaatgaatttgatgatttcattttgcagcttataattgaaattattatgtccaaactataatgcgattccgcaggtcttaattttttaaaatataccgttatttcactaaaattttattgatagcatttttttgtgatacattgtcttgtgtgtacagttgaaagtagagcttttatcgttgaaaggcgagacaatcgcgagatcgagccaaccttgtatgttacggttcagaagcaaacctataagacttgcacgaacatttgtgatgagtgttccacttatagccgggatagcaaacgaagcacaaacaatgagaatcgatgcattaaagcaccaagagaaaatgccaaggacaaaagccgtgagagcgactctgattccgcgtgcacaaactcggacattgcctcagttatatgaagcagagatcgttataaactcaaaaccgccctggattaaacgaatggcttataactttcatggactct

SEQ ID NO: 15856 - DNA, 520 bp, Arabidopsis thaliana columbia
ttcacaaagaagttccaacacagaaatgctatatgtaaaagaaatatcggtcaaaattgttatttatgattttaattacatgatttacaataagaagtaatgaaatctgaatgctgtgtatttacatactttatacatttagtgatgaatttaagtaaatgattgatagattcaaaattgtgtttgctgtgtgcattgttcttatctgctgaaataggttcttggggagaagagacgtcgaggtgagcacgtcacaggaaacttggtggaaggtaagattatcaatgggacggtactcaggcatgatgagcccttctcgctcttccctggtccaaacccttgatctgccattgaatgtcccgtacttgactagtttacggaaaccccatgtcttcttctttgctgcggtgtcaccagtttccattcatcttttggctcagatactctcgcaccgcatgcaagctctgtaccacaacctcaatgggtggggagacgagtgggttccttccgcgctcagttt

SEQ ID NO: 15857 - DNA, 644 bp, Arabidopsis thaliana
aagacaaaaacgtctactttaatttatgagatgtgatatatagaaaataaatacttggcatgaccaacttttacatttcggttttaatactaaaccaaccttacattaatccaatgctttatttaagagatgtgatagaaatctataatccaaaagctaggtttgtttaatttggttactagatgatgattagatttaccttcaatgtcagcaagaaagtcgtttcctgaaacataggtcttctccaactctttttcggttagtttctcccatatctgaactagttccatttgtgtgagaatgttgtcggtaggtctaacatacacagttttattcaacgttcggggatcattaagcgtcttcgctgtatattttgccatgtcatcttcatctacgaacaccactataataaaaccaatgggaacaaaaatagattttttagaattttcatgattataaaagtgacacaaatagaaaaaagaaaaatatgaagagagagcgttccataagagttcttctaacctttaacatttccggccccataaatatcaactttgtttttcggagggtacaaagttcccatttgagataaatttccgccgaagtatgcggcaagacaagcaccgacgaggtatgtgtgggag

SEQ ID NO: 15858 - DNA, 468 bp, Arabidopsis thaliana columbia
  unsure (1)..(468): unsure at all n locations
nnnnnnnnnnnnnnnnnnnnnnnctaaagtttagatgtcatggcaataggacccgtggtagaggacgttgccgatgatttcgcccgctactggtattgcaaatcggtttcacccttacagcaggtgctggatgtcccggaggtgaaatggcggatcgcatcgagttacccgcctcctggcataacgatgccatgacgcatcgttatttacgcaaaatggaatccagtccatttataaatcatctggttgatggaacattgccgcttatctgggcgaaacacgtttattaagtgatgatccggcgaaaggggagggcaaggcaaaacggcattcactgttaccgcagcgcctgtccgatatcatgggctcacccagtgaacgcatgactattatctcttcctattttgtaccgacacgcgcaggtgtggcgcaactcttacggatggtgagaaaaggggtaaagattgc

SEQ ID NO: 15859 - DNA, 495 bp, Arabidopsis thaliana columbia
cctttgtgagtgacactaatcttttgtgcaaatgattaggccacggtgaagcaaccggtcgttaaaaacatgatgaaggctctgtattttcaattcactgttggtgttttacctatgtacgcggttacattcatcggatattgggcttacgggtcctcgacatcgactctatctcttaaacagcgtcagtggacctgtttgggtcaaagcactcgctaacatttcagcttttctccaatctgttatctctttacatgtaagtctctatccagaccacaatgatgagtctttgagtcttaatcctaagcttaaccgttttaattcttgtgtttttaacgtagatttttgcaagtccgacttatgagtatatcggcacaaagtatggagtcaaaggaagtccattggcaatgaagaatctgttgtttagaacagtagcaagaggaagctacattgcggtgacactcttctctctgcgcttttacagtttctcggaga

SEQ ID NO: 15860 - DNA, 520 bp, Arabidopsis thaliana columbia
tttctatacatagatctgttcttgaacttctccattgctcttggagctgaaaaaaaaacacgagcattattggaaaaacagaaaagagccacttatagaaacgaacagaaaagaaaacttaccaagtccaattgcttcggatcctttcattatgcgcaaacgtttgcatgactcgacaaacatcctggaaatggggatttgggttggtgactaaatttagaaatctattgaaagtgaaagaatatgtgccagctacaaatgaggtaacatattgatgagttagtatttatatataaacatcttctctgtctctgagttctgtcccatgccaaccaaaagatggctgtgcgtgtttataacacatggatattgattatcattttgtgtatttttttgataagtaatatcaataataatgctttagagaatattgttttttttgtttagagaataattttggtcataataatgaaagcaagaagaatgaggaaactcacggccaggggacatcccaacgagc

SEQ ID NO: 15861 - DNA, 554 bp, Arabidopsis thaliana columbia
  unsure (1)..(554): unsure at all n locations
ctnnnnnnnnnnnnnnnnnnnnnnnctaaagcctgcctgcgttaaatatatgcctaagtaattgaatacttcaggcatatccggtcggattgccagcgcttggaaaaatcgttacgcgctaatgccctcagaccgagactatcatacaacactccgcgctcatataaaagctgtgcgcgttcgtcatcggttaaagcccgactggcaaggatttgttccatacgtgccagaatcacttcctgctgtaaagtcggttgcaatggtaccgcgaggacttcacttttacgccaggaagtattactgcatcctgcaagcgtaagtgctgtcgcaacgaaacaccagcgcaaaaaaggcttcatttcccactcccgaagaccacggttgaatgaacgtcctgttcccggttgctaacaaggcgtcctgcccggttaaaagccccccgccgcagcgcagggcaaatggcaaccttactcgccctgttcagcagccggagcttccggtgctgcagcaggttgagactgctcagtcgcttctttaatgctcagacggatacg

SEQ ID NO: 15862 - DNA, 337 bp, Arabidopsis thaliana columbia
cgccagtgtgtacgcgattaggtttaaaatcttatgcatggtttattaacttaaaataatctctagtatgtgtttccatatctggcattttgttagggttcagacaggtaatctcaatgcggttcaactttccattgttgcggtatgcactcaatttacgtaatgatacaatgcacccttcatctagcttactctttaccatatgaagctgacataagagttgctgatctgcacttgctttgtgaatggcgggatctggatttcacgcgcagatgatgagagcaccggtcatgtattgtcaaataaaactctttttgacataggtagataatttacc

SEQ ID NO: 15863 - DNA, 1120 bp, Arabidopsis thaliana
aaatatagtaatcaattgatggaattattaattaatttctttattttgggttgtttggagcattcttgaagtgagaaggggcaggtcggagccagtctttgccgccgataaagtccttgctcaagaagacggtagcttcttcatccgataactgttttgaccattctactctttgttccctgtctgctccgggaccataacatttgtattcaccataatatacagtactgaacaaattttgtcaaaattagtatacatcagtcaaaaatattcataagaacattaaccacaaaccaaaaggttaaaaagtacttttctttggttgaatctccccattggttccatccttgaggtgcgacgacattggagaagaaggaataagcaaagacaaccctagaataagctccccatggtcttcccaaaaatgtggaacctgatccagttaacttgcatcccaagaatgtaaagcctgatttctctgtggccgacgttctcatttgcgccgttatagacccattattcggcgacaacgagtgtaaatgacacctctacatatgaaaccataaaaaaagtaaggattaattaaacatgtaatgaatagttatagatcattccatgttaaaactatgagaaagttgactcttatctataaatggaacatgtttttttttctctctaagagctggtcatgcatgcatatatcccaaaaatatggaaataaataactctaatcactgggacgatccttaattgatctttagaaatagttgtagaaaaagtgattaaaacatgggatatatcatatatcattattatgtgaagtgtatttttaattggtacaaattatgtaaaatgagttattagtacttacttcatatagagaagaagcgcttccacaaatgaaatcggtggctccttcaatatagcagttcttgaagtaatggtttccattgtcgtcaaggagagtgtcttggtacgacgttatcacgcatccgtagaacgctgccttatccgccgccaccctcagtgcaaccgcacgtcccgccgttccaaacttattctacttacaatataacgcagcttcggcagatcgcttagccccgttcatcttcggcgcaag

SEQ ID NO: 15864 - DNA, 1037 bp, Arabidopsis thaliana
ctccaatcagccccccaatctttagccggaatttggttaatttcgtgaaacactcgaggttctggttcgggatgttcatttggtgctagtacatcctcgtcaacccacagttcagtttcagcttcaattgtagggctaggagtgatttcttcaattagttcgatcccaatatcttcctgcacagcagacttaggtacagttgtttcttttcactttcgctttttgacaggtggtaattcaacagtaggttcgccacgatctcgggctgcagctcggaatcttgtgactacgaatgcccccttttcttccttaatgctcctttccgaaatacactctattggaatgattcttctaacttcgggatcggatgttgatgttagggccgtgaacgcatctgtggtagtgttttctccccgtggtatgagaatgaattcgaatttcctaaaatttttagccaagtctttgaccacttcaagatatgcctccattcgtgagtcttttgcttcataatcaccattgaattggttaacaaccagttgcgaatcacagtaggcgaccacttcattgccccaactccctgtgccaacctaagtccagcgattaatgcttcgtactctgcttcattattagatgcgtgaataacaagcaaaatgactattcaaggatttccgaagtgggagattctaacttgattcccaccccggatccattctttgatgaggatccatcaacatgtagcttccaagtctggttttgcgactgttccttctctccgggtaccggtaattctgttaaaaaatcggctaggacctgagctttcatggcgactcggttcttgtaccctatatcatattcacttaactccacccgcccattttgctaatctaccggactggttcggactatggagaatagtccgaagtggctgattggataatacttcgattggatgggattgaaaataaggacgaagttttcgagcggaagttactactgcaagtgcaagcttctccatcattgtgtatctggtttcaggg

SEQ ID NO: 15865 - DNA, 719 bp, Arabidopsis thaliana
ttgctggagctgaggaagaaaaacaagaactagttgaagttgtggaatctcatactcacacaggttagctactctatatagcctttttattcaatgtttcttaacctgatgatttaatgcatatatttctcttactttgcaggtgtctgtacaccttatgtgatgaagttcttagctggtgagcacaaggtcgcttctactgccaaggtggctcccggtactaatgggatgtatgaagtcagacatggtggagatactcaccgtgtagacttggctgcttacacttgtacctgcataaagtggcagatttgtggaatcccgtgtgagcatgcatatggcgtcatcctccacaagaagcttcaaccagaggactttgtatgtcaatggtttaggacagcactgtggaagaagaattacacggatggcctctttccacaaaggggtcctaagttctggcccgagagtaatggtccgagagtgtttgcggctgaccaccagaaggagaagaagacaagcagatgacaaaggctgagaagaaaaggaaaaagggtgtgaatgagtctcctactaagaagcagccagaagctacgacaagaatcgatgcattgtggagtttgtggggcagctgatcataattcaagacaccataagagtgacaaggcttgtgtttagatgatttatgacattttggttcactcttgttggattatctaacactt

SEQ ID NO: 15866 - DNA, 803 bp, Arabidopsis thaliana
atatgtttttcttatgttatgcatagtaatgaccataaattttaagatttcgggtcggtttcggatttatttaaatattaaaatatcaaaattttgtgtgcaaatctatcaaattacttgaaattttaaaaaattcccaaaacaacacatgtaattttacttaaatatatcgaaaaataaacaaaaataattaaaatatctaaaaaaatcagaatattttctatatataagtataatatatactaatatttaaggtatgttccggtttagtttttcgggttctgaagtttttctctaacaagctttttctttaattttcatatgaaaaagttcaaaaataaaatgtatgaagttacaactaaaatttacttctaacctctctctctcttacacttttacagttaaaagttacaaacaaatgtttcttttacaactttaatttgtccaaagaaaccctaaacaataataaaattcaaaaaacatatttacaaaagagttcgaatgaattatcaggtcacaattctccagtgctctcgcaggagctccctagatttgtcgttacatcatgaactaagagccttacgattttcgtgcgggaggatctagggatctcgagacattcttgaagatcagcatcacaagctattaaaacccattcgttatcatcgtcaagatacttgatatcgaacgttcctgcatcaactttcagcctcttagccacttcatccttcaattccattatacctgaacccgaggatattctgaaccgtattatgtcgtctttgtacttgctttgattgtta

SEQ ID NO: 15867 - DNA, 1012 bp, Arabidopsis thaliana columbia
cgcaaaatcacggcgctggacgaaagacatgtaactatggggtatgtgttaaaggtgaaaattacgctgattcatctgatgaagcggatttctacggtaccttaactgatatcatagaactcgagtatgagggcattgtcaatttgaggatcacactttttaagtgtaagtggtatgacccaaagattgagagaggcactcggcgaagccaaggtggcgttgttgacgttctatctacgaggaagtataataaatacgagccatttattcttggtacgtaatttttaagaggtcaattatgtttctctgttaatttttaatactcttgtttgatatatatgtataacttgtgtttacaggatctcaagcagatcaggtttgttatattccgtatccatatacgaagaaaccaaagaacatttggctcaatgttttaaaagtcaatccgaggggaaacatttctggagaatatgaaaacaatgatccgactctttttcaaacagaaaatgatgatgctgttttactcactacaattgaagatcttgtactagaaaatccggtggaaagcttaaacccaataatccttgattacgatgtcggggatgctgaaccagaagacgaattccgatgtaatttatcgtcctcggacgaagatgaagtagaatatgaagagtaataaatgtgtgaagtatatgtttaattatttaataaaatatttgaataaattgtgttttataatatatcattgaacattgaatttgttcatgaatattccttatgcaatattatctcaatttcaagagtataaggttactattatgctactacttggtgactatgctataatctggtgggcttccaaataactaagcccatatcctatagagatgtgacaatatgactactctacaacgaatctttgcttagttgggtttcttactatcgaagcctagtcctgatagcaacagtgacgcttatgcgcttaattagcgaatgcagcttactatgtgac

SEQ ID NO: 15868 - DNA, 727 bp, Arabidopsis thaliana
ggaaaagtctataaaggaatacttccttctggtacacaaatcgcggttaagagagtctaccatgatgcagacaaggaatgaaacagtatgtggcagagattgctagtatgggaaggctaaggcacaagaacttagttcatctccttggttactgcagaaggaaaggtgaattgcttttggtctatgattacatgccaaatggaagccttgatgactatttgttccataaaaacaagctgaaagatcttacttggtctcagagagtcaatataatcaagggagtagcctctgcccttctgtatcttcatgaagaatgggaacaagttgtactacatcgagatattaaagctagcaacattcttttagatgcggatctaaatggaaggttgggagatttcgggcttgcaagattccatgatcgtggcgagaatcttcaagcaacgcgtggtagtaggaaccattggctacatggcaccagagcttacagcaatgggagtggccactactaaaaccgatatctatgcttttggatctttcatccttgaggtggtttgcgggagaaggcctgtagaacctgatagaccacctgagcaaatgcatttacttaagtgggttgccacttgtgggaaaagagatactttgatggatgttgttgacagtaaactaggagactttaaagctaaggaagccaagctgcttctgaagctaggcatgctttgttcacaga

SEQ ID NO: 15869 - DNA, 847 bp, Arabidopsis thaliana
acgcccaacgatgtaaaggttgccaacttcatgcacctcttatccatcagccttcggagttattctcctccatctctgccccatacctgttcatgaggtggtcgatggatatcattggaccattgcacaggtcaacccgaggcgtgcaatatcttttggtcttaactgactacttttcaaaatggattgagactgaagcatacatgagcatcaaggactcggcggtaaaaaccttcatttggaaaaacattatatgtcgacacagtgtcccatacgagataattacagacaacggaccacaattcatttcacacaaattcgaagctttctgtttggattggggaatcaaagttagttactctactccaccgtacccacaaggaaatggccaagccgaagccgtaaacaagacaatcctacgtaacctaaaaaagcgcctaagtcatttgaagggaggatggtacgatgagctccaaccggttttattggcttactgcacaactcttaggcgttctaccgaggagactccattttctttggtgtacaggatgaaggcagtggttccggccgagctcaacgtgcctggacttcgccgaacagaggctcccctaaacgaaaaggaaaactcagcgatgctcgatgattcgttagatactatcaatgaaaggtgagatcaagccttaatccggattcaaaactatcagcaagcagcagctcggcattacaataccgaagttaaaagcaggcctttctttgtaggagatttcgtgctaaagcgtgtttttgacaataagaaggaagaaggaccaggcaagctcggcattaattgggaaggacttatattgtt

SEQ ID NO: 15870 - DNA, 840 bp, Arabidopsis thaliana
gccagtgtgctctaaagacttccaacaaaagttgctgtaagcacgagtattttgccaaaacttgactacgataacaccgtcaattttgatatggagaaaagcaagaggatggagctttttattgacaggaatctgccagcttgtgtctcaagtctatctgttcatctaatcaacctagatgtatcaaattttgggttgacattgcagtttcacggtgtttgcgtgactaagtgttacttattataggagaacattgatcaggaactatgcattactgccgagtagtttgtatacttgcaaatctctagtgacatttttttttttttttttttgaataaaatgtaaaatttattcgaaaaaacttttttacatcaagtgcaacgtttgtttagaagatttttatacaggtcagaagataagaaaaaaaacctaagcttttgcaattatcttgaggcaaaccaagcttgcatacaacgatcatatcttcggtcaccttgttcacggatcgaggatatccggtttcggacttgtttgtcaagtagtctggtcattgaaactgaaagacgagattttcgtggacgttcctcgtatggtttgtctcccctccttgaaaactttgcaccttaaaggtgtgatgtatgtagatgaaggatctcttcaacggcttttatccaattgctctcttctcgaagaactggttgttgaacgatgtaatggtgccaatatgagaaagtttgccgttatcatcccgtcattgcttatatcaattgagatttatggttcgttatcatactgtatgtgatagacactccttctttgaagtattcaaagctaagtttt

SEQ ID NO: 15871 - DNA, 735 bp, Arabidopsis thaliana
atctagtgtgatgaggatttatctccacatctgatagacaaatcgttgccatctaacgtcggtacatcatgttgtgttaatgtagagctcaaccgtatgaaataaggatgcgaacgaggtacgacaaaaacaggaggcgcgataagggcgttccgatcgagtgtgattgcaatgctaaggttgtcgttgccacttctcttgatcctgttacaaccggaaaactttttttcagttgtccgcacgaaatatcagatgtaagcatcttttcttgagttaatgttctttattttatttattttattttgtatccctatgaatcaacctcctggttttttataagggtcccggtcaaggatgcggtttcaagagatggtggactgttgcattgtgtgacgagtttgacatgataaaagaggagacaactgagatgaagaaggatctggaagcagccaataagcgcgtcgagtctcaggcggaaaagatctttcttatggaaaagaagtttgaaacgctagagaagaagtatgagagcttgaacaagtatctatgatcttagcttaatctgtttttctcaatttgaacttctttgtactgtcaattatcattaagtcagcgaattgtgcgattataactcagccacaacgtacaatcgaattaaatttataataactcggctgttacgttagactaactcatccacaactcaatactatctcaaccaacgttggattaaaa

SEQ ID NO: 15872 - DNA, 959 bp, Arabidopsis thaliana
tgtaacccatgaaacgctccaatgcttcacagaagctttcaccagtcttctgtgaaaaaccagagatctcatttttgagtctatcaaattcctctaagtggtcgagtgggtcttccataggcagaccatggaacttgttcctctgaaacatcgagatgagacaactcttaatctcgaagttgttattctggattgcaggaggtgcaattcctttcctctgacggtgatctcgtggtgtatctctggcaccaatgtttgtagggccattttgttgattttgttcatcagccatttttagtggttgttggggtacaaggttgaccatgtttctcctttttcttagttcgagagctatgtggtcgatgttatcgttgtaaaggaggttctggttgccggttgatcgagtttgcatacagcagcagagtggtacctggatcatgaagacaacaagaaaaacacacagttagtaccgggaaatgaaaattgaaaaagaatttgatctacgcaaatctgaaatcttaaatgtaacaaacaaacactcaattggcaacggcgccaaattgataataggtttttagtcaattatcctaaatcactatcatgtcattgtagtaatgaaggttttcaatccaaatgggtgtgatgctaacaatctagatgcaatcagagttcatagagtcaagccaagcaatagcaggtttttagtttcaaacagttctaggtgaacatgcaggaaacagaaattcaagaaaaacagtaaacactcgaccaacacagcttgttatcaactacatggtgtggacgagtgacaggtcgagtaaacagtaaagacagtggtaaagatactcgactgcacagtctgttgccagacaactgcgtggtcgagtacacagtgatacaggcgaaaatgcaaacccaacaataccgacagatgtagtaacatagtgagtaacaatgaa

SEQ ID NO: 15873 - DNA, 687 bp, Arabidopsis thaliana
gtttcggctctgttatgttctgttttttatcaaatatttatgttacggctgagttaatgttttgtttttttgtcaagtatgttatgtgaaggctgagttattttctgtgaaggctgagttatgttctcttttttttttggcaaatatgttatgtgatgaccgagttatgttctataatggttgagttatattaagtgacgactgagatatgttctgtaatggctgagttagcttaagtgacgactgagttatcttaagtgatggctgagttaaacatactgatgggttttattatctcttgtgttgtagctgcgtgttcgtacaatggttgaaaaggctgagttaagcgagctgtttcattcttggccagactaattagaagacccagcactggataacttgatccaagacttacacgagcttaagcttgttaaaggttattgggatgtgaagacgagtgagaagaagaagaaactcgtaaaagataaagaagaggaggtgtctgaaactcccgcaaagaagcagaaggtctctcacagtgaggatgttcattctcgtgagaaagatgcagaaaagaagaagacgtagaagaagtaggaagtagctgtcgaatctgatgaggacgaggatgttcattctcgtgagcaggatggtcagggagaactgcagtcgctcgtggatgtggtg

SEQ ID NO: 15874 - DNA, 1255 bp, Arabidopsis thaliana
ataattatatacggttactaaacacccacgatttatttaagtttcttccattccccattccatctgtttcaacttgaaaacaaataagttatgctcaagttagaaaaagtcgacaagaatgaataaccatctggtgtcaaaaaggttgttcagcataaactaaactacttagttttctacgttttacattcatcgtaaacaaaacataatcgtctgcatatgttttttttttatctcaggttgctgctatcccaaaaatttacatcccggcaccaatacttgtttaaattattagctacgttgccgaagatgtcgtggatgctttgaaacccttggttatggctggtccaacatttaaggatgcaatgtattccaaggaaacactaagttgtgtccgcatagacaaatatcgttatttcatgtggtggttcatgccgcattccatctattatcattttttcacacaatgtcttgaagccaacaatccacatgctttgaaagctgtattgtacaaaccaatagcatatgagaattttgttgccgaatgctatagatctaccttatgggcaaagctatacggagagcattaaggataggaatcaaagaaaggaacaaatagtcccaaattttgaaagacaatgaaaagtctgtttttgatgttcatttctgatgttctgcctttcatttcagaaaatagttgcttattaatttctgatgttctgcctttgtttttataaaatacataatttatactctgtttactcctatgaaaagtcagatcccatcaaaatttgttcgttgccatgaatgaggtttgcatatttatgtttaagctaagtccgcaaaaatgatttccaattgataaccctttaaggccatatacgtgtgctcacgtcgttataataaattccaaacggacatatatctttggacatgttctcttggatagaacatatatttagcatttaattacaaataaataactcgactataaacgacaccagacgaattatctatctaatattacaaccacccccaactcaatacgtaatattctcaaaaataaatatgtcatatagtgtaacgacaacggatcgttcaagtaaccaacccttcgatgttaaaagttacatctttttctcgcagacgaagttacaccagttttggcttcaatcaaaggaaccttttcacttgctataaatacctctcctatacttgactctaccaagacaaccccatcacaaaagaaaaacat

SEQ ID NO: 15875 - DNA, 921 bp, Arabidopsis thaliana
taaagcggcgaacgtggtgaaatcgctgcgtaatccgtatctacaggtgagcgactggggctggggaattgatccactcggtctgcgtatcaccatgaatatgatgtacgatcgttatcagaagccgctgtttctggtggaaaacggcctgggcgcaaaagatgaatttgctgccaatggcgagattaacgacgactatcgcatcagctacttacgcgaacatatccgcgcaatgggcgaacggattgcagacggcattccgctgatgggctacaccacatggggctgtattgatttagtttccgcctctacgggtgaaatgagcaaacgctacggctttgtctttgttgaccgtgacgacgcaggcaacggtacgctgacgcgcacgcgtaagaaatcattctggtggtataaaaaagtgattgccagtaatggggaagatttagagtaggtaacagtgccggatgcggcgtgaacgccttatccggcctacatgtcgcacgaaccatgaaggcccgataagcgcagcgcatcgggcaatttagcatttggcatcagagctgttcaccccatcaagaacatccctgtcctgattccttaatgaaaaactactcttcttccaccgctaactgcgcgaagccgccatttccttcccagccttccagtcgttgataaacggtttctaccgcatctttaatcggctgggtcatcgggtagtaaaagccgacgatatccggctgaatgccgaggaaaatcacttcgccaatatcttctttcaactggtcgataaggtaattcaacggcatgttatgggtagtcatcataaacatctcggcgatatcatccgggtcgatgatgcggatctcgccggggtttagccccatatccgtggcgtcgacaatcagcagtcgtgtcctttag

SEQ ID NO: 15876 - DNA, 1033 bp, Arabidopsis thaliana
tcacaaaaagctcagccttgcgtattcttacaagttaaaaaacaataaacaacatgatctactagagatcgtacaaacacaaaaacataaatggtaattattacctaatgaacagatcaatttagagttcaaaaaaaccctaattaactagtgttaagctataaactaactaaaccagaggccattccattgcttcttcgcttaagtattcactaatatcgatcataaactcgtctttttcgttagttgaggaatgatcttgaagtggaacctcaaggttttcgttattaaaatccttgaatagattttcccaaaagctctgatcctcagtgaaaagcgttgatgtctgtgtttcttggggtacactcattccgttcttctcttcctctatttcacataagctgtcaacaaatccaagattaacattaaccaagtaaccagattgatcatcattaactaagtaaccagattgatcaaataatgactcatcaacaaagaagatatgattttgatcaaaacaagtaacttgtgacgaccgaggctcgccatggttctgataaaagcaaacaatttgtgaggaattcggagaataggtactagggttttgaccaaaattagaagcaatttgagaagaagacagagtagaggtactagggttttgaccaaaatcagaagcaatttgtgagaaaggagaagaaaacccaccatgattgaatatctcgtcggtgctaggtttttgatcggaaacaaattgtgatttttctttcttttcgagacaatccatcagatgcttcctcgttctcatcagacgatcctcaattatttttaattcagagatatcgtcgcagttacggtagaggtcagggtcttgataagcctgtgacttatcggaacaagaaataagggtagagtgagagatatacgccttatgcgacggagagttaagagagagaaatagaaatgatattgaaatgattatgtttgatacaaccctaatggggaaagttttccttaaatactaaagacccccaaa

SEQ ID NO: 15877 - DNA, 534 bp, Arabidopsis thaliana columbia
ctgtatcgatctctgtcacccagagcggcaaacagctcaccattagactcaccaaaccggaaatatatgttcgccaagttgctgtttcacatcccactgatattttcccatctaaggcactcgcgatgaactccaagtggcttcccaagattgcttggcggcggcgtttggatgcagatgatcttgaatccacgccccaagtaagtgctccacataggaccacaaagtaggcaagggcatgacctcttagctctgcaactagatccgatggtccttgttctcggtctgatttgtcagttgatagaaaccaagatgggatcgtttctttgatgagaacgtggaccacacctaagccaccggttagccataccaacgaggcactcagcgaacgagcaagcttcacttgagtcattgctgttgctagagaactttggccgtatcttgatccgttcttcactgtcttcagcttttccagcttctcctttgagagcctgttctgggctatatcctccacgaatgtatcagcagagagag

SEQ ID NO: 15878 - DNA, 868 bp, Arabidopsis thaliana
ctttgaatattttgtaacttttgttatttgtcgcactaaatacatttcaatgtttcattctgtttttcgtgttatgttggattaggtaaaccaacaagatctggctgatacgtttcaaccaccgttcaagagctgtgtggttgatgggcatgttgctagtgtcatgtgttcttacaaccaagttaacggtaaaccaacatgtgccgatcctgatctgctttccggtgtgatccgcggacaatggcagctcaacgggtaaggttatttggatccaatggtttaattttatggagggtttggttatctaaaatcatcggttgttttttttgttagatacattgtttcggattgtgattcggtagatgtgttgttcagaaaacaacactatgctaagactccagaagaagctgtggccaaatctctattggcaggtttggatttgaattgtgatcatttcaatggtcaacacgcgatgggagcggtcaaggcgggtttggtaaacgaaacagctattgacaaagcgatttcaaacaatttcgcgactctgatgcgtttagggttcttcgatggagaccctaagaagcagctctacggtggtcttggtcctaaggatgtttgcaccgctgataaccaagaactcgcaagagatggcgcaagacaaggcattgtcttgcttaagaactctgctggttcgcttccgctctcaccttccgcaatcaaaacattagccgtgatcggaccaaacgccaatgccacagaaacaatgatcggaaactaccacggtaaattgaaacaaacatagaagaaacacaagtgattatcggtctcgatgattcagttttcaagcttaaaatgtgtgaactgagaa

SEQ ID NO: 15879 - DNA, 1135 bp, Arabidopsis thaliana
cgatgtcgatgaaaccttcaagttcttctgaggaatagagaacccttttccgttgcctatcagtttagacttatgctcagctagattaacatcatgcccttgattctaagcacccgcgtgaccccacgattgttcccttcaatcagcaaactgcggacgatatcatcagaagtaattgccttacatctgaagttaagatacttgaaatctgaccagcccggtggtagcttctcgatcaagcaattcgtcttgaaaacgttatagatcgacatcccttccaactcgatctcttgaaagataagttgaattgcctccacctgttccatgattggtttggagtccaccatcttgaaattcagaaacttcgcagttgagaatctttgcattccagactcatcagtcttgtacttgttctctaaagttaaccacaatgttttggaagacttggccttgctatagaggtcaaacaaatcattcaccaaacggttcaggattagacctttgcaacaatagtcaccttgagcccaggtatccatacctccaaccgtatacacatctgtggtacattgcagaactattggtggatcctctttgaggtacctttccatgtttatgctgaccaaatagtagcgcatcttgtcttgccacgttttgaacccggatttttcatcaaacaagtctggcatcatcccttgggaagcggagggtcgtatggtagtgttggttgaaccattaccgaacagatttcggcgcacgctcatgtctcttactccaagaacacggcgatcaaaactcgagtttagggtggtatggtaggttgatttcccagaggccgaaaaggcgagtgacgcggcgatcgcgaggctaccgaggcgaaactggcgagagaaagggccgagaaagaggcctttgtcaacaaggagattgccatcagggtggccgagcgcaaccaaaagatggactctaaggttgttcgctgcaggcgactgctcaccgaagcgagaggacttagggacagcgaagtggctcgggctgcgcaaacggcgaggcgagaaacatcggagaccttcaccgccaagctcaaggtggccgatgagaaaatgtcgctcgtcgaggatgctaacgatcagttgtg

SEQ ID NO: 15880 - DNA, 583 bp, Arabidopsis thaliana columbia
caaccttaatcgtacgatgttactgcttttgtagttttttaaaaagtcattctttttttgtgagcaggtggctttgccggtaatactggccatgatccgcatgttttgtatacactcagtgctgtacaaatcttggccctcttcgacaaactcaacattcttgatgcttgacaagtttcaaattgtatcctttacgcattcagcttcttgtcactgtgaaaatatataaactcggtaattcgtttgttgtagatacaattatgctttttctaaatgcaaaaactagatattgctgggttacagaatgaagatggatccttctcaggagatatatggggcgaagtagatacaaggtattctttcttcatagctttttgtttattccgatttgtgagtttcattatgtttatctgcaagcttgtttaatgtaggttttcttacatagctatatgctgcctctcaatattaaaatgtcttgataaaatcaatgtgaagaaggctgttgattacattgtgagctgcaaaaacctggatggtggttttgggtgccacatggagcggagtctcatcaggacagagtatg

SEQ ID NO: 15881 - DNA, 555 bp, Arabidopsis thaliana columbia
atacagatttaaaccttggttcaatggaggtcaataatgtaagagttttgtagcctgtcagaaatagatgtaactatttcaaatggatgatcttctctacacaagtcacaaatactaaacaaaaccacaactacaaggactatttaactgataattacgttaagaccaaaacatatgtactgtttaatttctgactttgttagaaaacaatcaatatagaaagacaaattgataaataaaaccatatgaaaaaaaaacaaagacccatacaacaaatctaacgcaagggtcattaatgattaaccaagacaaaaaatatctctaatataaatattatccactacttcattcttcactctacgacacacaaaaacaacaatggagctactcacaagcttgaccaactggttaactccgacgactctcttcctcctcctcaatttcacgatcgccaccattttcatcaccaaccggttcagttcctgttcaagaaaacacaaccaacatcaagatggttacgggtcgtcgggtcatgccaaaatcaggcacggtttg

SEQ ID NO: 15882 - DNA, 568 bp, Arabidopsis thaliana columbia
cgaagaatccatgtcagcccacgcatgacacgcccattcttctcgggcactcatctaccgtatttttcctcgcgattaatatgtatggggcatgaatcatgaaccgtgattatcttctaaaggatgctgtgccaactacccacgtaaataacgtggtccaacattaaattataacaatttaattgaaagctcttcaacaaaaaagttaaaaaacaacacacatctatcattaaatagtgtttgagttaaaaaagaaacagagaagattttaggtatgcactatcaaatgatttaaagaaacggtagaaaccttgtttttaaccgtcacggtccctatataaacctatgagctagcgacgacaagtattcagtataatcaatcagaaaacaagtagaaactttaaaacgagagagagagaaagaaatggcgacatcgggaacgtacgtgacggaggttccgttgaaaggatcggcggagaaacactacaagagctggaagagcgagaaccatgtcttcgctgacgccattggcaccacatccaaaatgtcgttgttccgaaggcgacat

SEQ ID NO: 15883 - DNA, 545 bp, Arabidopsis thaliana columbia
  unsure (1)..(545): unsure at all n locations
nnnnnnnnnnnnnnnnnnnnnnctaaagtctcgatgtaagcctgaatgacctgcgtttacagattagcttctttgaatatgcgctgggtgctgctgaagatattgctaataagatcaagcagaccactgacgaatatatcaacactattctgcctccgctgactaaagcactgtttaaatacgttctgtgaaggtaaatatactatctctattcctggtcacatctgcgttactgcattccagaatagcccggtaggtagcctgttctatgatttctttggtccgaataccatgacatctgatatttccatttcagtatctgaactgggttctctgctggatcacagtggtccacacaaagaagcagaacagtatatcgctcgcgtctttaacgcagaccgcagctacatggtgaccaacggtacttccactgcgaacaaaattgttggtatgtactctgctccagcaggcagcaccattctgattgatcgtaactgccacaaatcgctgacccacctgatgatgatgagcgatgttacgcaatc

SEQ ID NO: 15884 - DNA, 593 bp, Arabidopsis thaliana columbia
tgcagtaaagtgtcactctcaattcatcatcacatatagtcttaagaagcctggatctatagaatgctcatggtgcggcaaaaatatcgaagacgattgtttctatcgttgttctatatgtaacttctatttggatctctcttgctcccaaagtattccacttctcctcgttgccaacccaaagagtcatcagcatccactcgtgttctacaggcgaccactcttgactccatgtgatgcgtgtgggttagtcaatgtgttggatccaagctatgcttgttttcaatgtaattatatggtccatcaaagttgcatagacttacctcgagtcataaagatcacgcgtcatcggcatcgtctttctcacattccttgcgtccaatctccggtttcaccatgtggggtatgctatcagaaagttgaaaacaagtacggcctatattcttgcaaccgctacgaagatcactcttatgtagtgcattcgaaatgtgccacgcatgaaaatatatgggacgggaaagaactcgaatgggaacctgaggaacccgaaacattgaagatatctcccatttaagaaggttggtactgatatg

SEQ ID NO: 15885 - DNA, 527 bp, Arabidopsis thaliana columbia
catcttgtctgctcgtgagacgaggaagatgattgtgagagacctctttatcatactggggttcccccatttcctctcccttcccacgagtaagatgccaaccaagcatccgctctgaaattttctccttctgagggtagttgaactcaacagtaccttcatcagctaagccatcctcgtctttatcaccaggaatagcaggactacctagaatcagaaattagcaaattgctataaataccaatctgatccaaaattcaaaacatactgataaactatcgatgaacaatgaagacagtatacttcagaaggatcaaaagagaacctttgagcctcttgtatctggttttgcactgaggacaagattgattcccatctttcctctcatactcgtagcaaggccgacaaactgggaatgaacaaatatcacaagccacaaaacgatctccatcaacagtcttgccaacattgtcactacagatctggcaagtctgcggaacaatgttcttcatcggcttccctacaaa

SEQ ID NO: 15886 - DNA, 568 bp, Arabidopsis thaliana columbia
ttcgtcatcataatcccgtagctcttctgaagttgcatcaagaagagctgcatgaagagcacctaaagctactctcagtttgatgtatccttttattcgtttcaaaattgaacttagcaaggcctgtcaaaatcaaacgggaacacacaaagaacttaacaattaggtatgtgcctattaagaaaccagtagagtggcacttttacaaagaaagtcaattaacagacttacacgtatgttgagaaacaaaactgcatccaccagatggaaggccattccatggagccaccagatgtgcaaataatgaccgagggccattaccaaggtagccatgtctaggaagaaaccaagatttcggttgaggaggcctttccattccaataacgagcctattcaatgggtaagaggtcaagttagtaatgtgaacaccaaacaggacaaaaaatttcaaataatgcacgcctgcagtctaacagaaaacataattacaatcatatgccgagaaaaagacaaaacctgctgtcatggaatcataaaactttgatctctggcaatctgaattcttgac

SEQ ID NO: 15887 - DNA, 581 bp, Arabidopsis thaliana columbia
caagttgttgtatagccaaaaccgaagaagaaaaacattacaagagacaacaatacaaaagagaaaagaggagattctggagggagagaagaaagttacgaacagccaaagcatttcctgaaagagagaaatccagaaggttctgggatcggatccgagatattctgttttgcacttggaagatgtttaaagaaggccttcacggctccagccacaccatcctcgtccttcatcgcctttgctagtgtctctgcactgctctttacctgctcacacttagatgctcagtttctttgttataaaacaatgccatgaccagccacacaagttgatggtcatataaaccaagctgaactgcttagactgcaatcaaaccaaaacttgttaaaacccgattggttagaaaatactatttaccttatcgtcgagcatgaaatttatggcatcttcaagcttatgaagtgagaattcatccactgggattggtgaaggaccaacacctctagcatgcactcgttctcccaaaaaggttggtctcaaagaaaggcacgattgtagttgggcactgtgttcaaggaaaa

SEQ ID NO: 15888 - DNA, 616 bp, Arabidopsis thaliana columbia
  unsure (1)..(616): unsure at all n locations
nnnnnnnnnnnnnnnnnnnnnctaaagagccacggcgatgaatgcctataacgcgtaacaagcactgcaaaaaacagccggacggttttcacctccggctatttttttaattgtgattacgcatcaccccttcctgaacggtcgaggcaaccagtacgccgtcttgggtataaaactcaccgcgcacaaagccacgtgcgctggacgccgaggtgctctccacgctatacagcagccattcattcaaattaaacgggcgatggaaccacatggaatggtcaatggtggcaatctgaatccccggttcgagaaaaccgatgccgtgcggctgtagagctaccggcaggaagttaagatcagaagcgtaaccgagcagatactgatgaacgcgcaggtcatccggcacgctaccatttgcgcggatccacacctgacgatgtggttctgcgacgtgacctttcagtgggttatgaaactccaccggacggacttccagcggacgatcgcagatgaatttatctttcagcactggcggcacgaggtgcgccacggattgggcgatttgcgtttcggaaggaggccatcagcgctggcgggacggcattgttttttgatg

SEQ ID NO: 15889 - DNA, 751 bp, Arabidopsis thaliana columbia
ggcttgataacaaatagaacagtttagtttcacggaacgtcaccggttactctagaatcatagtttgagttcgagaatggtgcaataacaatcctaatattagctagatctacaatttatctatctcccgagacaattccttagacctgacgctttaatcacttgaatctacacctcgtttacttgcttatttgtcgtttgcattcaattaattcatctaacctattaaataacatcataagtctatagtgtgaacatcgagagttcaatggaatttgacccttaagtgctaacgacgatctcttatttgagggagtaagcttaaggcaatttgagctatatcaacaactgagttatatgcttaaggaaaaacaaaacattcagtcaatttacatgtcacggctgagtaatatgttccagggaagacgaaaggttcggtaatattacattacggatgagttatatgcttaagggaagacgaaaggtttagtaaatttaaatgttatgactaagttatatgctcaagggaagacgaaagatgtgtgtaaatatgttaccactgagttatatgcttcagagaagacaaaggtttggcaaatcacatgtcacaggtgagttatcatttagggaagacgaaagattgtgtaaattatatgttacagctgatttacacacgttacggcttagttacacactttacagctgatttatattacagatctaagcaacatttttttggggaagcaatatg

SEQ ID NO: 15890 - DNA, 557 bp, Arabidopsis thaliana columbia
cttttagattaaaaaaaaaaagaaaaccaatttaagcttctccaaaatcaatcgaatgacatgaatagacatactttaacacaaagtgcatcaagtcgacaagtgatgcgtaccttgcagtgcaaacagttttgagcgttgatctgcagttttggcttaccctcttcgtcttcgatatatcttttttatgttttgaatcaatacagaaacgaagatgagtatcttgttcaaggaacttgatatattgatcaaatttcatatggtgagagaaagagagggtagagaaaggaagttattactcgtaaacacgggctgggcagtaacgtgactctggcgcacatactctggaaagtttaccttttctggaatcttaggatccctcaagcgcaaatgagatggttgatcatgatcatgattggtattactcctgttatcatcatcattcaggatacaactacttgtaaatatcataggaggagtacttttacatttaaagatactgtagtttatgctgtggtacaaacctgtataaagaagttggcacatcaaacgacaaa

SEQ ID NO: 15891 - DNA, 400 bp, Arabidopsis thaliana columbia
tagtaacggccgcgggcgccagtgtgctctaaagattgatccgcagttttatcaaatgtgcccagcacttcacgctcagaagccagcgctttcttacggtcaaatttgtgttcccacttggtgatcaccagcaccgccagcgcattacccaccacgttcagcgcagtacgcgccatggcgagggtacgggtctgcgccagcaatatacgccggaccttccagcggaatacctacgctacccagcgttgccagcaagaccacaaacgacacgccaggcacgccagcaatccctttcgaggtcaccatcagcgtcagacgcagaatgatttcctgccagatggacaggtcgatgcgagacaactgcgcgatgagagatagcggcaatactttgatacagcgg

SEQ ID NO: 15892 - DNA, 610 bp, Arabidopsis thaliana columbia
ctgttcaatccaatgccattgtgtgattgtgctggtgtaatctgaaatctgattatgtatgtgacagcaatacatagagctgctgggccacaactcagagctgcatgctatgaggttcctgaagttcgtcctggagtccgttgtccaactggagaagcaagaattactccgtgagattaccctttttttaactcgtgtataaatgtagattgaggtagtttgaaattggtattgttgagtgatggaaaccagttggattgaaaaattggaacaggggttttaacttgcctgcatcgcgtgtgattcacactgttggacctatctatgactcagatgtcaaccctcaagaatctctcaccaattcgtacaagtaagcgtaaacactgtttctctcgtttactatacttgacatgtttgtttcctctggtaccaacaattcatcttttttcttgctacagaaatagtctgagagttcaaaggaaaacaatatcaaatacattgcatttcctgccatatcttgtgggatttacgggtaaagttgcacaaccagagacctaagtctgtcatattgttttcgtatttagtttttttgctcttagagtgagtatga

SEQ ID NO: 15893 - DNA, 480 bp, Arabidopsis thaliana
gggcttatgactgcaatggttctattgtgggtataaatgggcatattcgctggttactcctcgtctcgccttcacaaaatgttcaaaggaaacaagtggaagagaatgaccttgaagactgcattcatgtttcccggtatcctttttgctatcttctttgttctgaatgcccttatttggggagaacagtcatctggagccataccatttggtacaatgtttgctctcttctgcctctggtttggcatctcagtcccactagtcttcgttggtagctatctgggttacaagaagccagcaattgaagatccagtcaaaacaaacaagatccctgaggcaagtaccagagcagccgtggtacatgaaaccagtgttctctatactaattggaggcattctcccgtttggagcagtcttcatcgagctcttcttcatcttgacatctatatggctgaaccagttctactacatcttcgggtt

SEQ ID NO: 15894 - DNA, 814 bp, Arabidopsis thaliana
tagctagggttaaatatcgatttcatagttttgtgttaggtcgagtttgggtgcatgaatgcgttaagatattgttaaatatggatttcgtagttttgtggtaggtcaagtttacttattaatggtttttaaaaacaaaacacgggtttaatatgcacacggttatattttgcgatacatcatgtattttcaacatggttcagggttttacctaatataacaaaatatatttaaaaagtttgtcatattttaagtgttttgcccgtacaaacatcaaggttttagaacaaattacatgccattaagtttaacacagaatgtttagggttatacaaactctaatttcctgattcttaagataacatctgattttctaatcacgtttacgttgctcacaactccaacatgaattagtaatagcctcttccacaagcggtaggactgttacttttgggcatgatgttagccgtatgaacaagttaaacgcttatatggcatgtctgggtattaattccaaccttatgctattttattttgtttgaatcatattacttaaaacttatgcatatggctgttattagggacattgattttggggcttgtcgaacacttcccgccatcgagttgcgtgagattgttgaattcaagactgttgtacccaaaatggtatgataaatatcatgttaccaggaaagattacatagtgctctataaacatagggtttgccttaaacacctaatatgccttctactctatttacaggttatagacatcttcattaacagcataaggattgactggcgtgcaaataat

SEQ ID NO: 15895 - DNA, 592 bp, Arabidopsis thaliana columbia
ggatgacgaacctgaattgggggttgacgctaacaacgaagaagactgcggtgtgtatggtgatgaagactgcgatgctgtggaagacatagtcggtggtggagagaatgatgataattgataataggtttttaagatcaattaatcctaaaacactatcatgtcgttgtagtactgaaggttgtcaatccaaatgggtgtgatgctaacaatcaagatttgatcagaaattactaagtcaagccaagcaataacaggttttggtgtgttctagcagtcctaagtgaacatgcagaaaacaaaaacaataaaacactcgaccaacacagctcgttgcagagcactgggtgtggtcgagtgacttggtcgagtaacaggcagtaaacgaaacagggatactcgactgcacagtctgttgccaaacaactaggtggtcgagtatcaggtcgagtaacaggagagaaatgcaaaaactaagcaacaggtaacaagatgcagtaaacaacaacaaagtaaacaataaaattaatcagataaagaattcccgaggatgcggtaattgagtagttttgtctccacagtttataggtga

SEQ ID NO: 15896 - DNA, 503 bp, Arabidopsis thaliana columbia
ttcttcagccacgtcaggcactgtatgaagtttatcactgtccatcagattctccccaccactgtcgccggatttctcatcttctcaatccttatcatcaggaaatctaacaacaaccaccggacaagcacaatggtgaactgagtaatcactgacactccctaatctccctttactactcctcttcgtagcaccaaatcctctactacccataatcaaagtacttagccctaacctctccacatccagacaaagcctctccttcatatcgtgatccttgacgatatggatcctaaacggaatatccgcctcaaccaaaggctgagcaacgtcgctcgctttcttattagtgacaatgtcgaaatcgtcctcaagcttcctctgcgactcttcgttatatggacagactgcggcgacaaatccatagcgctccaatcggcgccgtaaagtacactcgtcggttgaacatgaaggagaacaacggcgtcacatgatcggagata

SEQ ID NO: 15897 - DNA, 551 bp, Arabidopsis thaliana columbia
ggaaaaagctgagagaaaaggcggaagagtggcggcggttggccgaggaagcgacgaggtataaacatggttcgtcggtcatgaatcttgagacgcttatacataaagttttcttagaaaatcttagatgagaaaagttctaatgcggtagttaattacaaatatcatatgatagttttggtggtagaccctagaggcctatagatgtgttactcgtttcttttatataattataattggtctttattttctgtttgtaatcagtgtaaattgctatagaataactttagcataataacttttatttttgtttgttgataccaaaatattgttagaatcacaccactaatataaacttcaacaaaaaaaaaacttcatcttttcctgtgcaagatgtactacggaaacaaattttgtattcaagtctagaagagaacacatttcctgtgcaagagaacaagtcctctatacatcttttcgcaccttgccgaccaattggcgaatgagaggtcgctcttgctggaggcggtacgtaggtaaaaggtcctttt

SEQ ID NO: 15898 - DNA, 766 bp, Arabidopsis thaliana
  unsure (1)..(766): unsure at all n locations
gtcggcaatcaataatattacattgaagttcaccaccctattcctagacttgatgatatgcttgatgagttgcatggttcatgcattttctctaaaatagatttgaaaagtggttatcatcagattaggatgaaagaaggagatgagtagaaagctacattttaaaacgaaacatgggttgtacgaatggttagttatgccattcgggttgacaaatgcacctagtatattcatgcgcttaatgaaccacatccttagaacattcataggtcatttcgttgtggtttatttcgatgacattttggtttatagcaagagcatggctgaacatcttgatcatctagaatcgggcatgaaagtccttagggaagagaagctttatgtcaatcttaacaagtacaccttttgcacggataatcttgtttttctaagttttgttgtaagtgcagatagcgttaaagtagaggatgagaaagtgaagacaatcaaggagtggcctagccctaaaatcgttagagaagttcggagctttcacggccttgccgattttaataggcgttttgtcaaggattttagcaccttagcctcacccatcaccgaagcaatcaagaaagatgttgggttcaaatgggaagaagctcaagagaaagcttttaaagcacttaaagagaagcttactaatgcccctatataaaacttacccggttatattaaacctttgaaatcgnatgtaatgcctctagtataggtattggagttgttttga

SEQ ID NO: 15899 - DNA, 450 bp, Arabidopsis thaliana columbia
  unsure (1)..(450): unsure at all n locations
gtgtgtttaaaggggatcctgaacaaggaagagtaacaacggctgggaccggagcggaatacatgatttntgaccagtttggtagtggaacattagagcgacagggacaatttgcatgttagccgctgaagtggtccggatcgggacacagacgcttgacaccatagcacttctgcaatctcgctgcactcagtatttgtagagacggaaattccaagacataaaagtttttgggaatacctgaacgtgtgactgattccccgatcacgagnaggtcgntctcgagatgngagngcacaagaatntgcgntggggttttgccgtatttatatgcgagatcgcgaatgactttaccatcgaaaangnatttccatacttgtgctaatgggatctcggattaggcatcggatttctgcgtgcagacctagaggcgtgtagacggccttgttg

SEQ ID NO: 15900 - DNA, 634 bp, Arabidopsis thaliana
tcgaattgtggatagattagagaaagggactcagaagaaaatcgtgaaaatggtaagggttgagtggaattgcggagatagagaagaagatacttgggaaactgaaaacaagatgaaggcaggttccccggagtggttcaaagagatgggtaaaaagaaacttgggtcggattcggcgacgaatctcattcaaggggggagacttgtagcgtacgcgatcttcgataggatcgccggatgggacttggtccgagattgttaatatgaaagcatgtaaagtgcataataacactatcaaaaagtttgatggttttgtttttatataaaaaagtaatctggttttactttttctaaagctctcgagttcatatatgttgattgttcagtcacccagtggaaaccgaacagtctttagttaaaacaaaaaaaacaaaaaaaaacaaaaaaaaacatgtgaagtgaacgttgtgtttattactttattatactctttcctccttgagattgcagtgtaaaggctgagagattctggagctttgataatggcgaatcaacatttcttcaagccactttttcctggctttcacagccacttggtaaatctttctctactctgtatatgccctctgagaag

SEQ ID NO: 15901 - DNA, 575 bp, Arabidopsis thaliana columbia
ctacatactcttagagcaaattagattttatatggtttaatggtttttagttaatcttgtttaacaaaaaacaaaccaagattcatgtctttcttacctgatttaaccaaaactgtcaatatgtatatattaacgtctacttttacaggtcattatgttcctcagctcgcccaaaaaattcatgagtacaacaacgcctacaaaaatccagtaatcaatcttaaaggtttcatggtaagaactaagtaaggtctatttatcacatttccaaaactattactccatattcatatatgtccctaatatctccttgaaggttggtaaccagagatggacaaaaacaacgacagactagggacgataacgtattggtggtctccgcgatgatctcggacgcttcctacaatcgcatcctcaaaaactgtgattttacagcggatagattcccaaagaatgcgattcgccatttatgtcgctgctgccgactttggcgacatcgatcagtacagcatctacacaccgcaagtgtgtaccaccacaagaccaaacgaaccagaccaagtttgagcagatga

SEQ ID NO: 15902 - DNA, 1327 bp, Arabidopsis thaliana
cctagccgcgcccataaagatgcggaaagcaacctctattcccgtcttccccgtccttcagaacacgcattttctggaccactcaagccatcctcaacccgtcttccagtaccagttgcagttcaggctcagtcatcttctcccagaatatctcctaccgcttcaccgcctcttgcttcttccccacgaatcaacgaactccatgagcttccaagaccaccaggtcaatttgcaccgccacgacgctcgaaatctcctggtttggttggtcattcggctccattaacggcttggaatcaagaaagaagcaatgtagtagtgtcaaccaacattgtagcatcaccacttccggttccaccgcttgttgtaccgagaagctactcgataccttctagaaaccagagagcaatggcccaacaacccttgcccgagaggaaccaaaacagagtagcctctccaccgcctcttccgctgactccagcgtctctgatgaatctcagatcgctgtctcggtctcatgtcggggaagttgctcagagcggactaattagaggtaacggaaacaaaactaacttactgtatttgtaacatatctttaatcatcaatgattttaagacatggtttgtttatattaacgcaggagtaaaactgactgaacactgaccttgtaacggttgcgtttgatcgaaacgttagttgtagaaactagaaagagacccataagtaaatatagaagtcgatatttttgtatttcgttagttgttgaatctcctaatttgttcttaagcctccgatattttggatcttttttatccttgctttgaaagcaacgtcaacggaaaaattactttcttacttaactctgagaaatacgattaaaaatgagaatttaaaggaaatgatacacttttaaattcaagaaatcgataaaccttactataattataactttttgatcaagaaaatagatggatattttctttctaattatggattttgctttacacaaagggaagtgaaaatgacagtaacatgaccagaatttgggtagagagataggaagacaaatacgtttaccttgtcacgtgagcaacccaaactggaaatcacgtgatgattctcactagcaaatgggccaaggttagtaggcccatgtagaggataagtacctaacttctatcttctctcctctaatcttcttctttagtttgattgatttgatttgaatttttgtattcaagagcattattctctttgattgtgtataatttgcatcaaatatcctaatttaaagttttgagatcgtgatttgttgtgaatggcgtg

SEQ ID NO: 15903 - DNA, 777 bp, Arabidopsis thaliana
tccccgtgttaagtattattttcgtaaaagctatctatatatttcatggggtctttaaacaaaatgatataaaaaatcgatgttcttactattttatattgatatcttatcatgatggccgtgctacggtttcacttcacggggacctctttggctggtgtggtcagtggtcacacacatttagggtttgattggttcttccttctaccacccgcaaacccagcgtttgcagttggtaacggttgttagcgattgacaccaatcatagaaaccgctagatatcgctttggaccgttcgaaatcgccaatttttgaaagctctttcccgcaagcgtttgcggtcgcgggcggtagagttaggttaaaaaaaataatcttttttaattaattaaaataattatggcttccacccaaaccataatcactataattaaattaatctaatcttttatatatcttatttttattaaaaaaactaatcaatatattgtaaccatattctctcaattatggcatccgatgaaaatcaaaatcaataatcaaacataaatatcatctatccttttatttattcattagctagtgtaatttttcgactatttcatggcattgttgtttttattttattttgtattcttttaaattttttgattgaatacatgtttcgatttgttttctggattagaaaatcatttggtcggacgagatgatatattgtatttttatttggtcagaaaatcaatttttctaatattatcaatttatataatatattgt

SEQ ID NO: 15904 - DNA, 859 bp, Arabidopsis thaliana
tgaggagcaatattaactgcataaactctactacaagctctataaaacgcttcactaactcgtaactctccaacatcccttcgtggaggctccgctgccaaaaaattgcatagcaagacaatcagtactagagacagttaagaagcacaactaatgcaaaagtatgatggacatcagttcgtaaatacctgttacatctggtagtgaactaactggaacagggccccagaggctaagacaaaaattctgccagtcaaacttactaaagaactcaagaaaacgatagagaacctacaaatgcaagaagaccagtcaggaagattgaagaagcaatcttgacagaacaaaggcagtttcataatgacattacctcaagaggtcccgaaaatgagttgttgaaaagataaaatatgtaaagaaccaaggtttccagggcatatgtcgaaataagcccatggtgagctcccaatatacggctctcgtagtaacaccaggctttaatcaatataatactacgcttgaataaatggttctggtttatatagtgatcaacctgcatatatgaacagtaaagaggtaagaaatcaaaagatctgcctaactcaggaagagaaagcaagaggcatgttgtcttcggtggaatgctaacctcctcaaggaagcataatgtacacagccctccaatctggttgaaagatatatctaccacaatattctctaccagacacttaattatcttcacctgaaacattgtaccagtgaaaaatcattagacgatccagtacgtcaagagactcaaccttacttggaataaatatcaatggttcatacagcaaacatagaaagaggagaaaaaaga

SEQ ID NO: 15905 - DNA, 673 bp, Arabidopsis thaliana
tctcgattgtgagattcgccgtccattgcgcggagaaaaccggaccggttacgttgaaattggaaactgagaaattgtttacggagaaaagcggtatttgaggacggaggactagccacgttatggtggtggagatgcagaggaggacgactaaaacgattaaaccggtgaaaattcctctgacgaacccggacgaagctggtctttggtaaaccggattttgctgagccgggtaagatgaaccgtaatatgaagcgggtggggcttgtgcgtaagggtattgttggtaaggtgcgtttggataatttgggtatggtggaggcggttgatggtagcctggatagcccattaccggcgggtacgtttgctgttgcgtctgcggtggaggcggttgagattgtggtggaggtggtggtggttgattaatatcgcgttcggagttttgacccggacccgtatcgggtttgggttgggtttcttcttccggagagaaggcatcgttgtgtctccctcctctctctttttttttcttcgactaattttgatattaatcaatttttttccgggagattagtggaaagcacgaagattaagcatattttgccaaagatttttctctgtctttgttttttcgttaaagaatcaactctaataaatttggataaaaatagtg

SEQ ID NO: 15906 - DNA, 603 bp, Arabidopsis thaliana columbia
cataattctggacttgaagaagaagatcaaaccgaaaatcgatgtgagactcgaggccaatcatctggaaagtgcgatagtactggtgatgaaaatgaccaagttgaagattttgctcttgttcaatatattgagaacagtaaatgtcataggtctaattcttttcccagtagcattctcagggataacagtgagaaagaatcaggattagaattgcctaatctgcacagatcacattcggtggggaaagtaggtgagaaaaggcctggtgaaggcagtgacttggaggagggatcaaaaagacagagagattgggtggcagtttctgaagctaatgaacgcttcaacatgtttaaaacaagcggaaaccaatgcgatccggaagaagaaggaaagacaagctcgttcaacaaaagactgattgacggtgctgctggaaaaagggtcagccatgaaagtctggttaataactctacatacaataggacacacactggcagaacaggtccagggtatgctgaagaacatcagctgtttcctgcttcgtttaagatgtgtgacatagatctagggggagcgtcggatgtgaatgatgggataaag

SEQ ID NO: 15907 - DNA, 607 bp, Arabidopsis thaliana columbia
gcaacacacacgattcctcctccccacagtttctacacatcctcctcctcctcctctccgccttatcctgcgcctccctttctaatcctaccctgcgccttaccgtttcttcaccaccaccaccacagctgcttccgcagcacgactccgcatcgtcctcttcgttcatgtttttctctaatcctgcgccgcgtgatacgtccttaacctgcgccagaacatgctcgaggttggttcggaggtggttagccgtggcttcgttcgtctgagcaaggtctctccagatttggttctctatagaaagtgacttcactcgctcctcaagcgcgtggttaaccttgccgatcctctctctttcttcttctttgacacgaagccttttaaccagtccttgctctatcgcctccattatcgttctcgcttgtcttttcctcttctcttctatctcatatttcactctctccatctgatataactatgaacatcaaatcagtgacaattgataatacgatgcacattgcaacgaactctgctgttgatcaaaacttacgtgaagggagacgaatcgatctatttcgtgttgttgttgattgatgtgagaggagat

SEQ ID NO: 15908 - DNA, 715 bp, Arabidopsis thaliana
tacaactccctcagtggaaaatatttatgatccaacatggtctttaaccccaccttcagaaacagcatagattgtctttgctgcagcgatctgcccttcgactgaactggacttgagaagaccaagcaatggaggaatgcatcccccaagtaacaccttaactctaagttcgttctccttgcagagtgaacccaagacggttgcagcttgtatcttcactccaactgatcccgatcggagaagagagacaagtactggcacagcttgggagtgtgatccgacagcactgaatgcattctcacgcatttctataaggtccagtaactgcttcagacaatattctctttcttgtgcagatgatgaaccttggcgcagctgctcaatgcattgggcaacacttgctaatgtcccatctggatcttccatgctggttgtccggtctctgcaggggatggggaaagttagatactaattcgctaataggtgtgcctttctgcttaaaatgtctcatttgaaaggataacataggaaaccaatccagataatattaatttccacaggcattgttaaaccaagatggtggtgcaacaaatacagataaaacctcaattttatcacgatgattagctcccatgcagtaccaaatacatatatgcgttacctcaaactcatctttgtggttgaatgtggagttgggggctctgaatcatgcatc

SEQ ID NO: 15909 - DNA, 468 bp, Arabidopsis thaliana columbia
tgcatgcggatcaatcaatctgttaactagaatgacctcataatcaacattatctgaaatagagatcgcttgaagatcaacaagaagtggcatcttcccctgtgaaagagaattagatgtaatcccatacacatcgtaaaatccatccctgactttctggtcataattaatgaccttatgtccctacaagaaaaaagaaacatcagcttaactctcccattgtcatataaccaaggcagaaaccatccacattgaataaacccaaaaatggaaagttacacaattaggattcagaaatactcgcaacgaagagaacactgcaggcaatagccaagatcctaattcctttaaaccctcgctaatcgagcaaccagactccctaaacccctaaatccatagggatttgaaaattttcgcataagcaagagtcgagatatagagtatatcccaataacgaagcgagagaaa

SEQ ID NO: 15910 - DNA, 1263 bp, Arabidopsis thaliana
cgactatagaagtccaaagattcacgcggtttgtattctggaacggtatgtcctgcaccctgcatgcaaaaaaaaacattcaaacttaaactaaaacacaaatcgttttcatttgtagaaatagaatatgaagaaaatgtgtgatgtttgtaccttgatggttagaaatgtgagattattggcatacccttgtgtaaacctacaacacaaaattgtagaaacaatgagttgggaaaaaaactgaccgaaagatagttataacaaaaaaattacccggcgacttggttatttgacatccatggcctccattcatcaaccactttgtatcccattgccttagtccatgcttcagagccagtatatggtacacacatatcatgatctccactgcaaaaaatttaacttttgttatattttatattttcattcgttttacttttagttacctttgatttatttctatatatgtgcacctgaaaatgagagctcgaaagccactaagagtgaggtttctatggtattcgatcatgctaccggtgtcgtgcctatattcgaggttgcttgaacataactcccaatttccaatcgctttttcctatatcgacgtttcgaaaaaaggtccaagatgttaaaatggtgtccaatgtccatcatcaacttattacaaatactgattgagagaaatatgatgaattgaatagagacctctttagcatgaaccgctttccttacagctggatcgtttagccatttggtcgcaactgtatcgtcctgcatccattacaagttttcagtttctaaaattgtggagaatcatcaaatgtattacaattggtactatacatttaatttgatcaaatgaactatttgtgtctaatgatgaaaattaaatacccttgttcttacaactttttaaactatttatgtatatatatgatcctaatatacaatgtatccaaatgtagatatgtaaattcgagtgtaacctagtgataattagttttcaaagtggcaatcatgcacggtaatacttagcaaatactataagaggaaagatgcatgatgtggtttactacttacaatgcaaggaacaccaaagccagcgaggagttgagaccaactaggtacaatgcctggacgcacaacggcacctagaggccatgcacgaccaaacattctctttctcacgccattggcttttctgttttgcctagagtaaggagactcttaggcagagactcgatatctaaggcggatagagat

SEQ ID NO: 15911 - DNA, 529 bp, Arabidopsis thaliana columbia
catactccgaaagtgcgttcaattatagaccaaagagatgcatgagatcagttaaacaattcttccttgtttttcggaggaggaccggtatagaactgtgacatgtggtatctcagaagtctattttgtgttgacctataaggcgctaaaaacccttgcttattaggatatcgagagtcaactacataattgtctcccggggtaaaggaaactcagaatcaccattttacgtgagtgaaaggacagctgtatcatggcatgcactcggtgctccattccatacatatgtgaataacatatttatatcacatattgccattacattgatacttgcgtagttgtgtcggttccaataaatggcttgtaactcaggctttactttgacacacacatgagttccatccataactccaacaaaaccacttaaatatggccaatatcgtcgatcaacttgtagacgttgaggaatccgaagtaattgttgtgttattggtgtcttgatgtaatctgaggcaagaagttatgtagc

SEQ ID NO: 15912 - DNA, 491 bp, Arabidopsis thaliana columbia
cggaatagcaggctccgcatcttggcaatgtggtcacggtacttgatgtggtcttccatcgacacctgccagatcaagttaatcgaaaaggttacatcagatatataaactatcttcaaggcaaccaaagccaggttttattataagtcaaataagctgtgtgcaggaaaaaactagagcacagaacttgcctcattcaattcaagaagcttagcgccatcttctttgtgagcctccccaagctcgttatctttgagtacagaagccattttcttctcaaattcagtcctgggttgaaactctgatgctattgcacgactgtagaatcccaacattgacaggttgattaaagtaaacagttggtgcctccctattcctcttgaccagatgcacccacttattaaagtccttctcaacgagtcctgtcacagctttccgctctagtctttctcgttctggcttaggcaaaggtgcatgaacaacagactgag

SEQ ID NO: 15913 - DNA, 311 bp, Arabidopsis thaliana columbia
tcgtgtgcatatgttttgaacttgtcactggagatgtgctatttgatccccatagtggcgacaattatgatagagatgaggtatgcttaagttccctgctgtcttttggctgtgtgcatttgtgggttttacatatgttggctttctcttctcttgttttgtgggatcttagcgtggatttgcttcaattttctattgtgggagtttggaaatctaattggctttactgttatcaggatcacttggctctgatgatggagcttcttgggatgatgccacgcaaggtaatagaatcatcagcagataggttt

SEQ ID NO: 15914 - DNA, 429 bp, Arabidopsis thaliana columbia
ttttaataaattaatcttaaaaaagatgattggtacttgaggatactggatacatatattttctcttgcccctcttcatgccaaatggctatactattccttttctcttattaaaactgtagcatgtttgtgcattatgatttgtacagtggtttgcgaagagaaattagttctgctgcaactggtcgtccaattcaagatgtgatacagacagatgcagccattaaccctggtaacagcggaggacctcttctagatagctcaggaacgttaattggtataaacacagccatttattctccttctggtgcatcttctggagtgggcttttcgatccagttgatacagtgagttctctcttcttttttacccattgcaaatctgatcagatagagtctttctctatcattgaatccactaacgggagac

SEQ ID NO: 15915 - DNA, 1056 bp, Arabidopsis thaliana columbia
gaacaagtgaaaatcaaatgaagaactgagagattggagacattaccttgttcgtgggacagtagaggcggggaagaagacacaacggagatcgggaacaagttggagaagaagaaatcggctgggtctgagcgacgatcctgaactagccggagaacacggtgacacagaggcgaggtggaacggggccgaagacgaagaaaggttcaagagagaagaaaaaatttagggtttgtttgggaagcggctgggtttgagattcgctcaaactcagttcgctgtgtatatataaaaataaaacgcctcataaatccctcgcaaatttgctagggcttcgcgaagaaccgagaaaccaaccaatcaaattgctccaattttgcgtgggatccgtagcaaatccctcgcaaaattttagggttacacggtgactcgattagggttttcagtttactcttcgagggagttgcaaggcaatgtagtaaatctttcgcaaattgctagggttttgcgagggatgaatttaaaaataaaaaaagtttataaaaataatgataaaaagaacaacaaaatgcaaaattataattatataaactttaaaattagataattataactttaaaattattaaaatcattttctgaatttatttattatatacttgttaattaaaacatctggaacgttacaatagataacatctgaatcattacaatcattttctgactcaacgtcttcatctgaatcgccaaattcgtctgattgttcttcttcttcggaaccgtcagtgatgatgtcttataattctctgttttgtaggtcaatgtggataacatcttctgtggttatgtctcgtatgaaaacttctctaacactttcttgttgcatcacaacatcatcaactagaccgactatacggcctctgggattaactttaataaccgataacgacacttcacgtttaggcctcacacgcggataagatagaaatcttacttgccctgcttgtgatgttaggatatatggttcaaactttgaataagtcttgtttgcattgac

SEQ ID NO: 15916 - DNA, 537 bp, Arabidopsis thaliana
catcgaataaaaaaaaatgtattgtccatgttgtacatgtcagaattttagagttcttcctgtatctcaagtttggatgcacttatatggggaagggtttatgccaaggtacaaagtttagttcatgcatggagaaaatgagtcaatggtgaattatggtagttgtaacgaacattatcctgttgataggttagtggaaccaaatccggaagtagatgcaaatgtaggtaccgttcagatggtgaatgattttttcgtgaaaatgtacactcgtttgatagggatagtgatagagtagaggaacctaatttagaagcaagaaagttttttaatatgttagatgcagcaaaacatcccttatataaaggatgtaaaaagggtcattcgcctttatcttctacaaccaagttgatgggtatcaaaactgaatatcatttatccgaggattttgtggatgcgattactgattttgtgaaagatttattacccgaagataatcttgcaccgggaacatactacgaggtgcagaaattggta

SEQ ID NO: 15917 - DNA, 958 bp, Arabidopsis thaliana columbia
gatcttgaatgttggcttgtttgatgaaacccagcgatgaaagcctggtagatatagttgtggaacttaggtatggaatctagaatgttgtgtaagcttgcagagaagtacatgttggttaggatttgattagacctgttaggcatatggacttagtttgaatgatcatggcaataggctagagaatgttgggagttcctttgttttcaaaacctcttccacgggttcggcttttgtgttttgcttgaaggcaagcaaaagctaagtctgggggagttgatataacccgattttcactgattttatctatgttttaggtataagattttgagtctttatgttatttctcgagtctttttagtgtcttttcaggtattctatgcaatgggacaacaatggagataaggagacattttggagcaaaagccaaggaaaaggaggttaaggacgattttggttcaggaattagcgaggagtgtagatcgacacactcttggtgtcgatcgatgccagtgtcggcccagcaaaagtcctagacgctttcgagtttacagtagaggaaatttgcctcagaagacttctctatttgcattattagtccctggacgtttttagggtctttatattgtttttagacctagttttcttattatcaagtctttcatccagttttcattatcaagttttctacaaaaccctgttacgaagatacataagctattcatcgattgctttcagagttttattcagatcttaatacagtgaagagatcctttctttccttaaatctatttgttgtgtttatgttttcatactcaatatgttgcttgcttcagccaatatgtctgagtaatctacttgttaggaatagggtttctcatgaaggattcatatggtttagtagattgccccctttgctaggttatctgtaagattcttcatctttaattatgcttaa

SEQ ID NO: 15918 - DNA, 749 bp, Arabidopsis thaliana
tgatgagtctatggataattttgatacgggggaacaatatttgagccaccgcctactatagaacctggtcagtttaaaaaaggatgggaagacggaattggtttgaccttacgtcaagaatttttaaacaaggcgacattgcacgaggtggtggatagagctgcatttgttaatagttttggttatgtgattaagaagtcggataagaagcgttatgtcctaaagcgtgccaaagaaagctgttcttggttatctgaaattcgtaatacatatatcttctcgattagaaggtacaatagatgcatacttcaactcggctatgtagaagtagtagtaggatcagaaaaaggaaaggtaacccacaattagtggatgagaatgtaaaattttagtacctattcatagctttgggagctagcattgaaggctttaaagtgatgaggaaagttataattgtggatgcaacacatttgaagaacagatatggtggtgtgctagtatttgcctcgactcaagattctaattgttaccattatatcatagcggttggcgtactcgacggtgagaacgatgctagttgggattgttttttcgagaagctaaaaacagttgtacacgatacttctgaattggtattcatgagcgacagaaatgcacgcctcataaagggcatacggagcgtgtataccgcggctcatcacgagtattgtatttggcatttgtccaaaatgtgaacggccaaatgctgc

SEQ ID NO: 15919 - DNA, 843 bp, Arabidopsis thaliana
agaggagggttatttgtatgtggcatattggaagatggggaggatttcagtctcaatgaagatcaagttgacaaaccaactgaagtacttgagcccatactcgaccttgatactcgaccaacaaatccattaacatcatccgctgctctaaaactagttgctgctaaaaacagtgagacatcattcattcctcctcacaagcccccacttccatttcctggtcgacacaagaaagagttagaagataagtacagtgctatgtttgccaagaacatcaaggaagtcgaattaaggatacctcttgctgatgctctcacgcgtatcccggattcccaaaagttcctcaacgacttgatcatggagacaattcaagaggttcagaaaaaaacagttctgagccatgagtgcagtgccaacatacaggagaacgatgtctcagaaaagataggagaccctggttcattcactctaccatgctccctaggttcattgactttcaataaatgtctttgtgatctaggagcatcagtaaatctcataccactctcagtagctaagaggttgggtttcaacaagtataaatactacaatatctccttgatcttggctgataggtctgttagactacctcaaaggttattagaagatttgcctatcaagattggaaatgtggaggtgcctacaaactacgtagtgctaaacatggatgaagaaccgaaagatcccttgatattaggtgataagtagatttttaggccaacttatttgctgaatgtgaggttcagttcaattccccttaaacactaacatgtcgatgcagctatagggcgtgtcaatccaaac

SEQ ID NO: 15920 - DNA, 904 bp, Arabidopsis thaliana
gcatgcatcagcgaacaatgctccggcatagctgtgattatcagatttaagaagttaagaaatcaaaagtaggatcctgaaaatttaccaagtgagaacaactatgtaaagaagtacaatacttacgccatggacaatgtagctgaaccttttcctgcttttgcctccacgacttctgtacctccatcttgggtacgcttagtaagggcggtaagtatgtcacttgacaagttggcttgaggagttgcctatattttcacaaacagaataactttgagtcgaacagagctaaaccgcagttgtaagatataaaacattcgaccacagtctgagtagagaggaagtgagaggaaacctgagagaagagagggagaatagtaaccccagcatgaccaccaatcaccggaacattaacttctgcagacacgaaaagcattcaaattaaagcctcaggctcgggattcaaattgtgatcacagctaataagatgaacacatttcgaagcaaaacttatgaatgaatacaagagcagaaaaggcatctaaacaaacctgcaactgggacatttgcctttccagcatagaaagtcctggccctgacgacgtcaagagtggtaacaccaaacaatttcttttcatcgtacataccagccttcttaaatatctcagctgcaattggaacagtagagttcacagggttgctgatcatattaataagcgcctgattcagcaaaagagtaagttcaaaggtcaatcctttgatagaaaaccaaatttagtagaacaaaaggagacatttttacacctaaaaatcaacaatcttggagaagcgagacgaaattcacgctcaagacatgtcatctataagaaaactgaggcctaaaaaccagtaattcttggagata

SEQ ID NO: 15921 - DNA, 351 bp, Arabidopsis thaliana columbia
aacagtcaaaagaaaaagttcaggatgattattacgaacgccgtcaacactataatcaggagtactggcaggagaccgaaaggaaggctgcatcgtatctcgtaagcgaggtagacccagtggctcagccagccaaccttgaaaaggctcgtcgatcagatgaagaggggggtttggaccaatattgcgatttccacaaacgatctggccattccaccgctgcatgtcggcacttacaaagcattctattaaacaagtacaagaagggcgacatcgaggttcagcatagacaatacaaaggccacaacaacacgtacgcggcacgaggaggccgaggtgggaacaatgtat

SEQ ID NO: 15922 - DNA, 503 bp, Arabidopsis thaliana
gtcatttgatggaggcacaagatccgtggatagaggcaaagcacttttaaacggacctgggaattattccttcaacaaggctactgatgactctaaggaagcagagtcaggtaatgggtggaaagaaaattcagaggagaagccacaaagtgaagaccctgaagcagcaactgaggacagtgtccctggtgttttgtatgatttactacagaaagaagtagtttctttgaggaaagcctctaatgaaaaggatcaaagcctcaaagacaaagatgatgccatcgaggtaagagttctgtttctttaagttctgtttctttatgccatattaatcttgtttaaagaagaacattcttgttgtaaacggaggaagtaatgatacgttgatgttcgtagatgctagcgaagaaggtggaaacattaacaaaggcaatggaggttgaagcaaagaagatgagacgggaagtagctgcaatggaaaaagaagttgctgcaatgcgtgt

SEQ ID NO: 15923 - DNA, 521 bp, Arabidopsis thaliana columbia
ccccaagaacatcgtctgtgtttgtgcagattatgtgtaatagctggaaacatttcacctattgatgttattactcatcttccaatcttgtgtgaggaggctggtgttccttatgtatacgttccttcaaaagaagtaagccaattttctttcttgatttctatcatcttaccaattaatcggttttgtggtgctaagatattcaatattttttttatgaaattcaggatcttgcgcaacagtgggcaacgaaacgaccaacatgttgtgtcttggtaatgcttaaacctgcgaaaggagatttaactgcagaagaacttgcaaagttaaagacagactacgaacaagtctctgacgatattaaggagctagcaacttctgtaatctgattagaaactagaatgggtgttcctcttgtgcttttgatggttaatgaatatcatcatatttacggcatcggatattactttggactatttaaggtctttgatattgtagcgctaatcgattgtaaaagtttg

SEQ ID NO: 15924 - DNA, 501 bp, Arabidopsis thaliana columbia
gaggatcccgagagattttactctatggcatcatccttgtctttgaggctttgatccttttcatgcgaagattttctcaaggcgactacttccttctgtagtaaatcatacaaaacccctgggacattgtcttcggttgctggtgcagggagttcacttggtgggcttctactctgaatcttctttccaggtattatgtgactctgaatctttgggttcatcacaagccttgttgaacgaataattcccaggtccttttaagagtgctttgcctctatccaatgatcttgtgcctccatcgaatgacttggatgttcctttagcattcttcaataccgagggtgggattagaagtaaaggaatttctcatcggagttttctttgacaaaaagccatttgacgcaaacttttgtgaattatctgatccaccgattgactgcctgcgagacggtccattactcatggttctttcctcaggtggggtccttatgctgatgcttg

SEQ ID NO: 15925 - DNA, 513 bp, Arabidopsis thaliana columbia
caatgtggtttgagttgttcgcataagattcaagatttgagacaatgattcacttactgtttcaaagaacttgattccatattcgtcagcaagtgcttgaccctttgattttggcacagcctgaaaaatgtgtcaagaaccaaaaccgctattagtttgattagttatgacttatgaatcaggaggtagggtaatgtctgtgaatgaaccatctcgtagtgtaattaccctcttgctctcgtccatatcagctttgtttcctaccaagattttgttgacattatctgaagcgtgctgttcaatattacgaatccagtttctaatgtctgcaataaggtcaagagaaaagatccagaacaaagcagaaatgtaagactaaagatgttatgtatagagagacagaagaaaatttactgttgaaggatgactcgtctgtgacatcatacaccagtaaaatcccattgcccgcggtaataagctgcaataatgcaaaggaaaagagtactgaatgtt

SEQ ID NO: 15926 - DNA, 526 bp, Arabidopsis thaliana columbia
cgatctacagaacaaaaaaaaaaaacatttttcaatcatcaccataaaaataaaagtacgaatctttaccaaggaatcttaataaaaatcgaaccttcctgcatcttctggactgaactcaacatcttcgcaccccaagctcctcgcgaatctaaccatactcctagcgatttcgatgacctctgctttggttttctttagtttatactccaaatgtatatcactagtagctataaaagtatgaatcctaggccgtttagcgtatttcacagcatcccaagctctctcaatatccttcttattgcatctagagagtccacagataacaggaacataaccattctcatcaacagtgtttccaactgtttcagctatagtcttaaccgcttcaaaatcatccttggaagcagcaggaaacccagcctcgatgatgtcaacaccaagtttagctagctgacgagcgatgtcaagtttttccttggaagtaagtgtagctcctggagattgttcaccgtacggagagtag

SEQ ID NO: 15927 - DNA, 581 bp, Arabidopsis thaliana
agaatatcagaaaatgaatcttttcaatgaaaacataacattacttacccgctaaaggtctcattattgttccttgcattctctgggtaaaccaaactagttaagccaagttctggacctgtgtacgttgcttgaccctgaagtaagattaaaaatactcataatcagagagttccaatgaatacaagagagaaacaaaaacgcatgcgaacatttactctgctttaccaggatcactttattgttcccaagtgtaataggtgtgggaaaggaccggtctagagtggttgcagccactgttaagatccaaggagcagtgtttaccacagtctgagctgctggaccatcgttaccacctgcacaaacaactacaatgccttttgccacagcatggaataatccagtagcaaactcatcacgtatgtcggtttcagaattcagaggaatttgaccaacaagagagattgacaaaacatcaacaccatcatgtatagcttcgtcaattgctttcatgatgtcagaatctgaacaagtcactccttttagctcttcatgaaaccaacaagccttgtacattgcta

SEQ ID NO: 15928 - DNA, 653 bp, Arabidopsis thaliana
agtagctgggagttgctttggatcccctacctgataaaattagattttacataaggatatccatagctaccaaagttgcctttaacattaatcattaactcataaacttatggtgttgcgcttgcctgtaacatctacagtttcaagatgcaactattttaacatctatattcttcaatttcaaaaaaagtaaggcatgcttcattctttgaagctactgatggtgtgtgtcgaatcatctacttattttatgtacccggaaactaactgcaattttgatacatgaagggtaacctattggatcttaccagaaatacttgtttgcacctagtggccaaagggataagagttgctggctcaacctggcaaagtacacaagagtaaatttcattagcaatgaacatggggaatataagcattaaaaatttctctacctgcataagctttttaagttgcgtacgaaaacaattacttataagatacatgacagactctgactaggacgaaccaggattaaaattttctttacacttcaacataggtcagggctaacacatgactcaatttaatgtaatgacatgccatgagaaagtttttaaaaacaaagcattattattccactttaaagtaaaccctctgacatttagagtgtg

SEQ ID NO: 15929 - DNA, 563 bp, Arabidopsis thaliana columbia
taactagacaaataccaaacaagtcttccaaaatcacaaaaacctaaaacccactcttgcttacaaaccccaatcagtgctgtccacgctccactgtctctctcactcgatagacacgtaaagaatttaaaattttgaaaaagaaagaatgaaatttgtgtaaaatatattggaacacgaacaaactttttcaaatatggattcgcttcgctcctcctttatttaaaatacttgtagtgctttcatacggctagagacaaaaatggagtgtgtagaagcatttctcggtgatttttccgtcgacgatcttctcgacctctctaacgccgacacttctttagagtcgtcttcgtcacaaagaaaagaagacgaacaagaacgtgagaaatttaagagcttttctgaccaaagtacccgtctttcaccgccagaggatctcttatcttttcccggcgacgctccggtgagccacttacacactctgtttcgtactccctgttttgtcactctgtttcctctacctgtttttgcctgtttgctctgttttaactcatttttgtttt

SEQ ID NO: 15930 - DNA, 929 bp, Arabidopsis thaliana
taagtgcgttcggggtcttggtcagcgtgtataacatgtctagtgtttcgccaggggatatagtgatataagtagcctttataggtttgatgtagtgtccatcggccgagactacggtgaggctgtggttcgcgattgcgaaaaagagaggtaggttcattgcggcatttaccatccgaatgcggtaggttttccccttctctaccgtgagatgaaatgtatctgttcatgtaaaataacaaaattactaggtaagttttaaacgtatacgcatgcataatacaaaaagataatgtaatactttcaaaaatataaacaaaaatgttttatataataaatactaacacacacataagttcctaatgagtaatcacaactaacaaccaatagaatgaaatacaaataattatcttataaaatcccaataaattttaaacaatttaaaaacaaaaaaaaaacttttaaagaagatttcaacaaatgaagatgcttttacttttgtttttttttgtgttcaaaaaagattttaacaaatgctcattctaatcattttactctgttttcctagtctatcacttcacatataatgattttaattcacagttacacttgtataaagtttttatcccacaaattgtgataaatatacggatcaaaaacatactaatcaaggagaaatgataaaaaaaaacatgaaaattataacaaaacctgatttagagcaaggatacaagaaaccaggatgtccattgatggtcaaagcatcggacacattaggagccctcctgtccttacgaactcctcaacgacctctctcacatccctcttccaccactcacctgatgaatcgcataaaaaaaattttaagaagaagaagacaaaaaatatttgtgtacaatatacaatagaaatctgaaaatgaaaatatt

SEQ ID NO: 15931 - DNA, 513 bp, Arabidopsis thaliana columbia
caagcagtagacgatttggatgtcgttgatgtaaacaaacactgatgtatcagcgagagaattggtgaatcgcaacgagcaaacaaaatttctcaactcttggtaccaagcgcgtggagccagtttcaggccataaagcgccttcttaaggcgacaaacgtggtgtggtcgatcggggtcgataaaaccaggtggttgtgtgacgtacacctcatccgtcaatgtaccttgaagaaaagcgttgtttacgtctagttgtttaattgtccatgagcgagacactgccaattgtagaactaggcgaattgtgagagatttaaccacaggactgaaagtttcagagtaatggagtccatattgctgccgaaaacctcgagccaccaatcttgctttatacctgtcaagagtaccattaggaagatattttagtgtaaaaatccactttgtggaaataacattttgatttggttttggtggaccaattcaaatgtattatccgtatttgggcattga

SEQ ID NO: 15932 - DNA, 376 bp, Arabidopsis thaliana columbia
aagtataatagacttacggtgttgaccaccgagaatctcgacggcgtgagcgaaacaacggtgaagatccggcgtccatctaagccgtggaactggagaccgtacgtaaggtctaactccgtgaaatttattgccgtcaaagcttccgttaccatttctaccactagacttatcccatatcgtttcaagacccctatagaccgacacctagattcgatttttacttaaaccccagagaagaaaaggtttgatatgtcttggctctgtgaagaggagagacagagaatcgaggagaggaggatttgagaggcgtgcgggttgggattaaaagagcaagtatttgtttcctggcttctttcttaaagacgactgtctc

SEQ ID NO: 15933 - DNA, 570 bp, Arabidopsis thaliana
tattaacgtgcgccagtgtgctctaaagtgtagcagcctatgtaaacatctctcttctccggcagcagattctaccctctcagcgggtacatgggattatcgtcaatggcggggacagaccgaatatcatcccctggtcagcgagcgtggactactatatccgctccccgactttggcaacgctgaaaccactgaccgagaaggttgtgaaatgttttgaggccgcggcgactgctacggggtgtaaggtggaattccagtggtaggtgtttcgctggggtcttattcggtatcgcaatctcggactcaccgtctggtataggggtccctcatacgctgacgtcaaatccaacgagcatatctgcgagactacgtctccgtcatgcgagccatgggccaacatgtcctcctcaatagcccccagggagcagggggcagtgcgtcgacagacatgggtacgtcacattacctacaatccagagtagcaactacctccaacaacagtttctcctaacatgacctcctgaaggaaacgtatcctacgcaatccccggcttccacgggatattc

SEQ ID NO: 15934 - DNA, 529 bp, Arabidopsis thaliana columbia
gattgagcagaattcataagctgattacagcacaagaaactgaacttaaaacagtctacatagtaaacacaattccgccaccacaaagataacttgagttaaaaaaacatcaactagaatcatgccaagaaaactgatcacacatccaccttgaagataaaaaaaacaaaacttttgaaactcaatgtaagaatatcaaacagtagaaattcagtgaccattgaactactcaggaaggaaaaaaactatatgatcaagacaagtgtgaatatcaaagaagttagtaagaaagaaactcacgttcaataaagatacaagcttcccatattctttgcgtatattccgcttaaactctttgcttcgtacaggtaaataagagaacaacttcctaacagtgacagtggtaccaatttggcgagcagtcttcttttcagcagtaagcaaaccagaatgatcaaacgtcaagagcgtacgaactggctcattctttgttcttgttccacagtgagatttccaatgcacagagaga

SEQ ID NO: 15935 - DNA, 601 bp, Arabidopsis thaliana
ccatacaagtataaaaaacaattactccgaagtccctagtgatataaattcacaacaattcaaccattcatcccaagtaaccaaaagcctcagtcccttgtaaggtgtaaacgggtttaaacatcagcctcaggctacaaccggatacgatgaacatgttgcaacacctgccaaaatcaaaggaaaaaaatcaatgggatagagaagaattaaccgaaccaaaccgattcgattttatttcttctatgctaacttaatgatctaaaccgaaatcaaagctggttaaaagaacttaccacacatgttctttcccatttccatcttgaagtagccattgtctccccattcacctccccatgagttctttataagccagtacgggacgtcgtcttcaactccataaccaactgctaacactgcatggtttacatcctgttgccaccaaaaaaacccggtttacttactaaacgttggtaattgtaatatttttgtggtttacagcagaaaagtactcacattggagtgttaccacatgtattgctagtaaaaactccttcttataaacctgaattcatgtacaactcaaacgccacactcactg

SEQ ID NO: 15936 - DNA, 566 bp, Arabidopsis thaliana
tcactaatcagggttcatcatggtattcacataaataaagaccatactttaaatctcagacaacaagatcaatcatcccaaataacagacatcatcctaggaaatacataaataaatcgttccaacaaaacaagtgttcaatacatttttctccaaacataaactagacccttggtccctctcatcctctctacggtataaggtggcttttgatatcttgatggatttaccttacacttttttttgtcacccgcatccccgtcctcaggatcctcatctctttttttcttgtcatttttcttatcattgcacttcccttttcccttcttccctttcttcttcgtttccttcttcggcgtctcatcaccgcctctatccgcttcagcctcatcatttgtaccttgttcaacagtaaaccacatattccattgtaaccaacacacatcatatattaaacactatcaaaaattgacaaaataacataccttttgatggtcctccaacaaaaagaataatgccagtgcatgtttccattacacttggaccctcggtctcaataccctcgg

SEQ ID NO: 15937 - DNA, 151 bp, Arabidopsis thaliana
tgtagccttgtgtatttttagtagagacggggtttcaccgttttagccgggatggtctcgatctcctgaccttgtgatccgcccgcctcggcctcccaaagtgctgggattacaggcgtgacgaccgcgcccggccagcatttttcttaat

SEQ ID NO: 15938 - DNA, 599 bp, Arabidopsis thaliana columbia
gacctaattttatttggacattttttcttttacgcttcttttctacaacttttttagagctttcttaagcacattttgagattagagattcatccactttgacactttggatggtgctcattctggaattttggacactttggatgtttctacctctatgcgactagctggtgctcattctggaaaagtcgaacccaagggaaaggaacaatgttatgctattatgatccaggaagagcctagagatattgatgttgccaaacaggtggaaactaactttgttgtggttgagacacttgtggaggacaagattgcagaggatgatgaacctatatctgtggagccgccaccttatgtccctaagctaccatttccaggccgtgagagacagattcagaagtagaaagagtatgcacgttttgcagagatcatgacacagttgtatatcacactcgctttcttacagttggttctccatgtcccaagctacagaagtcacttgccggatatccccgtttacaagaggagcattgaggaaggagttaaactaattctcaaaggagaagagtacctcggctggtggagcttagagcacagaa

SEQ ID NO: 15939 - DNA, 677 bp, Arabidopsis thaliana
tctagaggatacatcaaaggccacgaaggtccaatgagatccctcatttctccgaacttgactcttccaagcgcattcgttaggatatcagccttttgttcaattctgggaacatgttctacctcaacttgaccattctctacacattctcgtatgaaatggtacctccgatgaatgtgtttgcttctcccatggaacaacggatttttagttagtgcgattgcggatttatcatcaactcgtatcatcaccttctcacatgttgttcccatgacttcagcaaacaggtgttggagccaaatggcttgcttagccgcttcagtggctgcctgaactcaacttcacatgaagaaagcgccacaatttgttgcttctaagaacaccaagtgatcggacactcattgtaatatgacttccctaagatcgacactcttgaggttgagtaggagataggctttgcatctaagcgatcgtgagatcactcaaaccaaaggatgttgagcgaatgtcgcacaaaggttgcggatagcctttgatttaccggtggagcgatgggtcacacaaaggttgcgaaaagttctttgatttacctttgatctagcttaagagagtaagagaataaaaagattgatgagtaaacaaagaggatattttttattttagatagagaagaaggg

SEQ ID NO: 15940 - DNA, 849 bp, Arabidopsis thaliana columbia
aagatagcaatcgaccacaatctaacacaagctcatcaagacagagtattacagaagcgaatcaagacccaatccaccacaatctaacacaagcagatgaagacaacaagctaatcaagacacaacctatcttttctaatcattgctacaacctaagacaagcaactcaagacaacaagctaatcaagacacaacctaacacaagactgcaaccgaacacaagctaatacagaatctaaaacaagctaataggttgaggaagagcacataccattcagtcttcggcttgggaataggagacagtacgatggtccacatttccctcccgcgaaccataagtatgtcggagagagccctcgccgagtcttcttgtagctccggcaatgattgaggagctcctcttgaaagttgttgccttgagaagatggatggctgtgtccctgagagttgggatttggagactccggtagctcttggtttagaggatcttatggcggtggattaaactgcgcctcttcagatcgcggtggcgcgcggatcaacacgctaagtggtggagctttggaatagttgctgcagcggcggatagttgaagtagtggggtgctgacgttgaggctctgacggcttgaggaggctgcgtcagaggaacttgaggcgccgccgccagagtgaagtcgtagtggtgaggcagcgaagctggtggtccaagcggtgtggaccctccagctctctatgtaacgttgggggttgtcttcctctttcgtgaacctccacgaccggcgatagggatggttgaagagattcgaatcagatcaaagaaagaggacgatcgaagaaagagaagaga

SEQ ID NO: 15941 - DNA, 591 bp, Arabidopsis thaliana
taaaatgttatttcactatcgcaataacgtaacattttttttttcttttttgatagctagccttggattaattacctaaataattaaaaagatgatcttacaataactaatagttttttcttttcttgttacagctacgtgcccggattagacaaaggcaaggctctatattttttgttcgtgaagacggaatcgaagactcccggtggattaccagcacgtccggtgctcacgagttattacaaaagcgaacaattcaagagacgtcctaacgatccgtacaacgtgtacacgagccctaacgaagccatcctttgtccagactcatcccaaagcatgtacacgcagatgctttgtggtctccttatgcgtcacgaagtcctccgtctcggcgccgtcttcgcttctggtctcctcagtgccattggattccttcaaaccaattggaaagaactcgccgacgatatctccacggtaccttaagttcaagaatctctgacccggccattaaagagagcatgtccaagatcttgaccaaacagcgccaagaactggctgatttcataacttcggtatgtggtcagacaatag

SEQ ID NO: 15942 - DNA, 379 bp, Arabidopsis thaliana columbia
  unsure (1)..(379): unsure at all n locations
ttgaaacgacctccgctaaccagaagaagaaacaataaatagactgagagaancaagatgataaaagagagtgactaaaacagcaggctacatacactattagtcagttgcatctgggcatagaccggatccgagacatatcccaaccatcatcatcantaggcatagccctagttcccggcaatgaagtcatcaaatcatcaagtaccagaaaggccaaggatatttaccagaccagtaacgtctgctgcaccaagatccgatacacgttagtaagtagatgttacacatactagacatagataccgaacgagtcccangatataactctgcctangaatggatttcattggtattctatcactatcacctgccattg

SEQ ID NO: 15943 - DNA, 574 bp, Arabidopsis thaliana columbia
taaatgaaaaataaatattttgtgagtttctttatacttttttgactagttagtacaattaatgaaacacacactttgccgtcaaaaacactcggacacaaatttctttttcggggaaggaataacgctaaaataccattcaatttatgacactcgtctttgactagatttgtgttgaaaaatgaaaataaaccaaaacaaatctgacttggtcagtagagttaaaaccgctccgaaatgcatgttatttaaaatacattttacgtattaatctgcgtaactaaatcaacaaaaatttcactattttagtatttacaaacaaaacccaagaattagcttacatattagctcaaactggaaaaggatccctcttttgttttctgattattattacacttcaaccgcactaatgttgaaagcaatcgaaagctgaccaaccataaccttaagacctttagcttcccaaaactcttccttgcaacccttaaacgcagtcgtatcataagtattaccatttcgtagttattggtcgtcgaagttcgtttatagaaaccgaaccacttagcttgcatgt

SEQ ID NO: 15944 - DNA, 698 bp, Arabidopsis thaliana
tcatatcattggcttgtgagcaaaaccaattccatagtctgacacgggcacccgatgatcatatcgacgtcttcgaagtaatctgcagactacacaatcttgtaaaatacctaaagattatttgaagtgtaagtttttccctttctctttggccgacaaggccactagatgcgttaaagtctttacatccggggtcaattacttcgtgggaaggatgcaagtcagctttcctaaatcacttctacacaaagtcaagatctaactttttgaggaacaagctacaaggattccaacaacgaccagacgaatccttctatgaagcatgggaacgattcaaggactacgaacgcgattgtcctcatcatagtttcccggaaggtaacctcataagtaccttctatagaggattgcatgccaagttccaactttctcttgatacggctagcaatggagacttcacaaccaagatcgtcgacgatgcacatgccttcatagagaatctagccaccaacaatagtaatgcttccacggattttgataggaccatccgtactaaagactctgactcaaaagatatattcgagctaaagaacatgatggcccaatttctgaagaatcaaaatggtgccctaagtagcatgtggaactacatcttagcttctgcattccaagggtacaatgacacattcgtgcaagaa

SEQ ID NO: 15945 - DNA, 658 bp, Arabidopsis thaliana columbia
ggaacattcaaagtacatcagttcgatcaaagtgcagattttggagaatttgcgatacattcaacacgctccaagcgtacagatgcaggaggtaaactcagatcatcataggacacattgatgctttaatctatctaacacggatcagtttttttacttgaatctcttaggttccaccggatttctacataccggattttgatgaagacgaatgaaacccggatgtactttgtaacaacccgtcccgtgggacccgcccacgtggccactctctgccacgtggcatcccgttggcgctgtagcgcatcgaccctaacctctctccttggaccccaaagcccaccaggtaggttattggtgcgcttggcgttcctcgaacccaagacctcaccttttaacaactttccataggacaagctgcttaacctgaaaattcaatgaaaatattctgaatatcttctaaaaagagttcttaagtccataaaggtcaatctggcacacacgaaaccagaaagtgttcaatcgtcaacagatccaacctgaggaaatcatgctccttgctatcttaagagtgaaagaatgacaaaaagcacaaaccaacaaagctaaagggcaagtgatcaaaacccgaacctgtaccaagacttcccatcccgag

SEQ ID NO: 15946 - DNA, 512 bp, Arabidopsis thaliana columbia
tttaatcttctcaagagcttcaaacaaagctttcttcttctttcgttcgaaaacctacaagcatggaattaagtgtaaccaaaaaagtagcaaatgcaaagcatatatacatccataaggtataatggtgttctctatcaaatcacctcgccgactttgtgaatgatgagttccaaaataatggagatcaagatgataacaccacaaactgtagaaacggcccaagtcggggtctggtctagctgtcttggaccttcgccacctcctccaccaccacctccagccattacttaaaaccgtgatgattatctttttatttttattttttagtatgtgtttggtatcagaatttcaatttcaaaagagaagagacaataaaaatgaagtcaaagagatagagagaatgaaaaggaaagggatgatgttgccattgacgagcatgcgaaaatagtagataagagtgtagacaaatcaggtgagttattttttaaaaaatattaattttgtttttt

SEQ ID NO: 15947 - DNA, 537 bp, Arabidopsis thaliana
accggtttcctcggttaacattagtaaccccaccagccgggcccgtgtacaacaacaggcgatgatcgacaaactggatcatctgcaacgtctcggcataaacacggtctttttccaggtcaagccggacggtaccgccctgtggccatcgaaaattttgccgtggtccgatcttatgaccggtaagattggtgaaaatccgggttacgatccgctgcaatttatgctcgacgaagcccacaagcgtgggatgaaagtacacgcctggtttaacccctatcgcgtatcggttaatacgaagcccggtactatcagggaactgaatagcactctgtctcaacaaccggcgagcgtctatgtgcaacaccgcgactggatcagaacgtctggcgatcgctttgtcctcgacccgggcatccctgaggttcaggactggatcacatcaatagtcgcagaagtggtttccgctatcgcgtagatggcgtgcagtttgacgactatttctatacggagtcaccgggttcacggctaaatgat

SEQ ID NO: 15948 - DNA, 520 bp, Arabidopsis thaliana columbia
  unsure (1)..(520): unsure at all n locations
nnnnnnnnnnnnnnnnnnnnnnctaaagatccttccggcacaaaacgcgcggcaatggttttcagccctaccagcaccagcggcacgaggatcagcgacaggctgaatccgaaagatggcattttgccttcgccgagatgcggttcgctgatgtcgtcaggaatatgcagctcaacgtaacggctgatgaagttaccccacagcggcccggcaataatcattcccggaattgccgcacacaggccaatcaggatcatccagccaaagtcggcattcatctgcgatgccagcagcatcggcgctggtccaggcaccagaaatgccgccgctgccgccacgcctgcaaataatgggattaccagcttcaccaggttcgtaccggtgtggcgcgccattgagaaagcaacgctaatcagcagaactatcgccacttcaaagaacagcggtacgcacagaccagccccgcaaggccgatggcataatgcgcgcggctgtgaccgaaggatttgagcattttgac

SEQ ID NO: 15949 - DNA, 591 bp, Arabidopsis thaliana columbia
tcaagaaaacagagcttctgaaaagctgttgggacaaagagtggatgctcatgaagcgaaactccttcttctatgtcttcaaaaccgtccaaatcatcatcattgccgcaatcacctcaacactttaccttagaactgaaatgcacacaaggaatgagattgacgccaacatctacgtcggatcactgctattcgcaatgattgtcaacatgtttaacggtcttgcagagatggccatgacgatacagagacttcccgtgttctacaagcaaagggatcttttgtttcacccaccatggacatacacgcttcccactttcttgctagggattccaatctccatcttcgagtctacagcatggatggcggtgacatattactccataggatatgcacccgatgcggaacggttctttaaacagttcttgattatattcttgatccaacaaatggctgctgggatattcaggttcattgcatctacatgtagaaccatgaccatagctaataccggcggtgtccattgtctactagctggtgttcttgactggaggtttcatcttccacgaagtgagattcgggtttggtgga

SEQ ID NO: 15950 - DNA, 624 bp, Arabidopsis thaliana columbia
ggaatgctgattctgaaaaaactgcagagaacgctgaaaatgaggagagagaagcagaagaggacgaacctgcagcagtcactgatacacctgcagcagtcacagatacacctgcagaaaacgaacaagctccagtcagaggaaccagtggcagaacgatacagccacctgtgtggatgaaggattatgtaacaggaggaaaaagcttgtttgttattgatggtgatgaggtaatggcgctgtatactgcagcagaggatccagagagcttcgaggaagcagcccaacatgagaaatggagaaaagctatggaagtggagataaaatccatagaagataacaacacttgggagatcatagagctgcctgaaggtgcaaaagtaattggagtaaagtggatttagaaaaccaaatacaatgagaaaggagaagtagacaagtttaaagccaggctcgtggcaaagggataccaccagaggcaaggaattgacttcgaagaggtgtttgccctgtggccagatgggatactataagacccgtacttgcaaaggctgctcaaaaggggtggaaagtgtttcaactggatgtcaaagtgcatcttacatggtgaattgaatgaagatg

SEQ ID NO: 15951 - DNA, 791 bp, Arabidopsis thaliana
tagaggatccccgtttctctaggaggtgttaaagagccagatcaagctttcagaagaggtaacttgtattgctgtcttactttggatccagaatgcgtttatgtgctgaatactttgcttgtgatagattttcttagggtggttgagagctgaaagttttgatatttagtcaactttgttccactgaaccttctaggaagctacctcaagtagacaggtgatcttaaagattctcttgtttctcttagatctcaatctttactgtttctcaagtttcctatgccaactctacttattcttgtcttccctcttcctcactttggctctttgttttgtccttagctttgttgacgggcttcaagccagtggtaaagatatgcttctgtagaagggttaatcttgagcattaaaggacatggctttctactctgaagacgacaagagcgaagactacctctttaagattgttctaatcggtgattctgctgtcgggaaatcaaatttacttgccagatttgcgagggatgagttctatcccaattcaaagtcgacgattggagtggagtttcagacacagaagatggatataaacgggaaggagatcaaagcacagatatgggacacagcaggtcaagaacgttttagagcagtcacttctgcatattaccgaggtgcagttggagctcttctggtttacgatatcagcagacggcagacttttcacagcattggtagatggctcaacgagctacacagtaagaaacctcttatcttttcttatctgctactaa

SEQ ID NO: 15952 - DNA, 595 bp, Arabidopsis thaliana columbia
tgagaactatctcgctgagttcattttagcttttacatgttgaagaagtactatcctatgtagatatattcatctgtctctgttacttattgtaggctactatgcagtcagagttcaataagcagaaacaagagttagagaagaacaagaaaattcactatactctgaatatgaccaaggttcgaattcattaatttttgtttaacgacttcttctagatgttttgcctttaacatagcgagttttattatgtcatgaagagaaaatacgaaaaagagaaggatgaattgagcaaacaaaaccagtcactcgctaaacagttggaagaagccaaagaagagggtaactattttatttttaatccggttggataaggttatgttggtatctatttgctcatgttttctattgctgccaaaagctggaaagagaacaacaacagatgctgtggtggagcagtccgttaaggagagagaggaaaaagaaaaaagaattcaggtattaaaaatctttttttaattgtggctcctcatttctgctttctgtgagttcttaaaccatacgtgaaattttctgcagattttggataagtatg

SEQ ID NO: 15953 - DNA, 657 bp, Arabidopsis thaliana columbia
  unsure (1)..(657): unsure at all n locations
ccccatggaaaattaaaaagagattgaccatcttgactaactaagactagaaacgggtgatctattagccaatagtttctcttgatcatccaggaccaagtaatacaaatatgaatataatgaaaaggtgaaaggatatatatagtcacctcctcgtatccaagaagtgttggtttcccatgatcattcccttcagccacctgagagtctttatcatacacaaacttgacggcactgacaccattttcaccttgtcctacatatatattcctcacaccgttgaaaacaccatcgctccatggatctcctccttcacctccttttgcttgtagtgtttcagcggaaggaggaagaataaactgggagaaataagctccgatggcatctactgcagcagcagcccgcccatgaaacccgataagagcactaccattgctttcaaacacgaatttacgagcagcaacctttccaaatatcggagaggttccccttttgacgttttgaacatcagcgacctcacacggtttttactagcatcgcttacaatatcgcatgtaccgtcatatatatgatatatcacttggatagtcgactacaactgaagtaaaaataagcannagatatatgtcagaaatataagggagggagaggagagta

SEQ ID NO: 15954 - DNA, 579 bp, Arabidopsis thaliana columbia
cgaactaggaggcaacctctgcgcaaaatagaaatgtgtcacaacatgaacatcaagaacatcaaatatccaagaatatatctaagaaaaaaaaactaaaaaaggttcactaactgtctagctgcattttggctcaaaatacagtccatcactctgatagcatctagaagatgtttagttttctttccttgaagagcatttgcaatagcttccattgggatttctggaggcgcaaaaaggattgcaacattgaatttcttggattggtgaggaagctttagtcttttgtctgcgtttctcctagaaggcgcggtttcaagaacaacagagaagtctagactggatctaggaagaggaccaacagtataaagattcttgtcgccatcataagcaaaatgtttgcaacccaaatcagcttgacaagtctgttgaactttttcaagaatctttctgccaaaacctttggctaaaagtggactaccatcttcatatgtgatagtaacctgtatccaaagagacaaagcacactataaagtatgtttccaaatcaagtcatggaaacagggacaggaagggaac

SEQ ID NO: 15955 - DNA, 561 bp, Arabidopsis thaliana columbia
acctgttaatcaaagaaaagattaatatggataaagatgactgaaggagatcaattgtagacctaatttattctttcatcaacaacttagaacccacatagctttgggtctttttcttttctaaatctccaaggtgcaatcatctaaagcctggagtaagtattattagtctaatctcggatcatgaaatttgtcttcacattcatattcatctgttaacttaatacgcatatttcttattccttttcttttgccatgctagatattacagaacatggcatccgtgatcagccctagctcatggcatccttgatcataggtttactacaagctggaggtccataattcctctaatctcggcaaagtccactacccatctagacactttcacattgaggtatgtttttcagatcaccatttacagtctctggcgggaggaaactggtcgccgtcatggagagacatcaacaccgggccatacgcttacgagaatagttgataaaagtgtccgcaatcggttgagtaccttggcattgacgagctcttatgaagagggaatgt

SEQ ID NO: 15956 - DNA, 429 bp, Arabidopsis thaliana columbia
ctgaatatagaagcgagatgattaccgtaatcagggaatggttcgatcaaatctaggatcaggagtcatctccccaaacaagttcctgcacaatagcagatccacgcgtgttcccacggtgcaaattggtttggatgttctttttgagtagcctcagtctatctggaagatcagtgaggacagcattgcctcccaaaagtgctgctatacaactgaaagaagaaactaactaaatgttttacacgttaatagtaattctcagaagagacatatcagcggtttttgctcacccaactaagccacagccagaacccaactcgacgatttacatgccttcaagagaaagaaccttagagtcaacagaatgttctaagaacttcctagcaccactccactgtcccacatcactgacacggttactccaggcgt

SEQ ID NO: 15957 - DNA, 474 bp, Arabidopsis thaliana columbia
ttgaggaggaggatgagtacttgtcagctttgacgggtggaccatggagagtgtttggaagttatttgatggtgcaggcttggaatccggagtttaatccattgagggatgagattacaacaacaccagtctgggtccggttatctaacatcccggtgactctgtatcaccgaccaattctaatgagtattgtgcggtggttgtcgaaaaccgattaaagttgacttgactaccttaaactatgagagagctaggtttgcaagggtttgtgttgaagtggacctaaggaagccgctcaaggggacaattatgatcaatggagagaggtatggggtgtcatattaagggttggcgaacatttgttcgatgtgtggactgtacggccacttagttcattcatgtccacggaaacctagagaggaggaacgtgtggtgccacgaatcatccagcagaggggtcgcaagttggtcagg

SEQ ID NO: 15958 - DNA, 543 bp, Arabidopsis thaliana columbia
agtgatgctgtattttcttggatgctatggaggtttgagtgggctgcgcgtggccaaagacattgctgagaacaacccagggagccgtgtgttgctcaccacctctgagactaccgttctggggttccgcccacccaacaaagctcgtccttacaacttagtcggggctgcactctttggagatggagcagctgccctgatcatcggagcagaccctacagagtcggaatctcctttcatggagcttcactgtgctatgcagcagttcctgccccaaacacagggggtgatcgacgggcggctgtcagaagagggcataaccttcaagctaggaagagacctccctcagaagatcgaagacaacgtggaggagttctgcaagaagctagtggcaaaggctggctctggtgcgttggagttgaatgaccttttctgggcagttcatcctggtggaccagccatcctgagcgggctggagacaaagctgaagctgaagccggaaaagctggaatgcagcagaagggcgttgatggattatgggac

SEQ ID NO: 15959 - DNA, 493 bp, Arabidopsis thaliana columbia
tagggattatttttcttttttgttcagacaacggtgttaaacgggtaataatccacggaataaactaaaaatttgcaaatacttttgaaagagttaaatatggataaaacagatcatttccgtacaagacgagatcctaataaaacatttatatccttggaaaactcatgatgaaagaatagtaacttcagtctctatatcatttcttcaccggatgacatagtttgaacatcaaaactcgagttacatcactataacttgagctggcgagaatctgcaaaccctagcttgtgtataaacaaggccttccttacaaaagtaacctttggaagggttacaatgtctttcttctgaacacacacaatttccttccaaggcacatccgtcatacttggaagcttctgttcctaagagaatctcatcagaccattcactagagaacatcttcttaggatctaacttgttctttacttccaagaatttatcaaagtta

SEQ ID NO: 15960 - DNA, 457 bp, Arabidopsis thaliana columbia
ggattcgggtaccattctgatcgcctctttcatgatcttttctatgggtagaactactgtgagcggtctaaacttcgacccttctttctttcttcatttaaaaaaaggggagcaaagcctgttttttgctccctcaattgatagatcagggcccctcctgccggcccgaacgaaaggctctttcaggaagtagtcccgggcccggcaccaaccaagaggaggcggggctctctccaatcattccgaagagccgagatctcgtaaaggaaaaattagctagctcagcaggtttggacccgggtgaatcagttcagtgaaggaagggagcctaagcctaaacttaaggcttttccaagccttgccgataggcgctcatggctcgctcagttcgctcgcggagttcttagatcagtagatttggatagagtctcgctcatctcataaaggaagagtagcg

SEQ ID NO: 15961 - DNA, 964 bp, Arabidopsis thaliana
ttctaatttatcaaagtgtgtaatcttgggttgcttagtcaggttttggcttggtctgatgtggtttaagttttgatcagaactttggattttagttatattggtataaatagtattgtgccatttcaaaagttaccattcatcacaactatgagaaaaaatgtggtttatatttgttattggatgtacaaaacgtgtcacattttgtgttcatggtggtggtggtggcaggaataacggtgttgtgggcggcggcggcacgattggtgccggcaatgcagaaagggaacgatacggcgaggagtctacatatagcgttgaatgcagtaaatgttcttcttttcatttggcaaatcccaacaggtcttgatatcgttcttaaggtctttgagttcactaaatggccatagatattaatatttggatgtgttatttatgagtttgtgactctatatatgcaaatattcttcaactttttttgaggtttgtagatgatgaattgtaaaaatcatgcaattagagtggatattggaataatggtggaaaaacgatcaataatactcttttaccagtcctttgttttcacctgattgtgtcaaatataaattggatacgctatgattgtgtcaaagattagtagattactgacatttgtctcacctaaaaaaaaaaagaatactgacatttattatatcttaaatgtctatcaaataatatactttgtcaattttggcccatgtatatagatacaatggtatttatgttgataggcccaaattggttatcgataattcttgatcaagccaattttcagtttacatgtaaatcatgttttgtttgcacttggactacaaattgcggaaacaaaatagtcatatcttttgctgcaatcacttttattgagaaacatacatggcgtcgcgtcattatgaaaacctctcagcaaccagtgaagatgtttatt

SEQ ID NO: 15962 - DNA, 499 bp, Arabidopsis thaliana columbia
aaaggtagtaagaaactgaatggcgcgacagaatgccgcccggaagggatcagaaactggcgttaaccccaacatacgggccgtcagccacggcgttgtcgcggttaccgtctttacccgacagattcaggtagcgataacccgcctcaatactgactggacgcataatggtgtaacgcgcgccacattcgcttcttcataactttgaataccgctggagagcgaatccggagagtagtaatactcgccaaacaaacggaagctgttgccaattttccactgcaaaccacctcctaccgctgcggcataaccttcatcgccgtaattcgggttggtgtaaacgccttttccgccaacggtcgccattaacggcccgagaggcagattcaaccccagccccacgccagcgacatcactgtcgtcgtcgttatgtgtccagttaccgcttaacgccaggcccagtcgtttcagtcgcaaaaccgacaccaatattggtgta

SEQ ID NO: 15963 - DNA, 715 bp, Arabidopsis thaliana
gccttcttaggcagagtagtaacctggtgagtcaaagcatatgccatcgctctctcacgcttagctgcagcttcctgcctctttagcagcttggcttgaatttgttcaacagatccaatgctatcgcaccaaccttcctgaaagatgataacacatagtcaacatgactgttattaaaggccaaccagaagataaacaaatacaaagtttgtaaacaacttagacaagtgacaggcacctctatttctcgaactcgggcttcatctgctaactgttgttgaagtgtctgctgactcgtctcactttccaattccaaggcgagacgaacacgtcttgcgcgtacacgagcctgaactcttaccaacgcttgcatgcatcgaagcgttacagcagcttgttttctcacagcatgtcctctaacaagggcttgaagtctaaccaatcccttcaacgctcgtaaagccctcctagcctaataaatatatcatcttccttatcaatccactcttctttttaaaaccaatgaactagcatcactaaaccataagtaaagcaacttaataaggcaaattgataccagaaatccccgataagccgtttggatacgcgttgcagcccgattttccctactttgttcgtcataagcaacacccccgatatgattgtagtgaagttgaagtagagacccagtatcaaccatactacgcgtattgga

SEQ ID NO: 15964 - DNA, 578 bp, Arabidopsis thaliana columbia
gagtcgttttagacttcaaaaatatatatatatatgaaacagccaaatcaaattgaatgattcaaatggccagaccaatatctaattaacaaagcaaagttgagaatatggttgtccaaccaagatttgattttctgtcattagtccttatcattaatctgaattctttttgtcatcgtttaatcatgattcatgattcacgatttcacgtgattcatgttgctgcttatatcatattattaaaaatgaaaatgtatatactatattaaagacaaagttgaaaagagacggttttacccccattttgatggaaccactaggcttgaactcataatcaactatgtagtcatagtttccacggtcgtcacaatccgggctacaagacttacgtccggtctaacctccgtaatctgcatcattatatatgcaaatacaaatcatgtattttatataagtgattgttcataagtcataacataacaacaactatatgttttctacttctaagtttggatttcagcttctgtatgtcgcccatgatatgccagcatattttcaaaatgcacatacttttggga

SEQ ID NO: 15965 - DNA, 501 bp, Arabidopsis thaliana columbia
cccctaaatgtaaaagaagatgatgatagtttgtttgggtcaaaggctcaaagcaatgaaattcttaaaatgcctattgggcctaacctgacgcatttctttatatttttgaaaattgttaaacgacgacggatctgttttctatagtgactctgacgcacttggataaacatacatgtgcaatgactataatacccttgaaacttgaggctatttcctacagtgacacattttgataaacatttgcgatggtcagttacggagttggagacaaaagagcttctgaatctctctctcttctgcgtctcgccaaatttatttcccgattcaatttgtagggtttctgcagaagaaggaaaccaccattaaaccctaagtacgtcacctttcaagctccttcttctgtaggttttttctgttcttctgattcatgtttacaaagttttttttatgtctcttctaacttcttctccttctcgccgcgtaatcagtccttattgt

SEQ ID NO: 15966 - DNA, 452 bp, Arabidopsis thaliana columbia
tgccttaatcttctctttctcagctgtaatctcgtcctgcaacttcattttctgcttctcccacgccagtagtttctttaagcattttttctctttcttcgaggcctccatgcatgccgtgagcgattctgatgcacttaatttggaagcttccatttccgcccggatttctgcactttcgttctcaagtgcccttactaccgcatttgccttgtcaacttgaccgctagcttttctaagagcattttccatctctgataattttttcaaggttgagtcctcacgagtttgtttcccctttttcacccgctgaatttcctctctctcactcctcaacgatttaagctcggacagttcatcgctgaccttttgggcagcttgcattgccttcttctgagcccagtctttcctctccttcaattgctttttgagatcctgaacctgctgaagta

SEQ ID NO: 15967 - DNA, 485 bp, Arabidopsis thaliana
ctagaggatctcctttctctctttccattgcgtttgataacttaaatgcacatctttcagttcaatgtctcctcggatatctccaagaacctttccatttacgtcataagcatcaatcaaaggctttcttttgatcgtctcaaacatcttatatgctgcagcttgacctgctgcaaatgcggttacacatggagatgtttgcccaagcgacctaaagaaaaacaaaacagaacacaactcttaggaatctcacatttataaacaaagaagaagacataatctgatgtatatatagaaccaatgatctaggcatttacattgaacccgcaaccacaatgatgatcaccttgatcacagagccaccggtataccctttttcgagtatcatcttcccaccaaaccaaatagccaaagcatagctgctgaagaacacatagatcattactccaagtcgtagaccagtggagaaaccttgttgaatgctt

SEQ ID NO: 15968 - DNA, 817 bp, Arabidopsis thaliana
cagatgtgctctaaagcatgatttagtgaagttcctaagacgacaatctagtccagttggtgctagatgaaaacatacttgcctgcatctgtgcaacacaagcgattcagataaaaactctaattagtaactgaattcggacacacttgtcaggatgaactcgacctgaatcggagtagggttcctggaatccgagagtttaacaagctcgaagcaatggacgagagagattaagctccatgaaagtatcagcatgaaatgaaactccatccactgtagagaagaacggcttgggagtagcatcttctggtttgtactcagctgcctcatcgtcttccgaaagatactcctccttcacaatcaaaaccacatttcaatttctctaataacctaattcgaaaacttattcaatcaattcaaaataaaagatttacttgtttgtcagtttcagcatcggaggcatcttcttcttcttcttcctcttcttcttcttcatttattgaaatgggaactggacgatgctgaatagctttagagatcttttcatcaatagacgttgtgtgacggcgggcgtgttcttcaccaacggagcttgagtaagatgcaaaatcccaaggagattgagcatcagcatctcgtttccgcttctcatcttcttcttcttcgtcgtcatcttcttcttcatattcctcttctccatcttcgtcttctccagcttcatgctcttctgcttcgccttcctttacgtcttcctcactactgtcctctggattgcgtattaattcgagctcgtcgtcactagcatcctcaaagaaga

SEQ ID NO: 15969 - DNA, 522 bp, Arabidopsis thaliana columbia
gattcaggtaaaccctaatcgcacccaaacggtagaagctcaaatcgaaacactttaaaaccgccacaaacacgataaacccgcacataatttcgaattcccatagaaaccctagaaaaaaacaaaaacgaggaaacaacctccgcaaaatcggactgatggccaggattatgctgagattcaggtcggatctcgatatcagcagactcatcaacgatttcttgcatagtattttgaataaactcatcaaacgaatccagctgttgacgaacgagacctttctcttcgaaataagcagatataacagcccacgcgtcctcctgggtaatctcctcatcgtcatcgtcttctacatattgaggttcaggttcgtattagttgtactccatttattctcactctctgaagattagagcacagcaaacttcactactcgagctctcggagacaaagagagagacaggacgcagagaatgagacggctttgtgagattgtgagtttataaaggctcgagagagaga

SEQ ID NO: 15970 - DNA, 558 bp, Arabidopsis thaliana columbia
cattgcatatcttcatcattcagtttcatgataatcataaacctaaagaagtagataaatttgacttgactttgaatcaaagtcttaagaagtcatcataaatcttcagatctaaaaattctaaccagcagcatcactatcgctatgattcaatcctaatccaaatccaatctctactctattcaaaatcaaaactcagatttacagatctcacttcaaattgaataaattcactcaaaaatcggagatcgaaacacatactgttgagctcatcgagccagcgaccgacgttttcgaaagtggagctacgagtgatatcgtagacgacgagggctccaacggcgccacggtaataagcagatgtaacggcgcggaagattcctgaccggcggtatcccaaatctgagctttgacctctttgccgtcgatgagcatgctctgagtctgaaactcgacgccgatagtggctttggaattgggattgaactcgttacgggcgtacggagtgaggagattggatttgcgacgcgggaatcacgatgatacaatcttgaagag

SEQ ID NO: 15971 - DNA, 544 bp, Arabidopsis thaliana columbia
gttgagcttggaacctcaaattctttcatcatctaagggccgctaatattgtttagaaaggttggtaaagggtttgtaggtggaaggtttgagatgcccctcttttccagtcaaatactatttttattaagttattagaaaaaaattatccgctaggaagagtcattcgggaaccgacgtgcttacatgagaaaaaaaacatttctactcttagctttttttgctaaatggtctgctcgagtgttaaaacttcgagaaagaaatctaatacaaaaagaaggaaaaaaaaagcaataagagatcgaaaagaggctaattatataaaacctttttctagttaaactaatgggttatatatacatttactttggaatccacatatttttaaggccggcaatacgattatctaattcgtatttagatgagaaattttcatttacaaaggaattaaacattttctggttggcctcaatttaaacggttgtgcaacatacactaaacttcaggtttatcaaaaaaaaaaaaaaaaattatttgcaggttt

SEQ ID NO: 15972 - DNA, 574 bp, Arabidopsis thaliana columbia
gccagtgtgctctaaagggtgaactcttctgccataatttgttcataagtgctattgtcagtaattcgtggatgcctattactacaaattagagtattgcgaatcgtatgcaatggcatgcaaatgacggaacggctgatcactggcatttgggtgatcaccagatcggctttgcggtgaaccaacagttcttcagcattctctgctgacatgaggatatcatggcactcaatctcgacagaggaatcttgccgtacaggcggatcagcatactattattagagcaagaaatgagctgagggccgtagataataaagtttttctttagttcggacttattgactatattaattgtttgttcaaggcctctgagatttttctcaagatggtgatgcagatttaaccgtgttgtcgtcggcgcgataccttttcctgagcgaatgaataaagggtcattaaattgcgcacgtaagcgttgtaacgactggctcacggctgatggggtgatatatagtgattcagcagctttgctaatgcttagatgctggtaaatcactcaaatatgacaagaaga

SEQ ID NO: 15973 - DNA, 579 bp, Arabidopsis thaliana
tagtaacgtccgccagtgtgctttaaagttacaccagatacgctaaaccagattgccagcgaagtgggtgaacagtcgatcatttcccgtgcgggcggtgcgccgacgctggcggtggggatggcctacattctgcacggcgcgctgggcggcatgatggatgtggcgttctggtatcacttcgccattttgtttgaagcactgtttattctgacggcggtggatgcaggtacgcgtgctgcgcgctttatgttgcaggatctgctgggcgtggtgtctcctggcctgaagcggaccgattcactgcctgctaacctgctggcaacagcgctgtgcgtactggcgtggggctacttcctccatcagggcgtggtcgatccgctgggcggcattaacactctgtggccgctgtttggtattgccaaccagatgctggcagggatggcgctgatgctctgtgccgtggtgttgttcaagatgaaacgtcaacgttacgcctgggtggcgcctggtacaacggcctggctgctgatttgtccctgaccgcagctggcagaaagcgtttacgccggatgcgaa

SEQ ID NO: 15974 - DNA, 230 bp, Arabidopsis thaliana columbia
gatatatgaaaggcggaggcggtggtggaggaggtggtggcggaggaaaacgccggtggaaagttctggtgattggagttttggttcttgttattctttctatgcttgttcctcttgctttcttactcggtcttcacaatggctttcactctcctggtatctcttatcattctctctctaacactctctttgctttttttctgccgatctctgtttcaaatctaatctca

SEQ ID NO: 15975 - DNA, 466 bp, Arabidopsis thaliana columbia
gtcacatgtcttcttgtgctttggtttgtcggtaggaggcaacaactcttgtaatccaactccttctcctatttgattgttgttggcatctgctcgagaaactacttgaccattctcgttttcttgaggtttgaagtcacccatctacatgttttgttttactaatgatgagtacacttagctaatacgtatataaagtcggaaaaatacgtacagatgtacaaagcgtacccagcttggcacattggtcgcgggaccgtcggatccgatgtgggcgacatgctttacatcggtaggaaacccgatctgcatgtccttgtctttttcttcgtctgtaattagattttttgttttcatatacatacagagatgtgacttgtattgcaagaaaagttacaattgctcttgttagtgagtcgatgagactcacggaaaatctgagtaatgtagcgaagccgtttaagaa

SEQ ID NO: 15976 - DNA, 603 bp, Arabidopsis thaliana columbia
agttggctgggaaagaatttttatattcaaggatagagaatctgaaaatattagctggtacgtggaatgttggagaggggagagcatcaaccgactcacttgtatcttggctaggctgtgctgcaactggagttgagattgtagttgttggactgcaagaagttgaaatgggagcaggagttcttgcaatgtccgcagcaaaagaaacggtaagctttctttacctactgttaagcagaaaagatgtatttcatttggcgtatgcgctcttctggtcacaccgacactatttaagttctacaatggaatgattaaaatgaaaagtgaaagtgaattggtcttttttttgtgtaatcctctaggccttctcaaaaaaagaaattttccattctctcaaacatgcaggctcacatacacacacacagacccgtccttttttgtattctctttctggttacagtttttgtagggggctaagtttataagtaatctttgaatgatctggaaattacgcactctgtttccctgaatgcaggtgggacttgagggtagccgcttggtcagtggtggctggatatgatcgggaaactttggatgagggtc

SEQ ID NO: 15977 - DNA, 270 bp, Arabidopsis thaliana columbia
cgccagtgtgctctaaagcagtcctgccgtcggggcatcaagtactcgtgccttaggggcagcgagtactcctgcctttggggcagccagtactcgtgccagtagggggatctagtactccttctgcatgttgcgtcaaatacctcatcctattagttatggctcgtatacagatgttggtcagtgtacatcagcctttggtagtagcggcttgggctctagacgatctccctatggatgtcaaggtacctcctttagcatttcgcattc

SEQ ID NO: 15978 - DNA, 593 bp, Arabidopsis thaliana columbia
tatctgctctgcttcatctatgatcttcaattagcgttttataatccattttctatagatgatacccacaagcatcttctaattcatcagcagttcccttttgttaacatacatagaaataaagatttcgtgaagaacacgaaacagatctagaaacaggggaaaagggactttgtccttgatcgttaacgcagggcttatcctcaaaccaaaaaacaattatagacaatatgatacatacgttgggaaaaaaaaacacttttgtacacaagacaaacattacaaaatggtcagacaaagtagatatgataatgcaaaaacgccttgtcacgttgcttcattgacgttcgatctgaatagtcacgtgactaatgttgtgttcctcttaatgtaatcgataatcttgtccaaaaccatatctgcctctgcctcaggtctgattttaacatgacatgccaacaaaagtttgccgacagtaatcgcccaaatgtgaagctcatgaacagccaccacttcttcaatatcacacactcccttttcaagcattgtcgggtcaatctctcgtggtgttgctccattaaacctctagaatg

SEQ ID NO: 15979 - DNA, 580 bp, Arabidopsis thaliana columbia
cttccttccttttctcgtgcaatctccaacaccttgactacgcttcttcatcccaccaacaaaaaccctttctctatcaaaaccaaaccaccgttagtttttctttcccggtgatacgtttagatagcttctttttttttccggtggttaacgttgacgattgactacttcaattctaaacggataagtattagatagcttcctcttcttcttctccagtatctggcgacgaattcaactagagattattttctctttttcttgtctcctcttgatcgtttgtttttgtttgtatctggattcaatgacgggatttggttaaacgaagaagattcatttctctgttcgttcgatctgtaaatttttgctttcagagtgagattttaacgaaatgcctcaccggactacttacttctttccgcggcagtttcccgatcgtggattcgattcgttttcgcttaagaatgatcacgacaagaagaaatcgtcgtctaacgttggagagagttttggatttcaaagagataataaatctaatggagtcggagaagattctaacaaggagaaggagagtactgtg

SEQ ID NO: 15980 - DNA, 877 bp, Arabidopsis thaliana
ccctgcttctgaagtttaggacgatgagttagtttttttgaaggtcattagttcttactttttggtgtatgatttttaattgttactggcctggatccatagataatcgtagtgagaatcagtagctctatcaattgttttgtatcaattgcttggaagatgattgtaactttgttttggatgaagagagttttgacataaatcttaacacttgttatctcttttgcagctcgatacactgttcgttcttttggtataagacgtaatgagaagattgcttgctatgtgactgtcaggggagagaaggcaatgcagctccttgagagtggattgaaagttaaagaatacgaactcttgagaaggaacttcagcgacactggttgctttggttttggtattcaagagcacattgatttgggtatcaagtaagtctcattctttctaacacatacatagaacaactttagagtggcttttgtgtaaccagtgatcaaacgtacggggtttttaaatatatatttgatctcaggtatgatccatcgactggaatctacggcatggacttctatgttgttcttgagcgaccaggttaccgtgttgcgcgccgcagaagatgcaagactcgtgttggaatccagcatagagtgacgaaagatgatgccatgaaatggttccaggtgaaatatgaaggagtcattctcaacaagtctcagaacatcactggttaaacaaatgtgtcaaacaaatagctatcatctgttttgttttttttgggttcaaatcgtattttctcagttttgttttgcttctctgttcttcagacattttgattttcctttatatattttgcgtatctactactccgacaaaagctgac

SEQ ID NO: 15981 - DNA, 479 bp, Arabidopsis thaliana columbia
ctagaggctacaagatacgagattaccgataaactgtctaccaagatcgggcagcatgcgtgacctttcccagtttccctcaaaactagctcccacaatagctgcttgctcaagacaatcattcttatgcaaagtatccatcagaacaacacaggtttagttatggataggtaatcctcatcgacgtgtttcctcaaaaagagatcaagcatccattgccctgtttgagttacttagaccttcgatcatggcattatcacaagcagagtctggaacaccaccgtttgccttgaaccgatcgaagagcgccccagcctctgcaatattcccagcctttgcaaagtctgatatcatggtggtgtaagaaatagtactgggtttaatcactgttatctgcatctcctgccataagacaaaggctttattgaacttcctgaccttacaaagaccatttattaggataccataagtaacttgga

SEQ ID NO: 15982 - DNA, 522 bp, Arabidopsis thaliana columbia
acattccagctgtatacgagttcttctggtcgcatggcatgatctctgaggtagtgggacgtacaatcaagattcaatgtgacttctcacattacacatatgcatacccccataacgtaagtgatgcctgcaacgatgctatccgtgaagccggagacatcaccactgagtatgtcaatacctttgatgttctccctgacctatgctacccatctattgccctgcaagagctaaggcttaaacaaatggttagcccttttttgcaccaacaaaacttttgcttgaattatctgtaaacttatgaaaatggtttcaggctactaagatgagcatgggagtggatgtgtgtatgaactacgaaagacagttctacctaaatatcccagaggtacagatggctcttcacgcaaaccgcacaaacctgccttattcatggtctttgtgcagcaagtaagttattttcctctctttcactttcataaaatgaagaatctttataccactgttgcactctatactgat

SEQ ID NO: 15983 - DNA, 1597 bp, Arabidopsis thaliana
tataacttgataagcctaccagtccaaattaggagctgttcgtttccccgcttctgatatagttgcgttgtgcactctgttttatatgcatcgcttttggtttgctctgagagacatgatttggtttagcttcttccattgcaattttcaagaacccttgttatgtgtggcttttgcagctagatacactgttcgttcttttggtatcagacgtaacgagaagatcgcatgctatgtaaccgtcagaggtgagaaggcaatgcaactacttgaaagtggattgaaagtcaaggaatacgaacttctcagaagaaacttcagtgacactggttgcttcggttttggtattcaagaacacattgatttgggtatcaagtaagtcaatccccttaaatcatcctgtcataacacttggggttcaccacattcttggtgatactcattgatctttgtttcacttcttataaaggtacgatccatcaactggaatctatggtatggacttctatgtggtcctagaacgtcctggctaccgtgtagcacgtcgcagaaggtgcaaggctcgtgttggtatccaacacagagtaactaaagacgatgcaatgaaatggttccaggtgaaatacgaaggagtcattctcaacaagtcccagaacatcactggctaaaacaattcctcctaactctttcttctgttttagaaaaccctgtctcagttttgtttacttgtctgaatcttaatctttgtactttatatgcattattggctttagtttcagttatttaagtatctaatttcgtgtgaggataagcaagataagaaaattttggcgggtagttgaagcgtgtggagacatataaatccactagctgacacgtgccacggacggctaagcacgctttcgccgatcgccgatcgccgctagattcatctcggattcctccaaataagcttccctggttcttatcttgccacgtcagcatttctccctcgtacgccttaaattcttcacaaaaataataaaaatattaattcaaataaatgttcatcttctcctacgaatgaaattgaaattaatttgagcgatcggaacaggatcgggtcggatcttttgaagttcttcaatggcgcagatactttcccctgtttgtacggatcttttgaagttccagaactcagctcttagctccagatcaggtgcgtcgccgcggttctcggcgaagaccaccggtgcttcttcatcttggtacttacctcggtacgcaggaaagaggcgaaccgattcaatcggaagattgagagttgcaactgaggatgcttcttctctttccaccggtgatgtcgccgatgattactatgccgttctcggactcgtaagaaccaaggctatttcaatccgatttgatatatgcatatagggattttgaagtgatgatttttttttttggtttaagttgtttgcttatgattgaaacttcttgtgtatcatggaaaaatactctgcatttcatatggttgtagctagattcatctttgtcgaaattgtgaagcctttgacaggttacaatcattaagatcaaagattgtgactttaat

SEQ ID NO: 15984 - DNA, 643 bp, Arabidopsis thaliana columbia
agaagattctaacaaggagaaggagagtactgtgttctcctctaatcctctgctttctaaaagctcagccgtttcagatctctttagcgatgatcgcaagtcggagaagaagcatcagcagcaactagccgctttctatgagtggttggcggagaagaaggctaatctctctaggtcatcatctactactactactcatggacgcggggtgaagcccacgcgcttctctatgtctagcgacgccgatgaggagagagagcttctgttgtcttctccggctgatcccgctccgcttcctgctacttcttcgccggattctatcattgattcggctaggacggttaacatacatgaacgaaacattgatcggagctttgacagagaggtttcgcttccccgaatgtcgagtgagagcagcttcgctggaagcttcttctccgggacgacggtggacgggaatttctcaatttctcaagtcatacagacgcaagggaaacttcgacaaccacgcttgtctcagtgaacaaagaggaagaagaagttgaggttatggaacagggcaaagagcatagcttagcgaagaagtcaagagaaggctattacttgcaggtcacgcttgctaagtggctaagttctcaagcaa

SEQ ID NO: 15985 - DNA, 414 bp, Arabidopsis thaliana columbia
ctctagacgccagtgtgctctaaagaagccgggcaggtggagttacgacgcgttaggcgcaggaatgtataccttgctgagcgtgccgaaagatgtgcagatcttcttcccgatggcggctctgcttggaggcgttgcttggtcttgggatgctggcgcacgcagcaaacatggtggtgatgcaggcttctggttttacccgtatgcaggtggcgctgtcggtgatgaaaaccgccattccactggtcttgctgacgatggcgattggcgaatgggtcgcgccgcagggcaggcagatggcgcgtaactaccgtgcgcaggcgatgtacggcggctcgttgctcgctagccagcaaggcttatgggcgaaagatggcaacaacttcgtctacattgagcgggttaaaggtgacg

SEQ ID NO: 15986 - DNA, 516 bp, Arabidopsis thaliana columbia
  unsure (1)..(516): unsure at all n locations
nnnnnnnnnnnnnnnnnnnnnnctaaagtgaggtaaaatatgaaaattggaactgtggcaggcactaacgacagtacaacgacaatcgcaacaaatgatatggtgcaagagcatgttaccaacttcactaaagaactgtttgggtatattgcaaatggtataggtgatgatatatcaagtattgccaggacaatgctcggtgaggttgtggaaaaaatagatgattggcaaatagaacggttccaacaatctattcaagatgacaaaatttcatttaccatacaaacggatcattcagaaaaatatagtatgctatcgggcatgcgtgctcatattctacgtaggaataataattatcagtttattgtgacaattagtagcaaaaattacggttgctctcttgataataccgatattaattggtgcagtattgtgtatttacttaattatatgacagtaaatgataatgctaatgatgttgcagttactgagtcgtacaaaccatctggaactgga

SEQ ID NO: 15987 - DNA, 530 bp, Arabidopsis thaliana columbia
cgtctaagtaagcgagcagagtttgtattccgttctctgatataaccgatcttcgaagagtttcgttgcttgaagtgagattctgaagacattccgctgcgtattctttagatcccaataggattccgcagttaagtatgttaatcatcactttcacgattccttcttccgctagattctgtcttacttcaggcacagcggaaatgttcttcaaagtacaagcagaagcggattgagaaacagagtcccctgttttgcaaatctcgatcaacggaccaaccccgccgtgaccaacaattgaacgcgatgtctctgatgaaatagacattctctgcaacgaaataaccgctttctccttagcaacaatacttcctgattctagtagccttatcaatgaaggcaatgcgttctcagagataagccagttttcgcatccgcctgattccgctagagagcagatcacatgtcacgggttttcccttacgctaggcgaggtagccgtcaaaagctgcaccaaagacgcgacgttg

SEQ ID NO: 15988 - DNA, 944 bp, Arabidopsis thaliana
ttgtcagaccatccattcttggtcttaagcctaaagagagacacaattgctggtagcttgctgtggtttaaacaatcaggatataaaggggtttctgcatctgctaccttggctaggaactcatcttctctcttgtcctcaccctctacaatctcacctaagttagccactagattgtcacctacatcaccattagtagccaagtcttggtcattgtattcaaatgtggattcaaatgttaaatcgattaagagaaatctatatcacaaaacaagatctttgtgaagagaatgtggattcaaatgttaaacagacatgataatcgcagaagttatttctttaccctaaatttcaaacaaatcgaagaaccctaatttcaaactaatcgaagaaccctaatttcaaaatgaaaaacaaatccgattttccttaccaatctactgaactagatcaaaattagagacaatcttacccaaaaattcaatagaaatagaagttatataaacgaagaaagacatgcctcggttttaactcattgacagccgctgcgtatgaggattaggctacggcggagtacaaatcagatcttaatacgactttgaggtttgagaatgagcttcgaggttagagatttgagcttaattggtgataaatctgagtttgtcggaatttgttttttgagagaatggtttggttttgattactgtatcgcgctaagtgttttgggctaagtgactgaagagggaaatgaattactgttctcgcgctaagtgtttttttggctaagtgttggcggataaagtcattttagattcccgctcattaaattcctatcatagtgtttattacccatattataaagaaacccaaaaaaaaacctaccatagcaggaacagaaaatgagctatcctatagtgctatcaatgttgatatttattgtagtg

SEQ ID NO: 15989 - DNA, 449 bp, Arabidopsis thaliana columbia
ggctcatttttgtcgaaacaccaatgctgcactggccggacagtatgatgacttacctgacaggcgacgcggtgctgttcagtaacgatgctttcggtcaacactactgcgacgagcatctgttcaacgatgaagtggatcagacggagcttttcgagcagtgccagcgttactacgccaatatcctgacgccgttcagccgcctggtaacaccgaaaattaccgagatcctgggctttaacttaccagtcgatatgatagccacttcccacggcgtggtatggcgcgataacccgacgcaaattgtcgagctgtacctgaaatgggcggctgattatcaggaagacagaatcacgattttctacgacaccatgtcgaataacacccgcatgatggctgacgctatcgcccaggggattgcggaaaccgacccacgcgtggcggtgaaa

SEQ ID NO: 15990 - DNA, 756 bp, Arabidopsis thaliana
gcatctttcttgatcaagattacaagcagttttgagctttttactcgttacacatgtacgaggcatgattgacatatatccaaagccgtggctactatttgctatcacccggttcgtcgggaaagctgctcctgaaatgtgctctcgaagatcttgtcagcatttccgacctcaaatccatcacgtcgatgagactcttgtatctgcgttttgtaggtttcagaaatgtcattccacaatgttggtacaccatctttacattagtggtatctaagaggagttctccaggcaatgggaaggaaaagatcgcatcgattcacagtaaccggattctaaataagttaagattcaatcagagtggtttcttacctcgctttcgggtatattttggtactgcggaagtacaaggcgttcagcaaactcaatgtatgaacaagggatagatttggtaacaccatcagcgaacttgaaagatatcgaatctgctacagttgagctttgctgcaaaccaccatcagggctaactgtaaaagtagaaagacaaagattagcttagaatctaatttcttttaaattgagtgataaagattagtaaccatacctttaaggactcctccttctgagttcaatttgatacctttttcttcgaggaactgattgagcttcttgattttgtttagatgagatttaagccgatgaacagaaatcgtgacgtggttaagtgcatatccattgacaagggtccatgctgcgtat

SEQ ID NO: 15991 - DNA, 795 bp, Arabidopsis thaliana
taaaaaaatggagaaatcagatcctccaccagtcccaaagcccggcgccactattatcccctcctccgatccaattcctaatgccgatccgattccatcttcttccttccaccgccgatctcgctccgacgatatgtccatgttcatgttcatggatcccctctcctccgccgcaacaaccttcctccgacgaccttccctccgacgacgatctcttctcttctttcatcgatgtcgatagcctcacctctaatcccaatccctttcaaaatccttccctctcctccaactccgtttccggcgctgctaatcctcctcctcctccttcctctcgtcctcgccaccgtcacagcaattccgttgacgctggatgcgccatgtatgccggtgatatcatggacgctaagaaagctatgcctcctgaaaaactctctgagctttggaacatcgatcccaaacgcgccaaaaggtccttcttcttcttcttcaaatttgtttctctttccacagaattgaagaattgcaatgaaattagggatttgattacaggattctagcgaatcgacaatctgcagctcgatccaaagagagaaaagctcgatacattcaagaacttgagcgcaaagttcaatctcttcaaaccgaagctaccactctctctgctcagcttactctctaccaggtttccatattcggcgattcctcgtctgatccaacagaataggaaagttctttcctctgttttacatacatagacagatcttgatttcaatgttgttttgattgatccagaga

SEQ ID NO: 15992 - DNA, 1085 bp, Arabidopsis thaliana columbia
tcaagatcgtaattttcaaatatatattagtaattaagtactgatcaatattagtttttgttagtcaactggttaagctggctttgccttttgtttggattttaaaacttctcttcttttgcttatcaaggcctccctctaaatgatatgcttgcttaaccaatagtatcaactattaagtacttattaagaaaaaatgatattctttttggattttacaaagctacttactttgaaaaataaattatgttgattgatgtttttcagacatgttacgcatgcctttcttccaaagtacaaaagagcaaggggtgacataattaacctagaaaagctgacgtacatagaaatctataaattaatgactaactcactactaacacaccacgcattgcatttagtttaaaaggccattctcttctcggaaagtagatttttgcaacaagccaacaacgccaacaagctaaaccgaataaacctttatgattaatgtacagtttttattggggttattaaaataaaaataattcacaaaaaatagtagaaatgtggatgtaggagaatgacttgttcctccccttgacaggttacatgtctaaaaacagtaacaaagttgtggatgcgcagataactgaatccttagccgttacatgtctaaaaatagaggtctctgtactaacgctatcaacgtcaagaaatcgaaaaacaaaatcgagtgagcaaaaattaaagaacaacgaacaaaatcagaattacacaaatgggaactagtaagattcccaaaaccctcaacgggaaccttgttcttatacttatcatcaccataatgatggtgactcactcccatggatttcaactggagatcaggaacgagctatcaggaaggtacaggaagcttgtgtacaaatgctggtcccgcgataacgatttcgggtggcgacagatactggccaggccagtacaaggactggtccttcgccatttcactattccacacctacttctactgccacttccgtacagcgtatggacgcgtggataagcagctagtagcgtcatgggagttaaaacaagagtgtggggac

SEQ ID NO: 15993 - DNA, 542 bp, Arabidopsis thaliana columbia
gccagtgtgctctaaagcgggctgcagtgctgaaatgactgcttcgcagtgccgtcgtccagttctccggtgaccggtacgctgaaccgtaatatcccgtgcttaaatcgtccgggtcttcatcaggcgcgttcgtcagtcctctttcaccttgttgctggaagtcgacgaaaataatattggctaaaacattattttgataattgccataaatagcttcatacgaatgcgggaaattttctttccagtaccaggtggtatcgccgcaaaaccacggcgcgtcagtaatattattaagctgagaatggtattgttttagatccctacgaaaggcttcaaccatatgattaaagtgttgagggtgtgacgcgtagtcactggtcattaagtcaaattcgccttgcatccagcatgcgccgaggaatttgttctgcggattttttgccagtgcggctcgcgttctgctgactaaatcctggtacagcggagtatccgtgccccaacgacaagcatcatggctggctccgtgccgttctgaatat

SEQ ID NO: 15994 - DNA, 678 bp, Arabidopsis thaliana columbia
gatgatttgaggactccaagctggaaggacaagaaacaccgtgaagtagacgcaacgccaaaagaaaatcgtctggaattggctcgaggaatttgagggtgcgttttgcaaccaaggaaaacaacagtcagaaaaaatcatgaaatcgcgtcgggcacaaacagaatgttagctataactacctaagttcctcatctcgtcaaaaccgtcccaaggagatcgtcgtgaatatcatcttcaagggccacaaagagaaagtgataggtatacggctcatctttgctcgggtacccgtcaataaccttcctacccgtcaagtaccgatacactttggatttaagaacctgccggatctcaaggagatttctcagatgagcaagcgtgatgtcggtctcagattcataactccgaaccagaatcccgagcaaatgtgtcaaggatcgcgtcgtaatctgggagagggcgatctggtacgatgtcacgtaccccaaaaccagcctcgggaccggaagccatagaaagcaaaaatagaaaaatcccccatacaaagtataggagcccgtacggggattgtcggctcgctcatcggggctcggcacacgtagagtgacctcacctagattgaatcgaggcctcagatccgaaagcaaccgctcggtgcacaaagtcgagccaaga

SEQ ID NO: 15995 - DNA, 546 bp, Arabidopsis thaliana columbia
agtgtgctctaaagtccataaccttgagaatctcaaaagacgatactgaacaaattttatcaggtgacgttccgtaaaaagttgtatggagttctcgatgcagtcggcgcgactatcagtacccccgctgaaccctggactatcgggccgccgtactggggcatgtcaccctggcgtgccgctggttttccgctaatggtttatttcctcttgctttcccggcaagaatttattttaatccggaaggattatgttattttcagatagggactcacattaaacacgtaacattttaattaatgcatggctgaatatgtattacacaatgtcagatatcgtaaaagaccagtgcaattctatgtaaactctctgactgttcattttatgtgttgtttcagggtcggaactcaccctcaataaacaactgaatacgagtagatattcatcgtctgagctatatggctttacacaatagccgacatgtcttttctcagtcaggaattttactttcctcactacgaagttgacgacttcgatatgggatag

SEQ ID NO: 15996 - DNA, 724 bp, Arabidopsis thaliana columbia
ttctatcgtcttctgtagtctgacatcatttgcttattatagatgattgatttctctattattgaacatcttctattttttatattaaaaaattattgaagaagaatgatcctaatgctaagtatacgagacactctaggttttgacttttggtcaagtcgagtagctgagattgtgacacgtggttgaatctgaagcgtccatctctaacggacttttcttatcttcttcttcttcgtttctcttcttaaacacttctgttgtaattctcaaattcattcgatctagtgtgataaggatctagagagagagagagagcagaaacattgtagtgtgagaaagctcggtttgagcaaatttgtttcagtggattctggagaactctccagcgagacgtaggattccaaattggaatccgaactcgttaattcttgtgtgtctgttctaagttctttcaagtgtgacattaatcgcgagagtcagtgagttagatcggagttcttgaggatcaaagctcacaaattagtatcagagccaggttggactcaaggattcgcagatctaaccggagatgtcaaacacaaagcttaagatttcacagttcgatggttccggtgattattcactttggaaaacacggatgttctcacatctaagggtgatggggttaaaagatgctttggtggacgagctctgttacaccattaaaggacgaagatgaact

SEQ ID NO: 15997 - DNA, 356 bp, Arabidopsis thaliana columbia
acccaatgttcacaacaacaccgatcctagaattacttccatcgtaaagagacgtgtcttcctcagatcgacctcttctcttcaagaagaaatctcacatgtgttcttgacactgcgatttctctgatactttgataatgccacgcgagatagatatcacgagatagacactccttgaattggttgatttcgtttactcatcttctggtaaagtcaatgagacgatgcagagtgagcttaaacgtatggtttctgctaacattttccggtgtctcacagcggcttaccatgagaacaatggagctcctcatgaagggagtaatcctgaagatgaagagccttatcatgagccatga

SEQ ID NO: 15998 - DNA, 705 bp, Arabidopsis thaliana
tactgttgaagaaggtcaagaatgacaggtccaagagagtagtgctttctgaacatgttagctccactgccaaatggcaaagcactgagatactctctgatccaggtagctttgttcttgacggcttgatatctactagaagattcagccactccttctgtcatcttggaacaagaatcaatctcatgcccaagtctgttgcagggaagctaggcatgactaactacatgccaacaaggatcactctcctctttgcggatcgttccaatcgaatccctcaaggtatcctcgatgatgttcctctaaaacttggtaaatgcctcatccctgctgattttgtggtcctagcatatgatgaagaacccaaggatcctctcatccttggtatagcttttctagctacacctggtgctaggattgatgtgaagaaagataggatctcccttaacatatgcgatgtggagatggagttcggcatggatggttcaaaatttatagtgcctatcaggagtattgccaccaacaaagacacatcttctatggctgctcagatttcacctccaagctcgcagatgaaagctgcaaagaactagtgtcgctcgacaccacaccccctatcgatcgacaccattgcgcttgagagactgatgattctgcacctccttcacagcccacacctaattcaaatccctgtgataggtactg

SEQ ID NO: 15999 - DNA, 544 bp, Arabidopsis thaliana
caggataccaaatagaattctagggaaaaagatgaaatcttcaacaaactatttcaagtgatggtaaggtgaatagtaactcacttggtggagtttcatctgcattttgtgtggacatttcggaatgaaccaagaagctcttaagggaattgtcaaactcctcggatttagtttgggatacagtaacctggccaagatcagctgatggaatagttgaagcgcagtcctgtacaaattgttctttgtactattatttctgatcttggcttccagaagcaacatatcgagcagaccagtatcaaaatttgaatataaatctgactcttctcccccctgttggtggtggtggagactgaatgtaagtatcaaagggatcaaggagatcagagtgtggaggagatgacgatttcttccactggtcaaatgttgtttctgaatattggaatgaagggagctccagcttcactgccccatataagggcttagaataaggaacaatgccatccgtagaggtatggctatctggaatcataacaggtgaatg

SEQ ID NO: 16000 - DNA, 842 bp, Arabidopsis thaliana columbia
tgctctgataccaacttgtgagaccccatcccggacgtctcgacgtccgacaaccttggactcacgtttacgcctcatcccggtcgaacttctttatttttcgcgattcaacatagaattgcctttaagaggcataattctataatcactttcttattacacaacagaagtctttctaaccttggttaaattctaaccaactcttgtacgggtttcattgtctttaccacttagacttagatcgatcctttactcgatcaagacatgcatattgttcgctaaccactaggcctatcaatcgcatattcctttatcctattttcatgattaattaccaaacgactatcttaactaataagctagatcgttacataccttggccaatatgcggatttgattccttagcccgtttgtcgccttactccattcgttcaacgactcgtatccgatagtgaatttatgaaccaatccctatcgttacttagccatacaaccaaccaaccccactggtctaagtcccacgatggagattggagatcgtgtggttctcttggttcacgatggtcgaatcaagctcttggctcattggtccatccgtcctccaagcgtacgcccttcgatttcatggtggatgattcagccctcggcttatcaaaccatccatgtttccgatccggtcgtttactacgaccatccacggtttactaactgtttatccgtccggtctatggtggtcagtaaagctttcggcttgttgatcatccttacgatccgaacgatatcgttatcacacccaagggtctgtggattcatccacggatcatcgtaggctagccatgaaa

SEQ ID NO: 16001 - DNA, 582 bp, Arabidopsis thaliana columbia
ggatcacataaagaaggtctacaagaatccgattattcagtttcaaagattttgtttctcaaaatttgctcttttattaatcacaaaagagccgttgctttgataacgtttctgttccgattaggcctcatttctcctttgtatacaaacaaaaacgacatcgtttatgtcaaacgtatgcaaaagtctcgacatgtattgtgcaaaaagtcttgacctttattgaccaaaagttgattttacaggactagttcatattccgagttaaagaatgcaaagcttggacctttattgatctattgcatccaatttacagcattttgagtatacaaaagagtattaaattacatgcaaagttgagagtttatatatgatgagttcatgatgctttttcttctgctggttgtttttgtttagacgctttctcagcctccatttttctcagagtacttgaacttatcttattccactcgatccatcagaaactatttccacaacttcaatctgcacaagcatattccaagaaagattggttcaagtaatgattgaaggacttaaaatggatcaggaggtcaataagat

SEQ ID NO: 16002 - DNA, 1048 bp, Arabidopsis thaliana
tgtttaccagttacctggtcgaacagataatgagataaagaattattggaacactcgtatcaagaggagacaacgagcaggcttaccactttaccctcctgaaatctatgttgatgaccttcattggagcgaagagtatacaaagagtaatatcataagagtagatagaagaagaagacatcaagatttcttgcagttggggaattctaaagataatgtcttatttgacgatctaaattttgctgctagcttgttacctgccgcttctgacctatcagatttggttgcatgcaacatgctaggaactggcgcaagttcttcccggtatgagagctacatgccaccaatattgccttccccaaagcaaatctgggaatctggatctcggtttcccatgtgcagcagtaacataaagcatgaattccaatcgccggaacactttcagaatacggctgtacagaagaatcccagatcttgcagtatctcgccttgtgatgttgatcatcatccttatgaaaaccaacattcgtctcatatgatgatggttcctgatagccatacagttacgtatggcatgcatcctacttctaagcccttgtttggggcagtgaagctggagctcccttcattccaatattcagaaactagtgcatttgatcagtggaagacgactccgtcacctccacactcagatctccttgactctgttgatgcctatattcaatctccaccaccatcgcaggtagaggagtcagattgtttctcttcatgcgacaccggcctactagatatgttacttcatgaggccaagatcaaaactagtgcgaagcaagtttgttgatgtcatcaccccagaagagtttcagttcaactacttgcacgaccaatgttactcagaatgtaccacgtggcagcgaaaacctgatcaaatcaggagaatatgaagatcccaaaagtatttgggtcgctccgagattacaagtccctcgcaacttagtgcaggtggtttttcatcaggtgagttgatcaaagttacttgttgattggt

SEQ ID NO: 16003 - DNA, 664 bp, Arabidopsis thaliana
gcaattgccttgatgcgtatgcgataacactccccttttgcatcagtacgcattctagtcccactattgatgcgtccgtataaaccgtatagggctcaccttcctccggtaagaccaataccggtgcgttagtcaacatggcctttaactccaggaagcttttctcgcactcatccgaccagttgaatgcggtgtcttttccggtcagtcaagtcatagtcgatgcatagcctaaagctaccatctttctttttcacaaacagaaccggcgcaccccatggtgagctactcggcctgatgaatcctttatccagcaactcctccaattgtttctttagctccgccatttctgcgggtgccatccggtacggagctttagatatggaggttgtcccgagctcgacttctatcgtgaacgcgtctgaccggtccggtggtacaccactaacggccgcaaacacgtccaagaactcgttgacgatcggaatgtctttcaactccgcactcgcccccacttccttggttgtgatcgtggctaaatatgcctcacatccattcccgagcatcctttcagcctggattgccgagattaccaagcttcccgaggttgttcttattccttggaattttaacataccctcgtccctctcgaaggagaccctct

SEQ ID NO: 16004 - DNA, 539 bp, Arabidopsis thaliana
ctactacaaagtccatagaaatatcattccaaggatgcgaaggaataggaagaggagtatacaaaccgtggggttgtgacttagccttagcttgtttacatgttcgacacctttcacatattctctccacgtctcttttcatatgcggccagtgaaagtgatcttgcattactttaagagtttttgagactccaaagtgtcccattaagcctccaccatgtgcttcccttataaacagctctctcaaagacgaattaggaatacacaaacggttatcataaaacaagaacccgtcatgtctataatattttccaaatgcaaacttttcacaagatgaatatatcttttcaaaatcagaatcatttgcataaagagattttatatgctcaaaaccgagtaacttagcatcaagagatgagagaagaacatacctccttgacaatgcatcagcaactacattgtccttacctttcttatatttgatgacataaggaaatgtctcaatgaattcaacccaccttgcatgcctcttgttgagc

SEQ ID NO: 16005 - DNA, 449 bp, Arabidopsis thaliana columbia
tgaaaatcttggcaagctgaagtacttattgggtattgaagtttctcgtggtcctgatggtatattccttactcaacgcaaatatgctaatgacattatcaccgaagctggtcttcttgatgccaagacgtattctactcctatggaacccaatcacaagctcggatgtgtccagggctaatggcctctacggtcccaagaagtacctccgtcttgtaggacgactgaaatacctaagtatcagtcttcccgaactgagttacattgttcagattctctcgcagtttatgcaaacacgccttcactcacactgggacgctggcatccgtgtagtgcgcgacctgaaaggttgtcctgctacaggaattatgcttcgggctgatagtgagatttcgttaatcgcgtactatgactctgattggtcttactcgacgatcatctaagtgcgt

SEQ ID NO: 16006 - DNA, 542 bp, Arabidopsis thaliana columbia
ccccttgaaaaataaaagctttatatgtagccacaacaagagacaatgatagcctgtcaaagaaactagtatcaaatctttgatacctgttactgcgaataatactcttaacaggaaaaaaaagttgtacctcgtctttgggaatatttttcttttcatgaccccattttcttgctagtttcaaagcagtttcgacaccttcagcacccgtgttcataggaagcaccatatcataaccgaacatgtttgtgagacgctcagcaaataccgggaatttatcgttgtaaaacgctcgtgaacttaaagtgagcttctccacttgttcctgcaatgccttcatgatcttaggatgacaatgtccctgcaacaataaacaaagttaagcattaaagcacaaacaatgagtctaacaagtagagactctccgcatattgtatcttagagtgacgggaagcggatttggaattgtattcctgattaactgcagagtaagctgcaagaaaatcaatgtatctctttccttcagggtcccatatagttga

SEQ ID NO: 16007 - DNA, 633 bp, Arabidopsis thaliana columbia
ttgtaacaaaaggaaccctgagaatatgagaatgctggaaaagtgttgagaatccagatgctgtcaaggagttttttcgaagacagaatggcatggacaaggcatcagcgagtaaatcttgtagcaagtctaacagtgtacaatatgctcatggtaaaaatagggatgatcctgaattgaacctgcttgctgacatggagaagcttaatatcagtgattccagagttcatggtggcagcgactatgaggaagcaagcaaatccaataagacacctgtatttacttttagtagctttggaaaggttgatcctatatgtaaagaaggtgcggcgacatcagagccatactcgttcagttccaatggttttcagcaaagtaataatgcgtcgggtgaaaacccacttttcattcccagaccacctacggaaacaacttaacaaacactagctttgctacaaaaacattctttgatgattcaaagtacctgaatgggatcttcgttgcttaaggacagtctgttccagaagtagcagaaaccagtacatgcgcgaagtatcgttcgccaaggcaagagatcaagaagttaggaaaatgaacagggtgacagacgatcaatggcaactgtgagggaat

SEQ ID NO: 16008 - DNA, 588 bp, Arabidopsis thaliana
aacagtttgtttactgtttttttgttttgtttggaattgaattcatttgctttggacaacaacaatcactgttcttgtctctttcttctccgtttgttttggatctatttaattcaaatgcatcaaaaagaatatctggatctagagtctgctcgtccttagatctattgctcaatttagacatacacatgtttttgtacgtataatcacatatacatatatctacacaatgtcatatcactcttcttttcaagaatgtagttaagtttatatagacacacaaactcacatctacttaacatgttactttgaattatttggatcactagcctattctttttcatttccctagacacatgttcttgttgacaaatttgtcttgctttcacatgtttaatcaatataaggttatggagagacagcaattgataggaacaataatgggtcatccgaggaagaagtcgatatgaacaatgaatttgtagatccacaagctgaggatagagagcttaaaggacagctcttgcgcaagtacagtggttacttagggagcctcaagcaagagttcatgaagaagaggaagaaagg

SEQ ID NO: 16009 - DNA, 510 bp, Arabidopsis thaliana columbia
caatctgtttgatcatgtattcgtggtccgggttgtagtagacgcttaagactgcactgaggacatatgcgaagaatgcactaagggagccacaaatgacagagcctactgaaccgagcaaagcgtatttccactctggagagttcattttagctagtcgccagaatgaattggcttgatccttgaaggccagcttctcgtttctatagtttgggtaggacgaagcgtcaatggagaggctaaaatcagaagttgagaaatcggatagtctccgtgaataaggtgatcttccatacgacgaattccgagtcattattggcgagctaaccgagtttctagcactcgacggtctgcaacaaatagattaacatcagtaacccaaaaaaaagcatcatcaaaacaaaaaacaaacacaaaatgaataagagtataccttgcgctactctttcttgcattgctcatggcggtttcgtgagctgcttcttgcattttaattagcttagcatagac

SEQ ID NO: 16010 - DNA, 514 bp, Arabidopsis thaliana columbia
gaggatcatcgcctgcccaactgcaatgattcacacaaactctctatataaagccattacttaataccacacaaattacaaaaaaaaaaagaaaaaaggagataataatcacaaactacaaaagtagaaagaagaaaaaagaacaaagtatcagttcttgaatatttgcatcaatggaggaatccaaaacacctcacgttgcgatcataccaagtccgggaatgggtcatctcataccactcgtcgagtttgctaaacgactcgtccatcttcacggcctcaccgttaccttcgtcatcgccggcgaaggtccaccatcaaaagctcagagaaccgtcctcgactctctcccttcttcaatctcctccgtctttctcctcctgttgatctaccgatctctcttcgtccactcgcatcgaatctcggatctccctcaccgtgactcgttcaaacccggagctccggaaagtcttcgactcgttcgtggagggaggtcgtttgcaacgggctcgtc

SEQ ID NO: 16011 - DNA, 549 bp, Arabidopsis thaliana columbia
gccagtgtgctctaaagggcagcgttatggcttaaattctgcggctgaaatgactcctcgccagtggtggctagcagtgagtgaagcactggccgaaatgctgcttgctcagccattcgccaagccggtgggaatcagcgacatgttaactacatctcaatggagtttttgattggtcgcctgacgggcaacaacctgttgaatctcggctggtatcaggatgtacaggattcgttgaaggcttatgacatcaatctgacggacctgctggaagaagagatcgacccggcgctgggtaacggtggtctgggacgtctggcggcgtgcttcctcgactcaatggcaactgtcggtcagtctgcgacgggttacggtctgaactatcaatatggtttgtccgccagtcttttgtcgatggcaaacaggttgaagcgccggatgactggcatcgcagtaactacccgtggttccgccacaacgaagcactggatgtgcaggtagggattggcggtaaagtgacgaaagacggacgctgggagctggagttta

SEQ ID NO: 16012 - DNA, 571 bp, Arabidopsis thaliana columbia
  unsure (1)..(571): unsure at all n locations
ctgtttcagtcaagcacaactttctcctactttctacgaccaaacttgtcaaaacgctctctccaccatccgatcttcaatccgaaccgcaatcagccgtgaacgtagaatggctgcttctctcatccgtctccatttccacgactgcttcgttaatgtatgtacttaaaacatttgattcaacatgtgtgtgtgtgtccatacatatatgtgtnttatggactgctctanactttatatatttttctttttttttttttaatttgtagggttgtgatgcatcggtcatgctcgtggcaactcccaccatggagagtgagagagattcattggcaaattttcaatcggcaagaggatttgaagttatcgatcaagccaaatcagctgtagagagtgtttgcccggcgttgtttcttgcgctgatattattgccgttgctgctagagatgcttctgaatatgttagtctctatatccatctttatatacatatatcttgattattaaccaaacatgtacatatttatatattcaactactactttaaactttttcaagtaatataatattta

SEQ ID NO: 16013 - DNA, 542 bp, Arabidopsis thaliana columbia
tattgatcgtttccaatgacgaggatgggccttttggctgtcgagagcgacggtgctttcgcagaaaagaaggaaatttctattgattcgccactctcttctcctatctaaacctcaattaccaaagccagatttcaaaaaaattcgcagctttctaatttcactctttgccctctagggtttgcaactcaaaaaaaagtctaggtttttgactcgatttcataagcttttcaggtgattcgaaaacatgtctctagttgaaaacctttctcttgagccacaacccaaaagacgtaagatcgatccagaggtcaaagagtctccgtctcgtaactgcagtcactggttcgtccgcaataaagtctgtgcctcttgcaatacaatagtggacaattaccaaggcagatcgctcgattacctctacacagggattcagatgagtaatgaagctttaggttttacaaaacggctcatctcccaaacctcttggcttgaagacaagaagctgcacttagtacttgacttggccacacgcttgtcac

SEQ ID NO: 16014 - DNA, 471 bp, Arabidopsis thaliana columbia
gagtagcaattccctcagtctgagtcccagagtaaccatttacaccttcattactaagactatgagaccatggaatcgagctaacggttggaaaacaacaactacactcgtccgcacaccgagcctcgggaagagtctcagtcttgtgaccatcaggcgaaacagcttcccaaagcggaccccaacactcgactttgttgaactcattgacattagaatggaaatagacccaaacaagagcttcttgtagctcaggatagttgttcaacaagttcccatctccatgcacaaaagccttcaacacctgtatatatcaaaacaataaacattttgttttacatgagaccaataaaaagtttcttatgaatttgggaacttaccacaggtagttctttgcaaaagatgaaatatcgaaactttgcaaagagatctaaaaggaaatggccaccgcttatgtgacaatgaacgtga

SEQ ID NO: 16015 - DNA, 945 bp, Arabidopsis thaliana
tagccatgactgttggtcccagtgagctgatgttcttctccagtgtggatatatgattggaaggatcacgcttcggttttgcgcgattagacccacaatgtgctcgttgttccacaagaacagtgctcgttctgcaacctgtatcggatttatgagatatacatatgagcataagcaaaccccacatagaattctaggaaagtttgagctgttgcacaaagacataacgggaaacttgtgtgattcctagaaatcagtaagcacagtaacaatacattcagagagttaattcactccataaattttgaaacaactgaatcatggaaaatgaagatgatctaggaatccaaggatttaatcagagtagaagctatcaaaagcatgagatataacgcatacttatgagagttagtaccaacaagatcattttatgaatgaaaatcaacatgtggcaaaaatgaagagaaagaggcaaagcaaaaagaaaaacagaacaaaaaaaaacaatttgcactaaacttgatgaagcactagttcttttcagggaagaaatcagaccagagtcaaaagagctaaataacaaaatctccatatttaaggtaatatgcataataagccttccatgtggggattaaaaaaaaacaccattgcaaacacgacgactaacctgaaagtgggagctagtgagacagcgaccaatttgttggaataatggaaccatgcaacgctggaactcgacaggctgtgttgcctcaagaacttcttcaagttctccaaggaagagattctcctttgagcagtttgtcacgggccaatactttaacaatcccctgattactgtatccgcaagcttataatctttttccacaaactgaacgatgcaataagataactgctgatgatatacacgattggttttggcttatcaatggtacaacccctgat

SEQ ID NO: 16016 - DNA, 617 bp, Arabidopsis thaliana
tgtatggcaccgaaccccaacaaaccatatcgagtgtgtgataagtgttttaacaaattgaaaaagaccatggaaacagatccatcatcccattcttctctgagtagaagaggaagcattaaccagggatcagatcccattgacaaagatgacaagttcgattctagatccgatggacagttagctagattttcattaatggaatccatgagacaagtggacagtcgacataagaagaacaagaagtatgaattcaatagtagtcgtgtctcacccataccgagtggaagctctcaacggggtgcacttaacatagccaagtctttcaatccagtatttggagcatcaaagaagttcttctcagcttctgttcctggttctcgaattgtgtctcgggcaacttccccaatatcgaggcgtcctagtccaccccggtcaactacaccgactcccactctttcaggactagccacaccaaaatttgtagtggatgatactaagagaaccaatgataacctaagccaagaggtcgttaagctaagatctcaggtatatttctcttatctccaaaatccttcccacattctttgctgccaaaagatgtagttggtgagatt

SEQ ID NO: 16017 - DNA, 612 bp, Arabidopsis thaliana columbia
ccccgaaaacaaaacaacataatcatacaaatatagaacgcagaagagagctattttggttgctcgtacgaatcagagcgtataccaaacaagctagtacaaaaatacacttgccctttctggtgcgttctgttttttacgttggagtaaccatttaaagccttttaatacctcggacctcggaccagcttcctctcataggaatcactccggaaactactaaccgaagtagaccgttcgggtttgttggggattgttgtcgatagccactcaagtccttcgtataatccttgcccagagatagctgaggttccttgtataagcctgcaccaatcacaatcacaaaaattgtttttgtttatcctctacctctaaatatatatataaccaacacgagaggaagtttttagtattattaccaacaacgtttggataggctgtgtagaccaagtttgttggcaacctcggctacaggtaaagcatttctcgaatcttgcttgttcgcaaagacaagtacacatgcaccttctagttcattctgtggattttttttccaataaagaaagttgttagggttacaaaaagaaaagaggagcaataagtacattttaa

SEQ ID NO: 16018 - DNA, 476 bp, Arabidopsis thaliana columbia
gccattcatgcagccgatgaagatcgggcttggcagggtcattgtaacctggagttattcacaagtaatatacaaatattagaaacttcttctaattccattatgaataatctcattccacattgggaattcaatcaatttcggataagctaaccacctagcaaaaatgttaagggaccccaaaatatttcaaaagctccaggaatttcccacaacaaaaagacaacgaggaagcatgacactatcttcagagccatcaccgatcctatctcactgtacttgctgaagatacccagagctccatataccattcgggtgaaaagagtgtgcattgggcagatgtagtacaacacatagtcgttgttgagaacaatacagcaaaacgctacaaagcagtccaggctccacatcatctgcaagagaaccaagattttagatgcggattatcaagtacaatgacgagagcatttagtgga

SEQ ID NO: 16019 - DNA, 716 bp, Arabidopsis thaliana
atattaacgtagatatgacgatatgacttgtatgagatggtgagaatcgtaaatcagcataaccaaaaaccacatgaataatcacaatactatgtttgtcagggaacaaacacgtgtgtcgatattatgacacaagagaacagacctttttacttgaccagaaaacatcgaaccttatgtcttccactaaggcaatgatattaatttcaggattgtgcacttcggtccaaaatagtaactactaggacgcttatatttacgactcatcatcggtcatgtatttcttctacaaaaaaaaacactaaataaaacagagccatagtttcattaataatcttctctcgctttctctctttactttaattctgaagaaggatgatgttaccagaagcatgcgtggcgactatcctctcatttacaactccggctgacacaatctcgtcggcggctgtctcatcagttttccgagtcgccggagactctgactttgtgtgggagaagtttttaccgaccgattactgccacgtcatctctagatcgactgatcctcaccgaattttctcttctaaaaaggagctttatcgatgtctctgtgaatcaattctcatcgataatggcagaaaggtctgtgatctttatctctgtctctgcatgtgaccaattcttggtttaatgttaaattcatttcagatttcaagatcgagaagcttcaggga

SEQ ID NO: 16020 - DNA, 702 bp, Arabidopsis thaliana
tctctcacttccggcacgtgcattacccctacgcacgtgacttccctttcgtctcctcttgatcgctccggcgatgttgatcctcttcctgtttccgacgaatctggtggctcgaaggccgatgaatctatgactgacgcagatgagactaaaaagaggaaacggatactcagtggtgattgtgaagccgatgagaataataagagtgacggagaaatcgcgagtctcaatgacggtgttgatgcgtttactgcgatttgtgaagacttgaattgttctctgtgtaatcaattgcctgataggcccgtcacggttcgttctctctctctctctcgctttgtgttttgcctcttatacttgttaatgttagtgtatatgattgtttacacttgagttactaatttcacacaattttggagtagattccttctttttgtgcttaccatttatgatgaactacatttatagataacagaattgctaagttcaattaagttaatacttattatatacctgtttttgtatctctttttggttggatttgacattagttagttttgagttacttctcaaggtaacaaatctattgtgtagatgaaatttattagttaagagtagtagtatatgggttgtttctttatcatgttgaaattatgtgtgttggacaagttggtgttgttaaattttgtagtatatgggctg

SEQ ID NO: 16021 - DNA, 548 bp, Arabidopsis thaliana columbia
gccagtgtgctctaaagcttattgcgaaaggagtgcggtttgtctgctctaacacgactgggaaaaacccaaagtctgttgtgctgaacacacaagggaggggttcacttaaagataatatcataacagttttcggcattagtacctttacaagtctacagcctgtaagtatatgtgtatcagaagattgtagagttgaagggtttctttccaagcctggacagggtactggacgcaatttagcagatcgacagtatttctttataaatggtcggcctgtagatatgccaaaagtcagcaagttggtgaatgagttatataaagatacaagttctcggaaatatccagttaccattctggattttattgtgcctggtggagcatgtgatttgaatgtcacgcccgataaaagaaaggtgttcttttctgacgagacttctgttatcggttctttgagggaaggtctgaacgagatatatcctccagtaatgcgtcttatattgttaataggttcgaggagaattcggagcaaccagataaggctggag

SEQ ID NO: 16022 - DNA, 585 bp, Arabidopsis thaliana columbia
gccagtgtgctctaaagcgctgggtgagttatgcctgtctgaaaaaatcaacgatggcgtggagcggactgagccgattgcgtccttttcaaaaaggatctcatggtaagcacctttaattaccaacggccgtcctccttcgacaggatggcccgcggcggtgcggagttcacaaaaacggtcatgcatgcggttatccaccacgcgttcctcttcagcctgcaagagaagcgttggcgtggcgtcatcacccgcaccggctaacacctgttcgccagccagaatactttcgcgtacccaatggtaggtcggcccaccgacgcgaatcgttgggtcatcagcatagaagcgtaagttacgtcgatatcgctgtctgctgtgggtcagtacgttgatagcaaacggcaacgcgcgccagccgggttgcctattgcatagccatcacggaaacgtggatgcgcttcggcccagttgaggatctgccgtgccataaatgacggcatacgaatcacgatcccaaacgattggcgcagttagccgaatggcgtcacatacacctggatggcgttcagaaataatgtggag

SEQ ID NO: 16023 - DNA, 329 bp, Arabidopsis thaliana columbia
gtgtatatattctccctcaaaatcaaatctaaagtagtaggaagaaaactaaaagaatgaaaacctaaagacaaataaaaatatatagttactcaatctatctacgagacgattaacttccctatacacgtgagacatacggactgatcagtcctatccaataaagtccttgcacaatcgtaccaggaggacatcatatgtgaatcatcagtccctgtctcaagaaaaccacctgccaattccgagtccacctccaacattagatgtgacactctatactcctaggcaacatatagaccatagtatacaccccatagttctgccaaagg

SEQ ID NO: 16024 - DNA, 493 bp, Arabidopsis thaliana columbia
tgtactctgcgaattcaatcaatggcttcgtcaataatcatctcttccatgaaaccctcgatctcttcctctccatccgcaaacatggtctctacctccatggtttcaccttccctttggttctcaaggcatgcaccagagcctcgagtcgcaagcttgggattgatcttcattcccttgtggtcaaatgtgggtttaatcacgatgtggccgctatgacgagcctgctctctatctactctggatccgggcgtttgaatgatgcccacaaactgttcgacgaaattcctgacagaagcgttgttacttggacggctttgtttagtgggtatactagttcaggaagacacagggaagccattgatttgtttaagaagatggtggagatgggtgtgaacccgatagctactctattgttcaggttttatctgcctgtgttcatgtaggggacctcgacagtgggggagttgatagttaagtacatgggaagaga

SEQ ID NO: 16025 - DNA, 514 bp, Arabidopsis thaliana columbia
tgcaagtcttgtcgatctgaccatctcaggatttttggtttggtcttaaataggttttcacatttactcatccaaacttctcaacgaaagtcaacaaccaacgctataagaagcttcagttcagtctaccaagcgatgctggctcagctttggtgcatggtacctgcttttttctagcccttttttgtttgttaatgtcaattttacatctccatttccgtaatctgaaactgaatctactgcgatcataataggattcgctggctattttgattccgtcctttataaagatgttcatcttgggatcgagcctacaacagcaacaccaaacatgttcagctggtaatggattaatgtctataaatgttttaaaacagagctttcttctatcgaacctcttacttcaaccgagagaaaatcgtgttccttttggcaggttccaatctttgtccattgaggaagctgtggaggttcacctgatactcattagaagtaacttttggaggtgttgtgg

SEQ ID NO: 16026 - DNA, 988 bp, Arabidopsis thaliana
tgcgatgtgagtaacgtatctcgcttgtcccaatgctcctactaaaagaactgtggtcatccctttgagagcaccaagtgcaccaagtactttccccatttcattccaacgctctgaaacgctactgagtaagctgcatttggatctatatctgtatacttctgcatcatactcaaggataatgccatcaagcagtatatcactgttattatcgacattgaaccgagtaacccgattggtatgtctcttgatggattcttggtttcttcagccattgttgctatgctatcaaatcctccatatgcaaagtacacaactgcagctgctcggaacactccctcaggtccaaaaggcaagaatggagtcaaatttgatgtgtcggcgtggataaaaccagcgattataacaaaaaatatcactaaagtgttgatagcagaagctatccagttgagcaatgaagtctttcttgtgctgatcgatgcaattgtagctgaagcggctataacaacaacagctattgggtccaagagattaaaaccggaactgagatctgttttgatccgtagagcgttcgggctacgattcagaagagttgcaaaatatgaagtccaggctctagcaacagctgcagttccaacaatactctcaagaagtatattccctgcagtgatgaacgccgcaaaatccccaagctcaatccgtagataggcgaaagaaccaccagccacagggatttccacagcgaattccgtgtagcagaagacagagagcatagcagaaagacctgaaacaacataagacaagacaatagctggtcctgcttgctcatgagcttcttgacctgtcaagacaaagattccagctccaatcaccgacccgaatccaaaccatactaaatcccaccatgtcaaacaccgtttcatctcgtgctcactctgtttcttgagctcaaaccgctcgttctcatcatcagacctactaaccaacc

SEQ ID NO: 16027 - DNA, 579 bp, Arabidopsis thaliana columbia
tcaaaaagatgatcatgagcagggcacatggcaatgcacaaaaccttagttatcattaatcttgaaaatctttagaattctataaattatcaccttgagtagagaaggaaggacaagtttcacaccatatgcggataattgagacatcatagctcgagcagcacattctgccgcttcgcgaactgctccgacttggtcagagaacgacaccagaagtaagggtaacatctttatcacatacctaaaccaaaagatagaaataagattattaccaagttgcattagcttttggcatacccatcattaaaaaattctcttacggttcaaataattttccaagcttctcgcagaggcattcaaatgcgagtaatgctccttcacgacgtttagcagaatttctgcagccacaacacaaacaacacagcagaagtgaaccaaggttcatcataatgagcttctacattctacatattatatgtgtgatactaaatgatatacaccaatgacataagataaaacagcagttaattacccactactatggagtattgacttgcaagcagcctttttatgtgaata

SEQ ID NO: 16028 - DNA, 555 bp, Arabidopsis thaliana columbia
  unsure (1)..(555): unsure at all n locations
nnnnnnnnnnnnnnnnnnnnnnctaaaggccgccatcgctacccagcggattaggcaccgaagcagcaggcatcgtgagtaaagtcggcagtggtgtaaagcatattaaggcaggcgatcgtgtagtctatgcgcagtcggcgttaggcgcttacagctctgtgcataacattattgcggataaagcggcgattctgcctgcggaatttcttttgagcaagctgcggcatccttcctgaaaggcttaacggtttattatctgctgcgcaaaacctatgaaattaaacccgatgaacagttcctgttccacgcagcggctggcggcgttggcttaattgcctgccagtgggcaaaagccctgggcgcgaaacttatcggcaccgtaggaaccgcgcaaaaagcgcagacgcgtgaaaagcgggcgcgtggcaggttattaactatcgtgaagaggatctggtcgagcggttaaaagagatcactggcggtaagaaagtgcgcgtggtgtacgattccgtgggcagagacacctgggaacggtcgctggattgcctg

SEQ ID NO: 16029 - DNA, 960 bp, Arabidopsis thaliana
cgcccgaagacttaagtcgacaatcaagatcgccataaccaacttcttaggtcgtgtaaagagaaaacttccatttaagagaagaggatcttatgaagaatagaagtaatgaagatttagacctaggataattagaagtttatcatattttggtatattcgacccattgtataaatagaggggtcaacccccccccccccattgagaccatctttaacctaatacaagagactactattacagagcaaaccctagctttttgttcaagcaacatagttattttcctttgattatttgtgagctaagagaggagtgaatttgtttaaatctcttagtacaaatagaagaattccattttccttcctcaatcatcggagagctctctttgggctttccgaaaaggtatctcatgccaagtttggcctcacgaactaaaagttatagagtcatacatttttaacaaaacaaaatagagaaaaaccgaaaaaagagggatgcaacacgaggactttccggcaggtcacccatcctagtactacactcgcacaagcacccttaactggggagttctgatgggatcaagtgcattagtgctggtatgatcgcatctgttactacatgcaatgtaatcgtatctattcttttttaaagactttatgatccatttgtcgtgggtcccaccagatatgtaggaataccgtatcttctttataagagctttgatacatgcaaaatattggaaaacaatgtccgaacatataattttcccccgtaataaagcaaagatcacgaaaaagcccaaaaaagtacatttaggtcaaaatttgtagtagaaaaaacaccaatagaagtattcaattttccttcctcattcatcggagagatctctttgggcttccgaaaaagtacacatgcaagtttggcctccggctaaaggtatagagcatcattttacaaaaa

SEQ ID NO: 16030 - DNA, 967 bp, Arabidopsis thaliana
tcccttctccgatctattttcttcgtcgccgcctctcttctttttcgatctgattacgtcaccgcctctcttcttcttctccgccgcgtctcatattctccagcagccgtcgtaactcttcttctccagcttcagccgcgagttaatctgtttcttctccaaggtaacgtcttcttctccgatataacttcttctttccaatccaacttccaccgtccgatctaacttcttcttcttctccgtcgcgtctcttcttctccagcagccgtcgcgactcttcttctccaacagcagccgcgactcgatctcttttgcctccaaggtaacgttttcttctccgatctaacttcttcttcatctccgatcttacattgttttcccgatctaatcttttctagtttacggatctaaactctgggttttgttttttttgcaagatgccgacgtcggagaatacttatgcatggtataggtcacagcagtgagacccgttgcatgtcaattctcctgttagtgctgggaatacttcaggggttcaaggttcacgccatccaccatcgcctccaacgccaaccactcagccttctgtcaatcattctgattctcaatctgagcgtctcaacaatatcacactggatgagcttcttgatagtcctggtcgtgctggcttgacaaggctagacccaaagcgtcctccgggaactctctggtaaggttaaattcatagtccatagaacagcttaggttgtggtgccttagaactttgtagtgccttagagcgtaatggaattaggttgtagtgccttagaagtttcaacaagtagaacaacttggttgtacttagcattgtagtgtcttagaagtttaaagacatagaaatccttatgtgtgggctggttgctcttcttgtaggtttgacgatgactctacagatgcagcaacagtccgcatcatctttgaaagagat

SEQ ID NO: 16031 - DNA, 523 bp, Arabidopsis thaliana
ctaaagctggtactgaccacgcaggcgcacgggcagaagaagcccggcagcaggccatttccggcgggacggaaccgtccgcttttcctgataccctgccgggttacaccgaatatggccgggacaacggcatccgtctgtctgccgtgtggctgacgcacgacccggaatacccggagaatttacctgccgcgccgctggtgcgctatggctggacgccccgcggcgaactggcggcggtgtatgaccgcagcaatacacaggtgcgcactttacttacgatgataaataccggggccggatggtggcgcaccgtcacacgggccgaccggaaatctgttaccgttacgacagcgacgggcgggtgacagaacagctaaacccggcaggcttaagttacacgtatcagtatgagaaggaccgcatcaccatcaccgacagcctgaaccgccgtgaagtcctgcacacgcagggtgaaggcgggctgaagcgggtggtgaaaaaggaacacgcggacggcagc

SEQ ID NO: 16032 - DNA, 814 bp, Arabidopsis thaliana
ctaatgagaaatcctattcctaacaagcagattacttagacatattgattgaagcaaacaacatatttgagtatgaaaacataatcttatgcaaaagccgtctccacaccaattcacttatcgcattggaagtaaattttggatatgcttcacacttacaacatgactgatgcaaaagccgtctccacaccaatggcatcttctcccaagttgacccttacaacatgcactctactctccgatccaaaaaccttaggaagcttgtaagtagtttgcaatacctctcctttacaagacttgatattgcctatgctctcaatcggttatccggatttatgcatcgacgaacggaggatcactcggaaaccgcaaaatgaatacttcgatacctggtgggtaccccaatacatgggattttctaatctagaacaaattctctcaatctccatggttttcagatgctgactaggcaggaaatccaaagattgtgtctccacgggcgcttatatgatctatcctggtagaaaccttatatcgtgttcagttaagaaacaaaatggagtcccacgattgtctacggaagctaagtactgttccgtcgctaacacagctgcagaaataagatggatatgtaatctactcactgaacttgggatttctacaatatcataaccggtcatgtactgtgaaaatgtaggcgcaacctatgtctctgcaaatccggtctttagttcaaaaatgatgtacgttgccatcgacatacatttcgttttgaacaagttcaacatggtcttctacgagtagctcatgtgac

SEQ ID NO: 16033 - DNA, 494 bp, Arabidopsis thaliana columbia
gactatgcagaatggttctgattggttgggacgccatcagtacgatggggtgtgattggaaatatggtctcagtttttgagctgacatgactacggccagtgccagtttttccattgctggataacgggttttagcgtctatcaacaagtatgatttaataacctcctaagtttttataagtaaatcaaaataaacacctaaacatgtgctatatcacatgtccgaaacttactggtgatgcgtgcatccttgggaaacggccgtacctacccctcaaatccattggttccttctcctacttggttatctatcaaatgataatcttactcaattaaggactaatcggcggttactaacactaactaaggtcggaaaacttaccgacttccgaatcagaactttttgcgggttttctcatctatgctaacttagagcgaattttgggtggaggttcctaatgaggtcgacagtatttatagggttttaggtcggt

SEQ ID NO: 16034 - DNA, 583 bp, Arabidopsis thaliana columbia
gccagtgtgctctaaagtgttgcgcattgcgatatcaacctgccggacccgctgcctgccgatctgtttaacggcttgttactgccatgccagcataaaggcaacgtcgcgccggttgttcctgatgacataaagcctgtcattcaggagcagacgcaacaggtgacacccaccgatccccctgtttctgtgtcagctaaccaataacgtgattaaggaatgatccatgtctgatttactttgctctgccaaattgggtgctatgacgctggcgttactgcttagcgctaccagtttgtctgccctggcgtctgtaacgccagatcgtacccgtttgatatttaatgaaagcgacaaatcaatcagcgtgacgctgcgtaataacgatccgaaactcccttatctggctcaaagctggattgaagatgaaaagggtaacaagatcacctcgccgttaactgtgctgccgccagtgcaacgcatcgattcaatgatgaacgggcaggtaaaagtgcagggaatgccggatatcaacaaattgccagccgatcgtgaaagcatgttctactttaacgtgcgcgag

SEQ ID NO: 16035 - DNA, 599 bp, Arabidopsis thaliana
cactctatttcctatagtacttaggtttctccagtgcaatgcatccctaaaaagggcggaattactgttattaaaaatgaaaaggatgaattgatccctattagaactataactggtcttagaatgtgtattgattatagaaatctaaatgctgcatctaggaatgatcattttcctttaccattcactgatcaaatgcttgaacgcttagctaatcacccatactattgctttcttgatggatatagtggtttctttcaaataccaattcaccctaatgatcatgagaaaaccactttcacttgtccttatggaacttttgcttatgagagaatgccatttggtttatgcaatgctcctgcaacctttcagaggtgtatgacctctatattttcggatataatcgaggagatggtggaggtcttcatggacgatttttcggtctatggcccctctttctcctcatgtttgttgaatcttggtagggtactaaccaggtgcgaagagactaatcttgttctcaattgggaaaagtgtcatttcatggtgaaggaaggcataatgttgggtccaagatatcagagaagggtatagaggtt

SEQ ID NO: 16036 - DNA, 951 bp, Arabidopsis thaliana
gcgttggatgaagctaatgaggtacttgttggttctcctctcatctatcatttagaataatatcatgtacatgtagcgttgagccattaaaattcctcttgatgcccaggcgttcctgtaccagcaaatccagtcggctggcattacatatataagcattggccaccgccggactttaacgaaattccataacaagatcttacaaatctcaacggcagacccgaagagcaatgaacgtaactggcgaatagaggacgtggatgcccaagattctttgtacggtagattgaatcaaaaggaggtgccaagtgaaagctgatcaaaacctgattgattacataagagacagaagcagcaggtaaatctgcaaacgggtgtcatgaaacatataagaaacatgtttggtgtccattttgtatataatctaccagacttgacgttgactgaagatgcaagtaaatagagagattgatacagatacgagtgcaacgaagttctgattaaaaataacacgcgagatgagctaaaaattcaaaaccggctgagtatttatcataagcccaataaatctaacgatgggcccatttgagaaagcctgatagagtgagaaaatgtaacacgactgactcgactcaatcgctcaaagtcgaaaaagaaagaaggcgcaaggaggatggtgacgaaagaatccattgaagtgatagctcagagcattggactctccactctttctccggacgtctcagccgctcttgctcccgatgtcgagtatcgcgtccgagaggtcatgcaggtatatcatcaacttcaactttacttttgccctctaatctcctctttaacttgtcgtcgcaatctccaggaagctatcaaatgcatgcgtcatgctcgacgcaccactttaatggctcatgatgtcgattctgctcttcatttcaggaatttggaggt

SEQ ID NO: 16037 - DNA, 578 bp, Arabidopsis thaliana columbia
  unsure (1)..(578): unsure at all n locations
nnnnnnnnnnnnnnnnnnnnctaaagccgccgatcaacgcggaaaggatcacaataatcgccttacccggaccgtcttttttcactggcaatgacgggcttaactgatatttaaacggcgtaaaattcacatcgttgacatgtgcttttgttaattgctcgacaagatactgccgattacgtaattcaccgttcagttccgcaacgtcagtgaccgctttttctatttccagtttgcgttcaataccgtctgcaccgagagaaatagaaaaatcggggtcatctttaacggcctgaccattactgtaaacgggctttttaattcctgccgcgttggcaatgtcgagtgaataattgaggcgctgaatgtttgcatcaagttgatttttcgttttaatgcgatcctgagccagtttttctttttcaaactgggttttgatctccagtttattacggacgttttctagcgactctttcaccaccaacgtagagatataatcgatatacccgctcaaaacggtctgcgcctcttcactggttggcgcggtaaaacttagcgtccaggaggtatacagtgac

SEQ ID NO: 16038 - DNA, 976 bp, Arabidopsis thaliana
caaataccaatcataatcaggtaaagaacgatttgacaagtagatggaaaatacgattaaagtaagagacaaaacctaccttagatggctccgttttggctacacatttctgatccaagctcttctctacgccctggttggtatcaaccgcagcaacccagcacagaaccaatggaaaaccccatgatatgttcttactcatttcgatgaagaattcaagatatatcacaaagtattatttcgactattgaaagaaagtgaatggaacctgcaaattaacaacatcatgatagaaagacctcattgttgggtttccaaggacatcaggcctgaaatgaaggaaaatagctttactgagactgagagacagtgtgagcttgtttcacatcaacagtaacttcttagctctgtggagtatatagtctgctaaaaatctaacatgtgtgcttcttaaaactagtttagacccaaaaaactaaaagaaagagcagtggaactcatgaatctgtcaaaaaaaaaatcatgagaaaatgaatatgagcacaaacatacacgttgagaaagtagcctccatcagaaacacatttgacagctgcatcttttggaagatgatctcgaaagtagtcacaatgtataagacttgccaagccaccggcagaacatcctgtaagtatggcctacatttactcaaattacaaagaagaacaaaaattaatctgtagcaaattacctaagtaggcgaattcaactaaatgcagaagatatatggtaggtcttgttaacatagatggatattggagtgcaagacagactttcatggtaaccagaagaacattattaacagatccatttttataagatcatgaagacgttacctgtttggcatctgacatgcccattgacaaaagttcatcaataatagcctcccaaataagctggccccggaagaaaagccgtgtgccattctaagaagagg

SEQ ID NO: 16039 - DNA, 558 bp, Arabidopsis thaliana columbia
gttgttaccttatcattttcatttcctgactcaccaacccaaagtttcccttcagagtctctcaaggcaacggcggaatgaccagcatatgccccactcacccatttctcaagagtctcaaaaccaccccaccgcccacgaatctttgaaatagctaagaggtcaccagactggatttgatcagttgtaacatttgtaacccatggttcaggacgaggttcaaaattagctcccatatgcttctcaagaaacgcaagattagagctctccccccaaccagtattgctaaagagaggaaaaacatcccacagtgcttgaagtgttcctaacatccctgcgtgcataaggaatatagaaactcctttgttcttaacctgatccaataagtagtacgcaaaacacatcaaccaaaaacacagatactaaatcctaaataaagaaaccaaagatatagcaacagaaacttacatattcatactcagctttgccatccactccggaaattcccagtatgctgtcgtgaaatgaagtaccaagtccatgtacacgatatggagt

SEQ ID NO: 16040 - DNA, 439 bp, Arabidopsis thaliana columbia
aatccggtttagttaggtcgtttggccttttttaaaatttcttctagagtggtcggctacaacaccacaatttaaacaacaagtatagggattcgaagctagtcaaagctaagaataaaacttaggacgctacttataagttatcaactcttatctcttatctaggttaataagattataaattaaggatatatctaagatacgtaccgggattatcagctacgaatctgatagcgatccaaccattcctaggcacggtcattgtatttttatacggtggatcgtagagattatatctcgacgacggatcttcttcacttatgttatagttcccgaaccctactccaaccacatagaagctaaaaccatggagatgcataggatgatcgagtccacatcaaccaaactagtcccttgaataacaagctcaaccaattga

SEQ ID NO: 16041 - DNA, 682 bp, Arabidopsis thaliana
  unsure (1)..(682): unsure at all n locations
gggtaccgattacatccacatcagtggtttaaaatgtttccggagtttcagtcaaatccgttctttatatcaggagaatcatatgctggtatctatgtgccaactcttgcggccgaggttgtcaaaggtcagtattatctctctcaacatcatctttagctccttttcatatattggcagaattagaaaataacgttatctccaatttttctcatcgttttcttgttatgttgtaggaaataaaaatgcaatgagaacaaacaaaacaagcaagaatgtgacaaagccggttatcaacttcaaggtacgactaatgtttgaggctatgtttcggattcaaagtcttatggttttggtgttaaataaataccattaagactaagggtactaatgtagttacctaattgtctctttgtatatgtgagagaaagagaaaccttcttcctatacttgaatgttaaaattggacttatatgtggtatagggatatttggtgggtaatggtgttacgatgaggtgtttgatggtaatgctcttgttcccttcactcatggcatgggactcatctctgatgaactctatgaggtttgattttgttggtgaattttcataattcttgctttatcctcaatttttattttttctaatgtgtacaaaatatggcaggaaactanattagtgt

SEQ ID NO: 16042 - DNA, 1519 bp, Arabidopsis thaliana
ctctctagtgccatgtcgtctttttggtgagctcaactgaaggtgggaaaaagattaattgggttagttgggagaagatgtgtttgtcgaaggagttaggagctcttggtttcaaagacatccagctttttaacgaggcgcttcttgctaaacaggcttggagattgattcaatttccggatagtcttttttcttctattatgaaggccaggtatttccctctctgcgatttcttggaggcaggtctgggaagcaggtcgtccttcacttggcgaagtatccttcatggtagagagctcctgaaaaaaggtcttctaaaaagagtgggcaatggcaattcaattagagtgtggatggatccttggattgaagatggggctgtcagaatgccttggataatgaaccctataatcaacattgagctaagagtcaaagacctgattgactttagaaatagagactgtgatatccataagcttgaagagcattttttcccgggagatatcttaaagataaggaagaaaaagcctcttgtctctcaagaagattttctagtttggagacataacaaaagtggggacttctctgtgaaatctgcctactggttggcttgccaaattcaaaactcgaaggttaggagagatgcttcaaattttccttctatcaacacgctgaaggatcaggcctggaaacttcaaactgaccctaagatcaaggtctttctctggaaagctctgagtggtgccttaccggtagctgatcgtttgaacaggagagggatgaggttggataatgtttgtcaagggtgtggcggaagtgatgaaactattaatcatgttctgttttcctgccctattgcgagacagatttgggctttgtctgattatccatcgccagagtttggttttgacaaaggttctgttttctccaacattaatcatcttcttattaatagagataacaggaattggccatctcttttaaagaaaaagttcccatggatcatttggagaatctggaaaaataggaactccttgttttttgaagggaatcagttcttggcaagtgatactattagcaagattgatgatgatgtgcaggaatggtttgcggctcaagtttcagagacaattcatggttctgttggagagaacacgagttcccccgtggtggagttagggagaactgtcacgcctagtgccacttgtccgaatgtgtggaaacccccacctagttcttggctcaaatgcaatgtgggatgtgcttggtcagctgggaactctttgttggggtgttcatgggtcttaagagatgaaaggggagtagtgttactacacagccgcaacgctatccccaacattagagacaaagattcagcatccttccaagctgccttctggtctttggaaagtctgctaagtctcggtatcacaaaggtaattctagaaactgaggatgcttctttggtgggatgtgttctaaggccaaaagcttggccatccttcaaaggggaagcgct

SEQ ID NO: 16043 - DNA, 555 bp, Arabidopsis thaliana
cccattcacatcccactctcaaacccacctgacttcaaatctctcccggattcttacacgtggactcctaaagatgatctcctcttctccgcctccgcctccgacgaaaccctgccgctcatcgacctctccgatatccacgtggccactcttgtgggccatgcttgtaccacgtggggagcgttccagatcaccaaccacggcgtcccctcgcgacttctcgacgacattgagttcctcaccggaagtcttttccggcttcccgtacagcggaactgcaaggcggctcggtcagagaatggcgtctccggctacggcgtacgtcgtattgcttcgttctttaataagaagatgtggtccgaagtttcaccgttattggctctcccctccacgatttccgtaaactctggcccagccaccacctcaaatactggtatctttttcaatggttcattttatcaacgttaagaccatattaacgtaacgtaacttatctttgtatgaaaaaaaaaaaaaaaaactgtggacgttagtacagttgactattcaattgat

SEQ ID NO: 16044 - DNA, 514 bp, Arabidopsis thaliana columbia
tttacctcccaagtgagtgtcaccatttggtggagagaacctcaaacactccgttatcaatggtcaagacactgacatcaaaagtaccaccaccaaggtcaaatacaaggatgttcttctcaccacccttcttatcaagaccgtaggcaatagcagcagcagtaggttcgttgatgattctagcaacattgagcccagcaataacaccggcatccttggtagcttgcctttgagcatcattgaagtaagctgcgcatagtcaaacaccaaataaacaatcaatcaccaatacagataagaaatttatctctccactacatatataacagaaaacccgaattaacaacaaactaacctggaacagtgacaacagcgtccttgattttctttccaaggtaggcttcggctgtctccttcatcttagtcagaatcatggcactgatctcctcaggactgagaaccttagtctcaccatccgttgatcttgacttgaatgtatggcttacgaccttgt

SEQ ID NO: 16045 - DNA, 1082 bp, Arabidopsis thaliana
gaagttgtcgttttgtcgttgctgttaaactctggaacacacattgatctggatttgctttggggatcatcaagagacatgagattaagattgttagaactctaagattgggtccattcttgagtttgttttctgttacgagacaatgtatctgctttctccacgtgtgttgtactaaaatagctttgagtcctattacgccggaagtttcttagtttgcgttttgtgtgatttgactcaccattttgttttaataaccaaactctcatccccaatgtatgatataatagtgttttggcaatggttttataaaatctattcgttaaggctataacataagaagaatctgtcattggatatctattggaaaaatgagttacagagaaaggctttgaaaataatattctaaacctaagtataagacataataaattcagatcagagaagaagtaaagaatctaaagagagatgtcatatgtttttcatataggagctgtgcaagttgttctgaaatggccagcctgattacaccggctacatcgaacaacccgcttttgacgtccacggtcctctccttgacttctcctcttctttggccgtggtggttgtcttaaatccctaggtggtctgataacaatctcttcaccatcctcaccactttctccggcaggttctgttgttttccactcagttttgtctggaactggatgtatggtttctgcgtaagttcgccggtaatttgctacagtgaagtaactctctgtgaacctgtatacgttctgtctacaagcgaggagggctgcaactgcgtggctacaaggcaaaccgtataactcccatccacggcagtaacacgtacggcatctaatatccactatccattttccttcactggtcatgacctcgaattgtgcttcgtttgctttgtgaactgggtacaaacgacattcttctatagcctcaaggacatgtctctcagcagatggaactagcataccagaccattgcatgcttgtttcacggcgttcattgaacagagtcattagttggcgacgaatactctcaacatttggattatagga

SEQ ID NO: 16046 - DNA, 545 bp, Arabidopsis thaliana columbia
tagatgtatatatattctcgagtctttgttatgtttgtcgtgtttcatcgtatcttttcattcaccagcaggttgagaaaacccatttgtactcgaggtgcttgcaagagcttgtaacacgggccctttgaaaccaccagaggatcaaagtattaaaactctttacatccgtagacttattaactccagtgtcctcgagcaggacatccgagaccatttctgcccctatggtgaaatcgaatctattgttatcttcccccaccgaggaggaggcacctgtgccttcctcacttacactacccgtctagctgctgagaaggccatgcttgagctctcctcctggactgacatcaaaggccagagggttaaactattgtggggacctactgaaaaatggcagcacaaaatgactggtgctgccatttcttcaacccaagaggttggttcttctagctccaatactgctgacttggtaactaaattagtacattctctagaaaagctttaattaaacctttttgtaccattaaaaaagataaatgtta

SEQ ID NO: 16047 - DNA, 921 bp, Arabidopsis thaliana columbia
catcttcaacaactctgtaactttctccttagttccttcaccacatccaacttgtaacatgacaacaagcttcttaaacgcacctaatctcaacgcttcttcaacttcagacccatcaccacttttacaaaccttccacatcacagaaaccaaatctttcttctcagaaatcttcaaaatcttcttcaccaaaatcggtatcaccagcttgtttcttctcactttctctcttccttctttagtttcacaaatcacgtttaataccgttaacgctttctcgcaaacgctgttttctgaatccactagcatctccactgttatattcacaagatccaattcaagaaaccttgatacggtttcttgatttgtcaagatcatatggtggattgatattaacgagttgacgcatgtagaatcgcgattaatcgatttcatgaacgcttcttggacgccattgatctttgttaacgcgtgaacgtgagttacgttaagctcaagaagctcttttatcaaaaacgcagcgttttgatcaccatttctcaacagttccactaaacgataacgagagtctggtgagtttggattgaccttctaaaccaatgggaagcatccacgtcagcacagacacagtctcctccaataataatgacgcatttgcgttttcggaaaacgcgtcgaagcaaacgcaaagaaccaatcccgcgccgttttccttaacgcattttcgattcctctcgctctcttttcctagtctcgtcatcttcgtaaccatctccatgcacgcggcgtagtctccacgccgcgtagcagctggataacctctcacaaatctcggagacttgatgactggtcacgggtacacgaggcgtcgggattcgttcaatcccgcgcctagtgacgacccgcaccgaacttgaatca

SEQ ID NO: 16048 - DNA, 446 bp, Arabidopsis thaliana columbia
gcttactatttcgtgatcaagatatgagatcaagaacgaaaaccgatcaattctgtatatgtatgtacactgaattgacctgttgaattcaagagccttcttgaaactagtggccaattcagctaccaccaagaactctcttgagatctgtcttctgttccgatgttaggctcgaggggacacatatctcagagttgaatcttagatctcctctctttgaaccttctttagagatgggcatatccttcactaggaatcactatctcctgagccggtgcaacgatatccaaaagcgggatagtcagagtcccccgactagtgtaggcaagctaagagtgatccctgtgaaagcgctccaaaagcgaaactcgcttgtctacaactaagatcgttaccgtctcttttgtaaaccgaatgcggtttcgcgactatgacagagatgagat

SEQ ID NO: 16049 - DNA, 608 bp, Arabidopsis thaliana columbia
ttcctcttcagctttcagacactacgatggatgctcctcagaggctgcctctgacagatttgacgacggtgtcacaaatctttgttgcacgagccgttgaagtccagagaaaatcgcattcatcttcaagaaagatttcaacttgattctctatgagcacaagtcttcgagttaacgactccctagggagatctgatttgacatgagaaagcctaactctttttccctccaacctagacattaagcaatgggctgaatttgtttatgggcctacaaaacaaatgtgcttaggctatacctaaaataattagagcctgaaacactaaacaaaaacattagtgcacacttgcatataatcccattgattcatatcatcccatcgatcaacatcacatgctagcatagttcagattaaaaatcatttagcgaacaaccattcactcatgaacagagtttagtgacccagaaagttattgaaacatgtgagtacactatgttggattcaaaacatttttaatacctttaaaatccgttccgtgttccgtgccaaccagttgttcataactcagcaagaagctaccataccactcagatctttaatagatcac

SEQ ID NO: 16050 - DNA, 681 bp, Arabidopsis thaliana columbia
tttcttgaagatgaatgcgattttctgtggacttcaacggctcgtgcaacaaagatctgtgacaccgtcgccgaacctgtcagaagcagcctctgaagagcatccatcgcagtctctgaaagctgaagaggaagaaaatcaaaacagagctatggtgttgtatgctgagcccgaaccaacatctctcagatctgagcttccaaacaatgagaaccaagatgaacaggcggcccaccggtgattgtggaactgcctgacgtgtgtgaatcttctgttgttcatgagcatagatctgagacacccattcaagctgagaccagaaacaagacttgtgatcaagttccataactcaacaacaagaatcctcaagtagtgcagatctctgatgcatctgaatcagcacaagctgttgactcaacagatctgtctgtgtcctcgcgtctgctgaaaagaaaacagtttgctgttgtggagaggataaaaagacagaagactaacgataggaacgaagctgctagttcaagtgttgttgataaagatggctttgaccgcttgcgatttatctctcatgatgctaagaagaggtcgaaggtgattctgtcaaggtatgtgtgcgaggaatggagtacaaattctctcctgccaagatcaacgcttcgtttggtctgcaattagtgttga

SEQ ID NO: 16051 - DNA, 623 bp, Arabidopsis thaliana columbia
ttctgggtcactaaactctgttcatgagtgaatggttgttcgctaaatgatttttaatcagaactattctaacatgtgatgttgatgaatgggatgatatgaatcaatgggattatttgcaagtgtgcactaatgtttttgtttagtgtttcaggctctaattattttaggtatagtttaagcccatttgttttgaaggcccatgaataaattaagcccattacttaatgtctaggttggagggaaaaagagttagggtttctcatgtcaaatcaaacctgcctagggagtcgttaactcgaagacttgtgctcaaagagaatcaagtttaaatctttcttgaagatgaatgcgatattctctggacttcaacggctcgtgcaaaaaagatctgtgagaccgtcgtcggacctttcagaaacagcctctgaggaggatccatcacagtctctgaaagctgaagaggaagaaaatctaaacaaagctatggtgttgtatgctgagcccgaactgacacctctcagatctgaccttccacacaaggagaaacaagatgaacaggcagccgtatctccagagccaccgagtgtgaatctattgttgttcctattcatagatctgag

SEQ ID NO: 16052 - DNA, 615 bp, Arabidopsis thaliana columbia
catgtttttccacgaaaacagtaaaatcatgttttctccgctaaaatcgtaaaatcattttcccgccaaaaccgtaaaatcacgttttctgccaaaacttctcacaaaaactgaaaaatcatgtttttcaactagaatcgtaaaatcatttttcccgccaaaactgtaaaataatgtttttccgccaaaaccgtaaattaaaatcacgttttcccatcaaaaccgtaaaatcattttttccaccaaaaccacaaaatcatgttttccaccaaaactgtaaaattatttttcccaccaaaatcgtaaaattattttcccggcaaaccgtaaaattatgttttcccgccaaaaccgtataatcattttttccaacaaaatccaaattcatgtttctcgtcaaaacttcaaattatatttgccacccaaaaccataacaaaaaatattatgctaaaaaccgcaaaatcacattttccgcaataattcaattaatatagctaagattaaagattaaaaagttaatatgtttggtattgatatttgataatgacgttgtatatttttcaaaatgagaacatgggattttatcatttttttctagcgagaataaagatgac

SEQ ID NO: 16053 - DNA, 753 bp, Arabidopsis thaliana
ctaaaggaggatcgcagaagtaaactttaacgccggtgctgacagtaaattctagatgtctggccagttccattcctctgtcccatgtcagtgattttctgagttctgacggtaaactcaggaatttgtcggtaagagcctgatttactgagacagaatctttgcccctgagtctaaggatgatcgtataacgtgattttcggtctacaagtgtggctatatgagagttttttgtacctgagactaaatcgccctcccaatgccctagagagcgtctgttatcgatatttcgggaacgttcgtgaattggtgttccgttcactatgttaatcgtacctctttcgcctttgcgggtatgacgcctgccatggcgaaggctatgcgaccgtcgcagatgctgtatattcaggtggtgtagcgcttcacggctacgaaagtacagcgttttataaattgtctcaggtgatattcgcagcgttttttgacgtggttttgttcgccttaaccatcctgatatttgctctggagaccatttcatctccagcttttccagaacaagctttcgcaatggtaaattttgatccagtaagcacggttttggccttttcgccattctgttggctcggttattagcatcaacagctttgtaatagcgtctgccgcgattacgctgaacttcacgtgagatcgtcgaaggactgcgattcagcgcagtagctatcgcacgaatcttcattttggctgacaaaccag

SEQ ID NO: 16054 - DNA, 380 bp, Arabidopsis thaliana columbia
attgccatgaaagaaaaagaaggaacctatgtatacaatggacttacgtgtatacatgtgaagataggttatggcatgagctacatcggttgcaatatctaaccgagtcgccatgtcgagaatatttacttccttacctacaaacagattcacattgatcgcttagcttgaaatgaatatatacaaaaagaagatagtagtagggtgtgtactcgcaatcccagtaatctctgagcgtaccattggctacgttctccactgcgagagtcttctcgtcgatatgaacaactgttccatagtatttaaccatactccgatgtgtagcttgcgctggtgtctgaatctctctcgtaagctctgcatctgcgccttgacggtcg

SEQ ID NO: 16055 - DNA, 1164 bp, Arabidopsis thaliana
ctcgccggaagaaatcagaaattgacctcctccggtgatgatcaaaacgcctgcgtttaattggagtgcttgtggtgcattgattatttctatttttttttggaatttttaattcttaatgatttttattttatttttgtgttaaaagataaatttaaacgagagaaagtagaaaataaagaatcttaattggccaataattatggtaagttttaatgtgaggaactaatatttctcttttggaaatataaatcagagatgcatgtacacgttttacgactcaacaagtcacaacgttggtaacaaaccaatttttgagaatctcttataaatatcacatgtgtgtttagtaggtctctatgtctcaaaacacaaaatatcataacaaacaaaaaaacaagaatggagaattcaagctttgaaacacttccttatgatctacaaatgaagattctgttaccgatgcctctaaaagtcttggcgaaatggctatgcgtctcaaagcaatgtgcatcatttatttgctccgtagaattcagagaaatttacttgagttgatcaatgaaaaagcctcgagtgttgttcgtcaccaatgttttaccaatctaccaaaacaaacccgaaacgttgtttcattctgtttgtcaagaggaggaagcattgttcttgtcttccggtcaacaagagatgtgtaccaacgaaacaccactttgaaatgtttctaaacccatccaaggtttgatttgccttcaagatactgaggttgcgatttaatttgcaacctggctacgcgaacgttacggaaattaccgcagatcgaaaggtctaacggagcatgcatgaaaagttttttcggatactacaaagctaaaaaaagtaatcaagttgatatgtataagtttaactaataataacaaatatcatgtatgcacggtcatgtaatctaagaaagtaaccaaggtgcgtaccaacgacgcaccactttggaaagtttcatgtgttctttagtcgaaggattgatcaagtaaatgtgcctaaaatcgtcatggatctgaatcaagaccaatccatcacaagatcccaatacttgaatggttttattttgacatttgtcgattggatcatcaggaaaagtgtagtaacaagaagaagaatgacagtttt

SEQ ID NO: 16056 - DNA, 586 bp, Arabidopsis thaliana columbia
ttccaggttttatgttcaaaaagtccccggttacgcattcaatatggcacacgaccccacaatcatcgcatgtatagaaccatctttcaggattggtttcggcttcacagatttcacaccaatatttaccttcaggcgcctcctccccagagcgcaaaactaaataatgtgtatcacacctatgctttatgactaatggtagagtggcgcatttgtaatccaaagaataatcacaatcaacacaacgcagcacattgagtttattctcaccgcaagctaagcaagtaccacgatctattgtggttagaaataacgtgtgaggatgaagtttggggtgcttgaagaaagagagagacgcacacaacacatcgagtaccacaccctcttcatccttgtagctaaaaccccttccatctctattgcaagcatcacaactgaaattttgttcgctaaaatccttcccgaagcgaagataaaatatacctgtggaaagtccatgtcgtttcgtaagaggaagattcgcacactcttcgtgaagaataaacttgcattcccgcacttgtagtgctctcagaagagactggac

SEQ ID NO: 16057 - DNA, 548 bp, Arabidopsis thaliana columbia
aatgatttttccgacgagtatcacgctattgtcaatatgaagtctgtgagacatggcttcaagtacttgcttctgagcttctgtttttcttgctgaaccttctggtgcttttcggtacttcatgaaaacaataacatgcaaacgaaattgtatttagcaatccaagaagctattaagtatccaaaagatgcaaacaagaaaggaaaataaccttttcccaaaaatgaacaagatctgcatcacgctggtttgtaactcttgaaggtggctttagtgaattcgcatccgcaaaggtaaaattgtcattggcagggtttgtcccatataaagatcgagattatccttgctaattcctacatcgccatattgcatgacatgagaaccataagagtacccaacaggtgcagtcctccttttcacctgaaaacacaaagacacactttatgatgcacatctttgctaacaatctaatttacagttgaaaaagttttagctccatcattacaggcaaaccacaaaaactagaaacttacaagttcatattgctg

SEQ ID NO: 16058 - DNA, 607 bp, Arabidopsis thaliana
tcataagattttgcatgcatatcaagaaaacattattagtactattctggtttaaaagatttacctatatctataacgcaaacgattaagagtggtcaattaaagatcaaaagaactaaccattttcttgaatcgtaaccagctattgttgctacttttttgaaagcttctctccatctttcaatgttttctctttctttacccttacaagtgtttctgaataccttcccgaaatcaccggtcagcttctttacaagagatggatccactttgtagaaaatgactatcactgtttgacccatttcttccttgcactttatgatctccaccaattcgtctaagcaccagcttgaagaagcgtagttcttggagagcaagatgattgcgatcttggaccctctaatcgcccgaatgagttctggaccgatagattctcctctcttgatattgttatcacaaatggtgtgatccttgtctttgaactccttctgaatgtgactgaggaagtctttgcggacatcttcccgcggaacgttggaaagacatcgtattttcgcgtgagagataaagacgacagaggtggtgaaggagctggttgtgttgaaga

SEQ ID NO: 16059 - DNA, 604 bp, Arabidopsis thaliana columbia
tgcgattagtatttaagctaaacaagaaaaaatttcattacatggcgatttcagatgacaggcaaaggtacatgcctgtgccagatgatcgggttccgcctcgtggtcagcctcttgcttatcccgaggcagttcaacttcttgaccctatcgagcccgagtttaaaggagaggtaaatttgaattctttatagaaaacatctaagccatccatttcaatttgaaaagacagaggaatcaaaacagaggaaacagagtattaaagttgattcatcttataggtggatgacaagtatgagtactcaatggagagtaaagacataaaagttcatggatggataagcacaaatgattcagttgggttctggcaaatcactccaagcaatgagttccgttctgctgggcctctcaagcaattcctaggctcccatgtcggtccaactaaccttgcggtaagaaataataggtttcgtcatatatcgcataatttgaatagaagatgaatgatagttgatgtgtgtgaaatggaaacaggtatttccagcactcactatgttggagcagactaatcatgagtttcagaagatgttgatttgaaattagt

SEQ ID NO: 16060 - DNA, 540 bp, Arabidopsis thaliana
tatatccggtcgcgtgagctgatctttgagaaaatcaagagacaactacagtatatcggtttcctactgctttcaagatttgcttttgtactttctctaaaatattgggattttgttttttacatctgtctaccataacagtattgatgtgcaagtaatgttattgataaaaaggcatcagtttcactaccttaaagatccaaaaccaaacaattcttcggcaaattttgtttgtgttgatagttcagaggaaaactacaaaaagacacgcaaaaagataaaaaggctttaaacttttgtttataatacttgcaaatgatatccaggaagaggaatcttaggctacacattggtttaatgatcatagtttgttcacattggggagcgggaacagtggttttaacaaaactaaagaataagcccaagttctgatggcttcaatgcatttctcaaacggtaattgtagagatagtagtgcgactgtcgacatagtggataaaacctcaactctttcaagaaactctcattctgcatcacatc

SEQ ID NO: 16061 - DNA, 2064 bp, Arabidopsis thaliana
catctggcatcaaaacaacaattcctaaacctgtatcatgctcttttttcattatcattctataagaatcttacctctaatagatttcattttacataatcaatcagatgcagaaaacaagaggcaatatagaagtaaacctgctcaataatttcatggcgctgcagatttcttgaaaagcctccttttcccgtggcacaaaacagaacaacgaagcgacatccaacctagcagaacttgaagatatcagtaataaaacttaactatgcaaaaccaaaaaaaaacaaatctctaacaagaagaaagtcaaattcacctgggaagagacacaagcggtgaggcgcgttatgcccttctcatcatcttgaactggtataccaacagtttcgatcaataggttatcttcaagctttagcagaagctataagataaaaccaaccaaagacagaacattgaaaaccttaaacactcaatcaaaaaaaacttaagcaagaaaaatctcagcattgccaaagtcaccttaatggtaccatcagtggcagtaacagtttggtaaatgggtgatcttcccactttaaatccaccatccacaagtcctttacgaaacgtcagtggcacttttagcatcatgaaaattggaagataattggttaatcatttgcataactgtcaatgaagacgcttcaaaaaacatagaacttgataagaatttgctcacaattgctaaagtcttcaactttattaacctttctcttgtaaataagatgatggagctgctttcctctgtatccttcctgaaaaatcagaactttctcagcttaatcaaccaaattccttcttctcgaatcttatatgcaaaaatcagatctttacttgaccgaggttgatagcaagctcttgaagctcaggctctgacattccgatgagaacatgtgagtccacgtgtggagtcgcgccggtttggctgataccggtttaggagacggtacgacggttgtggcggcacggagaaggtggtagcgagggagtgacgccgaactaccatacgagagattggaacagagaagacgaggttttgaagcatagccatagtattggttgttgtcgtcatcatagcttcgatcactgagaagtctgaagaagacagagtaaacccttttcttctgcggctaaaacctctctgcaactactacgagtcgagtagttttgctcactaagtggataagttacacaaaacgccacacagttcgaatgcagaaccaaagaccgacacgcatttcacaaaaccgtaattgagaaattggaccaaactagacaaaaatcgtgaaacggttgcgttttgcttcccctttttgtggtttggagtttgaacgacatttcaaatttataagatttgtgttaactgcaggtctgcagccaacaaagcacaattcggatttgtgttattcattgcacattgattagaattttcatattttgacttgcaataaatttgggtttcaaaactgaagatataggaaaaatctctacatcaaatgttaaaggaacaaaaatacaagtgttacaacacaagaggcaaaaattacctcatatatactcaatataacagcacacaaggaagcctaagctaaaggctacacatgttctctaaggttgggtatgggacatgtaaccggaaaatttaatgtatcctttattagtcttgacctgcacggtttgtccagaaccgcattcaatccgtcgaaaacggatatcggcagtttcaagtaaaccgccggaaaaatgtccatcctggaattcagttatcaacttgacctacacaaggtgcctgccaaaaggtttttgtgtgaaccgtttttcggatgacttagtagtaccagttttaaaaccaagtttcttggtatccttaaccggattggtctgactcggtttcccaagttgtcctgaagttgttgtaaggcacggaccacttggtccatgctcgggcgcgacttgggttcaaatgagagacactgcaccagcacgcttgccattctcactggcttcttcaggtaggtactgtgt

SEQ ID NO: 16062 - DNA, 504 bp, Arabidopsis thaliana columbia
gagttatcttgtctgtttctaaagcataatcgcggtggtagaaagtacatagcaaacggcggcaatcaataccccaccaatggtggcgatagggacattgcgtttcgggtttttcaccacacctgcggcaacggaggcactttccacaccgatgaacgaccacagcgtaacgttaagggtactttgaattgcaccgaagtgccaggccgctgacgttccatgccgccatataggtttcaccacggaaccagaaccagccaaatacggcaatcccgacgatggggatcagcgccacgacggtggcaactgcctgcacacgggtgatcattttcggaccgacaatgttcagcaggacgaagatccacagcaccacgacgcaggtgatggttaataccaatggatctttccgaatcgggaagaagtaacttaaatatcctacgccaatgaccaccatggcgatattgccgatccagcaggccagccagtagaggacgttggtttgat

SEQ ID NO: 16063 - DNA, 564 bp, Arabidopsis thaliana columbia
actcatcccccgttgccgtcatgtgctctaaagaccgtactgttcgggccagaacctgaattcttcctgttcgatgacatccgtttcggatcatctatctccggttcccacgttgctatcgacgatatcgaaggcgcatggaactcctccacccaatacgaaggtggtaacaaaggtcaccgtccggcagtgaaaggcggttacttcccggttccaccggtagactcggctcaggatattcgttctgaaatgtgtctggtgatggaacagatgggtctggtggttgaagcccatcaccacgaagtagcgactgctggtcagaacgaagtggctacccgcttcaataccatgaccaaaaaagctgacgaaattcagatctacaaatatgttgtgcacaacgtagcgcaccgcttcggtaaaaccgcgacctttatgccaaaaccgatgttcggtgataacggctccggtatgcactgccacatgtctctgtctaaaaacggcgttaacctgttcgcaggcgacaaatacgcaggtctgtctgagcaggcgctgtactacattggc

SEQ ID NO: 16064 - DNA, 483 bp, Arabidopsis thaliana columbia
tcagcgatttgatggactcagatcatgagagctcatcgaaggtccatactcataaacctcaatagcctttttagtgctatctatcaggattcatattgcattatattgttctgtagtattgatacattctacactagtctatgatagaaatgtgtttgataaatgttagatactcgggagacgtttatctctaatctagatcgactactgcgagttaaaaggtctatgacacatttgtgactcatacaagtcatacgcagttacatggaattccctcattcgatccaatatcctacaaaagtgtcgcatcctttgatctcgcttcatttccgatgaatgtttcaggaacacgagcaacaaaagcccaagccaggtgacatgtttgatagcgaaatgtttgaatggactcagaggccttgttctccggagattctacctagtcctgtgaaggccaaggtaaatgctgtactgcactctggtaca

SEQ ID NO: 16065 - DNA, 565 bp, Arabidopsis thaliana columbia
ggagtaacaactattacatttgaagattgatcacatttgtttccattgcattagatccggatatgttggaaatagggaatggagggatgacatacgaggagtatcgaggtcattttagcatttgggctttgatgaaggtatgtaacgtaattcgatggtggtgtttcccttaaagaccctaggaatctctcatctccatccccatggttctcttgcaggcacctctcttgattggttgtgatgtaagaaacatgaccgctgaaactttggagattttgagtaataaggagattatcgctgttaaccaaggtgaactttcaatattcttttacttgttagcttcactgcatacatgattttccacaaatccattgtccaagaccgagaatctgagaacatttctggttgcagaccacttggtgttcaaggaaggaaaattcaagccaatggagaaaatgattgtcagcaggtatgaattgggagcacagaattacggactcatagagaaagcagaaaaacaaactcaaggactgaaattggtgatactgtttcattgcaggtgtgg

SEQ ID NO: 16066 - DNA, 472 bp, Arabidopsis thaliana
gctacaaacagattcatatgtgaagtatgcaacaaagggtttcaaagagaacagaatctacaacttcaccgaagaggacacaatcttccatggaagctcaaacagaaatcgaccaaagaagtgaagagaaaagtgtatctttgtccggagccctcgtgcgtccaccatgacccgtcacgtgctctcggagacctcaccggaatcaagaaacattattaccgtaaacacggtgaaaagaagtggaaatgcgataaatgctctaagcgttacgctgttcaatcggattggaaagctcactccaagacttgtggtaccaaagagtatcgttgtgactgtggtacactcttctctcggttagtaatccaaatctttcaaactctttaaattataatttaatctattgagctgctatagtgatatgtgtgtgaatatgtgtctgtgagtcattcttcatgaattaggggttttttta

SEQ ID NO: 16067 - DNA, 1105 bp, Arabidopsis thaliana
tgtcttctttctaaaacttacaaattaaatccaactctttggatttatatttgttctctttgttctcgtaaatgtcttctagtgaattttttttttcatgtcgtcaatctctatggcttcttcctgttcttctaattccccgctttcgttttcttctgaatcatatttgatttttatcttctctctcattttttaaaattattttttctttatggatctttgtagctttagcaaaaaccgaccagctgagaagatgtcttcatcgtacaacacaattgctttgtcctccactccgaccttcctcctctcaagtgccgctgccggacccggaccaaacaactttaaccgtcaagaggctgcgatgaccatggttcaacaacaacccacttcctccgttgctccaccacccaagaagcgaaggaaccaacccggaaacccaagcaagtacctcttacttaatttttttatgaataataagtgaagaattttccattttagccgaaaataatataagaaccctaatcatttccgataaggaaaaaattttgtttagattatataccttttattcgatcaatttaatcaaagaagattagtatttgatgtgcttgcatacaattctctcttgattaatgggttcttgatttttttttttttaattgagcagatccagatgctgaagtgatagcgttatcgccaaagacgataatggcgacgaacaggttcctatgtgaagtgtgcaacaaagggttccagagggaacagaatctgcagctccacaggaggggacacaaccttccatggaagctgaaacaaaagtccaacaaagaggtgaggaggaaggtgtacctttgtccggagccctcgtgcgtccaccatgaccccgcacgtgctctcggagacctcaccggaatcaagaagcattactatcggaagcacggtgagaaaaagtggaagtgcgataagtgctctaagcgttacgctgttcaatctgattggaaagctcactctaagacctgtggtaccaaagagtatcgatgtgactgtggtccatcttctctaggtaactatctttcttcattccatccggactcttttttttttt

SEQ ID NO: 16068 - DNA, 599 bp, Arabidopsis thaliana columbia
tgtggtcaactctcgcattgactgcacatagcttaagcatggttagttgcaaatatcagaacacaaatggcaaatcacttccactaccatctgagatttctaccatgagttaccaggtaagaacatggagtctcactaggtcaacaccataaatgttcatcaatcagaaaatccaaataacaacccatcaaaggaagaagggacgagatggagagaggctgagaattgcttacacgaatcaaagccttgcgcgcatcctgtagctcatcgttagtgtagccatgttttacaacaagagtttgatagagcgactcttgatattcccaatcctcttctttctccttcagttcttcctttgtcttttctatcatctccttgatttttgaatcttcaccttcaccttcttgcatgtgtcccatgacctgcaagtcacctctcatacgctctatctctagctctaatgcctgctcagcatcgatcttctcctcgagctcacgaacttgcttacgtaattcatcttttccctctgtaaaacaatagccagctttctaagtacgaccaaaaatcaaacagcaacttgaacattaactttcaaagtg

SEQ ID NO: 16069 - DNA, 607 bp, Arabidopsis thaliana columbia
tgttgttggcaatggcagcagctgcacaaatctttttccagcaacggaaagaaatgagtgaaggtatcaagacccaccaacagttagccccgatgtagtaggagtaatagtagaaagagtttgtggcaaagttgtctccttccaagatagcagtaatgaaataaaccaaacatccgtagagctggcaaaccgaaatcgcaagctgaagcacgtagctatacgacttctccttagcaatggcataactgaatttccatcaacaacaacaaacttcaattactttttagtaaacacaaaaaccaaaatggaaaagaatgaaacttacatagctaggagagaagctgggccaacgataacagcagtgatcccttcaacagatacaactgcagaatctctacctacgtatctcgaatcacctttgctatattctttccctgtgaaagaaacaaactttagcttcttacgaattggtctaattgaacaacaatgacaacactaagaagaagataaaagaacttacaaacttcagcaagataagcagaagtgttgccttgaaaactcaggggagaaacgaaataccctcgagaatacatgagtgagacagtga

SEQ ID NO: 16070 - DNA, 570 bp, Arabidopsis thaliana columbia
ggttcagaagcaatcttttgaaggtaatcttttcaccattctcattaaaatcaggtaacgccccagagagatgaaaacagaaatctgcatacatctcacagaatgttggctccatcaaggctttgtcaaatatctgtgaaatgacaccagaaagtgtaacagcgttgtcaatgttgacacttttaacttgctcaaacagtttctcaaagttttgtggggtcaacttgttcaggatgctctttaactgcctttgttttgcttgttcttcatctgcaattgtccccacttggtattttctctcggctttgtgcatcacttgcataggagtgtgcggagaaggaaaaagtcctttttgttggaaatttgaaccacgttgccacctttctaagtcgggggtatttctacccattcctcccataggacccacaggttgcatcggtctagatataattggtccctgcatacgagggtttcttaaaactcccgagtgtcctcttgaccaggtcggaaacctacgttaccccatatcctgctggaagagaccctgattctcgccatctatcatcacag

SEQ ID NO: 16071 - DNA, 724 bp, Arabidopsis thaliana
  unsure (1)..(724): unsure at all n locations
ctcttcaacaattatgtaacaaagggtttcaaagagaacaaaatctacagcttcaccgaagaggacacaatctcccatggaagctgaaacaaaaatcaaccaaagaagtgaagaggaaagtgtatctttgtccggagccaacgtgcgttcaccatgacccgtcacgtgctctcggagacctcaccggaatcaagaagcattattaccgtaaacatggcgaaaagaagtggaaatgtgagaaatgttctaagcgttacgctgttcaatcagattggaaagctcactctaagacttgtggtactaaagagtatcgatgtgactgtggtaccatcttctctaggtaactaatctctatccatttcatttaaataatttgttcgtatttgatttaagtgatgaaacgtataatatatgtgtcagtgtgtgtggcatctagatataccttcttatcttggtaaagtataacaattaatggaccacctttattttgtattataatgcaaaactattctaagtaaaagctgcattcaacactgcatgtaaaacttagcttatttactaatttacatggaaaataccaaatatatataaccatctgtgactgaaatattgtatatttggcacggaatttgaactcgagtacacgcctataaattgtatgtagtccaatgtcataggactacaatgtantgtctggttgtgatgagtagtgaatgagaagcag

SEQ ID NO: 16072 - DNA, 297 bp, Arabidopsis thaliana columbia
  unsure (1)..(297): unsure at all n locations
nnnnnnnnnnnnnnnnnnnnctaaagtgaacagtgacacctaggagagcacttgatacgagcatgcaggtggcaacgaagaaacggctagcaccttagtacaccaatggcaatccgtccatgcgaccgttgtggtcgtgaacagtcaattaggcagcgagcanttgagtcgggtgccatgcgtcatgtagtccgggctatactggaacgcctgagaagtcggccatggcttcaatcatactgcggcngaatccgcggaaggcaagctcgtcaaacagtctntccatnaccgtagcag

SEQ ID NO: 16073 - DNA, 561 bp, Arabidopsis thaliana columbia
gtccagctctagtctacaaaaaactagacttgattagtcatcaatctttcacaatgatcgcataacctaaaaagcagacttgaaaatacttagttaaaaagaaaaaggagaatccatggtcatacctttgggtcatgctcgtcagcaaagtactctctgttgacatggctcattgggacagagtagtgagaattaatattgagtgctgagtctctgacctgaacaggaagaccaaaaccgagatccagaagacagacttggcatacattttttagcttagagcaagtttgacaaatctcggttttcttgaatctagcattccggcctggtcgccacctaaaagctgtgaaaggacgactacatatcttgcattccttatcataatccgctcgggtctacatataaacaacaactttaataaggatttgaagaagaaaaacgtgcagtgcaagctatgagaatcattagcacctacaataactttaaacctgaacctaaacctaaattactaagttaacaactccactatacagaaaccatcaacaaagcttaagagatggg

SEQ ID NO: 16074 - DNA, 914 bp, Arabidopsis thaliana
ctatcatcaagaaactcagctagtccaagagctcgcctagtcagatcaacataggccatcccaataacgcatctgccatcgtgaaaacttggaaatatggagacaacaacgtggtgtgtcctgcatttcattgtctgcaaacaaaacatcttcaaagcttccaatgtttccaggagaacctgttttcacaagtctccaattcgatccgcttccctcataaagttctacagtatgatcattacgctccaggagaagatccctagcaatcgtttcgaacatgttcctactaagtcttacgcttgaaagagcatttgaaccactcccgagctgacgtagagcagtggttgtatgataataagtctttgcaatgaaaactgaattttcaccatgagctgtataataatcctgcaaatgcatttaagaagtttccataaatcgatgacaaaacaaccaaaagtctagaccatttgagaacaatgaactcaccttgcgatcaaagaatctaacagctctcgtatcctgaagcaaagaacaatcaaaacccacataagcaaagatcgagaaattgctaaaaaatcttaagccttttttcctaattcgcttcccaatgaacaaaatgtctacaattgcttcaaaccctaattttaaagcatctactttccgactagaattggtgttatttattgcaattagaggcactgtacaagctctaacttctcccagaaatcgaaagaaaacgagaacttacatttggtagggttttgtagaacgagagaaacccttgagcttgctttgcatcttccaaaaattaaaaaaaaaatgcataacaaatatcagaccttttacaaaacccataaacccaattgggaaatcgaatacgaaaatgagaaagaaaaaaaaaactagggtttaca

SEQ ID NO: 16075 - DNA, 724 bp, Arabidopsis thaliana
ccgatatgtcttttattcatcttttatcaacttcaaggcccaataaacccagttcccactagcaaacaaaaagtaaagtacaaaaacaaaaaacagaaacagcttagcttgaccagtcttcctagaagaccgtgaaatcactttctctatcagagttcaagttttgtcgctcaatcctaaccgttacgttgcctttatcatctctccaacggatacattaacatttaccattttttccttttaatttttcgtaattcctaaacggctagtttccaagtcctctacctttatataaaccacacaagatccacactctctccatcctcaacacactttaaaacacattacacactctaatacttttaaggttttagattctaatcaatggcttcttcttctcttttggtcaccatcttcctctgcatctctgtcttcttcttttcgtccgtgaatgcaaatgaggttaccgtcggtggaaaatccggtgactggaagatccctccttcctcttctttctcctttaacgaatgggctcaaaaggctcgcttcaaagtcggcgactttatcggtaaatccataattttcaacttttttttttcaattagacattttgtgtgatcttcaatatactctgtttctgacatcgtcacatgtttattacagtattcaagtacgaagccggtaaagactcggttttgcaagtgacacgagaagcatacgagaa

SEQ ID NO: 16076 - DNA, 615 bp, Arabidopsis thaliana
atattaccggcggttacgaaacggcgattgtgttgcaaccttttgtgagcacggccacgtggcttcttcttcttatcctgctttgccactttcggtgtctgacctctcaccttaccggcacgagccaaggaaccgtgtaccttacctgatgattccaaagcaaatcaaagacaataaaaagcattaacgacagcaacaaagaatgagattggtaaattctaaaattgaatacggattcatatggaatcaaacgttaaagaggaattacccatgattgtttacgaggattcttctgacgacggaatcggcgctctctccggttatagtgtacggcaacgcttttaactcttctcagagattagggttttctatgactgatatttaagtgatgaagacgatctgtactgatacggcccattagtggtttcttaatgggcctatattgttatcatttggaagcctgtgcaacgaaatttagattcctagttagttgggttgatatcggtccgattgtgacagtaacagatggtttagatcaaatctcactagttatttttgttagcacgtcagcttaatattcgtgtacgcgcaactcaccgttagctatgataaccc

SEQ ID NO: 16077 - DNA, 534 bp, Arabidopsis thaliana columbia
tattcgattaagcaaatgaattttaattagccatctaacaatgaacattttttgtaaccagcaatatagtttgaaaaggcaggtacacaacctgcaataatcacttaaattctcaaagaggccacgtcccacgaagtatcgttcctgaaagagagaagaagcatcaacactgtgcttactttttctattatctaaagttctactaaatgaatacctgatatatccacttaaaaaactggaagaaagattgatctgacatttctgacagagcatggcatgctggaagtttgactaaaagtccaaagatgaggcgaacagcggcataacaccccaatacaagaatgtataaatggaagaaaaactcgattttggtttggtttatttctttcatccagaaccttcctgcaatatttgtttcacaaaaggttagttgttcgcatacaaactttatcaagaagaattagctcgcttggacaaatttgatacatacacataataatacaccacaaatgccgatcccaagctccaccaaag

SEQ ID NO: 16078 - DNA, 635 bp, Arabidopsis thaliana
cctataaactataaatgtatctgtatctataatatataatacataagattacaaataaaataacaacaaatatttgaaacagaataaaggttccaattaaagtattcaaagattatgcttgtcatgttcttcttctacctttcttacatacacgtacaccaccacttctctcttcttcattatctccttcctcacgctttctcttcatttttgattcttctcattactctgtcttcgtctttctcaacgacgtcctctgaagcttcgtagcgatttcgaactgttcttgtcaatgggggttgattactacaatgtactcaacgtgaatccaagcgcaacggaagacgatctaaagaaatcgtatcgaagacttgcaatgaaatggcaccctgacaaaaaccctacttcaatcaagcaagaagctgaagctaagttcaaacaaatctccgaagcttacgatgttttaagcgatcctaacaaacgtcagatctatgatcaatatggtgaagacggacttacggcgacagaagcatcggcgtcgtctcaacaacataattactcttctggtaacaacaataattactatgcagggtttaggtattaccacgtgatgctgaagatatttcgctgagttt

SEQ ID NO: 16079 - DNA, 638 bp, Arabidopsis thaliana
gataggtttcttttcttgtcattgaagtggggatcgtcgagttcaggttgccaagttggtaaaatcagactataaaggaggtgataacaaatggtcacttgacagcccagctattggtgttgtttggctagatgaccaggtgtgtatactgatataagttttttctaagcaaatacatattcatgagttttcggcttttctctgcatattcagttgctggtgatcccaactgtgacgggccatttgtatctgttcacaagagatggtgtggtaattcaccagacaaacttttcagtggctggttcttcagggaatgacctgatttcctatcatacgtactttactaatgtctttggaaatcctgagaaagcttatcacaactctatgggtgtcagaggggcttcagtgtacattctcgggactgcacatcttgttatctccagacttttgccgtggaaggagcgggttgatgtgtaaggagaggaggtgactggatgggtgcatttaacatggcattgtcactcttcaatgggcaagctcatggagttgttgacctccgctaaactgtggatgccataagtgaagccatagcacccgagtgtagcagagttgctactttcctatgtagagtgaagtat

SEQ ID NO: 16080 - DNA, 522 bp, Arabidopsis thaliana columbia
ctcgcggtttgtgccgtcattcaaagccagattcgactatggagcaatgatctttatcctcacatttagccttgtctcagtaggcggttaccgagtagataagcttgttgaattggctcagcaaagagtatcaactattgcaataggaacatctatttgcattatcattactgtcttcttctgtccgatttgggcaggatctcagcttcaccgtcttattgaacgtaacctcgaaaaacttgctgattcgttagacggtaagggaataaggaaaccaaaattgttatgacagattcagcattatagctagagtgctgactgttactaaaactgcaggctgtgtagcagagtactttaaggagaacgaagtctcaacgaatcgaaatgaagatgaaaacactaacatgaaattgcaaggattcaaatgtgtactcaactctaagggaacagaggaagccatggtaacttaaacagattatctatggggataaagacaagttcatttatctttttgatttgcag

SEQ ID NO: 16081 - DNA, 435 bp, Arabidopsis thaliana columbia
cagctcaaagtcaaatccttctctagatcacgacacgtgtcttccgtcctctgtcttctcttaatcggcgtcgccaccgtatcctttgtatccaccagatcaatcctcaacggcgaactcttaaaccacgccgtcgtagtctccgtcttcacgactctactaaaaatcaacttccctctgtagtgaagatccacggcggagatcaattccggaaacggacggtcgagatcagagactgtaccggcggtttccaccatagaataagcgtcggagaagaaagaacgagaaccaccggagcaagaaggccacgtggatcggcagattttggaccagaggatctcattggaagcgagatgatgaatatgtcaggaggcgcaagagacggatgctaaggttgcgccgtcgagacgtgtcaagatgtgagactctatgatg

SEQ ID NO: 16082 - DNA, 563 bp, Arabidopsis thaliana columbia
ttgattcttatttatttttttcaaaagtggaagaatcattttcttctattttaaatgtaaacagaccaaaagagaaaaagctcactcacacaaagcacctccaattctctctaccatacaaaaaaccaaacccacaaagtctctctctcttgctctctcggtgattcgattttcagaaccgaaactccggcgaaaagattatggcgggacagtcacgaaaatggatgatactggtggcgacgatatggattcaagctttcaccgggacgaatttcgatttctcagcttactcgtcagatttgaaatcggttctagggatttcacaggtgcagctaaactacctcgccgtggcttcggatctcggaaaagtattcggatggtcgtcgggactagcgcttatgtatttccgctttggacggtgcttttcgcggcggcgtttatgggattcgtcggttatggagttcagtggcttgtcatcactcatttcatctctttgccttatatcatggtaacggtaccaacttttctactttttctataacaatatatatatatatatatat

SEQ ID NO: 16083 - DNA, 446 bp, Arabidopsis thaliana columbia
tgaagcagattgggtttcacgtttagacaaatatagaagaaacatgaaaacaaacaaaccttgtactattacattacgtgaatcaaatcgatggtgaagaaacataacatttggaatcgaataaacatcaacgagaaagcagacctttacctggagatattaatgtcggttggtcagaatccaaggctcggagaactgtcactgtcgaagatagtttcgatggagatggtctcgacggagatgagacgccgccgcaagtttcgaagttagacgagaagagagaaaacccaagtgtcttaaaatcaggtttagacattttagttgtatcatttcggttagttcggttataaaccgaaccgaaccgtaaactgtactagaaagtttacagttgcggataagttctcttccagaacccgatgtaaacccgaacttcaacttcgggttcg

SEQ ID NO: 16084 - DNA, 544 bp, Arabidopsis thaliana columbia
ccagtgtgctctactaggtagtaaaattccatcgggtccgaattttcggacttttctccgcttttccttgctgtcatctacacttagaaaaaaaccagtaaggaaacatttatgcgcctgctccctctcgttgccgcagcgacactcatttctggtcgttgcctgcagttctcctacgccgccgcgtgggtgaccgtagtaaataatttcgacgccaaacgttatctcggtacctggtatgagattgcccgttttgatcaccgctttgaacgtggactggaaaaagtcaccgcaacatacagcctgcgtgatgacggcggcctgaatgtcattaataaaggctataaccctgacagaggaatgtggcagcagagtgaagggaaagcgtactttaccggcacaccatctgcttggttatatgtcgaagagcgtcgtgttaactggcaattacgccggtagcacgcccaaaggcatgtatgaatacctcaccacctggttaaaggtaagcctggtacgataactgctatttctataattttgatga

SEQ ID NO: 16085 - DNA, 514 bp, Arabidopsis thaliana columbia
ttatatgttttatgacgttgttgcaataatacaaagtaatgcaacagtgtggaggacgtgacaacgtgttggacttgaagaagcaatggttttataagtttctacgaaggactattgctgttcacatcttaatgttttggaccatcctctatctctatggtggtttaccttaccttacatgcggcggggtaatttgttttaggatttaattattactatatatttttcaatatcacaccaaattatttatacgtatccaaatgaaaatcaatatattttatgacagggcgttggaatttttatcgggtatcacgtgacatggctcgtaaactcggcatgccatatttggggttcaaggtcgtggaatactaaagacacatctcgtaacgtttggtaatataatactatataagaacctatatatatatatattcaaattagtcttaggaaaaagggatttgacgatcttgtgaacatattcaggtggttaagtttgtttacgatgggagaaagt

SEQ ID NO: 16086 - DNA, 565 bp, Arabidopsis thaliana
tcaaagcatggtggaggagatgtgatccattgggaaaggattgcccaagacattatccatgaagtaatggtgaggatgtgttgcgtccattactacaaactgcatgtcctccgacggcttccaatgccgtttcctctggtttatgaaccaattgtttatctgtttctggtccagccccgttgattccgcaagggcgagcttttgttgctcctgcaatttcatatcacatgcgagaaaaaatcaatcatcaagtgttctctccgatataaggtcagtccatgatcacagctacatcacgatttgctagattgtaaggagaacttagaatccatctactcatacgaacatgggtaatgacactatacaagtgtaataaagacatgagctactattgcattagggtatggcctcatgcaccctactttccaaagttatgacttgaaatatgtgcaacaaagtttagtctaagttatggtacacagccataagatgaaattgatcgtagtcttgactaagattgacatattattcggaccctaaaaaaggtatggaagcaagaatcaag

SEQ ID NO: 16087 - DNA, 614 bp, Arabidopsis thaliana columbia
tgaagagaggatacgttcatccataaagctgggtgggaaatccaccaaaaagggaagaaatggagccgattgggatgagttacacaagaaaagtaaaagatcattatattataataatgcaaggccatcatgtggatcagattcacattatctacatggacgaaaaaccaaaaaaattggaagatgtactttgttggtgcgtagttctaaggataaaaagaatccagcgattaatgggttcaatccatactctggaaaaaggacattgctctcttggttgattgaatctggagttgtccaactaagacaaaaagtgcaatacatgaggcgtcgaggtgcaaaggtgatgctggagggatggataacaagagaggggattcattgtgattgctgcagtaaaatactcacagtctccaggtttgagattcatgctgggagcaagtcatgtcagcctttccaaaatatttatctggaatctggcgcttctcttcttcaatgccaagtcagagcgtggaatatgcagaaagatgctacgaatcttgctctccatcaagtggacactgacaggggatgatccaaatgatgatgcttgtggtatatgcggtgaatggtgg

SEQ ID NO: 16088 - DNA, 894 bp, Arabidopsis thaliana
atggttattaaaatacaaaaatacaactgcacagccacaaactcgtaaccacaaataaaataaataaattgattaataataatctaggcaaattaattatagcaaaatacaacatcaagtttaaaaaaaaaaagacgaattatacattcattatactccattgcacaaaagtaaaaaaagaacagacaaatcacaaaatctcaaccttatatgaatcattttatcgttgacgcttgtatttgcaagaaagaggaagagaatcttctgaagaaggtcccatgaaattacggatctgagatcggagtttgaagaaaacgtgcattatacttcctctgttttgtgaaccaatcgatttagcttcgtctttgttaagctcaagatctctgatgaatataggttttcttgaaaggatccatgaccaaccccattcccaccattctttcacagagcttcctgcttgttctcccatggcggaaacagatttggatctcgggaatctagctgcgatcgctgctggttggtttgagaggttgagtgatagagaagagagacgacggcggatgagaccaggctcatcgtcggcggtggctgctgcattagggcgttgagaaacggggagggaagtgggtttacgaatctggagagtctccatcattgagctcataacttctttgttcttctttgtgttgagagagattgaagaagaagatgaatgtgaatgtgagagattgattagtgaacacagctctaacacaggctggggttttatccactttatttttgtggggccatttacttttatgccccagccaattacattcattttgttgttgctgtttgtttttgtattaaataatttgtattgttatgtttatttgttgatttgtatagtta

SEQ ID NO: 16089 - DNA, 473 bp, Arabidopsis thaliana columbia
tatctgtgatcgttatatatataaacaatattttctaaaaattggctcatttattgtaattctattcagttctagaaaagaactcgtagactcaacgactagtaattttaataaaattacgttaatttcgtattttttcttttttcttttgtcatcagatattatttagggccaatcttttaggaatcgcgtcatatttcgttaatttcgttcaatagcgcaaaaaaaggtttcgatatctaaattattgatacagttcaaatcataataaattcggaattcagggtttaataaatttcggtttacatagatgaataatcggttcagttgagagtcgtgttttgtttaaaaaaatggggagaacagagaccggcgacgaatcgtcggcgagaaagatgcgacgtaaagtacccacgtcgatcgaatctctagacgccgatatagtgtgcatcatcttctcttggcttgatttg

SEQ ID NO: 16090 - DNA, 478 bp, Arabidopsis thaliana columbia
tattttttaaacctttttattttatattattcttacacatggtattcacggtttaaataattttgttacattgtgatgtagcttagaagaatgtcacatgatatgcacgcacccaactttattattaatacatatattacataggatgatgatataaccataagatgaaaaaaaaaaaaatgatgatataaccatacatgaagatacatcctcaaaattcaacttattatggaacttacaagagtgttttataagggaacgaaatattagaatgtggagatgaaatcaaggattatttggagaatctcttgaggcttctcttggttaagaaagtgagccactccttccatgaccacaggctcttcaatcaaaggcacatcttccttaaactggggaccatgtatatattccttcacaccaggcatatagtagaccagatcaagctcccctatcacaaactttgtaggaacctggattt

SEQ ID NO: 16091 - DNA, 558 bp, Arabidopsis thaliana columbia
atataggattgtcaatattatatcagaattggtctattgcttatcttgttttctcaagaaacttcacatctcacattgcataatcaaggcaattttacaaaatacatgagtcaaagacatgcaccaatctgtttggttaagtctctaaggccaaatcttcctctaatcattaagctctacaactgctacatcattcttaaggatctgcatttcacataataccaaatcttagtcaaagctgaaaatagatgattaaaatcaacaaagaagaagtatgttctttatgtagtacctgtgaaatgtaatcttttactttctcgctaacttgaggatctagcgctctctctgcaagatcgtaaaacaaagtactaccctcagggccacttactttctccttctgcaagaacctgtaaaaaggacgaaaccttttgagaagaactatgaaaaccacctcagtcgtttattccttgcagagttatgcacaaggttaacgaaaggtctcacctttgttggactaatgtctccagggtctgcttgttgtcccaaacacaggattat

SEQ ID NO: 16092 - DNA, 847 bp, Arabidopsis thaliana columbia
cacaacacacaatccttctacattattcggcatccatgttagctccactgccgtcagcctcatatactctcgtcaattcacacttgcgaatgcgcggctgaagagtatcaccaaccaaaacaaagcaaccacacatctaggatcaaccttattggctccaaggttccactatatgcagcagacgccgagttagttgcttcggacaacagtggtggagttcccgtgaagttagagttcgagatccgatctcgagccaatattgttggaaacttagtcaagtctaggcataggaaacacctctcttgcttcttttatatttcctcctacaacaccacctttgtaaaatttacccacagtaacttgtatttcatagaagcttctttcattttttttttaatataaaaacttgattcttatttactcatagcttttgtaaaaaaatggattttttttttcaagtatagttataatataatgtcatatttttccatttttcttagcaaaaaaggattacattccattttatcttattggaaatagaaagaataaaatccgttaaaaccggttttataaactaaaacaagataaaatggaaaagaaagcttccaagggtttggtctatatccaatctctacggcgtgttcctctttcattaacttccaagacctatgtatcgatctcccattttcaatgtttacgtgaatctcaaaacactaacaaattgataaaccaaaagaaagatgatggatgcaacgtcagaatcagaaagaacaagcttggacctatctatttcatcacctaaacaagcttactacgtagagagtcttcaagcgtgtccaattagacg

SEQ ID NO: 16093 - DNA, 752 bp, Arabidopsis thaliana columbia
gttttcagcagcattgtttgtagcgtaccatcacatcgtatcctggatccagtttccgttgccaaccctgaaaacgtggaaagttaagcacaaacctcagtgttgttagatttgaagcaaactttaaaccatcaagagactggctctaaaatactgatgtaatcaactctagctaaagttcataggtcaataataatccgaaaggcgagtattcttcgtggttctatgggatgataagagatttaaactcacctcgagaactaatgttgtaaacatgacggtggacacattgccgtcgatattaactctatgactcctcattttctcgaatagttcgtgcatacaatccgctggatggactagatccccttcctctgttccccagaatgtaaatgcttcttctacttcctgtcaaaatgtgtgtatgtatgtataaacactacaaaaatgaagaaactttgaatgatgtaagagaaacacagagcagagatcttaccttgataaaggcctgtggatcaggacaattctgttgtttagataatttaagtgttcgttcagcagcagtccggccgtctctacgtgcaacggccttgaaaaatccgagtaggttatctcggtcagtttttgaaagttctgcagtcatgcccacatctaggaaaacgatgtgtggcttcctcgatctgaatagacctcttctagtattgtttggccggacaaagatatcccaggatgcatatcagcatgaatgaagt

SEQ ID NO: 16094 - DNA, 571 bp, Arabidopsis thaliana columbia
gagttaaaatttctaccaataccataaatgcacagccttagtcataaaaatcatactataaacctcttacaactacaggatctgcagttttaaggatgcactggaaactaatttcaagcttaggatcaggggttatggttcagattgcagaagaggaagtgcaaagcagagagaataagactagctaagaattttgggataagatgcacagttgtgtactcttatatatgcagtgattatctgtctacatgactacatgactctataactgtacagcagaacctatgcgcatgcagcacatgaaacaaaggaaatttagatctagttacttgttagtatagcaaaaggtgaaaatttccaagtggaaacaacccaacggtaagttatagttaaagaaccatgacagcaaagatgaccttaccagaaacttgtataggtaattgaaatgccggttgatctcaaagaaagcacagatacgagtaagagctccagctatgtactgatttatggcttgatcttgattctttgcggattcaagtctttctgtaattacttcctcaagggatgagat

SEQ ID NO: 16095 - DNA, 565 bp, Arabidopsis thaliana columbia
agaagcacgcagaggaattattcaacaatcattttctcatgggtgggcatccttacctggaagagagttgcccactgacttataccaccgatctaccggacattccatcaccgttcgtctcgagggcaagactcctttttctgcattctttggatttaaggtttttcctcgtgatttcccctaaccatgatgctgaagaaactagcaattctcccttattttgtcctcgcattggcaaaatcggttgctccgatgacgaaacacctatttatattatccccaaacctcgagcagaacatctagttatgtttcactctgacttgcataacaaggaaaaatgtcatgaagtaggcaacgagatactgtttgaattcagcaacatatccgacacctatgagattattgagtgtggtgtcagattctatacagatgaacaggtgaaatcagtgaaaggagaaatgaatatgaaatagaccaagtttgtgaagatgaaaacgattggagctatgagtttggacccgtggaagcattgggaatggctctaaaataatggacataatgatag

SEQ ID NO: 16096 - DNA, 101 bp, Arabidopsis thaliana columbia
ctcggcgtgcgcacagtgacgtgacaaccggtaagcgacgtcacgaagcctacctggcgttctgcaaagcgcataaactgcatcccgttgccgccctgcca

SEQ ID NO: 16097 - DNA, 1216 bp, Arabidopsis thaliana
atccccatttatctttgattccaaggtaaatgagataataagattaaggcatttgatatgatgaaacgtggagattagagcagtagtattaaggtttcgacatgacacgctgcgcaggcccccaagagtagatatcagaagccgagtttccattagtgagcagattttgaggcagtccatgaatgtcatctaaaggacgggatcttccattctggtagtactgctggttctgcatagaggcagcttcatcatcatccataggaagacgatcaaaaacagcattcatgaaagatgcagccatgagaacaacaggaccagatgcgattagcccacaaccactcctccaccaacaacctgtccttgaggtccggctaagtaaatggtcagaccagttattccaagtggtgctggtggaggcaagattgatccaagcaatgagaggatctcgtaacgtccgtgtaatgtgacaattgctcctgatgaagctggttgccttaatgtcacattggtgacacaaccattggcactgagaatgcagagacctctctgtttccttcttgcaaaatccgataaagtctcacagatgtcacaacctgagctgatctcaacggcgttagctctgagggaatttggactgtcgtgagtcacaatgattggtggtttgggtttgttcttggagccagcgggtctgccacgtggcctcttagccatctctccttcgattgatgaaaccggttggacggctttgggtaatgctctcaggttgttgttggtgttgcctctctctgttgcttcatggttcctcattggaacagacttggatcctacagaggttggagttagagctgtacctccagccattgttatgaatgttgttatatgttcaactgaaagattcagaaaatttgtgaggagtttgtgagtttaagtaaggagattttggtgaattattaaatggtagagacaccaaaagaatgattgtgaggagtaggagatggttaagttgtcaccaaaaattgtgattaatagttaacaaatttattttgcaaaaaaagaaaaaaaagaaaagtttctggcagcctacttctcaacagatgattaagtatttgattcatgacaattgtcttctttaacagagagattcataataatgcttaaacatcttgtagctatttacaaccaaatttataccctttttgggaccagttactagagg

SEQ ID NO: 16098 - DNA, 528 bp, Arabidopsis thaliana columbia
acatgaatggtccgctcaaggaaccgaaactggtatcgaaggtaacgttgattatgggtttcctacattttctttctctctttttgttaatgtctgatttttacggggttaaatctgcgattagcgtttttgtcagaattgaaagtttagattttttgaaaaataaatgcggcgtttgtagcttcgatgtggcggttagggttgcgaggtggtggaggtggaggtgaaacgttcccggagcgacccgatgaacccgattgtatctattatttacgaaccggtgtttgcgggtacgggtctcgatgtcggttcaatcacccacgaaaccgtgctccggtaataaaaactctctctctctctctcctctgtttttctgggtttgtttttttgataaagtgactgcctttttttgtctgcttcctatatgtctttgatgttgttaatgggctgatttagattaacagatccattgttgaatctacgatctgatatcactgaaacagaatctaggatttctaatttgtttgg

SEQ ID NO: 16099 - DNA, 317 bp, Arabidopsis thaliana columbia
cgtcggacacaccacgcgggacatcaagaactggaagggcaacgtcaagcgggccggcttcctgcccgaggagcgcgcctacttcgacaggttcttcggcgaggagatcggctggaaggacgtcgcccgcgaactggccggggacgtcgatggtccctacacctgggtggtcgtggcgggggcaggccttcgacaacgacaccgggtggcgcattgattaccacatggccacgcccgggctcgccgccctcgcaggatccgccgtcgttgaccgcgcggaaacctatgccgcgcgcttctccgaccacgcaccgctg

SEQ ID NO: 16100 - DNA, 407 bp, Arabidopsis thaliana columbia
cctccaagctttacctttcagattttacatgccgtcgtagtctatagaaacctaagtggccattgtgcttagacgattgcggatctactcttatcaatcatagatgtgagctttgaaacgggcgtgtgagactcaccatgacgacgtccatttcgttctcgccaaatgctgtgtatatatagtaatctgaaacgcatacctcatcacaaacgattgatgtcgagaggttgatgtggccgtgaggattggaaggagtagagccccagcttgccgtgaaactatgattcatataataccaccggtagccggttatggctgtccaaacgtgagaggagtatggacaagagaaaaattagggattttgatattaggtagtgattcttgatcatcggggatatggtcattgt

SEQ ID NO: 16101 - DNA, 808 bp, Arabidopsis thaliana columbia
tctgcaggtcgaggaacatgcgtgttccctggaaggtaacattcttattcttcttctcacaaaagattcaactttaaatatccaaacgaatcaagctcaacgcttttgcatcgacttctctacattttgcagtgcaaaaagcaatcagacacttggaaacaacacctcggcgttggccccctcagcgaactctacaacctctggatgtatcccaaagtactatcatcaccctcacgcatctttcggtgacttaacattactctcccttctactgatcattgccttagtattcttgtagaaactctgaaaagaacaacaactctcaattcttgtttctctaaattttaacttctttctttgcaacacttgagacaaaagagctcggtgggtttgttctctctgtgtctagttgtctacccagttttgttgatcatctccttttaacatggagttcattgagggtagcatgtaggttcggcttcaagatcatggatgattgtaactaatttcctgtgttgaaagcttgattctttcttttttatggctgaatatttcacaatccaagcttgtcatatacaaaatagacaaagttgcagacaacaaagtgtttgtttagatttgatagtcgacttcatatgggtttgtacctgccctatagtaacaagcttcacattcaaacgaaggccgagatgcagcatcagtgattgcaatctcatgtcgacgactactgtgattagtgcaatatggtttattgcagaatctgcacttgggaagcacaagccaacattcaagacacagaacatcatca

SEQ ID NO: 16102 - DNA, 708 bp, Arabidopsis thaliana columbia
tgtcgatttgaagttgtatccctctgcttttcagctattgacgttctactaataagcactgcaaataataaaaagggatcttcaattagttttgcaatatatagacttaagaagttatgtggactcttagtcttgctgataaaacctgaaaccaaaccaatctatgactttttagtgaagaggaaaaaattcttacattccttctgcagactctgaagtttgttactgatatcatttttctctgcttgttccattagaaggcagtcctttagatcctgaatctcgagttcatctatcaaatgattatatcaggaagccatgtgaatgccgtaaagaaaatacaaacttaagtacaattggaggtcaggtgggtgagagtcttacacttgcactccacttccgtaactactcgatccagtttcttcgacattgcttgaatatgcgatttgttagctgtcaagtcttgtcgaagtctatcaattaccatatcgtttgttgctttttcaaccaaaaggcttctgtacataaatggttggggtatttaaccaaaagttcagatacattgacacttgaaataatagtcgtaaaatgagcttttacctgattttatactctagctcttcaacttttgttacatgcttctgcctaagtgattccaaagcattcctatgttcctgccacagcttacaaatatctcaaaacagatac

SEQ ID NO: 16103 - DNA, 267 bp, Arabidopsis thaliana
ggatgagctatgtatggataaggaatgttaagctccttcaagaaagtttcctgattttggtgtctttgctcataactcggaagggatgcgagacggacgtagaaagctagaatcattgaaaccaatttgacaaacttaaccctaaaattcaacaaaattaccagaaatctcctttccggaagagaaggtggcgtcagacgtaacagagaatcgacctcccgaccatagaaatggcagaaacgatgccagcgacatagagaacccaaa

SEQ ID NO: 16104 - DNA, 523 bp, Arabidopsis thaliana columbia
tcaaatatctcagtcttgtcagatttgaggaagaaaacaggcaccataaaagcttgaaaagaaatcacaaactaccaacagttgagaacagaccacattgccaagaatttagagattcaatgcttttcaagagtagcaacagttatgcatttgaacatggctttgcaaaactcggaagtaaacaaaagagaaacaactaaaaaaatataaaaagcacaagttcaagaatccaaatgaaaattagcaaagcagctagtcaccataggccagaattgcaatggcagttgcaacacattgcaatggtacaaatcctccccaacaatgttcctgctaactccccaacagattatttctcagacatgattcttcttagtgaccatgtcccagaagaactcagtcaacacaggctcgtaagagggcatcttagcatatccaggaaagtagttaatatcaattataaggtacctattagcatctttggcatccctaatcacgtcgaagttaaagagattgagtccattga

SEQ ID NO: 16105 - DNA, 597 bp, Arabidopsis thaliana columbia
cgaaacttgaaacccgaaccgaggatccaaaacggtgtcgttgctacaagaaaaactatccgacgcatcggagactgattcatcgtaaaactcgtaagtttcgtaacggaggaaacaaccgtcgaggaagattcttgcggaggaagaagggagacaacgagggatgcgggtgcgtgcaatcgcgtaacagagctgacaatcggacggtgagagatcgtcgtggcattggatcagagcgtagatagatgtagtggagtttaatgattcagttgcgaaacggcgtgtagttagttttagagatagtgaatgcatatcttcgacgaaagttgggatgtagtttggatctgcggaggatttgctacgtccgccacagaaaagaccggagacggtggttctttgatcgtcggaggaggacgacaagaacggtaaaaagaagaaggaataaaaaatgatgacataatgaaacgatcttgtttttgtgaggcaaccattttttaaagtttttttttctgtttttacttatcttgtggatgttggtatttaaatataggattgtatttgcagaaaggtttatatatatatactatatagttatat

SEQ ID NO: 16106 - DNA, 484 bp, Arabidopsis thaliana columbia
agtttttttttacagttttgcattattctataacagtttaccgcgtcagttaacaacttatcgctctagctaacagctaaagttttgttaccaatcagactcttaaatcttaagaaatggagtaatccatctcagtgcataagtgtcacaaaatgatcgagactcgttggttacaaactctttatcacatttgaagaagcttaacttaagttgttttgattttcgagaaaccgatagagtaacaaagaagttaacatcccaattaattatgttcctaagctttattttcttagtgtcggattggttagattttctcatagacgctattccgctaaaaaactatgactctacacaattacacaagatgtgggttagtaaaaatttgaagtctgaaaaaaaaacagaaaattcagattcaagagccatcttcttgtcttatctacacgtgtcacatactgaactcctccaacaagagaaagatgtg

SEQ ID NO: 16107 - DNA, 542 bp, Arabidopsis thaliana columbia
caatgaggaactgaaattctaacactcatgtttttcttgcaggttatgcatagcgttccttactttcagttgcattggatatgcaatgccattcatactatgtgcaaccatatgttgttgtttgccttgcttaatctcggttctcggatttcgagagaacttctcacaaactagaggagccactgccgaggccatcaacgcattgcctgtctacaggttcaaatcaaaaagtagaaatgatttggagttttcagaagaaggtgaaggtggatttattctcttggggtctcagaagaaacgtcttatatcaggcgaggatgccgtaagtcaatacccttagttccgccatgaattcatttgaattagttggttaatacaattgtgtacagaagttcagtgcaactgttaactattgtctgcatttcttggataaatattgattttgcagagctgttgcatctgcttgactagatatggagacgacgaacaagttagagagcatgcatgctcacatgtcttccatgtagactgtgtagacaaat

SEQ ID NO: 16108 - DNA, 886 bp, Arabidopsis thaliana
acaactccacatgttaataaaacatataacacaaacctctaagaagagaagtaagactaaagaaacctctggagaaatggctcgatggatgagatttgcgttattgtgtaagaagttcagtgtctcagaaatctggagcagaccatgcttcacctccaacaagctcatctcctgatcaaattttaaacaatcaatttaataaaatccaaggtcaaccttaaattgagttttaatcacagcaacaacattatatatgttaccattgatttcagatctttcggcacattacccacattctcaacattaccaagcgcattagccacagaagcaaaaagcggctccgtaactaaagccatagcattcttattctcatcaagcgcttgcaccacatgaaccacaccaggatgcctcaacctcaccagcttccccgcatcagctcgaatcagatcaagaaacgcatcttcagctgccttagacaaattcgctcgtacacgagcctccgacaaagcacgcttatcaagcatccatacacagaccgtcgggtactgctgtggcctcgtggaatcacgcgccttagctgcgtatagcttccaagctagaccaggaccagcggaaccgatctgatcaagtagctcgtaatcctgaagagcctttggtcccgtaacttcctgtactgtggtatgaaccgtcttctcaatcacagcagccgttctagctagagcttgagtaaatgttttcatgtttatcgacatttctgctggatccaattactcctaagtgttgtcggcgacgatgtaaaaaacggtgatccgacgagagatctacaaatcagatcagagaatgcgtaattgaccgagatcgaggaagaagacgatggcagaagaga

SEQ ID NO: 16109 - DNA, 398 bp, Arabidopsis thaliana columbia
accgagctacattggatttgcgtaacaacaagcttaaaggtagaatccctgaaagtcctcagctagacagattgaacaatccaaacatttacgcgaacaacagcggaatctgtggaatgcatatccaagtaccatgctttcctacacagaccaagcagccagctgaggaaatagaagcagtagacaaagatgacgaagacacaattttttcatggaatgcagcagccataggttgcacttgtggattccttatagcagttgtgttcatgtcttacaatgagttatggaagtaacaacccaaaaatgtactcataaaacaattcaaaataaaattttcctctaagttcatcatttcattaccaattgataactaaacagatcatcactctctaatggaa

SEQ ID NO: 16110 - DNA, 552 bp, Arabidopsis thaliana columbia
tgaaccaaaaatgaaaactctttaccaatacagctaagatggttaggtaaaaactaaactataaacttctggccagttaagagtctatctctatttgtttacgagcttttaaactattcatgtatgaatggtgagtgactacttctaggctctaatgagctttacaaaccgaagaaacctagctcgcttgctttttctttttcgaaggtttcgaaatactgatatatgattgtaaccgcaagaaggattccagtgcctgacccaatagctcccattaaatcagccaagacagtgagtgcaccgatacacagaccaccaaaagctgcagccgtgggaatgtatcggttcagttccttttgaaggtttgagtctcggtgaccaggcattaccatttgctgttcctgaaaaaaatcaacacaaatttaagagttatagtcatgcaaaagacccaaagataagaattggatccgcaactttgcttagaacaagggtgataacaaacaaacatactcttagttgtctggcgacatctttggctgatgaaccggagac

SEQ ID NO: 16111 - DNA, 580 bp, Arabidopsis thaliana columbia
cgtagatggtagctacttggtttggtgctgcaaacttatgcttcactagatcataaaccacctgatgaacatatataagaatgatgaaccaatgtgaattctctaatgacatagatggtagagggaaagtaaggtgtgtaatacatacctcttccataggacctacttcatggatgtcgtttttctccgttggtatgaacctgacccgcacattctgcagttgcaagtatctatctttgaaggctgaatcatgtgccctgaagtcaaattcctacgtagtaagggcagaacagagatattctcaattcatttatgtttcattctttcaacaaaaatggaaacaaagccattacccaccctccagtctgatgggtaatagtaagaatacccgtcttctcgatccacaaaaggcgagtagctttttggtatctctgcaaacatgatatgaatcaacatattaggcttttggtccaaaagaatgaagaagagaggcaaaaacaaaacccttagttttgcagattacctcagcaagaagcaaagttgctggaattgaagttgcactaaagtcctactccacaag

SEQ ID NO: 16112 - DNA, 1115 bp, Arabidopsis thaliana columbia
aaattaatattgttactcataagcagacaattttatagtacggttgctcaattgtgctcaaatcggaacatgcagttccctttttggtaaatgaaatgctttcgatatttgcgtaggccactctgagaaacgagctccagaaacaagactggtgttaaaagtttaaactcttgttttttgactcttttcaatttcctaataacttgatgtcagaatcagaatctcataacaaaaaacaaaagagacaggtttgattgagattgaaagaggaagattaatgtaatgggaattgaagtgcagaagatatggcttggagaaagagaggatgcacatcttcacccgagaacacttctgactccaacttctccatgtgaggccatatctacaagaacatggtgaaacaagtcaatattcaatctactaaagctcttacaacaacatcccaactattaagttattttttacctcgctcgcatattgccttgtaaatgccgtgagatagccaagtgttgataagcaccactgttctctctcaccgacttcgcaactcttctttgggtttccattctcgctgtccacgtccatcgcagatggcttgtcatcttcagcacctatagattttagatcctgcactgatctcactttagttggatctgggagccgttccttcagtacacctaagaaactttggaacagcaagagcagtaaaacctatgcacaagtcaactcaattagcttttagtagataaaaggaaataataagatcatgtgctgcattaaactaatatataatacctcggtctcagagagagctctgttaagaagagcctcttttgcctctagggactcccgaagagataactccgcttcccctgtcttctccactgttgattttaaacgcttcatcttcgctggattctcaccaagaacgggttcaccttccactagggaaagtttgctctcagcagcctccaactctactcgtgcattggctgaagctttctcagcaaccaaaacatttttcgtaatgtttgatatatctttcctcaaatcagagatacggttataagtcttgttaagagcattgccaagtatctgcagagacagaaacagat

SEQ ID NO: 16113 - DNA, 770 bp, Arabidopsis thaliana
tcctaaaaaatcaatatcctgcttacttgatttcactgaggtataaagtttaatcattattgtattttggttcgttactctggaattaatatcctattagatgatttactaatactcttgcacctattcaagctcagaaatgcaagatcatgtgcaccatttttaaaatagatggtgacatgggttggttttatgttgggtgcaagaaatgtagcaagaaagttgagttgaaaaataacgacacctccatttctgttaagcctaaagaactcacattttggtgtcctaaatgcaaccttaacataacacaagtgtttccaaggttcgtgttctcattactatatatataatatattcctacactttatatatattgattagtaaaataaataagaaaatatttggttataggttcaagttgcatgttggagtcatggatcatacaggagatatcaaatgtattctgtttgatggagctgccaccgagatgattggtgatacaacatttgatctgcttgatggcgtgtatgatgatgatgtgagtaataccaattcagaataagattaacaaatcaaaattttatcattaagctcttatatcgtgtcatttataattcagttgcaggatcctgcaaaaccgcctccttttatcaaaaacttggttggaaaaacgtttcagctacttgtgtgtgtcgagaatgacaatttgtctggaagtaatgacacttacaggattggtaagatctggtcaggtgttgctaatgtgaaga

SEQ ID NO: 16114 - DNA, 1085 bp, Arabidopsis thaliana
cagaaagagcaggagatttcaaattccattgttggaggaaacacttacatcacctaccaaattacgaccagaacgaatctccctgactttggcggcccatcggagtttagcgtgcgaagaagattcagagatgttgtcacattggctgatcgattggctgagacgtatagagggttctgcataccaccacggccagataagagcgtcgtagagagccaagtaatgcagaaacaagagttcgtggagcagagaagagttgcattggagaaatacttgcgcaggctaagtgcacaccctgttattaggaacagtgacgagttgaaagtgtttcttcaggtgcaagggaagttgccactaccaatgagtactgatgtggcctctcggatgttggatggggcggtgaagctcccaaaacagttgttcggtgaaggcggacgtctgcagtgccggtgactgaggtgggtcagcctgcaagaggaggtagggatctgctgagattattcaaggagctgaggcagtcagtttctaatgactggggtggatcaaaacctcccgttgttgaagaagataaagagttcttggaaaagaaggagaagatgcatgatcttgagcagcaaattatcaatgcctcacagcaggtaaaatttcatacttgttaggtgaattgtgcatcattctggcagtatgtagtatcctgcttggaacaacccccttttgtggtttctttttgtaggcggaatcccttgtgaaagcacagcaagacatgggtgaaaccatgggtgaactgggattagcattcattaagctgactaagttcgagaacgaggaagctgtctgcaacccccaaagaactcgtgctaatgatatgaagaatttagccactgctgctgtaaaagcaagcagattttatagggagttgaattcccaaactgtcaaacacttggtaaataactacagaattatacagctacctcccttacttggaatcaaatgaaatgttattttcttttcttcatctgaaaaaaatgatcatttcgatttaagcgattgacattaggatttcggaaatctcgccatgcgtagca

SEQ ID NO: 16115 - DNA, 987 bp, Arabidopsis thaliana
cgttgcggccatacttctcacaagccctgaggaaagtattaaaatctcttctgctccatgttgagaaaccctggagattgacaattacaaaaaattaattaaagcctaccaaatcaaatgtctaagaccactctaacatcaaacatattcacttgcctcctccaataatccctccttttcctctacttcctcagtagttaagggatccccaccttctaacaaaaaaattcttaatcagtaataggtttgctgaaaaacatgttaacaaagtgggtacatgttaacaaagtgggtacaagcttgaccttctggttcttcaacatcaattgtgtctttcaactgatttttctgatgtgtttgctgaaaccaaaaagcacaaaaagaagcaagttgcttttataaggcaaaaaaactcgctcttaagcacatcaaaggaatcaagtgtttcgttttgagagaggcctaccatgagataacgtacttccttttcatacaactcggtcaatctctgaatgttaaagaactggaaatcgtgcctgaaagagggacaataaattagatttctagtgtaagaaaatcatcaaaacagggaaaaggcattcaacaatgagatggaggttgttgaggtactcacaactggggcatgcgcggaattctaggctctttaggtttagctggagcaccttgccgcaatgtttgcttaaagtactcagattcagagtagctgaagatacagtagataaaacaaaagggatgtttcttttagatatgaagactggcaaaataggactgcacaatgtataagacagaagtaatcattacttgcgctttctctcccgcttggggggatcattccaattgtcgcttacgatctttttaaaatcgagcttgtgttcatcctatgaacgaatttaccaatatgttagtaaattttatcatcagtaatgcagacaaagctagggatatgacatgaaagttaagactatg

SEQ ID NO: 16116 - DNA, 532 bp, Arabidopsis thaliana
caaactactcgatcgcaacatggaagtggtgtgatctagtggtctcctagtggaatttctcaaaccactcaatcgcaaggagaagtaaaaacacccgacaggacttcaatgacaacccgcctgaagacatgccatccaggtgccacgacattgccccaccaaggcaatccaactataaacagagggaccacaccgttccgcaagttcccgcaaggcactcgtctcatgagccaatggaacacaagaggaggaagagtgctagaactatacattcatcaagcaaaggccggatattgtcgggccgaagaacacatgaacgtcatgctccactacctgctggggttgcgatcgagcacaatgacgaggagatggcagagcacgatcaagaaccggtcgtgcctgcggagtacactccagcagatatggatgactacatctccaggacattctactgagtaacacgcccaaaccctttgtaaataccgcttttgtttgtgtctctatgtttatctctgaatctttcacaaatttt

SEQ ID NO: 16117 - DNA, 1124 bp, Arabidopsis thaliana
cttgtatactagcaaccacagactctgggaaatcaagcacccaaatttaacaaaagaaaccctaaatcccaagctccatcctaaaagaaactcatcatagattgcaaaaataaaccaaccaatatctcagaagttttatttataaactaatcatgatttatcgaatcaatgcaattagcagtgacgggaagcaaataggcaaaaatctaatcaatattggggggaaacgtacaccgtgctgacgagaaccggcgttgatgcgctcgatccagagacctctcatctcacgtttcttgttgcgcctatctctgtaagagtactgcagagctttctcgactctttccctcgcaattcttatacaattcttagctcttcctctgaaacccttcgctagcttgaagatctccttcttgttcatcttttctctttattcttcttcctcctctatctattcttcgtccttctctcactaatactgtaactccatttccttcttctaacgccgcctctgtgtatcccccttctgtttcaattccgggtcgatcgggtcgggtcgtagaaaatccggtcacacaattattaaaaccaattctccatctactgggcctttattatataacatcacaaactaaacaaagcccactatcccatccagtaactcccgacagaggacacgtgttgccatgtcattaccacgtgtcacaagctttccaactctgcttcattttcccgggaaacaaacaaaaacagaaccattattacttttccggaaacagaatttaagtggctttgctctgttcttctcgacccatcacacagaaaaaaccaaaaaaagaaagaatttcaagttttcaactgtcaaaatcttgtagtagtaatggaaaatcatcaccgaatatccgccacaaaatacaacggcgaacgagtgtcggacgatgtgggccaggggaagctatattctccaaaccacgcgatcaaaatctctccagaatccgacgaaaacgtgggccaagggaacctctactctcctgaccacgcgatcaaaatcgcaacgaaccctgattccgtggattctcatcagaggaagaagaaggagagaagcagaggaagacgatcatgttggg

SEQ ID NO: 16118 - DNA, 709 bp, Arabidopsis thaliana columbia
gtcaattctactctatcaccctccttgagcctaatgagtgtgaggagtcaagctagagatttaaaacaagctcacttgggaggaagtcccatgcctatccctgtatatagttttaattttattttgttacttttgatttgttttggttttggctttgattctcaggaaataaataacagctagagcaacagcagtgatgcaaccgagtgttcaaataaaaaaattcaaatttttgatgaatcactctatcgcaagacgagagtaaaagctcgggagtgcgatctagtggttttgggacaacatctttctcaacgacaatgtcaaaccactcgatcgcaacatggaagtggtgtgatcgagtggtctcctagtggaattgcccaaaccactcaatcgcaaggagaggtgaaaatgcccgacagaacttcaatgacaacccgcctgaagacatgccatccagctgccacgacattctcccaccaaggcaattcacctatcaacaaagggatcacaccattctgcaagttcccgcaaggcactcgtctcatgagccaatggaacacaagaggaggaagagtgctagaactgtacattcatcaagcaagggtcagaaatgtcgggtcggagaacacatgagcgtcgtgctgcacaacctgctggggttgcgatcgagcacaatgacgaggagatgcggagccacattaagaac

SEQ ID NO: 16119 - DNA, 586 bp, Arabidopsis thaliana columbia
gtctagaaaagacgactatccagatgatgaaaaaggagcttaccaagaaagggtcattgagtactcaattacagacttgtcacgagagcatgctgaatttgatgttgtatctactaaggaaggagaggagacgtcaattctactctatcaccctcctttagcctaatgagtgtgaggagtcaagctagagacttaaaacaagctcacttgggaggaagtctcatgcctatccttgtatatagtttttatttttgttacttttgatttgttttggttttgtttttgattctcaggaaatgaataacagctggggcaacaacagggatgcaaccgagtgttcaaataaaacatttcaaattttggatgaattactctatcgcaagacgagagtaaaagctcgagagtgcgatctagtggttttgggacaacatctttctcaacgacaccactcgatcgcaacatggcaatggtgtaatcaagtggtctcctagtggaattccaaaccactcaatcacaaggagaagtgaaacgcccgacatgacttcaatgacaaccgcctgaagacatgtcatcgagccacatgaca

SEQ ID NO: 16120 - DNA, 613 bp, Arabidopsis thaliana
ttgacttgattttcatgttttagtgactggctgcttccctcttgagaaaattgcagctcctttcgagtgtgtttacttatgcttttggcatcaaacgattctactctgcgtgcaagctgataatctatgctgtctcatataacagtgattctcattagtatttctaggatgcttatatatctcatggatgtttgcaggctaatctacgccggaaaacagctagctgatgacaaaacggcaaaggactacaacatagagggaggctctgttcttcatctggttcttgcccttaggggtggttttggtcttctctgagaagtaactcttgaagatatctttttctctttgtatggcttgttggagttcatgggaaaaaagtgattgcaatttggatatgatactttgaatattatgctgtttcactgggtttggatcattttaccaataatctgttaaatatcgaatcattttgttttgtttaacatcgaatcgtactttaacatatttatttgggatttagctatttatgatgaatatctttcattcaagaaagaggctagacatgtgaaaataggatcgagctatgtgtaagatcggaccaggctgattgaga

SEQ ID NO: 16121 - DNA, 947 bp, Arabidopsis thaliana
gaagaaactacatccttcacagatagagttttatttccatacttcaaggtatgcttcagctcatcagaggtaacaggcaacgaattcaagattataatcgcttgaacctctatttgcaacctcgatatcaagacttcctaattctgcaactatcctcagaaaatcatcaacgtacgtttatgaatcaatcgtctttgaagtcatcagtctacacgagtagaatctcaattgtgcatagatccggtttggtaacgacgtctccatatacaattcattcaacaattcccacaatgtagctgcagttttatagtgatttacttttctcaagactgtgtcacttatgtgattgatgataatgttgatcgcttgttctgatttttcaatcttaataggatctggaacttctttagtcaacacagcacttgaatcagatgattcatctccagaagctacttgcttctcctcactcttcgttaatggctcagtctttgtcaaagcaaagtctgttagagttcctttcaatccaagaactccgagttgtgccattatcctcatcttccataacgagaagtcgttatcgccgtcgaaggctttgatctcaactctagtcgtcgtcgccatcgatcgatgcgatgtgaatgaaccacccaaaagcctgggctctgataccaatctgttacgttttatgctcgattcacaatacaaagatcctcacaaactctcaatcactcaacaatcgaaactcaaatcagctcaagaaagagatcgaaacagagaacgaaagaaaacaacacaagagtttgtttacccagttcaacaagatcgatatgatcaagtctacgtctggggccaaatcagttcggcaattcactaaatcagaacgagaattacagagcaagagcagagctcaacaatggagtctcagagctcaaagttttttttttttt

SEQ ID NO: 16122 - DNA, 959 bp, Arabidopsis thaliana columbia
ccccgagagcatgctgaatttgatgttgtatctacccaggaaggagaggagacgtcaattctactctatcatcctccttgagcctaatgagtgtgaggactcaagctagacacttaaaacaagctcacttgggaggaagtcccatgcctatccttgtatatagttttttatttttgttactttagatttgttttggttttgtttttgattctcaggaaatgaataacagttggagcaacaacagggatgcaaacgagtgttcaaataaaaaattttaaatttttgatgaatcactctatcgcaagacgagagtaaaagctcgagagtgcgatctagtggttttgggacaacatctttctcaatgaaaatgtcataccactcgatcgcaacatggcaatggtgtgatcaaatggtctcctagtggaattgcccaaaccactcaatcgcaaggagaagtgaaaacgcccgacatgacttcaatgacaacccgcctgaagacatgtcatccagccaccatgacgttgctccgtcaaggcaattcacctataaacatagggaccacaccgttccgcaagttccctgtctcatgcgccaatggaaaacaagaggaggaagagtgctagaactgtacattcatcaagcaaaagccggataatgtcgggacggagaacaaacgagcgtcgtgctctacaatctgctggggttgcgatcgagcacaatgacaaggagatggcggcgacataaagaaccggtcatgcctgctgagtacactcaagcagatatggatgactacatctccaggacattctactgaggtaacacacaaaccctttgtaaatacgcttttgtttttgtttctgtgtgtatcttgaattctttcacaaattttgattcacaagggactgtgtaatttaagtttgggggagggtcaagacgtatttgacttgtgttttgtgaat

SEQ ID NO: 16123 - DNA, 698 bp, Arabidopsis thaliana columbia
gtatatagttttttttttttttttttacttttgatttgttttggttttggttttgattctcaggaaatgaataacagctggagtaacagcagggatgcaaccggtgttcaaataaaaaaaatcaattttttttatgaattactcgatcgcatgatgagagtaaaagctcgagagtgcgatctactggttttgggacaacatctttctcaacaaaaatgtcaaactactcgatcgcaacatggaagtggtgtgatcgagtggtctcttagtggaattgcccaaaccactcaatcgcaaggagaagtgaaaatgcccgacaggacttcaatgacaacccgcctgaagacatgccatccagctgccacgactttctcccaccaaggcaatccacctatcaacaaagggaccacaccgttccacaagtttccgcaaggcactcgtctcatgagccaatggaacacaagaggaggaagagtgctagaactgtacattcatcaattaagggtcgaataatgtcgggtcgtagaacacatgagcgacgtgcttcacaacctgctggggttgcgatcgagcataatgacgaggagatggcggagccacatcaagaaccggtcatgcttgctgagtacactcaagcagatatggatgactacatctccagaacattctactgaggtaacacaccaaaaccctttgta

SEQ ID NO: 16124 - DNA, 1214 bp, Arabidopsis thaliana
ccccgaagagagtcagggacatatatagtatgaactcaagaagagatggtctttacactgtgaaggtttaagagcttctcattaactagtttctccagtgacagagcaagctccatgcctgcaacaacaaatcacagaattgtatgttaaaattcctatatccattgagacttgaatctccatatgagagatacattttcataatacttaagaactcagataaaattcagtctttgctagtgaaaatatgcaatctcttcaaaagcttaacaaaatcattggtgtcaatatctaatttcttagaatgtggcagacatatgaaactaaagaagttttttcacttgggattattagtgttagcatttttgagcttaccataaagagcatctcctttgtcaacatgttcaaactctgaaagaggcattacaatggactgtaacttaaccctcccaccacgtttgttctgcaattcatggaaaaaaactaaaacatgttagaaccaaattagctccaataaggtaaacaaatggaaataactttaataagaactgatactccattaacttctcagcatgctctctttcttccgaacttgattccttaaagaacctgattccatgaaaccaacaattaactatggataaacaaaaaaaatccgaaaatatcaacactcttgaataaccggagactcacttggcaagacctttgagcgcgatgttatcccgatcaaagtaagcatacatagcgtgatacacatacgagacattgtattccacactgcaaccaaaatccattgaagaatttcaaattcacaggttcataaacaataagcagaatcaacatgaggttccaagttaccaaatcttatagccaatcaaccagattataataccgaatctaagagactggggtgagaaagaataacctacttgatctgctcgttaatggcggcttcgactcgtctgagtacttttgtcgagcgagtgagagatgagagctggtagggacgagatcgagctccttttttacttccttaaacggctcgaagacaacgccgcttaagcgcgtcggtggttgagcttttagatgcgcgaaaagagaaagttaagttccagatttccagaagaactcgaagattcgatgaaatggaaggtacaaaggagcacatcttcttcagcatggaaatcaccacgagagactgaagagagatgaga

SEQ ID NO: 16125 - DNA, 978 bp, Arabidopsis thaliana columbia
cagacttgtcacgagagcatgctgaatttgatgttgtatctacgaaggaaggagaggagacgtcagttctactctatcaccctccttgagcctaatgagtgtgaggagtcaagctagagacttaaaacaagctcacttgggaggaagtcccatgtctatccttgtatatagtttttatttttgttacttttgatttgttttggttttgtttttgattctcaggaaatgaaaaacagctggagcaacaacagggatgcaactaagtgttcaaataaaaaaattcaaatttttgatgaatcactctatcgcaagacgagagtaaaagctcgagagtgcgatctagtggttttgggacaacatctttgtcaacgacaatgtcataccactcgatcgcaacatggcaatggtgtgatcaagtggtctcctagtggaattgcccaaaccactcaatctcaaagagaagtgaaaacgcccgacatgacttcaatgacaacccgcctgaagacatgtcatccagccaccatgacattgctccgccaaggcaattcacctataaacatagggacaacaccgttctgcaagttccccgtctcatgagcctatggaaacaagaggaggaagagtgttagaactgtacattcatcaagcaaaggctggataatatcgggctagagaacacatgaacgtcgtgctgcacaacctgctggggttgcgatcgagcacaatgacgaggagatggcggagccacatcaagaaccggtcatgcctgctgagtacactcaagcagatatggatgactacatctccaggacattctactgagtaacacatcaaaaccctttgtaaataccgcttttgtttttgtttctgtgtttatcttgaattctttcacaaattttgattacacaagggactgtgtaatttaagtttgggggagggttaagacgtatttgacttgttttttgtgaatacatttga

SEQ ID NO: 16126 - DNA, 554 bp, Arabidopsis thaliana columbia
tgttcattattataaacccacatatacaggagaggagtaatggtatgttacagagcaaagaacagccaggacatttcatcatccaaactaagagctaaagcaactgtcagaacaaaatttaacaaggcgcaccaaaaaactaaagtataattacagcctggaaaagcacaagtaatctctctctcacacacatacacaagagtctataaggcgtggaaaatgaagcatttataaaacagtaacagaaacctgttggttgactggtgttcctccgtaagcaaccacaactttcactccagtttgataggagaactttctggcttcatcatgtatctgcagaaaaatcataaaagagatgtcttttcatgaaatcttcatgtgatcaacaaatgcatataaactatgatattataccagttattcagacctggcaagccaattcccttgttggtgagagaatgacagcaagaggatagactcccgaactccaagtggtctctctatatgctgatccttcataatcccactaataatcggaaaacaaaaggcagctg

SEQ ID NO: 16127 - DNA, 564 bp, Arabidopsis thaliana columbia
catccgcttcaccaacccataagtgtctttgtgactctatctactacttgatttctcgcacggaggctagccaatgggaattcacgactctcatccaaaagaaatctataaacttcccattgtcgatctaaagtcgaatgtctcccaatctcagcctacaagaaaacgcaatgccaatcttaaaacaaaccgaaaataaccgttcaaaaagcttagagaacacaatgtattattatacagtacttacggagaagatgcagattcctagtgatttcaacgcaagtgtgacatcgtagaaaactcgtggtcttccttttccggatagtccacagggttggctactaatagctcagtatctggtcctcggttcacgataatcactcgcaaaggacacaccatttcctccttaagtcgagcacagaagttggcttgatgttttgggccattattttatcccgtctgtgctctacaaacaactcaaatcctatacctttaccttggaggagacctccgtagcaactggataagaacaagactacttgagttatcaaatcttcaccatag

SEQ ID NO: 16128 - DNA, 534 bp, Arabidopsis thaliana columbia
aacaaacccaaatctctacgagtatttgatccacaatctccttttgttctgtctgaaagttcctacctttccaacacagttgagttgcaaagttccttccttgaggagaaattctcaaatctctaataagccctaactcaatcctaatctccaattttgacctaagatgataccagcaaaatggttacaaaatctacaatttgttggaataaacctagatttgctaacacctaacaacaacgtgttattttttccctaagcagccaacaaaacaaaaacaagaaacagctcaacaaagaaaagacacaaacatacagtttccataaatagattttcaaatttttaaccaaaaaaaaaaaagatagaaatttgtgttgatgaatctaaaaacctgaacgggagagaaaagacccaaaaagcttggtgaatcgagcaacatagctggacttaaaccaggcggtacggtgaacatcgacggcgattgagattgagaaatcatcaaaccggttggtctgttttgcttgaatctcgggt

SEQ ID NO: 16129 - DNA, 565 bp, Arabidopsis thaliana columbia
cgatccccgttgtgtcattctttgttagagtgtagctcaagtaaaacattttgtttctttctgacacaggctcaatcaccagaggaacttccagagcaagtactgtgttgtgtcaggctgaacaagattgatttcgtgaatcacggacaaattccaacgcttttaactaacaaacaatgaagtgatcactacataataacacagagagagagacaaagatcaatcaatcaatcaatggggagagcaaaaaaagacaaaaagcaaaaacagagaacgttttcacatatttgtattgttgagagacaaaagaagaagataaaattcaattgtcttttttggaaacaagatttgctcgggaatttattaatctcatgaaaaagattcatttgtacaaatgtcataatttcttcactccattattcaaaacccataacaaaacaacaattgctctgtatatttcattaaccaatgactgactacgaaagatgaacaaatagcaagaaaatttgggtcataggccattatgtattataatagtgtaataataacccaaagaaaaaagttt

SEQ ID NO: 16130 - DNA, 575 bp, Arabidopsis thaliana columbia
cttatgataacctcgtcaatgaagttgttgcggatgtgagtagctacattactcaatcaagttcacaactttcagaagatgctaacctgtcttttctcatgtttcctcttcagaattttgatgtagctgtaggagatatcacaatcgtcacaaacagaacaagatatgtagatttcacacaaccgtttatagaatcagggcttgtggtggtggctccggttaaggaggccaagtctagtccttggtcattcctgaaaccattcactatagagatgtgggctgtcactggaggcttctttctctttgtgggagccatggtctggattctcgaacaccgcttcaaccaagaattccgtggccctcctaggcgtcaactcattaccatcttctggttagttcccagttcttaacactagagcccgagtttaccttttaaaccttattttccttctcctcttcactgttacaggtttagcttctcaacaatgttcttctctcatagtaagtacgctataattcgagtaacctggtagatttcacaccagggcttacagaatgttggagggaagtaagtg

SEQ ID NO: 16131 - DNA, 532 bp, Arabidopsis thaliana columbia
tcgattatggcggccttctcttccgaggtggacagttgatatttgagcggcgaaaaatcatgggattgtatgtgacaacttgaagaaggtgtatcaaggcagagatgggaacccacctaaattggcagtttgtggcttatctctcgctgtgccgtcagagaatgtttcggcatgttagggccgaatgcgccggaaagacctcgttcatcaacatggttagtacacaaagggacatatatacaaatcttttgtgcttagtttttttttattaaaattttgtctagcatactcataagtaacaaattaagcattcattttttttttggctagatgactggactcgtgaaaccatcatcagggtcagcttttgttcaaggtttggacatatgcaaggatatggacaaagtctacattagcatgggtgtttgccacagcacgagtaacaaattaaattcttgtaacatatttgttgttgttgaatgaagatcattattaagtttacgtgttcctaacaatcatatagttattttat

SEQ ID NO: 16132 - DNA, 536 bp, Arabidopsis thaliana
atggctttatgcattacttggctcaattggtgccgttcttgccggatcacaaccggcattgttctccatggggcttgcttacgtgttaaccacgttttattcaccttttcctagtctgatcaagcgtgaagtcgataaggtagctattatctttgttggagctggaatagtaacagcgcctatatacattctccaacattacttctatacactaatgggagagcgtcttacttctcgggttcgcttatccttgttctcaggtaaacacaattttattcaaacatctctgttttggattgattcgattcttgaatacttataaatgtatacaacaactgcagcgattctttcaaatgagattggatggtttgatctggatgagaacaacactggctcactcacttcaatcttagctgctgatgcaaccttggtgaggagtgctatagcggatcgtctatcgacaatagtccaaaacttgtctcttacaatcacagccttagcacttgcatttttctacagttggcgtgttgcagctg

SEQ ID NO: 16133 - DNA, 522 bp, Arabidopsis thaliana
ggttgagttgatgggtgggcagttctccaagccgttggttgctaacagagtgacccatcttatatgctacaagtttgagggtgtggtgtctctactttggttcaactttcctttagcttagtgtttttcggggagtttacattctgtcgagtctttctttctgcgcaggagaaaagtatgagctagccaagcggattaagaggattaaacttgtgaaccaccgttggttagaggactggtaagaggcatacaagagtttttttgttttttttcgttttcgttttgtggatgtgaatatcttttctttctttctttctttgcagcttaaagaattggaagctcctacctgaggttgattacgagataaggtaaaagtgcaactccatctcttgtattagtggacgcctggaattgctattctttagaattggtatagtctcttattgagagatgaatttatgtcttgccaaagaaattggttactagatttcgtgctcatttcagcctgattaataatgttac

SEQ ID NO: 16134 - DNA, 197 bp, Arabidopsis thaliana
gttttgtcgtggaacgcgcgttttcaaatcgctaaaggaattgcgtctggtttgttgtatctccacgaagaatgggaacagatcgtgattcacagagacgtgaaacctagcaatgttctgattgactccgatatgaatcctagattgggagactctggactcgggaggctttacgaacgcggctctcactcgtgcac

SEQ ID NO: 16135 - DNA, 441 bp, Arabidopsis thaliana
gatcccctccatctctttcgtctcctatatctcgaacctggacacaccaagtctttccgagcttccgcggggaagacgtacggaaagggtttcttagtcatatccagaaggagttcaaaagcaaaggaatcgttccctttattgatgacgaaatgaagagaggcgaatcgatcggtccggggctgtttcaggccattagagaatcaaagatagcaattgtcttgctctcaaagaactacgcttcgtctagctggtgcctcaacgacattggtggagattatgaattgcagggaagagattggtcaaacggtgatgactgttttctatcaagtggatccatctgatgtgagaaaacagaccggagatttcggtaaagcctttaagaaaacctgtgttggcaaaacacaagaggtgaagcagagatggagtcgagctttgatg

SEQ ID NO: 16136 - DNA, 1314 bp, Arabidopsis thaliana columbia
ctcaaaagttgatagagtttggtctatatggagtttacaaggttgcctttatacaacttgattatgctctgataacagctttggtggagagatggagacccgaaacgcatacttttcatcttcctgctggagagatcactgtgactttacaagatgtgaatattttgttgggtctacgtgtcgatggacctgcagtaactggtagtacaaaatacaactgggctgatttatgtgaggatttgcttggtcataggccaggtcccaaggatcttcatggttctcatgtgtccttagcgtggctgcgtgagaattttcggaatttacctgctgatcctgatgaagtgacgttgaagtgtcacactagagcttttgtattagctttgatgagtggttttgtttatggagataagtctaaacatgatgtggctttgacgtttctccctctgctaagggactttgatgaagtggctaagcttagctggggtagtgctactctagcacttctctacagagagttgtgccgggcaagtaagaggactgtttctaccatatgtggccctcttgttctgctgcagttatgggcatgggaacgactgcatgttggtcgtccaggaagacttaaagatgttggtgcttcttatatggatggcatagatggtcctttaccagatccattaggctgtaggtaattgatatttgtcatattggttcagtttgtttttacaagttcaatttcaattatggtttgcttatgaaactgcttgaaatctaggtggagggcttctctgagtcataaagagaatcctcgtggaggactggacttttacagggaccagtttgaccagcagaaagatgagcaggtataataaaataatggcgtagatgaccgagctttgaccgttcagtttaggatagcagaggaagaattacagaccaactcctaatctagacaacttttgtctgtcattcaaggacttaatcttttcagtcatagcaatgtattttgtaaccgtcactgtgcccgatacttaattcagaaacacttacagtgtaagtactggtctcttatagcacttatagctaagatagtgtgtagtgatgggatatccaaaatggttttgtaatactagtttccagacgtcgtagattaccacttatcaggcaaaacttctttatttttccctccacacatgaatattttatcaacagatctctgatacggtaaacgacgtgtgaatttcttttatgatgtggatctaggttctatggcagccttacactccagatcttctagcaaagattcctctgatatgt

SEQ ID NO: 16137 - DNA, 594 bp, Arabidopsis thaliana
ggatcccatttggaatcattctcgccgtgatccggatctttcttggagccgtcctcccattgtgggccacaccttacgtctctcagatattcggtggccatatcatcgtcaaaggaaagcctcctcagccaccggcggctggaaaatccggcgtgctctttgtgtgtactcacagaaccctaatggaccctgtggtattatcttatgtcctcggacgtagcatcccagccgttacttactcaatctcgcgcttatcagagatcttatctcccattccaaccgtccgattgacaagaatccgagatgtggatgcggctaagatcaaacaacaactgtcaaaaggagatctagtggtttgtcctgagggaaccacttgtcgtgaaccgtttttgttaagattcagcgcgcttttcgctgagttaacggataggattgttccggttgcgatgaactacagagtcggattcttccacgcgactacagcgagaggctggaagggtttggacccaattttcttcttcatgaacccaagaccggtttacgagattacgttcttgaaccagcttcctatggaggcaacatgttcgtccggga

SEQ ID NO: 16138 - DNA, 516 bp, Arabidopsis thaliana
ctagtaacgtccgccaataccactcatcccagatatagaaaccacttgaatgttatcattctccaccaagtgaccagccaatgcttcaacactctgttccacccccacaaggtcgctttcagaactgttagcaaacgtttgccggatctccttttgctccctttgtctttcttgcagcgacatcgaactagcaccatcgataatctcttgtattcctaaactcttcattcccccaatcacctcggaaatcttctaagttatgcctttgatatctgaagcaaatttccggcgatccactaagaagcaagcaagtcttctcgcatgcttcttgatccctttttcttttgttctaaattcgttcagaagaaaggattcgattatatcctcagcatcataaacaatgtccctgacatcttccagaaagtttctcaccctttcactttcatgtttcttggcatcggcatctttcagcaatgactgtaaccttcccagctgacgctttagtccatcaacttg

SEQ ID NO: 16139 - DNA, 341 bp, Arabidopsis thaliana
gactcttacatctttagttaaatcaaagaatgaaaaccgcttcattttccttgtatttgtctgaggttaggattagaccattggttgttactttcgaattcttccaatttagttgttactttcgaattcttccatctcttagtttactaaaacaaacttatgtgccccatatttctccaacaatttgttgagtggtagcttacgttttactgtatacgcttttgcaggttatatcagcacaaccattaatgatggcccgggatgtttgatgctaagatgtcctgacccatcttgtcttgctgctgttggtcatgatatggttgacaaattagcgtctgaag

SEQ ID NO: 16140 - DNA, 758 bp, Arabidopsis thaliana
gggtacgagctcgaattcatatagttgtttgagttatttgattggtggtttcggagagattcgttaccttgtttcaatttctttaacatttcttcagaatttgaatagatacatagatttaagactttgttttcggggagtttatagcaacaagatcctagtttgggctatcgttgagaacctataaggtgccttaaagattctagagcatattgtggtcactgaaagtatgcaaggaaaaacgacatcatccgactgtgtgagataaattagaagcataacaagcgcataaaaaagcacgacaaaaattgttggtacatgttgaaacaagcccttcttacataaaacaagaatctgaaacataatcataggcagctttaagagttgcaaacttggacaaacaaacggatggtgaaagaagctttatgaaatagatattaaactcgggaaataacagacaggatgaccgatggagtcagcctcgaaagcaacatcatatgatttggtttcgtcatcatgtaccaccattgttcgttttcgtacacgacaataaaacaacaacttgttcttctgcgtcttcttcccatccaaaagtgctagtggcaagacggcgcatacttgagtaggaccaaaccaacgagaagttatatccagattaatggaacacattttgtgccatgtcttgttacctgaattgaatgaccatatcacttggttgggcagcttcatctcgggaacgcacaagcggttgtcgaggt

SEQ ID NO: 16141 - DNA, 486 bp, Arabidopsis thaliana
ccagatatagaaaccacttgaatgttatcaatttccaccataggaccaaccaattcttcaacactttgctccaccccgacaagatcgctttcagagctgttaggaaacgtttgccggatctccctctgtatgtcctgaagagacagcgaacgaccaccatcaatgatttgttgttgtatccctaaactctgcatttccccaatcaccttagagatccttttagtgataccctcgatatctgaagcaaccttgtggcgatccgtcaagaagcaagcaagtcgtctcacatgattcttgaccccttttccttctcctctaagtttgttcagaacataggattcaattatatcctcagcatcaaaaacaaggtctttgacatcttccaagaagttcctcaccctatcacttccatgtttcttggcatctgcatctttcaacagcgactgtaaacttcatcagctgacgctttagtccatcaagttgctc

SEQ ID NO: 16142 - DNA, 668 bp, Arabidopsis thaliana
atcataatgggatcaattttatagctgaacaggtgagtgatttctttacaactcatattccaatgtgacttgggaaaattatgagttcttagttgacatatgtcaatgttttgttcctcaggtctgccatcacccaccaatgagtgctggtcatgctgaaaacgagcatttcgcttacgattgcacttcaaaactgaaaacgaaattcctaggcaactcaattgatgtctacccagtaggaaggtaatatctcctaactatgtatttatatttaagagtctccttgtgagactaaaacactgaacttttcagtcaatgaatatgtgtgcaggacacgagtgacacttaaaagagatggtgtcgttcttgatcttgtacctccactgacaaaggttcataaccttatcttcggtcgaacatgggtcgattcgccaggagagatggtcatgacgaacctgaccactggtgacaaagtggtgctttactttcaaccatgtggctggtttgggtaagttctttcttcatcaaacttaaaaaccttcaaacaaatctgatcaattgaaatctcatctccatgcttctccatttagagctgaaatgtggacctaatggacagatctggacgatatgaagtggacggttacgtgtataattcagctgaagagcca

SEQ ID NO: 16143 - DNA, 939 bp, Arabidopsis thaliana
tgaaatcaaattcaaaaaaaaagaaaaaaaaagaacaaaaattaattagtaaatttgacgagaattaaatgggatattcgatattaaacaactaaccatatattaaatcatgtaaatgtcaatcattaagttaagattcggaatcttaaaaaatattacgtggattgcaaccactatttaataatttcaaattctacaacaaggtattcaagccaatttctatattggaaacttaaatttggtaactagcattatgcatattctctacatattcgaatcttaaaattttgcctaaacctaattttcaatcctacttatattgtaacttcacaatatactaatcttttctaaaatcgtggtattaatttatggtgattttaccatgatttttttttgacgtatcttagatttaatgtttgatgagtctttgatctccaagaatttatttgatcggcaaacctaaacacctaaactaaacatctctataaatatagagtttcattagactttctaactcatcaagcacttacctcattccttactaaatcataatgacatcatcggagggattaacgagtgttgacccttggtcattctgccaaaattcaacatcgattcatggctaacctttggttccttctttcacgacagtgatttactcgctaatgctcttcacatatccatctccacttccaccttatctttcttcgattcttcaaccgccgccatcgtagtctctgatctttatcctcctcaagctctcactaacgtctgtttcggcgcaaatctagaactcgccgccgccggtttgttaggtagattgtggtgcagttcaatgccgatgttgcagatgagatgcaatggaagttcacttcatcacagagagaggtttagactttatatctcaagaagagtgttgtgacgagttagtgttttttt

SEQ ID NO: 16144 - DNA, 1095 bp, Arabidopsis thaliana
taacctcgtgttccacgactcttttgatcagaagcagaagcatctcttggtggggaacatcaaggtttcagatttgacccttttgatcgttcaagggagctggaagttatcttatcagacgagtcccactctgtgctcctgatcatcaattatccagccatccgtagagaactgcatctgctatggtaggcttctcaaggtttcttgagagatgggcttcttgaacccttaaataaggatcttggattcttaaagtaactgaggaatggtgtctcagaaacaggtatgaattttgtgaaaaagccgatcggccatgaaagggatgcaagtgctatgcaagttccccattgccacccgttaagccttactgtatccgcaaacttctttaggaattccaccataatgacttgaagcacaatagttatcgctattattccaatgaacaacctgtttctgtgaaggcctttgaacacatttttcttctccatctccctcgcattgaattcgttaaaaacttgacagagcacgaaagtgttgaatatgagcgtgtccttcacttccttgcgaacactgaatattgacatacccttgaattgtaagatcaagagtacggctatttgatataatgactgaaccaggagattcctccacatgacatttgttatcagggcctctgttcggccaactggctttctcttcaggagctcgttagtgggtcgctccgtggcgagacagacgctcccaatgtgtccatgatgaggtttacccacagcagttgaactgctgtcaaagggacctcaccggctgaaattgctgcgataaaattgatcacaagagctgcaacgttcactgttagctgaaactgaatgaatttctggatattgttgtagacacaccttccccattttaagactgtggcaacggatgcgaagttatcatctagaattacaatgtctgagctttcttttgccacttcagtgccctgaattcccatagagagtccaatatctgcttcttttagtgcaggtgcatggttggtgccatcacctgtgacggctacacatggcctttaaagctcagacacttgaccattag

SEQ ID NO: 16145 - DNA, 650 bp, Arabidopsis thaliana
tccttcagaaaaccctcgaattcgaaaaatttgctgcgagattgataaatgactagttaaagatttgaactttgatttctgggtttgcgattttattcaaatggagagatctagatccaagagaaactaccactatgaccaagactatgacggagattccatgcctaggtctaaacctcgctacaacaataattaccactttggtggtggcggcggaggaaataacagataccgtggcggcggcggtggtggaggtggaaatggccggccatcgaagtctcatcctgaaacgatggcaacaacgacttatcgaatcctctgtcacgacgctaaagcaggaggtgttattggtaaatccgggacaattatcaaatctataaggcaacacaccggcgcgtggattaacgtgcacgagctagttcctggagatgcagagcgtatcattgagatttctgataatcgtaggcgtgaccctgatgggagaatgccgtctttctctcctgctcaagaggctttgtgtagtgttcatgacagcgatgtcggagagtgaactcagtttggttatggtggactcctgccgaagaggaggaggattacggtggagttagacctggtggacggagagttgtgactagattagtggttctagg

SEQ ID NO: 16146 - DNA, 588 bp, Arabidopsis thaliana
tagtaacctccgccagtgtgctctaaagacacatataccattatattttccaatataagaacacaaattacgaaactcacagaccagccagcgcagatcttagtttcccccagtgatccgctcccaagcctccctatacttttcactcgtcttctgcgcaatttcatccgtcatccgcacgccagacttgcccttaagcccttccttcaccaaccagtctctcaggaactgcttatcgaagctctgctgtccacggccgacctcgtacgaatcttttggccagaaccgagacgagtctggcgtgagacctcgtccgccagaacgacctcgttcgtctcctcgtcaacgccaaactcgaacttcgtatctgcgatgatcacgccccgagtaagcgcgtagcgtgcgcggtcttgtaaagcgtcacagcgagctcggcgattttcgatgcgtacggttcccctacgatttcgacggctgcagcgagagaagagaattagtccacttatcaagcactattgtaccgcaacaccaatctgaagagaagcaaagcaatgtgatagaggatccgcaactttatccggatggata

SEQ ID NO: 16147 - DNA, 489 bp, Arabidopsis thaliana
caaaacccagacatcatggataatggctgggcttaattgagcgtagtcggttatcgccaaacgcgccatcaatggtatgcatcgcgccggtaacaaaactggcttctggccctgctaaccatgcgaccataccagcgacctcttccggttgcccatgtcttttgatagccatcaaactatgcaacatatcgcgcattgccccgttggcgggattagcgtcggtatcaattggccctggctggacgacgttaatggtgatcccacgcggtccaaaatcacgggccagcccgcgcgccatgccttgcagggcagatttgctggcggcataagcagccatgcctgcaacaggcatacgatcgccattcacggagccgatgattaagatgcgcccgccttcgggcatctgccgggcggcttcaacagaggcatgataaggagcatgaatattgattttgaaaaggcgatcaatatcgtcggcatttaattcca

SEQ ID NO: 16148 - DNA, 1205 bp, Arabidopsis thaliana
acgattctgttctttgtgagattctaattctcataatttagatgaaagttaacaactttctatataaaaatacaaacgttatactaataagcatgttctggttcatcttcacaagtcaagctcatgacaataagcatgattctgaaactatgattttaggtaagaagtagaaatccaacgttgaatctcctacacattctccaaactctacaatctccactctataaattacaacaccatttgactccaaacatcatcgaacaaacaaacaacttcaaaacaaaaagaagaaccatctcttgttaaacactccaaaatcagctacaatgtcaatttcaagagtttatctctgtctaatctttctcacattcgtcagttccccacttgtgctctgctctcgcagcccgaaactcgcagcagcatcagcagcaatagggaagaagcatgggaaagaacatgttcattctccggcaatgcttttttctgaattcccgaagggttgattcatcatcctccatgacacatattgatgagcctgcaacaaagtctgcaatagccggttttttcaggtatagactaccattccagggatggcctttccacaagtatgctcctttcccaatgggtacacctacgaatccttccgttcctgtaacttcaacaccgtcttctggagctgctgctgctgaggaagaggaaaccgagaaggtgccttctgcgccaagcaaaggaaacagagatggaggcaatgcgtaatgaatcaatatgtgttctactagaaccttattgtgttttaatgactgtggaatctttcctctatgtttacatattgtatcaaataaaatgtaccatgtattataaatgctatgtgacatttacatggaaaaatgaaatgaatacagtttctcttatctaccaagctctgtgtatatattaccagcttcattgtttcgaggcgattttcactgtgacagacaccggaatacgaacaatgtgtcccgcgtttcctagcagcttgatccctccaaaactagaaatagagctgttcctctttgctgtgaggattacactaagtagctttgtctctccactggctatagagaattgagtaggagatacatttatcaaaacatcaaaaggagtaatcaaactgacagtataggtctcatttccagcaatgtttgtcattagtctttggaccgttc

SEQ ID NO: 16149 - DNA, 517 bp, Arabidopsis thaliana columbia
caaaagattgtatgcatgtttggtggatcacatgaagcagcaaacactcagatggcgtctggaatgaatgaggatgttttgatgaagttagccaatgagatttacgagaatgattagggttttaagtttagcttggaacatgcttggagaatattaagacctcatcaaaagtgatgtgcatcactgcctactgaagtagctatcacgagtaagaaaaagaaggctgaggcaaagaaggctgaggaaaatgagtctccatctgttgtgaatcttgacgatcaccatggagagactgaagctcgcccacctagtgtgaaggctgccaaaagtaaaggtaaaatgaaggccaacacttcagcaacaatggaaggagatgagaagccaacggagaggttctagagtatgtgggaaataaataaagaaggtttgtctttgagagacaagctcaggaaaaaaaattgctagacaaccttctagtaacacaacctcttagtgcaatagaggaattagagacttg

SEQ ID NO: 16150 - DNA, 944 bp, Arabidopsis thaliana
ttcgctctaataatttacaagtttttttttttgttgcttttatcctataattcagactcttataaaatggggcccaatttcggcggatattccaattttttttttttttttgccggcatccaatttctttaggcttctgcatttaccgaatatatttctttgagatggcccaaatttcgtgagatgaacttgaaaaatgttggaacagaatccaaacagtattcaaacggtataactaagagaaatcaaaatcaacgtattttgattcctatatgtcatcaagtatactaataaaaaaaaaaactgaatttagaactaatccgcaaatctgattggatgggggcagcaccagtacaaagagctacagttcccgatttaatcataattaaatacgttgtaagaaaaatgaagaagaagttaattaatagtagatctccactacacttttaacaattacatacactcaaaatcttagcggcattttttctaaaggtttcccaaagaaggagagctcactttatctttcgtctctcttcttaggtctagggttctggtggagaagattgtggttgtttcttagggttttctgagagaaagcatgttgttaactacgggaagaaaggagaaactctctgtttctaaaggttctgaaattgaaatctcgtctcaagagtatgagtatggtagtggaaatgtctggtattgtgtcattctcgaagaaaatctagctaaatcgaagcggaagaagctctctgtccgtcacttggatcctctgctcaagtatgattattctcctccgttaatcaaaaccaccgtgcatcgtttcatgcgtccagttccgccgccggatccatttccagaggtcgattttgaggaaggtgacgtggttgacgctgcttataaaggtggttggtgttctggctcggtggttaaagttttgggaa

SEQ ID NO: 16151 - DNA, 515 bp, Arabidopsis thaliana
tcttactcacccggcttgggcttggaacaatttctcgacacgttttggccgtaaacgatcggaactttgtcccattgagattgaatgtattaactgatataccctgtataaagaaacagagtatcaacgactcttgaactttgtcactaaatctgaactaggatgtgaaatgacgttgtcactagataagaaaatgtaccgttaatgcttttccgttaccaagaacgactctgtcaatgaactgccggtccgtaccgctggctgcaacggttatcatccatggcgatacattagccaccgaaccttgatcaggcccattgttcccagctgaacctgccgtgatgattcctctcatcattgcgtgaaaagaaccaatggctacagaagcgtttaataaattggagacgtaatcggctgagattgagatcgagataacatcaacaccatcggcaatggcatcatcaaacgcagccagaatatctacatcgttgcagcggttgaagcagactttatat

SEQ ID NO: 16152 - DNA, 462 bp, Arabidopsis thaliana
taacgccagttcccagttcagactgagaagagtgtgagaactcctacaagctatttggagacgcctaaactgctgaatccgccaatctcaaagccaaaacctatggaggatcttacggcatcggtgactaaccgcacagtgagtttgcctttgagctgtgttactacagattttgggttgggagtaatctatgcatccaaaaaccaggaatcaaaaacaacgagggagaaaccgatgctggtgactctaaactcttctttagaacatacatatcagaaagatttcaagtctctcagagaaatactctctcgtaaagttgcctggcagaccgaagctgtaaatgccataagccaaattatctgcggatgaaaaccgactccacgcgaagaaaccaagcaagcggaatttggctggctcttcttggacctgataaagtgtgggagaagaaagtggcgatgactc

SEQ ID NO: 16153 - DNA, 890 bp, Arabidopsis thaliana
aatggcgtacatattagctaagaaggctagacaacaaaactggaaaatctggccaaagaaaattaaaaaagtcacaaaagaaattgacttgtcttgttaaaaaaattgtcaatttaatttcacgaacaaactaaactccacagctgccccaaaaagccgacctttagagatccctccactactttgtaacttcttcttccccaacttttcatgattcttctgcaattcaactttccaaacaatcatttgttctaaatctcttaaacacaaatctttgcttgattaaccaagttcgttgtccttagttgctgaattgtagcctatacgtcttctagtataaacccacccaaaaaaaagatcaaacctttgcttatttctctgttttatatccctgattctctgcaaattttcacgaaaggttcgatctttggtctctgggtcgtgatattttgagcttatttagctaaagcaaagacgaacgggcaatggggaattgcttagccaagaaatacggattggtgatgaaaccacaacaaaatggtgaaagatcagttgagatcgagaacagaagaaggagcacccaccaagatccgtctaaaatatccaccggaacgaatcaaccaccaccttggcggaatccagcgaaacacagtggtgctgcagctatactcgagaagccgtacgaagacgtgaaacatgttctacactttgagcaaagaattgggtcgaggccagtttggagtaacgtatctatacacagagaagtcgacggggaagagattcgcttgcaagtagatttcaagaagaaacttgtgacgaaaggtgatacagaagatatgaggagagagatcagattatgagcatttgagtggacacttaacattgttgag

SEQ ID NO: 16154 - DNA, 884 bp, Arabidopsis thaliana
tcgactctagaccagcatgtgattgtcactctattagatagacagtttgatgtctatatctattaacttatctatcactacatatgcactaggtgggttactaatcactacaggtggatagtctggaaacttgcatgctacgacatatactacccagccaaatgcagaggaaactttctaacaatcaccaatgttcttgaggaactaaaatacaggtttcccagtctcacaacacaactcgttacttaaactcatgcaaagtctaacatggttaatcttcttaatagatatgagaagaaggtcatcatggtcattgtctgcaatcaggaggattctgagtggtgatgctccagcttcttcaatgatggtcctctgcatatcagctattaatccaaggaccgataatggttctcaggaagcacattgttctgataattgcagcaatgtgaaagtcgaactcactgatgggtggtatgaaattgctactgctgttctgttacctgttttcttgtctcattgccataggattttcttttaaatcacaggtactcgatgaatgctgctctggatgtcgtgctaaccaagcagctgaatgctggcaaattgtttgtggggcaggaagcttcgagtaagttatatcattgcaggatatactttgttttgcaccacagattttgggttggatcactgacttgcagcatgcttacgttcttatctcttatctgaagatcctcggggcaggactttctggctgggctaccccaacatcaccacttgaggtttcctagactttgcattttataagattttctgatatcttctcaggttggtttgttcttagagtttcgttcaaccaaactttaggtttcatctttgacactttc

SEQ ID NO: 16155 - DNA, 484 bp, Arabidopsis thaliana
tacaggagatggatggttttgacagtagctctgcagttattgttcttggagctaccaatcgagctgatgtcttagaccctgccctgcgtcggcctgggagatttgatcgtgttgttacggttagtagaatatctggctctgtatgatcatgcaatgtaatacattgtcaaagctatctgacatttaatttcaggtggaatcacctgacaaagttggaagagaatccattttgaaagtgcatgtttcaaagaaagagcttcctttgggagatgatgtcaacctagctagcattgcctcaatgacaaccggttttactgggtaaaaatttgtattttattcttgaccgaaagtttcttacctgcttttttctgtatatttcgttaacttttatgtttggtttttatagggcagaccttgcaaatctggttaatgaggctgctttgctagcgggaaggaagagcaagatgactgttgataagattga

SEQ ID NO: 16156 - DNA, 523 bp, Arabidopsis thaliana
gctgactcatctaattaaaacaaaaaacgtacgatttcaacatcgacaaaattatcatattttgtgccgacattcgatgtcgacagtcattaggcctagtcacagcccatttgaaaggctcggcccatttgagaggctcggtacaccaaactagaggcaaatccactcaatactatacattagacagagtgatacaacaaaatccagagttgttgttagttacacacacagaagagaacaagaagactataaacaaaacaccatcaagctgaaatgttcaaagtatgtgtgtaagtgtatattagaccggtttccacacagacaaaacctcttgaaacatctccagcatcagttctcgatcagcttgcctgaagaaactgctgatttcttctctgacatcataaatctttccgaaatcaaacaaatacatcaaacaccctttcttcagtttctccagctgataaagccaagcttctttgtagcctctcgagcacattactcgagtttatatcttccattaggc

SEQ ID NO: 16157 - DNA, 734 bp, Arabidopsis thaliana
ttacgtaatcaataaaacagcgaggttatagagataccgctattgatcgctccacagcttgaatgaagtcaattttctcaacgttcgtcttgttctttcttccagctagcaaggcagcctcatttaccaagtttgcaagatctgccctgcaaataggacaaaagagtttatgagatatacacccaaaaacgtataactgaataaacttcaaatcattgataatatacaaaagcgtaccccgtgaaaccagtggtcattgaggcaatactaccgaggttgacatcatctcccaaaggaagctctttctttgacacatgtactctcaaaatggattctcttccaattttgtctggcgtttccacctgaaaaatgcatcagtgcctttgaaaaaaccatattaaacatttacaaataggcagagctgatccattctaccaaccgtaacaacacgatcaaatctcccaggacgacgcagggccggatctaagacatcggcacgatttgtagctccaagaacgataaccgcagaattgctgtcaaaaccatccatctcctgcagaaaagtttccaacatgtgaatgggtcatggaaagatcaagaatgctacttacacaggaaaggtgcttgacagcagacttacagtgagcaactgatttaaagtttgctccctttcatcgttgctccccattcggaatttaccatcacggctttttgccaccagcatctcatctgga

SEQ ID NO: 16158 - DNA, 1030 bp, Arabidopsis thaliana
ctgcttgtggctgatgaaacggtgccgtctttgttggacgaaacggggttggtttgtgtaacgggaggttctggtttcgttgcttcttggctcatcatgcgtctccttcaacgtggctactccgttcgggccacggttcgaaccaactcaggttcgagttaattaacttcactttctctttacttatacactttgaatcatcatcactgattaagcaaatgccaataaaattattgttgtcatatatggctgattggtccgttttaacataaagtacataaatagaaagatagattatagttttttttttatatatagagagagataacatttaaagttgatttttggatcgacaattaaaaatatatatatttttatggatgtgaaaaatttattgtacttggctggaattatctgtcagtttgtaggatcttgaagcttcatagctatgtaaatatgtcatgtttccatgcatcttctatagaaagtcaaccatatattttatgatcaataactaataagtaatcacggaccataagatataaatgaagttaataattcataagtttgtttattttatgcatattacagaagggaataagaaagatataagctacctaaccgagctaccatttgcatcggagaggcttcaaatattcaccgccgatctcaacgaaccggagagcttcaaaccggcaatcgaaggatgcaaagccgtattccacgtggcacatcctatggacccaaacagcaacgaaacagaagagaccgttacgaaacgtactgtgcaaggtctcatggggatactaaagtcgtgtttggacgctaaaaccgtgaaacgttttttctacacgtcaagcgccgtgactgttttctatagcggtggaaacggcggtggaggaggcgaagtagacgagagcgtttggagcgacgtcgaggtgtttaggaatcaaaaggagaagagggtgagtagctcttacgtcgtgtcgaaaatggcggcggagcggcggcgcttgagttcggtgggaag

SEQ ID NO: 16159 - DNA, 806 bp, Arabidopsis thaliana
tcctcccggaactcacgatacggctcattaacaggatacgcaatgagctcacgaacattcataggttggtaacatttgggccgctccaaaagatacgatgatgagaaaacgcttcttgcgccttctttttttaattctggaattgccttttaatatgtggttgacaaaaaaaagaaataaatttatgtaaaagttttgtttcttttaaataaaagatttgcaaggggtaagagttgcagagatcaatcttttattatggaggaaaactcactagagaaacatgaaaacattggaaattaaaactactcaagattccgatattgatccagttataatttgactcataacccttatagaaaccccgatcgatccctaaatattgattttagagactcagtaatactcgtaaccgcggctctccctgagttgaacggtgcctgacgttgggtgcacccaagactcacgcataggttcatcggcagggtaaacgacaagctcacggatgttcatcggttggacaacatttgtatcggctccaaaaagaagatgggcaaacatttcttgcgccttctcggagttgtgacgtccgtcgaagaataggtaagaccgttggtactcgcatagcttcgaatgtacgttaggaaaaccgcaaccataagcatcatgtgtcccaactccgcagcacgatgcgttcgtaacggtgaatcctaagactggcaaatattaaacacatggtattagaagttatgacagaatttagaaatgacattaaaccatgataattaccaactcacggaagttttggt

SEQ ID NO: 16160 - DNA, 644 bp, Arabidopsis thaliana
tcctcccgacgtgcctccaggtcctcctcccgacgctcctcccggttatctcctcctccagacgctcctcctggtttatctcccgacggtcctcctgctcctgacatttctcccggtttatctccagacgctcctcccgacgctcccggttgatctgctttggttggggctcctttcggagctggattgttcttcggttttactccaatcctatgtctacatcacacacacaagtgtacatgaaactatttagattttttttgtgtgctgaaaacatccattattcaacattagaaccaataaaacatgcattatgcaggttcgttgtagatgcacacatgccttataatatatgatatgtaagacgtttgataaatagtggatatatgagatgtgcacctcgagggtttgaatagggttttcaaaaaactttagtcatggaaaaaataatagtaaattgaataaataaattttacttaaagagccaaagtatgagagcaaatgccgtcactcctagggcaactgcagcggtagcccctccgactaggaaagtagtggctatagtggctggtacgagaatcggactgaagatgacaaaaagcggtgtggctatggttagcccacaattgaggcccgaagttata

SEQ ID NO: 16161 - DNA, 802 bp, Arabidopsis thaliana
ttactttgaatttcagctctatgtaaaaagaattcatctttgaatgaaaaacagtttccggaaggaaaaaaagaaggaatattacatagttcaaacttaacataaatatatctaaataattgatgcgaaattcggtggtgtggtgctttcttttcttgaacattgattaccgaagattttttatcaaagatcttcaatctttccaaaaaatctttgtaaagcatcatctttttttgactaaaaataaagctttcaagaaaaagaaacgaatattacatagttcaaaattaacataaacgaatctaagtatttcactgccttgaataatgaatcaaatgaactgtttctttctttctttcttctccatgagaagaattatcatatcatagatctattccaacaaatgggaaacaatttaaaactactcaaataatcaaaagaaaattataaccagaaaaaaagagaagcttattgtcgccaccatcattcatcttcttcaacataattcaactcttgtttttttcaaaagtcatagtccttgaacaacttcttaacttgttcaagcgtaacaaacaaaaccaccgtgaacggtgcttgtctcgaaaccgtcgggataaaacctttatacaaagacataatcccttccgctttcaccgttttcaaagcacaatcaaccgctcctttatacggcggacgaactccagccaccaccttcatattcatcactctcgtcttaatcacatcaacaggattactcgcaacgctcgcaacaaaccccgccgcgaaactcgccgacacatga

SEQ ID NO: 16162 - DNA, 605 bp, Arabidopsis thaliana
gtaacatgacatagagactactaagcttaccaacagtttgtgcctttatccaggtatagtccaacaggcaccaagacttgggtaagcaaggtcttgtttaaaacatttgcctgatgcagcagaagaaaaagaaacacgataaaaaacaaagatcacagtaaggactcatttaagagttgaccatatgttgcagatttaagaaaagattataaacctgaatgattttatactagcatgcagtaactaacatgtttgttgagaaagcaacgactaacagtctaaacatactgaccttttatttctgagcagctttgacatagctctctggcaaatatatttctccacctacttcaccgtgctgttctccgctaatggttttctttgcgatgttgaattcttcactcatagcatccattccttgtctgattgcttcttcagcactgccataaccattctcctctgcatactttcggatgtcttctgttatcttcatagagcagaattttggtcacacatggagcaaaagtgtgcaaccttggctccatcagctggaagagtttcatcatggaaagacatagcagtcatggggtctacgacagagcaaa

SEQ ID NO: 16163 - DNA, 1479 bp, Arabidopsis thaliana
tggtggtgcggaaggggtgataaacttggggcatgcgtaagagaagagctcatcataaataccaaaggcctcgtcgtcagacctcagcatcctcatcatcttttcaccatacttgtctcgcagctgagagttgacagactcgtcaacgagtttagtttgagggcagagggagagggagagagcaagcaaagcgtacatctgctcattcttcttgagtaattgctcgtactgaggtgacttttgatggtactgcttagtcttgaaaatgtagaggagaatcttgttgaactcacgaacagcatcgacatacctccgcaacataagggtggcaaatccatagtggtagatagtagcgatatggcaaccaatgacactggtgtaaacacctggctgagtgatgtcaatgggctgcaaccatttgagagcagtgtggtagtcacgaggaggcagtgaacacgcaagagaccgaccatgctgaagtaaccgaggaccttcaagacgttgctgccaccgctgaaatcgtagccatcagtctcagtgaactcaaggccatccttgtcatgctcaaggatctggatgatacaagacttctccacaagtgcttgcaagaagttgagcacgccatagacattccaggccttatcgtgctgtctgagcaatgcaatctcctcctctgttttgttcttgagctttgctctgaattgacagaaactttggaactggtagacaaactcatccaccatatcccacaaccactggttcggcaactgcatattcactacgccgtgcaacacaacctagaaagaacaaacggaagaaggtctacttacttgtatttattcccagccaatacatacacaaaagaaatcaaaatcaacaacatctctatctaacaaggaagaagaagtagaagaattccacaacagacctgaaagaggctgcaatagttgtcataagaatcaatcctctgcttcaacgtcggagacaacctcgcatacaaatgtcgaaaccacatctcacggtacagaagacagaacacatggtcgttgtctacgtaaggagcaatcgcttccacacttggccacggcgtgtccttgaacagacgctccgatatgctctggaacgatgtctcacacatctggtggatctcgtacacgttcttgtcccttatgtgtctgtacatgtgtgacacgaacgatttcaccgaatccggcaccatattcgggtcgtacccactctccctctcccctggaccttcctcgtactcattgctgctcgccattctcgccggatcaattcttagcggccgcaacaatgttaactcttcaactcacttccaccgcctagggtttccttattaccaccgggtctatctccggtttgcttttactactaaatgaacgattaccaccggtttgtttatatctcgatttatttttcggttgtttatctattttaccgaattagaccaaaactgaa

SEQ ID NO: 16164 - DNA, 1051 bp, Arabidopsis thaliana
tgacgtactttaatttgtgcattatctatgtattcattcatatgaaaagtttgctgatatggttatcgggataaaagataagactagttacataattcaatttatttagctcatattagacatttaattcatcattaatagctgaaacaatattgcaaataccttttattagagagcccttgaggacttgatgaggtattttctcttaaaataagaaaatcatttatattcatctggacatttgagtttcttacttgatggatctagaacaagttgtcactacaggttttgagtatttttttcacatgcgaaactcacaaccatgtcatgaccaaaagatacaagaaaaaaaaaaaagtgtttcattagtttatgatctgaatattgttcccattgtgaggatctacagcacttgccgcctcagtcacaggcactttctttgcaagagacatggggatgtcaagatcatcttgagcacatctttgttgaggatgagttaacagcattgacattggcttgaaaacagaccgtgcaagcccttgaccgctctcaaatatgtaaccttcatactctgaaacatgttctactgcatcgacaagagagtcatacacatcttgtggacaattatcaggacttggcttgtcgtgcaggtacataacatccaacgtgaagagcttctggtttaagggccactcatgggttggtctcatagatgacctacagtatatgagaatctgcagggcgacatgaacaaaatcagtaaaacatcgtttatttttcaggctgtggctagaggagattgtagtttcacaaaataaaccttaccaccctgaaaattcggttctgtgctctggaaactttggcttcctgagctgctgctcggaagagaagtgtgagatccgctcgactagaggatttattacctgacaatcctctaagggaagcaacagcagattcagcatcacttgtgaactcctttttaagctgaaacataaaaaggcctcaagttcaattttcaaatgaaacaatcagcacagataatagtgtagag

SEQ ID NO: 16165 - DNA, 833 bp, Arabidopsis thaliana
aagtgttcaacgaggaaacaaatgcctatcggattcacggttttgtggagtctgcgtcgtgatcgtgtgcgatttgggacgggacaattccgttagtctctttgccttgtccatgttggaattgctgttgtgtggtagttctggccgagtacggatctgagctgctggtttcatcttatcgagccaacgaagaatccaatttccgagattcctaccaacttctatgtctctttcttgtatgttcttgtgaaccgaaatcgccacatcgaagattttacgagtcctcctgaaaacaaatcaaaaagaatgcacaagagaaagagaagcatagtcaatgcataaccctaaatgaatgaatctaagcttctgtcaaatctcacaaaacacaatcatgatactaattttctaatcacaacgattcgaaatcatcaaacacaacactagaatcaacataagcttttgttcttgattctaattcctaaaaatcaatcacatcaaaactgctacaatttctaaagatgaatcgatttcaagtctcattgattggtttgagtaaacgattcgaaaacctaaaccgaatcagcaatttcaacaacagagcgacgcaatttcacattctggaaaaaccaaatttctcaaatgcgatttcgtatccaacgacatatttatcagaatcgaaacgatctcgattagaaatctaaccgatgaagaaattgacggattttgggatgtttcggagtaacaagccgacgctggatcttcagagcgagcctataagtccgtctcagtcccaagaagtaagctgttcctagagttatctccaaaacaccatc

SEQ ID NO: 16166 - DNA, 629 bp, Arabidopsis thaliana
  unsure (1)..(629): unsure at all n locations
cccctaaaagatctgtgttcttgtctcatttgatgaaacaatcagcctctccttccttgttccagaatgcttaggaagaaatccaactgtattaaaaacaaagtagttcagaaattataaactttatataaagccaggttcgcatcaggttgaccggtaaatcggagaagaagttaccgaatgtgaactcatctgtctccaaaccagatgcagaaagagcagcaactacagcacaagccccagggattggaatcacatctatattttctttcgcacacattttagcctgaggaaagatgatagcacttgtttctcatactcttcagcttataagtgactagagaacattttcagactatgtgtaacacactagtaagtaagttgattataaacaaaactagcctggaaaaaagctcaaaggagaagctataatatgcactcacaagttgagtaccgggatcactaattcccggtgtgccagcatcgctgataagtgcaacaatctctccttgtttcaactgtgtcaacaccgcttgttctctctgagcctcgttgaacttgtgataactaagctacaaacctaaacctcataaattcaaaaccatcacatgataaaaaccanagagact

SEQ ID NO: 16167 - DNA, 1895 bp, Arabidopsis thaliana
  unsure (1)..(1895): unsure at all n locations
cacggtcccagatggctctcaactagataagctttgcacgaacgtcatagatgattgcctttcgaaccatggatcataaggtgagtaccctcagggtagacctacataatcaagcaagcaaagatatactattaatggcgcatcaagatgacttttgtaaacgactatcaaaactagactaagaaatcaaccttgtttacttaagctagatgcggcaaacacaagattcactactaacggtaagcctaacctaacgtgagctatatgccgcaaacataagattcactagtaatgctaagcctaacctaacttcagctagatgtcacaaccacaagattcattgtcaatatacagattcagaagaaaccaatttttgcagggactaaccttgtctttgataccaacaagccggttaaagacaatggctcgatgacctccatcgacattgtagagagtgtgcgtagcaccgtaaagactgagccccccaataaccaccgcagctataacaccaccaccaggacctttgggaactttgacattcttaaaattcatcttttcacgaacacctgcaaatttggaacccaatcaaaatccaaggcagaaacagataaatagagaaacgaaatgcgtttgtagattagacccaaggaaaacttggatcaacgaaaaagagacaaagataatctgcaaattagctgaaacgaaacaaaaacttagatcacaaaattgaagccgaagaatctgaagctttactcgcttaaactaagaattcgatctataatgaaaatggcgagaggaagtacctgaaaattctggaaatggcgtggagaagagagaagagaggggttagggtttaaagctcagaaatcaggattttgttgacgctttggtcgatcacgcattttctgttactagagatctttgggcccaaaatttgtattcaggcccattagtgaattcactaatttatttatttttcttaatatattttttttttagtaaacgatttttatttatttttcttaatatataaacggccatatttgacatttccttactttctatacaaaagaaataattctcattttgattaatagatagtagattaattattatcacttttcaaaaatgtaactttcaaacccatattttgttgcaaactgcaaaggctctaaacttcttgatgatttactactaaacctaaatgaaatttcttaacttatataaagtgagatatagatgatgtggttattttgttgataacttactttggttcaaaattggtcatcatttaataatacatgtatttaaattcaaaaaaataatacatgtatttttataaaggaaatttcaaaaaagaaatatcaaggcatagatgaatcaaatcaatcatgcaaataaatgtttgtttttcgggaacgtttccctcgcttttagttaaaggttcaagcaatatatataaccgagcaacaaaacaatgcaaagctaacaacaatccctagacttgtcctcttcacgcttgatccggcagatttgtgctcatcatcagcagctggagaatcggcatcagacgatgaagttgaggatttcggggcaggagctccggtgggagtggtctttgttccgaataactcctccggcaacaacacactgtccaccacgtaaactgctagaggaaactgttgccttaatgcattattgantccgagtctcaacaacaccggtggaaacattcacttggttgctttgtgcttgtcctgtgaaatttaacccaaaaacacctccgtcttgtcccgtagcctgagttctaacgggattacttgctaagagaagatcgcttagagagtagtattttggaatgatatggtagagcatgagctggatttgttgttgat

SEQ ID NO: 16168 - DNA, 814 bp, Arabidopsis thaliana
tgtaaacgtcaatcccacacatacccaatctggtttaaaccaaaaacaacagaaaaagtgttgaattcaaatgattaacaagttccacacaaatctattgaaaatggttatcataagcaagaacagagcatatgaatctataatcataatgaaatgcgagaaacataagttcccagaagaagtaaaaacattagaattggcataattttacctgaacagcaatggcagaccaattatttgggaggttaagagtgatgatatcctttgtttgatcaccataagccatataaccacaaaacccgaacaacacatagacaaacgtaatcccggcaagcactttagctaacaatttagggaaagcttctctttccctcatagaactctccaaagccaacgtcattgcaaaaccctcaaaacagaacaccgcaactcctccagcaaaaggtaaaccaccaatggtagacgaaatagcagttctatcactaaacgagaagtctccttcaatcaccatttccacattttctttgacaacaaaacacattgctatgatgttgcatatatcagcaaagatactgaaaggcgagagagctgataaagaagtgatccacgacaatccaacttcgattggaaccagaatcaatatgaaagaaaccatacttaacccatacgaactaaatatggatgacaagtttcgacctatgaacactaaatacgctactgatccaccacattgagcagtgaaaatgaggaattcggttaagtatcgaccttttgttcccatacatttgaaacctaaatcaccataagttttcga

SEQ ID NO: 16169 - DNA, 598 bp, Arabidopsis thaliana
tcaaacttagctactccatcagttttaatcgtttcaagcgacgggctgtacacgtagttgtcaccgctctcttctctctcagcaaatttgcagaatcttgaatcacacatatcagggttcagaagatcagataatttgcagccactaacaatctcctcagcatttttcacaagctttgcaacccaattcatcttgaaaatgcgggcaagattcaaagaatgtgaaccgcagcctccatactccttaggagggcaagggatgctcccatcaccgttggcttcccactcaggaaacttgtatgaaaagtttagttttagtttgggagctccttttctatcttgtacgttttggttagtcccactaatcgtcactgaagactcttcccgtagatcttgacagcatctcaggcaaaggtcatatgagcagttcggacagtgacggtagtagtcaacaactggtatccgacacacgttgctgcaagaaacaaaacttcagtcatgtacgataatacaaagtgccaacaagaaatagttgcagtactaagtcaaaagaagaaaggcatgtaagatagatcacaagtaccagcacatctgctcac

SEQ ID NO: 16170 - DNA, 622 bp, Arabidopsis thaliana
aaaaccttccacagtatgattcgtagtaagtgtactaagatgatcatgtaatagtggaacacgatgcaactcatctttttatatcattgtattatgtttaacagtaacaatatgtttcccaaatacctgttttattgtaatatgtttccaaaaaacaaaaaaaaaactatacaagttctgcaaagagattgaaggtagagagagacacaaaaggtaagagttgctgagttttgcatcaggagctttgtgaagaaaataaaacgacttctctctacctttctaaatgtagtaggccatatacttgggtgttgcactgaacttttgataacctttaacaactttgttcactgcgtccagaaagtccttctcagtcacagactttctcctagctccgattgcatacattccggcttctatgcatacacttctgatatcagctcctggaaaacagattaacaaaaacccaagtcagaacaaatctcattgagacacccaaataacagcatgggagctttttgatggttgggatcattaccggttgagtttgggcagaggcagcaaggagtcaaaccggatgtctcttcacaactcattgttcgtgtgtgaatcttgaagatctgtg

SEQ ID NO: 16171 - DNA, 476 bp, Arabidopsis thaliana
tgatgtcgtcgcttggtggtggtggtggtggaggaggaggaagtggtggtggtattggtggtggcggcggagggaggtttatgacgtattcgtcgtctctttcggtgcctccttctgctcctcagtctcctaattactccggtggtctccgatcacagtcttctgtcttcgttgagcaagagaagtaatcgaatcttagtttttcatcttcttttatatttttgttttttattgtttggtgatcttttataattagctgatgtatctgatgaagtatgttgatctttgctttgctgattttgatttttagatcttaatagtgtatctcgaatctggatttttgtctttgttgttttcttttgattatattaggatctatgtttcggaactagctcagtctatttcagatttgtctcaatccagttcattttttgtaaagcataagtctttagtgtgtgaggatcatttcattggtt

SEQ ID NO: 16172 - DNA, 748 bp, Arabidopsis thaliana
cggtgtcgtgttttcttaatctcaattctgttgactttagctttggtaattgaaaaagaatcttttcgcttgcttattttaattccatatccgtctcttattatatttggtcaattatgtgatctgatctttgtgaaattttatgaactgcagcgcttaaagtactttgatggcattgggacacttgtgcagcatccactgtttccttaaaatagggaaacaagaagagcttcttgtcctagatattggtttgcctattcccagtttcttcctcattaactttattggtagcagagcctcatccatctggtgaacttgtgaagcttcctctgtgattcttttggcgattggttagaaatatggtttcttctcagtgttctgttgcaaacaaaaaccagactgggaagccgtttcagaaacatctatctttatccatcagccctccaaaatctgtcttgggtgataaccttgagcttcaattctctgatgtctttggaccaatgcctgaagctaactctgaagaggcctgtgatgttgcttacgacgagcctgctgttgtctacagtcgatcccactcattggttggcccgtctttggttgttagccattctttgaagatgaacaagctcactttacgagaaactgaggactcagttgacttggtggagtgtgttgaaggtgaatcgataaaagagaacgatgaattctctggtaatgatgacactgacagtgagaaatctccagagga

SEQ ID NO: 16173 - DNA, 381 bp, Arabidopsis thaliana
ccatctccaactgaaacgaaaacggaaatccccaaaatcgccctaaatatttcaaacgagaagctccagatggtgaagaggaagtaaagtctccgatcagaaacctttgagcgtttagatgaaggagatttgtctccggaaggagacgatggaggaattctcttgccgctgcttccgtcgggaagggttgtattgttctcgccggagatagattcactccgtcccggtgacaccatgacgatttcttgaagtcttgcgttgattctttgagagttagaagaaagaatcaatgcgagagagatgatgaatttcgaaacaaggaaacagaaatgtgctgagagtgtaatttgtgtatatatacgtataagcctttctcaaata

SEQ ID NO: 16174 - DNA, 659 bp, Arabidopsis thaliana columbia
aaaagattggtatcgtctttgaccttgaaaaccaatgctaaaccagtcagtcagtgttcatctatccaaattatcaaggaaatgatgagctgacagaacacctgtagctcaggcaaggctatagactcgaaggatgcaatgtccactttgtacttgccaacactaggccatgtcatcgattcttgactgccaacagagagaaacaagtagcctaattatctgtgagagggaaactagagatttaagggtgaagaaggagaaggaggatggacctagaaacaatagaagaagcaagcaaacttgtgcggccatccaaagtgaccacttgaaaaccaaccctttgtcctcgttccctcatctcttctgtgtgttagttataactaacggtatcataaaaaagaagaagacttgatgactgattggtgtttagaaagaggaagagagagagagcttacttacgagtgtagaaaccctggatttttaagttagggttggaaacctcatcatatccaacactctcatgatcaatgtggttttccgacaccctgcccaaaaagtattgaaatccaacaatgagaaactgtaaaaggcgatgagaggaaagcaggaagataagcaagctcacaggagggccggtgacaagaaggcatttcccggtg

SEQ ID NO: 16175 - DNA, 625 bp, Arabidopsis thaliana
cattccagctttttgtcctttcacatctaaaagcggggagccaacaaaacaaccttcttcctcgcgaaaacagagagaaagaggatgaagaagaagaagtctctgagaaattttcgaacatgagggagatcattagcattcatatcggacaagctggtattcaggtcggaaattcttgttgggagctttattgtctcgaacatggtatccaacccgatggcaccatgcccaggtctttatactcatcgctctagtttatgaccatctttattgtttgtgggttcgaatttttgttcttgttattgttattgacatggctctgatgatttagggtagtaataaaaaaaactttgacaagttcatgttttttaataattggatttgttttgcagtgatagtactgttggtgcatgtcatgatgcattcaacacattctttagcgagacaagctcaggccaacatgtgcctcgagctgtgtttcttgatctcgaaccaaccgtcattgacgaagtaagaaccggcacttacagacagcttttccatcccgagcaacttatctctggcaaagaagatgcagccaataactttgctagaggccattacactggttattaacattttccac

SEQ ID NO: 16176 - DNA, 575 bp, Arabidopsis thaliana
gtaaaccataacgttttgcgctagtttgtctagactaaacgatccggctatctcatgccatgtatcaccagctgtgacctcgacttgtcctccgttgacccattggttatcgacgctaagtgcaatgttcacattctgaggactcatactactaccacttactcccacaccaagcttgacccaagctgagatttgatatgtcaagaagagtttgattttatcggttatcatctgagcaggacccatccaagtctgcgttctgttagtcacaacgatgtagtttccacctagaggtttgtgaggacctagcgtgtctctcgccattggaggcagagtgcgcggagcttggtccaacactcaacttgcagttccctagagtgaaccatggtttagttcccccatctaaaacttcactgttttcgactatattgactccgaaaccaggattctgccaaacaaaacagattagtatcccataagaaccatcagtctagtgtcatttagtttagttggtaaagggactatacctcgtagatatgaggacgcgatggacgattcctcttagcatgttgaac

SEQ ID NO: 16177 - DNA, 628 bp, Arabidopsis thaliana
aagctgtgcttgcagagtaacattcaccagcttagttaatttgatccacaataataaatatagaatcaacgatttcataacaaacataccgttttctctctgatttctttgtcgatttgaagcatttgttgttgcatctcttttaccatattctcgttctcttctattgacttcgcatagtggtattgattcctcttggatccaacaatatcatgatgtcctacatttcgactagttttctttcttccaatctttgcgacctccatagcctcggaaaattttagattgagaaatggaaaaaaggtttttcaatcaaggtttacaaaatggaagaaagttgcttgagtttaaaatgcagagggttgagacattgatataaacttagttgtctctctatacaattttaaaattaacttatttggaatttggtttgcactccaaggaagttggccattttgccacctttttatttgcttagtttaatcaaccacactataaagtagtactattttctaagttgagaaatcctacaagttttatatatctgcacatattggagtagattgtgtatcgaatgaataaattaacagtctcatcacaagtatattagtatatgaatgaattattt

SEQ ID NO: 16178 - DNA, 771 bp, Arabidopsis thaliana columbia
ttttgttattaattaatatataacaattagtaatacaccctttaaacaaaattaagagcctaaaccgtaacgtgtatagtctatatgagtggtcacttttgtagaggacttggtctacaaaagatgggataagtcttctcggctgcagaccatgcggccttagcttgatactcctctgaaggtgcatctggagaatcagactctcttgcagcaaatgtaatgtaaaacttggacatggagccagggttgtaattcgccctcaagatatgttccaacttcacattcaatccctaaaaacaacaagacataattgatttagatatacacacataattaggaatctaatagccatgattagaaccaaattaaaagtgaacaacttgccacttcttggttatacttgttgagacatgaagatgtcaagttagcgcagaattcacggacggtaaggcctttcccagcgttcgcttcaagatcgtagagcgaactaattccaccccagaggggaggaaaacggtctgacggctcaaagaaaccctaaacaaaccaaagatacgtgattaacaacaacatacacgaaaatccgaatgaatcattttctactcgagaataccttgttaggatgacttggcgtctataataacgacatttctcatcaaactccttgtccgaataccccatctgatcagaggaatgatactctcggccatcgaagctatcataaccccattccggctcactatcctcctcatccctgtgactctcttcgtc

SEQ ID NO: 16179 - DNA, 623 bp, Arabidopsis thaliana
gcataagacatggtcttcgagagagtcgcatcaaggaaaaagagatgcagtccgaggctttgcaaaacgcaaggaatacaattacggttgtcgcagtcttgattgcatcagttactttcacttgtgggttgaacccgcctggtggagtctatcaggatggacacttcatagggaaagcaaccgcggggggaacggtggctttcaaggtcttctcggtaagcaatagcatcgcgttgtttacatcactatgtatcgtcattcttctgctcagcattataccatttaggacgaaatcactcaagacattcttgattataacacataagatgatttggctggctgttatagccatggcaagtgcttatgtcgctggtacatgtgtcactttaccccattctagaggaaacaaatgggtactcaaagccactctggttattgcttgtgtcatgctaggaggtatgtttatttttctatggtttaagctggccaaccatatgtcaaggaagaagaagatgagaaaaaatatgatgtccaggatagaaccctgaataaggcagctgctttcgtggatggctattacagctattaaaattattatatattatatacatcctactatatta

SEQ ID NO: 16180 - DNA, 638 bp, Arabidopsis thaliana
tataccttcccttatattctctgttttcaaatctgtcagaatctgatcactcttttctttttatctacttcaggatgttggagaaggttgaaactttcgacatgaacagagtcattgatgaattcgatgaaatgactagaaacgctcatcaagtccagaaacaaactttgaaagagattcttctcaagaaccaatccgccatttacttacaaaactgtggtctcaatggaaacgctactgaccctgaagaagctttcaaatctatggttcctttagtcactgatgttgaattagagccttacatcaaaagaatggttgatggtgacacttcacctattctcactggtcaccctgttcctgccatttccttaaggtaacttcctctttttgctttatcattgatgattctgtttctcagtgtgtgtgtttttgatcatcagctctggaactagtcaaggccgtccaaagtttattcctttcactgatgaattaatggagaacacattgcaactgtttcgcactgcttttgccttcagaaacaggtatagtttaaatttgtgtttatgtatcccccacacacatttcacacttttctctgttccatccattgacatgaacagagaaactagtgatgttgt

SEQ ID NO: 16181 - DNA, 572 bp, Arabidopsis thaliana columbia
tgagcaagtccgtcttcttcaaaagtctccggaatggtatagcatctatcatatgtactgtatggatggcttctcatattgagtaattatagctcatgttagtttggacatggtgaatgcaggccagaaatcttcaaagatactagaccgattcctactgtagatagctcatacaaagcttcatctgttatgacctctcctgagaaaactagtgatgatgatgatggtatgcctccattgcaagcaaacacaaacagattgagaccgtttggggtgaagtgtgatgcagaaactgattcagggtcagattccgattcatagaaacatccggtacatttcttttcgcagcctcaacttaatttctcaatataggggatttatagttgcaagctgtattttataaacagtatgtaaccaacacagatctgctgataaagcagagttttgctttgactaaatcgataattgatttatataacatgcttctcattctcttcttgcaattcttgataagtcttaataaggagtcagaacagttaatattggttgattgagattacactacaagagtg

SEQ ID NO: 16182 - DNA, 965 bp, Arabidopsis thaliana
aatcatatgttcgcaagccaacactactaactagtgaagacagcacctgtcagcaaattgacaaatccacatcctttccctactggatcttcactgaacaacctctccaaactgggaaaaggttgtctgaggcttcatcaataacatcaggtcaatgccgccaacaaatatctgcagtagaataacctaagatgagcagcaagaacatatagagcttgaatgatgctgacatataactaaatatgacaactcactgttgcgttagttgattcgccatcagactgcgagccataacccatggaaccatttgatccatgtccaccagccagaatcacagctattccaatgaaaacataaaatctttatagttcaaaaactttgttgaatgcaacaagttgttagctctagagtcctatggattaaaactggctcacctctcgcttaaaactagtacacttaaatagaaagaatcagagggtaaaactagttgcagagagaagtatgaaaagaaaccttgtgaagaatgttgttgctgattagcaatcgctcttttgggagttgcaatacctacacgcatttgcctgttcgaacagtaagctccattcatttctgtcaaagcccttgacctctcattttcatcaccgaacctcacaaaaccataacctttggaccggccggtgttggaatcaatcacaactttggcgcttttgacagaaggatatctatcagaaaaggtctcatgcaataaaacgtcagtgacatctggagacaagtctcccacaaaaacagataggtctggaccattttccactgctcttttttcaccagtactaaaagatgcccagtttatacggaagggttggtccgagtttggcatcactgaaccactatagttctgaagaacttcttcagctgcagcacgtgaaagaaactcaacaaacccatacccttctgattgagaagtg

SEQ ID NO: 16183 - DNA, 898 bp, Arabidopsis thaliana
gtaacctatccccccaagtcaaactgcaaaaaaatataaaggtagaaagctagaacctacaatgaatgttcttgctatatgtaatttcgatatgaaattcatatatgcatatgtcggtgtacctggtagagcacatgatacaaaggttttgaattattgtgcgacgaatgaaccttatttctcacatccgcctaatgggaagtattatcttgttgactccggatatcccaccaggactgggtatcttggtccacatcgtaggatgcgatatcatcttggtcagtttggtagaggaggaccaccagtaactgcacgagagttgttcaaccgaaagcattcaggtttgcgatctgtgattgagaggacatttggagtatggaaagcaaaatggaggattgtagatcgtaagcatccaaaatatggtctggctaagtggattaagattgtaacagcgacaatggcactacacaattttataagggattcacatcgggaagatcatgattttttacaatggcaaagcatagaagaatatcatgttgatgatgaagaagaagaagaagaagaagaaggagaagaagaagaagaaggagaagaagaagaaggagaaggagaagaagaagaagaacatgttgcatatgagcctaccggtgacagagcgatggaagctttacgtgacaacatcacgaacgaatgtaataaaagtcgcttaccttattagatatgttttttttattgacttggtttattgttataattatgcttacgactttgtctatcttttttgcttataacgtggtgtactactttattgttataattatgcttatgattcgcacaaaatttaaactaacgcagcggcggcgaaacgaacatagagacttgcggcacggcaaca

SEQ ID NO: 16184 - DNA, 1429 bp, Arabidopsis thaliana columbia
ccttattattgatatcaaccgttgattagtatatcgaagggtcacgaattattaagaggacaattaactcattggctaattgattaatgtgtggatcacctaactattcatatcaaccgttgattagaatacatctaagggtcaataatcaaagttgttttaattactttcttatttctctttattcgatgtcgtcgatggaaacccaaaaaatcaaagcttctttcatctctctccgaagcgaaaaggttgaatctacaaacctttgagttcctcaacttcttctgatttactttcgcccagaaaaggtaattgttttctctgaggtttttgatgtgttcgctggttttgttagttccttatctgatgagttcgatggtctttggatccagatttggctgttcgagaagacagatttgaggattaaaggaagaatcactgtaagttaacattttttctattgtagacacttttttttagctatggattatgtgatattgaagcatgataagcatgaattgttgatattcctcactttgtttattggaaatcgatttggttatgttaactttaggagagcttcaatgcattagcactgtcaatatctctgtaatatagtctctgtttgattgtggaagttgagccatagaaacgaaaatgattagttgactttgatagttgtgttctgttactacagaacaaagcactggttatagcctgtcaatagaaacttgtttgattcttgaggttagtccacgatggatcctgactcatactgcatatgtattcttttcgagttagtattgaagctgttcgtaggttgagtaatgagtagatgataatttagagaacttgagatgtatgatctcattggcttcaaaattggaactgtctccttgaacttgtatgttgctagtttcagtttgtatttgcaatacttaagattcaagcttttcttaggttaattctattctaattcggagaagtttgagatttgtggtgttgtctttctcattggtactgcagaaaccgctagttcaatggaagctaaaggactcatatgcggcctcccagctaagaacgttataccaaggctcagacaacagccacaacagcaggcaaataacaatcaacaaaacgaggtggatgatgaactgaaggagataacagagctagagtttaggcagtcttgtcctcaccttggctacttaatatggatcgaactagaggaagaagacattgatccactctacaagcaatggttcagaaacatgaaaaaggatgcacacaacaacactgctaagaaacgcccaagagaggaaagaggagagtcaaggcgcaggaatccatgagttcatgttttaatggttaatgtgtctttagttcatgtaatatcttgactttgttaagttaactttatgtaatatga

SEQ ID NO: 16185 - DNA, 1385 bp, Arabidopsis thaliana columbia
tcccttcactagctaattgtctgcatatctcaaatccaatccctctgtttgctccagtaactacagcatatctacaaaaaccattaaacaatctgagaaaatcagaaccaaactcactaagattacagactaaatcaagaactaagagaagatttaagacataccttggagtttcctctgccattttcgaacctttttatttctgggttttagacaaagaatatcaataattggcgtttctttttttcttatgcgcatgcagtgaatgcacagaaaccatacgaagaaatgtggaggcaaacgaagccacgtagctcagaaattgatgttcatgggagattagacttctaatccgacgccgttgttttagtcttgcattatttaaagttgaacatgttagtatatttacctgtgacgtcgattttcataatttacagtttttttttctttttcttgcattatattgacacatatttgagataactaaagttattatatttgtttggaacaaaacgttaataaaggcaatttgttttcgttaataaaggcaatttgtttggaacaaaacgttactgatgatagttatcatatttgggcgatggttaattacaaacttacaagttattataatttattttagagaatattatattgtgagacacttttaaaaagttatttgtcgatttaggcatttttaagttatgagacacttttgttagacaaaattctcgatttgccctttaactatatctctcctacatttacgctaacaattcttcttattataattctctctctttctcgatacaattcatctctctctctcttccccccctccaattcaatccatctcccccaattcaatccatcggttcacggtaatttcacaacaacaaaacaaaaacatttttcttttctccttcctcactccaaaaacaaaatttcacaatcaatcaattgttgtgaaccaagcttctcgctcaaattgattgttcatatcttctttcttatggcgacatgagttagaaagttatcgaccgtttgatcaacatcaccggcgcttctgacgtcgtcgtcgttcataaactcaaggtgatttgagtttattcatctccagtcacgggtatttatgtcttgcttcgtgattctaagtgtttatgccacagtctggttttgaggttattggaagtttctagaatcggtatagtggaaagtttgatgtgacgagatgtaggaagtctcgatgttgcggaaatgtgacaaattgttgtgagattatggatgtgattgattgtcgaattgcaatggtttggaattgaagctataaactaagcttaactcttatgatgagattggattgtaaagttgctcaattggattgattt

SEQ ID NO: 16186 - DNA, 999 bp, Arabidopsis thaliana
attatcattatcagtgttgtgtaaaaatattgtatcattcaactcttcttaaaacattcacattataaacgatatgtacgctcgactcaagaaatgagccacatatgtatattaaccaattacaacaacaaacgaactatataatcatctctccagagatataacacaaacaccatttccagaattaatcatctctacaatatcctgaaggtaaaaagagtaaagagttataaaagaaccgactcgacaagaaaaagcaaaaaatggagtaaaaacccggaccccgaccaaacagctttaatcatgaccctccatttgtcttcaagatcccatgcatgcacgagaagtggcacactcgggtacgctgccattttttccttttgccctctttcttatttggtacataataatatttatattgtttctttttgtctctgtttttcatttaacagtttgagaagttggtgaagcgaccaccacattcgccgacggagagttattgtttatgttcctttgcgacttgttttgtctcttcgtagctgctgacgacggtggggcctccggcttttgtccgctcggttgtcttactttaacccctcgtatcaactgtcataatattattctcaattaattatgacaagataaataccaacaaaagtaatgatgagagttaaatactaatgaaaagtatagaaaaatattgtgatgcttctcttacatatttgccacatttgacgtcggagtatatgactatgaaatcaccttcttggagcccattggttttcacaaaatcgcctgtaaacgtaatttcaaggaaaattagatatgtatgcgtccacaacaataattacaagagaacaaacaaaccaaaagaaaggaaaattattaacgggtacattttcaaaaacgtaccggtgttctcgaggagatacatcctgcttttgttgttagccaaacctgcaaaccaatttagaagcaattaataccgaaaacattttg

SEQ ID NO: 16187 - DNA, 946 bp, Arabidopsis thaliana
gacttataatctcagatgagcaacagtcaaaatcccaataaaactataggtggaaggagagaaagaaataccaatgttatcagcttgagatgagctagctactgcagaattactgtgaggttgaggctgaagttgagagctaaacatagcaatgaactgttgaagttgttctttgctcagattgcccaccaaactctttagaccagaatgagtatcattagattctgtcgtagccaaagcaacattagaagcaacaggttttggtttctgtgttttatcaccaaccttacccttaggagtaaaacgtggaggaaatccatgcttcttataacatctctctgcaatgtgaccaaccctattacagaaagaacacatcgatctccccttattaggaccattctgaacatagtagatagtgggatcaatgctattagtaatagtgacttcagacacttggaaagcagctggtcgagcaaccacatttgaaaatccttgttgactattgtcttgatccacaatgtgatacacctctgctaaactcggaagtatcttcttagcaataatctgtctgcgaataatagcataagactcattcaaaccagctaaaaacttcactatcttagctcttttttgccttctgttgcagacgaagagctttaccacacgtacaaggatcatccaactcctctgtactatctaattgatcccacaatgtcttgagacgagtatagtactcggacaaagacaaagtaccttgacgcaaatcctgaatctcttgagtaagattatatgtacgtggaagattagtcatattgaatcgactattgagatcacgccatatatctgaagcatcattcatacgaagaatacttctacagatctgaggagacacataattgagaagccaagattttaccatgctattacatctagaccatagacaaaa

SEQ ID NO: 16188 - DNA, 444 bp, Arabidopsis thaliana
tcaagacattgtgggatcaattggatattacagaggctttggatgagccttgtacttgtggtaaagcgatgcgtctgcaacagaaggcggacgaagctaagatagtgaagtttttggctggtttgaatgagtcttatgctattgttcgcaggcagatcatagctaagaaggctttacctagcttgggagaggtgtatcacattctggatcaagacaatagtcaacagagtttctccaatgtggttgctccacctgctgctttccaagtttctgaaataacacaatctcctagtatggatcccacagtttgctatgttcagaatggtcctaatgaaggtaggccaatttgttctgtctacaatagagtgggtcacattgctgagagatgttacgagaaacgcggttttcctcctggtgtcactccaaaaggtaaggctggtgaga

SEQ ID NO: 16189 - DNA, 519 bp, Arabidopsis thaliana
tgtctactttaaatcaaacaaagtgaacaaaagagagaaactttaccaggcgaaatagtccataatctctgccaattgaaccgatgcagcaaaatcttggagtcctcagtaaccattgccagtaaatccttctccgggttccactcagctatcttaatctaatgaaattgaacatatataaacatctaaatccttaaaagcataaaaaagacacgaactttgagcaggagtagaaccaaaacctgaaaaggtatgggcttgtcgaactggagctggaaaggaatgatattttcttcctcgtcactcgccatttccgacattccgaggtttttgggattaggggttaatattctaattttcaatatctagcaaagctgtaggaaggaagtaactagagagaaacacttgagaagaaagctgtagagagtggataaaggaaagaagacggtggtcgccgggattcgccgatccgccgggagaagagagagacgcactaatgacaaacctggcgggcttttc

SEQ ID NO: 16190 - DNA, 533 bp, Arabidopsis thaliana
gattatagctctgtgatagagaaatgcaattgaagatgaaccgaccttattctggatagagaagttgatgaagttagtatccaccaaaacacggtaaggaggaaccaatgtagagttgtaagaaaagaaaagccctgcaggaacactcggtctgatccaaaaacaaatcaaacgaaacccaaataattacaacttggcaacgaaagctaacagtggtaggaagcttacacgtttctcggaagttccgtgaggtccttcttgtttggattcagaacctcttccttgtaactatataaataaaaacaaaactaagaatctctttaaaaaaggatcaaatttgaaggaagacgaatcgtttactcactgcttcaaagctttgtggctaatcatcttcttcacgacagcaaacttttgaggtttctttgcctttcccatcttcgaagcaaagagtaacaaaaaccctagaacgacgcagagagaaagactgggaagctgaatatgcgaggtctgaatcggcggaggctgagaagtgg

SEQ ID NO: 16191 - DNA, 612 bp, Arabidopsis thaliana
ttgtcccttgattgattgtgcagtttgagctacatgtacatctagcttcttcaagtgagagctcagattgtcgatcttcccattaagatctatgtagacagcatcaaactttccattaaactccataacaagctttgtttggctttccagaatctgtgcaagcatcgattccattcttgtctcttctgaggatggaggggggcttggtaagttgaattaccataggtcctctgaaagctgatttgaggaaaggtctctagaaagctggctttggagtgtagttggaggaaccctggttccctgtaaacccgttgccactaaagttgcccagtggctttccaaacttcctgtatccctgaccatctatgtagaagactccttcctctgactcagactcaggctcaatagtctctaactcatctgcaaagtggacatgcttcttccctgtgagcaagttatgaaccgaatccagcttagcattcacctatgccatctgatttcctgaaatagctccagcaatcttcttcctctcaaaataagcattcttggtactgttgctacaagtgaggtctcaatcagggttgtagcacagctggataacgtgtgttgaag

SEQ ID NO: 16192 - DNA, 1019 bp, Arabidopsis thaliana
tacaaagaaaatattaagtttaattatcattttttataagttgttaagtaaacgaattttccaaacattcttatacgtgtatagtgttttaaccatccaacaaaatcacgatctttgtaagtttcatattctttttcttctaatccaggacatgcttcacagatttgtgaatcaaataacctacaaattaatcggaaatcactttagcttccttaattagtatcacagtcactataaaatataaaaaaattaagaataaaactgtatggctttatacctttcaaatttttgaatgtaatcaacatttcggagtatgtaattgtgagctgctcgagaaagcgcatggtcgtcccaccaaacttctttcaacttccctgcaagtctacctatttgggcaaaggtatctggaacatcaggaacgttatatgtaggtgcaaactccatcgtcatatcgtcgtggacgagtctttttggttctaacgcttggactaaagtaatacgacgtgaagtgagacgtttcctcggttaaacttcctgcgactatcgacccctcaactctaggaagattttttgcctttcctttaagagatttcatgaatcgctcaaaaggatacatccatcaaaattgcactggtccaccaagagcagcttcatgtgtaagatgaattggcaaatgttccatcacgtcaaaaaaggcagggggaaatattttttccaagtgagtagtgtgttagtggaatattcgttgtctaattgttctatggtatctgttgtcaatgttcttgaacataggttcctgaaaaatactctgttgcctatcatgtatttatttaatgtaagttaatagtcgtcaagtaataattgagtaaacgaatatatatagtatatatatatatatattacctgcaattgtttcatgaatatttgccggtagcaactcgaataacacaaatggcagtaatcgttgcatgaatacatgacaatcatgacttttcataccagaaaactttctatcttgc

SEQ ID NO: 16193 - DNA, 578 bp, Arabidopsis thaliana
tagtaacgtccgccagtgtgctctaaagatcagagcctggcgagtaaagttggcggcataaaatcaccagaaattatgagcctatgtctccttgtaaacttctgccattttgtgtggcccttgcgctaaccggttgttcactggcaccggattatcagcgtccggcaatgcccgtgccgcagcagttctcactcagccagaacggcctggttaacgcagcagataactatcagaacgcgggctggcgcaccttttttgttgataatcaggtgaagacgctgattagcgaggcgctggtgaataatcgggatttgcgcatggcgacgctgaaagtgcaggaggcacgggcgcaatatcgtctgaccgatgccgaccgctacccacagctcaatggcgagggcagcggcacgtggagcggtaatcttaaagggaataccgccacgacacgggagttttcgaccggccttaacgccagctttgacctcgattttttcggtcgcttaaagaacatgagcgaaccgagcgacaaaattatttagccactgaggaagctcagcgcgcggtgcatattctgctgg

SEQ ID NO: 16194 - DNA, 562 bp, Arabidopsis thaliana
agtgtgctctaaaggatcatgctgacctggtttttgattctggcaggactggggttacgtagcattattgctaacccggaagtgctgcatgcgctgaatccaatgtgggcggtgcatttcttccttgaatacaaaacggtttcttttattgcattaggggcagtggtgttgtcgattacgggggtcgaggcgctgtatgctgatatggggcactttggtaagttccctattcgcctggcgtggttcaccgtcgtattaccttccttgacccttaattacttcggtcagggagcgctgttgttaaagaacccggaagcgattaagaacccgttcttcctgttggcaccggactgggcgctgatcccgctgctgatcatcgccgcactggcgacggtaattgcctcgcaggcggttatctctggcgtcttctcattgacgcgtcaggcggtacgtctgggatatttgtcgccgatgcgcattattcacacctccgaaatggagtcagggcaaatctatattccgtttgtgaactggatgctctatgtcgcggtcgtgattgtga

SEQ ID NO: 16195 - DNA, 955 bp, Arabidopsis thaliana
gaacattttggtgaagcaataatgtttttgtttgaagatgagtacctaagaaaacccagtgcacaagatcgtcatcgcctactaattcttagagagattcaaggattttccgggatgatgggaagcaccgattgtatgcattgggagtggaagaattgtcccacctcttagaaagggcaatatacacgtggctctggcaaaccaacgatcgtttaagaggttgtagcttcccaagatctttggatatgacacgctttttttttacctccaagcactttaaacaatatcaacgttcttgatcacaatccagtttttgacgatatcttacaaggatgagcttcagttatttagtcaacgagaccgagtatcatttgggttactatctcactgatggaatttatcctaaatcaactacatttatccaatctatttcacttccacaagatgaaaagattctttattttctacaaatcaagaagcttgccgtaagaatgttgaacgtgcctttggagttttgcaagctcgatttgctattgtaaaacatcctactcttatttgggataaggtaaaaatcgggaatattatgcgagcatgtataatccttcacaatatgatagtagaagacgaacgagatgggtacactcagtatgatgtatccgatttcgcacatccggaatcagctagttcttcacaagtggatttcacctattctatagatatgctttcaaatcttggtaatatgatggtcactcgaacccgacttcgtgatcggactaagcatgaatacttgaaagctgatttggttgaacatatatggcaaaaatttggtctgaatcaagcttaactcttatcgtcattcaagtttttcatttctatatgtttgttttgtttttatgttatgtatgtttataattttaatatttctaataattattatgttttgtgaaaaaaaata

SEQ ID NO: 16196 - DNA, 1465 bp, Arabidopsis thaliana
catcataagaagagtaaacaatggtcacaattacatacctatgaacagagaaaaatagtacacgaggatctttccaaaacatcttctgggtaccatttccgtgatggacatcccaatcaacgatcagaattttcttgacccctagatccggctgcattcaggaaaagcaaagaagttgggaacacgcactccaaaggaatgtgaccaaagaatttgacagtaattaaaagcaaacagtacaagtccttactctttcgtttagcaaaaaactagcagcaacggcaacattgttgaataaacaaaaacccatggcttcatctgcctcagcatggtgcctgggggcctgacaatagcaaaaccacaatctaactctccttctgcaactttttctgccaactgtcaagttgaaagaaaaatgttgttaccccatattcaatcaaatcattctaacagtttctaatgtatcctcctattgtaaaaagaaacaaatcaactagtattattacctttacaacagaaccagctgcaagatatgcggcttcagatgaacctccattcagataaatcgaattcaactgtgaagcaatcctgtttctccgataatctttctgttttgtgctaatactcttaactaaattaacatggtcctttgtgtgaaccaattggagatgcttatcttctgctttgctactaccaagaaccacacatctgcaaaagaaaagaccaagatcgtcaatacatagcaggccaattcatccgaatcgaaaaacaaatcgtgatggatacacacctcaaagactagattccaccttccctaactaatgtgctgccacattactctaattaataatgttatgagtgaaattcaaacaaatatgaaaaatataaaattgatatcagagagggttataaaacagacatggaggaaataactcgaacacaagaccgaacataacgaaaaggtagcaaatttatgaagggttaccgttaaaattgagcagcatacaaaccttttgattctatgaaatgcacaattcaaattgagaaaagtaaatttcataccgaacaaggaagaacaaattgagaccagtttctcagctgacaggatcagaaagtacccaatttgactaaatttgagcattttctagggcttatattatcaaacaaacaacaaagccgcacgaagaagagagaaagtatgaacctttgagaaactccggcgagctgaagcttctcccagataactctgatgcggtcgggacactcagggtgatcctcgccgtcaggtgtgtcgtgtttgcacatcgtctcgtcgtaaataagacccacctttcgctgtctgttccccgcgactttaccgtcacagtctccaatttttttgccggaagattctccggccatagccataactgggagatgcgacggccttattgttcgacgatcagtgagaaggaagtgaaaaagg

SEQ ID NO: 16197 - DNA, 1064 bp, Arabidopsis thaliana columbia
ctactctctcaaataagagatcagttgcagtatttaaggatcgaattcacaaaatgctttgttcaaacaatgagttcaatgtcaagattaagctagcaggtgatgattgaaataataagtaaataaagtaaaaagagagcaagttgattgtgttgtaaacgattatgaaaagagctaggatcagggtattctaaggaaactattggttagtagatctaatgaaagataggttgttatcgaaccattcttaaactcaaactctaataatggaataaccggtggtgttccgcgaaactccctatatctatagctaagaataacccgagaagccgaaagattattaacctaaatatgcattcttaacgagttcgattgttcaccttagtagataggctgattcttattacacacctataaacaaggctcatcaaataatagatccaactacagatacctatggtgggcatatctattgtctggattcaagatctagttaatttctctagatctagcattaagcataattaaagatgaagaactctacagataacctagcagaggaggcaatctactaaaccatatgaatccctaatgagaaaccctattcctgacaagcagattactcagacatattgattgaagcaaacaacataattgagtatgaaaacataaacacatcaataaggatgagagaaagaaagaatctcttcactgtattcaaaactgaatgaatctctgaaaacaatggatgaatagcttatgtctctctataacagggttttgcaaaaaagattgataatcgaaactagggtctaaaaaaatgtatataaaccctataaaacgtccagggactaataatgcaaataaggaagtcttctggggcaaattttctcttctgtaaacttgaaagcgtcatggactttgttgggccgaaactggtgtcgaacgacactcctcttgattcttgagtccaaaatcatcattagcttcccttttccttagcttttgctgcaaaatgtatcctcatttccattgttgtccactgcatagaatacctgaaaaga

SEQ ID NO: 16198 - DNA, 1459 bp, Arabidopsis thaliana
attatagaaaagtatgtttattactataatacactacaagaaaacaggtgataaacgacttacaccgcagtcgcatagtaaaaaatgataatacgactagtcggcgactaaagacgttagtcattattacatagtcgctgagtgagatagtcgtggtcgttgatcgacgactatattacgacaataacacaatcagtaaacaattgtcgttgtatagtcgtataatattggcgactatttaacgaccatagcacgattaattatcctgtacaaagcgtgtgaaacacgtggtcgtataatagtcgtataagtgtttccgacgagttgacgactatttgaagactaattctatcaatgtaaggaaataattctcgttgtcatataatagtcgtataatgttttacgactactatacgtctcatggacgattatattgtgactaggttggttagtcggataataatcggtaattaatatgactattatacgactattttacgtctaatttgctacctaaatacgactactgagagactacttgttttgtccgaataagaatttggtcatcgattgttgggtttcttgtttgttgtttaaagttatgattttttctctttttttatttgaaatgctaaaaaagatgaaaagacttgtatatatagaaaatcaagttcaaatacaaatacaattatcttgtttattacacaaacaacttattcaaataaacataagttcaagtagagtttgggcaaagataatctaaggatcattaggtggaggacttggtagatgttctgtggttgtggtagagtgactggccatgaagtccaagaactgcggatcggtttggcggagatacttctcgactaaagacaattgctcgagcttgtccttttgctcagctgtaactcgagatgactcagcttctcgggcagcaatctcagcatctctcttctcattatatgcaacttgctcttctattttcctttgagcttcatgcagccgttcttctagggcttgaaaggatgatgaggaaccggagtgatggcggttggcgctgcctagagtgtcttttagacatccaagtccataaggattgcctcttgaatccttttctgtggactgcaagaaatagagaagaagctcattagtgatagaatattaattggactctaagactcataattatactaaaacatcttacctcgagaaagatggctgtataatcatctagtgtgagctccggaggtcgtgaagagccatcagagacagcagaagcagccgcctctagtgctgacaacctatctctcacattctgctgataagcttgagcaatcttctccgacttctgatcaacaaatgagccatccgacttagtgtgtgtttggatgaacacctaaccaagatggaccggtcttccaacttctcttcctacagacacaaatcaatatcaacagta

SEQ ID NO: 16199 - DNA, 1097 bp, Arabidopsis thaliana columbia
aatactcgatcccgaagtcaagtaagccctctgcaagggaattctcaaggaacaaggcagatatcactcgagggaagaagcccgtggggaggaggttggaactggtagacgaagactccaaggaagaaatagcttcaccagaggaagatgatcaaacggagaaaggaggcgatgatgatttggaatcggagaaatgtgcaactcgaaatgagtactacaagctgctgaagcgcaatgtgtttttaggaactcggtaccctcatccctagaccatggagagactcggcatatatgatgatgtagactacatgtttaaccagtgcagcctgaatattcacatgttttggccaatggaggggcatgaggaagagaccattcagtttctttcatccgtgaaattgctcttatatggagtgtcagaggacgatgaaatcaggccagacggaagtttgggaaacttgaagttctgtgtgtatgacgtagagtatcggcttccaatagagcattccgagctgatgtatggatttgcaagcggaaaagacacaagtcatcgttttgacaagagagagcttcagtcattctgttgataccaccttgtaacacccctatctcgtcctaggcccatgacaaaacgggagcgtcacgttgacgcccgtagtcagccaacctaggctccgaccgcgagtgtcgttcctcacgaacgcggcctaaggctttgcaacccgtactacgatacgtgagttgtgatagtccggacaggactaattataccatgggagacacggggttttataaaatcagagctttattactattaattaaaatatcgagtcttacataccatacgcaaaactatatcttgcaaaggcaaagcaaatctacatcggttggcctaacgtcctacgccccctaaggtctccctactaaaggttgcctgcaaaagagagtaagggatgagcgctaatcgcttagtgaattcgggttcccctaaacatgcaataattccccacccaaacccaaaataacaagcaacaagcaaccaaacaatgcaacaatcaaagttgtatatactccatggagtatacacaaataatgcg

SEQ ID NO: 16200 - DNA, 930 bp, Arabidopsis thaliana
accaccatctccttgccacctgattctactcaatttataggcagcttcgatatttttaacagcaaccactgatgtagagctcaaggatgtgagaattagcaggtgaagttgatttctctagttaaaaaaaaaaaacagactgtatctgcataacaatgaagataagtaacataccatcattttcatttgtttccgaccgtggaaattggataactgtgtagatttcaagagcgttaagtagagaaggaagagttgacctcgaggtttttattagctggtaaatgcaattttctcctttgcatgtcactggagaaagattatggatagtagtcacccctaactttggagggatgaaaccttcttcaacaacagctccatcccataatatgtcaaattctctggtatcattggtctgtaaatcttgtatctcagagaagtggctgtacaagtaatattggtcaccaggattgtctggtggccaactgattgtcaatggcgcgctggcattagaaggcgtggcagccgctgcaagagccttttttggtggttcataattgttatcattggtcacttcgagagtggtgaaaatttgggtccaatcatccaccataaagtaattatgccatctgcgatcataaatatcatccgggtacctatgtggaacaaaggttgtattatccttgaataagtataggaatgttaaaaataaagagtataggaatatagaatccatcactgttaaccaaaaaaaaaacacttaccgaagaaagccatctgtcttgttgagatatatccgaacgaaaagattcaaagaaccatctgtgagataagaattatttcctaatggccgtaattccaaggctgagatcaagggtgtagtggccctgtcttaacaagacaaacgttcaaagagtttgatgttggagtgtg

SEQ ID NO: 16201 - DNA, 1645 bp, Arabidopsis thaliana
gtaacggtccgccagtgatccccgttttgcaggatttatctttctttctcacttcgtttcttacattattagagaatttgacttacatcgcgatgtatgttttacaagcaagtagaatcgatgccactttccttagatattagcgtagtagacaatgtcaatgatcgagaaatatacacaaaagtacctaacttttgtcagcatgaacagatttgaatgatattacgtaattgtagagaagaaacttaccttaaaattaacacctctaaaaggtaagaatgtgttagtagaaaatggctattcatattgtaaaattaaaaggccgtataattagtacagaggaattcgacttggaaacagaaaattagagattaaataaaacacgaattttaaataacggaaataaaactttagtgtaaattatctatacccataatatatatagtaccagaatctaagtataataaagtaaaaaaagaaaaactgaagtagcatccttgaccgtcaccacatcttccgccgctggctgcctggctccaccaccaccactactacattcaccggttcattgtcaataccaccaccaacaggtccttctcctctatcaccacagcagccaggaccaccacagcagacacaagagaatatcatctcatctaccattttgcccgcacagctctcaattaaaactaacacaaaggccaaaacacataggactatcatggtaatataaaaagagttgttcatgttctcttttgtgcaataaggagccaggaaacatgttcttctatttatataatttggttttattgtaacacattagtttcgggtcagctaatggcatgattatcatatagccaaaatagaaccttcattttccattcacgttgcggggaatatagaaccaccaatataccgaggagaaacttctgtatgctcttaagaaatttagtgaaagttagtatggctgaagttaaaagaagaaaacaaataatatttagtattatcaattcatttctatacgtatatgtcattttaatttgccaagctcatatataacactgatttgcagcacaaaacgataaatgatttttcgagatccgaaaatagaaagtggtttttagaacttaaagagtgttatgtctactttgtcgcaagttatagagaatactcaagggcagcctaatgaagaaagattggttaaccaaattaaaagacatccataagaccaagtcctatttaaattaaaaaccaggaccatttctggtagattcaaagtatatcacagtattgaagcaggacaggtaccaaacaaaacaaaaaaaagtagatagatgaaacaacaacttaaaagagagatgttccctttcccttcttgtctccaccgatctcaaagtgcttgcacctctgcaaaaaccacacacaaagtgtaagaaacagaactgagactaaagagtgattaacaaaggtaaagaatgtcgcagacattaccttaatcgggcgttgcgagaaatgcttgcagctttggcattgaagcctcagcacaatcttcttagttgtcttagcctgttccaaagaaagacaattaatgtgcaaggtctagtatcaggtggcaaggagatccttgcgtccctcaaaagtatgc

SEQ ID NO: 16202 - DNA, 512 bp, Arabidopsis thaliana columbia
atggaagatatatattttacagtacaacaaatcgagaggagaacaagaagaacaatgaataatctgtattagtagtaaatagcctaaacaaaaacttaagccctcaacgtaacaaccctaaaacattttttttttgcatgtgatcaatgtacaaagttgtttattctgggtgatgatgatgaacgaggagaagaaggagattgattggggagagtctgaggaatctttctaaaaacatgtttcctgcaacgttggaagatgctgtcgtatatcagatcaaactgaacaccagctctctctctgttcactatgaacattatgtgatctgcttccactatcttataatacctgcaacaacaaggtattcagattttctcaatccatcaacgtcattaggtcatatatgattcacttaccagatcccgggttgtaatgtttgacattccgaatcgctccttatgaaccggctcggatgctcaacaggtagcctcggatgtgtcattgatattgtg

SEQ ID NO: 16203 - DNA, 469 bp, Arabidopsis thaliana
agtgtgcaatgatcttgagttgatcattcctcttgcaagtacattgcttcttctcaagatcaaccacatttcttccacctaacatgccatttatctcgtagctccagctggtgatcctcccaaccttggtaccattagttgttaacatggtttttgttatttgcttgtcaacttcccggaggaacgggacctttacgttcgagagacttcttccgacgcgcattaaaccatctagttaacatagacctgataaatcttatcaactccacaatatgtgacaatcgacctttgtttaaagccttgtttaacatctcagctatattgctagtcatcagattgaaacgctatcccctgaaatatagccttgtccaattagccatccctatatcatgtagatacttaccgcaattttggttcgtggattcaatctgaccataaagctctttaaactttgtaccggtaaacgcat

SEQ ID NO: 16204 - DNA, 1239 bp, Arabidopsis thaliana
ttcttccggggtatctctttttccagcaaatccccatctgcttccgaacacctgtactgcatcaactcacgaaggtcatccactggtatcccctgataatcagttggcttgtgagccaagaaatcatggaaaaaccgttctgcttcttttttaatctcttcttgagtatcaacgatagaaccatcttggcatttgatctctttgattgtgttacaaatttccctaaccgtagcagctttgtgaaacgccttgttgtttccatcgcccaccttaagccaatgaagttttgatttctgcttcaaatatctctcctccaggtctgacaaatgcaaccatctagtgtaagcggtagactctgtttgcattgttaaacttgatgggtttaacagcgtctccaattgagcctgacataggattgcatacgcgtcctttgtctttctcgttagatctcctagcttattcttactcatagttttgatgcttggttttagcatctttaacttctttgaaaaccggtacattaccgagttggagtggaaaataggctctgtgcgagcccaataatcttggatcagtggtaagaaacctgcatccttggttaaggcgtttgtgaatttaaaaggcttgcgcactcgaagcttatctgttttgattcttatccgacagcgaagatgatctgagcaaccacctgcttcgaaaactccataagattgttgatactcagatatccatgaatcattcactagaactctatccagcttcttacaaattagatctgcatcattccttttattgcacgatgtaaaaagtggtccatgatactacaagtcacttagggaacaatatctcaccgcatcatgaaaatctctcatccccagggggatagttgggttcacgtcataagaagagtgccctcactctttaatatttcattgaaatcccatatgatgtgataatgacaagcttggatcatggagctgatgagataatgacaagcttggatcatggagctgatgagataatgacaagcttggatcatggagctgatgtgataatgacaagtttggatcatggagctaaggagcatcttgaacgaggggaagttattaccactcgaccaactactcgaccgaccactcgatcgagcatgctattgaagacttgagggagcttgaatctaatgactcgatggactactcgaccgaacatgaagatgacttcttggagctacaaagagga

SEQ ID NO: 16205 - DNA, 978 bp, Arabidopsis thaliana
ccgctgcataaggtgttcatcattccagcatctctgtttacctcttcttagacattcatatactttcttgaacaatatatcatttatctgtttatcatttccaccctaacttcttcttgtctttcgaaggcttctgacccctccaggtacgcctctatttccatcgctggagatggaatcacataggactatgatgagtcagactggtgattcaaagagtcgcccggctacattgacttccagagtaagaatgttattgcttagtgttctgacctcttttatcaactcctggaatggatactagataaacaacctaatgtagtgcaaccagtattaaaataaagctctgctgttattgtttatatgttttgaatcgccactactagtttaacctgccgcatcagtctgtgacgtttacatttcaagtttcatgatttacactagtaaatcgcatttatcgttattgctatgtgggatgttgctctggattttttttagagtagcacattttcactacttcgttatggtaacctatgaattatctgtcgtagctggcaaattcctcaacagagtctgctgcaaggaaccatctaacatctagacaacaaacttcttctcctggattgagctcttccagtggagcaagtcgaagaccttcatcatctggaggacctggatcaagacctgccacacccactggaagatcatcaacactgacggcaaattcaaaatcctcaaggccttcaacacccacttcgcgagccactgtctcctcagctactcgaccttctttgactaactcgaggtccacagtatctgcaacgactaagcccacgcctatgagtaggtcaacaagtttatcatcatctaggctcacagctactgcatctaagccgactacctcaactgctagatctgctggttcagtaactagctctacccctagcaccaccacagaatctgcaggtccttcaaggt

SEQ ID NO: 16206 - DNA, 839 bp, Arabidopsis thaliana
caacgtgaacttctacgaccttggaatttgaatttcaaactttatcttgctcaacatcaagccccttttcttctacggcgtacacacgaggtcctatggcttgcctcttaggaagtgtttggttcccgtcatttatgttccgttgattcccttcaccagacacgtagtgcactcccgtgcataatggcccggctgcccacacttcctacaattattattaccttccggacaattctcccttatatgacccacttcaccacactgaaaacatttgcctgaatccatccaacaaacccctccatgctgcctattacaccttgtacacttggggtaacggttctgacctggtccttcttaacggttatcccatgtacgcttttgagatccaactacctgagttgtcctcgcttgagtatttttcaagtacttagcttctagaacaagtccactctctatccttgcagccttctcaaccaagtctatcatgctgaaaaattctcgggaagcacatcgagtcagaatgtccggcctcaatcctctcattaatctacgaatcattgactgctctcctcttccagctctcactgaaaacctgctaagatggctaagttcccgctcattctctctaactttctttgtgtcctgacgaagctcctcgaagtcatcctccaaactatccattgcttcctgaggaaaaaactttctgttgaactcttccctaaaatcctcccagaaaatcacatgctgcactggtgtgttccccagtacaccatcccaccaatgactcgcctcctctctcagaaaatgaactattatgtctttttggaactccactggac

SEQ ID NO: 16207 - DNA, 771 bp, Arabidopsis thaliana columbia
cctcttgtcttttcacttgtctattcttagcaactacaactcttcattcttctcttgtcctttctctgagaaacaaaaccattccgagatcatggatgcatcagattcaggttcggttcaaacaagcggtggtgtgtggatgacggtcccaacaagtggtcgtctgtggatgaaagccccaccctaaagctgtatcaaatccgtcatctcttacatcaggagcaacataagggagacggcggaacacacttgcttgatatcaaactgcatgagaaggaagcggaacttaaggtcttaagggacggatttaacgtgaaggaggagatcgagaaagtgctggcgcaggttggcaaggcctacagagcgcagcgtgaacgcccggtgagtagtattgattgggacaaactggggtatggatcgaccggtcgtccaaattcggagtccgattaagaatgaagatggcgattgatgtgattgtatcttcattttttattttcaattatattatatgtatgttgttggattccagtactccttatcctatgttatcataaactctgtcttttcaattttcaaacttcactttctattttatactcgcgtgtgtgattcaaaaactttttctatgatttatcgtagattaacttgatgtttggctgagttaaacatgtgactcaatcattgttattctaacgttaaggcggacttatcgtagattaacttgatgtatggttgagtgaatctaacgttacggctgagttattatagggg

SEQ ID NO: 16208 - DNA, 874 bp, Arabidopsis thaliana columbia
catctcaccacggattgaaatataacaagaccaaagacatcacagagatatatccctgttaggcatactttttccattattcactgtgactttcgccactacctctcactgtgcaaaaggaaggagttctagtggaggttctcacctgttcaacccgttgaattccagaagcaactacagttccccgccgcaaaagacaaattttttcaagtacccaatcgtccaatgcgtcccccatcccaagttgaagtatctgtttggcaacccaaaaagctttccgccttgtaacgtgcaaaaataaataatcagaattactccactttcttgactgagatagagaaaattagtatgtcccctggaccctggttataaaattacgtacctgatccacccaccctcctggagttgaaagacaacatctactaagtctagcaagggtaatgttagctttggaggaacccactgcaagaaatacaagcacttgcctcatgctttcccacgatgcaaaagataaaatatcagaaaaattcgattggctgatgctaggtgtggatatacctcggtgggcaggccagcgcaggccacatcatcggcatgttgagtacccacttttagcccgccattctctttgcggtttctcacatctacatcaggtgtcttcacatgatcatttccaagatttttcacttttgactttacatcatccaccataacgttattcctcatattttgacccgatatcccattctcagaactcagatttccctccgaggaagcggacctggtgctgcctgagtcatacttgctatatttgtagcgacagtagatgtcttattgacaggtttaactgaaacgatttactagtgacaataaa

SEQ ID NO: 16209 - DNA, 730 bp, Arabidopsis thaliana
taatctccgccagcttcctacccgcttgactgtttcctgcgctgtaagactttgttttttgctttctcgagcctgttcaacaatgtgattaggctctttgatacgtttgggtgattggttgatatatatctccatttttttattgttgtgtaaacaggcaaaacctgagacagtggacaaggtgtgtgcagttgtcagaaagcaactctcacttaaagaggctgacgaaattactgctgccaccaaatttgctgcacttggtgctgattcccttgatacggtatagcttaacaaccttctcgatgtctaataattggattcaacttttgaaatgggattgttcattggacttattgatgcttaatcaatgcctcttaaaaattgtatcctgctttcaagctcatattgtcgaatgttttagattgcaagtcttgtaaagggtcgctgtgtctccttatacgcagctctttagtattgttactgatacaggcaaatatataggacatactcaaacacatacttcacaagcaatgcatttatcaaattcaaaatggattcgaacgtgtgcacatactcatgactcggcgttttggatttcaggtggagattgtgatgggactagaggaagagttcgggattgaaatggcggaggagaaagcacagtcaatcgccacagttgagcaagcacgtgcgcttcattgaggagctcttgtttgaaaaggccaagtag

SEQ ID NO: 16210 - DNA, 1079 bp, Arabidopsis thaliana
cgtggagtgtgtaagatagggttttcttgctagtttatgtggataagatatttgagccagagagctttccattttaactatcatgtcatgtcctttggcaaacagaagatagttgttttctgtggatcactttatggcgacttgtgaagtatcatccattatcattgtttcataagcaacttagataaatgtttctttcattttcttgtcagatgccaaatagcagtgcatcaggaatgctatggcgctagacatgttcgtgatttcacctcatgggtctgtaaagcatgcgagagaccagatatcaagcgggagtgttgcctctgccctgtaaaaggtggctttataaagtatattcagctttttcacataaacatatggcaccactgcctattaactatatccattggctccgctatgttgtcactgatgataggaggtgcattgaagccaactgatgtggaaacgttgtgggttcatgtgacatgtgcttggtttcagcctgaagtatgttttgcaagtgaggaaaaaatggaacctgcagttgggattttgagtattccatcaactaattttgtgaaggtaaatttaatattaacttattgtctttaattttggacctttccataactagctgcgaccaaagctaaattgcatgaaatcttcttcgttttgatggatttcagatatgtgtaatatgcaaacaaatacatggctcgtgtactcagtgttgcaagtgttctacatactatcatgccatgtgtgcctcccgagctggttatagaatggaggtatgcttactgtttgactgtttctgatctttcttcatgagatcagacgacactgactttttctatacatgcttttgaactaactggaacgatcttttttatatagtcgtataaagtgaaactggtttccgatagataatgtgtttttaatctttacttaaaggaacttgagttttttttttcctttgcaatttattatcttactccatttaaataggcatatttccatgcattttgtatgtagttgcactgcttggagaaaaatggtcagcagataacaaagatggt

SEQ ID NO: 16211 - DNA, 1019 bp, Arabidopsis thaliana
tgggttacttcagcgccgtagcgctgggtactcgaacattggctcagggcattttctctaccccttcttaccctgaaaaaacagggacaccttgcgtccttgaaccgataaccatctttcggctaacctaggctcctccgtcccgcgtgaccaacatggagttagttagtaaaacggaacttgggtggtcacgtatttgctgtataaagaggtgtaaagtggcatccttccttaaattatatcctcaaaaaccaaacttgctcactccacacacacactgctcccaagtcctctcacttcttcttcttcctccgacaccgttgcttaacggttttccatttttgtcccttcaagatgatctcatggcacgacctctacacggtcctcaccgccgtgattcctctctacgtggccatgatcctcgcttacggctctgtccggtggtggaaaatcttctcacccgaccaatgctccggaatcaaccgttttgtcgccatcttcgccgtccctctcctctcttttcacttcatctccaccaacaatccttacgcaatgaatctccggttcatcgccgccgacactctccaaaaaatcatcatgttgtcacttttagtcctatgggctaatttcactcgctccggtagcctcgagtggagcatcacaatcttttccctctccacacttcccaacactcttgttatggggattcctctcttgatcgccatgtatggcgaatactctggttccctcatggtccaaatcgtcgtcctccagtgtatcatctggtacacgcttcgcctgtcgctcgtcgagtttcgtggcgccaagatgctcatcatggagcagttccctgagacggctgcttccattgtttccttcgaaagtcgaatccgacgtcgtttcgctcgacggccatgattttcttgagaccgatgcagagataggtgacgacgggaagctcacgtcaccgtgagaaaatcgcaacgcttcacgtcgttcgttctgcggcccgaacatga

SEQ ID NO: 16212 - DNA, 971 bp, Arabidopsis thaliana
cattaaaaaaattgcgatggatgagatgtgaactctgattggtcaatacaaaagaaaccaacaaatccttatgattgttagaaggtaaaaaaggagtttcttgtgaaacaagtaatcagtatgaacaaattctaacctaaatggttattagtttgttatggggaaaacaagtgaagcaagtaatgaaagaaacaatttatttacctagagtgtcaccgactctgaaagtcttttcactaacccaactcgtgtactcgacaccaatggtccaaccatcattatctcccacctggaaagtcacggcaaagacggcagggactgccactaggaggaggaggaggaggagagcggtggcggcggttgatcccattgagatattccatatatatcatgaggaagaggctaaaatatgaggtgagttatatagaaaaaggccgtgacgtgagatgtttgaatatatcatggtttgatcaattgccaattcaatatatcaagttcgtcagctgtgtttaccacaaaaaaaaaaaaaaaaaaaaaatcgtcagctgttttctattttataagaattgtttgtttaaaaatctctttgttattatgtttaccaattctctattcttttcaaaatttctctttgtaaatgaccaactagccatatgcaaacttttgtccttcatttttttaaatcatgacatgatgtattgaacaatgtaaaatcgacatataaatttcgaatctgaaaatatgatagtgtcgaagattaacagagtgagaagaagattggtggtttttttacttcttctaatactactcaaatgcttcataaatatatgaaagtttccgactaaaacaaaatctttctgaaagaaagaaaaatcgttcttttaattttattttattgttataataccccgcatgagttttggctgaacaagattttcacgatacatacggtatggtttgttagcaatgtt

SEQ ID NO: 16213 - DNA, 762 bp, Arabidopsis thaliana
tagtccctgattcgatgcctgatgaaaggaatgacaacaccgatgtttgtagcactcatgattgtggtgatgatgacaactatcaaactgatggaaccatggatggctcctccaaaactcgtaaagctgaaggccagtttaacataccagactcgctcaaaaactatattgacaagaaagacaagcgaatggagtctcgtatgttgaaggctatagctgattcggaggctagattaagcagcttactgagagcaactcatggcaaacatcacatgtatgaagaggttcaacgtcctggattgggtgggaagggaggatctgttgttgatctggatacatctatgggagtgcatacaatgaagaatagtgcaacagatattcttgatcaagttttaggggaagtgatggaagatatcaatgatgattcatctgcacagccgacaatacaaaacatcgctcatttccaaaggcaaagcaactgaaccgtagttcgctggtaataatttataaggttatcttcttttacctactatctgttaccaattactaattttataactttttgtcatgtacaaaagaggaggagagtacacactagtacaacgtcgaccaacccttccacctgttgaggtggacactagatcaggagaaattgctgcttcagtagagaaccattatcactcaagctgatacgatcgcccaagttaaaggttctgggattgttggcgactccgatgaagtactcaggatggaaacatgaca

SEQ ID NO: 16214 - DNA, 889 bp, Arabidopsis thaliana
  unsure (1)..(889): unsure at all n locations
cgtaccaagtgacaacacaagcaaatcctcaacacctctaacaaaaggaaactcttgcttattatgcaacacatgagtaatcgctgcagccgttggattactcattgctaaaccaccatcaacagctacacaccgtgtcttaccatcaactgatctcatctccaccggctcaaacactcctggctcagcccaagtagctctacaaacttcccacagcttaaaatcataaccgtccgtttccaacgcatcagcacgtgagaacaagaacggtgcagagctcgtgaggtcgtaacaaggaatcaaaaccggtttaagcgtatccttaagcgtaactcnttcgaaagactccttcatcgctttctcaagcttcgaacctgacccacccgaaccacccgacccggttttcataaccctgtttagtatccccggtggtgatttgttgtaaaagcttttacctttcatagctaaaaaccgccacgtgtcttccgctttgaagatcggacggttaccatcgctcgacgcaaaaagcatcgccgtgaaaatcccaccgataccggaaccggaagctacgtcgaagtaatcagcgattcgagcattcgggtcacccgatttcgatttcagagcatgttccagataagccaaagcttttccaggtataatccctctcattccaccactatcgatactcaaaacacaaactttacctctctggttcttaactgtacccggaacaacgccgtttaaagcttccaccatcgccggtgatgccgtttcttgctctggactcgggtctctgcttcttgattccataagcttcaggtcatcatcatacccgaaaagaaacttgctttcgagaatagagaaaatctcgtagctaagcttatcagtc

SEQ ID NO: 16215 - DNA, 578 bp, Arabidopsis thaliana
taacgtgtatgtgattacaattagtttcctcacatctaatgtaataaaagtccaaagttagtgtcactttcgcggtggttagtttcattacatccatatcattccaagaattcgattttgtacttgtagattttttttgtctttacctcaaaagaaatataaacccaaattagcgctttgatcacgtaaaagtttgcacgcgacataccaccagaagcatggtactgtttctaagcatgaagtaccgtacgacatataatatatatgtgttgatgcaaaatgctaaaagtaaaagaaggcaatggagaaaaagcggtttgtgcttgtacatgcggtttgccacggggcgtggagttggtacaaggtgaaaacaaagttggaggctgcaggtcactgtgtgacgcagtagatctggctgcatcgggtataaacatgaccatagtggaagagattcagacattgatggactactctaaacccttgcttaattttatgagctcgcttggctaggatgacgataaggtgattcttgttgctcatagcatgggaggaatcccgctgcgcttgctgctgacata

SEQ ID NO: 16216 - DNA, 751 bp, Arabidopsis thaliana
gggtaccgagctcacttatctaatttagagatagtgaacattttagcttgtttcaagatgtcaaactggtaaaagtttgtttatgtatgtagagacgggttaaatgtgggtttccactcaagacattgcatgctgggattacttctagggatcggtctttgcgacattgtatcaaatgcaagaaagaggatggagatggtgatgtaagtgaagggtctaagaagagtgaagaaggatttgagtatgtgactgttgagaggcatccttaccatagttatatggattcaacttctgggaagcttgagccagcgtccggggctcgggctagtattccaggtgaggattattggcctgaaggaacttcgagccgggttagagctgctagagctcctcaaccagctggtgagtcttcgagttttccttcctatggaaagaatcctggaagtaggagaaagaagaataggaaagctactgaggagaatgtgactgttgaaacgaatgacgaagtatccgattctgaggatagctctgaagaagaggaaaatgattcctcggatgggtttgttacctataagaatgaatttgagagagaagaagaggagactggttttgaattagacaaaaagcttggaagggcacatcctttaattgaatctacgaaaaaaaaacaaattgaaaagacactcacgagcaatgaatcagtggtggaagtggaggaaaccgggaaaagaacaatggtcagaaatgggca

SEQ ID NO: 16217 - DNA, 2927 bp, Arabidopsis thaliana
gggaccatctgcagaagcgactttagatttcgcaagagaagccgaagctgctagggctgaaatcaaaccaatcgcacatttctgagccattattcctgggaaacgagacttagggttcttcgagattcgagaatactgtaagaaaatgtgatttatgtagaagaaattggcttggagaagaagaaattcgaagtcggaatatctgttgccattagaaatctcaaagtcgacgagaaggttctcaaggtttaggtagggtttcggcgggacaagtgttggatcggtttctggataacttgacccgataacccgacccgttttgtttccttttccttaaaaggtttatgaaagcaaataaattaaaacttaacaaaactttggcacttgaatttgaactgaataaataattaacagtagtagcataaataattccatcaacagataaaagattacaaaatttaaaaagacaaataaaaaatgtcctttcccaaccaaataaaaaaacaaaaaataaaagacaatgagagaagttctttgacttgctctatattttggctcaactatacttgtgtgtttcttggccaatctctgtctccatctttagaaaggactaaagaaagagaatttttgagaaaccaaacctatgaatcatgggaaagtgaaagatcctccgatttgagtggaaccagcaggtggattaatggcaacccaaagcagagatatggtgatggcaacaagtccagaccagacatatacaatggtcggagtccttcctcttcttcccataagccctttagcgaatggataaagatgagccagtacccagaaactgaagaacactcctccaatcaacttactccactgcggaatcacactgtatatcgtcctgctaaacccgaccgcgatggcgattaggttcaccatcatgattgtgattggtgggatcatgagggatgtccatttcacaatgtagagatccgcaaattcgtcgtctacatcctctcctccggatttagatgtcaatgtgaatgagatttcgattccggcaacaactttgagcagcccttggataaccgcggctaagtgagcgcttgttcctccaatgagccagaactgctcgtttcgccaccattcctcgagtgagattcctgaccatttgatctcgaggagagcgagtaagcagagcgtaatggagatgattaagaggtagacaaggaatgtgacattgagtgtttggactatgaactggcctgagaatagggagagagctgggaggaagcagtagactatgaggaagaatgatgtgaacgggtagattccaacgtttaggtaagcgattctctggaggattttcattctcgggctagcaaagaaggcattgtttcttgagaagaagatctctaccagagccagtaacccatcggagaacctggtgaagcctatccgtcaagttgattggagctgtgccacggaaagcatcccttttggtcacacagtaaaccgatttccagcctcggttatgcattctataacctgtgacaacatcttcagtgactgaaccgtaaatccatccgatacgtgatccccactcagttttatcctcgtaccagcaagagataacagcaatggcttctgctacagtcgatgcatcaagaagttctcgaggaatggtgagtgcacccggtggacgcccgtttttaaccgcagggtggtccgcgagaggccggccttggaactcagcaacgggaattgaatcaatgaggaatgttgagttaccgaacttcttcgggactagagagagattcatctcttcgtcatcataatcactcatacgcagagctcggttttcttcaggaatattcttcttcttgctacgagggaaacaacaactccagcaacttggggaaaagtccttgcttcgaggcggattgaatccataaagcgcgattcttcggaagagacaaccggttccgacataaaccggacccataagcccatcaagagctctcatgttgacgtcaaagaagacagtgttgtgattagcatatctatcagatgggtcaataccttcaaaccgctgcggaaactgaacgtagcaaagacgatccccgcctctatccatcatgaaacacatgccttctctcagagcctcagagttgtatatgtaatgatcacagtcaagattgagtatgaacggtccatttgacataatcgcagaagctctgactaaggcgttcatggctccagccttcttgttatgatcataaccaggtcgcttctcacgagaaacatacacaaggagcgggagtcgaatgtccacgtcggttagatcaagaaacccttcggatactccgtgtagtggttcatcactaggtggcttcaacatcacctgcattgatcgataatatgccaaaacaaaatgagatattgaataaaataataacatcttgaatcttataccgactttatacctgaatgatacccgcgtggtctcccttggcatgatcactggcagaagtcaaccaagttccaggccagtgagtaccatcagccatccatgtagctttaggaatcttcacgggctccataggctcatcgtccctgttctgcctctgcatcttcatggctttgatttcttctctggcatgataagcatcagaacgtcgcctgatagaatcaggcaagctgttaaccctgactttaaactcatcaaactcacgcttaacccgtctacgatccttcacgaaatcagacttcactttgttcttgtaaggatctctctttaagctaaagtaggaatcaggattcctcggctcgatcgcatgtttacgacaaaaaggaacccaaatgttggcaaagctagcagcttcagccattgcttcaaacgtaagaagcgcccctccatcatcagatacatagcaagaaag

SEQ ID NO: 16218 - DNA, 744 bp, Arabidopsis thaliana
  unsure (1)..(744): unsure at all n locations
atgcctataacaaagcatcaaaattaataaggggttactggttgatttgacgagagagaaaaagagcttaccaacattagcgccagggtgatccatggctatctgtttgtagacgtttttccaattaggtcgggcgaaatgggacatgacccttgtcccagcaacaatgtctaaaccattcttggcataattaagagactgaagcatccgtatgagcgcggaacgaacgtctccttcttcgtagacactagtgcaatgattgtgtagttctatgactttacttttgtcccgttctgcgatctcgttcatgatgttcttgaaccaatcaaatgtgccctgctcctttgttacccagtagaagtaagcccttcgagtcttgaaagtttctttattaccttgttgctcttgtggcgatcccttctccatttggctgagttgttccttggtctccgtattgttaataatgtccttgataatgctgatcatcggggtggctccaatgccaagacctatcagcaggaccacctcgtacttcttgtagtcttgagctggtgcgccgtacggaccatcaatcataattttggggaaactgcgcaagaagaggtcattgcatttcaaaattattaacaacgttagaaaatcttaggtagattaattttctaacaacaaagaacgttagggatcacacacacatatgatgaatgcattttccgnacacatgcattttgatgtatgaaatcatat

SEQ ID NO: 16219 - DNA, 858 bp, Arabidopsis thaliana
tgtgatttttgacaagaaagaaatcaacctatcatggaaaactgaagtttcctccgatctcagtattaccagccggtggattaatggcgacccaaagaagagaaatggtaatggccacaagaccagaccaaacatacacaatcgttggtgttcttcctcttcttcccattagacctttagcaaatggataaagatgtgccaaaacccaaaaactgaagaacactcctccaatcagtttactccactgaggaaccacactgtaaatcgtcctgctgaatccaaccgcaatcgctatcagattcaccataatgatggtaatcggagggatcataagtgaagtccatttcaccatgtacaaatccgcaaactcgtcgtctatatcatctcctccggatttactcgtgagcgtgaaggagatttcgactcctgctacaactttgagcaaaccttgaagcacagctgcgagatgagcacttgttcctccaatgagccaaaactgttcgtttctccacattcctcgagtgagattcctgaccatttgatctcgaggagggccagtaagcagagagtgatggagatgatgagaaggtagactaggaaagtgacgttgagcgtctggacgatgaactgaccagagaagagggagagcgctggtaggaaacagtatacgatgaggaagatcgatgtgaacgggtagatacctgacgtttaagtaggcaattctctggagtattttcattttcgagcttgcgagaagagcgttgttacgggagaaaaagatctccaccgagccagtagcccaacggagaacctggtgaagcctatccgtcaagttaataggagctgtccacggaaagc

SEQ ID NO: 16220 - DNA, 596 bp, Arabidopsis thaliana
gagttcaatacctgttgctcaagactcaaaactcaaaagtcattactccattggattagcttagttctcactatggtatcattgttactcctttgtgttcttatttcctgatatcttgaattttatgtggacaggatgattcttacctggatagctacataagcaccattggtgttgactttgtaagcaccttcatttgctcatcactcatttatatacaggaatcagaataataagtgttaacctttactaatgatatcatgcagaaaattcgcacagttgagcaggacggaaagaccatcaaactccagatcgtaagtgttcttcagctagatatgcaatcataatctgttaaaattttggaaagagcagatagttactcttgttttggtaatcgcctgtgtatacagtgggacacagcaggccaagaacgtttcaggacaatcactagcagctactacagaggagctcatgggatcattgtatgtactcttactctaaccaaccaatcatcttcttgttaaataacacatcctatacctcttgctcacaattgcctatctttgcaggtcacttatgatgtccagacctagaga

SEQ ID NO: 16221 - DNA, 770 bp, Arabidopsis thaliana
gcttatacctagaaagatagaagggtgggtcgaagctcttctagagaacacttccccaaagaaaatggacgctatgatgctagaagaaacataaattattaccaccatgaaggaagaacctcagcaagtagagagctaaggcatatgagagttacctcagggactcaggagttttctcgagagggtccaagaagagggtcgtccaatagatcattcaactatgacaacccaaattaccagtggagggcacgagattcatccagaaacagccctagacatgacagttaaaaatcttggagaacacgcatgccacctttggagagacctcttgtttagttttgataagtgtgcattttacatgttttgagcatccatttgttatcactattgcatcatatcatcactgttttataccatttctcatcatttgtcatcactttacatgtttaggatatgtttgcatatttgtgttgtttttaggtgatttggagctgttaacgagctaattggaagaagcggacctgatcatgtcaaaccactcaaccccctggtcaagtagatgcttcacgacctcaacagaccacttgaccccctggtcgagtaccaccatgagagtcactcgatcacatcactcgaccacctggtcgagtatcatcacctccaccacctgaccatcactcgatcacaccacttgaccacaaggtcgagtatcttcatcaccgtcactcgatcactctaccaccaagtcgagtaccaccatctccataagc

SEQ ID NO: 16222 - DNA, 875 bp, Arabidopsis thaliana
tctctccaagtacgatcctttttttctttttcttgtctcttctcttctctcatgcatgatctgattctgaatttagtgtttgtgttgatattttatgataacagttgttgtgattagatgcaactctcttgatgatcttaatgaaaatgtttgtttggtaaaatattaaaaaaaaataagtttgaccgagtcacatagtaataccaccgacattagtatgtctaatctctatatatttgtgggctttgcctctctactctcttcttcactctcgattccattatctctctccgtaagaaacaaaacaaaccctaataatgtcgtcgtctgattgcacaatgaggaaaagaggaacaaaaagaaagattgaaattgagaaacgcctgactaaacaacaacgatctgtggcctgcagcaaacgccgtcctacactcttctccaaagcggctgatctttgccttctctccggagccaacatagccgttttgtaacttctcctgatgagaactccgacgtcgtttattcattctcgggctactctcatgcctctgaaattgttgactgttacctcaacggcaagtctcctcccaagactactattaaccccgaatcatccaagttttggtgggaagaccctaatctctacggtgattgtgacgatttgtctgagttaagaatcatcgaagatcgtctgatgagaacgaagaagcatctcatggattgtcttgagaagaaagaaaaatcatactctgtttctaaatctgatcaaaaccctaagaacaacggtgggtcttcttcttcttcttcttcttcttcttctcaaattgcttctgattttggtcaaaaccctagtacctcttctccgttttttgatc

SEQ ID NO: 16223 - DNA, 536 bp, Arabidopsis thaliana columbia
tcatagaaactgaaaattacggtcgatgcttttgatcgctgaaccagcgatatgcaaacgaacaacttttgctaaatgtcgttggtttcagtcgccagcaacaggcaaacgaacaagaccaatgctgacgagtatttatatatcttgtgaattgtacctagtatttgttattgatctacttgcatgattaactcatctccttcaactagacattgagataagtgaaaatatgtccaatattatctacaaggttaaattatcttggacatcaacgtttgttaactttgccaaaatagtcaatttaatcgtcaaattttgttaactttgccaaaatatccatgccattaagttaataaacggtgtcgtttttgtttaaaaaactactagcaccgaactcgaacccaatacttctactgaataccatttctacatttttaactgggctaagcatttttttaaaaatatcaacaacataacatagaacattgaattattatctacaaatgtatttaagttttttcttaataaaataaata

SEQ ID NO: 16224 - DNA, 989 bp, Arabidopsis thaliana
ctaaagcagatcaacaaaggtacagccaaacgccggtgggttagtggtggttttgatggagctttcagcagagagctgcccgccgcgttcagggtggtagaaagcgtccatcgccaaatcttttaacgacattaacggctcttccggtcgttcaaccagcacgatatggccttttatcagggtcagattcatcgctgactgatgtagcatgactgcggcgtgacggatgattttctcttttaataatagtgccgcactgcgcacgcaggcgcggcaacatagctctggcgtgaggcaaatgcgccgggatcgaacggcgtaacgtcggtatcttgagttgaaataacgcgaacgtcgctgaccggaacccccacggtttctgccaccatttgcgagaagacggtgtcggcaccctgaccgatttccgtcgcgccgctttgcacgttgatggttccatcctgattcatcagaaggcgcgcgcctgctatttctacgccgacacgcaggtgttagaggtgtagctaaaacaggcgacgcaacgccgcggcgcaaattgccttgctggttctggcattctgcacggcgtttttcccattcaaagattttccggcctttttcaagacactccggcaaccctgcgctgtaaatacgtttgcccgtgagcggattagcatctccttcgcgggcggcgttgcgtaaacgaatttcaacaggatcaatacctaacgctgtcgcggcgtcatcaagcatagactcaacggcaaatacgacttgtggcgcgccataaccacgcatcgcaccagccgaggggaggttggtatagcaggtctttgaactgtaagcgtaggcacaacgaggataaaggtaagcgactttattccccccgcagaagcgatggagtgcccgtgagatgcataagcgccggtgttagacagaacatccagactataacctttcaatgttccgtcgcggttcacgccactttagag

SEQ ID NO: 16225 - DNA, 1161 bp, Arabidopsis thaliana
catacatatcgagtaacgcgcatccaacaaatgggttcgacagaaaattggatttgacggagtgtgcatggactgatccaccgagaacaggacggaaagctgcagcgcacgatttgagagcgagtgagaagacgtgtgcatcgagaggtaaggcgaaagaagaatgcatttgaagaaagagattaagagcttgttcatggtttccttggttcgcgtaagagcttaattgtttggtgagagagatcaatttagtgcagctcgacgcgtacgaagaagacatggagtggtggagatagagctttcggtgttggcgtcagccttcaaagaaatacaaattagtttgttgttaaatagttatgttctaaacaaccaaacaacaaagtcgttgtagtatagtggtaagtattcccgcctgtcacgcgggtgacccgggttcgatccccggcaacggcgatcttttttattttcggctgtacaagctaattgggccttattcttggtcccctataaatatggccctatcaatgccacttcactgacgctatacggcccataaaagcccactgcacgtcacttgttcttaattcatgtgtttcgaagaaatttctataaccaaaaatttataatcaaacaaaacaatatactgtacaacgttatattttgcgtcatcagtagataacttcaagaacactgttttcgcctaaattcttcagaggaaagtgtttgaacaagctcctgcaacctctcagaaccaggtcctggtttcaacaccgagtcgtcaccttgcacagagcactgatcattgccattagctgaactcccgacacaccatcctcctggtgcaaaccggtgtgtccgtcccaatagctctttatcgatcttgtctaacgcaggatcgtttttgtggaacttgcgtgcaaatggagctttgctcttgaccatattgtcaaaatccttcaacgagagagatctagggtgttgctttggaggactgtcccaagcaatgtagtgaaggtcgtgaccgattgcagtgttgataaactctttgctgttgcagattactgtgtggaagtaccttcaggagaagatacgaaatttgtgtagtacattagtattgttcttgggaaattatccatccccaaatgcagtactcgaggaaag

SEQ ID NO: 16226 - DNA, 1141 bp, Arabidopsis thaliana
  unsure (1)..(1141): unsure at all n locations
catgaaaaaagtatctaaccaaccagcactagtttgcacttacattaacttacagactttgatcaccctccagagcagttcttcaacagctgtccaccactcctgtgcatatcgaggccgagccatttagctgtcttgtcaaatgcctcacctatagcatcatctactgtagtcccaagttgtgtgtactgaccaagcttatgcgcaagaactagaagattgtgccctcctaaatagaaaaaaagaaaaggggcgtttcagtttagatagaaacctaatccctacggtgaaactgattttgcttaagaataacttcactaagatgatagtttctcacttacattaaacttaactgattttgcaatacctgatataagcaatgccatgaaagggaagcttaattcttgttccactaatctacatagacaaatcagacgctgatgagccagtcacaaatctcaaaaaatgggaacaaaatcataacgcgagcagattaagcaatacctagcaacgagagcatgagcctccatgtgatgcaccccaacgattgggagactgaagttaccagcaactcttctagccttgcgcacaccaactgtataactcaaaataaacacttgtgtctaagtactctaacaacactcatcattccaaagtacaatgagtggattcttatttctccaacttaccacgtagacagaggctcaaaccaggtccaatggtaacagcaacagcagagagatccttctcggtcaaattggctttatcaagcgcgtcttgcacaacctgcaaccgatgaatcaacatttttgtgtgccgttagcattaaaccccaccggcctaaaaatatgcacatctcagggcaaaatgaagaatctggaccaattgtgaacaaagactgaatctagatacttgagagttatcgagtcatgcaatgctttgtaacgatgaatagtctatattaccttatcgataactcgggagtgtgcttcttcagcctgtttaggagcgacgcctccatattggacaagcaattctgccttaatgttgccaattccgagatcagaacaggtgaaacttaacgaatcatataaaggatagacatttttaaaagtganaggctttctcagacaaaactatg

SEQ ID NO: 16227 - DNA, 1289 bp, Arabidopsis thaliana
ttccctcaccacacaatatacgcgtgcataccatcatcttcatcataaattgcccatatttgccttcgctcaaaggattcctccgatctgtttttatcaaagtcatggaaatcagagtctggaactgttattggcccgttagttttgcgccctgtaacatctcccaacttacaggagagaacagttttttcatcaaggggtgttgcatcctctgcagccgctgctgcctctaaagccaatctcatcatctccaatctttgcttgatatctgttctggccttttgaattaagggcttccgtgtatccaatactgatgcagcagaccaacgtctagttgaactttggatatgaagtttgtaatcctgatccattttggcatctgtattcgctgtctttgatactgaaacagatctcagagggttctcaacaaatccattagcagcagcttccataaaaactttgcttttcttcccaggtctgccgaccttatttgcactcgcgtgagcagacatgctgatctgattaggatatatcagaccacctggtgtgcttttcttcgagcatgtcccattagaaccatctttgactttatttattccccgctgactactgagttgctgtgcttataaggatacccattagacactgaggacacacgcttcaaatccagattccctggggaggttgttgttccagagtacgagctccattcatatgaaccattcgtactataatcatatccatgtccttgcccaggatagtggcctaagaaatacgtggaattggtgggcatgcgtgacatagcatcataaccatgtgcaccatagccattactcggaggcgcatgagatggaggcgcatgagagggaggcgcatgggatggaggcgtgtaatgaaatggtgcactaacaggagctggaccagtttctacagcaataaatgctccacgacagttcttacatgaaagcctcttattcacatacttcctcagatactcatactgaactttgcaagaggtgcatacagtccagaaagtatcaagcctttctgaagatggtggaaaccgatcaaatactgcagtccccgtcccagtcccagtcccaggcatgtactctgtgctatgcttctgaacctcagtggagtcaatatgcttctttcttttgtaataaaaagtgcttttattaaactcattagacaagaaactccaagcttcagatatgagatgaaatgcaccatcagctactcttgcttctttctcgttcctgaatgtttcatcgtaatcctcttcc

SEQ ID NO: 16228 - DNA, 804 bp, Arabidopsis thaliana
tgctttcgattctggatttgattttgtaatgttctcaacaaatccattaccagatgaccctaaaccaacattcctcttcttctcaggtctgctggctttaatcacttaaggatcagcagaccagttgggtgggcttggatatatcagatcagaggctgttcctttcatcgagcttgtcctgttagacccatctttgactttttttcttcctttacagactactccattgttgagcttataaggatatccgttggatgctgaagacattcggtttgactccagattcccaggagatgttcccacatatgagctccagtcatatgactcatttgtaacatattcatatccatgtgctggatactgacctaagaaataagtggaattggtaggcatgcgtgaaacagcatcatagccatgacctccatagccattacttgttgtatgagatggaggcgcatactgaagtgatgcactaacaggagccggcccagtctccacagcaataaatgcacctcggcagttcttacatgacaacctcttattcacatacttccgcagatactcatactgaaccttgcaatatgtgcatacagtccagaaagtatcaagccttttctgaagctggtggacaacaatcgaatcctaggggcgtgggggcatactctgtactactcttctgaaccaccatagagtcgataaagtttttttcttttgtaataaaaggtgcttttcttaaactcacttgacaggaaactccaagcttccgaaatgatctgaaatgctctgttagctccaaggcatttg

SEQ ID NO: 16229 - DNA, 691 bp, Arabidopsis thaliana
atttcaaagtcaaattatagagattaatttatcgactcaattatgaagtttattctaacaagagaattatatatgattaagtgataatttttgtaaccgtcatgaacgagaggtaatgcataagattatacttgaaaaatactggactttccacccgtacccatggcttctaaatcaatagctaaacgtaccgtggaactccatggatgctgcatcaaaaatccaccgacgacaagaatctcttctactccgtcgtcatcatcgcacacagtggaaccgtttctctccggcgacgagaaatcgcgactgttcacaacgaagatgttctcgagaatcgcgccatttttcagaatggtgaacacaaggatcgtcttctccggcaatagttgctcctcctccatcagtttctcttctttgacattcatgaataaatcttagatcgaatgattgacagattttagaaaactgaaaacaaataaaaaaattttgacacgtttagtcagttttattgcatgccacatcaaacaaaacaaatcaaaccggttaagcaaataatggtttaatttggaaaggatataattgtctttttatccttcaaaaataaggaaaagtgtctaaacattagaaagtgcctcaaacggaataagtttttctaaaagtgcctattagtgacacattccctaaatgaaac

SEQ ID NO: 16230 - DNA, 434 bp, Arabidopsis thaliana
gaatggactcaaataaacacaacccggaatgtaagtggcttttctgatggctacaacccaccacaagatgtaattaagacagcctccatacccactaatgtcagtgagccattgacctttacctggatgtcggaatcctctgatgacgaaacttatgcttacctttacttcgctgagattcaacaattaaaggccaatgaaactaggcaattcaaaatcctggtcaatggtgtttattacattgattatattccaaggaagtttgaagcggaaaccttaatcacccctgcagcactaaaatgcgggggaggggtatgtcgtgtgcagctttcaaaaacaccgaagtcgactctaccaccccaaatgaatgctatagagatttttagcgtcatacaattgtcacaatcggacacaaatacggatgaaggtatgta

SEQ ID NO: 16231 - DNA, 498 bp, Arabidopsis thaliana
gaaccctttgaggaattgaatgaaccagcaacagaggtaatggtaatgagcgaagaagggtcaactcgagttcaacctgcactctcgaggacatactcgaccagccactcgaccttgtctgccaacgaatctggggagccgatcattccaacttcagatgactggtctgaacttaaggcaccgaaggttgatctcaaaccacttcctaaaggtctaaggtacgcattccttggtccaaactctacttaccctgtgatcattaatgccgagttaaatagtgatgaagtgaacctactattatctgagcttagaaagtataggagagcgattggttattcattatccgacattaagggaatttcacctagtttatgcaaccaaaggatctctttacatgtttaggataggagcttcaagatctcaactgatcactcgaccccctggtcgagtggaggacatcactactttaccacatcactcgaccccgaggtcgagcgt

SEQ ID NO: 16232 - DNA, 742 bp, Arabidopsis thaliana
cagcagaaggagatactctacatcactgatgaagagcacttccaaatgcaagaaggggggagaatgatcaaactgaagagatcatctacattgagaaccaaggagggttcaacaagggctacaacaactacaagcccaacccaaacctctcctacagaagcactaatgtagcaaacccccaagatcaagtgtatccaccacaacagaatcaatttatgccatttgttcagtacaaccaaggttatgcctctaagcagcagttcaacggaggttactgttggtatcagattctacaccaatggttcgggaccaaccaaagattgccatgtaggcataagaggagtccacaaaggataggacccatgagaaccttgagttgagaggatataggcgaggtggccatgctgtgaggtggatacgaactcgagattaaagacaattttgttcacggcttttttggatcgaaaggcgaagcccacgaagtctaaagtcaattcaaattcgaatgtttaaacattaaacccaaagactgaaacagacacatttaaaggaaaattatggtgtataattgagaattaaatgtgatgtactagtataagtaagagggccaagagccatgtaaaagaggggcaattttattaacaaatacactttagttattttcataccatttcatagttttacacttgatttttgcctcaaaaataattctctcactaaataaataaatacttgagtgtat

SEQ ID NO: 16233 - DNA, 585 bp, Arabidopsis thaliana
cgtcattggtcattatctaacccaaaacatgaggaatccattccggtattaacaggttgttattttcattatccaacaacaggacataaggagaaaagaaatgtgaaggcttaccttgatttttctcaatgccaggaagagagactcggaagatgtaagcaacttcgctgacgccaatatcaacaagaccaatgggtggcccaacagagcctagcttagcagtaccagtgcagaatacatgtgagatcactttcgagtgagtagtagtagtctgattattctcagcgttcatctttgtgtttctgtttttttcacaagagatagaatccaaacctacctgttaataatatcacaattaagaaagcaaaagaagaagacaacaatcaaatcacaagcacaagtcaagtttgaagatgtaaaagcaaagagacctataagatttttctatacaaacagagcaaaggttaaaactttatgagtaaaaggatctaatctctctgaaggaagattcaagaacatcaaattgaaagtacaagggaagaaacaaactaagctagatcatgaccaaattcttaattttgatga

SEQ ID NO: 16234 - DNA, 770 bp, Arabidopsis thaliana
cctatatttattgcatacgaaaacaaacaaaaatgtcgttgtagtatagtggtaagtattcccgcctgtcacgcgggtgacccgggttcgatccccggcaacggcgattatccttttaaccttatttcatattttacgtgggctttgtaagaagattaagaatccgcgagccttctttcttaggcccatatcgttttggggaatccctacaaggtgcctaatttatcgtttctgaagaatacaagtaatctatgttcatgaagattcaagagaacgattgagtgactaatggcgagtttgatcgcttgaaaatcaaatgcagaagaagagttgttgaccgtcacacacagaagtcagaagacagaatgatcatgaagaagacgattcaatataagactcatgtttccgggtgaaccataatacatattaataagtccctgaccgccacacagaaggcaacgttacaaaatactacatttgcctatctttctgtgtgcctgtcagaaactcacaaagggcaatagctccaaacaaaatcatatcatatcagatttgtttgggcatcaatcgctttatccatgaagacgatcaaaatataagactgatgatgtttccaagtttgatttcatatatattatcagtaatccccataaagaaccttacgtggatcgagctgaccgctgcagtagcttgaggagacgatagagagttcttgtcttcctttccactcttcatgtggcttcaacacaattgggctttctatagcacca

SEQ ID NO: 16235 - DNA, 728 bp, Arabidopsis thaliana columbia
ggtaaggctaccttttgttgaggcttgcccataagtccgctcatcgagttcgcctactcactcaatgggctggggggcaaatgttggagctggattcccctccaggaatccacctgcgaaaataccaagccagcccacaaagcccaccaagcccaccaagtagaggacctacgcaactaatgagcccacatatgcaaatgggtacttgggccagataagcccgatcacctgatgaagggagatatgcgagtaacaatctaggaactgacgaggagatattcgcggagcggacctgatatctcggaattgacctgccaaatatccaggaggatctccgcagatcccggacagagctaccacgtgcgtagatctatataaaggagcaaggacgacttggaagacacattcaattcagcttacattcacacacatacttttacacttgtaatctcctttcacattgtaaaagctttgtcataatcaatacaaaaagtccattcgttcttagcaatataactctcaaggtttcagtgaagttctagccctcctttctcataatctcaattacaaatctctagtgtgaatttcaaaatccacagtgggcgaatttaagatttgtaaaagacaaaatttgaccaagacaatgatggatacactaagagaagaagaaacctagcaaaaatgaaaattttaaccttatgagattgattaaacatactttctcatca

SEQ ID NO: 16236 - DNA, 897 bp, Arabidopsis thaliana
tcgcacttaagctctggttcagacagaaacgtttttctaataggtattacaaacacgtttattcgaaagacgtttttctaataggtattacaaagacgtttattcgaaaagaattaaagtgatcaaataagatcggtagccattacaagggcgtttattcgaggaaagataaaaagagaaatgacctaaatactactaaggatcatcttctatcatgacaaaggcatggtaagagaacatttcatagcattcaggagagctacaggccagatggaagcatcaaatcgtccgatccgaaacgacgcggttgtctttgagaaggcgattcggcataggccacaccagctgaagaccaactttctcccaatcctctgaacgaatttccaacgctttgatcgtttgttcgatttcatccagacgggtgacgacccttcttttcttccgtctcagtttagtaatcagagcttcaagctcctcaaggcgagaatccaccttttgtttcttagttcataagtattgtagctcgcggcactgatcctcatgcataaatccgacatgaagaaaagaacgatggaatcataagaatcacatcaaaaaaaaacgataggttaaacagttctcacctggttaacaaaattctgacactcggtgctttcggcatcggaggcggatgatccaagatagaacagttgaggcgctctgggaacgaaatctccgtcagcgataattgtgggattcctttccttcgaggcgacaacaacatcttgggcacagtcgttgaaatatgacaagaggatgtctagcatgggagccaatctttagaaaccattcttgatccaataacgtagatgcgacttcaacatggctagtttatgaaggggggatcctctgagcgtg

SEQ ID NO: 16237 - DNA, 1015 bp, Arabidopsis thaliana
gcaactgataggtttcgtaagctctgaaccatccatgccaaactccatctccaaatcccacaccttgagagaaattctccctctcttcgcatcaaacctagaaccagctgtagctaggaacgctcttccaaggataagaggatccttgggttccttctcatagtccaagaccacgaaatcagcagggcttatggagttaccaaccttaacaagaacatcttcaagaattccttcagggaatcgtttggaacgatccacgaagaggagagtgatgcgagtcggcctgtagtgagtcatgcttagtctctcagcaacaaacttaggcatgaggttgatactcgatcccagatcacacaaagagcggctgaacctacttgtggagatagagcaatcaagaacaaaactacctggatctcgaagcttctcagtagtctcaccaggagtgatggtgcggatgtacacaacaatgtccactctttgtgccttctccttcttgaccttaggcagcatgattgcactgatgtccctggacagcagctttgcttcatctgagttaattccattgtcaaaaagtagcttgacatacctcttgagaggttttgaagatgtctcaaatgcatccttaggaagagaatggaggatcttctccattatggttgtgcacttagcagcttgagctttagcagaatgctaaagataaaagccaacggacacatagtgtgatagctcagaagatgatcccactcccttaggtgtcctaactctaccctttttcccattctttctcttttttggtttaagttctaaggggtgcttctttaaaacgattcaagagtctagcggatttggttttaaactttgacaaggttaaggcatttcttctaatcttagcacaaagggtgttttacccttttctttgaattacaatgcctaactttctttgaattccaaaccctttactagacgaacactttcttttatatccccttaagaaatctaactcttactctttttt

SEQ ID NO: 16238 - DNA, 1093 bp, Arabidopsis thaliana
caactattgaccaagtatttaaaactgataacgacacttatttatgagtctactaagtactaacgatattactagttgtcaagtaaaaatatctaaatcctttttatctgagtgccttttacaaaattttggatgattatctaatgagcatccataaataagctcaaattttagttagctacttgaccatggttaactctaacaaggatgataaattgataatgatataacggttcggttcggttgcttttggaagaggacgaaccataaagaaagaagctcaaagcccacccattttcgtgattacaggctttttagcaaaaggaagcagcacgtgttctcaaattaaccatagttaactcttcaatataaccatggttaacatttaacctcttcttcttcttattaacttcatcactctctttgtcttctcactttctcttctccacagttcaactcaaccttccaaattccaatggcgacatcacgagctttcactctcttcgctttcacattatctctcctcaccgtagcttctaccgtctccggccataacattactcaaatcctctctgatacgccggaatattcctcattcaacaactacctttctcaaacaaaactcgccgacgaaatcaacagccgcactacaatcaccgtccttgttctcaacaatggcgcaatgtcttccctcgccggaaaacacccactctccgtcgtcaaaaatgctctcagcctcctcgtcctcctcgactactacgatcctttaaaactccatcagctctctaaaggcacaactctcaccaccacgctttaccaaaccaccggacacgctctcgggaacctaggattcgttaacgtcaccgatctcaaaggaggcaaagtcggctttggctccgccgctcctggctccaagctcgattcctcttacaccaaatccgttaaacaaatcccttacaacatctccgttctcgaaatcaacgctccgatcatcgctcccggaatcttaaccgcacctgctccttcttccgccggagttagcaacatcaccggacttctcgagaaatgccggttgcaaaaccttcgcgaattt

SEQ ID NO: 16239 - DNA, 759 bp, Arabidopsis thaliana columbia
cggagagtggtcaaagtcgtaatattggaatgcatggatggcaaatcccatagaagaaagaaaagtgtaagagagagaagttggtattcccgaagaaggaactccccaacttttgccaaaacaaaatgccaacttcactgaaacacacaacctccttcccctcatttcttggccttttctctatcttttgagaaatctatacaaatattttactaatttctctcttgagaaagtaattatctttaatgtatttgttttataaaagcctggactgcaccagtttttttccaccactttctccaagaacacacaaaagttgaaaaataccagctcattcacttatgactcatgagtaacttcttccttataaattcaaattgttcacaacttccttgagttccatttccgaacacaaacacacatcatacgtatatttgtcactaataaacatataaaggaatatgagaatcagctgcaacgggtgtagggttctacgcaaaggttgcaaccaagattgcaccattcgaccatgccttcaatggatcaaatccgcagactctcaagccaatgctacactcttccttgctaagttctacggtcgagccggtcttcttaacctcatcgaatccggtcctgatcaccttcgtcccggtactgaattatctcttttacctttttttttactacacaacggtccattgaattatcttgcgagtaaatagtacagaaaaagtgacgatgtattttggattatgagag

SEQ ID NO: 16240 - DNA, 598 bp, Arabidopsis thaliana
cacgatgtgcaaccaaaatatacagttgaacagggtaatgtgacgaaagatgaaccatttgaactaaactgtttcgaaccagatgaactatctctagttcagtcgaaccaatgaaataacattacaaagtcacaaatcaaaagcattataaaatcagggaataataaggtcacaaatccgacattacaaagtcattacaagatattaaagatctaatacaacattacaaattcctgtttctttttattaccaaacattacgtaaacaatggcaatggtgatcaagcaaagccacacaaaacacattgttaagcaaactttccacttgcggaattcctttttgcccaattctgcttcttctttcagttcttataacatcgcatgtagctctttcgcctcagatttgattttgttaagctcatttgcaatgattccaaatttttctaaagcatcttcgacctcttcttgcacagcatcctcaacccacttaaacaaatcaccctattgcacaacccacaaaccaaatccgacaagtttagcaactacataaatacacaatataaacacaactctacttacatctcttttgtttgccacgt

SEQ ID NO: 16241 - DNA, 847 bp, Arabidopsis thaliana
cagcggaataagtccaagtcgaggtctgatatgtcttccgtccaccagtctcttggaacagagtgatgctgtctcttcgcgtacctggtctggtgtatgtatgagaccaggagacctctgaagttggagtgaggatcttctccacaattgaatctatacactttctgacgattccaagattttcacaccattctggcaatttggtagtggactgcaaagtgacaatggagtccttccagccttggagaatgcaggagtggaaaaaagcttcaagctttggtaacagatttcccttgtcaacggaatcagacatccgaagaaacttggaggcacagagagcattcacaaggttatgagcactgaggttgattgtgatatcatagcagaacttagcacacaactcaaaagcatcggctccaccaggtatgtcattcagctctatggtaacagtatcagactcctctaaatcagtgcaaagccttcgcaacagcccacattttggaacaagacaagactgcagacaaagatggaaaccactattaacatacatatatgtgtgtgctgctatgataagagagtcaatcgagatatataccctgtggagatgataagtggtgttgttgattctaataacaagatcgttaggtgtgtctgttatcaaaatcctgcagtgtaaaaattttgtcagagaaatggaatttgggaaatttagaggcaaagagatcaaggaacaaccttgaagcctcttgagtgtagaaagtgtcaggctttgttccgattttcatgaacttcatcgtagacttctctgcgttcaagaggaatatatatatacatatgatgagaaagt

SEQ ID NO: 16242 - DNA, 500 bp, Arabidopsis thaliana
gaagctgttgatttcttaggaagaagaactggattaatgtttggaagaacaccaccactagcaatagtaactccatgaagcaatctccccaattcctcatcgttccttatcgctaaacatagatgcctagggtttatcctgttcttcttattatctctcgctgcgttcccagctagctcaagtacctaaaccaaaccggttcaattcattagaacttcaaaattaaacagatctaatagatacacaaaataaatcgattcaaaatgcaacgagatctgagattgaatatacctcggcggctaggtattcgagaacggcggcgaggtaaaccggagcaccggaaccgtatcggagagcgtaccgacctttcttcaagtaacgagcgatacgaccaacgggaaattgaagaccagctttaacagatttactaacactcttcttcctatctccacctttccttcctcctgctcctctcgttggcttcgtcgttgcttgtgatg

SEQ ID NO: 16243 - DNA, 911 bp, Arabidopsis thaliana
gtgaatacaatgaagtactactaacattatcctaaaacagccaagacacttactggtgaaacatatgtcgttgcaaatcaaataggtgcagcacaagtggttctgaaatgtccggtctggttacaccggctacaatgcacaacccgcttcactcgtcctctatcttcagctctaacccgtcttttcctcggcctaccaggaggtctcagagactttggagggtttataatagcatcaagagcagctttattcacgtttggatctccttcagaaagctctctccaatgacttttatctggaatcggatgaatcgtctgagagtatgtcttcctataagtagccacagtaaaacagctctcagtgaatctatgaacattctgtctacaagaaagaagagctgccacggcgtgtgcacaaggtaaaccatataactgccaaccccgacagagacaacaccggttcctgatatccacaatgttgtttccttcatgagaaataacttcaaactccgcttcattggctcgaagcacctgataggttcttgcaagctcaagagcctcggctacacgccgttcagcagttgggacgagtatcgaagtccactgcatactggtttcacgccgttcattgaaccaagtcattagttgtctcctaatgcattccatcatctgaatgattggaagtccagatgcttcagcgatccatgagttcagggattcgactatgtttgcggttacatgtccaaaccgttgtccttcaaaatatgcggtaggcataaccgaggagggattcgccggatccagtacgctgcatcttgagaaatctcttcaatttcaagtattttggcttcaaactcaattactgttagagcttgagcagcttcccacagataattaactacgagtgtgttg

SEQ ID NO: 16244 - DNA, 498 bp, Arabidopsis thaliana
caaagctgaaatggcagcgaagtatggagctcctgtgtattcacgacatcctccaatcacagctatcttccctgacacaagatcaattccaacacatgagctaaaacatcaaagtaacctgaaaaaactcaaactttaaaatcctaaagtttcgaatttgataaatttctgatgacacaattgaatagagcaagcactaaccagcttggcctttgtgtcgtttgagatcgagcgatggcgtcacggttctaagaacactctcagcgtcggcctctgatgtggaactcattgctctgatgattggtgacccacaaagcgttcgtaccaagaactcttgccttctgagcacacttgaagaagaagaaggtgaatgagaagtcaatcgtaccaagccagagatgatactgggcttcaccacatcagattctctcgttgagggccgagaaagccaccgcttccgatacagcaccgagaagtgactctctgtttggttaagaa

SEQ ID NO: 16245 - DNA, 575 bp, Arabidopsis thaliana columbia
gttgaaataacgacacttggttagggttcatatatatacaccattgtgggtttagtgttcagtttatggtttctagggtttcacacataattttgtgaacttaatacctttatgaaactcgagaggtggttgtcggaatgacaatgacaaaatagtggctggggtgcactggggttggatgttgaaaatgggaagatctgagtaaatccctggatcacgataattggtatagtctgtctctgatgttgtgctctgcaaatacatatatattcatgagataagtcccgagagacatagagactttgataataatggaaacaatcagagttcaaacagagaaggacttgccaagacattataggcgagattacgcaagaaaaggtcagaagaggagttgactgtgaaagaagtactaagcagattctcagataaagctaacaatagtgaagattagttaggaaggcaacaagaatttattctatagtcatagatatatatatccaaaaaaacatggaaattaaagagggaaagtatgtatacttgttcgaagggattggttatgtcagtacaagtat

SEQ ID NO: 16246 - DNA, 635 bp, Arabidopsis thaliana
aacagtggaaggctgtggagactaccggggatgtaccggcgctgagaagcgtgttcccgacgtatcctcacggtaagtacatttttttttatcggtggggacttatagccgcatgagtttatgtacatgggagctgggaagatttctggagagtttcatcagcttgatacagagacgttagtgtgggagaggattgtgtgcgggaatgaagaggagaagccgagccaacgtgggtggtgcgcgtttacgaaagcggttaaggatggtgaggaaggtttgttggttcatggtgggaattctccgaccaatgagcggcttgatgatttggtgttttggggtttctctcatcttaatgtcaattaatgactagctgctttgtgtctttcgtttataaagtgtttagtgtgttgttgttttaaggagtttaagtggtgatgatatgtaactgctaagtgtctgtgtttaaggagctatgtgtggtgaaactttgctacctattccaaatagtttattaagtttggtgttttggtaatttaataaaaatcttgttagtctgattctcagaaagtgaaaggctaaaagtggtggtgatatatggtcaagttgttgcattcggaatttacagtgatagtttt

SEQ ID NO: 16247 - DNA, 892 bp, Arabidopsis thaliana
ctgttgcggtggcacttagatttggttaatgaacttgttgtctagggttaatttattgagcatgtcaatcacctgtaaactgaggaaacgaaactactcaattaccccatccttaggaattctttatctgattgatttaattgtttactctactgctatttactgcatcctgtcatctgttgcttagtttctgcaattctttactgttactcgacctgatactcgaccacccagttgtctggcaacagagtgcagtcgagtatccctgttacattatctgtctattactcgacttatcactcgaccacacccagtgctctgcaacgagctctgttggtcgagtgtttatttgtatctgcttgattttctgttttctgcatgttcacttaggactgctagaacgcaccaaaacctgttattgcttggcttgacttagtgacttctgatcacatcttgattgttagcatcacacccatttggattgacaacctaaaatactacaacgacatgattggtgttttaggataattgacaaaaaacctattatcaatttgacgccgttgccaattgggtgtttgtttgttacatttgagatttcagacttgcttagatcaagttcattttcaattttcttttcagttactaactgtgtgtttttcttgttgtcttcttgatccaggtacacctctgctgtatgcgaactcgatcaacaggcaaccagaacctccttttcaacgacaacatcaatcgcacagttcgcgaactaagaaaaaggagaccacagtcaaccttgtacctaagcaaccactcgaaatggctgacgaccagaatcaacaaaatggccctgcaacattggtgctggagatgcacacgtgatcacgtcagaggaagg

SEQ ID NO: 16248 - DNA, 892 bp, Arabidopsis thaliana columbia
cttgaaactgtcgacgacgtactgctcaaagacctgtggctccatcgggatgggtggaggagaaggcagctgatatggaagagcggacgaggaagatccaactcttggacccccagcaaggtcaatgaactcgtcttcggtctatgtaggtgcacatcctgaagcttaacccctctgtcgcctggtgcatggtgcgacatgcagaagagaaggatcgggatgaaagcctatctcctcatgctctcctgtaatctttgtaagtgcagggggaggtaactgaatcatatgctgccctgtatcgtctctgaagcaccaaagtaagttgcctttaagcaagtgagagttcttcaggtaagtctcatccatagtgaccgcgtggtgttgacttcttcgccctcaaagctgatgcggaaatgctcgaatataggagtgagaaggctgccaactctctctgattactgtcctttacctgtaaagggcttggtcttgagcaagaccaagtgatgagcgaacacatcaccaaatttgacattacggtcaacctgctcaaatccaaggctgtgtggaaagaagtcatgaagagcatgatagagcaacaacaactcagaaaatctcatcttgtcaggcttcatcttgcacaatagtgtgctactaatcagcctaaccaaatatcgcagaacagggtgacagaacagagtgtactgcatcgttggaatcataaattccattaccaaacctgctcctgaaaatctgataatctttaaattgaccaggcagggaaactctagtgagatcattgtcaaagtcatagatgtcacataaaactctcattggtagactgtatctgacaccgcgaatgaagaagataagagctccttcctaagcgttttgt

SEQ ID NO: 16249 - DNA, 613 bp, Arabidopsis thaliana
gtaacggccgcagtcttttgtgttttcagaagagcagaaactcgattgggctgacgttttcttccttacaatgcaacctgttccattacgcaaacctcacttgtttcccaagttacctcttcccttcaggtttgttccaaatttttaaattattctacaaactccacaaaagtgttctatgttaaaattttggcttttgtttcttcagagatacactggatacgtattcggctgaactgaaaagcatagctaaggtcttattcgcgaaactagcgagtgcactcaaaatcaaacctgaggaaatggaaaagttgtttgatgatgagttaggtcagagaattaggatgaattactacccgccttgtccggagcccgataaggctattggtctaactccacattccgatgctacaggactcaccatactgttgcaggttaatgaagttgaaggtctccaaatcaagaaagatggcaagtgggtttctgtcaaacctctcccaaatgctttagttgtcaatgttggagacatcttagaggtaagttatttggatgacagagcttattcttagtatcattgtaaatagttctgatgatggtattggtaattatgtag

SEQ ID NO: 16250 - DNA, 733 bp, Arabidopsis thaliana
tacacattcccttcgaatgctgagtacctcccctttcccatatgcatgatgcaatgcaaatgcagttattgaaataatgaatagggagttgtgagaacgtaccagtgatcgccctgaagtttccggcatcgttagcttcctcctacaactcataaactcgcggtgccacggcttgccgctttgggggaggcggcagtccatttcccccgcgattgtccctttgtccggcctgcttctccgcagtcaacttagggcactctcgctttagatgtccagtctttccgcaatagaaataagtccttgtctcttcaccgagaaccttggactgttctggttccattctcgggcaactttggatcgcatggtccttgcttccacaccggtcacatgcacctatggccttccagcaagttccgctgtggctcttaccacaggtcacgcattccccggtctttgcatcggacttggtgttatccaccttgtcaaatttccttttcttatccgcgggtttggtggattgattgttccggatcggtgctttctcccggttcaagtacctctcctcctcgatcccttcctcaatcattgctgtcttttcaaccaattcggaaaccgagttgaatgtccggaccaaacaatggttgcggatctctatccttagtccacggataaatcagcgcacttgagcttgttcccctcaagtttacgtccacataacgccttagcggttaaa

SEQ ID NO: 16251 - DNA, 703 bp, Arabidopsis thaliana
gtagaaatgtagaggattgttaccgattcactgtgaccagttaaacaatgcactaagctaccatcagcagcattccaaacacaaatcctgcaatctgaatatacactgacggttaaagagaaacagaagatagtagtacgttcatgtaataccaacaggtggcccaaaaacactgctttttaactgttgtgtattttactatccacggttggaacacagtgagactgagagatattcatcaaaatgataatttatgcatcataagatttcttctaagattaattatttacccatgatagcggcaagtacaaaacgattatccaagctccatataatcatattaacaccccgtggtgttggaagaaacctttgacgtgggcctcctcgaggaggttgtggaggaagtggaggaggtggaacttcagatgatatcctttcatccagcgtccagatttcccctggaaatataacatcgaggaagctgagggaactcgggaagtgatgatagaatcggaaatttgctgtcattaacttgcacattgcattcagtgattgattgacagaacttacatggaatttacgtgatcttggagtccatataattgcactaccatcgcgagacgaggttactatattgtcatgacaaaacctagtagtcaaaagtattaattcttaactaacaatagatgaaagatagaggaat

SEQ ID NO: 16252 - DNA, 630 bp, Arabidopsis thaliana
  unsure (1)..(630): unsure at all n locations
ctagaatcagaatgcggagttagaccaataaccttatcgggctctggacaacgcgggtagtaattcagcctaattctctgccctaactcatcatcaaacaacttatccatttcctcgggtttgatcttcagagctaccgctattttcccaagtaagatcttagcaatgcttttcacttcagccgaatacatgtctagtgtatctctgaagaaacataaaccaagttttaaacagagaaaatttgtgtatttattaagaatgattttatacatttgaggcaaacctaaagggcagaggtaacttggggaacaagtgaggcttgcgtaatcgaacaggttgcattgtaaggaagaacatatctgcccaatcgagtttctgctcttctgaaaccacaaatacttgtccaaacccttcgatctcatcgggttgttgccacaaattcttcttctcttccatgggaaggttgaagaagtcttgaacctctgactttactttgttcaagaaacttgactccattccatggtttacaagctgttgaatatcataaacacatgccacaaggataaatttgaattccatatgaatttgctacaccaaagaagatggggtagtcttgtanagagttgagta

SEQ ID NO: 16253 - DNA, 1401 bp, Arabidopsis thaliana
tataatatattactattaaaagaaataaaaatataatatattagaaaaattgattttctgaccaaataaaaatacaatatatcatctcgtccgactaaaacattttctaatcgagaaaacaaatcgaaacatgtattcaatcaaaaaactcaaaagaatacaaaataaaataaaaacaatgatgccatgaaatagtcaaagaattacactagctaatgagtgaataaaatgatagatgatacttatgtttgattcttgattttgattttcatcggatgccataattgagagaatagagttacaatatattgattagggttttctaataaaaataagatatataaaagattagattattttaattatagtgattagggtttgggtggaaaccacaattattttaattaactaaaaatagattatttttttatttttaatctaaccgctaccgcccgcaaccgcaaacgcttgcgggaaggagcttttgaaaattggcaattttgagcggtccaaagcgatatctagcggtttctatgattggttccaatcgctaataaccgctaccaaccgcaaacgctgcgtttatgggtggtagagggagaaccaatcagcccttaacaaaaccgaaaaaactaaagatttgaacctaagtgtcgaagattctttcggaccagtctttaccactagactacctaacaaatacgaaaatatgaagccaaaattgtttttatactatttgcgaccgtaagtttgggtttagccgcttgtgtttgtgccggctctggctatattaaaaaagaattagatatttttcaaatataatattttttacaaaatatgtaattgatgtgaattttttcaatataggtgttcttatttatatacatattataaaaaaaattaagccatttcgtttttgtaatatctaatgtaccagttccattagtatgtactttgctagtataacatacccttttgacgtgaatcttctatgagtatgtttctttagttttgaccagacacaattcatttacatcaatacataaattggattttagttccaaaatatgattttcttgaaagaaatattttatatttttattagaaggagttattagttcgtcataaatggttctttgaatatgacatttattttgtttttttgtttactgtctaaataagtataacttttaaaaagtgtatctaaattttttaaaaactattatattgatagatttatttttctccacaaaaacgttatctccagttcaccacatagagagtatggaaaggacaattgggagacgtggacgcactttaagcccatcaatagatttcccttatatcttttaatctcttcacttccacaacacaacacaaaacacatcactgatccttctc

SEQ ID NO: 16254 - DNA, 1270 bp, Arabidopsis thaliana
tgaatgacttgcagacaaaattatcggagaaagaagaggttttaaagtcaatggagatgtcaaagaatcaggtaaacgagatacaagaaaagcttgaagcaacaaatcgattggttgctgagaaggatatgttgatcaagtctatgcagttacaattatcggacacaaaggtaaacctttttcctcttatgtgtctccagatttctcctttgtgtttactttgaatctggttttaaacaaaatggagaatattcagtttgcttctacacgtacctcacattttaattgcttcctttcactgtcttcactagatcaaacttgctgacaagcaagcagcccttgagaagactcaatgggaagcaaagacaacaggaacaagagcaatcaagcttcaagaacagctagatgctgttgaaggagacatctctacattcacacgggtgttcgaaactttggcaaaaactgattccaagaaacccgataggattatgatgcagtcccatatgaatttgatcatcttccatatttagtaagccaaagaaaccacaatcctcatctctcctttttccttttttttttttttggttaatatctaaaaacttgttgcaaaatgcgttaaaaacaggacgatgtagatgaaactgacctgaggaaaatggaagaagcaagattagcttatgtagcagcagtgaataccgcaaaggaacgagaagatgaagaatctctggtcatggctgctcaagctcgagcttacctgcaatcactagcctttacatattaatcatcttcaggtacttacttctttataggatatttctctccttgggttgttttaggagtatgtagatttgtaccatgaagaaattggagaagaaaagcttatgtgagaaacataaagttatggttttcccctaaaccaatgaacgcaactctgagtttttgtttcttcatttgagcatgtatgtatctatatgatcttctacattattgggaacataaaatcagattgtataatgcatctgttcaatagtttactttagatatactcttaacaaggaaatctatcaactttggaatctaaagcagccatacttgttcaacttgaaatcgtggaatgatgaatttgggcttaattagttaacaaaatatagtttgggctcacattgaattccttttaataaggtaaggtctttttagtgataatcttaatctaataatagttcacacggggtgggaaaaaatacgaaataataataatatttcacacgtg

SEQ ID NO: 16255 - DNA, 1037 bp, Arabidopsis thaliana
aaaccgcccgatgcgcgcgtaatgtcgttgatggtgtacttattcattcatttattcctttatccagtcgttacatttttactttggcagtcatcccggcactgacacggacctgttccagaatggcggaccagtcctggcgaccgcgacccgctgcgcgcgcctggctataaacctcccgtgaggcggcccccagcggcattggcacatgcagctggttggcgacatcaagggcgatgccaagatccttatgggcaagatcgatcatgaaggcgggagaaagatctccgctgaggactttgtttggccaggaagtggtgaagtgacctttaccggcggcggtaccgctcatcactttgacggcaacatcgaagggaagattcagggcttcgcacaaaacggcggcttctgccgaaagcgcattgagcgcgatgctcatgtagttgttgatgagcttaacgcggatccccatgcccggaccgccagcgttgatcaactcactgcccatcgccatcaggatcggtgtggcacgttcaacttgttcagcggtgccgccagccagcagtaacagagtaccggtaatggcatttgcagaagtacggcctaccggaacatccatcatgctgaagcctttggcttgcatatcggcaatcaatttatcggtttgcagcggatggatggtggacatatcaatgaccagcgcatcggtagataagccttcgcaaacgccgttttcaccgaacaacacgttgcgcaccagatcgccattcggcaacatggtaatgataaattcggcatctttagcggcctgcgccagggttggcggcgggagtcagcacctttgtctaccagatgccgcacagcttcggcgttcacatcaaagacgcgaagttgatgccttgctgcaataaattgctcgccattgcgaacccatttgtcctaaccgataaacgcgattgctccataacctctcctgaatacagttatgcactttttgtcattatgcatgcttgcttgctgttttgacgtattgtaat

SEQ ID NO: 16256 - DNA, 597 bp, Arabidopsis thaliana
gttgttatttgcgaggtttccttggaccttttggtggttgttgattttgtcgtagcagctgttctcgctccttatcagtttggacagatctttaatttttaacgtagagaataattatgatcagtttggtcagtgtggcctacccccatggccttcagatgctttttcatttgtttgaactcattctcaatagatccaaacctgctttcaaactttgcatcaatcctcgcttctacttgatctccaatcaccttctcaatatgagaggacatttctttgatgcttgtatcaacgatgtcaaaccttgagtttaagggagatattaatttaaacaccacatctacgaccgacacatcttcccgaacatcctcctcgtcctcatcagattcaccagctactttcttcttcttcttcttcttttgtgcatctcctccaccagattgaacaccctcattgtgatagactttctgctttttttgcgggagattcaggtcttagccgtagctttatcctttacgtttttcttcttcttctcattcctcttcacatcccaatagcctttaacaaacttatccccatgtatgtgttcaatcaagt

SEQ ID NO: 16257 - DNA, 563 bp, Arabidopsis thaliana
caggtcgactccgactctaggccgccagtgtgctctaaagtttattatatgtaagtacactgtagctgtcttcagacactccagaagagggcgtcagatctcgttacggatggttgtaagccaccatctggttgctgggatttgaacttcggaccttcggaagagcagtcgggtgctcttacccactgagccatctcaccagccccgataatcaagagttttgaccggacctttgagtacgcctcggtcaacgaaggtgtagagaggaacaagtgtgtctcctcctccatacttgttgtcaaacacttgaagctccttcttcgccttctccttgagctcttccgccatttccatcattcccttctctgctccaccatcatagctcttcttcttgtcctcggtgatgtcatcgaccacctgatacagcatcccgacggctctcccgtaccttcggagactctggagctcatcctcagtggcaccgccaataggccaccgcacacggcagagcattcacccatggctccgaatttcttctcctgaacaaaggaaagaggaaaggg

SEQ ID NO: 16258 - DNA, 571 bp, Arabidopsis thaliana
  unsure (1)..(571): unsure at all n locations
ctatctataaattgtgttagaactaaatgttgatacctgtggacacctgtggactgagtaactgtgaaggactgtttgctgtaaaaatccacatttttaaagaaatattctgatttcaggggagaggtcttccaagtggagtgggatcctaaccatgaaacagtactcgcatcttcaggggaggacagaaggctgatggtctgggacctgaacaggtatgtatcatcatcatctactttgcagaattcaaaaacttcaacttttaaatctgaagattgttcaacgttgagtaatgcttcttttttggggtttacagggttggagaagagcagcttgagatagagttggatgcagaagatggtccaccagagttactcttctctcacggaggccacaaggctaagatatcagactttgcttggaacaaaaacgagccttgggtcattgcaagtgtagctgaagacaacagtcctcaggtgtggcagatggcagaaagcatctatcgcgatgaagaggatgccgaggacatcanagaagatattcacaacaatcatgaaatttagaacgattt

SEQ ID NO: 16259 - DNA, 757 bp, Arabidopsis thaliana
gccagtgtgctctaaagcaggcaaaagacggaaccgtgtactctattacacgttaatcgtctctgtcgttcactttgaaaacggctcctggacaggggccgttttcctgtttttaacaacgacgcgaatatagcgtgcgttgtctgatgatttataaaaatgaggctttaaacatggtacctgtggtcgcgcttgtcgggcgccctaacgtaggaaaatccacgttatttaaccgtctaactcgcacccgagatgcgctggttgcggatttcccgggtctgactcgtgaccgtaagtacggtcgtgcggaaattgaaggccgtgagtttatctgtattgataccggcgggattgatggcacagaagacggtgtagaaacccgcatggcgatacagtcgctgctggcgattgaagaagcggacgtcgtactgtttatggtggatgcgcgcgcgggcctgatgccggcagatgaagcgattgccaaacatctgcgctcccgtgaaaaaccgaccttcctggtggcaaacaaaactgacggtctggatcccgatcaggcagtggttgatttctactcgcttggtttaggtgaaatctacccgatcgccgcgtctcacggtcgtggcgtattaagtctgctggagcatgtgctgctgccgtggatggaagatcttcaccgcaagaggaagtcgacgaagacgctgaatactgggcgcaatttgaagcggaagagaacggcgaagaagaagaggaagacgac

SEQ ID NO: 16260 - DNA, 1545 bp, Arabidopsis thaliana columbia
accttcaatagttgatgtactagagtaaagtatcattgcttctttgaacagaaaatttgaagaatgcgaatcatcaacaaaagatatctctcctattgcctcctcgcgattcaacaaccaaaagacacacctactcttcgagaaaaacgcaacaagatcccctcgagttattactgatacagcaatttccccttcactcaaccagtttctagacactagagagcctttgctcggttcagatttctctgacactgagaccaactgcaacctaccaaacgaatcagccataagcaatgattcctgctcatctaactgaaccacgcccataaaattcaaacaaccaatagataaattcccatggaaaactgtatgaacaatagtaagagtgtaagtatcaacaacaaccaccgtgcatctcgacttctgaaaatcagtatctgctaaagtctcagccccatcaacatcgatataagaacaaccaacacatacatatctaggctctgatggcaaagtagacaaaatcgatggacttccaacccaaggaggtaattatcttcgtttcctacactgaccactacttctactccatacacacaagacaccatcagtacaagcactgatcaatgcacaacagttaacaaatggatccgcattaccattatctgatgcaacaactccattacttgaaagtattgtaggatcacaaatagcaagatccactattggtgaagtatggccacacaacatagcaatcggtttaatctcatgatgagggagacgagttacagaattggattcggaagaagaagagatgctccaccagatgattgacccatcggatccaccggtatagagagtcggtggattggttagagaggctgtggcggtgacccgatgagacggaggagcacgagaccataggcaggccacagatcggcacttcatcggcttgaatcaagcggtacaagcatcgaccgagtcagtgaacgagtcggggtgagagaagaaggaagaacgaactggtaaacgacgtcgtaacagtaatcacgacaaatatatctgtacatatttagatggatttttcgaggttgcaaataaattttttaaggtaaatatttggcaaaagtttgataattgatattttaactttactagattattatcaacttaaaatacttaaatctgtgtattggacgacgggtcctaatctagtcaatatataaattataacttgttaaaatatatcatagtctaaattcacaaatcacattgtatttgctaaactatgagtaaacgattacgatataaacaaaatgagtagaaaatgattattttaaattattgtagttctctataaatatctttaccattagttttctttccttttttcagtattattcttttgtcaactaatttatttgttaaaaaatctggacttatcaagaatcaatcttatgttaaaaaataaaatccaaaggaaattagaggataaaataacatctaattacctttttgtttttggttatatgacctagtagaggtatt

SEQ ID NO: 16261 - DNA, 544 bp, Arabidopsis thaliana columbia
ggcttgctgctggatttgacaaaaacgctgaggctactgagggactgctagggatgggatttggctttgttgaggtaggctctgtaactcctgttccacaagaaggcaatccgaaaccacgtatcttcagactaagccacgaagggtgagaatctctaatctataaaagaccttcaatgattgaagaagcaagatagtttaaactaaaagacttatattttggtcctcccagagctattatcaataggtgtggatgtactagcgaagggattgttgtcgttgcacagcggttgggtgctcaacatggtaaaagaatgttggctgaaacatcagctacttcgtcatctccaagtgatgatgtaaaaccagggggaaaatctggacctggtattcatggggtcaaccttggaaagaaccagactgagtgaggatgctgctgctgactatgtccaaggagttcataacttatcccagtatgctgattacttggtacaaacttcttaccatgatatatcgaacatgaatttgatctaatcaccgtaga

SEQ ID NO: 16262 - DNA, 572 bp, Arabidopsis thaliana columbia
gagcttgcgatatggatgatggaagatgatgtggagaacgttgggatgttcagggatttgggtatggagaaagagctcgtgaaggttctggaaactacggctgagcttgagaactttgatgttttctctggcacggttggagtgagccgacagagcagaacggttcattggttagctgaattggctttaaaaatgcttgaggatgaacattcttaaggttcatgttcctcttgagaaactcagagcgtgctaattatgatttatgaaacatatcgtttatttttacaattatttaaaaagctgctcaaagttcaaattagagatatatctcaaattccatcagtatatacacataccttgtaaagaaagatacacttctctcgtaatagtgatcttcattaaaccattgtctaaacttctggtaatagtggcaatttctcagatacaaatagagtttataatcctaacaatgacgaaaacaacttcagggatgaagtgatataagagaattcatgtccacagaggaaaagtgaattatacatacgaatagttcagcatcaatcagatgattt

SEQ ID NO: 16263 - DNA, 799 bp, Arabidopsis thaliana
  unsure (1)..(799): unsure at all n locations
gtaagtcatcatcatccgccaaagacttgaatcatttctggttttcattggaatgttgtgcattttggttgccttcatcatcatcatcctcatcctcgtcatcttcgcggtagatgctttccgccatttgccagacttgaagactgttgtcttcagctacacttgagatgacccaaggctcgtccttgttccaggcaaagtctgatatcttggccttgtggctccatgagagaagagcagctcaggtggaccatcttctgcatccaactctatttcaagctgctcatccccaaccctgaacgatccaccaaattgaaactaactaatccaatttcaattttgaatcaaatgaaaagggaaatatcgactatggtacctgttgatatcccagaccatgagtcttctgtcctcgccagaagatgcaagcactgtttcatggttgggatcccactccacttggaaaacttctcccctgtaacaaagccctcccagtcctcagttatcacttatcatcaacatttgatcaaataattttaaatagaaactatgagagaggcatactcgtgtttgctcaggacatgtaatggcgcagtcagcttacgaaggtcaaacaaggcgacagttgagtctgaggaagctgtggctagtacccattcattgaagggattgaaagaaagatagtttatctgcaaaacagaagatagtgttgtagaatggtcacttgagggtttaccagagcaaagnctggcatgtctgagaaattatctgctcataacttcgaattatctattcaaacgag

SEQ ID NO: 16264 - DNA, 1253 bp, Arabidopsis thaliana
tccacttagttattttccagctaacactaaaaccgagtctatctcgtaattcggaaattaaaccaagtaaacataaaacggtctccacgatcttaaataagttaaaaaaaacaatagagttaaggcctctctggccaggttcaaaaaagaaaaataagttttgaaacaaaacgggggtcactgcggaccaacacaaccccgactcaaacataaacttttttactctgcagcttcggagttcttctcaacgtcaacagggaacatggcggcgattcctgcttcggcggctgtgtccttgttggttccatgcttgtctatgattaacacttcatctgaagcgttggaatctgcaatcacttcgggtggggtatctgccagaagcgaggtgggctcaacagggtttggacgtggggtctttggttcggcagccttttgtgcgaacttaatttcgtctgcacgaaccgattcaagttcttcagctatgctgggtatttcccccttctcgatctcttcgaggagctccctgttcaccttgacttctgcagctcgaatattagcagcctcaacttcatcagattggacatagaaagtcccatatttcgaggagaagtctgtcaattgagctcggaccttccttttctcctcttgcctcgcagcgtggagcattacagactgaccttcctcgagttttttcatcctctcctcgcacgcaagaagttcggcccttgatcggttttcattttcaatggtcgtcggataggcgttcttgcccgattcgagttttgcggagagatcggtgttagaaatctcaagagtttgaaccttagcttctgcggctctcatacggctaagtacactattagcccgatccaccatacgagcgttctcctcctcgttttgcttataactctcaatctccttatccttctcgaagagctggtcctcgtgactgaggaaggcatagttaaactcctggacagcctaataataaaagtggttagggaatacaaaccagtgagaagtgaacttgttttctgataaagtttatttacctcgccaagtttctcccggttggttgccttaagttccgctaggaggtggcatgatcgctctggggtgaacgagtgtcctaagcgtgtcagcgaagggcatcggaggagctgagacaatcaaaagatacgtataagtgattgacggattgataaaccttcaaaggcaacgacttagaacacgagcttaccaggcaaaggaga

SEQ ID NO: 16265 - DNA, 562 bp, Arabidopsis thaliana columbia
tatactagtatcacttccatatacaaaatcgttgaatattctatcgtatacatactctaacacagatcatatacacgccctctatattttgttgttgttttaaccctaaaatcgtataagaaaaaaaaagcgtgagacagccttaaacgcgtttgcgactcgcgtagcttttgcccacatagtgataataattactattgctctgatttttactcccaccactagagcttttaccgcgcagtaaatatgacaacgccctccacaaaaacgattttctccgtcgcggtgaaacggcaatcacgtgactagcatgtggtctcgttgacttcttaatcacaagacctctaacttcttccggtggcttataatgcctaatcaacggccacttgattccatcaaaaaacggatgacgtttgatatcttgcgcacccctggcgcatcctagccttttccttgggtccttaaccaaaagcttctcaatcaagtccctagcttcatctaaatcaccgtccatatggaaactcgcggtcttagtggtcgatactatattccgcagtgtttg

SEQ ID NO: 16266 - DNA, 581 bp, Arabidopsis thaliana columbia
tcgactcaagcctttaaatcaaaatcactcactcgttgctcaaacttcgaatgatatacgaaagcataccgccatgattatagtatgttagttccacttgatcaattccaatcaaccaagtcagaccattaaatatatggtgacaatcaaatctaaacaaaagcttttgtgattacctctgtgtctaaccgcaaagtgcagacaaaagatttagcagtgtcagtagtcacagttatgtcctggcctggttttatctcattgatattactaggaaggtggattgtgtagagttcatggccagttagtccaagggtttctgcatcttcaccggacttgaaggccattaaccccaattcctgtcgaattcaagctgcatcacaaatttggacaggtttctctatgcagaaatttaggggagttactatggaataagctatttaatcctacttaagtcataaattatggccaacagcgaaagattcgtcacattacaacagcatagcgatgaagtcgttttgtaaccagtggatcactccaagacgcctcactgcattcctcatagacaagataaatttagcatg

SEQ ID NO: 16267 - DNA, 923 bp, Arabidopsis thaliana
attgctgatttcatccttagtttcttgggcctgcctagctggttcacaacaatcggaggtaagcacgattggtcaattacaatttgaggaacatggacttcggtatctgaaggcatgattgcaccagcgtacgcattgaccaaataattgcccttatagtaagaactgcacagggatatacaagacacacacatatgctctgcagctgcgattgcatggatgcatggtactttctctttctcgaaaagacggcatgtgcatttttttgcatccacatttacaacatgcaaagatgttccataagttacttttacgcggaaagcatcaatcgtttgtacagccataagtcttgacgcggtgacacgggcctattagagagaagaaaaaaagaaaaaaagccaaatacgttatggctgagttattctcattatgtctggtttatcattatttgaggactgagttatgcactaataacagctgagttacctgtaccagtttctcaacaccacgtgtgagctgagtatgttgcgtgctcgcatcatctctccgttcagcaaaccatcttgtcatcatctgtcttatcgcttctaatattcgaactatgggaagttttctggcttttgacaatgctctgttcattgattccgctatattcgtagtcattaaactgtatctatcaccgggaaaatgaacacgcgcacacatttgaacaccctctctttggaggtatgcatgtaattgaggatcacgctcttgaatctcgttgaacgcgtcatcaaaatcagtccgcctataacaccttgccgctttttcaccagagggaacatatgttttcctttgaatttaccaaaatgttcttatacaaatggtaagtgaaatccacgagcagcaattcctttcctattgacttatgtctgccgaga

SEQ ID NO: 16268 - DNA, 488 bp, Arabidopsis thaliana columbia
acacataacctaggaatctttggaggagtcggtcttttgattacaatagtgaccggtctatttggaatcaacgtagatgggataccaggtgccaaagattttccacaagcctttgcgcttttctcagtcgttctgttcgtctcaggtttggtgctagtggtcgctggtttaatctaccttggactcaaggagccagtggcagaagagaatgtggagactaggaaactagagcttgacgaaatggtgaagaagtttcaacaagaagctgagtctcatgctcaggtctgcaaaaaagttcctcagaacatagaacgtacgactagtagaagtagaatgatagtccatgatccgaatggttacgttctcttggaatgaaatcaatccggtttatgattgtaaattgtaagatgtagaatatttaatctttaggaaatcattaataaactgttttcttcactggtttatcttttatattttggaagttgtat

SEQ ID NO: 16269 - DNA, 483 bp, Arabidopsis thaliana
tttccttaaactcagacccatctgaagggcgaggtaacaaacccaagaagccagcaaaagcaaagtcgtggtttccggcaagaaagacatgggtctgatcgggatgtttctccggcaaagagatcaagaagtcgatgacttttcgagtctccggtccacgatcgcagtagtcgccgaggaagatgacgagagctgagctgaaatctgagttttggatatcggattgaagattaagccagagtttattgagctttgatatgtttccatggatgtctccgacgcagatcacagttcgtggtttttgggtcatcattagtcttgtttcttgcaatgcaatcaataattctaagcattatttgattcgatgatgtttgatagttttgtcaacaaaagtcaactgtttcaatggttatgattacataaggtacttcatcgcaaccgtcgaaatcttcgcgtgtaaacatttcagatcgtacggtcaaa

SEQ ID NO: 16270 - DNA, 603 bp, Arabidopsis thaliana
acataatgataacagaacgataacaggatgaacaacttagtaaaaagaaaagcgaatactgaatagattaagaggaatccggattacaaaagcgaagaacacacaaactgtcgatggaataaaacttagtctcgaatatataaagtacatgctacttatagagaaatgttctgaaaccctaatactcaaaacgacacagtattggcgagtattaagaacggtaatcgacccaggtggtcgagtagtgggtcgagtgacgagccaaagtcttcttctcttccttatgctcgaatgtctggttgagtgtggaattgagaagactctgaagctggcagtcgagtaatgctgtcgagtggtgaatgaaggtggactcgacttggtggcaaagtgattgatcgagtgatattggatggtggtactcgaccatgtagtcgagtgagtgatcgagtgaaggtgatggtgatgctcgatcatggagtcgagtggtggtgaaaagtggtgaaggaatctactcgaccagggggtccagtggtgttgagaagtggtgaagcctctactcgaccagggggtccagtggtgagttgtagatgttgtggccaagta

SEQ ID NO: 16271 - DNA, 636 bp, Arabidopsis thaliana
cttctcatggaatggactgcttcttgaaccaacactatattatccgtacttactctcccgggggataaaactagcttgagccggaccaatcagatttgtcattaacggtttcagacgctctaccatcgtcttagtgatgatcttgaaaagcacattgcataggctgataggccggaactgagttattttttcaggctttccaacctttggtaacagcacaacaagggcgtcatttagtctactcggtaacacggacgtttcaaaaaactccaacacaagcttaaccactgattcccccactacctcccagcactcttgataaaagactggctgatatccatcgggtccaggtgctttaaacttacccatacaacgaacagccttctccacttcaccggcagagaaacaccgtagcagctctgttttatctgcttgggacaggctcataaatccttctggtggtagtttggtaaccacaggctcaacatcgtctaaagaataaagcttagaataataatcaagggcgagctattccaattctcgagaatctgaaacccactgatcttcattattcttgagcatctctattctgtttctccgctcctaatcacagtagaagtgtgaaaatatgtggta

SEQ ID NO: 16272 - DNA, 586 bp, Arabidopsis thaliana columbia
gaaaattagaaaaataaaactataaaaattgaaaatccgatgaaaatcaataggatctagagaattaccaatgaatccatgattttggtgataaggaaagcttagcgagcaatcatcaaagaatcagacgaagatacgattaacgagaatagagaagagctaacaaagattgagatttgagagaatgaaagagcaagttgaagatgatgaattcatgatggagaagaaacgttaggctggttatggactgattatggatttggtaaaggaagaagaagaactctctatttgagtttcgtaagaggcagcgcagatccaaaaaattgagactaaattagggttaatgacccataatctttatatatggctgcagattctcggtttaggtaaaaccgatcgcttccggttaccgaaccgacccgaaccgaaatccgattacccaaattaattttgccgatcggttacgtggattctgttcggtttcgccgataaccgaaaatttcggtttgatcggttcggttttctcggttattccgaactcccaggcctaatgtaacatatgattaaggtggtagttactcattga

SEQ ID NO: 16273 - DNA, 581 bp, Arabidopsis thaliana
gatcgattcctcggccgaccttactctcagttacccgaacctccacacctagactctcggtggctactagatgcagcagcagcagcgtgtcgtcttcccggccatcgggcaacctaggttcattcagcacaagaaggaggcttactggttctacaggttcttatccatcgtatacgaccatgtcatcaatcctgggcattggaccgaggatatgagagacgacgctcttgagccagcggatctcagccatccggacatgcgagtggtcgatgtcggcggcggaactggtttcactactctgggcatagtcaagacagtgaaggccaagaatgtgaccattctggaccagtcgccacatcagctggccaaagcaaagcaaaaggagccgttgaaagaatgcaagatcgtcgagggagatgctgaggatcttccttttccaaccgattatgctgacagatacgtttctgctggaaggtatccttttcttcttcttcttcttcttcttcttcttcttcttataatcgtcttctttccggtgggtttgattgtgtgtctcatcatcacacagcattgagtactgg

SEQ ID NO: 16274 - DNA, 599 bp, Arabidopsis thaliana columbia
gcatgcaggtcagaggatccccatcagaaccatgaaacaccaaaccaaactgcccttaagccagtgagtactcttcaaataagcctcatccatggtggctctcttggtcacaatcttctccccctcaacactaatgtgaaaatgctcaaagataggagtgaggagactaccaatctgctcagtcttcttccatgtgcatgtaaagggtttggtcttaagagagaccaagtgatgcgcgaaaacagccccaaagttgacattgcggtccacttcctccatcctcaaagtgtcaggaaagaagtcacgaacaacatgataaagtagcaagaacttagaaagcctcatcttccaatgctccatcttacacaaaaatgtgttgctaatcagtctagccaaatacctcagaacatgctaacaaatccttgaatgtacaacatccttggaatcataaattccattgccaaattcgctccaaaatatttgagcatctgcaaactgtccaggaagcgaaacatgagaagtatcattctcaaaaccatagatgtacacaaatccctgagcggtaaaatttatctgatacacgaatgaagaaaataagg

SEQ ID NO: 16275 - DNA, 473 bp, Arabidopsis thaliana
  unsure (1)..(473): unsure at all n locations
actggtcgttctcgaatgtaccctccaatatgttgtcgaaagaagtaaaattgttgaacttgataggggtgttcggatcacccgatgttacaaccgttttgtccatcaaattgataccatactcggcactcgtagtcttgactggatcagaattaggtatcaccttgaagttagttaacccgatccacttattttcaaagatcttgtcgaagtaaaaggcagaaaagcgtcggtggattgtaacctctatccccgtcccctattcagaatattaaacattattaatatcaggtacatgcaaaacacaaaacaaaaggtagcttactgtttgatcagctacgataactctaagttcgaacaaatcgcctctttggtatattcaagacaatcactcgtacagtccagccggtgatttgaggggagactcgttgagtagatggtagttgcccattnttttcgtttgagtgatttat

SEQ ID NO: 16276 - DNA, 574 bp, Arabidopsis thaliana
tattccaaaggggcgattcattcgaactaagagttatcatagcaaataaaccgtaatattttcccccccccctgcatgttcctgattttcacaattttccagtttctgaataggggatgaggatggaggttacaatccaccgacgcttttctgccttctacttcgacaagatctctgaaaataaatggatcgtgttaaccaacttcaaggttatacctaattctgatcaagtcaagactacgacggctgaatatgggatttacttgatggacgagacggttgtaacatccgtagatccgaacaccgctatccagttcaacaatttcacttccttcgacaacatattggaggggactttcgataccgactaactggtcggtaagtctatgtttattaacttatcaattgattcttattaacaacatttttgagggtagggtttgatctaaacttacactgaaagtacagatctcgtcggtgctgttgttgaagttgaaattctgtctcattctggtgatccgacgatggcgtagaggggatgatcatccttttaaattaatggacagatagtaag

SEQ ID NO: 16277 - DNA, 596 bp, Arabidopsis thaliana
agacttctgtttgaaacctaacagaagagacatctcgcaagctcagcaacttaacacataaataaagcattttggtttcaaattacgacaagaaacttcacattcaaggtttgcagtaatcaaaaccaattatctaacttaaattcatgacagcagtgcatgccttcatttcgtatactaattaacataagtgattcatacgtgtaaatttaagatgagttcttaccattttgatttcttcaattgatggttcagggtattaagttgaaactgcaccatacctcacgattttaaccttgtttttgcgcccaccaaccagttcagactccctaaccaccctccaccaagccagtgccacaacaatttttggatgaccaaagccccggtaacaagtatcaaattctaatgcctttctcccagtggcctcacagtctagaatctctttgctggtgtagggaaaaatttaacaatgttaaacacaccaaattatcctattttattttatcttagacgaaaaacttactatatgtccattaatttcaaaggaacgaccatctcctcaacgccgacgtcgggatcaccagaatgagaaagaa

SEQ ID NO: 16278 - DNA, 646 bp, Arabidopsis thaliana
atgcatcctagcacatcatagaaaccatttttgcagccattgcaaatcttaatccctccatctggtaaagtgtgatataagggatgatcgggatgactcggatgaagaaatggctcagcaattgaaccgcaccgaacatcgaatgtgatgtttccttgatggtatctgagaccattggaccatctatcacaagcataacacctaaagggttcagcttcgtttataacaagagtaagacgttcattgtgtagcacatgccatttcattctacgaaatccagcgcagttttggtggagaatgaagtcacaatccatacagccgtaaaaggactggagacagatgggatgggtgcatgcactgcaccacttgttgtcgtcacaaagaacaccattaacatggagtcgtaggtaatgctctttgtggctgaaatgttgtattgtgttttcatctattaccacatatggttgtatatcttctgtttcttcgggtactccttcaagctctttcccattccacacatcttttctagtagcacatttagaatgaacgacatagccatgacacctctgacaagaaaagcctccacaagtccaatccaccttctggtgacaaactccacatacagacttgacaacaccaagaacag

SEQ ID NO: 16279 - DNA, 587 bp, Arabidopsis thaliana
cgtatttatccaagttaaaacaagatgatttttttgttgttttggcggcaattttccctcgcttccgaatgagaattccccatcttcccggttcaaatatttggatgtaatattcgactattttaagcaagccaaataaaattgttgttatccacgtggatcttcagacgtttaacatctgatggatttacatatatagtgatgtaatgcatggcaataacccaaattttgtggatttgttactatggatacacgttttaaaaataatttttgatccattatgtcgtgatacctaaacgatatccggttaattcgtgtagttattactagccggttgttattctaaacgattgatttattggttatgtgagatgatatttaaggaagttgcttaacccattaattgaccataaaatcactgaaacgagaaagacatgatgttcaactaccatcttctcaacgagctctcccctctcatcaccggctggactgtacgagtcattgtcttgaaaaagtacaaaatattccaaaggggcgattcattcgaactaagagttatcatagctgatgaaacggtaataaacttt

SEQ ID NO: 16280 - DNA, 519 bp, Arabidopsis thaliana
tggtacactaagaccagtgtacgtagccattaccggtttaagattcttcacggtttacggaccatggggtagaccggatatggcttacttctccttcaccagaaacatcctacaaggtaaaccgatcacaatctaccggggcaaaaaccgggtcgatttagcccgggatttcacatacatcgacgatatagtgaaaggatgtttaggatctctggattcatcgggtaaaagtaccgggtcgggtggtaaaaaacgtggagcagcaccgtaccgcaatagatccatccgcaccaagataatcatcacacccatcatcatcttcgttgccctcctccaattcatcctcttctgttgtatcgtcttcaacatcggcttgctcctctgcatcctcattattttcatcaacatttgtagcactatcaaacacacggtcactttcagaaacttcaccatgagacctagagacagtgttccgaacgcctcactgtactattgaagagacgacaagttgagagaaag

SEQ ID NO: 16281 - DNA, 1196 bp, Arabidopsis thaliana
tcctcagaaacctattcactactcagatatcataatagaaagcataaacgttgaacaaattgaaaacatgataacaacaatataacagcaggatgataacagaatgaacaacagtaaacgaaatcaagaacataaactgaatactgaatagataaagagaaatccggattacaaaaagtctagaacacaaggtctgcggaaataaaactagataaaaaaaacttcttgtcgaaaatgtgaagtacatgctacttatatccaaatatcccgaaaccctaatactcaaaacgatgaagtattgggacgggttaagaactgtactcgacccatgtggtcgagtgagaggtcgagtgaatagctggagtcttcttttcttccttgtgctcgagtgtctggttgagtgcggaatgaagaaggctctaaagctcgtcatcgagtatgcagtcgagtggtggtgatggtgatactcaacatccatgtggagtgatgaggtcgagtgaaggttttggcaatgggatgaagtcactcgacctgggggtcgagtgatgtgatcgagtggtggtcaaaagatggaggtctgtgtcactcgacctgggggtcgagtgatgtgatcgtgtggtagtctagagatggagatgaagacactcgacctgggggtcgagtgatgtggtagagtggcggtgtcttctactcgacctgggggtcgagtggtctcttgagatcttgaagctcctactcgacctctgggtcgagtggtttgtcatgatcaggtctgcttcttccagttagctcgtcgacaactccaaatcacctgaaaacaacacaaatatgcaacaagcatgcaaaactatcctaaacatgcaaagtgattacaaatgatgtgaaatggtataaaacagtgatgatatgattctaaaatgatgacaaatggatgctccaaacatgcaaaatacacacttatcaggtaacatataattatttttgtttatcgacacaggtggtggtgttgattgacacccgtgctacaactggactatccttagtctgtctacaattcagctctacaatatgttccgagacaaccaatgtctaccttttgtcctcctgcttatgtggaccttgcacagtcctcctgaatcctttcttagcttttgaggattggacagggaattgtaggcgtgtagcttgtgtagggc

SEQ ID NO: 16282 - DNA, 716 bp, Arabidopsis thaliana
  unsure (1)..(716): unsure at all n locations
ttcttgttgtgtggctaatgtcatggcttcgagtctacagcttgtccgccatagagccataataacaagctaatgaagagtctctttccccagaactagaaagcagtgaagataccaaccttggtgagttttgtttcgtctctcattctaatacgtgacattcaagaatcagtttcactattaccacttgtatttattcctgtcattttctgggatgattcaaaggaggaagaaaaggaagaagaatccctttagttttgtggctaatattttgcctacgagtctacgttatgacaaactggcgaggtgaatggcataaaaaatgcaaagaagatgagtttcttggataaagatgatgtgaaatggtctacgaatctgaggtttgaaaaggaccgtaagagaatgagattagtaggaggttggaaaacgttttgcaatgctaactgtgtgaagagaggagaatcgatagtgttggaactgattgtggaagcagaaagctttgttcttaagttctactctaatgtaataatgcaagagatcaaataaaactgtttctgaggttattcaattacaagaagggtaaattgcacacagtagccattgacccacttttaatttcagattttgacaaagtgggctgggcatttcagctattagccattaagccaaaaactgaccaaaatgcccctggcgacctgacganactgaacccggtt

SEQ ID NO: 16283 - DNA, 654 bp, Arabidopsis thaliana
cgctgttgttgaagttggaattctgtctcattctggtgatcccgacgtcggcgttgaggggatgatcgtttctttcaaattgttaaatgttttcctactgcagcaaagaggttctagattgtgaggccaatgggagaaaggcattggaatttgatacctgttaccggcgctatggtcatccaaaaattgttgtggcgcttgcttggtggagggtggttagggagcctgaactggatggtgtgcgcaaaaacaaggttaaaatcgtgagttatggtgcagtttcatctgtttacccggaaccatcgattgaagaagttgaagaaatcaaaatggtaagaactcatcttagatttacacgtatggttcacatatgataataactaattagtatacgtaatgaagtcatgcgatgctgtcaagaatttaagttagataactgtgttttgattactataagatttgaatatgagtttaagagaaaatttgaatcccgaatgctatatttatgtgttgagttgctgagcttgcgagatgtctattctgttaggtccagacagaagtttgcttgaagatagggaaagaattatagtacaaattttaatgaaatcatgggtgtcaagacttattgtggaacattattctctagatactgtg

SEQ ID NO: 16284 - DNA, 1075 bp, Arabidopsis thaliana columbia
caaaacataaatccgataaaaagtcttcactaggagcaaaagaagacatagtgaacctttagtattcatacatcaggcgaccaactgcaaaactaatagatacaatatagagaagtcattaataagagttcatataacccagaattatctcattatagaaacacctagaactagaaactggactttccaattcgcagttatctagaaaatcaattttttacaataagtcttgacacccatgatttcattaaaattttcactataattctttccctatcttcaagcaaactcctgtttgagacctaacagaagagacatctcgcaagctcagcaactcaattcagtttaaaattttcccttaaattcatattcaaggcttgcagatagcgctgggagttcggtggaaaccgatcaaaccgacccgatcaaaccgagattttcggttatcggcataaaccaaactgattcttcttatccgataggcgaaattaatttgggaaatcggatttcggttcgggtcggttcggtaatcgaaaccgatcggttttacctaaaccaaatatctacagccatttataaagctaatgagtcagttgccctaattttgtctcattttcttcttttggatcgacgcctcctcttgcaaaagggaaatagagaatcatcttcttctctaacttaatccataattttgctaactttcttttctttcatcaattcatcatcttctacatgttcttttagtctttaaaatctcaattgttgttagctcttctttcttcttaatcgtttctttgtctgattctttgttgtttgtttggtaaacttttccttatgacaaaaatcacggctagggtcactggtaactctctagatctgattgatcttcaatttacatcatagatttgtatgttattatcattacatatatgatagatcttgtcggtcttaacttttttgcggttggggagatcgtccatcgccgtccactgccgccgtcgtcaccgtccattgccgccgttgtcatcgtccgtcgctgcctcatcaccatcaaccctaattgtgaatgggctgg

SEQ ID NO: 16285 - DNA, 604 bp, Arabidopsis thaliana columbia
taaaataaaataatatgtaacactctggtttcaggaatatggtagtgcatgctgagaggtttaaaaaaattgatttggccacctatcaccaaagtacacttatctttttggtcaaacgtcctgagagaacttcacagttaaacgtgcttgggctggagtggtttcagaatgggtgaccttccggaaagtgattgtcggaaccatgcaagtgaggacaaatcatgaggaaagatcatgtagtgatttgtagagatggtaacaaatctttaaagtctcccagatgtgacgcatagaccgtcagacaggggtggacccatggacccgaaagaagacgtgaggcccacagctaaggacggtcggggcgttacataatacttacctgacattcaatgtatacacatcttcaatcttttgtctctcaaatttcagacttttggaaagagaagtaaaccctacgttcttccaagaaaaaccttgcatgtgagtgaggcttgataaagagaggccacactaaaaaataatagagaaaatgaaatccagaaaattggagcaatagaaacaatggagaagaaacgttgcatgccaacatctggtatgaaatcag

SEQ ID NO: 16286 - DNA, 1039 bp, Arabidopsis thaliana
cgctatattacggactaaaattaaagatttcatatgctatctaaaacaaggccatttctcttaatgtaccactcattattactaccaaaacttggactactcaaattccaaaaaaaaatattttgcattatctaagtcagagtagcactacttgttttcacaaaaataaccaaagaaataacaaagttatgaaaaacttacggtttggtaaatttgacggtcatcgcaacaaatcacgacatttttaaccccacggtgaattgattcatataacccagtaattagtgctagaatatctgcttcttcgcggttaatcacagcttcataaagtgatttattcattccatagaataagttatccgcctcgtcgcatatcgcgactccaaacccaactttcacaatcgctttcttgtctgtcgccgtttcaccgctcaccaaacccttgaagtacaatttgtagactacattatccacacaactttgtgtctcaaaggtggattggccaaccttagaacttccctcacctttgcgatttgggatatctttggttaccgcataatccatccgacgttttttagaaatgcaatttataacatgattttccatgattgtttaatatccaaattttatcgagaaagatcgagtctatatatagaggacgagaggagaattgagaaattgtaaaataaaatctcattaactacaatagtcgtcttttaaaagaaaggttaatctaaaaggtcatttgcgtgtaaattgtgacggatcataaatgtatatgtttgactagattttttactaaatattgctctaatgatatttttgatttctaaagtagtaaaattcgaacaatctaacttttctttttttgttgttcatgtaatcatttcttttttatccaacaaaataagcctttaaatttttaagtcagacccattgatgtaaacttaaactctctacaataatttttaatctaaacctctaatataaagtttttgccattcaattccaaagttttctcttaatgattttaagggta

SEQ ID NO: 16287 - DNA, 512 bp, Arabidopsis thaliana
tcttgtttctccgtcttcttcctctgagagcgaaatgccattagttcgccagacttctcggctaaccgggaatccgaacgacgaagctcagtctagtcgatcgaaccggatcgagattccgacgttgcttgatgagccagatcgggaaggttccggtggacatctcgctgctcctgaagatccggtggatttcttatctcagttcgacccactcatcgacctagaggatgcttataacacgcagccgcagtatacagaggctgaggttaatgcgagattacttcacgaggattatgttgaatttgacctcgacccagttgttagctggaacaccgagatcactgcgaaaaagaccctttcaacaaccgagtctgtcgcggaagtattcgccctatgtggctatggagatcgcccgctcacttgcatgattcccggagaggaggagcgcccatggaatcccctcgagggtatgtttgtatgtatgaacctacttcagacagtgtcactctggt

SEQ ID NO: 16288 - DNA, 776 bp, Arabidopsis thaliana
cttttcctttgccccatatcacaaggtataatcctgcacatataactacagcaccaagaaccctgccatagaaaaagtttttttattacctcctttcaatcttggtgtttaaaactcgttttagatgttgtttgtgtcttgcttaccttccaaggtacatttgctcagcaaagatgatggtcgacataatcgctactatgatcatacaaagaggactgaaagctgtcacaaacacaggacctctggttttcatcaccactcctccaacgtagtaagccaatgctgagcacactatcccctgcatccattttatattccaacaattttaagttatcaacatatatggtgtagtccatgaaatcactagtctactgagatatgtatgcttacactataggtggctgtaagaagtttagtgtcccaaccaatggcccatgcgctgggatttcctttctccatcactaatgccacggcggttccttctattgtccccataagacatatccatgctgtgagagagagctcagcagggtaagtccttaatgttatcgcctgaaaaacattgattcattgtcaaaattgatccataagtgtttttttatatattttttgtttgccttacttggagaatcatgaaacatgcatagctaaaacaaccaatcgtgaccaatactgcgcctttgatggcgttatgaatgtcggtcccagctgtgttatgtgcagagactcctttggtccaaaacagatcgagaactgggcctttgacaagtgtcatg

SEQ ID NO: 16289 - DNA, 905 bp, Arabidopsis thaliana columbia
  unsure (1)..(905): unsure at all n locations
cacgactcctttcaacctcctctatggaaaatcctgtcatttgcctgttgaactcgagtataaagccatgtgggcagttaaactcctgaactttgacattaaaaccgtcgaggagaagcggttgatctaactgaacgatctcaacgagattcgcttagaagcttatgagagttccaaaatctacaaggagcgaaccaagtctttccatgacaagaagatagtctcaagagattttaaggttggtgatcaagtgttgctgttcaactctcgcctaaggctttttccaagcaagctcaagtctagatagtctggtcctttctctgttactgcagtctgaccttatggtgctatcactctagctggaaagaatggagacttcacagtcaatggctagcggctcaagaaatacatgatagatcagtttattccagaaggaacctctgtacctttggaggagcctttaaacgcctaatgagtatgaagagtcaagctagagacctaaaacaagctcacttgggaggaagtcccaagcctatctttgcacatatctttaattttccttgttgtttttaatgcatcttgttagtgttttcaggagataaatatgaagagttgatggaaataaattctggctttgaaggaacagcaatacactcgaccacaaagcaatcaaactcgacattgttctggcgtcttcacaccaggaaatcactcgaccacaccctataaagaccgaatgacgatattgtcgagtatagcgaatgatgcagtcacgacttctccactcccgtagcttacgcgaccgcggatggtggccgcagcagaagaagagaggtcgagtatcatcacagcggtgctggccgcgacganggagcagaggtcgagtacccccagggggaagctgg

SEQ ID NO: 16290 - DNA, 522 bp, Arabidopsis thaliana columbia
tatttgtttttgtgttgatggagattgctggtgggttatgtgataatctattgacatgtatagtaagagcatgggattatagcaaaccgttgtttgttgcaccggcgatgaacactttgatgtggaacaatcctttcacagaacggcaccttgtcttgcttgatgaacttggaatcaccctaattcctcccatcaagaagaaactggcctgtggagactacggtaatggcgcaatggctgagccttctctgatttattccactgttagactgttctgggagtcacaagctcgtaaacaaagagatggaaccagttgagttttacttagccatttactgctctgtttgctccagtcattatcaattagcccatgtcataaatgtaactttgttcttgaatacactaagaacaaacaacatcgattacccttgaatgttatgcagatatttaatggaaaatcaaagcaatgcaggttttatgtggccaacgactcgagtaagaatcgaaacaacacatgagttt

SEQ ID NO: 16291 - DNA, 543 bp, Arabidopsis thaliana columbia
cacttttcactttaagatggaacacgttccaccccttttcttcggccaatgcgagaatcgatctgattgtatcccatctcgccgccagagcaaatacttcataacaatcaaccccgtacttctgatgatagcctttcgcaaccaatcttgccttgaatttatcaacttccgctttctcgttaaactttgtttggaaaacccattttacgccaataatgtttgctccggctagtagatccatcagctaccatgtattgttctcttcaatagaagtgaattctgcatcttcaaaacactcgggatcctcggcaacaacaaacattgcaatgatctcttatccatcttctgtaactaagaaacctgcatttccaagaacgtaatccttcactcagactagcgcttgtctctgtctaattgttccttctcgcacaggagtttggttgtgactgatttattgggttacctcttatccactctttcctattcccattatcatgctcttcaactgtgacatcttcttgtggtccataggtaatgtacaaa

SEQ ID NO: 16292 - DNA, 1093 bp, Arabidopsis thaliana
tgttgtggaagttgtggccgagtatttcaggatctccaggatgacggtactcgagctcgtggtcgagtatgttgatttgatcaggtccacctcttcaaattagctcggcagcagctccaaattacctgaacacaacacaaatatgcaatatgcatgcaaaactatcctaaccatgcaaagtgatgacaaatgatgagaaatggtataaaacagtggtgatatgatgctaaagtgatgacaaatggatgctcaaaacgtgtaaaatgcacacttatcaagcttgaatactctattttatattgatccaaaataatttacacgctagcattatattatgaaaatttgactataagataaatctttggaaatcgtgaaagtagcaagagtgttgtcattcacaaatcaaaaggtttaaagtattgtcattcgcagtggcataatcttctggatgaatgcgtgtaaacagactaattttattgggtttgagatggtgtttgtctttatctgtatatacgttagcttattcaagttttggacatatttggaaatatgtatagagtataaatgacaagtgaataatgtttccaccatatatagttatatacaatcatatctttattcgttatcttcactaaacatttcaaaatgagaacactcaaacgaaaaaaaagcatcactcacaagagtcgacgatctaactctatatatcagaaattgtgtcatttgtgttaaggttttggtttttggtaagaaaattttgggaggtgatatagctcacattgccttaagcttactccctaacacacgacatcgtcattagcacttaaagctcgaattccattgaaccctcgatgttcacacaatagacttatgatgatttcaattaagctagaccaatagattataaaataagacataaagacaagcaataagtattaagatgtaaataagatgggaaagagtcaagtttagggtattcttgggagatagatgattagtagatatcgtgatagctaggttgttatcgaaccgttcttaaactcaaactctaattttggaataccggtggcgttcacgaaactccctgtgccta

SEQ ID NO: 16293 - DNA, 469 bp, Arabidopsis thaliana columbia
gtgagcaatgtaaaagtgacaaacacggtgaagtgatgcttttgtgtgatagttgtaataaaggttggcatatatattgtctatcgccaccgttgaagcatatcccacttgggaactggtattgccttgagtgtttaaacactgatgaagagacttttggctttgtgcctgggaaatgcgtattacttggagattttaagcgaattgctgatcgagccaaaagaaagtggtttggttcaggaacagtgtctaggacgcagatagagaaaaagttttgggagatagtagaagggtcaggtggtgaggttgaagttatgtatggtaatgacttggatacttctgtttacgggagtggttttcctcgaataggcgaccaaagaccagaatcagttgaggcagatatgtgggatgaggattgtggtacccctgggactcaataacatgcctaagttgaaaggatctatgcttc

SEQ ID NO: 16294 - DNA, 931 bp, Arabidopsis thaliana
ttttcctaaacgttcacaacacaatcaatattgctgttttcttgctttgtttacttactatttcacttacaccctactagcttaatctcgacatttaactcattgtttaaacaaaagaactccgtgattcgatcttaaataactgcaattaatctcttatttgagagagtagttctagctaatttgaaccatatcacattggttggtgtaaccattgaaatgctcccatgcttcacagaagctttcaccagtcatctatgaaaagccagagatctcatttccgagtcttgcagttttggcattgagaagaactttgctagaaaagcattcttgcaatcatcccaggtggtgattgagtcatgtggcagattcttctcctagatgtgtgctttgtcgcccaaggagaatggaaacaaacggagcttgaatccgtcttcactgacaccattgatttttgttaggttgcagagcctatcgaattcatcaaagtggtcgagtggatcctccattggcagaccatggaatttgttcccctgaatcatcgagatgagaccacttttaatctcgaagttgttgttctggatagcaggaggtgcaattcgtttcctctgacgatggtctcgtggtgcatctccagcaccaatgttggcaggaccattctgttgattctgttcgtcagccatttcgattgttggggcaaaaaggtgattgtgtttctcctttctctgagttcgcgagctatgcggtagaagttgttgttggaaaggagattctggttgcctgttgatcgagttggcatacagaagaggtgtacttggataaatgagacaacaagaaaaatacacagtcagtaactgaaatgaaaattgaaaaagaacttgatctaagcaagtcggaaatcttaaatctattgatcacactgagcacactg

SEQ ID NO: 16295 - DNA, 630 bp, Arabidopsis thaliana columbia
gtacgagagcatgagattgtttccgccggttcaattcgattccaaattcgctttaaacgatgacgttttgtctgatggtacatttgtgaatagtgggactagagtcacgtaccatgcttatgcaatgggtcggatggaccggatctggggcccggattacgaagagtttaaaccagagaggtggttggataacgaaggtaagttccggcccgagaatccggttaagtacccggttttccaggccggagctagggtttgtatcgggaaagagctgcctatcatggccgatgaaatccatagctgtggcaatcattaggaggcttcgaaacacgggtcgcaagtcccgaaacaaccgagacactccggtttgcgcctggtttaactgcgacggttaacggtggattgccggttatgatccaagaaaggagttagactcataaaagcattaagtcaagatatataataatacttaatgaaaaccatagatagagtctttgttctctaactgaccaattattgttacatgcaacacacttgttgcaacaattatgtgtacattactcttatttaatttacaaagcaagtgggcttaagtctttggaacttaatgtaaatgcttaagtaatatga

SEQ ID NO: 16296 - DNA, 1010 bp, Arabidopsis thaliana
taaatagtcatgaataacttaaaaacaaaaaattgtttgatgcattaagaagaggcaagtggtaatgaaaaactgaccagtcgcgtgaacggtaaccatcgattgtggccacttgctccaaagctttaatccatctatcaatgtcctctttgttttttctctcacattcttctctgtgcttgttcatagccgtatcatcaatctttatggacctaaacatagtcatcaaacacatattaaaaaactgtgaattactttcatgtgttaagaaagattaagaagactaacaagcggctggtaagtttatagactctaggcaattccgccaaagctctagtgcatttccaaatgtcttcatctgttttaccctttcgtgtttttctgaaattatccccaaaatctccagtctgcttcaatacatcaattggatccaaattatagaaaatagtcaccactctttgacccaactcttctttgcacttcattatctccaccaactcgtcgagacaccacggagagagagcgtagttccttgagagcacgacaatcacgattctcgagacactaatcgcgtttctgagctccaggtccgatcgacacgcacctctcggtttcattatcgattagtggctcgaaaccctttcttcttaactctttcctaatcctactgagaaaggatttgggtacatctacagagctgaagctcgagaacacattgtgttcccaattgcgagacgaagccgttatcttcttcttcttctgcggattggatctgatgaatttttcataaatcagaaatgaaaccgtacccaaaatcgtgattgcagccgcacagatcctaaggagggaagcagaggaataatccatttagagtacgattgcaaaagagaaaaaagaccttcgtctgcacaaagaagaagccaccattattgactccattagcaccattggttacaaataaaatatatgtatttttcgtattgggaatttaatatatttttttattaggt

SEQ ID NO: 16297 - DNA, 294 bp, Arabidopsis thaliana columbia
acaaagtgaagaagctagtcagagtagaaacgcatcataacatgccccacggcgagattcccagttcagtgagttcgtgcaccgagttaaccgaattaaatctctccaacaaccgtttacgaggcgggataccaccggaactcggtgatttaccggttttaaactacctggatctctctaacaacaactcaccggtgagattccggcggcgtgttgaggctcaagcttaatcaattcaacgtctccgataacaaactctacggtaagattccttctggattcagcaagatattt

SEQ ID NO: 16298 - DNA, 1147 bp, Arabidopsis thaliana
tagaggatagaggatccccatgtcaaatcagttgtagcatttgatagcagtgtgtcctatgcgaccacaaatttgacaaactggtctttgtcctgatgatggtgaagcggattgatgttgagaaaatcctctgccgcgtgtagagtagccaccgcgtcctctgttttgcccagaacgaccacgaccacgggaattggaattgtattgaggagcgccagagttagacctttcagtattgaacgcaagatgaggattaacagagacagtgtcgtcataagattgcagcttactgtcaaacccttgaacttcggagatgacgtcgttatacgtcggagcagggagcttgcttagggagctttggataactgtggtgataggatcgtactctctgccgagtccattgagaaagccaaagattttcatggattcctctactggtttgccaatggagcttagagagtcgcatattattttaaaatcacgacagtaaagagatagagacttatctttttttgtcagaagttgaagattacgacgaagagaaaactctctggcgatgctacttttgttgaaattttcagctagagagatccaaatctgacgagatgtagtgaggttgtggacatgaccaagcacttcctctgaaagcgtaccaaacaaccacgaccggacgagctggtctgtgcaaaaccagtcttcatattgaggattcggaacttcgctggtgacatcatcattaacaacaagacgagtctgagctggaggagtgacgactccattgacaaaacctatgagcttttggctcgatagaagggactcaaactgtgtcttccacaacaagtagttactatcgttgagctttaaggtaacggaactagagacatggacattgtctggaaaagggtaagcaggggccattgaatcacctgttaaggtataatagctctgataccatgaagagaaaaataaaactgtgattatttcttgacaaaaaatgtttttattttgcttatctttcaatggagttttacatctttcttttatgacttctttagaacaatttagaatccttgacaatgctatctttaatcaatagctatttattgtgaattactgcaacggcagcgactgcaacggcttgaatttg

SEQ ID NO: 16299 - DNA, 995 bp, Arabidopsis thaliana columbia
taattttgtttgtttttgcagcgatatttagatcattgttgtacgaagcatgcgggaggattgtgaatccgatatacggatccgtggggttattgtggtcaggaaactggcatctttgtcaagcggccgttgaggcagtaatgagaggctcacccgtgactccgatcgcatgcgacgcagcggttactggtcaagcacctccttttaacaacaagctttgcgacataagacacgtgtcaagcagggacgagaacgttaagagacggagccgtggtgcatgcaaggaagagagaaacgtgaggtctttgagtcatgagtcgtcactgagtcacgagtcaccggtgtcttctgaggagacgacgacggaggaaccaaagacttggatcgggcttgagctgactttggggttggagcctttagcacgtggaaatcacgtggtggtaccgatgaagaaaagaaagttagagaggtgtggcacgtctgaggatgaggacacgtgtaagattgagcttggactggtgtgcagtgagtgaatggttctttttttgtggctggtcttaattacaagttttggtgttgagttttaggtgtacaaatagagattaacgaatctctcttttttctctttttgagttttatgttttgttttgttttcttttgcatgttcggtgttcttcataaatatgtatgatgaatgataaagaggtcttaacttaacaaatcttggttcggatcgacataacaaacatttcttctttccattctaaattcttgattttactcatgtacttaaacaaacgatgcaattgatgtaaacacgtttatcccaataaattttgtattttatttatataaaaaaaaacttaacaaatcttctatttcagaaatatctggggttagattacaaagaatctaagttgcttaatgatgaaatctccatatgatgattagtcattcatttataaatattttgtctcaaaaagcccttttgtatg

SEQ ID NO: 16300 - DNA, 843 bp, Arabidopsis thaliana columbia
gcaagtatgccccaattgctcattgtatcatgtcattttgcaccattttagcttattttgtatacttaggaatctaggatcatcttgcattcgcattgcatgttttgatgtgttttcaggtgcagaaggagcttaaaaggactctactcgatccattcactcgatcctggcagctacagaagaggcatcgattcactcgacctctttactcgatccaggatgctacagaggaggctgtagtttactcgaccctcttactcgatcaaggcaacctcagatgaagcagaagattgatctactcgtccctcctactcgatcctctactcgacccatttactcgaccaagggtaaccaactctacaagacttgttgagctatcaaagcgtcttcgtatcctcctcattccccactcaaccagacatctgagcatacagataggagaggatgaatcatctactcgaccaattgatcactcgaagcatagacacaaaggctgtacactttgcaacaccctctttacttgatccccaagatcgagtattcgcccaaactgcgtcaagtctcttgtcttctagtgaatctagggtttcaacattttattataaatatatcactttggggtttgtccaaaggatctatgctttatctctcagttattctttgtgtttatgaatcttaaaaccttaattacttttaatctatttcgtttttgcatttagttgttatagtaaagttgtttagcttgtttagatctacattttgatatgatttcagtaatttcagggtttgtgttcttgagaatgttaatgaaccttggctgccacgggatcctcttgctctaga

SEQ ID NO: 16301 - DNA, 339 bp, Arabidopsis thaliana
acgaaggaggaaatagtcttacgatatccatggcccttcacatgaacgggtatggagctgttactgagggtaacatttcaggtggcacatttttcatcgggccatgtcgctgacatggtttgcacttcgccgaataagcctcgcagtccggcagcatagttggccagtagttgtagtgacccgcataaaggcatcgggcatgggccaaggatcgaatgagaaaaagttgaccgaatacacggccgatagactgaatgtgcccaaaggtaccaaactatcaaatgacaaaaacgggcaagaatgggcacgaatgggcaaagatgggaaagattggacaaa

SEQ ID NO: 16302 - DNA, 858 bp, Arabidopsis thaliana
acttgtgactttggctccaaacttgatgaacaaccaccattcttgatcttcagagtcagtgagcttgctctcaacccgatcaggagcccagttctcgataagattcaagagttgcccagccatggaaggagggcatttcctgcataatagcttggaaggtccaggggtttcttgatgactagaggtcggtttctcttgttccagagggttacatgaagataatgatggcatcttcttctctttactaacttttctgttatctttcgaaggaactgacttcttctctttgttgagttttgttgtgatctctctcgacgaaccaaaagttggatctattcttttctcttgacagacccttgaatgaccaacagactcattaggagcagtagcagcttgagaagcatctaacatttcccgggaaaagcgctgtttttgatccttgctggtcatcatcaccccatcctcaggatcttcctgccctttgtcaggtaaccgagtccgtatgctggtttctttaaaccaagaaagaatgacaccataagcaaacagacccaacaacaagtaaaagcaaacaagctcaccagagtcgttatgttatgcctaccatcaaggggctgactctgaatttgctttggtctctcattgctatgaagagtgctatcacaagaattctgagacgatgtttgaagctcaagttccacagtctggcagctcttctctaacaactcgacctcactgcttactaatttgccactagcaatggcgccttcatctttccgccgtctcttatgccgatgcttcctgctcctccccgcctcattatccctatcctttctatctttttcattcctcttgtgt

SEQ ID NO: 16303 - DNA, 875 bp, Arabidopsis thaliana
attcttccaatgtgttacacttttcatgtgaacttcttagtgttaataatttcaagtttgcaactaactaattcaataccatcaagaggactaaacagacaatactgttgtttacgatatgtctacgtaagaaaacctctttgtttcttaaaccaaacaaaacagtgaattacacacaattcaagtgaaataaaaactgacttaaaaatctaatttacattaatacaaaagaaaaataagaggagagatttaatatttgtttcatattagccgatgtacatgtgaatttggagagcaagcaagagaatacaaacaagagtgaagtaaataagagtatgaacaataaccgagagaccacttgtctgaaacgttccaaactcaaccactcgacctctcccaggaacttgaatcagcagtcccggagtcagcaacacaaaaagcgtcaccgcgacaaaaaccggtccccaatcaggcatctctcgatcgatccactcctctttctaggtatcttaagagggatatagttgatcaatgaaaatgcacaagtgtgtgtatatatatgtagggaaatttgtagtggagaatagaagattgggttcttttctttaagggaatagagtaatccattggttaatgtcggaagaaagaatgctttgggaggaaaggacaaagaattgtgacatggaaggattaaagttataagaaaaagaagagattatgatccatcaagttgtgtgaggattccattaatttcattggaatgtgatgtccatgggattggctttggacaaaggaacaaatatcaaagtagtcggccattttttattggttactttaccacaattatttaacctttatgagaaaatataacaata

SEQ ID NO: 16304 - DNA, 942 bp, Arabidopsis thaliana
tgagagcaatgggtcgcaatatgaataagaccaagttagcttgtttccaagtgaagcacaagtgtatgactgaaatgctagagaatcagcttcgtctacaaaagaaggtcaatgagctacaagaaataattgagaaaatgaagaaccaggttagtgcacttatctatttatatataaagacttacagctcaattagtacataagatttgactttgtttttctctttttgtaacagatacaatcacctgaagtaggtgaaaactcagcttcaagagtaagtcactcatatcatatgctttgatttgctctaacagatacactcacttaatactttgtctatctttttcttttacagagtgtgaacaaaaggacacaaccaaaatgtgtcttacttgattgggctggttcgtatgcaaaaattgctgagggatgtattattccttatgatctgggtgaattagtgaatgactgtcgcttaggtcctaccgatgttaaagtcttgattgacactgatattgaaccagaagcattcctttggagacctgcggctaacatgttcaccattgagaaagccgttgaacatatgattgcatggcctgctgctatgtgtgttagcctagaagaggatctccaataagaagacattgtaggccaggtaaagtttattattcagtctcattctcatatatagagtaatgatcttctattaacataatgtatttccgggtttcaatatttttgacagggaccaaataacaaatgccagctttttgatttgtcttcaaatgatgttgttgttgcagaaggacgttggcagacacaagaacaaaatgcattagtcaatgggaacctctcggacctccaatagtgaagatatatgtcgatgcaattcttcaaccagagacatttatatggaggtcacgatggatgtgacttacttga

SEQ ID NO: 16305 - DNA, 741 bp, Arabidopsis thaliana
atataaactaaaaatagtttaaaatatcaatatatatatatatatatatatatattacgaaaagaagaattaaaacagactacacacataataaaattttaatagtaacacttacaaacatatccaataataatcccccaattaattcattatgatctttatgttatttctatatactcaaaccaaaaaaaaagaagtaaatgattcaaaatccaatcataattatttttcaaattcattaaaatacaagaaatttcatattaaaaaaatagatatttctttcaaagatttatattcaaattataaatatatactaaaacgctaaaaaattaagtacatgctataatcttttccattatttttctaacaaaagaaagttatatatgggctaaacttagaaggaaagcccaagaggccaagactatataaagattcatgacccgagtttaagatccgatttcagaatttgggactaaaggaggacaacgacaagcgccgggaaaaaatcgagagcgacaacaatggcgccttcttcgtcgagcggtctcacgttcaagctacatcctctggtgatgcttaacatatccgatcacttcactagggttaaaactcagcttaatcctcccgccgcttcttgcgccaccgggaatggctccaacaacgccgacgcgatgttactgcaaaaccctagggtttatggctgcgtcatcggtctccagagaggtcgtacggttgagatct

SEQ ID NO: 16306 - DNA, 700 bp, Arabidopsis thaliana columbia
gtacaggaaagagtctaaaaggttcttgaacattagcttgattgatgagacccagcgatgagagcctaatggatatagttgagtgatttggtaagtaatctcggatgttgtgtgagctagctgagaattacatggtggtcaggacttgactagaactgtttagtacatggaattggtttgtatgatcagggtaataaggtagagagattgggagtttctatgtttttcaaacctcttccacatattcagttttatgttttgcttgagggcaagcaaagactaagtttgggggagttgatatatcatggtttttactaatttctaacatagtttcataatagtttttggagtctttctagtattttttgtatgttttgagtcattactgttttacagtttaggtgccaaacctcttgtgtcgccattgtccatgataatatctcttgccaagagcaaaccatttgatgagatagatttagccaaacatggcagcatacttcatcccgaatgggcataagtagtagtgtgcacaaggagttactccccatgatactagtctttcacttatggtagtttattgagagtgttaacacgcatgttgaacgcgtgtattggaacaactcctttaaacaacatagacctttcccaatctgtctcaacctatcttgagctcatagcttcccaatttgagtagaagaga

SEQ ID NO: 16307 - DNA, 779 bp, Arabidopsis thaliana
atcactattaatttgttttgagaaaaaatatccatttcaataagttcaattactttttggtaaatgttaacgaaatgtgaaatataatactgtatatataagtataaacctgttccactcgtcttgccactcacaaaagagagctggaccagtggcctccgtcaggccatagacatgcagaacttgaaaccctaaccgctgaactttcttgacaagagcagcggggagaggtgaacctccggtcatcagatggaccggtccagacctatgtgacatgtcaagcggatttccttgtaggagaatgttgaagaccgtaggaacacaacacatatgtgtcacactatgcatttctatgttctcatagatctccggggcactcacgtggctcatacacacattggtgcccccgcgcgctgctgttgcccatgtaaacgtccatccattgcaatgaaacataggcaaaaatccaaaggtagacagggcaggtactcatttcccaaccaataattacacctaacgaggtcaaatatgctcctcgatggctaatcaccacaccttttgggtcagccgtggtacctgacgtgtagtttagggagatgggatcttgctcattttgtatacggaacatattttcaaccaacggagacgtaggctctcccatctgaatgagactctcgtagtctaactcctcggatgaaacccttttagcggaattgtactcgtcaataaatatgaccagcaagtttagttgtaagtcgcacatgatagtagatggagga

SEQ ID NO: 16308 - DNA, 506 bp, Arabidopsis thaliana
tttaaaaatatcattaaaattctaagatcatatttacattgacgtggaacaccagaatccgaatcgctctcggaactgctaaagctatagagtaattatctaaaccatttgtttgaggagaatcatcgaactagctacttgctgctcttctttattttcattttttatcttgtgacaagaaactctcttttgtcaggtaccttcatgaaacatgttcgcctccgctagttcacaagaacatcaagtcatcaaacattttacttgataatgagctaaatccccgcctctcagactatggcttggcaaactttcaccacgtgagcttcttgtaaaaattagtgttatggagatacagagttgtttcaaatctattaaagtgtctcatctcttgaaactgtagcgcacaagtcagaatcttggagttggatacaatgccccagaatgcacagatccctccgcttacacacaaaagagcgacgtgtacagctttggtgtggtgatgcttg

SEQ ID NO: 16309 - DNA, 812 bp, Arabidopsis thaliana
agctaaattcttgtctaaaggacgcaaaaaggtccttataaagtcttgctcaggctcttccgacatatgttatgtcgtgttttcttcttcctaaggctatacgctcaaaactaagtagtgctattgctaatttttggggaaaactaatgaaaatagtaatggtattcactgggtagggtaggataagttgtgtaccccacactttgaaggcggcttgggttttataacactagaataatttaatcttgctttactagcaaaacaattatggcgccttattagatatccaaactcccttctgagtagggttttgagaggcagatatttctgttttagtgatcctctgcatataggatcttctaatcgtccctcttttggatggagaagtattatgggttctaaaccgttactagttttaggccttcgaagaacaataggttcaggtatgctgacccgagtttgggaagatccgtggatccccacaattccagcaagacctgccaagagtgtcattgacataagagaccctcatctctatgttaatgacctaattgatcaatccacacagatgtggaaattggatcgccttcaggctttgatagatctcgttgatacttcgctcattttagggatttgaccaagccgtacctacttgagtgatggatttagttggtcgtatactaaatcaggtaactatactgttaaatcaggctattgggtcgcgcaaaatttatcttgccctacttgtgacccccttttcagggactaggttttttggcacttcaggcacaagtatggaagctaaaacttac

SEQ ID NO: 16310 - DNA, 920 bp, Arabidopsis thaliana
ctcaccgatctatgggcttacaatgtcgttgatcagaaatggattaagtcccattctccgggagaagcttgtagaggaagaggcggtccaggactcgaggtggttcaaggaaagatctgggtggtatatggattcgcaggagaagaagcagacgatgtccactgtttcgacatagctaaaggggaatggaaagaagttgagacaaaaggcgaaaaaccgtcagcaagaagtgtgttttcgactgcggttgttgggaaacagatactgatatctggaggagagattgacccgagcgatctggggcatatgggagcaggatgtttcacaggtgacgcttatgggcttgatacagagacgctggaatggaggaaatgggaggatggggttggatcggtggagcatcccggtcctagaggatggtgcgcgtttgcagctggatcacgagatggtaagcaaggtctgttggtttatggcgggaactcgccgagcaatgataggcttgatgatatcttcttcttcactcccaacactctactcaagtgattggtaactaagtatggtttggttttcttgccggtgagaggggctgtgtgaatgttcctttttttttagtttccttttggattggatgaactatgaagatgtgtgatgtgtttcattttcctctgttatttgtaattaaataatcgaaatttttcattaaagaagataacgaataacatcagcttaatggttattttagcaactaaaccataatagagatacacaactaaggatgagagcatcaatggaagctttgaattctatttattacccactcactctctgtctcattgagtcagtagttgataggtatttaattgcaagaatctctctatattggcaaaaacaaggtcaaataaaagtttgttttgcgaata

SEQ ID NO: 16311 - DNA, 553 bp, Arabidopsis thaliana
gtaacgtccgccagtgtgctttaaagattttctcttggagccctacataccatctgattcttcccatacccaccaattaatcccggatcggttggtccataaaccgtgatattgggtctatccagtgccgccgttaaatggcttaaccccgtatccaccgacactacaaatttagccccggccagcacgcgggcaacgccttccagactcatcttcggcaatacttcaacataagcaaatccttccgccagtcgtttcgcccgttcttcctcatgcggcgcgccccacggaagtttaatccgtattcctgaatcagccagtaaaccaatcaattctcgccagtgttcttccggccagtgtttatcatcacgggtcgtcgcatgaagtaatacggcatattcgccagcatctgtaggcaggttcgtcagaaaatgctgtgcgatacgataatcgccctgggtttgcggtttgctatagcccaaacttttggcaaacagttcgcgggtgcgttctacggcgtgctgctgttttgcaatatgatgcttacgattgt

SEQ ID NO: 16312 - DNA, 2500 bp, Arabidopsis thaliana
catccaaatgggttttcaagactaaactcaaacctgatggcaccatagataagttgaaagctcgtctagttgccaaagggtttgatcaagaagaaggagtcgactatcttgagacattcagtccggttgttcgaactgcaactatacgtcttgttctcgatatcgctactgcaaatgagtggcctctcaaacagcttgatgtgtccaacgcgtttctccatggagaattacaagaaccggtgtttatgttccaaccctctggttttgttgatcctaacaagcctaatcacgtttgtcggctcaccaaagctctttatggtctaaaacaagcgcctagagcctggtttgacacctttagcaactttcttcttgactttggctttgagtgcagcacatctgatccttccctcttcgtttgtcatcaaaatgggcaaagtctcatactcctcttatatgtcgacgatatactcctcacaggaagtgatcaactgctcatggataaacttcttcaagctctcaacaaccgcttttcgatgaaagatcttgggcctcctcgctattttttgggtatagaaattgaatcttacaacaatggtctatttttacatcaacacgcatacgcttccgacattcttcatcaagcaggcatgacagaatgcaaccctatgcctacccctctgccacaacacttggaagacctcaattcagaaccctttgaagagccaacatactttcggagtttagctggcaagttacaatacttaacaatcacaagaccggatattcaatatgccgtgaacttcatctgccaaagaatgcacgctccgaccaactctgattttggccttctcaaacgcatactcaggtatgtgaaaggaactatcaacatggggcttccaatcagaaaacaccacaaccctgttctttcgggattttgcgatagtgattacgctggctgcaaggacactagacgctccactactggtttctgcatcctcttgggatctactctgatatcttggtctgcaaagagacaacccactatctctcactcctcaacagaagccgaatatagagctctttccgatacagctcgagaaatcacttggatttcctctcttctccgagatcttggaatctctcaacatcaacctacacgagtgttctgtgataacctatctgctgtctacctctctgcaaatcctgctcttcataaacgatctaaacacttcgataaagactttcactacatcagggaacgtgtggctctcggtctcatagaaacgcaacacatcccagcaactattcaacttgctgatgtcttcaccaagtcactaccgcgacggccctttatcacgcttagagccaaactcggcgtgtctgcgtcaccggtctcacccacgccaagtttgaaggagggtgtagaagacaacccaataaatagaacgggctttgacaaaaacaaagacatggtagcccaaactcaacaaagcccactacagaagcccagtcaacatatgcaaaagaagataaagaccaaaagctctttacctgcaaaacagaagactgtcactaatacggagaagaagacaataacacttgaaaacaaattcaagccgttgcagtcgctgccgttgcagtaattcacaataaatagctattgattaaagataacattgtcaaggattctagattgttctaaagaagtctataaaaaaaagatgtaaaactccattgaaagataagcaaaataaaaacatttttgtcaagaaataatcacagttttctttttctcttcagatggaagaaagaagaataggtagaacatagtacttaggtcttgttgtccgttttaatgtcaacaatggtcatgatttgttatgttatgttatcagaattcagaaccaaatcttttgaatatcttttttttttttttttactttggaatatgttatgtatcattttgtggattttattcagaatcagacataacatctaattactaccgtttagtgtatgtgtttttttggatgctgaaatttcatgcatctggtctttttctatagctaggtaatatattgtttgtcccaaaaataaaattcccacaaatcattgttctagaacgttagaattcaatatcatcatcaacatatgtgcatgtgcatgctaactatgaatgtactgtaaagttttctttatttataattatgtattgtaaagttgtatactatatgtcaattaaatggtatactttccgataggaccatttcaattagttgccaaatttgatgtgaatgaagcaaaaatataacggattttgctttagaaaaggaattcgtaaatgacaacgtaactccgaaaagtatttccattgtgaacatattaaattacattaatatccggtttcttacaaacttaggggattagtaagtttagtgttctcattattcaatgcaaattttttatttctttgactattgatattctgctgaacattttg

SEQ ID NO: 16313 - DNA, 1005 bp, Arabidopsis thaliana
ttaaagcataagtctcaactaacctggaccccagggaactcccagagactgagccaccaatgaggcagcacactagcgctgatctgcatgccacagcacatgtgcatcgacacgactgtctactctgacatcagtactacgaccgtgcatatcatgttctatcgacatgtcaaccgtgcacaatggcacgccttttccgctgcctgattctcgatatctgcttgacggttttgatttcgttttaatcgccctggtactcaccgaagtacaaggtgaattcgggctgacgacggtgcaggcggcaagtctgatctctgcagcctttatctctcgctggttcggcggcctgatgctcggcgctatgggtgaccgctacgggcgtcgtctggcaatggtcaccagcatcgttctcttctcggccgggacgctggcctgcggctttgcgccaggctacatcaccatgtttatcgctcgtctggtcatcggcatggggatggcgggtgaatacggttccagctgcacctatgtcattgaaagctggccaaaacatctgcgtaacaaagccagtggttttttgatttcaggcttctctgtgggggccgtcgttgccgctcaggtctatagcctggtggttccggtctggggctggcgtgcgctgttctttatcggcattttgccaatcatctttgctctctggctgcgtaaaaacatcccggaagcggaagactggaaagagaaacacgcaggtaaagcaccagtacgcacaatggtggatattctctaccgtggtgaacatcgcattgccaatatcgtaatgacactggcggcggctactgcgctgtggttctgcttcgccggtaacctgcaaaatgccgcgatcgtcgctgttcttgggctgttatgcgccgcaatctttatcagctttatggtgcagagtgcaggcaaacgctggccaacgggcgtaatgctgatggtggtcgtgttgtttgctttcctctactcatg

SEQ ID NO: 16314 - DNA, 744 bp, Arabidopsis thaliana columbia
taaccactgctacaaaactttaatgtatttacttttcgggcccatgggtctacccatgtccgactaagtgtgccacgtttgggaggctttaaagatttgttactgatcctataaatcaccacatgatgctttgttctcactcgcatggttccgacaatcacatcccggaaggtcacctatcgtgaaactactctagcccaagcacgcttaactatggagttctctcaggacatttgtccgaaaagataagtgcaatttggttacaaaggtagccaaattaattattttaaacctcttcgcatacactagcagattcctgaaatcaatgtgttacagaaataaaaataattaagtaagcgaatttcttatttttacattgcaaattaaaaatagtaacttcttattttacaaattttttgctacaataataacattagattttctatttttgatttattaaaaagaaaaattgtgactttttctgttgtttatgcgttattatgaaaattttccttaataattttacaaaattaacaatatattatacaaaaacaaattagactaaagagtatggaaaaatatgtatttatttttctaactgtgtactaacaattttgattttagcaatgtagactttagactagagacgcaattcttttttagaaaaaataattagaaacatttatttcacttttaattttgttttgagatgaacaattactaattgtagaatatagacatata

SEQ ID NO: 16315 - DNA, 516 bp, Arabidopsis thaliana columbia
gactctatcccgatttgatcacagatttataaatttaagcataatttctcaaaagaatattatcactatcaaggatttaaaggggcaaattggccttgaaaatgaaaagaagtagggaaaaaaaaatctgtctaacaatcatgttttcttctgtcttctgtgtcttctataagagagtgaaggaacaaagaccctcatgctggctttgatctctcgcgcggtggaattcgcatccatgacttcatcgactcatagactgtgaatccaatcgcaaccgatggaacaatctagcaaataaagacaattaaacgaatcatagaggaaaaaagtgaaaccgagactgagatattggattcattgtttcttcatctgatttaccttaatgtagttgatgcttaaaccagcaaacaactgtttccaaccctgagttcgaacaatcgtgttaagcccatcaaatgtgttcttgtaacgcttgttgttgcttcactcgtcataggttgcagattctctacatgt

SEQ ID NO: 16316 - DNA, 573 bp, Arabidopsis thaliana columbia
tgggaataagctctctaacttgatcttattttaggcggttgcgaattcaacatcagctactttcttgagagttgttggtagtgagctgattcagaagtatttgggagatggtcctaagcttgtgagagaacttttcagagttgctgatgacctttcaccatcaatcgtcttcatagatgagattgatgctgttggtaccaagcggtaagttaaactattttcataaacctgatctataacccattgataatggttatctgattacttgttgtttgaaagaacaggtatgacgctcactcaggaggtgaacgtgagatccaaagaactatgttggaacttctgaaccagcttgatggatttgattcaagaggagatgttaaggtcatccttgcaacaaacagaatcgagagtcttgacccagcactgcttcgacctggacggattgataggaaaatcgagttccctctcccagatatcaaaacaagaagacgtatcttccaggtaatatataattctactgagatggcaaatcaatgacttgttcgaaactttcttgttcattgaggttgtggg

SEQ ID NO: 16317 - DNA, 683 bp, Arabidopsis thaliana
ggtaccgtcttcagactattgtgttcaagtctggtatggctaagtctatccatcactctcgtgtcctcatcaggcagaggcatatcaggtattgcatctcttcgatttatttgtgcttgtgtatgaattatctttgttatatcaattgataggatctgaaatgaaattaacattttctctgtttccatttcatgattatctttgaatgattcggctttgtgttacacttctttaaacactgtctctttggtctaacagattgtagtctttcatgagtttgtactgtcttttggtttgatctttcttcaaacgttttattggttgctcttaagttcacgcaagtcttgataacttgtgcctcttgagtggcttaatatgaagtgtgttttgatatgatcttaaaaattgggtactcatatttgtttcgggtgttgttgtagggttggaaagcaattggtgaacattccatcattcatggtgagacttgattcacagaagcacattgactttgccctcaccagtcccttcggtggtggccgtccaggaagagtgaagagaaggaacgagaagtctgcctccaagaaagcctcaggtggcggtgatgcagacggtgatgacgaagagtaaatctgaagtcgcaccgttttagctatgaatcaatctgctttttgatattttgtagt

SEQ ID NO: 16318 - DNA, 582 bp, Arabidopsis thaliana columbia
caacatttttttttctgtttgctgaaaagtcatgttcttttttttttcgatcttgatctacaaacatgcatgctttctactgtttagatctttcacatgatcaaatatgtatccagaatttgattgttatatttcgttctctatagatccagaagctgaggtcatagctctatctccaaagacacttatggccacaaatcgtttcctctgcgagatatgtggaaaagggtttcaaagagaccagaatctacagcttcaccgtcgaggacacaacctcccatggaagctaaagcagaggacgagcaaagaagtaaggaaacgagtgtatgtatgtccagaaaagagttgcgtccaccaccatccgacgagggcacttggtgatcttaccggcattaagaaacatttttgtcggaaacatggcgagaaaaagtggaagtgtgagaaatgcgccaagagatatgcagtccaatctgactggaaggctcattccaagacttgtgggactagagaatatagatgcgactgtggtacaattttctccaggtacttagtgtatacgtcacacgtacgtactaatagatg

SEQ ID NO: 16319 - DNA, 442 bp, Arabidopsis thaliana columbia
attttggccgtcggggcaagagccaggcctcgatgagccaagtcttcgaacacgccaccttttattgttaaaacacgataagaaaacgagaagagattgaggcataacctcagataagggatttttccgtattcagtttcataaagggaggcagaaccaaactaagaggaatcgtcactggctttgaccacatgcatcatcatctgttctcactacaagaagagaatgagatgattttgaggcataacatgatacgacggaacttgtggttaaattcagagagggaggcagaacactacctaaaaggtcaatgagatcacgctcaaggtgcataagatagatgtctttctgttgtttctcttctgttgtttcctacggtcatcctgtacgaatcgggaaaaaaaatgatgaaattcgaatattatttttgataaaaaaaatg

SEQ ID NO: 16320 - DNA, 509 bp, Arabidopsis thaliana columbia
ccgcgaacattgctgtgtaaatttctttcttgttcctttttcagttttacaatagatggaattccgataagagaattcaagaactccgaagcccttggagttcccttcccaaagcatcaaccaatgaggctctatgctagcctttgggaagccgagcaattgggctacaagaggaggattagagaaaacagactggtccaaagctcctttcaccgctttctacagaaactacaatgtggatgcatgtgtgtggtccaatggaaaatcatcatgctctgcgaattcctcatggtttactcaagtacttgatttcaaaggcaagaatagagtgaaatgggcacagagaaagtacatggtctacaactattgcactgataagaaaagatttcctcaaggtgctcctccagagtgcagttaaataactgattgcttgattcacgaattaatcacgtggcattgtctttgtaacggaaatgatgtttatctatattttggcactagctgagtat

SEQ ID NO: 16321 - DNA, 560 bp, Arabidopsis thaliana
tacatatagattgatgtaaaaattttgatcgggtttaaactgtaacaattaatcaaatacgaagaattaaatttgaatttattatttttaatccttaaataatatttttaattttcataattttttttatcacagtttgtggaagccagttttaataaaacataacggaatatgtggaagatcaaacagatcatacaagcatttaaccatatgctacagcgaattattttgatattctaatttttttttttgaatagaatgttaaattaaattcaaaagaaagatatagcgttgttacaactagtgcgactttttaaaaaatttacaaaagaaaaaaaaaaaaaaaaaaaaaagattcttgatctagcttgtgttcctcagagcgagccagagttggaatcccctatcgtatttgtggtggccattagctttaagtaccgagagctgattacggatgtgtttatcaatccacgagactaaacgacttgctgaatgtggtggtgtccatgattacggatattctaatttctactatacatatagaatcatgtaaagttttt

SEQ ID NO: 16322 - DNA, 1004 bp, Arabidopsis thaliana
taatgttacttcataggttgtcgccacttcctcctattatactcgttaaaccctcgagattcacttccgccgcttgcaagaagaatcaaaggtagctctcattcttctccctgcgaattatttttcgttctccgtacttttatcgaattttctgataatgggtaggactatcatcgtttcctcctcctcttcctcttccgatagcgaaactacaatgttagtttgccataaatctcgattcgtagaaaatcaaagagccgaggcccaatctagtcgggctaatcaaattgagattccgaggttgatagatgaatcagatcgggatggcgatgacggtaatccggctatccttccagaagaaccggtaaactatctggatcgattcaaacccctcatcgatctggaagtcgcttacaacgtcaatccgagatattcagaagctgaagtcgtggcgaggtccaattaagaccgccgaatttgatcttgatccggttgtcgactagaacagtgagatcactgcgagtgaaactctctcaaaagaagaatccgtcgtcgaactgctttcttcttgtgggtgtggagatcgcccaatcatatacatgattcctggtgcagacgattgtccctggagtcctcccaaggggtatgtttgcttatacgaggcctacttcaggcaatgccacctctggtttccaatcccgtccttaatcatttctttcctcactcgccgtcgtatggcgatctcccaacttactccagcagcaatctgtaatttcgtcgctgccttgacttttggtgctaaggaaggctatcgagtgaacgttgaagagctgacaacgatgaaaaccagtaggtcgcctggatactaggtggtaaacaatcgccccaaatataacttcctccctggccctaaggttagcaatttcaagaactgggaggagttctacttctttgttagggctgatcttgaatcttacgagagtccgttctcgggaaggaagagg

SEQ ID NO: 16323 - DNA, 560 bp, Arabidopsis thaliana
gttcacgtaatctgcgaccgccctgattaacaaaacattccatgaaaatactgttaggttttgaatggttacagacttacagtgggtggaacaaagtaattaagagtaaagtaagagaaaaatattagtatattactgtctggctgggagaattccggcggcggggccgtaagagttacccttgccggagcgaaggacgtcgaccacggcgttctcgacgaggatggaggtgcggtaacaagggtagacagaagggtcaccgtgagcaaggggtaaaagaggctttttcacatccaggctgcattcatcgaagagcttgtagacgatgactctcatcgtgacgctggaggctttggctgcgttgtcgcttcccctgaaacgccaaacgctgatatcggtttcatcttgcgtctgcgtctcggtttgatgggaaggaagaacgaggttgctgttgtggttcattgtgaatatattcgttgggagtaagtagctattgaaatctaaatgttgtgtttatatgaagagaggtaacaaagatatttatagatgaagaagtaaac

SEQ ID NO: 16324 - DNA, 1070 bp, Arabidopsis thaliana
tgttgttttggccttaggaaaaactccattctgcaaagaagtctttgcacggcccaaagatttctcaaaagctctttatacattggatatcggccaaaacgatctcgcgattgggttccaaaacatgacagaggaacaactcaaagcaactaatacccttaatcattgaaaacttcaccattgccttaaaagtaagtatcttaaaattatcggagactttggtataaaacaatctctaacaatgatttattttattagttgttatacaaagaaggagcaagattcttctcaattcataacaccggaccgacaggctgtttaccgtatcttctgaaagcttttcccgctataccgcgagatccctacggttgtttgaagcctctgaacaatgtggcaattgagttcaacaaacaactcaagaacaaaatcactcaactaaaggaagagttaccttcttctttctttacttatgttgatgtctactcggccaaatacaacttgatcaccaaagcaaaggctctaggtatgcactaaaccaattaaacggtttatatttttggattttattggttacggttagacttaagacttctcattcatttccggttttatcaaatctataatgcaggttttattgatccttttgactattgttgcgttggggcgatcggacgtggaatgggatgtgggaagacaatatttctaaatgggacagaactctatagttcttcctgccaaaaccgtaaaaatttcataagttgggatggcatacattacaccgaaaccgcgaatatgctagtcgcaaaccgaatcctcgatggttcgatatcggatccacctctccctacccaaaaagcatgtaaactcacgaaaaaataagttgccatgatataaactaataaatgtctagcatatttctggtgctttcaagtaactagccaaaatttctattcacatctctctttttgtttttgaatcaatgtaaaattttcttcaaaaagtcattggttacaatatatgcagctttaagcagaatgtttctatcacatcttatcatattagttattata

SEQ ID NO: 16325 - DNA, 608 bp, Arabidopsis thaliana
gcactcttcgtgttatgacagagcaattccagtttggcaacacgatctgtcaggttaggaagcataacacccgattttgtttatgaaaagtttacccaggatcctgttgctaactaattttttatatgcaggagattgagttaaataaacaacactggagttccttatttcagcaatatatgttcttcgaggcatataaaaactaccttcaggttgatgtactagctgcagatgccgaagatttattggcatggaaaggttgggtggagtcacggttcaggcaactgaccttgaaggtagatagccttatgttcgtttaatgttgtggagtacaccttccgtgtcctcagtgtgttctcgaattttttactgggagaataaacaatgatttaaggattcttcgtcttctctttttatatccaataatgcagatagaacgagacacaaatgggatgttaatgtgccaccctcaaccaaacgagtatgtagacacttcgaagcagtttcgacattgtgcctttttcatgggcttgcagagggcagatggatttggtggcaagaatgcaacagtttgatatacgtggaacagtggacgaattctggcaaga

SEQ ID NO: 16326 - DNA, 568 bp, Arabidopsis thaliana
caatgtctctcaaagcactcttcgcgttatgacagagcagttccagtttggtaacaatatcttgcaggtaagtgagcaaaacttttgacttgttatctcaactatttattcaggatcctatacttatgcatgatttttaatgcaggagattgaattaaataaacagcactggagctctttatttgaacaatatatgtttttcgaggcatacaaaaactaccttcaggttgatatagtggcagcagatgcagaagatttattggcttggaagggttgggtggagtcgcggttcagacagctgaccttaaaggttgatagcctcctcttttcatttgatttacagtaataaacctgctgtatatcagtgtttaatcatatttgttgtggtagaaaatataaaattattaaatgtttctcgattttgtttcttttcattcaataatgcagatagaaagagacactaatgggatgttaatgtgccatcccaaccaaatgagtatgtagacacggctaggcagtttctgcattgtgcctttttcatgggcttgcagagggcagagggagtggg

SEQ ID NO: 16327 - DNA, 711 bp, Arabidopsis thaliana
caagttataagcaaaaaagtagacaaaatcgttaactaaaataataaaccaagtcactaaaaaaaacatatctaataaggtaaggacctgtattacattcgttcgtgatgttgttacgtaaagcttccatcgctctgtcaccaataggcttatatgcaacatcgttcttctccttcttcttcttctccttcttcttcttcttcttcttcttcttctccctctccttcttcttcttctccttcttcttcttcttcttcttcttcatcatcaacatgatattcttctatgctttgccactataaaaaatcatgatcttcccgatgtgaatcccttataaaattgtgtagtgccattgtcgctgttacaatctttatccacttagtcagaccatattttggatgcttacgatctaaaatcctccattttgcttttcatactccaaatgtcctctcaatcacagatcgcaaacctgaatgctttcggttgaacaactctcgtgcagttactggtggtcctcctctaccaaactgaccaagatgatatcgcatcctacgatgtggaccaagatagccagtcctggtgggatatccgaagtcaacatgataatacttcccgattaggcggatgtgggaaataggttcattcgtcgcacaataattcaaaacctttgtatcatgtgctctatcaggtacaccgacatatgcatatatg

SEQ ID NO: 16328 - DNA, 1033 bp, Arabidopsis thaliana columbia
ccctacaaaagtaacaaagacataataaaaacaacatagacataactgaaacacaaagacataaaacacaaagcatcaaagacaaagactgaaacgcaaagaattgagaagattgtcaagtaaaatacatgtttttgattagtttattctttagttctgtttccactttagtaagcgtgtagaatcttgcaactaaactgtctagcagtttcttgtcgctcaacgtttctttaaaagctaaatcttgttgctttaatttcccacatactctccatcctttctagcctctttccttcttcttccacatttgctgaaactccagccatgctcctttgtctttacccttagcagccttcacacccggtggacgagcttaggaagcttcaactacatgtgtaatccttggaacagctacacgaggagcaccattaacctttcttcttttgctaagtaatgtctctttggttggaagagaggcgcattacttctgatcatgccttaactccctccaacaatgctccattgtaatcactctcgtaaatttcatgagctaacctcatcaaatcattctcattcattccactcgccatccgagatgtttcacctgcatgggatcccacaacatgtaaatttgttgatcttggaccacctttacttacaatgacttgctggtctattgttgagagtaccaacaaagggacttgctgcaatgtactacgcaatgtgtttcctgaatacatttgctcgttgctcattaccaataacaacatccttgctttttatttagccacacaaagattagtagaacatcgtctttagatgactacttggtccttgttcttggtgtgcgatttgtgtttgtgtttcaccatgcaatgctgcttcacatcatcatgtaccgaagacaggggcgtcagattcacaaagtcttgtatcagcaacattgatggaggtttcttgttgacttgttaccagatccaagaagccggacgtgttagcataaggattcattaaggaggatgaaagagtttca

SEQ ID NO: 16329 - DNA, 892 bp, Arabidopsis thaliana columbia
caaaacatgattgaataagaaatcaataatgaattaagaagagaaaagagtttagaagaatcttctctaaaaagagtctctacagggttttgctcccaagaataaaagagataataagagttaggtctaaacaatgagaaacaatgaccataaaaatccaatatataagtcctaaaaacgtctgggccttctttgaaaataagagaaagttctgggccgaatttagaaatcttcaaaacacgaataagttgtgtaattgaattaccgtcaggtattggtgtcgctcgacaccaggggttttgtcgatcgacacctacgtcaatttctgtctccaaattgctgccgcagcttaagttgtctgttttgctccagaatgctccataatctccaaatgcatcccaaacatgtaaagacctgaaaaagagtagaaaagactctacaaataacaaaaggactctaaaaactatacctaaatcataactaaaagcagtaaaaatcgaggtatatcaacttccccagacttagcttttccttgccctcaagcaaaacacaaaagccgaacccgtggaagaggtttaaaaacacagaaacttccaatctctctagcttattaccttgatcatacaaaccaaatccatgcactaaacagttctagtcaaatcctgaccactatgtaattctcttctagcccacacaacatcctagaattcatacccaagttctcaactatatccattaggttctcatcgatgggtctcatcaatcaagttaacgtttaagaaccttttagacacattcctgtactatacgtgtactagattcatttagaaaattaaaagaaaaacacaaataaaggaaaaagacaaaacgaaacaccataccagtgggttgc

SEQ ID NO: 16330 - DNA, 778 bp, Arabidopsis thaliana
cgccgagacgtccgggacggggtctcacagtattcccagtgaattaaaatttagtattaactgaaagaaattctagtgttacatagttgcacaacgcgaataaggtttacaatgattaaaatcaaatactatgggtgccaaataacaaccattgcaacgactgtctcagcctccttttgttctgagtcctttgacgttttggacgtctttctccggtggatggaaacctaagtacttttgttctacccttcttctttttccgaggcagaggtaataccttcaacgctttgatgtcatccgggatatcccactgtgatctatccgggactaaataaatagtcctataatacgccaatgcccacaattccgcccaataatattttgaaaccaattcatgtaatttcatacctcgagttcttgttgtatcgctctcgaatgcaatgaaagcggctaacgcgtgaatacatggatactttcttcaaatgtgttgcatccagaattatcactttcctcatcgcttgaaagccttcaatgctagctcccaaagctatgaataggtattggaatttcccgctctcatccaacttcagatatgttactgtaccttcatttaccttcttcaacatgtacaaataaccattgatatccttgtagctatcttccgcgcgtccttttaaatcacaaacggcttgcatttccctctcaatgcggtggagtatgatatcttcacacctaattttgtttgaacaagcttcatgataaccttaggagctggagt

SEQ ID NO: 16331 - DNA, 1776 bp, Arabidopsis thaliana
cgcagtatatatataaaataaaaagatgattccgaagtattttgatggatagactcatggacataattatgcaacgacccaaagaacatgaaagaatccgtccaattttttaaaataaaataaaaatgtgaataggtcccacgtttagcagaaaacaaaaaccggtggatggtcgacacgtagacgaagaaaatgggaaggagagagggtgacgtgtacggtttaagatgtgttagttgggtggcgggagagatttgatcgaaagaaaaaaaggttcattgcactgacaaagacaggtcccccttttatattatttttctttcgtcccattaaattccgtaaatatcttgtctttaaactctcttttttcctctcctcattattattctattttctctaatatctcaataaatatttattcgtcaacagatagataaaaaagaagtatttattcatgttccatatgtttgatgccacttgtgcggttttctttggacaatgtgtaatgatatgttattcatatgggagatgtgtgaaagtgggctttggatgatgggcaagagacaaaatacccaagacacctcaaatacaatgtaccaatcatctaccgttttttttttacaaattattacaaaagtagaaaaaacattgattttttattgaaagctatttcttttagataaactgagaagaaagccgagacaaatatgaacactagtaatttattttgtttaatgtgtgattaattgaatttgttagctttccttgcgattgcgggcaaagtggataagagaagtagaagtaggtttgttctaactcgtaataaagtcacagaactaattctaaagaacggtacatatatcatcattcataagtacttgatgtctcccattttcggtgaaacactttacttgaccagtctttttaatatgcaacaaatcttgtatatattcaacataaaaaaaatgcaccatcattggaattgttgacccaacaaaaaaaccctataggcattaaaaggctcttagagggccaattttgttatcgggccttcacttggccagtagaaattacaagcatgcaaacaacagttcgagacttcgaggaagattcctatctctctctactcgtttcttgaaccaagtcatacaagcaagcaagacagctttattaaagttgactttactttaatctttatgagtcacacctcatctttattagttagttagctcagacaagtaaaagaaagagcgagaaatcatcgaaatggatttcatctcatctcttatcgttggctgtgctcaggtgttgtgtgaatctatgaatatggcggagagaagaggacataagactgatcttagacaagccatcactgatcttgaaacagccatcggtgacttgaaggccatacgtgatgacctgactttacggatccaacaagacggtctagagggacgaagctgctcaaatcgtgccagagagtggcttagtgcggtgcaagtaacggagactaaaacagccctacttttagtgaggtttaggggtcgggaacagaggacgcgaatgaggaggagatacctcagttgtttcggttgtgccgactacaaactgtgcaagaaggtttctgccatattgaagagcattggtgagctgagagaacgctctgaagctatcaaaacagatggcgggtcaattcaagtaacttgtagagagatacccatcaagtccgttgtcggaaataccacgatgatggaacaggttttggaatttctcagt

SEQ ID NO: 16332 - DNA, 982 bp, Arabidopsis thaliana
ttttgctgggccgaaactggtgtcgatcgacaccaagagtgtgtcgttgacaccaagagtgtgtcggcgacactcctcgctgattcctggaccaaaatcgtccttagcttcctttttcttagcttttgctccaaaatgtctccttatctccattgttgtcccattgcatagaatacctgaaaacacactaaaaagtctcgagaaatattataaagactcaaacttctatgcctaaaacttagataaaattggtgaaaatcgggttatatcatttggtatttgtggtgatgtggaatacttgatggaattggccaatcttgaacattcatgagctgccaatgtgggggatacaaagaggagggctgccaactccttgcacccttcaaggttcatttttgtgttgatgattcagagaaaggagaggaggtcttggttacataactttcaaagttagggatgtcaagtatactcttgatatttgccatcttgataccatttttgggtttccaagtggagaaggaatacgccaagactatgatcaagaagagctgaaatctctttggaagacaatcgccggtccgaagcccttctcgccaaccaagagcaagagttcttcaattcgaaatcccatgattagatacctccaccaatgcatcgccaacaccctctttccaaagaaggccaccggatttgttagtgaagaggagctatgcatgatagatcaatctttggtcttcattttgagggagacaaaagatggggaaaagatggcgggtgatagagcggacactttgttgagtgttgttctcttagatcaccttttgagctacaaggagtatgctgcaaccatccatcgctcgagaattcgcgggagtctttgtgttggtggtctcttaacgcaaatactaggagttgtgggtgtggaattcggaaccctgacgtgttgctaagtcattgactagactactcaaggggaaggatt

SEQ ID NO: 16333 - DNA, 634 bp, Arabidopsis thaliana
tctagaccgtttctttttgaacaagtctgtcacgggtgtatcggcttgtgattgtgggctccggagaagtttcgcccttcatggtgtacgaatgtcccgccttgagcgccctttttatggcttggagcgcttggttgggatttttcgccacgaggcgtttggttcggcggctcgtgccttttcgacagccattctatttcttcctcatgagaacataattcgaggctcaggtgcaaggcgtccaagattttttgtggtttggacaaatttaactcctttcggaattcggacttgtaccacatcccttcttcagagcagagagagtcgcgacgtcattgattccctcgacttttgctagggtggatcagaactttgttaggaaatccctaagtgtctcgttcagctgttgagatagcgaccaaaggtcggcatcagacgtgcccggatcgattagcaccgagtattgcttgaggaagagcgtcgatagctcctgaaaactgttgacagaatttccttcgagtcttgagaaccaatctagggctggtcctttcaaatgtttaacgaacatataacagagaccggtgtctctttcctcaagccgtaacttggctcgggctatagagattatgaaaga

SEQ ID NO: 16334 - DNA, 736 bp, Arabidopsis thaliana
accacagctatatcagaatcagtgaagtatagtgtttatcccaccctcattcttctcgagcttcatctcaagaaaggtctgcagagacaaattttaacaagaatcatgacccaatgagcattcatattctctcaacaattcagctacttcactaaacactttctaagaaatgaataaaagaaaattagatgggctcttaaagaaatgggtgccaaagagatagataggtaaaagcaacaaatatattctacctaggtatcagtgcgagtttgctcttacaatgtaagacctgattctttgaagcatcaggttaccccgtgaataatcaccctgaacaggctgtaatatcacattgctttgttggatggagagatcagaagctggatcagtcaatatgacaacattgctcttgggcatagtcacctaaaaacagatttttcagtagtaatcagtctatgagatagcaaacgcagcagctaagaaacaccaaaattgttaaatacagaggaaaactcagcaagttacctgaatgaagttggcgaatgcatttagaacagccattgacctctctggcttgctgtaggtaacattcccaacaacagaaaccggattggaggattcacatttccgacgacgtattataacagtaacaccggtacaaaagaacgccatttccagaccagcacatgagaagttgaccatgagcttgtcagagcttcgtgcctaacaatatgaa

SEQ ID NO: 16335 - DNA, 1020 bp, Arabidopsis thaliana
tcactcttaaactatctccgatccttctgaagaacaataaaaggaagagatttacaccgaagagtagtagtagtctcagtgttgaagagataaccaaacaagtattcgacggagtagtcagaaagtcttcatcttggatcaagtctgagttccttggaagaggctcttacggttcggtttatctggcgacaagtaagaaggccaaaactaaaacgaccatggcgatcaaatctgcagagatttcacgagcttcgagtctaatggacgaggaaagaatattaacccgtctctcatctcctttcatcgttcgttgctatggccacgagattgcacgcgaggagactctgttcggtggcgagagaacgaattacaatttgattctcgagtattgctctggcaaaagcctcttcgacttggtcaacagtaaccttggaggattgtcagagaaagatgtgaaacttcttgctagagatatcctttacggtctcgactacatccacagggcaaacattattcattgtgacatcaaaccggaaaatatcttactagcccctgtcgagaaccggataagacctaatgggtacgtggcaaagattggggatttcggtttagcattggagaagggttcaagcgagtatgaaaaagcatcaggtcataggagaggcacaacgcgatacatgtctccggagcttatacgacatgggattgttgattacgctgttgacacgtgggctttcggatgcacagttttggaaatgttaacgggacaacaagtatggggagaacatagtgatctcggttctgtagattgggacattctcatcggtcaaagctgttacattccttatataccggattggttatctgaagaagcacagcattttctcagcagatgtttaaaaagggaccctgcttcaaggtgggggattggtgcactcttgaaccaccccttttgcaatgtggatctataaattgtttagtaacggttttgtttattagttttaagttgtaagatgaagt

SEQ ID NO: 16336 - DNA, 901 bp, Arabidopsis thaliana columbia
tcttcgttttcgtctcagccttccatgacatttaccgacgtgaggttcgtgttgggatttgattattggtgttacttgattttttcgtagtgattgttttttcaagttctagatcttagaaatcgtttttattttattgatttaattgttttctttcttctttcagtgagaatgctaaaaacacattcatcaacctcattcaatgcaatctcgcttcaaggaataaatgtctggaatgccactatgtgcgaaaaagtaaccaggaatgccactcttctaattcttattttttgccgaattaaaaataaatgagagaaaatccaaataattggcaaaagaccaaaaacccagacgacccaacaaagtatccgatccaattaagatccatgcccagcgacccaaaactcatcccaaacacttaagcgaaatccctaatttctaaaatcaaaccgtttctgctctcagaaaattcaaattttccaaaatcaaattcataatttctcgcctttcacgattttccgacgaattcttgattcgtgtaatagtttgatggctcgtgttagagacggtattgctggccctttatatgattcgacggagaagtcgtcgtccggtgaagtttcgacatccgaaccagttacttcaaaaattgagaacgacggagatgtcgccgacttggttccgaccgaacctgcaggtccgacagaaccagaaacacgagatgttgcggcgaatgatactacaaaagaaaccgctgaaattgaaaaggctatggaggaacgcgtgatggtgatgagggttctaaattgaaaaggctatggaggaacgcttgttggtgatgaggcttctcaaaagaactgctgaaattgaaaggctatggaggacagcatgatggtgatga

SEQ ID NO: 16337 - DNA, 1113 bp, Arabidopsis thaliana
acatgtctctaacaagctctgaaaatatgtcgttgatactccaacagtttatatctctaatgatcgacaattgcaatgttatctacgtttgacaaaattcgagcagctacgtctctgtgtggagtttacggctgaagattcaagtgatattagtcggaaggacggatcaagaggaagggttcgaaacgccctatcgaatctgactcaagagcagaatctacattcaaagttcctgggtggggggtttgaaggcgtctgttacgattatcaagacgatgaagtaggggacgatgaatcaggtgatgatgaagaatgggacgatgaatcaggtgtcgatgaagcatctgacaaagaagcaggtgacgaagaagaagatgatgaattttctagccggtttgatgttttcgacgactccgatggtgcctcatctgatgatgaggactttgctgtatacggcgagcctaagaataaagacgaagattcaccgaaacttactcctacgaagagaactaagaccatggaaatgatcggatctactgggagcctgactgatttaaagttggagctgtctacgctaacactcgcggtaggccaacaataccgtagcaaatttgagttggagtatcgactcaaacttcttgcgataagggatggatttgattttgatgtaccaacttctaataagactacagtatattacgagtgctgggtggatagatgtcgttggagagttcgtgcatctagacaaggggataatcctaatttttatgtttatatatacgatacggaacacacatgttctgtgacggaacgttctgatcgatcccgacaaacaacaccttttgttctgggagttctttacagggactatcttggtgacgttggtccgaatgttaaaccaaaaacagtcggaataatcatcactaagcatttataagtaaaggtaattacaatgtttcggctgacttatttaaaaattgttggcggacttatacatatttaacggttgacttattgatatagtatggctgacatataattacatttcggttgaagtttgccctgtaaaggctgacttaagatcactttgtggctgagttgtggtatagtttg

SEQ ID NO: 16338 - DNA, 1105 bp, Arabidopsis thaliana
gacatgcatcagcaatgggtccctcatctgtctctgtgtggtgaagcatgactctatctacactaggaaaatctcaggaaatccgacaatcatcgctaaactgaatgaactctctgtaagactctgtagcatctcttgctcgagtaaaatgatgatgtaaatttttttgagtttttaaacatcactcatactcgaccaatgtactcgatctctaggccataagtagagtaaaagttttgaatttttactctaccttcacgttattcttttttttttttcctgagaaccacaaacacaactaaaacaaatcaaaaataacaagaaagtaaaaattatttacaaggataatcatgggacttcctcccaagggagcttgtttaaagtctctagcttgactcctcacacttatcaagaagaaagtgaatgatagagagggtctgcataatcctctctgatatcatcatcatactcaacgtcttccctagagaggtctccagcagaatacttaattctcatttcttcaaaataagcttctttctcttctggagggtaatctgtctcttcagaccatcttgaagtgaacttttttctcgggatagtgttaatccgcctttaggttgagcttccttctacatctgattcagcttactcctaagttcctcaacagagtgagctagcctctctatagtttcttcttgcttatcagacctctttttaagctattttactttctcagtctcatacccttctactgggatcactctatagtcttctgaggttttttcatcttctgttgacccttgtggaatcttgctgatgccaaactgcaacttgatgtcctttccaaggttgaaacttattttcccttccctgacatctatcactgctcccactgaagctaagaagggtcttccaggattaagggatcctctatgctctacttccatatccaacaccacgaagtctgtaagcacttctactccattaatcatgactagtaggtatttcagcatgccgaagagctctctggaagatctatccgcgagatatgaagtcaagtcacaaggctagtactgactagactctaacctttttgccagagaga

SEQ ID NO: 16339 - DNA, 660 bp, Arabidopsis thaliana
cctactaaggatatgatatacttagtcatataatagtcgtatacgattaggttatgactaatttggtttgtcttaaaatagtcggtaattttggtgactattttacgactactatatgtctaattggctacttttttacgactattttgcgacttctgattttgtccgaataaaaatttggtcatcgattgttgggtttcttgtatgttgtttagtgttatggtttgttgttgtttgttgttgtttgttattcgaaatgctataaattatgaaaaggtatacatatattgaaaatcaagttcaaatacacataaaagtatcttgttcttaaacaaacaactttattcaaataaacataagttcaagtatagtgtttggaaagttaaatctatggagcagtaggtggagtacttgggagacgctcagtcgatatggaagagtgagtggccatgaagtccaagaattgcggatcagtttggcggagatacttctcgactaaggacaagtgttcgagtttgtccttttgctcagttgtgactcgggctgactcagcttctcgggctgcaatctcagcatcccgcttctcattatatgcagcctgctcttcaattttccgttgagcttcctgcagcattcttctaaggcttgacaggatgttga

SEQ ID NO: 16340 - DNA, 555 bp, Arabidopsis thaliana
atatgggctttatattctctacggcgtcaaccataagtttgattacatcgcgttcagttcgagtcaagcacatttctcttcttcctaagaggccgtcggggtgccttttgtgctttgcttgcctgttagttttgcgtcttttctttctttcttttgcctgttagacacaggtggttcatttgggttggcctgtcctgtttgtgtcgaggaaccacgtcgaagaattgcaaccaaagcagaatctttttcagcaagatagtcaaacaggatgtcgaagctattgatcctctcagcctgagattgagtgcatgcttcagcggcagccagcttctgagaaagtatgagcgaatcatcactaggaagcattggaccactatgggctgaggatgcttcaaactgcagagatccaaccccataaatcctttctttctttcgcggagcaacctgcaaagatcacaaacactcacaaggacacaacagaaaaaccatgagaaaccaagttcaaaagaattcagacacaaagtataatgaataagctgccaagattaagagaat

SEQ ID NO: 16341 - DNA, 454 bp, Arabidopsis thaliana
tggcttataatttagtcgatttaaaacctaatttcaagattgggaatccgatattgttaatacgtaatcaaccgacggaggttcacaaaaaaaaaaaaaaaaaaaaaacatgaacttgttcttaaggacaaaaacattttattcaaatataaaagtctgaaagataagagtggtcgacataagtcaaccgacctaaagccttcgtagctcccagttcgtctggagctttcctagcccgcagttcgtatagctagcaggtcgtctgcacttcgcctagctaacagctcgtctgcggcctttttagctaccagttcgtctgtaactttcctagctagcagttcgtctgcacttcgcatagctaacagctcgtctgcagccattctaactcccagttcgtctgtagctttcctagctagcagctcgtctgcacttcgcctagctaacagatcgtctg

SEQ ID NO: 16342 - DNA, 708 bp, Arabidopsis thaliana
cgtcattgtgctcgatcgcaaccccagtaagttgtggaccacgacgttcatgtgttcttcggcccgacattatccgtcccttgctcgatcagtcgcttctcctgttaacgggtggtcgaatttgaaggcgtacctctcatcatgcatttggtgctcgattacatgggtaagcttgagatgggcgatatccttccatattggttcggtctgagtcgatctcggagggacttcgcacgataggagaattggtgtaaccactcctccaatgcaaaccgctccttttgctctattcttgcttttggacaatgcccaccctctatagctgtataggtggttgagaaagtacatttacggagttgtgtcacttgtatctcctctcattgtctctccgttcttggtgtatcggaggaagctcttcagcgccaagtccatcgtctccatgtcttttttctttaataacacgactttttagccagttttagctgttgttttcttatgtttcagagagtatttggtgccattctagagccaagaggaggagaaacacatattctaggtgccaagaaggttttaagagtttcggagcaaaaagtatcaaaaggcgatcaattccagtacttcagaagtttagcatccggaaacgagacatttcggtatttatgcaaagctagaagagtcaagattaacgttgaagtcgaattgaagcaa

SEQ ID NO: 16343 - DNA, 1309 bp, Arabidopsis thaliana
ctttctttttattttcttatcttttgtttagattaatttgaaaccttaatctattgtgtgatccgagaggtttttgaaatttgacccttaagtactacaatcaatttcttatttgagagagtggtcttaaggcaatttgacctacatctaatttggcacagttcccgaagttctgtacgattcaccattagaataaggattagaattttgtcttagcttttgtttttgtgtttcttttcactacaagaatatggagcatttgtagcgcccgaaaaacgctatttaattataccatagcgttattaaaagcgctctatcatcgtccgtcataataggtcggagcatattgtagcgcttttttgttctgctatcattatttcctttattacagcgctttttctgctgtaatctttaattatttaatagcgattagtttctgatataaataactgttatacatagcatatttaatttgctacatataattagacaatagcatttagttaattgcaatatttatatattatggcatttttaattatgcaatatttctccaattaattccagttcataaattatattttaatcccaaattcagaaagaaattcatattatttgtaaatcataaaatcaaaattcagaaagaaattcataaattcatattatataaaattcaagatcccagattacatttcaaagtcaaagtacttaacaaaaaaaacaacataatgtttacacaaacatgattttatcagtaggccaagccacaatactacctacatcatctgcaattgtttgaatttcagagtttggtctccacatagcagcatctccaatctttgaaacttctacacataccttgcttgcatttggacctaggggcatatgatggactgtgtctgaagggttagaggtacatactcttccttctgctactctttctctcccgttcttgtaatctaacatgatgcatttcttcttcgcagatttgctggtgctagcagtacaacaagctctacatgaatcaaaataataccaagtaagcaatattcaagcgatggtctttcatatgcatgtaagttaaagtgcagaaagttaccaatggaggtgatggtcttctatttgttgatgctgtttcatccagtataggagatatattcacatgttgtatactatgaagtggccacgcaatgttctcatgtagtacatctcccattagaaactttcctggacttggtctccataaatacgcggctttgtttacaccttctcaaccttaacaattgcagcagaaggaccaagcatattg

SEQ ID NO: 16344 - DNA, 560 bp, Arabidopsis thaliana columbia
aggtggagcatggtttgcgtactcataagtctgtttccaaagggttcatcgcgataaaatcaaatatgtcaaaagcttttgatagagtggagtggaattacgttagagcattgctggatgctttgggtttccatcagaaatgggtgggctggattatgttcatgatctcttctgtttcttactcggttctaatcaatgacaaggcttttggaaacattgttccttctagaggtttgagacagggagacccgctctccccttttctgtttgttttgtgctcagaaggtctcacccatctaatgaacagagcagaaaggcagggtcttttaagtggtattcgcttctctgagaatggaccggctattcacacttgttatttgctgatgacagcttgtttatgtgtaaagctgttaaagaagaagtaacagtgataaagagcattttcaaggtatacggagatgttacgggtcagaggattaattatgataaatctagcatcactttgggggctctggttgatgaagattgtaaggtttggaatcaagctgaattgggtatac

SEQ ID NO: 16345 - DNA, 266 bp, Arabidopsis thaliana columbia
ctctagtaagaccatctctccaagacgagtatcaatgacgcctatcaccacagcagaaacaatccctggatgctctactagaacagcttccacctgcgtaaattcaatccataaaaaaacttgagggtaatatcgagcagtttcttgtgttggaaggtaacctcttcggggtaaacattctcgcctccagtcttgattcggccattggaccggcctataagccataagttaccaaactcatcaaaggccccgatatcacctgtgtc

SEQ ID NO: 16346 - DNA, 524 bp, Arabidopsis thaliana columbia
caggattgaatgccaaagcatttataggtccaaaatgacctttcacaccaccaatttcctcttgcagaatctatatattataccaaacacaatgatacacggttatttaaatatgtgtattttccaggttacatgtttccaagtaaaacactcttattataaacactaaccttgtcgtaaaacttagcttcaaactttccagcacgatgatcagtggtagtcacagctgatgcatcttgaccacctccaagtacaacctaaaagagagagcagaaacattcacaaagataacatcatgccttgctgattctgggattcgaaattgaatttcatgaagcattagtgcatacatggttgagaagtggagacagggagacagcatttacgggcaccacagtggtgtaagtcttaagaagagtcagcgttctcatgtcccaaagctgaaacaatcaacaaaagagaacactctattagatgatttatatctatatgtatagtgcaaaaatttgaaacaagatatactg

SEQ ID NO: 16347 - DNA, 478 bp, Arabidopsis thaliana columbia
ttccttcctccgaactatctcatcggaatacttgactcctttccccttgtatggctctggtggcctccacttcctaaccgttgcagcaaactgcccgatttcgctcttgtcgtatccactcacagtgattctagtgtactcttccactttaactttaagactatacggtaactgcatctacaccgggtgtgaaaacccgagaataagcaccagctcctttccgtctactgtcgcacgataaccaacacccacaagtatcagcctttcctcacatccctttgacactcccacaaccatgttatcggtcagcgtcctaccagtcacacagaagttaaaaaaaaagcttagagaacaaacgatcttttaacctcaaaaaagttaaggacttcattggatgacaagaaacgatgagacgtttgtcacctgaaacaggcgtgaatttggttggctcttctagtttcgacggttttcttgccct

SEQ ID NO: 16348 - DNA, 537 bp, Arabidopsis thaliana columbia
tgataaactcattcttgtcaatgtcaaacactttccagcctttttgagcaaaagggtagccaacgaaaacgtacaaacgacttcgtttcccaaatttgtctttatcacgggtgacgcggtgaacgtaacaagctgatccaaacacacggagctgatcataatttggtttaccaaccgtgaagaatttcatagggcgagatacctttgtgaagagatgaaggagtccggttaatcaaatatgcagcacttagtaccgcttcaccccaaaatttgaccggcatgcttgcttgaaacaatagagccctagccacattaaggatatgtctatgcttgcgttctactcgaccattttgttgaggagtccaacacaagaggtctgatgaatgatcccatgttcacgaaagtaagcagcaagacacataaattatgtgccattgtcactctgcactgttttgacggacttgccaaattgtttttcagtgtaagcataaaattcatgagtacatagcgcacttcagattttgctagtagtagata

SEQ ID NO: 16349 - DNA, 521 bp, Arabidopsis thaliana
ctttgagggccagaaataccttgcagtgccttgaagccttccaaaggaacctgaaaacagaaacaccgcttgtaaaacatatgaaagtttcccttttctatgaatttctagcgtttcaaaaggggaatagaggaaggagatcaaaatcgagatcaaaccaaccagacaaaaaaaaacaagtacatatatatcagaaagagaatctcaagtgacttggacagaagctgctaatattggtctacctttgatgttccagtgacaaattgaagaaatctagccatatcttctttgctgaaagccttgacaacctcccagaaccaatgaataacaggggatcctgccgtgtagctggtatactcggtattggcttttagatcatcaactaaaacaaataaaaagattgttattataataacttaatggataagcacatagatattgatcaatagaatccaacttacaatcaatctcaggcaaccgctgattaggagctcaagctctttatcattgaaaattgatac

SEQ ID NO: 16350 - DNA, 589 bp, Arabidopsis thaliana columbia
gagggatactgcagtcacgtcacaactcactcatgttacacaaaattctttggatatttagataattgaattcgaaagtacacaaacagaatcaacatttttgtaaatcaaaaggatttgaagaagcggtcttaccgatacatagcagtgggtcttaatgtggtccatccagaaactagtgacatttccggttttacccaggagctcctgaacagctttcagtgtgaacggcctaaggaaacggtcaatcctgagggaatttgtaggctcctttggagatggaggaactgccaataaatattgaacacatctatcaaacaaagctttaagacaatgaataagagatggaaacatacatagagggggtgctgtattacatacccacacgttccttgggtccatcttcactaaccgaagagtcagaccttgagaagtcgcgcttcagaccagtcgaccttggtgttgtagtgggtgtagcactattagtgatctgtgcttcaggaactttaatactattagagttccacggcgcctctttgcaggttcattgtttcgacagcttcttgatctacattgagttcaaagaaag

SEQ ID NO: 16351 - DNA, 451 bp, Arabidopsis thaliana columbia
actctatccccaaacaaaaggcaatccccggagaactcaccgccagctcctcctcctccttctcctccgtcacctccctcttccaacgatcaacaaacaacatctcctcctccttccgacaatcaagaaacaacatctcctcctcctccatcttcacctgacatagctcctccacctcaacaacaacaagaatcaccacctcctcctttgccggaaaattcctccgatggttcttcctcgtcgtctccaccaccaccgtctgactcatcctcacaatcacaatctccacctcctccttcaacgtccccgccacagcagagtgacaacaatggcaacaaaggaaacaacaatgagaacaacaaaggtaatgatggaagcagcggcgatggaaggaacaagaacatgtctcatactcctccagcagcttctaagacttcggaacatagctctc

SEQ ID NO: 16352 - DNA, 514 bp, Arabidopsis thaliana columbia
agagaagatcgttggttacttcgtggagttaacgtaagagatgacagagtcaaagtcatcttttgatagagcagaggagggcagaatgctaacgtaggcatagtcatggtaattttcatttatgtttgcaacaacgatttctgaactaactttatcttcactcaccaagattttccctctaagcagaggtccatcagtagaacctccatacagaggataattctttccttttaaatcaaaagcgttcaatgatttcccctgtttagacaaaaaaacaaaagagccctttgtcactgaaagggacaaatatactatgatgatagaaatgagagtgttacttgatacttacgacaaatgtcttgccgtttccgagtacaactttggtgacaaacccacggttggtgttgcttgctgcaactgtcaagatccatggtgctacactcatgactgagcccggattcggaccaccgttaccagctgactgcacagtgagaatacttttgaccatagcgtg

SEQ ID NO: 16353 - DNA, 449 bp, Arabidopsis thaliana columbia
catataaacttgtaacaaatgttttaattcgtactaaagtataaaagtgaatcataagatgccctacatgaaagaaagcaacggacaaagatgaattaaaccaaattaaactatgaaaatgaataaatccgattacatcaaattaaaacacacaaatatctctcattaagcacacaaaaaaaaagatctcaaattgttctaagaagtctcatgaatcatcaattggttgggttgctgcggaatgaagccaaagctttgattgctgcagctctcaagatatattgatggtatgctgctgctgctaatgctcccacgaatggtccaacccaaaagatccactaaaaattcaaatccattaacccaaaacttaattagtaattattcaacaaaaaaataagtaaattgattgttaatgagagagaactatatttacatggtcgtccaagctt

SEQ ID NO: 16354 - DNA, 652 bp, Arabidopsis thaliana
  unsure (1)..(652): unsure at all n locations
tcttcttcttgactcatttggtatataagatcctctgctgcacctggccagtagtcaccgtcaaaatacgggagcctagctgctgtaaccttagctctacattcaccagtttgcatgaaaaaatggtcatatagattgatagtttctgcaacaatgccctcctttgaagcttttctcaacattgctaagtacctgcgaataacaacgtgggcagttggatgatgtaaatgactttttcatatgaaagtttacgaagttcatcccaaaaaggtaaatgaactgaccactctcgtagtttatcagattttggcgtcttctgaatttctggatgacaatataagatataatcctcgcccttcagcggcggacaagcccatatgtagcagctcgtgaaaccacgcaacttgcagtattctaggtagccgatctataaaaaggatcagattatactcttagatcctccatacagtgtagaaagtaaaaagcacagatattggttaaacaccaaggtttcagaagaccaggacttaccagaatttcgtggtaaacaaaagtacgcagagcttctccgttataagatctaacctcgggtctgaagtacttgacagaatccanatacgagagataaactcggcgttgattgggaaatgcg

SEQ ID NO: 16355 - DNA, 853 bp, Arabidopsis thaliana columbia
tagaatggaaacttctctaactttttcttagttgcatcacaatatcatcaactaaaccgactatgcggcccctgggattcactttaataacgggcaaccacacttcacgccgtgacctcacacgcgggtaatatagaaagcttacttgtcctgcttgtgatgctaggataaatggttcgaacttggcataagtcttgtttgcattgatatcgaccatgcctaagttatttacacgtacccctggaccgatcaccggatcaaactaatcacacttgaacatgatgcatttcaaattaaaaagtctcggatattcgacttctagaatttgttgcagaatcccataaaactcagttttaccttcgacatggattccataatttgcaattgccctttgacttccatatggatacgtatggaaagtatagccgcgagtgaagtacatcagagcagttctgatcttagatcttggttcttgaacaagctcatgcaaccaaagtggtaatggttcgtttccacatccatttatcacctacacatagaaaatattagatatcacatttttaacagtcaataagtcatagacttcccactttcaaatattcttatagttacatagtattttcaggatccagtaaaatcacgatctttgtaagtctcatactgtttttcttgtaatgcaggacatgattcatggatttgtgaatgaaataacttacaaattaaaatgtagctgtttaattagattgcttaattaatatcatagtaattattaaatataagcaaactgaataaaaataggttgctttatacctatgaaatttttgaatgtaatcaagtaagtatgtaattgtga

SEQ ID NO: 16356 - DNA, 779 bp, Arabidopsis thaliana
agaggatcgacgatccccggtcccatcaatattataaattaataattatataaatttacaaatatatacacatatatatatatatcaatattatatgtaaaatatttattgaaatatgactctaatattattttttcttcaatttctattaattatttgtagagtttaattctaatatttttattacgtcgaaaaaattttgtattattttttaaacttaatcattgttttttccttgtaattagttttagaaaaaattattaattataaagaaaaactacttttctatcgaagttttgtaaaaaaaaaaaatacaaaatttgtaaaatctctccataaattaataattattaatttatcgataaattaatacctctctaaattaataaattttctcggtcccgacattattaatttatagaggttttactgtatatatatacaatcaatccatatcatttgccttttacttgatttttttttgttaactaaagtacgacgtacgtattaacgtatatataactatggttttatctgaaaatgaacacaacaattttaatgtaacataaacgcacacgaaaaattaaatcgagtgtatgtaattaatagagatttgacaaagcttgttgaatttgaaaactacaggtggaaaacaatgcttgcattacacgcaagtggtgtggagagattcagtgaagatagggtgtgctaggggtcaatgcaccaatacttggtggttcgtgagttgtactatacgtccccggtaattgggtcggaga

SEQ ID NO: 16357 - DNA, 624 bp, Arabidopsis thaliana
caccattttacagtagaggtcttcaaccaatacatattactaacacagatgattcaagattcacaaaaagaaactctgcaccaatcgaatcatcgcccattggaagcaagcacattgatcctttcccctgagccacttcacaaggctgtagaatcagcttaagcctccttaagcctccttctgaggctttggcttttttttttttttttatgtgtctggtttagttccctatgttgttgttgttgtttctgagaactgaacatctcttgtttccacgaattcacagagatgatccgataaaaaaatgcttctttacaattcactagtccgcggtagaatcacccgaaccatgacgctctcttctgatcatatctagtagatcttgaacaacttctgacatcagtggtctaaattctggttcagactagaaaagaaataaaactcttttggtcacgcaaacacaatcacaagcatctaaccacagtttctaattgtcagtatgtgttttactgaacacacgggatattatatcagcaaagtgtgacaatgactttgcagggtattgtccattaagagatggagcaaacattttgccgaatgcatcgatatcatgaagctgtggga

SEQ ID NO: 16358 - DNA, 894 bp, Arabidopsis thaliana
gtttataacgtttttacttccacataccttaattgtcactaatcatcataatttcgtgcagggaatgcgttcccgcatagaggctaccattaatcgtcgcattgcttcgttttactctgactgtatccgagaaaatgagtggataattatcaatactttctcggttcgtctccacgacgaggggatacacacaacgtcccatgactaccggatctgttttatggatcagaccattgttaccaaagttttgggattggctgcaataccgtattatgattttattccttttgactacatcgtcgagaagacagtttctactggagtgttagttggttagtatatttgacttgctattgattcttgtaaatctgtacgtacacgtaatacttttatcttttattacgtacaccagatgtgattggtgcgctccttgaagttggcaacttgaccgaagactaccgtgggctgaagcttccttttaagataatggatcaatagtaagtgcctctgtgttattttttaaaaaagttttcacctatatgtttgttatatcctccgtataatatatattctctgtagcaaagaagttcttcaatgtgaagcacacaatgatcaagctttggaatttcaaagattcttccagcggctaaatggtcctcaaaatgttattgctctcgtatcctggcgtctgagcgggatttataaactgaagactctgagcaatgaccccatctccaaagtcattgctaatccggatatatcggaagtggaagaaatcagagtctctgttatgctattagtttatctcttgtctctgttattcatactaactacagatttgtacccgaatttgaacatatcctatatttatgctcacgttctactctatttccg

SEQ ID NO: 16359 - DNA, 619 bp, Arabidopsis thaliana
ttggccgatcgatactaattttatgcccaataaagcccataccgatgactttctaaattgtaacatgttttgtgcctttctaaattgtaacgaatacttttattttattgaaataatggatttagaaaaaaatagcatgttatttatacagaaatatagcacagaattttacatgtaactgtatcaaatatgaacatatcattgttttatcatttagttatttacctgaattaataagtccatttacccttataaacatctacacaaaaatgtctatcatcgtatgtttaaaatacagatgaagtgattataaaaacttcacaatcaatgataaagacagaatatgaaaattaaatccttttagaaaaaaccataaccattcgtgtgtgtgtaaacatcatcctccatccatgtccatgcaatacacaagtatatgtataaatctttacccacacaattacaaaaaaaaaaaacaaattcatatcttaatcactatcactctagctgtctcattagcttgacgagtcgacacggatggagactcggcagagcggacaactcgactcggttttaagccaccgatccacacattcgcagtggtaacaatggctacacggag

SEQ ID NO: 16360 - DNA, 558 bp, Arabidopsis thaliana
tctagtaacgtgcgccagtgtgctctaaagagaggcttctaggtactcaggatgattacgtaaagtaaaagtcagtttgctcaggatatgtgtcggaacgtcctgctcatcaataattttggccgtatccagcatgatccggccatatttcatttccagcgtaacgaagcggttccactctggaccgttagcgcacaagaggtcaaaaaggatttcaccagtggtctcactacccagtagggcagaaagtttcgtctcaatttcattaactgaggacaaagggttctcgaagccggtcgccataacgacagcttttagagcccctgagacgttaattccggtgatttcaaacaatatataagtccttgattatccccacgctctagtggctttacccatcaaccgggccatatcagaaatcatacggctggcatcgaccacagtttccatgtggaacagagaatgacgttccacattaaaaaaagtataggctgtgctgatgatgttaatctgttcaggtctaagagtagctgcaaattgcgggttcagaatgtaatg

SEQ ID NO: 16361 - DNA, 803 bp, Arabidopsis thaliana columbia
ggtttttcaagctgataatcttctttgtaaacttgatagcactgtattttactcattttaggtgtatatttatcatcatttagctttgcatttgatcattgtatcatatcattttgcaccattttggcttgttttgcatacttaggcatctaggatcattttgcattcgcattgcatgtattggtacgttttcaggtgcaaaaggagcttaaaaggacacgacactatacattcgtaggaattagtatgctacagaagaggcatcattctactcgacctctttactcgatccaagatgctacaaaggaggctgcagtttactcgaccctcctactcgatcaaggaaacctcagatgaagcaacaaattgatctactcgcccctcctactcgatccactactcgatccatttactcgaccaagggtgaccatatctacaagacttgttgagctatcaaagcgtcttcggatcatcctcattccccactcaaccagacatctgaacatacggataggaaaggatgaagcatctgctcgactaattgatcactcggagcatagacacaaaggcgcagactttgcagcaccctctttactctatccccaaggtcgagtattcgcccaaaccgcctcaagtctcttgccttctagtgaatctagggtttcaacattttagtataaatagatcagtttgggatttatccataggatctatgctttatttttcagtttttctttgtgtttatgaatcttgaaactttagttactcttaatctatttcgtttttgcatttgattgtttaag

SEQ ID NO: 16362 - DNA, 661 bp, Arabidopsis thaliana
tacctcaggtacagagcagatagatgaagaatttggtatgcttcaataattctcaacttaattttgtgccataatctttgattaaatgaaatatgtaggagcaaagacgaagttatagtaaacgagcagagtggttatctaatgcgcacgaagatcgcatcatcagatgaaggcggcgttgcagctggttttggagtcttggacagcatatatctgatttgagatggataacattcacaaccatcttgatcagtttttcttctggtttattccttcttcttctcttcttgcttgttaaagatttgtgtattaatcatgaagatcaataagactaggcaaagctctttacaattctttccacaggaccgcaaagcctacattgcttattgttatttttagaccgtgtgagatgattactcgtttataaagatcatgaattgaataagataagatcaatcatggaatttggggtataaagattattaccatagcaacatatttagaccataggcacatatatgtacatacacaaataaatgttatgaatcaacgaatgtctgaaattccgatgcctctccgttttgagggaaagatagcaaagaagaagcttgccattgtcaacaccataacagcaaagtacttgatcataagtacaaaatga

SEQ ID NO: 16363 - DNA, 694 bp, Arabidopsis thaliana
tatgccaccgcccctactcgttcgatcaccttgtacgggccaacataccttgggcttaactttttccttgaggtgaattgccctgcccctttgtaggtcatcgcctttaagtacacaaaatctcctacttggaattccaattcctttcgacgcttgttggcgtacgttttctgtcgatcttgggcttcctttaacttaatttttaagaacttcattctctccgtggtttcatatacgatcgtaggtccgaacaatcaacgttcgcccactggcgtccaacataacggtgttctacaagctcggccatacaacgcctcatagggagacataccaatactagcttgaaaattgttattgtatgcaaactctactaaccttagatatttctcccagtttcctccccaatccaagatgcatgccctcaacattcctcgagggtttgaatcgttcgttcggattgtccgtccgtctgtgggtgttaggccgtacttaggttctttcgagttcctaaggccttttgaaaagccttccaaaactttgacgtgaaccttgtgtctcggtccgacactatactaaccggaatcccatgtaacatccaccttctttgccttagattcaactccgacttggtgaatatgtactttaagcttttgtggtcagtatagatttgaactttagcaccatacaactatga

SEQ ID NO: 16364 - DNA, 699 bp, Arabidopsis thaliana
attgtcgatcttcccattaagatctgtgtagagagaatcaaacttgccagtaaactcaaccacgatctttcctaggtggagaagcaatgcgtgtagatccttgttcctctctgcgattgtcggaagcctcagcaaattttcttcgatcatagtctatttcctttgtggagagacttgtgacagcgttgttgataagaactgatgcttcggttggagtctttgtcatgaaattgccattacttgcaccaccaaaacataaccgatactgcttatcgattccacggaagaatatgttgattagtttgctttcctagaaaccatgttgtggacaatccctctgataggatttgaatctgatccaagctaccttcaaaccttctgttggagcttgagaaaacaaagagatcttctcccttagtaattttgtcactgaatcatcaaggaagtggatcatgaatgcgttcttcgtgtcactccaattggttagtgaaccgggttctagttgtcgcagccatgatgttcctctgccagcgagagagtgtgggaagagtttgcaaagatgataatcagcttgtaccccatctgctttgattgaggacactaagtcttcgaagacctctagatgatctagtagtgattcatcaaaatgacctcgaaactttcctcgtgaaacaagataatagtaggcagggtgaatag

SEQ ID NO: 16365 - DNA, 838 bp, Arabidopsis thaliana columbia
tgaaatggtcaataatgttgcgtttaatcatatggaccaaaaagatgtaaagaagattaagcaggattgtgatacttctgtgggagctataaaggatacctcagccggtttggactcatctgtaactaaaggtaaagttgagcctgtggaggggaatctggaaaatagtgaagtcaaggaacggtactcaggattaagagctactccaggattatcacctaaagaagctgaggatcttgagagaccgaatgggcctaaaaccagtgatgctgatggagatgaagcgggggaatgtacgtctgctgccagagatgcttcttctgtttcagctgcagcttcagctggcatctgagatggatgccagagttgaatttgatctaaatgaaggttttgatggagacgatgcaaaacatggggactcaaataacttctctggatctgtatttttgacgcctactcctctacaaccagttaagaccttaccttttccggtggctcctgtatctagtggaactcgtgcatctattactgttgctgctgctgccaaaggtccgtttgttccacctgaagatctgttgagaaataaaggggctgttggttggagaggatctgctgccactagtgccttccgcccagctgagccaagaaaacctcaggatgtgttactgagcattaacaacacctctacatctgatgcatctacttctgctggcaaacagacaaggacgtttctggattttgacttgaatgtacatgacgagagagtccttgaagatttggcttccaaagatctggaaatccacaaattgtacatctgatatcaccaatagtttgacca

SEQ ID NO: 16366 - DNA, 1083 bp, Arabidopsis thaliana
ccccaaagactttgcctgcttcatctataggcacttgggctgattgtaaaaaggcattcctagctaagttcttcgctaactcaagaacaactagattgaggaatgaaatctcgggtttcacacagaggcattctgaatcattttctgaagcttgggaacgcttgaagggctacactactcaatgccctcaccatggtttcaagaaagcttcactgcttagcacactttatagagaagctttgcccaagataaggatgctattagatattgcttctaatggcaattttctcaacaaagatgtagcatcgggatgagaacttgtagaaaacttagctcaatctgatgggaactattgtgatgagtatgatcgttcaatttgaggcaacactgagatggaggaaatgcatcagagggatatccaggctctacatgcaaagattgataagttggtcattgctctaccacgaccaatcgttgagagacatattcactacattacggatgaagagcaacaacagattcaagaaggagagacttacccatatgaggaagtgagctacatacaaggtggctacaacagttacaagccacctcattcaatctctcatacagaaacaacaatgtggccaatccacatgatcacgtatatcctcaattacaacaacaacctcaatccaaaccttatgttccattcaacaacagcttcaaccaaggtttcagccagagacaacaatttgaaccacctatcccacctccacctcaaccagcaccacctcgagctgttcctgacttcacagctatgtttcagcaactagtccaaactcagaacaatggtgttacagtgttagaaaagcatttggttaagatgcataccaagatggattctactttcgttgatctccaaaatcaaatagaatcactaggttccaaactcaggacaatggaagggcaagttgcctctacttcagtaccacaacatctaagccaactccctacgaaagctactcaataccccaaggagtaggctcatgctatctccacaattcatagttttgtcacaaaggacagtgaggatcaagaaag

SEQ ID NO: 16367 - DNA, 959 bp, Arabidopsis thaliana
tttatttactctactgttgtttactgcatcttgtcatctgttgcttaatttctgcaattttttcttgttactcgacaacccagttgtctggcaacagactgtgcagtcgagtatctgtgttttattttctgtctgctactcgacctgtcactcgatctcaaccagtgctctgcaaagagctgtgttggtcgagtattttattgtttctacttgattttctgttttctgcatgttcacttaggattgctagaacacaccacaacctgttattgcttggcttgacttagtgacttctgatcacatcttgattgttagcatcacactcatttggattgacaaccttcagtactacaacgacatgatagtgctttaggattaattgatcttaaaagcctattatcaatttggcgccgttgccaattgggtgtttgtttgttacatttgagatttcagacttgcccagatcaagttctttttcaattttcaattcgattgctaacaggcaatcaaaacctccttttcaacgacaacatcaaccgcatagctcccgaactcacagaaaggagaaacacagtcaaccttctacctcagcaaccactcgaaatggctgacgaataaaatcaacaaaatggccctgccaacgttggtgttggagatgcaccacgtgatcaccatcagaggaaaggaattgcacctcctgctatccagaacaacaacttcgagattaagagtggtctcatctcgatgattcaggggaacaaattctatggtctgccaatggaggatccactcgaccaccttgatgaattcgaaaggctctgcaacctaacaaagatcaatggtgtcagtgaagacgaattcaagctctgtttgtttccattctccttgggcgacaaagcacacatctgggagaagaatctgccccatgactcaatcaccaccttagatgattgcaagaa

SEQ ID NO: 16368 - DNA, 788 bp, Arabidopsis thaliana
ttttaaaaggatctaatactacacaagccggacacaattcaagatgcactttttcgagcaaacaactggacggaagtagaagacgaaaaagaaagttttgcaaaatggaatgagccagcaaaaccggcggttacttttcctgccaagaaattcgagcccagggaaaaccaagggccaaggaagtttggattgcaaccttttaacaataacgtctggaagcagttccaaggaaaaggaaagtcaaacacctgggtccgagatgaaagtctatactgcgacatacatatggtaatcagacctctaaccaaagattgtagtgtcctcaaaagacatctcgctaagctatgggccagcgaagatctttccaaattcaatagagacgatttcatgaagaaatattaagaagcaagggataattccgaacttcaaaactccaaaagaccgaggccgtttaacgaggaagaacctgggagtttgaagcgaaagatcaatataatccttggaggctccaaactttgccgatatggtatcagtgcaatcaaaaagcataggctaaatgtgttacttaaatcgagcttgagcgaagaaattgactaccaaggcgcttcaatatcatttgacgagaaagaaacacgacaccttgaaaggcctcatgatgacgctctagtcattacattgtattacgctaacttcgaagtgtcaagaattcttgtcgatattggaactccgttgatttaatctttctaagaacttcagaaagaatgggaataagtcgggcggacatagta

SEQ ID NO: 16369 - DNA, 642 bp, Arabidopsis thaliana columbia
ctcatctgtaactaaaggtaaagttgagcctgtggaggggaatctagaaaatattgaaatcatggaacggtactcaggattaagagctactccaggattatcacctaaagaagcagaggatcttaagagaccgaatgcgcctaaaaccagtgatgctgatggagatgaagcgggggaatgtacgtctgctgccagagatgcttcttccgtttcagctgcagctgtcagcttcagctggctctgagatggatgccagagttgaatttgatctaaatgaaggttttgatggagacgatgcacaacatggggactcaaataacttctctggatctgtagttttgacgcctactcctctacaaccagttaataccttaccttttccggtggctcctgtatctagtggaattcctgcatccattactgttgctgctgccgtcaaaggtccgtttgttccacctgaagatctgttgagatataaaggggctgttggttggagaggatctgctgccactagtgccttccgcccagctgagccaagaaaagctcaggatgtgttactgagcattaacaatacctctacatctgatgcatctacttctgctggcaaacagacaaggacgtttctggattttgacttgaatg

SEQ ID NO: 16370 - DNA, 982 bp, Arabidopsis thaliana columbia
tcaagtacgtgacttgatcatgaaaccatgtaagtggaaaatgacatagattattaaagtccctagtcaaggttattaaaatgagacattaataactaagaatgactagtatgtgaggtgactgatgactaagtttcatggagtcattaatatgtggtattaaagtcaatcacatagatatgtgttagagaacacagtattggactgacccgttatgagaactctacaagattgttatatgagtgtcataagagtttctcatcacaactatagagtatagtcctttgacctgagttcgtcatgatttcttattcatggattagttcgctttgactctgtcaaacgtcagccgttaaaggtgattataaagacagtgattgggcgcattatgaattgtttaaggaacagggatggaacaagatgggatttgtccctcccatataacgggagataaatatctttgggcctatcgaagatttgatactgagaaaatgcgtagccgcgctcaaacgaggtgaatgtcagtcgtttgttttatcagtataaatcggagttcgataaacatggtctaactgaataaggatgacaatttcttgccttatgctgagatcgagatatagaggcaaagggattatgggaatagatgattcccatacaagtgggagattgttaaagttgtactttactctagttaaagttgtaatgtcgaggtttgacatttgtataatattaggtggttattatgttttgctagagaccgcttataatctatgagtcagaactcattgctaatattatacaaacctacagggtcacacacctaagcagactggacaaaaaaaagggaagaaaaagagttactatgctttggtccattattaaccttaattagttagggttaacgtttggctatatatatgatataatagcaacgtttgtgatatatacctttgatcataaaaccctaaaatagagagcctac

SEQ ID NO: 16371 - DNA, 561 bp, Arabidopsis thaliana columbia
ttctggtgatgaagaaaaccaaaatggaaatcaatcggttaccactctcgtattaaatttgagattccggataacagaaaaccaaaaatccggtatcaatcacctgccaaaaccctggctttcttatggtcatcttcgagcttggcgacgttttcatggagagccaccaatgcggcggcgcagagacgccgatctgtctcattcctccgcctaatgttttccttaaccaccttgcctgcatttcaacaagtaattacttgaaccggaattgaaaaaaaatattgttatttaaccgtctcaatttgatttataggtaacgtactttagtaatgaacttcttgcttcccacgattaccgaaccgaccggtgcaccaatacctttcgacaaacagatctagttgtaccaaagtgacggaattagatttcaactgtacattgagagacgaaaacattaattagaccacagttttgatgatgagtcataccgagacagaatcagctgcttgaacaatcctcttcacgggaactccaagtgccttcaaaattaagaccgaaaagatg

SEQ ID NO: 16372 - DNA, 787 bp, Arabidopsis thaliana columbia
aacacaaaagtgaactttgagggttgcaaggagttggcagctctcctctttaaatcccccacattggcagctcatgaacattgcaagattggccaattccatcaagtattgcatatctccacaaataccaagctcttgcatctttttcttatgagggtatctagttccctcaaacttcaactccttcaagtattgatagtactcgcttggggttgactctctcttcctccttggccggtttcttctcccaacaggggctagtgtatcatcctcgatgatctcaacctcttcctcagaaaccgcttcttcaaagactgcctcttcatggtgttcttcctcagccttaacaaccctcttgcccctagctacttcttctctttgcatggctgagcgacttgaacttctcccttgaatcaagcttgatctttgagcacagcgagcttggtgaatttggtgttcagtcatgccactcatgtcaaacgcctcaacttcttcgttatcaacaaaatcttctagcccgagatgaactctttcttcttgaatccatggagattggtggtgagcttcaataagacaatcaaaaacaactctccaaaaggtatcaatttggaaaggattcggtttttggtgatggaatttgagcttaaaaaccggttgaaaatttgaggatgggattgggaatgatcgagtaactttggtgaagtatggtgaatgtgagaacggattcttgagaggtgatagggagagtttggaatgaaacttttgaagctttgtgaaagatggagaa

SEQ ID NO: 16373 - DNA, 671 bp, Arabidopsis thaliana
catgtattcaatcaaaaaactcaaaaaaatacaaaataaaaaaaatgacgatgccataaaatactcagagaattacactacctaatgaatggatgaaaggatagatcatacttacgtttgattcttgattttgattttgattttcgttagtttggatagatgccataattgaaagaatagggtttcaatatattgattagggttttctgataagaataagatatatagggtttgggtggaagacataattattttaattaattaaaaaaaaaaattaatctaaccgctaccgcccgcaaccgcaaacgcttgcgggaaggagcttttaaaatctggcgatttcgagcggtccaaaacggtatctagcggtttctatgattggtgtcaaacgctaacaaccgctaccacccgcaaacgcagcgtttttgcggatgacagagggagaaccaatcaagctcataatgtagagaatacatacatacatacataacgcagaatcgcagatgggtccatccaaaagccatgcacccatgtgctcatcatattcaacggaaggtacggatgattttagtttgattattgctttgataaagcatcatccgtgttttaatatttgatttttatttggaatgtgctgttgaaatcatctacattgatggtactaagtggta

SEQ ID NO: 16374 - DNA, 586 bp, Arabidopsis thaliana columbia
tacacatggagatatgtttacctttgaaacacgagtcatcacatcaaaaatctccttgcaacttcccaaactcaagtgaaattgcattctttgcttcaaatcatctaaactacacacatctcttaaagattctctcaacgtagaatacttagaaccagtcaaggaagagtcaatctctgaacgttttttctcaccacaccaacctaaattcctcaaccttttagggcttctccacattgtatcaactccaacagatttactatttcctaaagcctcaccactatctctcttccccttacctaaattcccaacaccagactcgttctcgaacggatcgcaaccgcaattttccgggttttcaaacaagaaattgagccacacagtaagtgatttagcaagagatctaagattcttctctttcgtcaactcagccttgcgtgaagattgagattgctgaagttcaaatgctttgagccgcctcgacgatgttgataccttagaccgagatgcataagaatgaaccattgaaggacgacggaaattagaagacgaagattttggggtttgctttgatgcagtgaagaaa

SEQ ID NO: 16375 - DNA, 561 bp, Arabidopsis thaliana columbia
tgtgtaggtttcggaagctttttgttttgttttcaagctatacatatgtgaatacacttgatagaatcaaccctgagtcaaacgagctcttgtagagttgttgtagctcgtaatgttggatcattgagacaagtcattgatattttactttttcatttcttgttgtcacactagtatatcacaagaaggtaagtgttcttctctctgatgagacaccatttcaacatggtttaacactaacaacatataacaatacaaacttgagaattgaaaacttgcttgctttacacttgggaaaggtcatcgaattggaatcaaagtagacaatcatcatagataacattttttttctttatggtacttttcttgtccactattatagcattaacaatcctagaacgagctttcatatttctgggtttgttctgagttgggtctaatttcgacacgacaatatcatgcttgacttgttctgtgttggaaacttgagagtccgcaagggttagtacttagtagaattctactgaaaatttcccttttcgtcagcttttgcaaaagaag

SEQ ID NO: 16376 - DNA, 327 bp, Arabidopsis thaliana columbia
atcaaacagaatctaacctaaacaacattcatcactaatactgaagttatgtgtcaaacattgatctatatgtaaaagctatcaaatttctgattctcagagctatagaaactgacctcagcttgtgctttctgagattgtgttttgacctcagcatttgcatttgcaaatcgccattgcaagtaacggttatggagcagtttcagagaatgcacatccgcttgttgtcctaaagctttcttctgcttctttgtatcggcttgaatcttcgaattaggaaccaacggagggcatgaccaacccacaccatttttaagcgaccatgaa

SEQ ID NO: 16377 - DNA, 1357 bp, Arabidopsis thaliana
aataaaatatccttaagttacgttgtaatttgattgaagtaatatcgtgatttgcgcgtgttattgtttaccaaaactaatacaggttcactcctacacctagagatatcaaatatgtagattagtttagaacatacgatgtttatttgtttacttttcttaccaaaaatgttttagaaagtgaaaaacacatttgagggataacaataaatttgagagattaaaacacttattttactttcttttttttcaatgtgtaaacaataacatatggactaactaaacatattttgattacttaatatttaatatttagggttccatttgtcaaaggcaggacggtaagtgagctacaatgtgagaccgtgaaggaagagaatgcgataacggaagagttgtcggagtggcaagacgatgcgagtgaccttgtcatggggacatcgtcagatcccgaccagaggatccgacggctagcagaaatcgtccaccgaactgatgatctgcgactgagaacgatcacacgtgtggtggaggtcttgagtccgctccaacaagcggagtttcttgtcgctgcggctgagcttcgtacaggcgttgctggttgggggactagccacgaccgtcgtcgaagttccgaagtttaaagctaactaaaaccggtctaaaggtaatgagaatcgaggaagaaaaatagtttttggatattaattatatgtttttaccatgtttttacaacaatcgcccggtagtggctaatcagtcgccaactaatcgctatatagtggcataaatgtagccaaacagtcgctaattggcgactgggtggcgacccaatggcgactacttatgtagtcgctagttattcaccatttggcgactgtttggctacatatcaatatagcgacgcttgtattgccaactacgtgttttagtcgccaaatagtcgtaaatttcgattaagcgactgtttagctatgaatagtgtagtcgctaataccatgttttctcgtagtatatatatatatatatatacttcacgatttaagaggggaagtcctcatctgcctccgttttgttttaccaccataattctccaagtttgtacttcaaaaaaagacaggtaattggtgacaataacatgtttattatggacaaagaaaccaaaatgtcaagcttacctaagttaagcactcttcattatcagtgacagttagcagatctatttcactttcgtttctagtgattaaattgttgcatgcatgtgcatccgtgcatccaaagctaatattagagtttaacgatgtagaagcgtttataccaaagacgtaccttacaacttggacgtgatctagaattg

SEQ ID NO: 16378 - DNA, 294 bp, Arabidopsis thaliana columbia
agatcaagcttacccgagtcgggtttcagaccaggcagcttcatagataccacttgcagtctgaaacgccatttcaactagaccttcttggatcattgttgcagacagtgcatatgtaacaccggaccatatctctcgtgattgcattgacgctgtatcaactttcccattgggatgcatcccatttacagctccacgtttcccatctttaatcttcatcacattatagttataaactttctcgaaagcagttcttgctttgtcttcgactactataggcaaaagccgtgatgc

SEQ ID NO: 16379 - DNA, 503 bp, Arabidopsis thaliana columbia
ctgaaggcaaatatggaattatgtgcgaagaaaactggaactgatttgtctggcttgcctcaactcagtacagagaatctggtagacaaggtatttaaataattttaacagcttattatggtatatatactttcaaggtttttctgcctctgactattttctgaatattgtttttcctatttctgcgtaggaaatctttgcacgcttgagtgctgcttggtctaacattaacttgcatgagacatcaagtggtggaaacatagccgaaatttgtggttctctctcccaaaaccttgatcaatttgtggttggtgttagccatctcgaagagaaagtaagcaagcacttggccacatggcacgaccagatcaatattgtatccaacagtatcgacacctttttcaagtcaatttggaacaggaacggactctgaagttgccgctcttggtgaaagaattgccttgcttcatggagcatgttctagcgtgttggtggaaattgaa

SEQ ID NO: 16380 - DNA, 536 bp, Arabidopsis thaliana columbia
  unsure (1)..(536): unsure at all n locations
nnnnnnnnnnnnnnnnnnnnnnnctaaagcgcctgtcacaaagtaaattcagatgccaggtatgtggatatacagcgaacgccgatgtaaatggcgctcgcaacattttagcggcggggcacgccgttcttgcctgtggagagatggtgcagtcaggccgcccgttgaagcaggaacccaccgaaatgattcaggcgacactgannacgtagcagggatccacgtccttcagggcgtggaggatgtcaatatcggtttctgtcagcgattaaattcaacaccacgtaacaaacgcctccggcaattaatccccaaaacgcagaaccaatcccgaccagcgtcaatccacttgccgttaccagaaatgccaccaccgccgcgtctcgctcacgctcattatgcagcgcctgatacaaactgccgccgatggtacttaacagcgccagacctgccagcatctggatccaacttacgggcagggcagccatcatcccggtaatggcactccaaacagacctgcgagcaaatagaaaatg

SEQ ID NO: 16381 - DNA, 575 bp, Arabidopsis thaliana columbia
tgttctttagagactggacagacaaacaccgaatgaaactgaaactcctcggatagttgcgcatcaacaggaagttgttccatggtctgccaatcaagcttcttattcgccatcaccacgttcatgtatttcaatagtactggtaacgcttgtgtgcccgctgttactgttatactcaacgggctttcagatgattcaccgagtaggttgcagtactgtcgggttagctctttgactgcattgttccacagagcgggggagagaaactcggagtatggtgatttatcgagttttctgttccataagagagaacacatgagcttctggatctccgggaggcagctatctgcaaacgtggcgatatgctttctcgcatagtcgatagcttctttggagtttttgcctcgtgctatttccagaaagtgtagactatgaagcttcatctcaagatcagaccttgcttcctttagtttgtcagagttcgaaacagcccaattaagagccggttcaagatctcgtctcttcatagcttctagtatccgatacatctccacgaaagattgtcttgtagaaca

SEQ ID NO: 16382 - DNA, 830 bp, Arabidopsis thaliana
ctcttggcttgcattctactcaagttatctcctgcaaatcaaatcttaaccatgagtgtttttctcaataaacttggtacttaaagatgaaacaagatagttgtatcttacccgcagattcctcaaaactatgggtttgatatagaagatcctgtattcgatattaaaggagcactcctaccttcctgtaatacccacaaaaacattaacatcatagagagatcacatccaatctgatgtcaatgtcttgccattaaaaactcttaccgatgtataagagacttgactaggatgcgaagatcgtccttgtccagcataatacacagaatcaagactctcttcaccaatctctctaagtctactaagctcaggcatcacttctttaccaagatcaggcctatcttttcttctcaactcagcacattgtagcgataacttggcaagagacaaagcttcctctaatggccaatctggtactgcaggatcaagcatatctttcaatgtcccttcttctatcgcttgttccacataataagccaaacccatcggctgttttgccgtcaaaagctgcaaaagcatgattcccagtgaataaacatctgatttcacacccaacattccggtttgttgatactctgggtctatgtaacaaaacgttcctgcagctgatgttactctgtactgggtcacgttttcagctaccgcggggacgagtcttgcaagcccgacatcgctaatcttgctgacgtaattgtggtcgagaagaacgtttcctggcttcaagtctctgtggacaattggctctggtttggtctggtggagaacaagag

SEQ ID NO: 16383 - DNA, 733 bp, Arabidopsis thaliana
acatcttcatacatttttaaagaagcttccgaaaacttttttaatctctctagaagcttcgccaaactcgaatgcacactcgacaaatccgggaccaacagtgaaccgcctttgtcttcccccaacatctccatatccaaggaaaaccccttgattgacccgctaagttcatcagacggcagtgttttgatccctgcagaccagtcccgacacagcacgaatatcggtggagccaggacacgacgtggggaccatggtcttcggtttcttgtagaacgttcttgagggagcaagacacagttgtgaagccaaccattcagagcttccacataagaagccatactgtgaaccaaatctacaaagcttagaccaaaacactctgtttcttctagaagctccgccaaaatccgcctcttaaggacactttcgtgtgctgttttggaggaatgtcgacaatggtaagccaatgaaatggtaatgtactgtgtatgatgacattcaagcatcgctttccacattcttatcaacctaaagagaaaagtaaggatcaaccaacgagtctatatccaaaagttaataagacatttggttactatatacccttgaagaaactctaagagctgtgggtggagctcacgtctctgattctctcaatccgctttgaaatcgattcaacagattgaatcgcgactctgattcttgaatgaagatctttagcagctgctcttgtttt

SEQ ID NO: 16384 - DNA, 1100 bp, Arabidopsis thaliana columbia
tttttaagagttatggcaatgttgatacagaatcatttcttttgagttcaaaacaattgtagctctctgacttgtaatgatcttaatgaaatttatctctcttatttaaagatggtccaagttctctagtggtcgtgtgtgtgtttttacctgttgacataggaagctcgtactggcgctttaagaatttggaggcgttacgatctttcttgtggcaaagaactctaacaagagtttgtgcatcctccaagcgccgctgctctgaactcacccccatgttgatgagctcgctcgcagtcattagcatctgaattagcatatcgctctgccacaacggacataatccgtaacactttggtatctcataatttctaagaaaggaactaagtttgcaatttgcaagtgagcaaaatatatttacctcgagagagtacaagtcgaggatctctttcgcctgtttcgcttcttgctcaactagtgaacgaggaagtccctccccatcggcaatgaagaactcctacaaggggacacacgccgtaggttaagtacacagattggaactgcctaatccacggatcaagacccggttctcatatgcaaaatggccgaacctcaaaatcaaagtagaaaatctagtttctagtattttttaatattgtctttatctgaaactaattggatgcagggagtatacaagatgatagagctcgaaaactttggtttccagtagaataagtacggaatttcaaaataagaatataagttgcttactttcaaaatactgagatcttcttccatcaaggtgatgtcagaatccgaaaaggcacgggttggccctccatcaagtagtactcgaacataggcttcctatgggagagaagcatgccatttttgtgggcataaaagaggttagagttagttaacttgtttccatatgcaaaagagaaaagaagtgttaccagagcggatcggcagatgcttaacaccaccatatcccgtgagtcctcataactcaaactgcatacagtatcaaggacctgtgcattgcatttcctagtgtaagttcatgcttagtagaacggggtgaataaaagaaagag

SEQ ID NO: 16385 - DNA, 926 bp, Arabidopsis thaliana
tgcttacattgcaatttactatgatggataaagaaaaaactaaagggacatcaacaacataccagttcatctaagaagtccctctgagactttgcttctgacccaatttcttgagcaatctgcatcaaaataagcgatcaacgatataacaaaaaatcatgagggataaataatgcgcaaaagtgcaaggtaaaacacaaggaattgtagagaatgtcgactgattccttcaagaagggtggtgatataaaacaataaccacagatgtatacaaaagacatcagacaagtggattcaactaattaatcgtggactgactgataagtattgtgaacaataacattatcatagtaccctgaacaaaaaaacacctacacaactaattaaccaagctctaaccactgtcaaaaccgaaaagaagacaaatttccaaattcatatgatcaacttaaagcttaaagagaacaatgatccttcagaaccacaagaagacaatacaaatggcactatagataaaaagtagaaagatcgaaatgggatttagagggtttcttacatttttcaattgcctgacttggccatggagacctagaatctcatcatccaggtcagagtgcataggatcaatcctcagctgaatttcctctgaacctgaagcatttctagtgcttagcccttctctacaaatcacacaccaaagataaatacttgtactttacgcagaattcaccaaatctaggacccgttttctctatccagaatcgatttcagaaaaggagaaactgataatattagaaatatacctagatctatacggatcagtccgccgtatagagaaccatcccgcaccgcgattggacgccatcgacgcgaaatctaatgggtgtaagaaaccctaaattcgaatctgctggggtttgagaaat

SEQ ID NO: 16386 - DNA, 758 bp, Arabidopsis thaliana
ctcaggtcatgatttccgggtatgctcagcacggtaatgcggataaggctctgtgtttgttccgtgagatgatagataacaagatcagaccggattggataacgtttgttgcggttttactggcctgtaaccatgctggactagtgaatattgggatggcatatttcgaatcgatggtgagagattataaggtagaaccgcagcctgatcattacacgtgtatggttgatcttttgggtcgggctgggaagctggaagagacattgaaactgataagatcaatgccgtttagacctcatgctgcggtctttgggacgctcttaggggcttgtagagtgcacaagaatgtggaattggctgaatttgcagctgagaaactgcttcagctaaactcgcaaaatgcagccgggtatgtgcagcttgcgaatatctacgcatcgaagaatcgttgggaagacgttgcaagggttcgcaagagaatgaaagagagcaatgttgtgaaggtagagcgagtcaaagttcgattctttattcgagttacaagactctaatgtatttacttgactgtttcaggtacctggatacagttggatcgaaatacgaaacaaagttcaccatttcagatcaagtgatcggattcaccctgaactagactcaatacacaagaaactgaaggagttggagaagaagatgaaactagctggatacaaaccggaactagagtttgctttacacaatgtagaggaagagcaaaaaga

SEQ ID NO: 16387 - DNA, 530 bp, Arabidopsis thaliana columbia
caaagacgaacccatgatattgagagccaaaggaagattaccaacaagctctgtaacttcatttgcaagctgcatgaaaccatcaggtggggagtttctgtcgaaagcagatcgacataaaatccgaagagccaattttctcgatgggtaccccacctcataaatatgatcaatcttgtgagacttgagaaggatcctatcttgagtggtcacgataattctgcttccaggtccaaaccacccggtttgtcccactaaagtctttaatagctctagattatccacatcatcaagaacgataagtactttcttatgctttagcctctgtttcaccacacctaattggcttatctttaggtccttttgatctagaatttctgacagaaactgctcttcccaactcaacttcatgccatagttgtcctggttggttctcttaaaagaaccaaaaacgtgatagtcgaattggctagagagcttactgtataaaattctagctatggtagtctaccaatgcctgaaggcccaaa

SEQ ID NO: 16388 - DNA, 937 bp, Arabidopsis thaliana
cccccctccctcccacccctccccgaacaccattcactcccgggtaaatccattaacttgccttgccttgcatatcacaccactatcgctccatcctctttcatcagtcaacataatatatattcagtaattaacacacaagacataaacacaaaaatgttggttaaagttttctcttttttcatcgttatgataacaatggtggttattggtgttagcaaagaatattgtgatgacaaacagtcatgtcaaaactttttgttggagcttaaggcgggttcatcgtcactctcggagattagacgtcgtgacttattgatcatcgttttgaagaattgcgtacggaggatcgacatggttatgattggtgtgatggatgatacaaaacaacatgaggagatggagaatgatttgcttggtgtgaaggaggacacaaaactatttgaggagatgatggagtcgacaaaagataggatgatccgttcggtggaggaactcttaggaggagaatttcctaatcgtggatcttacgagaacgtccacacttggctcagtagcgttcttactagttacatcacatgtatcgacgaaattggtgaaggtgcctataaacgccgtgtcgagccaaagcttgaagacctcatttctagggcaagaatagctttggctctctttatctccatttcaccgagagacaacaccgaacttatctcggtgattcccaatagcccttcttggttattccatgttgacaagaaagatctatatctcaatgctgaggtaataaaacagaacccttatattttgaaattataatttgataatcgtgaaaaccatattaaggatttacttgatactcaagtaacaaatatttaggatttttatatttaccttttattgtatttacttttaggtagataattcattttccttagag

SEQ ID NO: 16389 - DNA, 597 bp, Arabidopsis thaliana
tgtaataattgttcttctttgctaattttaattctgacattcaacatctctccactgaatagtctctagtttagtatcttcttacacctgtttatttccctttttcaaatatcgatgattgataacgctcatcaggattcagatgaggtaaacaaaattttttccacgtgttttaaattattatcttttttttaacctcgttaatttgcttttttaatattttctaggactttactacgccgcataagatcactattctcgattccaacattcagcttcgccgagattcagcgttatatgccaaactccagccgttggctgccatgctcccttacctcttcaaacagtctaactcgtcagttggtcctatcttactacaccctttcccgcttgatcgcctgcatagcatccctcaggtctcctctccctttgattttgtgttctctctgttttcctcatacatgctcatgctgccggtgaggttgaagaatgcgtgaatttggatgttgccactttggatctatgatttgaactcaatcaacttcaactagttcttgtttttcttcctcagctccagcaacctttagagcacactgg

SEQ ID NO: 16390 - DNA, 952 bp, Arabidopsis thaliana
atatctctaccaaatcgaaccttgttatcatgctatctttagtttttccctgcacattcagaagcgtaatcatgaaattatcgaagaaatttttctcgatgtgcatcacatcaaggtgatggcgcaagaggagattttttcaatatgggagttgccagaagatactctgtttgtgccaattgtgggcacttctatatctgtcaggcatattcgccggagtgtgccagttacacccacgtttacatgtttcctaagcaccataataatcgatattttcaaacaaatcatttctagaaagataaactggtgggggaagacgcacaattttattcttcctaattaattttttgtttttccgatacggatgatgcatggaaagatactgacgatgacaatcaaaccagcatgatttccgcccatgctttagcttaaacgcttcagtccgatccatacaacatggacactgataatcttccatgtgttgtccacccaaataacattccatatgcaggaaagtcactaatcgtcgacattagcattgctagcatattgaaattctgcttactcgagtaatcaaacatcaggacatcttcgtaccacaaattcttcagctcatgaatcaacggttgcaagaagacatcgagtgctcgcttcggatgcttagggcctggcactagaatacttaagaacagaaattcgctttgcatacacatatctggaggaagattgtatggtgtcacgataaccggccataaaaaatattgcctcccagacatacacatttctacactcactagcaaagtttgaatatatcgtttgaaagtgtttcacgcctatgcatcagatgggtgagtaacttcaccatttactgttgaatgttcagcatgccatctcattttcgctgcagttctttctgattggtataagcgtttcaatctatctgttattgaca

SEQ ID NO: 16391 - DNA, 790 bp, Arabidopsis thaliana
atcgatccttgcacgtaagacgccgatctgtggtcattgtctcagcagccaaatgagccacttcgagacttcctcgcaaaatttcgatctaccctagccaaagtcgaaggatttaatgatgtagaggctctctctgctctgaaaaaagcgctgtggtacaagtccgaatttcgaaaggagttaaacttgtccaaaccacagacaatccgagatgccttgcaccgagcctcggattacgtttcccatgaggaagaaatggaactactatcaaaaagtcacgagccgcctaagcaaacgcctcgcagcgataaatcccaactcagcgctccgaactacaaaaaggacgctcaaggcatgacattcgttcaccatgaaggacaaaatttctccggagcccacaattgccaagctgatacaccccgaagtcaaggacgaggccgcggtcgagggcgcggacgagaatcctacaccaggacgaaggatcaaactgtaggaaacgagcaggaatactgtgagttgcataagagttacggccatcatactttcagatgtcgtagcctcggggcgaagttggcaactaaattcctagccggagagatcggtggaggcctaaccatcgaggacttaaaagcggaaaaggccaaaaccgagcagctcaatgctgtggccaatcccgagcaggcggcacccgcggcaaacctcgaaggatccaaaagaggccaaggcaatcgcgaacgaaacggtgatgagccagaagctgctcggggaaggacttcacaattttaggaga

SEQ ID NO: 16392 - DNA, 958 bp, Arabidopsis thaliana
tcaccaccaaccatccttatcaccgtgagtgataagggagctttgagtagaaaacgcagcggatgacactacagaactcttttcgcgactatacggcagagtccgcgctgtttcgtcgccgggcgctggtcgcctttttggggattttgctgctgaccggcgtgttatcgccaacctgtataatctgcaaattgttcgctttaccgactaccagacccgctctaatgaaaaccgcattaagctggtgcctatcgcgcccagccgcggcattatctacgatcgtaacggtatccctctggccctcaaccgcactatctaccagatagaaatgatgccggagaaagtcgataacgtgcagcaaacgctggacgctttgcgcagcgtggtagatctgaccgatgacgatattgctgcattccgaaaagagcgcgcacgttcacaccgtttcacctctattccggtgaaaactaacctgaccgaagtacaagtagctcgctttgccgtcaatcagtaccgttttccgggtgtcgaagttaaaggctataaacgtcgttactatccttacggttcggcgttgacccacgtcatcggctatgtgtcgaaaatcaacgataaagacgtcgaacgcctgaataatgacggcaaactggccaactatgcggcaacgcatgatatcggtaagctgggcattgagcgttactatgaagatgtgctgcacggtcagaccggttatgaagaggttgaagttaacaaccgtgggcgtgttattcgccagttaaaagaagtaccaccgcaagccggacacgatattcacctgacgctggatctcaaactccagcaatatattgaaacgctgctggcgggtagcgcgcacgtgtggtagtcacgatccgcgtacaggtggggtgctggcgctggtttcacgcctagttatgaccaaacttgtttgttgacggta

SEQ ID NO: 16393 - DNA, 571 bp, Arabidopsis thaliana columbia
ctttctgctttgttattcacctgcctgttactcccatttctggtaccaggtagtaccccggctttagatccaacttggtgaagaagcttgcatctcccaacggatcgaataggtcttctacgcgcagaatcaggtacttatctgcttgcatgaaaccggattggattgacacctaaaatactacaatgacaggatagtcgtaacgcccgtgtcccaagttagggagtaaacaagatctctcatccgccgaattcgaggacgaattcagtgtaaggggggtagacttgtaacgaccgcatctcgcgttcataaagaggcaggtttgttttaggagaaaactagatcatggtcgaggaacggaataaaatactacgtaggaagaacgagaaagtataagctaaaccagctaggtgagctggacaagctgtatgaactagctaggtaagctatgtgagctaaaccagctggaagactagctagctcagctaggtgagctgaccgacagctcgactgagcttggtgagctgatcaagtactgacccagctgggtggtcaggtcagctgacactcg

SEQ ID NO: 16394 - DNA, 594 bp, Arabidopsis thaliana columbia
tttggatttcatttgttcagagggtgaaaaataaattagttgtggtagttaacaaagtgtatcacatgagaggagaagtttattacagtaatgcttgtggagatagtggacaaattatgtttgtaagttggtagctactagagaaaccctgtcctcttctctattcagtaaaattatagaaatataaccatctacaagtttcttctatttcatagttcattttagaaagctcaaaacgatcaaaattattatgtccacaaagtacgaaaaggaaaaaatgtgcatacctgaatctgctgcaaaacaaagcgtagcctcttaaccattaagactgcatatgacgaattcgaatggccatcagttggaactatctctccaagttctgtcattagtttatggtgagtaacctgatttcctcttcattagctggagcagagagtttcagcaaaatgccaagggaaaactcaagaatatttccaagataacccatgtcgacattaccagaagccagtaactgaatcatgccaagaaaagaaagagacattaagtacataacgtatctgttgtacaataattaaagacagactgtagtac

SEQ ID NO: 16395 - DNA, 634 bp, Arabidopsis thaliana columbia
atattaataaaagtttctagaagaacttggtcgtcaagcaaaaacagcaacaactctgacattgtctcactatataaaacccaaattctctttctcttttaggactcggttcaaaaacgaaaacgcaaatacgtcttgttctagtttggagttggaagcgtaaaaaacaaaaaacaaaaatgtgtgggggagctatcatttctgatttcatctggtcgaaatctgagtcagaaccgagtcaactcggctctgttagcagcaggaagaagcgtaaacccgtctcaggtacaacacttttggtttcgagttttgtttttttattataaaacctaatatatccgtttctgattcgggaatatcttcgaacagtgagtgaagaaagagatgggaaacgagagaggaagaatctgtacagagggataaggcagaggccatggggcaaatgggcagcggagattcgtgacccgagcaaaggtgtacgtgtctggcttgcacattcaaaaccgccgacgaagctgctcgagcctacgacgttgctgccatcaaaatccgtggccggaaagcaaactgaatttccaaacactcaagtagaagaagagctgatactaaaccaggggggaacaaaatgagctga

SEQ ID NO: 16396 - DNA, 510 bp, Arabidopsis thaliana columbia
tgaagaagcatgcaatgtcccagagagactttacgaatactgtaatgtattgctataaacagtataaaaccacacaaatacaatcccttaatgggatgatggccatgaagaagagaagcatagcccaccttgcacttcggatctttaagttcagtaggattcaggagctttccacatttttcgcactgatctccacgagcagaatcataattacatccttcgaacggacaagaaccctcaacaagccggtcagctaagaacttcttgcatgtatcgcagtaaagctgaagatacaatgggccacaaagacatgagagttaaaacccgctaactgagtggtgtagactcttttacttacgaagaacatatgtatgcacttgcgatcaaataagtctaactggcattggagtaaaagcattcacctgctgcatggtgttctctgaaagccacttgttgtcccacaacttgttgaaaattgcttggccacctcagtctgttctggagttgaag

SEQ ID NO: 16397 - DNA, 765 bp, Arabidopsis thaliana
gtgattaccgtttgcgcacttagatgcatagaggtaaagagcccattttcttctaaacctctttctagatcttgtagctttttctttagtgttttaattaaatcttgaaaatttaatttgtaggtagtagaaaaggtcaaggtgcatcctttatggcaagcgactcccatggtaacaatggacagaaagtgacttgagacaatccatctccaagagcttacttcaaatgtgcttgtgctccaagctgttctgtcaaaaagaacgtaattcataaagaaaaaaacctgactctcgcttaaaatatgaattggcataatacaaatttgatagacttattaatctgattttgatcctgtgtttgtttctattcaggttcagagaagtgtggaggatcagtccgtgttagttgcaacttatgagggtgacacaaccatccaatgccatcgcaaatggattcaaacaatggcttaaaccgctacatctctcatggtggttctgcttcaacacccgttgcagccaacaaaagaagtagcttgactgagccggtgactatcgtaattatgattgaatcaaagagagtgacgagcccaacgtcaagaatcgattttcccaaagttcagaaacttttggtggagcaaatgactgtaacttttgtcatgttgttgtagtagactgatagaccgttaatagtatactcaatgaagaagagaagagaggcacgtgcgactgagatggcagatgaggagcacgtgagtggcagttgaa

SEQ ID NO: 16398 - DNA, 835 bp, Arabidopsis thaliana
caaaactacatttgttcaacttcgacagagaagccacatttgcagcgtttcgttttcacagaggtttcctcatcaaaggtttcttcctcatcaagaaacacatgttcatgactttcatcttcattacgagactttcttactcgtgacttttctcctctcttagccactctctgcttttcaggtgctttcacattctttgccttaacgactgtttctgaattcacttccaaactcttggcttcgacatcgttagagttattagcgtaacggtttttcaatctttcacgggttaagatagacgaaagaagctgataccatctcgaagctgcttgtgcctcatttcttcttctctcctcttcttctttcttttcttgttcttctgcatatgcctaaccaaaacaacaagaaaaacaagatataaccaacggatccatattcaaaacatggtactctgtttcagattgaaaattaaagagattatacctcgaggattgtgtctttgaactcggtacagaccacaataccttcaaaaataggagtagcacctccacttctgtactcgaaaccaaccatggcaggtgcataatctataccgaatctcttagcaaccgcaaatattcgaggaaaccttaagtggactgttccaggtgggagacatttctcagaccagacatcaacttgaccgcgctcgttctgaaaaaaacataaggattatacatttatacactattcccgtctacaaagtatgttttgttttaaagtattgatgaagttgcaactgcagaagcgatataaacaaggacaaatacaacaacatttgttttaccttgggcac

SEQ ID NO: 16399 - DNA, 464 bp, Arabidopsis thaliana columbia
ggaatatttgcagtatttaccggttgtatcagggcgtggggatgttaacgcagaaaaagaacagacaaataatgtactcagcaagatattctcaaagcattcgcatgagatcctcaatgttggcaaggtaaaaccaattcacttctcagctctcctctctggtttggtctattacctctgatgtttgtatgtgaaaagattgtgttaaactgttgcgtataatatgatttaggcgataaacatgtacaacgtcaagaaggagaagaagaagtcaggaaggtcagacaagttgaaacctaagaaggacatcgccaagaagcctgccagcaaagccaagtgaagagactctcccatgtctaatttactcttctatctgtctccatcttctatcacaatacaaattttgggttgcaccgttaatgtaatactttatgagtacgtttattttgatcgttattgacttc

SEQ ID NO: 16400 - DNA, 494 bp, Arabidopsis thaliana columbia
gaacagttttgattgatcattcactgctctctgttggagccggtttctttccatactgctgcaagggaaaaacaaaccgaggatgaagttagaaaacttactcaacttgttcagacgttagagtcagttctgtgaaggaaggaaagaaaaagaaacacacacctttttcccaaaagagaaagggacatatctgtatttgatcatatgctgtatctgtttcctcatcgtaaggaaaaacaacatcacccagtagaagagaagtattggccagaatacaggtacatcaaacacctcgaagaacgtcatcataaatccgatgatgaaagcccttatgatcgataaccttcatggcaaaaaacacacacacaacattccacatcaaaaaatccaaaggacatcaaatcgagacttcatcacattctagattgataaacctaaaaagaattcatacaaaggcttcacaaagtgaatcttgtcgatctcttctaaatttg

SEQ ID NO: 16401 - DNA, 945 bp, Arabidopsis thaliana
tatatatatatatatataaatgataaattgcagacaagtgctttggtggaagaattaaaccgagttagtgctgagaacaagaagctctcggagatgctaactgtgatgtgtgacaactacaacgtcttgaggaagcaacttatggaatatgttaacaagagcaacataaccgagagggatcaaatcagccctcccaagaaacgcaaatccccggcgagagaggacgcattcagctgcgcggttattggcggagtgtcggagagtagctcaacggatcaagatgagtatttgtgtaagaagcagagagaagagactgtcgtgaaggagaaagtctcaagggtctattacaagaccgaagcttctgacactaccctcgtaagcattcatgaaaatgatcaaacttggtatctatctatctttagaaactttattttatatggtttactgattgtagaagttgtttcttataggttgtgaaagatgggtatcaatggaggaaatatggacagaaagtgactagagacaatccatctccaagagcttacttcaaatgtgcttgtgctccaagctgttctgtcaaaaagaaggtaattgataaagaaaaaaaactgactctcgcttaaaatatgaattggcataatacaaatttgatagacttattaatctgattttgatcctgtgtttgtttctattcaggttcagagaagtgtggaggatcagtccgtgttagttgcaacttatgagggtgaacacaaccatccaatgccatcgcagatcgattcaaacaatggcttaaaccgccacatctctcatggtggttcagcttcaacacccgttgcagcaaacagaagaagtagcttgactgtgccggtgactaccgtagatatgattgaatcgaagaaagtgacgagcccaacgtcaagaatcgattttccccaagttcag

SEQ ID NO: 16402 - DNA, 476 bp, Arabidopsis thaliana columbia
cgtgtatggactcgcctctacatgatcacacacgccagtatcctccaattccgatatacaaatcctcgggaaattggtattcgctgacaaagtttcaacggaagagagcttatggttctgcacaatctcttcatctttcttcttgctcttcctcccccacccattataactagtcttctcttcaccccaactcaacacccctttcccaaccggggctccattttcccataacccatcataacggtttccattagcccacgtcattttccctttccccgaaataacaccattcttccactctcccacatactcattcccatcgctccacacataacgtccattaccatcttgcagattggccttccagtttccttggtaaccatcgccgtttgcataccgcttctctccatagccatgctttcttccccacagccaatgccctctaataagtgtcgccatctattccaatgaacgtt

SEQ ID NO: 16403 - DNA, 611 bp, Arabidopsis thaliana
gatatttgcaatcatcaagattaacaataagttagcatcaacttctcaactaatggtgcaagcatatcatttataccaaacttgcgacaatggaggaatttgttgtcccgggtgcagctctaaaagcttttgactttctcccatacatgggacacagaacaaacccagcagagtccgcagattttgtccggtatgcatcagagagaagaatgattgctggggaacccatgtctctgaaatccaaaatccagcgtgaattaccagattttgagtcgacaagctccagaccgacaaaggtgatcttcaatttctgcaaaagaaaaaaagaaaaaagaaaaagtcacttcataccaaaatctaattcgaaacagttagtaaaagcacctcaaataatttctactaccagtcgcaactttcaaatgactcttgcttcttgcaataacaaaaattgaaaaaaattaaaatcaatcccatagaaaataagaataaggctactcatgcgaaacaaaaagaactcccccgtgcttagttcatgattacaaaaatttaagagcacatcaaacatcgaaaaatactaacatcagcttaatgcctaataccagactctggct

SEQ ID NO: 16404 - DNA, 537 bp, Arabidopsis thaliana columbia
tatctcgataacgagatcaattgggattggttcaaagttttcgtcgcgtccaaggatggtttgtcgagccacggacacattctgtcgccgtgatttcatgttgcagtaatcaaattcttttggaacgatatgaagaatagggttagaaaaagtaaatataaaaagtgatatagtttgcgtgtcgttatttttccattaaacacggcgcaggatttatcatgactaataaaaaaaggttaacatatatatatataccagtggagtggagtaaatcacggcacatatttatcatgactaatgaaaaaatttgatacagcagaatagtttataactttatccttgacattagaagattatcatgatttcatctcgactcatgacagttataatgaaacaagtgctcctagcaagacagcaaatcatctttcctaggtgtagcaaaaaaaaatgatcagaattgagacaagaacaatccatccctctgctttgaagcatagcttgatcttatgaaatatgaaaaccacaaagagaaaaaga

SEQ ID NO: 16405 - DNA, 606 bp, Arabidopsis thaliana columbia
  unsure (1)..(606): unsure at all n locations
tnnnnnnnnnnnnnnnnnnnnnnnctaaagcatgcaagaggtcagcggttcgatcccgcttagctccaccaaattttgcacccagcaaacttggtacgtaaacgcatcgtggggctatagctcagctgggagagcgcttgcatggcatgcaagaggtcagcggttcgatcccgcttagctccaccaaatttccaaccctcgctgcaaagcgggggttttttgtctctgctttttgccgcttttgtaatacagtctacgtccgggttagtgccgcctggtgaaagcatcattggatgaaaaatcggcaacaggctggcccccctgtttgcttcgcgatgcgaataaacttattatttgtgtgcctgaaaaccccgatcagtgagagtagtgtactcatgtttgtggagcataacctgataaaaaatatcaagatattcacactagcgtttaccgtcaccgtggtacttattcagctatcccgttttatttcgccacttgccattatccattccagttatatctttctggcgtggatccactgtgcgtaatgctgtcaatcttgtttatctttggctggcgcggtgtcgttccgttttatgcgggatg

SEQ ID NO: 16406 - DNA, 605 bp, Arabidopsis thaliana columbia
tcacaaatgaagaatccttcagtgatctcttttctcatcattctcctgtttgctgcaactatttgcacccacggaaatgaaccggtgaaggatacagccggaaatccacttaacacccgcgaacaatacttcatccagccggttaagaccgagagtaaaaacggaggtggtcttgtcccagccgccattacagtacttcccttttgtccacttggcatcacccaaacacttcttccctaccaacccggcctaccggttagcttcgtattagcacttggcgtaggatcaaccgttatgacatcttcggctgtaaacatcgagttcaagtccaacatctggccgttttgcaaggagttttccaagttttgggaagttgatgattcctcatcagctcccaaggagccttcaattctcatcggtggtaaaatgggggacgaaatagctcgtttaagattgagaaagctggagaaggagctagagcaaacgtttataagttgaccaccttttacggaaccgttggagccatccaggggtttggttaacgcacacaactaattatcccaaggatcggctaagacttactcgcaaattcaaaaggttgatga

SEQ ID NO: 16407 - DNA, 622 bp, Arabidopsis thaliana columbia
tgatcatcgttcaccgagagttgattaccgcttgtaccactatccaaaggttggaatttgtcagcatctttggaattccaggaagcataaaactgagctgcttgttcgattcccttcgatctgtaaggtgagatgttgtggatgccaagttggagagatccgagtaagtcattctcaatgcactcgtacattttcttgcagagtgtatcgacggcgacagacaaattgatgatttgaatccttatcgccataactttatcattactaaattcatcaaagggctcctcaaggaactgcgaaagtttctccacattactttcaagttgttgctgctgatcctcaaacaaattcttctttatctctctctcctcaggggtcatctcatctttaaacatctcttcaccaaacatataatatgcaaaagcatacgaatatgaaagaactcgccttgatctgaataaccggtcgagtccattggtgacccagctgaagtctttaagcttcaactccctcttttctgatttcgacactttctcatggatagtaccctaagtttatctctagctttgatgaactgtatgagctttgtatcggtgatgataatgcgtatacctgtttaaat

SEQ ID NO: 16408 - DNA, 562 bp, Arabidopsis thaliana columbia
tgtattgtgctgaatatatgtgtcttgatctgagtcaatcacagcatctaagaagattggagattgaccgtagcgattggtttatggggccaacgaagattgtggcaccgcatctccattgtttgagattgagacactcgagattaccatgtagtttagttgatgtctcttctttaaccgaagctgacttgaacatttactttggcgatcttaaaactgttaccgctggttttcttcaacacaatgtggtcaagatgctacaaatgttgcagaatgtagagaagcttactattgggggtacctttcttcaggttcgttagccatttttctgccttctctaacacatagaaatctgtatgttgtagaatcacatagcatgctcttttagaatcagttggttttgcataggcagatattggttgatcaggctttgatactcagattcatgattacctactaagtatttggtcaatggctcttgtcttgttgtgctttggttatttattttgctgaggtttgtgtttggtatgttgaactatatttgcattgcatttcagatgtt

SEQ ID NO: 16409 - DNA, 415 bp, Arabidopsis thaliana
ggtaaacctgataaagcgacgaggtcaacgacgtccaaatcgctctcggcaaagagtttctgtagagtggtgaagtttgccccagcggatggtaagtctctggccgcctccgttgccaatgaaactcttccatcaacacgtccggtaaacacattccatagcggccgttcaaactataacacatcaaacatagaaactcagggagttagaattgattattggtttcatttgataagaaagacatctaaaactaacatatgcgactagtaaaatactaaatttttgatttctaatcatgaaattttttagacgagtttgttcatatgtattaattcataagagacggcatctcgggcggctaaagtgagaatgtcagcgcaagagacggtgttagggcatcgtttttagagaatat

SEQ ID NO: 16410 - DNA, 562 bp, Arabidopsis thaliana columbia
ccttgatttcgcttctgtctctccatcggtgaatcaggtttggattcaacattacacccaagatttcttgttggagaaattcaagaaactaaatattttcatatatgcatgtataggtggaaatgcatccattgtggagacaaagaaagctaaggaaagtgtgtgaagagaacaatatccatgtaagtggatactccccacttggtgggccagggaattgttggggatcaacggctgtgattgaacatcctatcatcaaatccattgctctcaagcataatgccactcctgctcaggtaactccacaatttaaggtccttcctcttttgttgattaagagacttcattgacttatggctattaatgaaggtggctctaagatggggaatgtcaaaaggagcaagtgtgatcgtcaagagttttaatggagcaagaatgatagagaacaagagagccttagagattaaattggatgatcaagacttgtcactcattgaccatttggaggaatggaagatcatgagaggagacttccttgttaacaaaccacaagcccttacaa

SEQ ID NO: 16411 - DNA, 728 bp, Arabidopsis thaliana
tgatttattttatgtgtgtgactggctatggaaatttcattttatcatgcttaactttccagaagacatatgcttttcatgtccattacctttttcctctgttttattcttacatttttatgcaatactcattctaattgataaaatactacgcaggtaggggatgctgcattgtccatattacatagcatggtttcggcacattcagatttggatgacgctggagagattgtaactccaacaccaagagtaaaacgtatcttgtctagtacacgttgtcttcctcacattgctcaggtaatctctttctttctctccgtaattcttcttctagctgcatccatgatgtgtttggtaagtgttattaagctgagccaaggatcctagcttccctactatttaatggcattaggcacgcctgctgtctaagtgctagctttgagtattatctgagagatgagttgtaaaataatcaaagcgctagttttgagtattatctgagagatgagttgcaaaataatcaatcagtatttgaaatcttctcatttagttttccttcatcgaaaaactgggagttgtagtcttgagctgttttttttccttgaccgaaaacagtttattataaccctatgttaatctgatgtctttctataattttgaaaaggctttgctatctggcgaaccagttattgtggaggctggtgctgctctcttgaaagacgttgtta

SEQ ID NO: 16412 - DNA, 983 bp, Arabidopsis thaliana
cacagatgcttatcccacgtggcactgtcttaaccacacgatctgtgatccttcagcctccgacatctgcaagcttccaagatcagcgtgggaatgggacggtggctcccagggcaaatccggcattaccgattttggcctcgagtgctcgagctctttactcagaggtatgcctagttctgctttctacatcggtgccattgttggagggttttttcttgctttgattccagacgattccttgggtcgcaagaaactagttttgttctcaacctttgcaatgtcaatcacttcaatctctgttatcttctcaaccaatgtatggatttatacattccttaagtttatcattggattttcgcgatcacagacctggtcatacgcgttggttctcatcagtgagcgagtctccaccagatggagaccgagagctacgatgattccatttaccctattcgttttagggtttatgtcgttgtctggaatcgctttccttgcacaagattcttcatggagatatctatatctatacacatcagttccagcggtattttactgtatcttcctctacctcttcgcactcgaatcgcctcggtggcttcacatgcaaggaaaggataaagaagccattgatgttctcacaaagatgtcaccgaagaggaaagcttatttggaatcagtggtttctaagttacccctcaagcaagaaaactttgaacaagcgccaacttactcgattaaggacttcttcttccgaaaatgggcttttcgtaggattttagttgttatgatcataatgtttgggttgggaatatagtattacggcgttcctttagcagctagagacatagacgtcaacatctacttgagtgaaacctaaatgcattggtggagttgctacttttgttacactccgatcttattggagagatcaacagaagaagctctgttcttgtgaatacttactcggtggggcacagggg

SEQ ID NO: 16413 - DNA, 399 bp, Arabidopsis thaliana columbia
gttccatgacggatgcatcaccatatttacaacattgatgagctttctattcactattggttcactctacacgcatgaacttgcatttttggtgaactctatcagtctattgtcagattttgttcaatgtaacccattaccacttgtgaacgcagcttttgatgcagtgctctatgctgtagttattctgtccatgatgatcagcttatctatcgctggtcttttgcaggagtttctgtttggtgggagatttatatttgggccagatgcttggtctattcccgttaccttcccgctcatcataactcccgtttgggacagttcagtatgagctgcgacacatcttcgcggcgagcatcttaccaatcagtgcgggacatgtcttcttagtggcatgag

SEQ ID NO: 16414 - DNA, 1966 bp, Arabidopsis thaliana
tcctaacggtaaaaaaaaagcatagttagctaacccatccgcgagacgattagcttctctatacacatgcgaaatccggactgaccagtcctttgaaagtaagccatggcacaaccgcaccaggaaggacagcggatgcgaatcatcaatccctgtccgaagaaaacccactaccatctccgaatcaatctccatctccaactgtgtgacaccgcgctcccaagcgatatttaaaccgtaatatgctccccatagttccgcaagcggagccgaacaaatcccaatattcaacgaaaacccataacaccaatttccatccccgtctcgaactactccacctactgtagctagtcccgggttaccacgcgaagccccatcagtattgagcttaaaccaacccacccttggcggagaccacgcaatcaatctctcctccctagctgtccgcgtcgtcactcccattttgtgcacatgcgccttctaaacatccaacgcacgatccttaataaaacgaacccgatcccgacacttcctgttctcgccaaagatgttaccgcaacgccatttccacccccaccatatggcctgcgaaaaagtgaccgcccatggacaaccattaatctctatctcctctcctaaatttgcgtagatccattctaacagcgatttcgaaaagaaagaagagagtctccgtgctggtaacaagcgggtccaaattcccgccatcgccggacagtcccgtaaaatgtgtagaattgtctcctccccactcttgcatactgaacataagctcgaatcacataaatgccgtctgtatctctcaacattcgtcatcaacacctgatttgcagccaaccatatgaacactcgaactctttcatgagctacaacacgccaaattctagagaaaaaacgcgccatctgctgcttcgaactccagtccaagcttaaaaaagagtaagctgacttgactgtagaattaccattggaacaccctccccaagacaaacgatccctagcccctgtcacattatccaccaccaaagatagtaacttgagcttcataccttctgtgaaatacggcgtaacgtctgtaaatcccagcccactccatctctccaaacatccacaacttttaaccgcctcccagtttgccggtaattcgcatgttaccacctcacataacggggtctgcgacatccacctatctttccagaagaggatatcaacaccatcccctagaacccagctcaaacccgagaagaccacctccttcagacccacgacaacgctcctccatgtagaagaccatgtacctttagacaccatccacgctctgttatgaatatcaccgacacggtacttgcttctcaagattttcgaccatagactcacatcatcatgaagtaaacgccacccaattttcgagagaagagccgtattcatctgtgtagagcaccagatgcctaaccctccatcctgttttggcaagcacacacgatcccatgcaataagatgttcctggctttgtatgatgaagacataattgctactctacttaatattaaaaaaaaccttggtggcataaattttaagaatttgtcgctgacgtgtctcgtgatgattcgtccacgtggttggcaaacggctcctatttaaaatctcaaaaccaaaaaaaaaaatcaagcgaggaatatgctgagcttatcattgagtaatcatgttcctccattaacgctcttgagccatgaacgaagaatcctcaagctccaaagtcgatcgtctattctctttcaccaactcttccacactaagttccttctcctgtcgaattcttcctctttgtcttcttcacatggagttgttgctatttcggcatctccgtcttcagtcgcagttccggaattagaagacgaggaccacttcgatgacgaattacgtcgtctattggcgctcgtaccggagg

SEQ ID NO: 16415 - DNA, 518 bp, Arabidopsis thaliana
ggtggagtatcaagcggcatattttcagagtcttgttggagaacatgtaactcagctttaactgatgggtcaagtgattcaatccgtaatcatcgagcaccaacttcaaaagcctatcgtgcgctactagctccacaattctacaccctctttggttggggttaaatacgaatatctctttcttaacccaaataccggaaacaactatgacaggaaccggatcagccatttcgagagaaaaatgaaagaaattgaagatgaatgatgaaaacgatgattagatagaagtttcggcgatgttgttacactcaggcataaaactcagttagagatgacgagtttaaaaagcaagggacatttcgtatttccattgatgatgctgacatggaatgatgacatggaataatatcccttgactctttcgccgtaaactccacacagagacgtagctaatcgattttcatcaaacatagataacattgaaactgtcgatccctagagacataaactggtggagt

SEQ ID NO: 16416 - DNA, 956 bp, Arabidopsis thaliana
caagtttcttcttgcatctcaaacaaaactttgatggtgtagctgaaatctgtatgagtctttggctttgcatcttttaacaaggaaacactacttaggcttttaagatccagttgcagtttaagttcttatactcaatcatacacatgacatctagtcatatttgactcctagaaactaagcaaacttcttcttgcttctcaaagctttgatggtgtagtcacagtccgtatgagtctttgtctttgtatcttctaacaaagataaaatactgggatgggattgaaagtagggtcgcagcttccaagccgacattaggactgctaaagcgagtttttccatttgcgggtagcgagattccgcgccggtgaaagtctgcgtgacgtaaaagattggtttttgctcacctctgtcttctcggattaacactccgctaactgcaatatatgatacggcaacatacaaatacagtggttctccgacgggttttgcgaggatgggtggtgttgccagatacttcttgagctcctgaaaagcatcttcgcaccgggtcgtccattcaaacttcttatttcccggaagcacatcgtaaaaggccaagcatttgtcggttgagcgggagatgaaacggttaagggccgcaactcttccggttaggcgctgcacttcccgcttgttctgaggtgacgccattcccaacaatgcatcgatttgctttggatttgcctcgatgccgcggtgcgtgactagttacccgaggaactctccggatcttactctgaagcggcacttttgctggattgagcttgacgttgtagaggttaagctgttggaaacattcgcgtaagtgggatatgtgatctttctctgccatggattttactaacatgtcgtcgatgtaaacttccattgtcttcccgatctgtaatgcgaagattttgttgacgaagtgttga

SEQ ID NO: 16417 - DNA, 681 bp, Arabidopsis thaliana
ggtggaggagacttgtactcaaccttaggagatggggagtaggttggtggtggtggggagctgtagacgtacggtggtggaggagatttgtattcaacctttggggatggggaataggttggtggtggtggggagctgtacacgtacggtggtggaggagatttgtactcaacctttggggatggagagtaggttggcggtgggtggggagctgtaaacatagggtggtggaggagatttgtactcaacctttggggatggagagtaggttggtggtggtggggagctgtagacatacggtggtggaggagatttgtactcaacctttggggatggagagtaggtcggtggtggtggtgagctgtaaacatatggtggtggaggagatttgtattctacttcaggagccggtgagtaagttggtggtggggaactgtcgatgtatggtagtgggggagttttgtattcaatcttaggaagcggtgaggaatacagtggtggtggagagctatctgtgtatggatcatatgcagcaaccattgttgccatgatgacaactcctagagcgcaaatgagatgggttgaaggccccatcatagaagaagatctcattgagattttgtttattctctaccaacgcgttactacgttggttagttgtttttgttttgttttgtgttg

SEQ ID NO: 16418 - DNA, 587 bp, Arabidopsis thaliana
tctagtaacgcccgcatgtcctggtggagtggacagatacgctttaagctgtccgaatgcttcttcacacttctcatcctaaagaaactctttgtcgaatgctgcaatccgactggttaaccgttatacttccttgaaatttcttggagatggcatgttgagaaaagcgttaatttggtttggatttgcctcaattcctctctttgtgacaatataaccgagaaattccccggacgggactccaaatgtacattttgctgggttcagcttcatttgatattggttaaggattgcgaaacactcttctagatgcttaacatggtcttcctttttcaatgatttgactagcatatcatcgatgtagacttccattgttttcccgagatgctcgttgaacatcttgttaaacagccgttgataggtcgctcccgcgttcttcaaccagaatggcataactttgtaacaatagatgcccctatccgtgataaataaagttttctcttgatcttctggattcatcatgatttggttgtatcccgaaaaggcatccataaaggatagcaattcgtttccggcaagttgattcc

SEQ ID NO: 16419 - DNA, 564 bp, Arabidopsis thaliana
tctttggttcttcactcgatcggacgtgagaaacgctccagctttaattgcttgatcaaacggctcagaatgaacctcaagaagttactcgatcaaacggtggtgatgctcctctgatttggtcatccaaaccaacggctaaaaatactcctcctcattctactcgatcaacagttgagattttcttgacttgatttgaatgtactcgaccgttgactcccttagggtcactaaaacaaacctgaaacacttaaacaaaaacatcaaaaataacaagaaaaatagaaagttatttacacggatagacatgggacttcctcccaagtgagcttgttttaagtcactaagcttgactcttacagtgcttagtcagaaaagaggttgaagagaggaacagagaagtcctcatctttaatggttgaattttcaatgcttgaatcatactctgcatcctctcttgagacatggtaggatgagtactcatttgatttttcttcaaaataagcttctttctgatcagcagagtagtcttcttcttctgaaccaagcttttttgcccaatcc

SEQ ID NO: 16420 - DNA, 432 bp, Arabidopsis thaliana
gtcaagcgtcgcatcaggcattgtgcgccaactgccggatgcggcgcgaacgccttatccggcctacggttcggcacaaacctgtaggcatgataagacgcgacaagcgtcgcatcaggcattatgcgccgactgccggatagcgcgtgaacgccttatccggcctacggttcggcacagacttgtaggcatgataagacgcgacaagcgtcgcatcaggcattgtgcgccaactgccggatgctgcgtgaacgccttatccggcctacggttcggcacaaacctgtaggcatgataagacgcgttaagcgtcgcatcaggcattgtgcgccaactgccggatgcggcgtgaacgccttatccggcctacggcacgttaaacaacgtatacgtgttattaagcaagcgttgcgcaatctcatccgccggttc

SEQ ID NO: 16421 - DNA, 391 bp, Arabidopsis thaliana columbia
aatgtcgtcgaagaggtaaaactggagctagaaaaggctgaaaaagaagagcaacaagcgaaacaagattctgatctcgcgactgcgtgtggacgaaatggagcaagggatagctggtgacgtaagtcttgcagcgaaatcgcagctcgaggtggctcaagcgaggcatttgtcaacggtctctcagctaggaaccacaagagacgagctagcaatgctgtccaatgaactatgaatctcttttccccgagaaagatttggctgctcattacgctgaggactccgtattcgaaagccaatgatgtagcggcccaaatcgcgggtttgcctatggaggtcattgcaaccaagccgttattgcgagctagctcatgcgactcaccctgaagct

SEQ ID NO: 16422 - DNA, 573 bp, Arabidopsis thaliana
ggtttggtgtataatacaagcaagaatcaacaagaaacaataaacttcgcagataaatcgatccggtttgaatgagatatggggcaaaagaggattttacctaaaggttctttgaacctcttcaccagttattgcgtttgtagatgagtatttgttgcttccacggataagaactcttgtggttgcgatggcatcaatgccttctgttactgcattcattgagtactcaagcagagtagccggttcctaaagggggaaaaaggttttcaataagcgatgacccactggtgagttatttgtagatgagagcctcagcggtataaacagtacctttacgataagatctactgccttgtaagctgaatccacaggcccagttccaatagaacaagcgacatgttctttgccatcagcgtcagcaagttttacagttgctgttgaaagcccgagagttccacaagttatctgcattccacttttaagtaccatgagaattggataaagacaatgaacaagaaaaaagagtaagaaagcacattatgatcccaatttcacctgaatgtccaggagttt

SEQ ID NO: 16423 - DNA, 405 bp, Arabidopsis thaliana columbia
ctgttgtatctttgttcgtactcacatgccctgctccaacggctaatgggttgtctaaagtcaaagccgttgtcataattgcagattttatagccgatggactccaatttggatggacttgctttataagcgcagcgctccagctacatgaggtgcagccattgatgtcccggttaagagattgaatccgctgaataacggtagtgctcgagttccggtgatttgctcaaccgacggccaagcagagagtataagtgtcccaggagctagaatgtctggtttcaggatttgagggaagcttgtgaatggaccccttgagctgtatgtgcaacttctggcgctggttttgtccgattacgttttcgaaactcagctttgcgtcgcgttgttttgttgcttgatgcg

SEQ ID NO: 16424 - DNA, 527 bp, Arabidopsis thaliana columbia
tcgcccctaacacaaccaagaccagctctgagctcaagaagctcaattccggaacaaaatccacaaattctacttcttcgatcaagaaatcagcagatctgtccaaatcaagctcatccaaaaacaaaaccaccataaaacccccaagttccaaactttcttcacctccatcagagaagaaatcacaaccctcctcaaaaccagtgaccaaatcgaaacaatccgagaaagaaatcaaaccattctggctagacgacgaagaagacgaagatttcgtaagcgaattcagagatctaccaacaagattccaaagatccctaatcccagacctagagcgaatctcaacaacatccaaaaactacatcaacaaagccaacaaacagatcaccaaaaacttcaaaccctatttcggcaacaaatacgcaccaaccatagcttccgtagtctctttcgtcttcatcctcgtccctctactcttagtctcactcattttcaacagattcaaagcttatttctcactccagaag

SEQ ID NO: 16425 - DNA, 566 bp, Arabidopsis thaliana columbia
gaatggcttgcgacgaagctggcaactactactgctaccgccacggcgattatgcctagagatcatacgagcagactcatctccaatgactttagatcctttctcagtttcaggactaacaaagatcttatcaggtccatgaatcttataataagaaagaacaccatcttgcaaaacaaaccacctaggtctccatcctctaccataattcacccacttatacaaaatcccagcaattccattcccaacgatatcgttaatcttaacatcaaccggtggttctctaaccgccgccggcaaagctaaaacgcgttgccccaatcgatccgttacatcactctggtgatgattaaacgagagactatgaataagattgttattgaattgacctgaatgattataactttgagaagcagatcgagttataatcggttcggatctcgccgaaccaaaatcggcggcgtaattcggtagaggcggttgtggtcaggtaacggaggcatcgaaggagagtgatcggagacagttgtaacgcactagagggatgcatgtggttctaagatgag

SEQ ID NO: 16426 - DNA, 799 bp, Arabidopsis thaliana columbia
cccctattcgttttggtatatattttttcgatgttgttaaagtataaatgatgttaatttttgattttttttgaaaagcaacaaaaaattaaaagtaataaaataataatagtaaacaggaatgtcaagatagtagaacctaccttacggtttttagtctaattggtttgattcttagaaagtatcattcattggttaatcgatattttacaatctataccggttctagagcaaaagacagaagtaaaacgatggctgacagtgatccgagtgtgatggctactatcccacacggccacggagacaaaacatgtcgtgttctaattttatcatatgataaaacaaaaaaatcaaaactcataacacgtacaaatccataaccaaactttcctaaaatatccaattctttggtgctatattattagtttaggacctattataagtaagcaaaagtctttgacaatgtaattaattactattatttggcaataaaagagacacaatcatgaaagtcagctaaaattgagtttaatattgaaaaccacgcctcttaaaatatcgaaactcagattagagtgagggatatctcttgcgatatcaattactcgggatatcgttgtttgtagatggatcatgaaaaaaaagacgataaattctcttaataaagattagtaaaagcagttggctcgatcatactcttcatgaaagtcgttgcattacctcgtaaaccgacaagctgggggctaactgttgaggttggattcccacaagcaagaccgaaccaaacagtaagaacagt

SEQ ID NO: 16427 - DNA, 509 bp, Arabidopsis thaliana columbia
tcagtgaccgtgaagaagaaggaagtacaaaagtcgccatctgaagctttgtcaaacaaaaagaagggaaatgattcgaaaccaaccacgaagaagaggaagaagaactctgatgatgacgactcagatgatgattttttggctagcagagtctctaaaaaggctagagccaagtaggttgaattaaaagactgaaatctcattgtgttatttgtaatcgtttcttagggagtcaatttgtagaatgcttgaaaggtgaattctttaagagtaatgagagagatggccaattgtttctgatcttatcgtgtacttctttagttattaagcaaagacttaatcacgtttggtttagagcatgatagttactcttcgtccatgtcactactttgtaacctcgtcattctgactagcgaaaaagccgttgaactgatctttgaggcacttttccttggagctttagtcttcgatatgactctctgatatggcaaggtctaataggtcctgat

SEQ ID NO: 16428 - DNA, 694 bp, Arabidopsis thaliana columbia
ggacaaagaaacagaagatctcagataaccaaatcattttagtattatttgagcttaaacaggttcaactgcatagtcaagactttgatttcaccgtcaagtgggtggaaccactctccttttggctactaatttttcttaaaccaaactagaaaaaaaaagaattgaaagatggctaacccggttatggagagcctctcgtgcaccaccagggaagagaaggacatgagatttagaatctaacagcttaaatagattggttgcggtgacaggataggcaccaaatactttaatccagtcaccataatcaaacgccttagctggatcattatcagaatacagaaccggatgggccattccacgaaagagaatgttcttctcttttataaacgcctcggacattggaccaagttcaagacccatcaacatgtggtaacaacaagtagcaccggacctttatctggaacaccagcaagtcccttcactattttcccgtcttccatagttgaaaaaaacacagaaccaacagcatttcgcaagaatctgcatatcacaaggaataaaatcagaccagataaatcacatgaagctaagtacatttggttctcttttgctcatttgaggagatcaaggaacgagacacattaacttgtagtgtcacatgtttggagaaagttttgaatattagtagatg

SEQ ID NO: 16429 - DNA, 502 bp, Arabidopsis thaliana columbia
tctgtttgataacaaaaccaaggatgatgagaaaaagacaaagcaagtccatgaacttctcaaacttatcgacttggtcagaaagcagaacaacaatattccgtataccgatgagatgtaccatatgataaaggttaaagagtttaccacttttgtttccatttgcatccatctctcgcgatgttttgaatgctaaagaaagcatatggtctctccctcatcaggaagaaaatgacaggcacaagaaagaacaagaggagctagaatcacaagggcattcagaagagcagctcgcagcattgatgaaggagttacagataatgaatgaacgaaacctcaaggcaatggcagagatggtataaactcctcatattctttcacatataaacataagcataagtggtgttgaagttgtcattaacaatatctttttatttacctcagatggagacacatatgacaatagctatggaggcgcaggagaagctctttgagcaaagag

SEQ ID NO: 16430 - DNA, 585 bp, Arabidopsis thaliana columbia
ggtgctgaaattgaaatgcaaaatccaacaacaaactgcaaatgataaaagaaacttttaagaactatttacttaaaccctacttagtttgtgaagacagcatcagagagtaaactgaagacaacatgtcaaaagactcatcacaccaaaccaaaataaaaaaacaaaccaaaccaaaacaacataaaaacagaaaaaaaaacaaaaaaaaaaaaaaacagttaaaagtgatccaaaaggtttcagagctttgttcaacactgtaagatgatgacgatgcctctatggattgatttctcttttgttcactcagctttcgttgactcaccgtttccactcagctttcgtcgacttgtctgatataaacatgaactaaatttgttaaaaggatgtagataatgtaaaagaaattgacaaaaaggcttgtgtatagttataggtttaaacctcttaccaccaatgtccttggaagatgaaaaagatctgtcactgttcattgatcctttggctgaagctatgagaagtctgtgagctcttggagacattgtactcagcttaccattggctgcaggaggaagagagtgg

SEQ ID NO: 16431 - DNA, 398 bp, Arabidopsis thaliana columbia
agctcaatggatttggattcgcagccgaagcccgagacgaagctcatgtcactcatagctcaaacaatctctcttttcaactccatggatttggattcccagccggagccgttaaggaatctcatatcactcattactcaagaattatctctccaaaactctatagattctgattctgagccaaagcctaattcacaggttatgtcactctactctgaaacattcaaactcaagccgagaccggagctcatatcgatcatcgttcaaatatacagtcttttcatgtcgccggagccggatttcacagattcagattcgggttcgagttcagattcggagatggagtcaaagctcatatcagtcatttctcaaatactcacagtcgacacggttgtggt

SEQ ID NO: 16432 - DNA, 557 bp, Arabidopsis thaliana columbia
  unsure (1)..(557): unsure at all n locations
tctnnnnnnnnnnnnnnnnnnnnnnnctaaagggatgtattccggaatatcttgcttgatagcgcaggcagtaacacagggggcaacgtagcagtcggtcagcggcaggtcttctgccacttcaatacgctcttctggcttccagtgtttctgggtgtattccatggttaacgcatctgctgccagtctgttcagtcgttcgacgtcaacatggtcaagtccccaggcgtcggagccttccagctcgcgcatgcaggcacttaagcgcagatagccgccaggtttcagcaggtcggttgccatagtaatagggcgaatacctgtatcaaaaatatcgcggatagtcagctgactggcaccaccggaataagaaatgggcagtttgccgtcaaaggcgcgagagagaactgctgcaacattgatggagagcgggaacagcgcacggcctgacatatacatctcttcaccaggcagtgcgcctttattgttgatggtgccgagagtgttagtcagttttacgccaaagccgagtgatttttcttttgccagtgccatca

SEQ ID NO: 16433 - DNA, 526 bp, Arabidopsis thaliana columbia
tgaattttcttgagaataaaacagagaaaatataattgttgaaaaaaacgaaatctaccattcatatatatgattttaccttagtgaatctttttaggtaggggtagatatcaaagcgggaaacccaacgacgtacaatctcattttctgtttcaaatggaattcgaagaatatttgaatattttggttccgaaaatagattccaattcttggttgcatttagtgtttttaacgtatgtgattaatcgtgttacctaaataaaattttcaacatcaatatcgtattagccaaggaaacaaagatgataccataaaataccacgtaacaagttctagcttaagaagtaatacaaaatttgaaaaatattcatgatcaagaattcaagactcagttcaaatagaaagagaagtatttcacagataacttacaacaagaatctgaggtttgaaattaacccttgagagttaattctgtactctgtatgagagttgattttgtattgcatcgcttcgtcaacttgctgct

SEQ ID NO: 16434 - DNA, 576 bp, Arabidopsis thaliana
ggtgaaaaaattgaagataatagctggttcattacagtctgagcttggaagagagagacaggatctagaagaaactaagcaaaaagaaagtacgggtttggcccggacaaacgataaagacgcaggagaggagttggttgaaacagccaagaagttggagcaggcgacgaaagaggcagaggatgcaaaggcattggctacagcttctagagacgagcttagaatggcgaaggaattgtctgagcaagcgaaaagaggaatgtctacgatagagagtcggttagtagaggcgaaaaaggaaatggaggctgctcgggcgtcagagaagttagccttggctgctataaaagctctgcaagagactgaatcttctcagagattcgaggagattaataattcaccaagaagcattataatctctgtagaggaatactacgagctaagcaagcaggcacgcgagtctgaggaggaggcaaacacaagactatcagagattgtcctcaaatagaggtggcgaaagaggaagagtcaagaatcttggagagactagaggaagtgaatagagacatgagtgta

SEQ ID NO: 16435 - DNA, 520 bp, Arabidopsis thaliana columbia
tgctgcttgccactgggtttgatggagaaggtgcagtgtttcctttggctttcgctattattagtgaagaaaatgatagtagctggcagtggttcctctcagaattgcgtcagtgcttgaagttaattccgaaaacatgccaaagctgacaattttatctagtagagatcaatccattgtcgatggagtagatactaattttccaacggcgtttcatggcttgtgtgtccattgtctcacagaaagcgtccgtactcagttcaacaactccattcttgtgaaccttgtttgggaagcagcaaaatgtctgaccgactttgaatttgaaggaaaaatgggagagatagcccagatatccccagaagctgcctcgtggattcgtaacatccagcacagtcaatgggccacatactgctttgaaggaacaaggtttggacatctgactgcaaatgtttccgagtcacttaatagttgggttcaagatgcgtcaggtcttcctataatccaaatgttggagagt

SEQ ID NO: 16436 - DNA, 632 bp, Arabidopsis thaliana
tctataaattcttattccaagaatataggcagcttcacttatgtatttcatcgagaaacaacttccaagccaagtcttaacagactggagcaaaggaatgtcatttccgaggaggagtatgtcatctacatacaataccaaaaatgtgactgcgctcccactagtcttcttgtaaagacaaggttcttcttcgtttctaatgaaattaaactctttgattgcctcataaaaacgaagattccaacttcgagatgcttgcttcaatccatagatgaagcttgcataccttcctagcaacttcaagaacagtgaaacgtttaggttgtctcatgtacattctcttcgagattttcattaaagaaagctattttcacatccatttgccaaatctaatagtcataatgagcagcagttggtaggagaatccgaatggacttaagcattgcaactagagaataggtttcatcatagtcaataccatgaatttgcttgtaacctttcccaatcagtctagctttgtgtatctgtatattaccatccatgtcaattttcttcttgaaaatctatttacactctatggcttttcacaatcaggtaaacaaccaaagtccatatcctgttttgtgacatgg

SEQ ID NO: 16437 - DNA, 500 bp, Arabidopsis thaliana
tttcatgatccggacggcctcgggatacataagcaccggtctggacagacctcatacaaagccagagcccgcaaacgtgtaagttaatcaatttttttcctttaaaacacttgtatttcaaacaactgacctatatgtttatgtgtttcagtgtgagatgacaggagaaagtactccagattttctcctcctcttagatgaaacacacaggaaacctgatgggagtttcatcgacagaaaagtcaaaggaaatctataaggaagagtcatcgaagattcaagaggaagagtcacttctgtgttcaggcgacactacagagagcacgggttcaggcgggttatctgttcaggcaaagaacatgatctatgcacaggtatcttatctctttcaacccaatatagaagacatcatttgttgttgctttggattggtctgttgtggcttgcattatgtctttgatgggatagttgcagtttcaaactgaattgaatatgttgtg

SEQ ID NO: 16438 - DNA, 515 bp, Arabidopsis thaliana columbia
agattgcttatttttcatagcactactttgccgatcatattcaaacaaaatcaaggtaaatatatttaattatttaacgattagatattcttcgatattaattcacttacatggatcaggttaacaagattcaatgaaggtaaaattcctgtatatcatgtccctggagtacctaatatatttatgcatgtcggccgtccaagtggtgaaatgcatgtagattggctttcagagaaagactaccaaagcgcacatgcatatgttttaagaaattgtgactattttaaaccatttgagaggtatttttaatcacttgttgtttttaatttttcactaagatcactttgataaatatttcttcgtttgtaaatgtaatatgttcgaggattatctttctgcaaaatatccatgcttgcccgataaagaactctacgcgaaaagagtggaagaatatcatctatgggttaaagaatatgtaagtctatctcaattttggttcattcgaaaagtgatca

SEQ ID NO: 16439 - DNA, 662 bp, Arabidopsis thaliana columbia
tcccccaaagtaactaatagcagattggaggttctgaaacaatataataaagagtcaggtttagagtattcgcaggaaactatttgttagtagatctaatgatagctaggttgttatcgaaccattcttagactcaaactctaactttggaataaccggtggcgttccgcgaaactccctatgcctagagctaagaataaccagagaacccgagaaatcttatactttaacatgcattctaaacgagttcaattcagtttattttagtaaatatgctgattcttattacacacctatagaccaggctcaccaaataatagattcaactacagatacctatggcgggtatatctattgtctgggttcaagttctagttaattactctagaactagcattaagaacaattaaagataaagaattctacaaacaacctagcaaagaggctatctactaaaccatatgaatccctaatgagaaactctaaccctaacaagcaaactactcagtcaaggagattgaaacaagcaacatatttgagtaagaaaacataaacacatcaataagagaaatggttagaagggatctcttcactttaatgaaaactgaatgaatttctgaaaacaggggacgaatagctaaaaacgttcaggaactaacagg

SEQ ID NO: 16440 - DNA, 638 bp, Arabidopsis thaliana
  unsure (1)..(638): unsure at all n locations
tttgaatgaactgaaagatgacgtcatacactttaagctgctccatcacgtgaccttcgagtcctctgaacgttaccgccatattctcatcgtctatctctctcctctccttgaacacctccggtttcccatcttttcatatatgtgttccatttataagttagcaacatgcatatatatgttttttttttctgtactaaagtgcatatatatgttggaactatatatataacacccgtcacactcaactaaattttaaggtaaagagattattccatcacgtgtagttgttacttgtaattcctttcgaaaaaatccgcagatctacttttggagaagctttctgaataaatttgtcgggttcataaattaataaagtgaatcaaatttagagagatatgagtttacatatatgcagtgaaaccttttgaaaaatggattctctgtattcttgtgacaaagtcgtacaactatatattcatttttatgtgattaacctcgagtattattcaagctctagttttcagacgtgagttatataactanaataagtgtatatttttcacgcatgtgtagttcaaatcttgatggctcatgggagtccattcacgtcgtggatggtgacacttggatgtggt

SEQ ID NO: 16441 - DNA, 648 bp, Arabidopsis thaliana
caagaagctcgactagtgcttcttccatatactgttgatactgtgggtagttctcgtagagtgaaccgtccatagccacaacggttcttttacctgaatccattcttttggtctcttcttcaatcttctccacaattgcaactataccagctgttaggggttagatttgggcttgcttttcccaaggcccaaatccaagtcaaaggcctaagcagaatgttaagtcaagagggtaggctcgtcaaaaccctggaggaatgccctacacgcagaaggctataaatacggaatagcatgtcttgtcaaaggagattccaggaggacacttagagacaaagagtagctcatcagttcgcccgtctcaagcagctcgtcagctcacccgtccgaagtatctcgcgaggaggacacttagagacaaagagtagctcatcagttcgcccgtctcaagcagctcgtcagctcacccgtccgaagtatctcgccaggaggacacttagagacaaagagtagctcatcagttcgcccgtctcaagcagctcgtcagctcacccgtccgaagtatctcgccagccggtccgcctcaagtagctcatcagttcgcccgtcgcaagcagcttgtcagctcacccgtccgaagtatctcgc

SEQ ID NO: 16442 - DNA, 411 bp, Arabidopsis thaliana columbia
ttcgtgatcgagaatcatccttcggatccaggtaatcgtatgcctgggaatttcggtgattacttctttggtccaggtcttgagcagttgattcagcaactagctgagaatgatcctaatcgttacggaactcctcctgcttccaaatccgccattgatgctcttcctactgttaaggtaacgaacgatatgttgaaatcggagatgaaccaatgcgcggtgtgtatggatgagtttgaggctggtagcgatgttaagcagatgccttgtaagcacgtctttcatcaggactgtttgctcccatggctggagttgcataattcgtgtcctgtatgtcgcatcgagttgcctacggatgagtctgattatgagaacaggagtcaaggaagtcaggggagtgcgtgatggaca

SEQ ID NO: 16443 - DNA, 839 bp, Arabidopsis thaliana
tcaagtctttcaaaaacttgtgggtatctaggattagcgctagagcgtcaacaagaggtatccgcaactcaacctccttgatgttcttcgcaaacatagctctatacttatatgccaatgctttctagtgacagccaggaaatggaagctagggtttgtaaggaggaggaacaaagaccttttctttgtttttgacagcaactagtttcggagatgttattgggaagggtggtcgagtaacgtgatcgagtggctgctcgagtgactggttgagtgaccggtcgagttgtttgtcagcttgatcttattaagaccgaaatcctccccatcttgatctacactgtcctcagtgactgtcttaggttcctctcttgttggaagtgcttttccactgtgcagagtgatagcgtgagaatattcttttgcacatgcttttgtgggctaagaagaatcctttccagcttgtcattcagcgctttgatctcgttactgtgtttgtcatctgagtcagttgtgcctctgatggtcctgtcacagtcctcgttgtaatttccatctgactaagctaggttctcaaccaattcccagccttctacaatatctttattctggaaatttccattgctggcggtatccagaagcattctgatccgtggtaaaacacgtctgtataaagtgcggacgagagaggctttcttgaagccatggtgagggcattggttggtgtacccttgaaacgctcccatacttcacagaagcttacaccagtcttctgtgaaaaacaagaaaatctcatttctgagtcttgcatttctagcgttggagaagactttgccaga

SEQ ID NO: 16444 - DNA, 591 bp, Arabidopsis thaliana
taacaaagatttgatgtcattcaagacccatagatttaatattgtaaaaagacacaaaaaagagagtacaaaaacagtcgaatagacctgtccagcacatatcacatatcacatcaaatgaattcttccttaattattgcgtaaacatataatgattatattatataaaacataagacaggattaaagttttgcgtaggtaggtaggcagatagaaggcaagcgttctgtttagagaggaacgctgtgcaagacgactgtctcaacagtgagacctggtccgaaaccaaacaagacaccccactccaacccttctcctgtcgtggccacaccatccttagctgacttcctcctcatctcgtctagtatgaagagaacgcacgcgctcgacatgtttccatactcgctcaacacgtgacgtgtcgccctcatcttctcttcctttagtcctagctttatctccacctggtctaggatcgctggacctccagggtgggctatccagaagagggagttccagtacttatcccaaaggtttaaacgttcgtctagctcttccaatgtcttggagatgagcgggacatcttgagag

SEQ ID NO: 16445 - DNA, 493 bp, Arabidopsis thaliana columbia
cttgaagttgttggttgaagaaatagatcttttaacaaccgtgttcctcaagattgacaacgagaaagtgttctacccaaattcggttttaatatcgaaaccgataagcaacttctacagaagtccagatatgggagattatgtcgacttcggcatcgcattctcaacaccggccgagaaaatcggctgtctcaagggaaaaatcggagagtaagtattaggcatcttggttcttcacatatatattttagtcccctaactaccatataacatgaccttgaccacattaaatcactgacttttcattgactctaaatttggtgttgtaattggtcagatacttggtggcaaactcacaacattggtatccagaagcacaggtgatggtgagggcaattgagaatatgaacaagctggtattgaatatactggtccaacacacgataaatttccaagtatatgtagagaagagtttaagaagaaccgcgctgat

SEQ ID NO: 16446 - DNA, 857 bp, Arabidopsis thaliana
catttctttgcctcaacttgtatttgagaatcgtaccatataatatcttagttttaaatctaaaatttcgtctacagatatttatgactggttggtggttatgtccggagctatatctcaaacgcccctttgaagatcatccatcattgcggctcgatgcattgctggagacaaaagcaaaacagggcgttaaggtatgcgtaatgagcttacatttctctcgaaaggattcgatttgttttcttatgtaagcgtacactaaaaatttaaaagttgttgcagatatatattcttctgtataaggaagtccaaatcgcgctgaaaatcaacagcttgtacagcaagaaacggcttcaaaacattcacaagaacgtcaaagttcttcgttatccagaccatctctcctccggcatttacctctggtacagttttcatcgtttcagggatttacttaacaactacttagctataactaaatttgaattctgtggttttttcaggtcgcaccacgagaaaatagtgattgtagattaccaagtttgtttcattggagggttagatctctgttttgggcggtacgatacagcggagcacaagattggagattgccctccttatatatggcctggaaaagattactacaatcctaggtaatatcctgaactttttattatcttttctaacaaaaggaatcatctttctcacaaattgcttctattgtcagagaatctgaaccaaattcgtgggaagaaacgatgaaagatgagttagacaggagaaagtacccgcgaatgccgtggcacgatgtccactgcgctctatggggaccgccttgtcgggatgtggctcgacatttt

SEQ ID NO: 16447 - DNA, 618 bp, Arabidopsis thaliana
gggtaaaactcaacacgataccataaaaatacaaaaacaaaaacaaaaaacaaaagatgggacattgtcgctgtttagaaccagaaacttatttttcctacaactatgacagaatcaaacacaaaactgtacttctctctctctctctctctctctctttctcttcttcttctcctactcttggtctcagcatattaataaaactggctatgactttggcttttaccctttccctttttccttccatatcagcttgaaactctcggctcttcacgaacattcttaccctctccttctaactctgtaactcctaaaacatcactggcgtcttgagccaccacgcccgaacactgtcctattgctctttttcgactctcttctttctccaccgcaacagcttcaacatcttctttattgtatggatcactgttcaggtctattctcgctgtgttcacttccttctcctccttactcttatcagactcagccagttccatgtccttcttcttcttatcttctgctgctgttacatcgcgctccaactgcttcttcttcctcctcatcataagcgtcttgaaccttctcttcacggtgctacacacagtgcagcacatgtag

SEQ ID NO: 16448 - DNA, 575 bp, Arabidopsis thaliana
ttggaaagcctattgcagctgatgcaggggtaaattgtgtattcttttatttttgattgaattgcgctatcaagatttacttaatgttctgatgcaggggaagttgtactcaataatggagatatgtcggctttttgatcaaatattcaaagagcatcttgatggagtgtacgttttgactctttttacttcaaatgtttaagattacaccatgagttgttatagcgtctgagttgatatttctactcttgaccttctgaaactacaaaaggaaaattgtaatttaagactatggttgattacacaggcgtgctggtggtgaaaaagtgtacaacgtgtttgataaccagcttcctgcggctctgaagagactccaatttgacaagcagctagcgatggacaacatccggaagctggtcactgaggctgatggttacagcctcacttgattgctcctgagcaaggttacgtcgtccattgagtctctattgtctccacagaggcctgctgaacatctgttgacccgtatgactctttcttcatctctaaagatgtacaaaactacacaaacaata

SEQ ID NO: 16449 - DNA, 569 bp, Arabidopsis thaliana columbia
tcgtagaatcggatgatattaggatgatcgattgtgctaaggatcgaaatctctttaagaagattatctcttactttagggctaagaagtttcttatcaatctctttgacggcaacttctaaaccagaagatcgatgcttcgctaaccacaccaccgcaaacgaaccagacccaattctcgggccaagtgcgtagtcacccacaagtcgtgccgactccatccggaattttttggttttgacccgttagactttcggatccttgcttgaatcaacctccattgtttctattaattactactactcaaactcacagagaaaaatcaaaactttttttgtttttttttacggattaaaggaacaacgaactgtttttgttaacgaaaggagacgatttgagttttatatatgttatacagtaaagctatcgacttttttttttttttaataaaggtttttttgtgtgtggagattgagatttggttatagcttatgagcaaagagtttcttacttgtagtagtccagaagaaaccttctgaaattgacgttttgaaccaattccacaagga

SEQ ID NO: 16450 - DNA, 612 bp, Arabidopsis thaliana columbia
taattgatggaaccttttcatgttcaaatttgttagattacttagtttttgattgtatatatgttgtgtgtattttgttacttatgattgagctttttattctggtgaaacaggctttggacaagattaggttcgagtccttgacggataagagcaagctcgatggtcagcctgagcttttcattcatatcattccggacaagactaacaacaccttgaccattatcgatagtggtattgggatgaccaaggctggtacgtaattgatttcattcaaaagcaagttgtacttgatttcattcaaaaccattatctatgtgtttgatttgtgtttgctgattcgtgtttgttctattgtacagatttggtgaacaaccttggaacaattgcaaggtctggtaccaaggagttcatggaggcattggctgctggagctgatgttagcatgattggtcaatttggtgttggttcatactctgcttacttggttgctgacaaggttgttgttactccaagcacaacgacgatgagcagtatgtgtgggagtccaggccggtggattttcacggtgccagagcacctctggtgaggccttggtagaggacaaagatg

SEQ ID NO: 16451 - DNA, 449 bp, Arabidopsis thaliana columbia
ggtgaattcaccaatctggaaccaggcgatggtgttcagtacctgatgcagaccggttgggatcagcagacggttgatgaaaccaaagataccggaacccagcgcgcccgcagaaacgatccactcgccgcctgcatggatagcgtgctgtaccggcggccagacgtaaccaaaaatggccgccagcaccaggcagaagaatccggtggcaatcggcacaaagcgtttgccgccgaagaagctcaggaagtccggcagtttaatatcggaccaacggttataggctgcgcaccaaccagaccggtaatgatacccgccagtacacccatgttaatttctgggttgatggtcaccatcgctttggttaacacaaagtaacctaccgcacccgccagcgccgccgcaccagcgctgtctttcgaccagctggatgccacaccgatggcgaa

SEQ ID NO: 16452 - DNA, 639 bp, Arabidopsis thaliana columbia
tcaggtcgactctccccgtctgaagagctgcaagcggtaaaaatcacatttcagtatgtgtatcaaccttactaacgtcatcgaatttcttatcatttttgtagccgcaaacaatcaaaatcaaccaatccgaccaaggtgcgggaacatctcaagctactcagaaatcagcatgttgcggcacataaaaattgggtccacgacgcctgtcaaaggagagaatctggctagtgaaagagaaatggtatttggaaagaaaaaatgaaaaaggaaatcaatcttcttttgcttttcttctatatgagatggtgtttctacgtattcttttaagattctctctttccctaatggtatagtgtgactgtgaaggacacaattcgtattccatatttctggaatggattctctgacatcagattatgacttatgataatatcagtttatctcactcacacaccaatgatattggattctatgtatacattcgagaatggttctgttcaaactttcaactattaatgttttacactcattgcaagaattgaaaccttttattcaacaaattgtgtatgcatcatgacggacagatgaataatgtgtagcagagagaaaaacaccacaaagtcagagaaggttaaa

SEQ ID NO: 16453 - DNA, 859 bp, Arabidopsis thaliana
ggtgattagaggagaaggaaaaaacgaggaagatggtggcgaggaaggagagagcggtaatcggagattcacaagcaggattggattaccggataagatttacaagatcgatgagattaaggcggagatgaagaacggagtgttgaaagttgtgatcccgaagatgaaagaacaagagagaaatgatgttcgtcagatcgagatcaactaaaaacgtcgacgtttttttctgttctagttttgttgataggtctttgaataagaagtgtgtgtagtttggcacggtcgatgttgagtcatgtagtctctaaagactaaaaggttatatgtttctttcttgagacggtggttttttgtcttgcttaaaccaaaatttgcattccaaatcaaagcactaattaaataagttcctaatcgtgtattcttttagctaactcggtcggtttacatgcctttgtggttatgagactggagcttatggaacgtatttgggtttaaaattttctgtagactaggaactaggaagactttaagacgaattctgaggctgcgtaagttgtcgacggactggtctattaataacgcgtaaaagtgttaggcccgttcgagtagaatagcgcgttggacagcccaacttgaatgaatcgatcgacttttattaaaaaaacaaaagtagggcaaaaaacaaaaaacagaacctcgacattaacctaaacctaagagcaaagcaaatcgacggcgacgggaaaatagaaccgcagatctctgtctcctctctctctcgtaactgtttgttcgatggcactgaagaaggcggaggaagtggtcgaaagccctcctgtttccagtgaagaagaag

SEQ ID NO: 16454 - DNA, 473 bp, Arabidopsis thaliana columbia
cagaccttgcacaggccatgcagctgcatcacccaatgcacagattgtgtgtccttcgatctgttctggttacctcctgcagcatatcaatctcttccagctttgcattgccaactttcattctctccatgatcatccaaagccaacctgttccctctctgcaaggagtgcactgcccacagctttcatgcttgtagaagtaagagagccttgcaattgcatccacaacatcggttgatttatccatcacaatgactgctgcagttcctaaccctgattggacagccttgagcgcatcgaaatccatcagcacatcctcgcaaatgttcttagggatcagaggaacagatgaaccaccagggatgatagcaagtagattgtcccatccacccctaacacctccacaatgcctctcaatcagttccttgagaggtatctcatctcctcttccaccgtgcatggcttgtttacat

SEQ ID NO: 16455 - DNA, 606 bp, Arabidopsis thaliana
tgctttgtggatattctttcaatttcgttgctggttcagcttccatcaagaaagttgctgaaactgccaagcatctaggcgctgctggtttcgttcttgttgtcgaaaacgtttctccaggaacaaaattcgatcccgttccttcttgcattcctgggattctgattacagatgtctctaagtcaatggtaaaatatagttttgttgcgttcactatacagttatttcctccctcgtcttttccttaacttggaatgccattttttcttctctaggatttgattgattactacaatgtcacaacgtcaagagattggatgggaagggtaaaggactttaaagctgaaggaagcatcggagacggtttggaacccattcttcacaaatccgcacctgaagttgctctgttctcagctcgaggacccaataccaaagatttcagctttcaggatgctgatcttctcaaaccagatattcttgctccaggctctttaatatggtctgcctggtctgcaaatggaacagacgaggctaactatatcggtaagcatttccaaaaatcttgtcagaattatccataagtactctagaccaagaacctaaatg

SEQ ID NO: 16456 - DNA, 534 bp, Arabidopsis thaliana columbia
tgcaccttctttttcattttctccaattctacagcttcccatctgatgagctgagctataaacgttccatttctcagtcattccctttgctccttcctctgtactcaccgagtctaaaaactcttggatcgaattctcattgacacctttgcatattagtctctgcccgtcgcttctgtgagttcccacttcctctgctccagctgctattagtatccttagcgactctctaagcccagctttgagattatctctgtcggttttgtccacggtgtagtttattctgccttcggttttaacttctcctgacccgcggtctctaactatggttatgagactcgcggttcttgagtatctagccattcttttcttcatgtcaagcccagaggtccaaggagttaaaacggagaacgaacctggtcctagttgcggtgtctctatgattgctctgacttcagaatcttctgataacactttgctcactgatgttatgatcccgcttcatatgaattcccttgaaactgatgttagaag

SEQ ID NO: 16457 - DNA, 614 bp, Arabidopsis thaliana
acaaagatagtgagaagaaagcctgcttgaagctgatatgaaaagaggtaagcatcaaatggttcttctagtcaacagaaaggttaaaacgcagatgaattttgacgtctgactctaactagatctattgaagcatatgccaaaggcctcctctttctttttggctactgtaaagttctcaaagaggcaaaaagattttatttgcatatgtattacaacactttaccatcatctatatactacttttagttcatattgtaacttttgagctttacaaatgctacaaacagagtgttaagagttcagagatactcaacagggaaaccaacgacgggttttatctcagaggccagggaccgtagctcactcacttcattgtctgtcagactccaacctatcgctccagcaaactctttggcttgttctgcgttcttggctcctgggatgggtatcacgttcccttgtgccaccaaccagttcaatgctatctgcacagcacaacacaacaaaacaagaaggcatatgatttgatgcaaaatcgagggtgtacacttggatagcttaatatggatcacacaattactcttttgtatttttcttaacgtttttggaca

SEQ ID NO: 16458 - DNA, 1116 bp, Arabidopsis thaliana
acatatgttctgttatgaactcacgtaattaacaaagctaatgcatattgatcgtacatcatgtaatcatattactattatcccttataatggagtttaaagatacaaaagttataaactaattatacaaactgtattattcttttcttactcaagacacagaactaccttcttattattactgcatattacaaaaataataacaataataatgttacaaaatctcatatgttttctttatcgcctttgtcccatagcaaccacagggagagtcactttatgccctcggcttcctttcaatgtaacctgtccgaagctataagctccagtcactgatctcactgttagagtcaccgaaaaggttctagaagcgcccgctcttactgtcattgcaggaggactcacttcgatggcgattgctggctccatcctcgatgtgattgtgtatgtttcttcttcttccgcaacattcgtcactcttctggttacggtttgtgttctgacgagatgagagatggctatggatggcgtgttgaagtttgaaggatgaaccattttgaaattgcatggagtgtttgtgaagttttttatctcgtgagcatcgataccaggtgtggtgcacaagaaccctatataatcctcataaccttcaagaaaattcaatcaatcacaaagtgtatggccatacaagaataaaaccaatgagtatcctagtgaccagagattgaagagggagtgacgaaaactgaggtttatgtcaatggagtaagagtatttacctgcatcaaagatgagaccagggtctagagcagcgcttggattgacatgaccgcttccataatcaaacggagttgctttaacaagtgttactgtctctgtttcagaatattgttgtgcttggagaggtcttcctgctctatctatgactgttgaagtcgtcatcaaagctgatttaatggcagctggactccattgaggatgcttctgtttcaccagagcagcaatacccgcaatgtgtggtgcagcatgcttgtgccagaaattagtgcaaatccttcgcctgctcaatagtcaaaaactaaacatttaggttcttggtctagagtacttatggat

SEQ ID NO: 16459 - DNA, 813 bp, Arabidopsis thaliana
tagctttatcaacatccatagcgtctgagatcgagtcttcaagatgaacccatcggtcatgaaaaggttatcatctatacgtttctctatgtcattcatcaaaatcacagcttttcctactggctcgtctctgttaggagcagtgtgatcttccacggagaggaccaagttatcctcaaacgcgtccgcgactacaaacgtgaactcatcaccccattttggattattgcttctctggggaaatttagtccttaacatctgattaccgacttttactcgcacaaagacctctggaacacgggatttgtcagacacgatgatgacgtcctgagcttccaatatttgcacccttaggtaccatagccgaggcgaatggtacacttttgagcgcaggttagcggatataatgttggagctgtctgaatctaccaatgagtctgagaaagtcgcatccccgaaagcttcatcagcctgagttccagaccacacagcaagcattatctcataattcttcttctcgcctctcttgttctccagtctgtaccactggggagctaaaggactatcaggaggaacgcgagactgaacctcacggagatcgaatttaacgatcccaacaaaatcatcaaggagaatgtctttatccttgaccataacttcaagaaagttcgactgaagattatctttagcgaaggcaaagacttggttccactcgggatctgtattcttgttaaaatgtgtggtacacctttgaagttccgatttttctacgacatacgggtctaggcttcctgtaaggtctttgttggggag

SEQ ID NO: 16460 - DNA, 418 bp, Arabidopsis thaliana columbia
catcagtggttacactgctctggtaaggccaaagtaaaagtctttattttgcacatcgtcttcataaatttcaaaagcataaccaaagatgtgcaacatatataggttgctggcacagaggatggtatcaaggagccaacagcaacattctcagcttgctttggtgcagctttcataatgttgcatcccacaaagtatgcagctatgttagctgagaagatgaagtcacaaggtgctactggttggctcgtcaacactggttggtctggtggcaggtatatatgtccttctatggaaatcgatacaacaaaacgctgccttgtaacacatgtttgtaggctattaacatgatctgtaatgttttatttcctgcagttatggtgttggaaacagaatcaagctggcatacactagaaag

SEQ ID NO: 16461 - DNA, 629 bp, Arabidopsis thaliana columbia
  unsure (1)..(629): unsure at all n locations
ccggggactnnnnnnnnnnnnnnnnnnnnnnnctaaagaatgacgggcgtttcacacatgattcccttcgtggtatcgggcggtattttgctggcggtttccgtcatgttgtatggcaaaggcgcagtgccggatgccgtagccgatccaaatctgaaaaaactgtttgatatcggcgttgcgggcttgacgctgatggtgcctttcctcgcagcgtacatcggttattccattgcagagcgttctgcgctggctccgtgcgctatcggtgcctgggttggtaacagctttggtgcgggcttctttggtgcactgatcgccgggattatcggcggcatcgtggtgcattacctgaagaaaattccggtgcataaagttctgcgctcggtgatgcctatcttcattattcctatcgtcggcacactgattaccgcaggcatcatgatgtggggcttgggcgagcctgtaggggcgttgaccaacagcctgactcagtggcttcaggggatgcagcagggcagcattgttatgctggcggtgatcatgggtctgatgctggcgttcgatatgggcggtccggttaacaaagtggcatatgcttcatgctgatttgcgttctcagggtgtta

SEQ ID NO: 16462 - DNA, 520 bp, Arabidopsis thaliana columbia
gaccaacaatcaaacaattctcatacaccacaactagttaagaacctgttccaccaaagacgctagtactgcctatatgattaaagattctcaaaaatgttaatcacatattaatgatctcccattcagaacctgtaacagcatcgagcaatgactaactttacgattgacatagcattatcaacatatcaaaaacctgccactagttaaatcatatgaatgcttacattcaacaaaaatttgatcaatttcaaaatcaatttagttggtagctaaagcatgagtaacatattgaagattccaatccaagctttatccataaaaaaccagagagagaatgaccaataagaacctttaaggaaataatcggaggaaggccatccatgagaagaattggtagataaagattcttagtgtgttaacggattcgcgagtttcacaacgagctgagcgattccatgagactgagatccagatccaggaggagggaccaataagacgcaccaggaacaaaagggag

SEQ ID NO: 16463 - DNA, 404 bp, Arabidopsis thaliana columbia
tacacattccactcacttttttcatcctttctcgactattgaaagaaaagaggattagaactgaaaaacgacatgtacatcttcgatttgtcactttggtttcgatctaacccatcagaaactcctctgtaacccgcgatcccgttatccgaacgctgatcaaacgatcgctctgcagcaggcgtgtagtagtaatactgtccctgtatagacctcttgtaaccactctctgaaggtaaatcttgtagtctctgtcttggtgcgctttgtgatcggacttttgctttgtaagactcagtgttagccatgtagttagggtgatacccagagtagtactcgtactcgcttctcgcaggcgtgaagggagttttctccttgaaccaccactgctgcttcctgttcta

SEQ ID NO: 16464 - DNA, 518 bp, Arabidopsis thaliana
aatacatatacgtagaaaataatattttagccaataaaaactaaaaagctctatatttattcttgttcttttttttcttcttcaccaatatatatgtttaccagtttagccattccataatatattattttgtttaaaaaaaaaaaaaaaatcaaatggggaccaccaaggacggtacattcatttgattttagagaatggttcaaatgacggatatattagcgtgacattttgataaactgaaaaaataataagtgaagcagaatcaaagttgccacttagtccggaagactgtgattgtgattttgaatgaactcatggaacaagtttcctctgtaaatttttctcactactttgatttctcatttcttctctgattttgtctttttgtaatgttcttgttcttgttttgttttggtgaacagagatcaagctctctcactgtcggagagcaattctgcgccgtctttatacctttctttgccattatcgatgtcctagttcctccgtcggacaat

SEQ ID NO: 16465 - DNA, 555 bp, Arabidopsis thaliana columbia
cattaaaccttaggccccctacgaaaaacaaatcttcaagtatgtgcaacagattcatggagaaagaaggaaccctggaaagagactatggccgaaaccccaccggaaaaccctcaccgggcgactttcattctgacacatacaacctttactttaagggtttggtaagggagaaaacatcagctcaattatcggcgggatttgaggttgcaattttcagagaagatgatgaatatctcttgtttcagatgaaaggatcacttcatgactccacagttacagttttggaggctgagcttatggcattgaagcgaggattaaccgaagccgtgagtttgggaatcaatcatatctcaatctgctgtgatcgtttagagttatatgaattggtaagctttcttggctgttcaggttcacatatccactttgcttatttttgttattgatgttttaccttgaatgtgttaggtcatgggcagattagcgtctgagaaagagatcatcgccttgctaatggatgatgtgcaatgcataatgcgagaactgacatctagc

SEQ ID NO: 16466 - DNA, 1542 bp, Arabidopsis thaliana
ccaccaaccgctgagcattttatcggcttcgatggacaaaacgatgatgatttggcggcctgagaagaaaacgggtgtgtggtgaacgttgtctgtgttggagagctaagtcactgtgctcttggtttctacggtggtcattggagcccaaatagtctgtctattctggctcatggatatggcggagcttttcatctctggagaaatgttagtagcagcaaagagtctgagaattggcagatgcagaaagttccttcgggtcactttgctgctgtgactgatgtcacatgggctagaaccggcgagtacttgctatccgtgagccaagatcaggtcagggtttatggttgaggtgttaaaacgattcagtatattataatgcaaaaagtttcttttctgatatttcattctccaaatttgcgttttgcagaccactcgtgtgttctcagcatggaagaatgatgaggggaatgaagcagaggatgagcattggcatgaactggctcgtcctcaggttcacgggcatgatattaactgtgtggctatggttcaaggtaaaggcaaccaccgttttgttagtggagcagaggagaaagttgtgagagtgtttgaggctcctctgtcgttcttgaagactctgaaccacacttgtgcgggaggagaaggaagcttccctgaggatttacaagcagacgtgcaggttcttggagcgaatatgtctgctcttggattatcgacagaaacctatctacttacactgtaagtgattttgattgatttaacaccattactagctttttaccaaaagcaatcttgagattcttaattttttttcgcagcttctagtgaaccactggagagaaatggcggaggcgaaggtttggatacatttgagacagttccagaggcggctccagcagagttgaaagagcctccaatcgaagatcagcttgcgtttcatactttatggccggaatctcataaactctatggtcatggtaatgaactattttctctctgctctgaccacaagggaaaccttgttgcttcatcgtgtaaggtaagttaatgcagttttcagaatttttttacacttcttcaatctcctagatttagattttagatctaactgagcaggattccattactaaattattatttttatatatgaaccacaaacttcttcaggctcaatctgcatccatggcagagatatggctatgggaggttgggacatggaaagctgttggtcgtttgcaatctcacagcttgacggtgacgcacttggagttctcttatgatgacactctgctcttgtctgtctcaagagatcgtcacttctccgttttctctatccaaaggacaggtaactcaagcggtttcaacttcaccgttctaaatcagattttctcaaaacatcgaaaaatgtctacgtttttagcgtctctaactcgtctgtttttttgcttctgttcagacaatggtgaggttagcacaaactcatggcaaaggttgaacacacaagaggatcatatgggcatg

SEQ ID NO: 16467 - DNA, 571 bp, Arabidopsis thaliana columbia
taaatgaataagattcatcaaagaaatgataatgattttctaaaaatgtttatttctttttcatggggattgtatttgtgaagatccaaagattttcgctgtggaagcaaatagaattattccaagggacacaagatgtagttgtggcaaagatagggaaaaaagaagcagacaagttctttcaagatgctcgatacgtcgtcgctttaggcagcaatgacttcattaacaactatttgatgcctgtctatagcgactcttggaaatacaatgatcaaaccttcgtcgactacttaatggaaacacttgaatctcaactcaaggtttattttctaaactaattcaacacttcaagtacctatttatctttcatatatataatgatctaactgatacaaatttgtgatgcatgtaatgttttaggtgttacatagtttaggagcgaggaagctaatggtgtttggtttaggaccaatgggttgtacccactgcaaagagctctaagcctggatggaaattgcaaaacaaagcgagtaatcttgctaagagatcaacaaagctgccacacaat

SEQ ID NO: 16468 - DNA, 591 bp, Arabidopsis thaliana columbia
  unsure (1)..(591): unsure at all n locations
gtattcttcccataggaggccttggtgaaattggaatgaactgtatgcttgttggaaactatgatcgttacattctaatcgacgctggtataatgttccctgagtaagtccggagatacattcatcttgttaatattggcgagaagtcattatctnttgtgtgcgtggtgctaactctccgtggaaaacattgctgtataatgttacagttatgatgagcctgggatccagaaaataatgccagacacaggatttatcagacgatggaaacacaaaattgaagctgttgttataacgcatggtcatgaagatcacattggtgcgttgccttgggtaaggtcttcttctactccttgaaaaatccataatgagccatagacttttggagatttctagatagagtctagcttttatttttcaattacagcttcggctcgtgtgtataatgcagttcttttcctcagtccattgctggtttctgttctttttttgaccgatacccttttacatgagcaggttatccagcattggccctaatcaccaatattcgcacaccttcacatggaggtgatttcaccttgatcttgactt

SEQ ID NO: 16469 - DNA, 620 bp, Arabidopsis thaliana
tccctcgtcttcgtaatgttccgttcatgcttcgataattgaaaacttgatatttgttcgaaaatttgtaacagatgatttttgctctcttgaaattgacccttttggtttcactattaaggatcttcagactcaggacaaactcctccgatgtgatagtctgcgacctctatactcttgataacatcgtattttcgcccacttttactatgtttttattagttttttcatggagaaatcaagagttgaaggacagttaaggcaaatttcaagtatttgagcttcaaggaagatttatcaggtttcatgcaataaggagtacaagtcaaccaaaatccatttcaaaacagtttacgtgcctcagatgttacacatccgtttaaggtcttccagatctcggcatgaggatatattggtgtcattggaaagctagaagagtcaagattaacttcgtcgaaccgaagcaatccatgaagctggtcagaagttatggcccgaagagtgaagacatgtcttagaattgcggttttgaaaatgatcaatttaaaaccgccgaccaaggtgacttgaacccgggcgtccctcgagtctttcatagaccactagggcgcacaaccaca

SEQ ID NO: 16470 - DNA, 746 bp, Arabidopsis thaliana
tagtaacggtccgccagtgtgctctaaagttttcagccctttcaggtcggcgggggttttaaccggtgcgcgcgagttggtgacatcgcgccagctgttttcccagtaggccagtactttcagtcctttaccttcaagtgaggctttcagatcatcaccgactttgccgtcgagcgttttatgcgcgtgaggtgatcgcggaacaggaaagggacatcaagcaagttcatcactggtgataacccggcaaagttattcgagccggacatttccatatcgatggtgccgccacgtacgccgctgatcatcgcctgcgcgttaccgagagtgctgtccgggaacagttttaatttcagctcgcctttggttctctcctgcaataaatcattgaattttttcgccgcaatatgttgcgagtcggtttgtgatgtttcataaccgaaacgtaaagattgtgccgccagagaagatgtgctgaatgcagccaggccagcaatgaataatgcgtaggttacagagcgtaatttcataatattttccttttaattaatccatttcaaagggaggatgatgagatcgggaataaaaacaaatacgactaataatgaatataaaaccaggacgtaagggaaaacgcctctgactgcatcatcgaatttgagttttgccacccctgaaataacgttaagtacattacccgatagcggtgtaattaagctgattgagcagttaatgataaacatgac

SEQ ID NO: 16471 - DNA, 363 bp, Arabidopsis thaliana columbia
gtcgcttatagtaactttactcgttttgctgctctgaatctaccggttttagagttagccaatacgctaatttgtaattgtgtgttagtgatattgtcgaagaattctagaaataagagatctaattacttatctgaggtatttttagggaagtagattgtgatcgtacaagaattcgagtctttagcatgacattgtcaatcttctcgtcaagcttcctttacatctgttttgctttgtatgtaaatatttgcagggttagaggcacggatgggagttatgtattacacagtggggaggtacgaggacgcaagaaacgcgtttgagagcgctgtgacaaagctacgggcagcaggtgagaaa

SEQ ID NO: 16472 - DNA, 745 bp, Arabidopsis thaliana
ctatgtatgtattacctgattgtttatgggaacctgtcccccataaatgagtccctgttcgattgcatgttaaaagacatccacgtctatattttatataccataaagttgtgtctatttggacaacaaaatttggacacacaatgatttattttggacatgagaaaacttactcatatgtctaattttttaaaaattttgtaggacccacgacgtcgccactaacctatctcaccaccacaccccaccctcttcaatgtgacaaagtattagggttcccattctatcacgatctcaaagttacaaaaattttcattaatagatcgctatttgtacaccttcagtactatccgaatcgataatccaaaatgcccaaaatcgtctgcgaaaaaggcaaatgtatccaccctcaaccaatggcacctaccagacatttctggcgacccacaagtgcccttgcacctattagggaaaatcaatttgccgtccatcctcctcgtcaagctttggttcaattccacctacaggtaatgtttaactactaatctttgctatctgaacaatcacccgaatttaggtttatcatttggaattattttatatcagcctcctccgttctctgatttccacatgcctgaacacgtagctgctaaaatagtaagcttagtttcagaggacggtgttgatatgttaaaggcttggattcaatcaggaccagatggcaaagctgctgtttttccaggga

SEQ ID NO: 16473 - DNA, 769 bp, Arabidopsis thaliana columbia
ataagaccaacacaacaagactcttcaaacaacagaatagattgtggctgcaaagtaacatctataatatcaaagactttcagccaacacaacacggcacaaaaaaaaaaaaaaagtgacatttgctcaatctaatcaatctcacaaagatcattacccaactaaaccctaagagcaaaacacataacttaaatcctaagaacaaaacacataacaagactcttcaaacaacagaatagattgtcagatgcatccataacatccataatatcaaagactttcagactttcagaccaacacaacacgagacacaacaaagaaacaatttagacattttctcaatctaatcaatatcacaaagctcattactcaactaaaccgacattgaacacaacatgggatcacaaacaagagaagaagaagatcataccatgtcgtattcggtcgaggaatgggagagaggacggtgacgaacttatccctctccggcaacataagcagatcatttagggattgaagtctgtcctcctagagatccggcgacagaggtggatattcttcgaagttgttgccttgagaggatgggtgacataacatacctagtcaaatatagtgtttcaaaatataattaaacataacatacctagtcaaatatagtgtttcaaaaataatttaaaaatgtttgcataattttcaaaataacttatgtacatatcataattaatagaaataacttaagtacatatcataaacacaaaactaatattgt

SEQ ID NO: 16474 - DNA, 639 bp, Arabidopsis thaliana
ggtttaggaaggaatagtgctagggcataagatttctggtaaaggaattgaggtcgacaaggcaaaaatcgatgtcataattcagctgcaaccccctaagacagttaaggatatcagaagctttctaagccacgcagggttctaaaggagattcataaaagatttttcaaagattgctcgacccctcactagattgttgtgcaaggaaactgagttcaactttgatgaagattgccttaaagctttccatttgataaaagaagcgtttgtgtctgcccctatcgttgaagcacccaactgggactacccatttgagatcatgtgtgatgcatccgattatgcagttggcgctgtcctaggccaaaggattgatggcaagcttcacgtcatctactacgccagtagaacaatggatgaagctcaaacaagatatgcaaccacataaaaggagctatttgagaaatttagaagatatttggttggctccaaagtgaaggtctacatagaccatgcagcactaagacacatctatgccaagaagaaaaccaagccaaggcttctaaggtggatactattgtttcaagagtttgatatggaaatcattgataagaaaagtgttgagaatggagttgcagatca

SEQ ID NO: 16475 - DNA, 547 bp, Arabidopsis thaliana
gtaacggccgccagtgtgcaattgtgggctccagagaaatttcgtccttcatggggtacgaatgttccgccttgagcgacctttttgtggtttggagcgctaggttgggatttttcgctacgaggcgtttgcttcggcggctcgtgcctttttgatagcagttccatttcctccacatgggaaacataatccgaggcttggtgcaaggcatcccagattgtttgtggtttggataagtttaactcctttcgaaattcagacttgtaccacaacgttttttcagaccagaaagagtcgctacatcattgattccttcgactttggctagggtaaatcggaactttgcgagaaagtctcgaagtggctcgttcggctgctgagacaatgaccaaaggtcagcgtcggacatgccaagatcgattagcaccgaatattgcttgaggaccgatccagggctggtcctttcaaatgctcgacgaacaggtgacagagatcggcgtatcttttgtcgggtctgaatttggcttgggcacaaagattgtgaaag

SEQ ID NO: 16476 - DNA, 589 bp, Arabidopsis thaliana columbia
taagccgattgtcagttcaagggctgaaattaaccatatgctgcagttcaagattacaaaggaaaggctgaaatttctacatctagagttcgtgatgttaggtgttacaaatgtcaagggaaagggaaaggacatcatacaaatgtcacgaatcacatggataatggagatatagagtccgaggaggagattccagatcaccttcttcattgaaagagaatgaggagctgccggctaagggtgagttgttggtatctaggagaactttgagcatccaaaccaagaccgatgataaagaacagagagaaaacttgtttcacacgggttgtcatgtgcacgggaaagtttgcagcctcatcattgatggagggagttgtaacgaatgtggcaagtgaaactatggttaagaagcttggattgaaagtgcaaaaacatgtgaaaccatacgttctttagtggcttaatgattgtggcgaaatgagggtataaatcaagtggttgtgcccattgttatcgggaagtatgaagatgagatcttatgtgatgtttaccaatggaagttggacttattcttcttggaaggccgtgg

SEQ ID NO: 16477 - DNA, 450 bp, Arabidopsis thaliana columbia
caatgagcttccaagaagcatctgtaatcatgagtacgttttatttctcagttgatccattcaactacatctcttaattgttttaacataacaagataaccttgtgtagaagaataatctggctgggagatctgaactatcggattaacttgtcgtatgagaagacacatgaacttattgcaagaaaggaatggcaaaggttggtagagtacgaccaggtacctttactgcagcattggttttggtttaatactaaattgtgaagttctaatgtttatgttttttaagttacatatgaatctatcaagattgaaattagatgtttattctctgatagctttcaagagatatgacaaaagggatcctattcgagggatggtcagagggaactttagattttgcaccaacatataaatacgaaatcgattcagaaaattacatcggagatga

SEQ ID NO: 16478 - DNA, 561 bp, Arabidopsis thaliana columbia
ccttctgagacttctcagctcgttctctcttccgtttcactttctcacgcctaatcacatcatacaaccagatttaactaattaaatcatgttttactgggagaggagataaataaatgttggcattacagagagagtaactaaccagtcaccacccaggggttggaaatttgcgttgtctttagcctctccacttgcgatttgtcgagatttccattcttcgatttctcgttttctttttctatctaggatttcggaatcatcttcttcttcttcgctatcgtttagctcctctttcgcagctttccactgagcacaagtggagacacctttaagttttggatctaagagaatctagaaaaagggttgtttgacgagattcaagaaataacataccttgtcaaccaaactggaaacctttttatttgacctcaatgtagatgtagcagctactgttttctttcttgtccgtttcactgttaccaaagccaagtaagaactcagaaccctcaaactatgaatgtgataacaacaatgaaccaagattagagatcatgaaga

SEQ ID NO: 16479 - DNA, 694 bp, Arabidopsis thaliana columbia
acatatcaaaaaacttccgtgcttctaaattaggttcctctactctatcactatccccatcaaacgagtgtacattttcacgaaaagcatcatttaccatctgaacggtacctacatttgcatctacttccggatttggttccactaacctatcaacaggataatattcgctacaactaccataattcaccattgactcattctctccatgcatgaaccaaactttgtaccccgacataaacccttccccatataagtgcatccaaacttgagatacatgaagaactccaaaattccgacatgtacaacacattttttttgattcgatggttaccggttgatttgtcgcgaatgccatgaattgtttaagaccttctgcatattccggcattagtaactccgttagcggatcacgcatgggctggtccatccatgatcgaaaataattaaacggatttgaagaagccatttctctctggttatattttgttgctgcttggacgattttgtgaatgatggtagaaaaatataaagatgagaattatcaatgttttcgacgggttttcgacggacgtctgacgggttttggcgacgaatttctgacggaaattttgaatatttattttttaaaataaaaaaatgcacggctatgtgaccgtgcggcgaattgaccgagtagctacttgaccgagtg

SEQ ID NO: 16480 - DNA, 840 bp, Arabidopsis thaliana
tagtaacgtccgccagtgtgctctaaagccattgcggcagatcagcaagcgattgctgaaacgacttcaaaccttcagaattattcatcactactcctctgaaaaataataaaaaacggtagaatcgtgagattccgccgttaattgcgtatgttcagagtgatgatatatatctgaagattttttcaatcctctgcgcttgaggcagctgcgcgactgctggctcaggcaatgaatgagttataatagcagcatttactaacagggatttattgagagtatgagccgccgtgatacaccttaaaatctcaacccagcaaagtttcggagccgcgagcaaaagtgagagccttcacaaaataatgcttagtaataaagttactttgaattcagagccccgattaatgtgaacatgatcaacgaattttacccagattgagttcattcagtagccaggttttgaacacatcaagcgcagaatgcatgtgttggtgctgggggaaaaccaaataatgaccgatgtaatgtatttcgctggtactgtttacaagtgggcataccagtttaccgctagcgagttcacgttcagccagtagttttgattcacgcacaactcccatgccgtcaactgcggcaccaatcgccataaagctacggtcaaatcgaacgccatcattattgggtggcgtcatcttattcgccgcaaaccatcctttccactggtacaactgcacatcgcactgagtctctgtcgccgcatagagatcctctgctttctttagccgctcagccagttggggagaccacagtggcgtaacttcttcaacagcatgcgggatc

SEQ ID NO: 16481 - DNA, 544 bp, Arabidopsis thaliana columbia
ggatccccatcaccctgcagggtgaaggaagcattttatctgggcccaccaacaaaggacaagctacccaaggtttaatagattgttgtataattgatgttctgatcaaatgagcatatctctctcaaatgtacaattttaatttcacctgcagaataccccccaaggatctatgttggtgggagaaatctcatatgggaaattgtcatttgatgaaaaagaagggaagaatccaaaggataatccggtatcttatccgatatcatatgtggttccaccaaataaggtatctaaataaactaccatttctggtctggcatgcttgttagcataggcttgtgaaacttgatgcggtaatgcggaacaatctggctacatgagctcatattgtgtttagcttgatcgagtctatccttgtattccaatttttttgaacttttatttattttgttcttaattcaacagcctgaggaagataagaaggcagcttctgcacctacttgctctaaatcagtatcagaacgcttggaacaagaggtattat

SEQ ID NO: 16482 - DNA, 546 bp, Arabidopsis thaliana columbia
ctgctgaattttctgtttcccctgagtgtagacttcagatttgcactttctgttcggtcgttttagaggttaaacctaagagttcattagcaaaatcattgaaattgatatgtttaacatacattgagtttttctctttcaggttccctcgatgcgacaactacacttacacgttataagccaagactttaattcagatagtttgaagaacaagaaacactggaactctttcacgacctcgttcttccgtgactcagttgatgtacttgaagaggtcaacagccaaggcaaggccaatgtggcgagcgaagatctgttgaaaggtgagctgcgttgcaatcggtgtagaagcgcacacccaaatattccaaaacttaaatcacatgtcagaagctgccattctcaatttccagaccatttactccaaaacaatcgccttgtggctagagcagagacgtagtagttataacgaccggttctatttcggttaggatttttttttctttgttatctaattgttacgggtaatatatattgtgattttgg

SEQ ID NO: 16483 - DNA, 294 bp, Arabidopsis thaliana columbia
gtccattatgccggcgaaggtgaatccggtcattcccgaggtcgtcaatcagatctgcttcaaagtatttggaaacgatgtcactgtctgtttcgctgccgaggccggtcagctagaacttaatgtgatggaaccggcgctgtcgcaagcaatgttcgagtctatccacctgctgaccaatgcctgcgacacgttgcgtacagtgcattgacgggatcaccgcaaatgtggagcggtgccgggagtatgtcaccaattccatcggtatcgtgacctacctgaatgatgtgattg

SEQ ID NO: 16484 - DNA, 460 bp, Arabidopsis thaliana columbia
gtcgctcttgtgggtccccttctcccttctgtttttgaggttcctgaatttttttaacatttaacatgagagaagtttaacagagacctgctggaaccaaagtttcgaatatgtttggtggaacacgagagaaatgcgttggttgcgacaaaaccgtgtatccaattgagaaggtatccaatctcaaatctttcctgatcagaatcaagttgtgtcacagaagattgttagattgtttccataacgaatctgatctgttcttggcttaaaccagagctgaaacattgcttataatgtggactttgtgtaggtatcggtgaatggaacattgtaccacaagagctgcttcaagtgtacacatggaggctgcacgataagcccttcgaattacatagctcacgagggtaagctatattgcaagcatcatcatattcagctgatcaaggagaaaggaaacttg

SEQ ID NO: 16485 - DNA, 475 bp, Arabidopsis thaliana columbia
tgctcctatggatttggatgttgaagtttggctagatagtgtagatggatatgctcctatggattacaatgctatcataggacaaatgtttgataacgagactggaatcaaaggaactcctcctgcatccaaaagtgtagtagatggtcttcctgatgtggagcttaccattgaagaattgagcagtgtgagcattgtttgcgcgatatgcaaagatgaggttgtgtttaaggagaaagttaagaggcttccttgtaagcattactatcatggagagtgtataataccttggttggggataaggaatacttgcccggtttgtcggcatgagcttcctactgatgatctggagtatgaaaggaagaggagagcatgaaggcgtggtagtggcgggttggaaagggagtcgatgctcgggtagagaaggagtaactgtgcgttatatcttcgataattgtctaatcagtaacgatct

SEQ ID NO: 16486 - DNA, 566 bp, Arabidopsis thaliana columbia
tgaaccgcgcaagaaagacggcacattcctgatgtgactgccagcatgaacccctccatctaccatcataccattcagacctgtttgccttccctcagatccatagccaacaaagtggtgagtaccatcttgaggcagctggtgacttgtctttattccaatggaattgacctgatcagaaggacctggtatggagctggattccccaaacctccaccaggtatgatcttgagcagcatgagaactcgaacttgcataagttggtcgtcctgaaggtgtactattgtttggaaatccagtgtctgctggattcaacatggtattcaaagacgtctctgtgcaataaatcgattcaccatctacttgattcacttcagtagacgaaccaccaatactgcgtggcccttgcattggattcataccttaaactagaacacaaggactctccagtaaatagaacaaaagttaaaagaactttgaggagactagagtacacaaacagaaacaaacaagaaaataaatatgcataagagatccatgaatgagggaaaattaaaaactgaaat

SEQ ID NO: 16487 - DNA, 653 bp, Arabidopsis thaliana columbia
taactatagttaggtaacatataatttttacggttatttggcctctcttggctatagtggtccaatctttagcctctacaccgcttttccactcgaaatcaaccgcgaattttgcggtaggtctataacctggagccacaaaacacgtcatgtaatcgccggtttcttctgccgtgaacacgaatttcccggactctacattctctgcatgatgatggcttttccctttaggagatgacacctataaagagaagtacataaaatgtgatactcaaccaaacgattcatagattatttgtcatagattcatagttaatgcttacagtgacgaagagtttgtgagaaggaggaagatggtggccttcgttgggattgacgatggaataagtcccaacggtcatgtaatttgttttgatgtcatcggagatacattttgtgttacctgattccatatctaatctcattgattctcctcttctcatcaccatcatcatcatcatcgtcatcattgttaagatccacttaactttgtcttgtgaatcttatatcttgatggtagcaaatccatcttctagtttcagcaacaacaaacaacaaggaaaaagttgggatttgttaaagaaaaagacaaataatataagcttgttttggtt

SEQ ID NO: 16488 - DNA, 534 bp, Arabidopsis thaliana columbia
cgactcgatccccgtgcaaattgtacagttctggacaaaccttcttttgatcatttcagcttctcaaacacttcttccacagggatccgctcctataatataaatcattcaaaaattattacagattttcaacagttcaagatctcgataacgaattaaactctgtaaaaatcttacaaggtccacattttctttcttgatttcatcccacgagaattcagtcgccatttttcttccttaaaagagagacagatataaaaagaagatatatccgatggacgtataaatcaacttctcccttctctccttgctctaaagtcttctcttagcatgcaagacgctttcaagacgaggccataagagagagggagagagatgaagaagcgtgtattacaagaaacctatgagaatgtataaatacaaaagaataacacactctaaaacaaccattgttgtgttccatttaaaaccctcaccagcgtatctactctattctcggaagttttttcttttcttccagtaatcaggtttggt

SEQ ID NO: 16489 - DNA, 1462 bp, Arabidopsis thaliana
cagttcacaattcgatttgtatgtacatggtttggattattcattacaatcgaatcattttaaaattttgttaggctaagggttttatccacccaatattgatgaaattgttttaacaaatgtgcaggaaaacactcagttgcatataaacaggggaagcatttcacaagaatcccattgtcatttgtatataaacagagtcagaactcagaaacattagaactagatacatatagacaacaaagcccagaggcagttatcaaatcagtaaagctcgttataacctcttacagagcctagtccatcagattcaaaacctctgcctctgctctttcacggctcttgcagcggcgctgtaccatgccgctgcagccattgctcctggatcaggaattgatgcaaaaatctcagctgatacatagcttgatctcccggcctaccctccaatcataatccgtcacatcaaaaagaaacaaaaaacaaacaaccaacagataattgtgatgtcagtgattgctattaactagtagtcattaaagctcacctgtgctttcatatgaatggtagattcagctcctgcggtcgcagcttcagcagacagaacaaaagcagcaatagggtcctccccaacactcagcttctgctcagaagcaaagcaaggcacattactacttaacaaatatcaatctttaataacaaaaagtaacctattgatcagtcacctcctcaaggacttttgaagcggggatgagcgcatctaacatcgttctataaccggcagttgctccaccatatttactgacagcagagattgatgacttgagtgcttcagaccctgattacaagaagaaatcagattcataggccaagatgtgccttttggaataattaacgacaatgcaagcaacgtatatcttacagtgtttggaagtggtttctgattgactgttagcttttaactccgcatatgctgccttacagaggagattgtaactggtttcatatgagacagtgtcatgtcttacatcagtaaatgccaaatgcatgatcaattttatggaaagaaaattgttaaaattaactgcgtcgatttacattattccacttgttccccccatgactcttctaatcgatgaaccaatctcactcactgtttccgcagcatcgttgagcggataactataaaagcgagaaaaagagggtatacattgtaagtaaacaatcaagctaaacagaggagaagaagaggtaaaatgggtgttcagagtgaagtgactcactacttcttcatgtcctccagaatagctgttgcacctctgcacatctgtgaatggtgatgagtgcataagatattttagaaatgcaaaacgaacatttgaaaaacaggacttactgttgatccacaatcccatcacctactttccatccattcgttcaactaccttcagattgatgactcagt

SEQ ID NO: 16490 - DNA, 539 bp, Arabidopsis thaliana columbia
gacaatacattgggtcgtcggggcgagagaacggactcgatgaggatcgtcacatagtcgtcggaaatatattctaacaatttctctacgcttttctgacaatacattggtttggaaaccggttagaacatagtcggaaatgatcgtcggatcctcgtcggaaatatgttgcgacaattttctaacgaatattgttgacaggcattgcatcagaacgttgttgaaaattggtcggtatattcttctgacgatttccccacaacgttattcccgagtgattaccgacgatgtatttccgacgggttaccgacgttgttcgtatttctaacgggtctaatttaattatcaattaaatatatatatttttttattaattaacacaaagcatttatagaaattttttgttcaaatattataaaataaatattttaacagtgcatatattatcctacaaaagaaaatcaaattgtttgacaaaacaacaaaattaaatttaaacaaatgcatttatagaccattgggaaaatcagaaaattttg

SEQ ID NO: 16491 - DNA, 519 bp, Arabidopsis thaliana
taaaaaatactgtttcagctcttgatatttcttttgagtcctatatatcagcttaaccctgtctcaatataggttggaggccacactgaaacagaacttgaggacagaaaactaagaatagaggacgcgaagaatgctacatttgcagccatgagagaaggtatagttccaggtggtggtgctacttatatccatcttttagatgagataccgagaatcaagaagaatctaatggaagattcatacgaacaaataggtgcagatattgtagcaatggtatgaaaacgtaatgacaaaacaaaacatgttttcttaaccatactggattcgtaaagtaaccttttaagagtgaaaaatcactttaatttttttgtttgcaggcactcactgcacctgcaatggccatagcaaccaatgctggggttgatggatcagttgtggtgcagaaaaccagagaactcgaatggagaagtggttcaacgcaatgtctggaaagtatgaggatcttctaaacgctgg

SEQ ID NO: 16492 - DNA, 616 bp, Arabidopsis thaliana
tgatccattggctgctcatgagataagccatggaaaggatgctggccaactaaagcaaagtagccatgcttcagctcatagtcgttcctctaaaatggtgagggtacaatcgctgatcgattagcatagaacaggtctggcttgttgaaattcccaagagtacgacgtggttccgcagctggaggaatagctgcaggaatgtggtgttgctgtcgatcgacacctctattgtgtcgttcgacaccgattgcatctgcgtgctgctcccgatggtgtcgatcgacacccagttggtatcgctcgacaccgagccctgctgcgtctctagtagctaattgcgcattgaggcacgcctgatcctcattggcgtcctcgggtaggatgagtccatgatcatccaatctctaaccagcctcattgtaggcttgcccatcctcatctctcaaaactccttctgcatcagctctgatgactctgtcagcgattgctaattttttagttttttggttgatgcgttcaagttctccctagtccagaacagacaagttgataagctccttctgttttgtgctccttgtttgcctaggcatacacatgggacacagctatgaccatg

SEQ ID NO: 16493 - DNA, 1161 bp, Arabidopsis thaliana
gttctggtctctgtctagctcacctcatgcaataatttgtttttcttttgatcatttaaaaataacttttcaagggaaatatatataccacaaacctattttgtttagtttttaattactagtttattagactatagagagcagatttatttttctttttggtgtcctatgataaaagatcttaaatctttaatcacaaactgtttcttatataagcgttacttaaatcagtttcatcagttttgggcacataaagtaacttttgataaacaaaattgtagaaaaatgggtaagagaaactgatgataaatccaaatctcaaaatcttaatcctaccaaaaaaaaaaaaaaaaaaaattattaatagaaaagttggaaaattggaaaaaaccctagatgtctttacttgttctatattaatacaacattgagagggaaaagaaaaagaaaaaaaccctatcgtctctgcgctccatttttctctccttgcactaagcttctctctccctatctctctcgcgtacggtgattgtttgtttaggtctgggcaggtactgtcacctaatggcatctgaatccaatagctttgcgaaaagagatcgtcttctcgagattgaggtagcagttcgaaagtggtgggaggatgaggatgttttcagggctgaatctcgtgatcatcttccaaagccaggagaaaagttcttctccactttcccttttccctatatgaatggttatctacacattgggcatgctttctcactctccaaggttgattttgcttctgcttaccatagactaagaggtgccaatgtgcttcttccttttggtttccactgtactggtatgcctattaaggcttccgcggataagctttctcgtgagatcctacagtttggagaccctcctgtcttccctgctcaagataacctagctcctcaagttcacgaggagggcagtgatacaccggctttaacgggtcagttcaagggaaagaagtctaaggtggctgcgaaatctggtggacaggtttatcagtggcagacgatgcgcagttttggtcttactgacagtgagattgcaagatttcgggatccagatgaatggttgtatactttcccctttggctgttgaagattcaaggcatatggattgggctgt

SEQ ID NO: 16494 - DNA, 897 bp, Arabidopsis thaliana columbia
tatttcaagtacttttgagtgggttctttgtgtctgactctgttcactccattgatcttgcacaatgggattgagactttgtaggaaccctactgagaactccttgaggagaagcaaccttgatcgatctttcactgcaaaatgcaatcttctttgatgagatgaagaggaggcctgcgatgggacctgctgttgtggatagatagcattggtacgccttgaagagtttctcttgatcgcagaccttgaagagtcgcttataaatcttctctaagcctcccatttgaaggatcttagctcccaaggatagctttctcttgactgtttcagttagctttggtcctagtttgtcctgatctctagctccgtttgtgaagctatcggttttcttctttcgcagcatcgattttcctttgcctgtcaaatatgaaacctttgaagaagttgggatttggtggttgttgatggaagctgggtcaggcaagtaactcatcgtatcagtcttggctgcaggaaatgcaataacttgttggtgaactctgctcagtgtcatcttggaggattgagtagtgatcttgattcttgattttgtgaaagagaaagagagagagagattgtgagtgatggttgatgatgaaaccgtgtaagtgggaaggtatttaaagggaaaaacaaagagacaagaggcagttgaaacgaagctctgaattgagaccctttgtggtaaaggatgagtcatgtatgggtcatcaagccacctagataaagctactttcttttgtgggcatatgtactctgtttggcttaggtttcaactactaaatcctgttatgacacagttttgtctaaagtaaatttcagtaactgatgaaatgttttagggttttgcttttgatt

SEQ ID NO: 16495 - DNA, 713 bp, Arabidopsis thaliana
  unsure (1)..(713): unsure at all n locations
tagtaacgcccgccagtgtgctctaaaggccgaaatgccggttgatacccgtactcatcagccgttcggtttactacatggcggcgcgtcggcggcgctggcggaaacgctgggatcgatggccggatttatgatgacccgcgacggacagtgtgtggtaggcacagaacttaatgcaacacaccatcgcccggtgtctgagggaaaggtacgcggcgtctgccagccgctgcatcttggtcggcaaaatcagagctgggaaatcgtcgttttcgatgaacaggggcggcgttgctgcacttgtcggctgggtacggcagttttgggatgaacccgacagaattagatgagattgcaggaaaactcggttaacggagtgatcgagttaacattgttaagttaaatattggtttcaactccgatttacatggttgctgtgttgttaaattgtacaaagatgttatagaaacaaaatgtaacatctctatggacacgcacacggataacaactatgaacaaatcagggaaatacctcgtctggacagtgctctctgtaatgggagcatttgctctgggatacattgctttaaatcgtggggaacagatcaacgcgctgtggattgtggtggcgtcggtctgtatctatctgatcgcttaccgtttttatgggctgtatatcgcanaaatgtgctggcggttgaccgacgcgtatg

SEQ ID NO: 16496 - DNA, 811 bp, Arabidopsis thaliana
tatcccctaaaatataacaactattagtaattttttaaaaattatacaaaaatgtatgctatgaaacaaaccttacctcaagaaccatgcggttaattttttctcgggcctggacgttggatggtgaggatccatcatcattttggggaagctgtgtgaggcactccgtcttccttctcttcaatgtctcaacaagacccgcgatgtaaccgtcttgaattaatccagttttcttgttggtgtgtgtatcctcaatgatttctacaaaatcaggtttcacacctccgttcttctccgtctataaatcaaataaaaaaatatagttaaattaaaagaaaacatgaaattaaataagagtaaaagacttaccaattcgtctgtacgacttaagaagctcgtcgaactcgcatggtgcaccgccatacctttcccaccacgtttgcttctcttccccatgatcaacaccatgcattatccaatcgaagaattcttcctttgagattgcatctaaccggaacgcaggaattgttcattttccatttaccataatatgaagcttcttcttcgaacaaatgtcttgcaagtctagtctagactttaaattatggttcgtcttacctggcacatttaagactgtattcatcatgttgtcatgcatgttcttctcaatgtgcataacatctagattatgtctcaacaaaagatccttccaatatggcaattcccagaaaattctcttcttatgccaattgtgattaactcatagccatcaacaagatcatgcccattaccaccaacctcaattgatgta

SEQ ID NO: 16497 - DNA, 387 bp, Arabidopsis thaliana columbia
agaaagaggcgcgaacgtgagtccaaggttgccacacgccgagacgtctgggacggggtctcacccttcctcctcctcctaccattacatctccttcttctcgatctggcagcgaaaagatcgatcgaagtgcgacccctcgataagaggaagttgagcccttgggtactacccctaaatcaaagaccgttcttgtccctcaaaccaagtcacttacaggttagaactatcatgtcatttttttgtatcattcaaacccttaataactcattcgtcatcctttacttccatagcgatgaagacagagggtaatgtcttccgatgcttcaagacacggaaggacactatcttgccaacctttgatagatggcgtcctgcaattcgaga

SEQ ID NO: 16498 - DNA, 729 bp, Arabidopsis thaliana
  unsure (1)..(729): unsure at all n locations
gggaattgcacgaagcttggattagatgaaagtaaggttaaattgcaaatgaagtacaatgcaatgatgttaggaccaacttaagagatttacattagtgatgatgaggatgtcagtgtctatatatctttaggtgaaatggttagtaaacctttgactgttgacgtcatcactccaccagaattgcccgagaaactgtcgagagtggaggtgctcaataaaagttttattggtaagaactatgctgatttggattcaaatgaggatgaaataagagataatgctgccatcgtgatgggcgaattggaggaacaaggaataaaacaaaatgaggcaatggcaatagtggaggttgatgatactcaaaattttgagattggatcacgtgatgaatgtgatgatagagatggtgatgataggggtgatgaatacgttgagccaccgcctgttgtagaatttagtcagtttaaaaaagaatgggaagacggtattggtttgactttgcaacaataatttccaagcagggcagcattgtaggaagtggtggacaaaggtgcatttgctaacagttttggttatgttattanaaagtctgataaggagcggtatgtcgtaacatgttctaaaaaaaattgtggttggcgatacgagcttcaaatattcgggatacaagtattactcgtatagaaagtccacgagatgcatatttgttccgaattagtatgagta

SEQ ID NO: 16499 - DNA, 446 bp, Arabidopsis thaliana columbia
acttttttttttaaaactcaaaagccaaaaaagctatgaaagaaccggtaatcgaatacatccacattgaaccggaccagaagatcaacgcttttaccgcagaaaatcttttgaccattagcacctgcaaggaacaaagcaaaaaggcagtgatgatgatgatggttttgaattatgatgatgatgtggttaagaggtggacattacgtacatcggttaaagatttctacggctaactgcaagattatctcgctttctaattctagcaactgggcgtgtttatctgttagttcttgtgcctcttttgcttggaactccaagtgttctgcctcggcgattaattttgctactgcgtccatgtgaggattttcttctggtgcccttggtacgagagaagtacagaggaaaatcatttgaccattagcacctgcaaggaacaaagcaaa

SEQ ID NO: 16500 - DNA, 511 bp, Arabidopsis thaliana columbia
atctcctttgaaaagagaaagacgcctttcttccccactcctacagaaaatccaagaagattagaaactcaagtagtagatgaaacccaaaacttgcataataccccaaacgtcagacaaaattggattaagctgtaactgacccgttactttttgatcggagacccatagttcggcacatctgatgaataatgccacgttcgctatttgtaagttgctgctcaaagacgtaagctacacaatagaaagccaacacactttccaattcaaccaaacagaaaaagacagaacattccgatagatagaaatcaccaaagctaactataactttaaaaccattgcaagtagagagtatcggagctcatctgaagattagcagaagaaacacaattaagaacaaaggaagaaactttttaaattccttgggtcgaagaggtaaactcacaatcgttcccggagcgcgaaaatctcaaggccttggtggcccagcccagtggcttgcagagacgag

SEQ ID NO: 16501 - DNA, 937 bp, Arabidopsis thaliana
agcaggatccctagatagcaagtgaatggaataatgcaaaagcataatatagaatcagaaaactcaccaaccaacatgtgagggttaagctcaccactttggatttttgaaaatgacgcccaagtcctgaagtagcagctacttggctgagacaacttcaagtaggttccctcaagacttggagaagcatcaagatagccttcttgaagaatttctacaatgatgctaagtctgaggagttgagaaacaagctgtgtaccttcacacaaggtccagctgaagctttcaaggctgcttgggttcgttacaagcagtaccaacgagattgtccacatcatggtttcagtgaggtacaacttctaagtaccttcttcagaggagttgattggagataccagatggctctaaatgtagcgagcaatggtaacttcaacacacgttacccagttgacgtacaaccctaatagagaacctcgcttgtagcaacagtaccaagaatgctgattttgagaggaagaagattgctggagctattgataataggtttttaaaatcaattatcctaaaacaccaatcatgtcgttgtagtattttaggttgtcaatccaaatgggtgtgatgcgaacaatcaagatgtgatcagaagtcactaagtcaagccaagcaataacaggttttggtgtgttctagcagttctaagtgaacatgcagaaaacaaaaattcaagcagaaacaataaaacactccaccaacacagctctttgcagagcactgggtgaggtcgagtgataggtcgactaacagacagaaagtatgacacagatcctcgactgcacagtctgctgccaaacaactaggtggtcgagtataaggtcgagtaacaaaaaagaattacagaaactaagcagcagatgacaggatacagttaacagcagtg

SEQ ID NO: 16502 - DNA, 911 bp, Arabidopsis thaliana columbia
gttaaaatatttcagagtaaaaagatttagaaatcaaatttcaagaaaatttgaagtagaaaaaatgaagttcaactttaaaccgaagcgagagtttaaaattgaagtgggagtatagatatacagaccccactccaccctatttttttgtggggctagctgaactcgtccggagacaaccaacccgtagttcaagttatggtgaaaaggccgaagctctttttttactcgatagaagagtttattttttactcggtagaggagtcttttcgctcggtagacgagtgtttttgctcagtagatgagtctttttcctcaatagactagtatttttgcttggtagacgagtgtttttgcaagtttacacaaaaaatataacatagaatgcatatatatgattgagttgtgcttgttagattttaatagataacacttatgttattggtttggagataaagatgatgacatctacgacatggacgatctgaatctcggtgcgcttgatgactgtctattgagctcagttgactgtgtcctgatgcgattcagatgttttctgaagcattctcacaatcggctcgggctgtgttcataagattaacatccgcgcaattttacgacctctctctgaaacggttgatcgaataaggtcccgaggtgctttgttctaggctaggggcaaatcatatgtttaaccatgaagtgattgttattcttagactgtttggctcggtcttgcttgtggtggaatccgaccccaacacctctcagacacaccatcatcattaactcacggtttttgtttttaaacctaagctctctataaataagaagccatcattgaactccttccttcacaaaccattactctctagatttttaagaatcttgacgatggcaaatgaaggagt

SEQ ID NO: 16503 - DNA, 720 bp, Arabidopsis thaliana
agtcatacatttttatatactgtaagagctattcctagagccaatcccctaaaaacgcattccggatgttgattagtgaaatactaaagcaagacaaaatgcacccctcttaaccaaaaatatccttactgtacattaccttattatcttctcatgttgtgtctcatgagcataagcgagcatctcacttgccttttcagtagcagttccaaccaataataaacccatgctgatgccagcagcttcaccagcaactgcactgtcagtataaagcacgcttttgacatcatcatatatctcttcatcagctgtcccgagagctgacaagccaagacctaaacaagctccatgttgaatgacctgcatccatatttttccaataagtattaattaggctgccagggaatatgagagactatattgaagtaagatattaattaatcacctcaacattagtgctgcgtaggctatcacgtagaaattgcttgattccctcgccatggttagcatgaataaggccaagagcatataaagcacctccttcggaataaggactcccaccaccacctgctcctccctgaggcaagtatggagccatcaatgacctaccctgttgcaggtgacctctgtgaataacacctaatcccgcggtagactgaacttagccaattggttgcctgcttagcaacctggcattaaaaaaaagaatgatgaagaaag

SEQ ID NO: 16504 - DNA, 531 bp, Arabidopsis thaliana columbia
tggtttctacttgtaggatcatgtcaaggccacatttacttgaactattaaagataaaccggatccttctaaaccccattactcatttcatttaataccaaatccggactatattattctaagccatctcctccctgttcagttcctagatttgaatttgaagaacctgtttacggatgacttaaatcacagaaaagatggaatagttactgacttgtagtgagtaggagacatggtagaaaagaaaacttttgtcctcaaaggatccatactcttcttcacccatttacccatggtcatcagatatgcatcttcgctctccatctcaacgattctcttgttccatccttgaaagaactttcgcttcgaataacacaaattgcagaaactatcaaatcgcgagtattgggggtataccaataagatttgagaacctatcactaggaatattgagaagagtttagatttcatgattggtacatcaagatcttcattctgaagctagctagtcctccacacaagtatatgttg

SEQ ID NO: 16505 - DNA, 455 bp, Arabidopsis thaliana columbia
tcacaaacaaggtcttaaatcttatgttttaacaccgaataagaagccaagtgggctaaattggggctacggaaactgagtgagacaatactaatgggctatattggacccatggaaatggtccagtaaagcttctaattgacttaataaggttgattgttttattactaaacaagaaaaatggatgtttcagttttcttgctagttctttgttacactagctcttaaactctctcgcttaaatcaaactgtaaccacaatcttatatcataaaggagatagctttgtcaacttgataaagccaatgattatccatctctgactccatcttcttgatatcatagagactctcaatgttgctctgtctcggtctcatggcagccatagcttcttgtataccagctaagatgactgtaatgtctagaggaaggaccataagctccctgatattgttc

SEQ ID NO: 16506 - DNA, 448 bp, Arabidopsis thaliana columbia
ccaccatcacttaccctttctcgcctctcctgaaatcaaaatcccattatgcaaatccattttcatcatcatcaatatcatcaccaacttcattctcatcatccatggcccatttctcatctatgtagattctcatctctctacctcctcctcattttctcctcttgattcactaattcttcttcttcttcgtcttttcagacatgactcttccttatcgtttctcttccgttagataccactcacttcgacttaagacttctcatctctgcacacccagatcagctcttggttgttgtctctctcccaaggaatcccctttcttcaggaagaatactgcccaattcctttctcctcagaaacacacttctcttcctctgaaacttgtctgccctttagctagtttctcttcgtatgcggattctgacggagaagagcaacaccatgc

SEQ ID NO: 16507 - DNA, 622 bp, Arabidopsis thaliana columbia
ctaatctatgggttagacttgataatgattgtggcattacagcttgtcattctaatttgaattgcagatatattggctgcagctcatgctatcttccagactcataatgtaagaacttgatcatgcatatatcgaatctcaatcctatctaatttccagccatggtagtttcctttttcctaatgtttggctcttttgtaggatggaactggaaaggcaaatgaaattcttggtaacacataacacagcattttttctcattaacacaagaatgacgggaagatattgaaaccgtttttgtccatcgcagatacagttatgaataattatatcaaaactatgactgatgatgacgacaaggaggttgttgctcaggcttgcatcagtgttgccgatatcatgaaggattatggttaccagccattcaaaagtgtgggtatctattcttgttggagtcaatttgatgtaaattattttcaggatatttaaatgatccttactcatgtatcatatgctgacaatggttctagatttatcacccttgttgatgcgacattgctactgctgacggaaaaagcagcttgctagcagttagaagatgagagtgatattgatgatgatg

SEQ ID NO: 16508 - DNA, 579 bp, Arabidopsis thaliana columbia
  unsure (1)..(579): unsure at all n locations
nnnnnnnnnnnnnnnnnnnnnnctaaagcattctcccctgaactggtggtgctgtttgcgccagatcactacaacggctttttctatgacgtgatgccaccgttctgtttaggcgttggagcgacggcaattggtgatttcggcagtgcggcaggagagctgcccgtgcctgtggagctggcggagcctgtgcgcatgccgtcatgaagagcgggatcgatcttgccgtttcttactgtatgcaggtggaccacgggttcgcccagccgctggagttcctgctcggtgggctggataaggtgccagttctgcctgtgttcatcaacggtgtcgccacgccgctgcccggtttccagcgtacccgcatggttgggtgaagccattggacgtttcaccagcactctcaataaacgcgtgctgttcctgggttccggtgggcttcccatcagccgccggtgccgaactggcgaaacggatgcccatatgcgcgaccgtctgttggggagcgggaaagatttccggccagtgagcgcgaattgcgtcacgaacgggtgattagcgctgctgagaagtttgttg

SEQ ID NO: 16509 - DNA, 518 bp, Arabidopsis thaliana columbia
aacgttctctaccaagaatacgtggaaccacatcagagctctctctcccacagttccctggcgtctggttcaatcatggcaaacctaagtattcgttttgtatttggcttgcggtgcaagatagactatcaaccggggagcatatgttttatatggaacagaagagcctcaaggcactgtgtgttatgtacgaacactatggaaactcgggatcatttgttcttttcatgcaattatgtctcgataatatgggctgcggtagtaagaagttaatgaagtccagatacacgatggaatggtcacaaattttggctcacgtctccgataaatctttctaccgagtggatggtttcctaatccggtatgtagtccaagctacggtacacatagtttggagagagagaaattgacgacgtcacggagaaacaccgaattccccaacacaactgataggttggatagataagcaagtccgaaaccagctcaccaccaatcgacgtacgggagatcgacaatac

SEQ ID NO: 16510 - DNA, 843 bp, Arabidopsis thaliana columbia
aatgtgctgtaaaggctgatcaagcaaggtttggtgacatgggaacgtgaacgaatgagagctgttttctccactttcttatgaaaccacccatttgtaatgcttcgatctgaatgaggctatcaccactcgatacctatccttctctcttcgtttctaaaattggtgaaactgttgcttgacacgagatctgcgactccctgtgtgttgcttttccttcgccagatttacagccatcgaattgaatctatcctctccaagatacaatttatttctcggagaacgaactcgaaaggctagatgtaaagattgagaacgatggtctttcttcatttttctttttcgaaccttgtggtaacttcccttgacaagaatcattttgtttctgagaattttagctgtaatgggaaccttagaggtccaaaattcgccagaagcatcgtgagattgaacacccaccatatgttcgacgaaattactcacagaaaaagttgagtttaagacatcatggaggaggtgtcgaagttgaatgttgaggatgttgatggaatcttgcaaccacagcatctccttatcacggcgtgcttctcgttcttcggttgtctcttgcgtttgtggtgtaccagtcacacccgtgactcgagttcaaatgtatttggtgtactagacatactctcaatgaaagcaccaattgataacacccaaaatgggctatcaaataagtaacagaaaagagatgagaaaatagaagaaatagaggttgaggtgaagaatcagagatgagaagagaagaaagaaggagagaagacatgatttgtttttattgatctttgatatgttata

SEQ ID NO: 16511 - DNA, 978 bp, Arabidopsis thaliana
tggcaagtagccaactcttaccatacaaagccatatcgccggttaatgatgcaaacttggggtgcaaaggttcatccgtcgccatcggatctcactgaggcgggtagaagaatcctcgaatccgatccatcaagtccgggaagtttaggcattgcgatatcagaagcggttgaagttgcagcgagaaacgaggatacaaaatactgcctagggagtgtattgaaccatgtgttgttacaccaaacaattattggagaagaatgcattcaacaaatggagaattttggtgaaacacctgacctgatcatagggtgtactggtggaggatcaaattttgctggtttgagttttccttttatccgggagaaactcaaaggcaaaatcaaccctgttataagagcggttgagccatctgcttgtccttccttgaccaaaggggtttatgcttatgattttggcgatacggctggattgactcctttgatgaagatgcatactttgggacatgacttcattcctgatcctatccatgccggtaataaaataagctttaaactaactatcttaaacaaaacgcttcttgattctcaatattctgttttcttgatttcttggatctttggttcttgattcttgaaacctgaatcttttatttttggcttaattttgttgtattatacgtctatggttgttggcaggtggattaaggtaccatgggatggcaccattgatctcacatgtttatgaacaaggattcatggaagcaatttcaattcctcaaattgagtgtttccaaggtggttcttcgatcgctgaaattcctcaaatctcatttaacttttgcatttgattgtaatacaaacttttcatgtttaattgtctttcaggtgctattcagtttgcaagaacagaagggatcatacccgcaccagaaccgacccacgccattgctgcaaccataagagaggctctccgatg

SEQ ID NO: 16512 - DNA, 481 bp, Arabidopsis thaliana columbia
tgtcaagactttgctaaaatctgcattactttttatggatttcttagtgcagcaagactacgaatttgaaatcggccatctgaaaaggttcagttttcgcgaaatacaaaccgcaacaagcaattttagtccaaagaacattttgggacaaggagggtttgggatggtttataaagggtatctcccaaatggaactgtggtggcagttaaaagattgaaagatccgatttatacaggagaagttcagtttcaaaccgaagtagagatgattggcttagctgttcaccgtaaccttttacgcctctttggattctgtatgaccccggaagagagaatgcttgtgtatccgtacatgccaaatggaagcgtacgtgatcgtctgagaggttttcaattaacacatttcttgttttgttattctttcgatatataacgcgaaaagttccttataagattacatgtttcagacaattatggagaa

SEQ ID NO: 16513 - DNA, 865 bp, Arabidopsis thaliana
  unsure (1)..(865): unsure at all n locations
tgtcaaaagtaaaacctcacaatacactttaaactacaaatcaaaacaatggcctctctattctcttcagttctcttgtctctttgtttactctcttcactttttctctcaaatgcaaacgctaagccaaaactaggcttcaccgcagatctaatccaccgtgattctcctaaatcgccgttctataacccgatggaaacctcttcccagcgtctacgaaacgcgatccaccgatccgttaaccgtgttttccatttcactgaaaaggataacacaccacaaccacagattgacctcacctcaaatagcggtgaatatctcatgaacgtatccattggaacacctcctttcccgatcatggccatcgccgacaccggaagtgatctcctctggacgcagtgcgcaccatgcgatgattgttacactcaagttgatcctctctttgaccctaaaacgtcttccacatacaaagacgtttcttgctcctcaagtcaatgtactgccctagaaaatcaagcctcttgttccacaaatgacaacacttgttcttactcattgtcttacggggataactcatacacaaagggtaacatcgccgtggataccttaacgctcggctccagcgatacccgccctatgcagcttaagaatattattatcggttgtggtcacaacaacgctggaacgtttaacaagaaaggctctggaatcgtcggactaggtggtggtccggtttcgcttatcaagcaacttggcgactccatcgacggtaaattctcatactgcttggttcctctaacttccaaaaaggatcaaacgagtanaatcaacttcggagcgaatgccatcgtgtcgggatcaggag

SEQ ID NO: 16514 - DNA, 522 bp, Arabidopsis thaliana columbia
cgccagtgtgctctaaagaacagcattaccgccgccgccgccgacgccgatgactttaatcaccgcgtcattggtaagttccattggttcaaacatagtttctctccgatttgtgcctgtcgcctgaggccgtaatcatcgtcggcctcataaaaattaaaactcttttcgcagccaactattgagtcgcttgatccacgagccaactgatgctgtaacacgtttttctacttcagcttcaccgttaagatgtgactctttcccatagtgaagcaatcccaccgccgtcgaataatacggctcctgagcataatccgttaaaccggtaatgttcagcggcgcgccgatatgcacttgcgtatgaaacacgcgctgagcacaggctgcaagaccttcgatctgcgctgcgccaccggttaatacaatgcctgccgccaggtgatgtttaaccccttgttggcgaacgtttcctgcaactgcaatatctcttcgttgaccaggttgagcagctcggtatagcgc

SEQ ID NO: 16515 - DNA, 427 bp, Arabidopsis thaliana columbia
ccacaatatgcttaagtcattctgctacaaatttgccattcgctttggatgaccttgttttccatatcctatgataaaaattcattattaatatatcaaccaattgttcaaagctcagtaaaaaaatctaatagagttaggattttcttttttgttcacttactttccagcttgcgatcgctaagcatatgaaagcaacggagctgacatatcttgatggattcaccttaacctaattaatgaagaaacttgaaaaatatcaaacgttattcaatgttatatattaacaaagccaaaagtaaagagagaaataccatttcacataacccttgaaatgcattttcttttgtactgtcatcatctaacctgaaaagaaagtacgatcagaaattgttttatagagccgaggttggaagagtatgtaaag

SEQ ID NO: 16516 - DNA, 986 bp, Arabidopsis thaliana
tcgaatcgcttcttgagaaatgtgacatccttctgcttggtggtggaatgatctttacattctacaaggcgcaaggtctttccgttggctcctcccttgttgaagaagacaagcttgaattggctacaacactccttgccaaggctaaggccagaggagtctctctgttgttaccaacagatgttgtgattgctgacaagttcgctcctgatgccaacagcaaggttcgtctccaataactattgctaaaagcttggcattcttggttgacagaaagattgaaaaatggttttgttttttaagactggatgtgttgagggtactgagtgtaatgtgaatgttgtagattgtgccagcatcagccattcctgatgggtggatgggattggacatcggtccagactcggtgaaaacattcaacgaagctctggataccacgcagacagtcatttggaatggaccaatgggagttttcgagtttgaaaagtttgcaaaaggaactgaggtgcatataattctctgactcttatatactgttagttgactctttgttggactaatatgtagcatggttgaatggcgcaggcggtagcgaataaactagcagagctaagcaaaaagggagtgacaacgataataggaggaggagactcggtggcagcagtggagaaagtgggagtagcaggagtcatgagtcacatctccacaggtggtggtgccagtttggagctcttggaaggcaaagtgcttcccggtgtcgtcgctcttgatgaagcaacgccagtcactgtttaacaacatctctgtattacacctgaaggacccccctaaatgagtttcttcttcttattctgttgtaaatcaaagtctttgttgtaccatcaaatccatagagaggagggactctttttgtctcaaataaaatcaaatacagtgacattcgttattttgagcaaaacatcaatcaactgctcgaaatcatttta

SEQ ID NO: 16517 - DNA, 601 bp, Arabidopsis thaliana columbia
ctggccattcttgtttttcacatacttgctcaagtctagatcatgaactgggaaattcacaaacgtatcaatcttgttcttcagatatctgctgtaagtgaacctttttaaatgaaacacaagaatatctggtaacttccacaggtctagctttttgttcgcttgtctgtgttctttgcagctcggacaaaacctgattcagaaccgtaagaaagagggtcaaagctaaatcttaaaatgaatatatcagtccatgtgattttaagttcaggctacgagttataccacatgtcatctggtcccagaggttcttctgctaaaaaagcctccaaacacgaaaacagggatatcgattcttgccttgtcttctttgcagagaaacttgttttatgaacctctggaagatcactcaagtagctggaatcatatctttcatgctcaccctcattccactcgactaaaactcttgtaacggtacccgggcttatagaagattcagactgcagtggtttaatgttcaaccacgttcatctgtcaagaatatcctgaaggatactctctatcagatggattgtctatctcggtatctggggatgataaa

SEQ ID NO: 16518 - DNA, 653 bp, Arabidopsis thaliana
ctcatcagaggtcatactttggtagagctccacttgcagcgtggagaggaattgaattgtctcatcttcatatgctatatacggataagccatcagagtgtccagatggcaactctggtacaggtgctgaacatcctccaacagtccgagttgtgcaagtgtggtcgagcaaggatacctcgtgctacataactcattcagcttgaagagcctaatatattcctcagcaggcaatacatcgggcttgtgcagaagtttagtggctctgcgattatgctcaggcatgtactcgtcttccagatcctcatatataagctcatacctctctatcatcgctctcttccctcgggctatctcagcttttcttctgaagttttcatattctctctattctctctctggctttgaagatgacgactctgtctcatccatgttgtagtcaggatcaacagaagaactgccactataattgctcatgattccctcgaattgaatcgattcgagtggtaaccgttggttgagtaaactctctgaagtcgagtgaatggttgcagaggtcgagtacttcttcggtgaagcttagaggtcgagtgacatgggaaatgaactggtgacggcggcgcggaggttgagtggtttttggtggtcgagtg

SEQ ID NO: 16519 - DNA, 896 bp, Arabidopsis thaliana
aatagttgagaacttgcaacggtgtgcattttgtgatgcttattggcaataccatcatatttagaacattgtgcatttcctggcctttgattagaaagaggctttaaatgttgcttggtggtttgtgtgcaaaaagtttctttgttaacttggtagatgtttcccgaacaatcagttttacctgtcgtatactatgattggggtttaagagtattttactaagagcatttttgagctttcttgtgagaataggtgcatttcctggcctttgattactaagagaataacatcatatttagaacattgtgcatttcctggcctttgattactaagagaataccatcatatttagaacattgtgcatttcctggcctttgattagaaagaggctttaaatgttgcttggtggtttgtgtgcaagaagtttctttgttaacttggtagatgatttccgaacaatcagttttacttgtcgaatcgtcgtccttttaaatgagatatactatgattggggttagtagtgtaaggatattttactaagagcatttttgagctttcttgcatttgaaaacttgacatattacttgtgtttaagataattggtttatatatcttcctgatcttgttgacaatattagtgttcataaagttatactcggaactcttgcgttacaaaatctgaagttgtgtccaattttggtttgattgcaggttgtatcaccacaaaggagcttgggactgtgatgagatcacttgggcagaacccgacagaagccgagctccaggacatgatcaacgaagtggatgcagacgggaacgggacaatagatttcccagagttcctgaacctaatggcacgtaagatgaaagacactgattcagaggcagagcttaag

SEQ ID NO: 16520 - DNA, 536 bp, Arabidopsis thaliana columbia
  unsure (1)..(536): unsure at all n locations
nnnnnnnnnnnnnnnnnnnnctaaaggtgctggcaggggataacgaacaacagcaacgtcttgaacaggcgctgatgaccccggacaccgacgaatattacaacgcggcagattatgagctggcaggagaaaatcaacgcggcgctcgatgcgcggcgtgctgccgatgccctgcgtcgccgttatccggtggcgcaaggagccggacgctggctggtggcggatgatcgccagtatctgaacttttccagtaacgattatttaggtttaagccatcatccgcaaattatccgtgcctggcagcagggggcggacgaatttggcatcggtagcggcggctccggtcacgtcagcggttatagcgtggtgcatcaggcactggaagaagagctggccgagtggcttggctattcgcgggcactgctgtttatctgtggtttcgccgctaatcaggcagttattgccgcgatgatggcgaaagaggaccgtattgctgccgaccgcgttagccatgcctcattgctggaacgtccagt

SEQ ID NO: 16521 - DNA, 598 bp, Arabidopsis thaliana
atcgataaaaatttatttttgtatcttacaaccgcctaaataggcggccttatctagtattcatataaaatatcataaacaattatcactaacaatttggtatgctctttcatttgtttgaccaaaagaaaaagaagaaagtcttacatttaagtttcaaatatattcatgaccataccaaattgaatttacattcgatggttaactctaaattgtatctttttttttggtgtaaaaactctaaatttgtatcttaatcttaaacttatacttaaaaccattagtgacgtcttctccatttcttctctttactttttttcactaaatcccggaagtgaaacgaactcccgtagagggcaaccaagaaactccatctaggaatttaccgacgctaaaataatttgcttcttcaaacccaatcgaatgaaacccttcccacgtcactctcttggaaattctagctttaggaccataattcttgaactctccaaaatacaacgtctttagtacttcgtctccggagtctaaccacccggcccatcctccctccgcgatcgcgtcgtcaatatatgattccatcactatagccctcgaatac

SEQ ID NO: 16522 - DNA, 579 bp, Arabidopsis thaliana
agccgtcacacgtactgaagagcgaggctggtcgcatcgaggtgtgggaccaccacgctcctcagctccgttgctcaggtgtctcctttgcacgttacatcatcgagtctaagggtctctacttgccctctttctttaacaccgcgaagctctctttcgtggctaagggtacgtacgactctttctatatcgaaattcgaattcatgactttatggttcatgctctttaggattagtccataatctttcaactttaattaaacctatataatttatgtgttacattcttaggacgaggtcttatgggaaaagtgatccctggatgcgccgaaacattccaagactcatcagagttccaaccacgcttcgaaggtcaaggtcaaagccagaggttccgtgacatgcaccagaaagtggagcacattaggagcggtgataccattgccacaacacccggtgtagcacagtggttctacaacgacggacaggaaccacttgtcatcgtcagcgtcttcgatctagccagtcaccagaaccagcttgacacaattcatggccatgaaactaaatctcagataa

SEQ ID NO: 16523 - DNA, 764 bp, Arabidopsis thaliana
gagatcatttaagagcaactgtggtaaatcgacagctcgaggcctcccttgcgtagaactgtatctgctcttcacaacactttataattagcatgtttattgtagttctttcgagagttaatgtcacacgtatgtgtggtagcatacaatgcgattttgaaactttctgaatctttgacgacgtgagcagtcaaatgccatagacaagtatcatcaacgcataccatcttcaatattttaggacatgacttaggttgcttgaagcaaaagcattgcttgatcgcttgataagacattgtttgttgaaggacttttctgttcttaaaaacactccccacatacaaagtttcacatgtggtgctgagttcaacatgtgtctcatcggctcaaaaattgagtaaatcatcgaacaccggagcaacatcgttaccgagaatcgccaactcaccaccatgtaatgtagaaaattcattatacacttggtaagcctcaactgtggtaactacccgattatcatttagtgtcctagttgcggaactctaataccacggtcgatgacttcatccctggtgacatcgtctataccaataagattggtatccgtgttaccttcgcagcgtctaccgtcacccaatggagaaattgtatctctgccaggtacactcttccaatagacgactgaattccctagatgttgagcagtctgttgagtgagaatgacgtcttcctcaacattttttattccatatttttctacaattaca

SEQ ID NO: 16524 - DNA, 275 bp, Arabidopsis thaliana columbia
acttttcacctgaaacaagactcaaaatctctgttagtccatgtttcaaagaattaaaaagctccaaagtgaagatgttggaagtttacgtgaatgttgttatgagctaagtaaggccagaaggtggagtggaagctgacatcaactttcttccaccccaacctctgcagaccgcggatcatttcctctgcaccaatatttgtataaattgtaaatctcatgccgatttagaagaatcaatcaaatgtttgggctaattctacaccttccacaat

SEQ ID NO: 16525 - DNA, 499 bp, Arabidopsis thaliana columbia
gatttggtttcaattttttttcattttttctgagttcaattcgagaaaatcataaaaataatatatggatacctaagaaaaccaaacattttttatatggacctagctcgggaagttattaaagcacatgcggtggtaggagtgtctcggagattagtgggcagagaagatagactaatctcatggagtagaccaagtgaaggttggtgcacgctgaatacagacggagcgtcaagaggcaatcccggattagcggcggcaggaggggtcttacaggagagcaatggggaatggcgcagagggtttgcaattaatatcgggatatgctcaacacctcttgctgagttatggggtgtatactacgggttattcatgtcctgggagtgtaaagtatcccgattagagttagaggtggactcggaggttgttgttgggtttcttcggactagggataagtgaatctcacccgctgtccattctaatacgcatgtgctatggc

SEQ ID NO: 16526 - DNA, 592 bp, Arabidopsis thaliana columbia
agaggatcagcctggtagtctgtacagttggaacaagacacaagctccctgaatgtctcggacgaaggaaaccaagcttccaaatcgtactttttcgcagctgcatcattcaatgctccagagacgatcgagacgatttggtatggaagttttagctgcagagaaaccacacagttgactatttagaaactattaaaatgtataaggtttcttaacttaaggtatcgagattaccgcttggtaaaaatcttcagagttcttcatcatctcatcgagcatttcccacgaggcattctcgttagggccggtgatgcaaaactgttcaattttctcaaactggtgaacacggaaaataccaagggtgtctcttccatgtgaaccggcttcttttctaaagcaggatgagtaaccagcatatctggaccaaaaaaatacataatgttggcggattttccaatacattaaagaaacaattgtcttaaagctgcgagtaggtgtactatgtttgtttatccttaggggaagctcagtcggatgaaccattcatcaatatggtacgccaaagaggctgctcagcagttgcaatgaggta

SEQ ID NO: 16527 - DNA, 368 bp, Arabidopsis thaliana
aaccgctccaagcaacaacattgatgtatatctacagccgctgatagatgacctaaaagacttgtggaatgaaggtatggttgtttatgactcattcaagaaggagagtttcactttaagagctatgctgctatggagtatcactgattatccagcattaggtacattagttggttggaaagtgaagggcaagcaagcatgtaaagtttgtgggaaggatacacctcataggtggttaaagtttagctgcaagcatgtttatatgggcaacagaaagcgtttgaggcctgcgcacccttacagacgtaagaaagtgtggtttgacaatacagttgaggttggtactgcaaatagaattcagagtggag

SEQ ID NO: 16528 - DNA, 911 bp, Arabidopsis thaliana
  unsure (1)..(911): unsure at all n locations
ctgttcatcaagagtaatattagcaatgttagtacatgaaccactatccacaattacatgacataccttatcctcgatggtgcaacgggaatggaacaagttatcccttcgctccggttcttccgtggtctgttgggctgagagaaccctttgaatgattagtagctcacctacatcgggatagatggtggttgattcatcggaatgcatcgactccactttgtcttgtgagtcataaccgtcatcgggtgtaacccatgactcgcttgttgggacagtctcttgccatatgacctttcccttggcaattataacaaatcatttcatgtgatctttgagggttagtagacttacctcgttcaacatggtggtcgtttgatttaaaatgtgactcaaccgcaagggattttcctttgtttatggtttgtggagctggtgcttgttgtggtgtgtgataataagtttttaagatcaattatcctaaaacactaatcatatcgttgtagtattttaggttttcaatccaaatgggtgtgatgctaacaatcaagatgtgatcagaagtcactaagtcaagccaaacaataacaagttttggtgtgttctaccagttctgagtgaacatgcagaaaacagaaaatcaagcagaaagagtaaaacactggaccaacacagctcgttgtagagcactgggtgtggtcgagtgacaggtcgagtaacagatagtaaataaaacaaaaatactcgactgcacaatctgttgtcagacaactgggtggtcgagtaccagaacgagtnacaagaaagaattacagaaactanacaacagatgacaagatgcagtaaacaacagtagagtaacaataaaatcaatcagataaagaattcccgaggatggggtaattgagtag

SEQ ID NO: 16529 - DNA, 594 bp, Arabidopsis thaliana
ctcctcatccttgtccgcttcatattcaccagcaatgtgctacatcttctacttgttcttcatcttcatcatcttcttctgcttctttcggcatctcctacaccatagtggcaccatcaccgtgagagactttctgcttctttgtaggagattcagacacagccgctgcatcatcttctacgttagtcttctaattcttctcattcctcttcacatcccaataacctgtaacaaactgattcccatgtctgtattcgaccaagtgatcaagtgttgggtcttttattttatctggccaagtatgaaacagctcgcttacatcatcctttataaccattatacgcacacgcagttacaacataagagattataaaacccatcactaaaccacaactaagtcataactaaactatataagacagccatcatttaacaataacccagccatcaaaaataataactcagccatcaaaattaataactcagccatcagtaactatcataacccaaaccatatacgcctctcagtaggccatgctttgcacactactaagcctcgcctaagttcatctaacttaggaccttcaccggttg

SEQ ID NO: 16530 - DNA, 585 bp, Arabidopsis thaliana columbia
tcgactctgatcccctgactttgatgtgtggtagtacacagccgaagaataaaggaaaacgctaaaaggttgcgcgagtggagagtctgcccgccaagcaacccctagtattcagctttttgtgcactgatccaactcgactcggcctttttctctgagttgactcgaccgagaaaaggcgatagagctggggtttaattcggcgataacaatggacgaagattccgtccatggcgattctcacctcaagacatgtgtcgtcctcggcggacgagggttcattggtcgatcgcttgtctccagattgcttcgtctcggaaactggacagtccgagtcgcagattccggtcacactctccatcttgatgaatccgattcgctcctcgaggatgctctctcctccggccgcgcttcttatcactgcgtcgatgttcgtgataaacctcagatcgttaaaggtttcctcttatttcctgttgcactttgttagatatgacattgatggatcggtttttggtactagaaaatgctatgggggagtgtttggctatttgagatttcgggttctgatttgagttttggtgt

SEQ ID NO: 16531 - DNA, 519 bp, Arabidopsis thaliana columbia
  unsure (1)..(519): unsure at all n locations
nnnnnnnnnnnnnnnnnnnnnnctaaaggtcctgcctccattgccacttcaatggcaagatcgggtttggaagagcgatggatcgctttcgagataattttgcgtagatttatcggtacattttccgggatttgcgccatgcggtcggaacacatcggaaaatccctggcgatacataaaatgttccatatccagcgccggtaacgccgttaaatgttctcgttcggcttcccgatcgttattcaacaggctgcgtaccgtagcggcatatttcttccctgcttcatcgccatcgaccagtacatgccattcaatccccattcggcgggcaaatttaaccagtggctttagcncggactgggcaaactcaatgaccttgatcccttcggcatcaaaatgatgtccgcactgacgcgccagttcattgataacccaggtttccgtttccccttccaccagcaaccagcagcgtgcaaacagcgatgacggacggttaaaacgaatgtgaaaggatatgcg

SEQ ID NO: 16532 - DNA, 402 bp, Arabidopsis thaliana columbia
aattagttgtagggcggaggtgaatataaagccatgggagagtttgttgaaggaactaagagaagggaatgagaggactaaatggattaacagagagccgtatgcttattggaaaggtaatccaatggtcgcagagacacgacaagatcttatgaaatgtaatgtctctgaggaacacccgtggaacgatcgtatgtatgctcaggtaataatgagcaattaacgtttttgagctatgccaaaatcattgaagaaaacagcagtgtttagatttttagtgtatcttgtaggattggatcaaagaatcaaaggaaggctacaagcaatcagacttggcaagccaatgtcatcacaggttctgtagatgttttctagacctttaattcgtagtcaaatatttgg

SEQ ID NO: 16533 - DNA, 983 bp, Arabidopsis thaliana
atcaagaaattattggaactcaaaaacataattaacatagaattatcctaacctgagagactccagctcttgtgccagcagcgtttgcctggccccagttcccagtagcaagagaatatttcaggccagaggtaattgttttagccttaatggcaaattgaagattgacttctttgccattgtcaacgcactgtcaaagaaacatgaatcagacttccaaacacagaataacaacttaatactaaagtctttggctcgagaaagagtaactatgtaagataccttttgaacataagatctcacatcccttgttaactttcggaaaagctgcatgtagagaagatgttaggtcagtaagagataaaaaaaacactgatactcaacaatccccaagagtgtataattgtgtgccgggaacaaaccattctaaatagccctccaagtaaaggaccagcaagatccagccttttgttaccataatgatccctatcatcttctggccttcggcaagtgcacaaagcagcagccggtgtatgatatacctacggatcatagcataatatgagcaacacagaaacatgttaagtctataaacattacaagtgagttaaatacctacccaaaatagtaagctttctttgtctcgcaatgctccccaattcctacatgaggaagcatttctttctgaaggatatctctagcatacctgcaatgataatattgcaatcgcaaacctccagtgtgaacatctcaatagttgacatcttagatcataatgtccaacttaattggtttagattatcacatactttatccttttttccttggttacaccaacagttgcaccacgttttccaatatagtcaagtgcaacgtgaagtaatatgaaagttatcaagtgattgcaagatcaattcctcaagcataataaaatgtcattaaccaagtgaaaaaaaagtggatccagctgattttgaatacga

SEQ ID NO: 16534 - DNA, 509 bp, Arabidopsis thaliana columbia
atgaatgaagcattacgacaatggcttagtgaaagagagacctgatgagatggttctttagatagaatcacacttccaggatgttcaggtgattgcggctttatgggatgatttttcacctacaatcaaacaaacgagttcattcattatcaatgaggaaaagaaatgacattcaaagcttgtgcctttagacttaaatggttggtttaccagcaccgcatgatgtcccagataatctccattggagcatcagttttaatcccaagcgggttcacatgggacccagagacacggtactttgcattgattaccgctgatcgaaacaaagcagctgatggtgaagtacattttagcgttgcagagagactatgcaggctcaaaaagagaggaacatctggcaattcctggagacaagccaaacatttagggatttagagaaattgatcataaccataaactaaagctatcagagtgtggaggagagtttgcctctgagattgtggtaagac

SEQ ID NO: 16535 - DNA, 615 bp, Arabidopsis thaliana
ttaacgagcaatgcctcgatgctgcttgttacctcctcaagcctgtggcctttgctgtgcatgtccagtgtggtttggtacgcaagcaggtgcaatttctccttgatgaagtatttgatcaagatatggaaagtattatagtcgggactaacggcttgctcatccattttcttcatcagtcgcataacactttccatctctcctgctctgcaataggcacagagcattgtgtttaacattaccaagtcgcatttttcataagtggtttcagagtcccttgacagttcttttgcctccttaaaacgcttacttcgacataaagcagatatcatgatgctgttggcatagccatctgaaacaagaaaactgacatcattgttctgaaaaatctgagaaaatatctaaccataaagacacccctagttgtagcaaattgctgactcataagagataggtcttcaaggacagaatgaatttctcaatccaagttattgacaaatcttgaattaaatcaatgaatagtgtttatctcaagatatcattgcaatatattccgatcctatactgaacagcagtgaaagcagcaaccattaaagaggcaagaatgaaatatga

SEQ ID NO: 16536 - DNA, 447 bp, Arabidopsis thaliana columbia
cgactctagcatctatccccgcatgtgggttcatataaacttgtaaccacgaccaacaatttgattgtgattattggagttgttgttggcagttgcgccgctcaccgttcctgaagatatcaccatttgaccttcagctggcccactcatagctccacgaccaacaatttgatggtgattattggtgttattgcccgttgagccattcatcgttcctgaagttaacaccatttgagcttgaactggcccatttatagctccattattcccaaactgctccatctcttgcattttctgtttctgtagcttcactgtcaccgtctgttccaaaagccgtttcaacccctctacataaatgacataagcaggtatcataacattcagattcagtcagaacattttcaccaggagagttacaacgaccagtacatatttcaagtaaaaggt

SEQ ID NO: 16537 - DNA, 523 bp, Arabidopsis thaliana columbia
ccattatgcttgggcaggaaccccgtcaaacaacatcgaaccttgggcacttgaacaaaccatcgatccaggtgattatcactaactgaatgtgtcctgtttttaagttgaaacgaaatcaaaggttttctctgatactgacttttggatactactatgcaggctttgattcacgggttgaacagacactattactcaatagcaatcaactataggaagaacgagcttgaggagaagatgttactcaacctccacaagaagaaatggacagatggtctgacgctaagacgctttgacacccactccaagaccaacgaacagacggtccaggtaaagaaacacagggttatgtttttatctgttcaagcatattctacaatcatgttcattgacattttcattatctcctgtttaacaggagatgttgagcttggctgctaaatataacaaggcggttcaagaggaggacgagttgtcccagagaagctggcaattgtgaatgtgggaagacaagatgcaaaga

SEQ ID NO: 16538 - DNA, 833 bp, Arabidopsis thaliana
ggcttaccaacattgatgcaagggaagtcacctgaataacgcacttcaatgttacgctctttatagtaattgagcactgtgatctcaacctcctcaaattctcccttgtcgttaggtttcctccatgtaaatctatcaatcatagaccaatatcttagaataaactcaaaagcatataaacttgtgatcaaagaaatttgacatacagttgatctttgcagctgtgttcacttagtccacttatcttgtattctctattggaaagagtaatttgaactctcagattcttgaggacacgtcgagcctgatgagataaaatcagataaaatacatcagtgaaatagtacaacataaaagaaaatgatgtaccttgttccagtccattccgtatggatctttcttgttctggttagcaagcaggaaatcaactacaggtccaggttgtactatcatcgtagttgaagtgtctgaagaaatgccaaagcaaaaaaatcaaagtttagcagccgaatgtcaaggaagaatctaatacacattagatctggaaaagaattaccaatattcagggataagcctccctgagtagttctgaaacttgaatggaaccctctgcaaccactgacacctccaccaataggtacaaagttctttacgtcattgtggaaaaaggactggcgaacaaggaggcaacctctgcgaacagatatgagaacatgacattaaagatcaagcagagaatttatttgaaatacaaatacccagaatatttaacttactgcctagctgcactctggcgcaaaataatatccagcactctcagagcgtcttgaaga

SEQ ID NO: 16539 - DNA, 423 bp, Arabidopsis thaliana
tttatcgatgaaatagatgctattggaggaagtcgcaatcccaaggaccagcaatacatgaagatgacattgaaccagatgctcgttgagttggatgggtttaaacagaatgaaggaattattgtggtcgcagcaacaaatttcccagagtctttggataaggccctggttagacctgggaggtttgatcgtcatattgttgtacctaacccagacgtggaaggtcgacgccagattttggagtctcacatgtcaaaggtaacttcaaattatgtactagacagctcaggttttgcacagtgacttgtaatacagcaatgggatgaattttgaaccgttggttggctgtctgtatggtgcattttcaggtacttcaggctggagatgtcgattgaatgatcatcgctagaggaacgcctggat

SEQ ID NO: 16540 - DNA, 565 bp, Arabidopsis thaliana columbia
tattatatagtattgttatagataaaattttaaactatagtttaattaaatcatcttcttatttattttttaaaaaaaagaaataataataattagaataataaaacataccaacaaactcatacaaccgtgtgggtcgattctaatttaaccaaatttcattaaatttatcgacgttttggtgttacaatgaaaggattttgccgatggacgaccaacttgaaaattgagaaataagtgaatcacaagtattgaaccaaaaaaagcatcaaagctaattaactaaaccattcaaaacataagaaattaatacattcaagacataataatcaaaatcaaattaataacttagtcacaaggctaaaaattgttttttcaatgatcatatgtttgacgtaacataagtcaatcaatacataagccatcagtttgtttgtctaagaccgtatttacccaatcaaaggatcgttatcgaagaaatttgaaggccgaagagtaaaaccacccgtgaagagttggcataaccggaaaatcctcttggtatggaatgtgatgaaacccacgt

SEQ ID NO: 16541 - DNA, 506 bp, Arabidopsis thaliana
tcgttccctctaggcgcgtcaaaataggcctgcatatgtgataagcaaatacacattgggtcaacgtgaacatgtttcagcttgtcatgtctataggtctactataactagactcaagacttaatattacagattattggttaaaaagggcttggacaagtcagagtttcttatttaccttgtaccatgtcaaaggttgtttgttttgcttagccaatgagcctttgatccaatcaacagaggagtcctcagtaggagagaccaagttcattgattcccctcgcagaccagcctgttgaagtacccgaaaaggcggaaatgttatttagtttcggttgttaactatccatgagagtttcatcttgtaagcattattgaatctcacctgataagtccatttctgccaactcaagtctttgttaccctcgtcaaggccatgaagcaccacagacccgacgattcctgtggcccacgtctcaaaatgtggtccaacattcttcacaaca

SEQ ID NO: 16542 - DNA, 1196 bp, Arabidopsis thaliana
cataatctgtctgtgtccacaaacctcttgtctttttaggttctctctcagaccataactagattgaccaccattttcatcaatcatcttgagcttatcagcctcatcttcatctgaatcagctgaattctcattcatgtgagttctgatgtgacctccaagtgatttcccacaaggaaacctcttgctacagaacttacaaacaaacttcctctctttgaactgctccatctgatcaaaacaaagacaaaagatcataagaagaagtagaaacaaaaagtgagagaagccattagtttgatttttacctcaaatttatcttcaaagaaagcttgacagatgctaagaaagagaatcaagcagaaagcttgatacttttccagcgatcagagtttggagatgtaacactagtcttgttaactacagatcctaccatcaaggcaaagagaacacaaaaacaggaaacaaataaaactgactttgaaatttcctcaatatctaaagttagcagatttactttctttttggggttgcgaatgaaagatataaaataaaaattttttgatactcagattattacattatacagtgtgcaaattttttattgacatttttcataagagaatagtagagaaatgagtgaagacgtgaccattgtctaggcggattttgcttaagagtgaaagctatacacgcattattttagtctgtttttggataaaagcaaccaaataaagaatgcaagaaagtaattagctaactaagcaacaaaaaaaaaaaagattagtagatccgacacattttagctgaatccatcattttgttgcgagtagaccggtccggtccagagattttgaaaggctctaaacccaaaaagtgatatgtactagataaaatactcgaaattcacaagttacaaacaaaaattataactttttctgattcatcttataccaaaaatgcattcaagttatttctattttactctataaagattatttttttcccctccaattttgcttcttgtttccttttctgttttgccaggcttgcactatattcatcatctcatcttaaaacacttttatcccataaatttggcgataaacattaagatatatacattttctttcataactttccttttcataaagagtaataaataatattttctacaacttataatccgttgatta

SEQ ID NO: 16543 - DNA, 309 bp, Arabidopsis thaliana columbia
tcatagtgctaaagcctatacacacactatcacacccacttttacataaccctaatcatcatttttgtttgtttgtttgttgacttacctcgccgatgccagaagctgctccggtgatgacaacaacttttccggcgacattttccgagaacagattccggcagatggagacggcggatttgagcctctggtaagttgggtagaagacaagaagtgcatacaaggttaagagaggaaacaagaagttgatgatcttgttgattgaatccatgcatcaaggactatacttcacaatggtttttcagtttt

SEQ ID NO: 16544 - DNA, 522 bp, Arabidopsis thaliana columbia
ggtcaatttgctaggtttcatctcttatgctttgccttgtggttattggttataagcattatcatgatttcatctcttgtttaaacatttttcagtcatggtttacgaacaagtatatatgaagcaagtaaacttgcgttaccgctcgttgctcctactcttcttgatattcaagttagtaattgtaaaaagctcattgccaactttattgctacataatgtttcgttctttgaatttttttgcttcttgattattttaggttcagtcaatcgcgtcttttattggtacggtattggggacaacgttgcgaataccgtgtgaagtgttgaaacaacggttacaagccaaccagtttgataacatagtggaagctacagtttcgacttggcatcaagaagggctcaaaggactctttcgtgggaccggtgtacccttctacgtgaggttccttctacgttgctggcatgggactttacaaccaatcagagaaggtaatcatgatagaacagaacaatgacatg

SEQ ID NO: 16545 - DNA, 318 bp, Arabidopsis thaliana
ggattgcgacttcctccaatagcatctatttcatcgataaatataatacactggggagcacttctttgcagcactaaaaagatctctcactcttctggctccaactccaacaaacatctcttcaaactcactaccactgcaggagaagaaaggcactccagcttctccagcaatagctctagcaagcatagtttttcctgtcccaggaggaccgacaagcaacacacccttaagaagctttcctcccagacgagtgaacctctatagtaaagatcaaaagatgaaagagtgaggcctaagaacaaaacagtactaact

SEQ ID NO: 16546 - DNA, 2165 bp, Arabidopsis thaliana
ctgagagaattgttagcctcatcctcatcctggccacctctagcctcagctctctgttctctcttctcactgatgcatagttgtccctcggcgagatggctccgcttgccatcccgcttcccgagcggtttgggaacaagaagaactggctttggttcgaaccgcctgtgccaccgccgctggtcatggcgttcttgagccgtgtctgttcgtagaacaggacttgaaccgcaatctgaaccggaagtctctcgttttgcgccgcgtggctgcttgcgtcctgcgacagtttcttacagctgactgtcttgcagagacggtaacgttccgaatctttcatgtgggggtgaacctaatacaaaaccgtaacacagcaatcaaaatcatacaacactcattctcaaaagcagactcttttataccttgaggaagatatcaacggctcggtagaggccatcgcagacgacgcgagcatggtcagggagaagctctgcgagtgctataaacttggagggaggaaggctcgagtccagagccacctcagcgagataactatccatcagcttcgacaccttgaagatggagctctgtttcggtgactcagccccctcgaaatcgtacatggccatctcgctctcgtccaccgcgtcctcctcgtcgtcatcatcatctctgtactcgcactcgtcaaggttcaagaacattgagaaaatcctctgcaccgagtcggtgtcgtacatggcgccgatgttcgccggaataaggatgtcttcaaggatggcctggtcgagcaggtggctgatccgtctctccagatcggatctgcaagagacggaggtgccagatcctatagcggtcttcaacaagctagagaggaacgagatcggaatcgagcttttgttcgcttgcgttgggaggagcccgacgaccgcttcaaggacgattcgctgtttcctctgaagatcggaatctgatttgacgagattcggttctctgatgatctgcagtgatttgcgagcgtactcataaggatgtcactgataatgtcgtgattgagacctttggatttcatggcggagagaactctctggaagaaatcaagcttgaggatgggaagagagcgaccccaccagtcacaaggtttcgcagtctccgggacgccgcagctgaaactctgatcaagcttgagcaaaccagaggctagctgttctttgcaggcgtttacagcgattgcgttgaccagcctcccgacgaggttgatctcttcagctacaggcagtagcctctcgcaggagtgaagaacagtgatcgaattcgatatgtcattgaaaatggagtctttcaggtaggcctctgttctcgcctcgaggttcttctctgacaagtcttctgtcatctccaggtaatgagccacgcatcgcagcgccgcaatgttggacgagttatattggacgccaacgccgtagcagaactttgcagcaagctcgaacgattctgagccgcctggaacagcggctaggttcaggttcgtgtcttttgattccagaacaagtttccggattcttccactccgagagacgagaggaaactgcaaaagagaacgagtttgtgtaaagcagtttctcttttttcttctgagtttattgaatttggttaccttgtgaagggaaaaggtcgcagagccgacttcaatggttaagtcactcgtaacgtccgagacaggcctggaacaacagagagatcagcaacattttgaggaaagaagagatgagttagtgaaagagtaccattgaggagtgtgtctgatactggaacttggacgaaacgctcttttagcagcaacactttgcttattagactcaggaacagtaacaacacccattggatcttattattatctatctcttctccccaaataaagttgtaaacctctttttgtgttactgcaaatatgtttttgtgtttctcccaaaaatgttccttactgtcggctgcaaatgctctctctctctgtctgcttttcaaatatgaaagattgtgccatggagtgagagttaaaaacacacatgaattcatgcaggattaaagtggaattatgactttcttcataaaaataaacagttctttatgtgcatatcatatactaataaaaaattaggtgaata

SEQ ID NO: 16547 - DNA, 667 bp, Arabidopsis thaliana
gtcccattgttgctactctcaacctccgtcttaaccgtcttgtaaataggcatgaccacactcttgaggaaagcacaatcacctgagaaggaaggccagtaaggcattccagtcatatcatcaaactctccggcgaggactttattaagttccatagccatatgatgaaaaatgtaacacagacactcaggcataaaacgaagattcgcagattctccccaaatcaatagatagagagcaacatagagaagctcacggcggagattcaaaacggcgttcgtttggtgacggctttggatagggctggtgacgtggcacctcactccgagaaacgagcaccaatttgtataattacgaagcagcttcttccgaaatctccggagaacagtcggatcgagaccgtcgggatgacgtggcggaggttgcagccgcatttgagagttagctaagtgaagaacgagattctctcgctgattccgaacgttatcgatttgaaaaccaaagagaagaccaagccagtccatcaagtccatgcgaggtgtgaaatcagcaaacggaggtttcggaagatctccgactattctaagcgccgccgccgccgctctaacctccggataacgcagcgacggatgttccgttaagaaatcatgaatcggaatgatattgt

SEQ ID NO: 16548 - DNA, 531 bp, Arabidopsis thaliana columbia
cacacgtgaacgcgcttacatgtcaacatgcacctgtcttacggacgtttctcgtctctctcggtgtagacgccgagctttgtattgtacgagctgcttcgtatgccttatccaaatggatgatctctaaagagataggacttgggaatcttggtttgaaacagttcagtagcagcctcatgccacgtcattcgttggggttttcgtatgccacagaagctcatggtctttggatcttgaaaggttatttcccaatcttgtcaatgaacgtcacaaataatagctctaacgaggttcacaacaagatcgtcaagtttccattcgtagagcctaaagaagctgtcctacgttacgctttgtcgcatcaacaagctgaaatactagtacagtttgaatactccgttaagttctatgagaactacataaaagtaaacgcacgtgtagacaacatacgcatccacgtctcgaagctagggttcacaaaggaggagttggcgtggagaacagatagcggattgtactccgaggaga

SEQ ID NO: 16549 - DNA, 551 bp, Arabidopsis thaliana columbia
cccgggaagtctgttcttattgatcttgaaacaaagaaggcattttaacaaagttaccaaacttttattacctatgaatttcttttgataataagacagttttctagtataacaaaagaaataatcatcagcgtaagaccaaaaatcaatatcctaaacaatcagatttaattgatttaggagttttacggtttagtagctctctcagcattcaattctcacagctccactctcagaggatatgaatttaggttttctaatgactggttccatgcattgaatcacatctcccactctaaaatcattccaatctccaaacacaagcccacactcgttccctttcccgacctgttccacgtcttgtttctcccgtttcagcgacgcacacgagccttcgaagaccacttctccgcttcgtaacagcctcatgagtccgcttctacatacccgaccatccatcactttgcaacctgcgatgtttactccatcttcttcggttcttctctttcctaagatcttgaatatgctaagtacctcggcttcaccagaca

SEQ ID NO: 16550 - DNA, 513 bp, Arabidopsis thaliana
taaatgctctgaagcctggaatctttgagaaccaaaacgttctacagcaattgcgttgcggggtgcgaatgacatctcttttcggttatatatcaagcttctcctaaaaattattaaatccccaagattgattgtattttgggtgtttttctgacctcagggagtgatggaggcaatccggattagttgtgctggttatcctactaggaagcactttgacgagttcttgaacagatttggtatcattgctccacaagtgttggacaagaagtaagatgtctcttcctcatcggatagccttcaatgcgaggttattttcaatgacttgtcttgctgactcctcttttctttttactagttctaatgagccagctgcctgcaagaagcttcttgataaggcgggacttgaaggatatcaggtaatttctttaattagcagaatattgtttgtcagtttcttcagtctgcttctatgatgagttactgagattggaacgttttcttttgtagatt

SEQ ID NO: 16551 - DNA, 554 bp, Arabidopsis thaliana columbia
gatgaggtttccttgctgggaacacagtgcatatcaacacaaaggacacgggtgaactcatactttccggtgtagcactcattgattctggggaaatcaaccgcagatgcgtatagttttttttgagaagctgagcccgttttcatgttgaatctcatttcgtacctgcacaggtaatagttgaggagggtttacggttatgagagagcaggacagatgtaacacgtcagggattcttacagttcgttgccaaaattttcgagtttttctttcactttcccactgaccatgtcaagatctggattctcaagacgacaagtgatgaggacgacttcatcctcttcttcccaagcattggctgaatatacgaagtcattcacagatgtttgattggtatatatagaatataaaatttgatgatatgaaaacttaaacagacattaaaaagcacacaccggttgtggaaaataaagcagttgggaagctcaaaccatctaatcataagttcatcgttggcatagcgtggaagacaccaaaacgagccttttttgtgg

SEQ ID NO: 16552 - DNA, 898 bp, Arabidopsis thaliana
ttttcatagatacctctaaatgtctctgatgggtagatgataccatcaccatcctggtcaaagaaagcaatgtgttgctgaagaaccgacatgtcccggtgcttgtgtcctcttgtcccgttaacgttttccatgtctggtgcaaccattgctcgaggcacatctattttgatcaaacaccaaacaacctagtcaaaactaaacgcaacgtttaattaaaaaaaaaatgcaatttacaaattacaattgtgttcacaataaaggcaccactaacaaaatgataaaaccatttcaaaccactaaagagaaattatggatattgttttcaacaaaactttgtatttgtgtagtagccaaacaaaaacatttcatagcttgtgaatcaagttaataattttgagaaaatcttgaaagagagagagattcggacaaaagtcataaatatgattctaaatttggaaacatatacaaaaactgttagaaaaagaccaagatgaaaagagagagagagtgtatgaacatggtttagggagacgatcatcgagatcagtacggactctcctctccgctgtgacaggggctttctcagccaccgtagcaatcgaatctgctcttgcgtgatctgtcgacattttgtttttccttgttgcgtaattgtggataatggagagagatttttcttttataaagagatgtgagagagtgttcttaactgattccaaagaagtcgcgggagttgttcgccattgaacaagaactcttttgttgacacgtgttcctatgactaaggatttttgcttctttttttaacatcgctttttaaataagagttaggctataaatagatgctgtttttagttcagtttttggatttgatgtttagtttttggattgtaga

SEQ ID NO: 16553 - DNA, 518 bp, Arabidopsis thaliana columbia
taccttaacattaccggcttctttaatggcggagatgatcttgtattgatgtcccaagagggagtgcccaacagtagagatgaccacatccgcttgctttatcgaattcacgagactcgtatggtcgtcaaggtctccctatccagttttagtattataatcagaatcagaaaatcactaaaccattgaagtaaacatttgtacggaggatcaaaggaaagagaagagcgtaaagagatagatacgtacgaggagaaactgaacgccgaggttcttgaaattctcgatggtggaggatcgtgaagggcttgtgagcgtcgaatttcgaacgagaactaaggttgggtggccagatcttgcgctcgcttccactatatatttcccgatataacccgttcctccgatgaacaggattttgcttatactcgtcatttttagactcggattttgacggagagagaagaagtatggtggttggtgcctggcgggtaacaacggaatgaatcacagatgaagaa

SEQ ID NO: 16554 - DNA, 597 bp, Arabidopsis thaliana columbia
accgcctccacctccaccgcagctaactcttcttcctcctctgcctcttatgatgattccgataattacggttttgcccctgacgacgactctccccctcctgacttaaccgccgttttagcctcccgccgcttcttcttctcttctcctggctgctcaaactcaatcactgactcgccagatctccgctgccgggataattacgatactgccactaggcttcttaccggagaaccgccgtgaaacactacgtgcaatctcctgatccgtacaacgacttccgacgatcaatgcaggagatgatcgacgccgttacaaacgccggagatcttcgccgttacgagttcttgcatgagctgttactcagttacctctctttaaatgccgccgatacacacaagttcattatcagagctttcgccgacattctcgtctctctcctatcggacggtcaccggatcagctgagctgacgtggcatatatatatttattctctcttcatgttatgtaaaaagtaacacatgttatttatttttgtaatgcgttacttaggacaaataatcagaactaaagttaatgtaattattctgtaatga

SEQ ID NO: 16555 - DNA, 580 bp, Arabidopsis thaliana columbia
aacaagttgagatttgactatatttaccgtaatagtatgtcgacaaaatcgtgatccgctccgtcggctgcaaaagaaatggtaaaagaatgaccaaagttgaatgaaatccaactattgactaagctaacgaaattctggttttcttgaaaacataccataacaaaaatcccctcgcggcgagtgggaacttcttctagcttactcaatgtttcatctcctttagtaactttaccaaacacagcatactgttgaatacctccaatcttattactactagtcatcttaagataaagccaatagtctgcgctgaattagcaatctgacctggcgatcaagatgaggagcattgccaagaagcatcgaaaatgaagattgtgcactgtttggatcgtcatatctaccgaacaaaaacaaaatcacggaaagacgaaacatcaccatgcaattacctttaccaaaatgatatgaacacaacaaaaagcaacagtcacgagctacacgaggacattcacagaacacatataaacaatccaagctacacaagatcaaaagatacgataccttcccatggaaagag

SEQ ID NO: 16556 - DNA, 558 bp, Arabidopsis thaliana columbia
  unsure (1)..(558): unsure at all n locations
caaacctagtttgatatggggatggaacatagcatgacaatcagtacagtgaaagataatacattgtaattagttaaagcgaaatgaatgaaactatttgcaaagaagttacgaaaaaatatagtaactaaccctttcatatgaagtttctcaagaatagatatggactcaactgcaatgcaggctaccatgtttggagacatcctgccacatgacacgaacatgaatcaaatcaagaatcttgcaatcagaaggaagtgtggtgagaggagaagagtgcttacgattgccccgaagaattccaaacatcccagagactcggaccaagcatgtccatgacctgaagtatatattatagcattacttgtacatgataacacaatcaatatcgaaagtatatttaacaaagctcattgtaaattacatacaagaatgtaaaaatctccttgacgacccttatgatgtacncgcagaactccatagcaccattgagggtctttcaacaagaagaaaagaacagatgagatgcaaatagttgttagagaatttgcaggaaat

SEQ ID NO: 16557 - DNA, 1328 bp, Arabidopsis thaliana
gcatcagacagttatctcaaatgctactatcactaatcttcttccacatatccgaatacattctagccatcaccattcacggagcatcaaacgtaactcttagttcgcttttaatcaccaagcattacgctttagcaatgcttctgtcgcttctcgaatacctaacggagattatcctcttcccggggctgaaacaacactggtgggtcagcaactttggactcataatgatcatcgttggggaaatcatcaggaaggcagcgataataacagcgggaagatcgttcactcacctcataaagatcaactacgaagagcatcacgggcttgtgactcatggtgtgtatagactaatgaggcatccaagttactgcggttttctcatctggtcggtcgggacacaagttatgctctgtaaccccgtttcagcagttgcgttcgcggttgtcgtgtggcggttttttgctcagagaataccgtacgaggagtattttctgaatcagttttttggggtacagtatctagagtatgcagagagtgttgcctctggtgttccatttgtgaactgacacttgaattatttttgaacatatgagtttgatgtacttgacttgaggtcttaaagtcacaaaaacatacaagaccctctggctgaaagagaaggtcttgacgtggatatgaaatttaccacagcgttaattgtttatgtgacacctgtcaccggtgatgcatagctccggcgaagagtttcggagaacaagtttggtctttttaggggtttgagcagtggagtcggtaaccatgttatgcggaggctctcgcgcctccgtgcatttgtgggaccatcgtcatcctcctaggctcggtgctaaggttttgcggaaatcttcgttcatgctcagaccttgttcggctatatcgcagcagcggataaagtcgtcgtttaggtctcactgtaaaactccaagaaaaatcccagctcctctcgattgtttcaggtttttgaatctcgctgttgttttgattgtttttgtatccgaatctgattgttttatgtgaaatttcctgatgagctttaagatagagatgtctgttagatgttcttcactatgttctactcaaattgtcaaaattggagtctttactaaaatatttggctgtaattcttctgtcaaagccagggagatgatcatcctgactgtcagctgaagggctgtccccagttgcaggtatctgtttgtcattcaagtgtcaactgccttccatcagtggccaacctttatatgacctttctggattatgaatttgttttgaatttgcaggaggca

SEQ ID NO: 16558 - DNA, 391 bp, Arabidopsis thaliana columbia
ttctttctcagggtcgctcggtatatttcttccaagaattgcaactcaataatcattctttgtcgcagattcatgccgttcctgatcttgtctggtcgtctatgtccacctgggattgaaggaacactgtttgcgctgtagatgtcgataaacaacctaggatacacagttggatcgtacatgggagcaggattggcttcacttctgggaatatcgtcagggtcgtttgacaatatgtgtatgggcttagcattcaagtgtcttgcactgatatacccgttttgatacttttcttgattcccgaagaagctacaggagtatcagcatcatagggcagagagctcagtgcaaaggtagtttctcatagcacagttttagatcggaatttttg

SEQ ID NO: 16559 - DNA, 546 bp, Arabidopsis thaliana
atattttaaacatcatttcataaatcatcgttataatttttttgacataataaacttgtaaactaaaagggcaagaagacgtacgcttccatttgttgaatctgactagcagtatgtctatggtaacgtttcttcttcgccgcaggaggctcttgttcgattgcagtattctccactgggtcatgacccgacccggttgacttacccgacccgctttcgatcttgctcatcacctcatactcttctttctaaacccacaaaaacaataaagttattaattttttaagaaaaatatgtaaaaaagttagggtttttggagacgaagacaaaccggaaaaatgtaagggaaattagggttctcgaaggaggtaaagtaattagggttttggattgttgttgtcggagacgaagacaccgaaccgaaaacgttgtcggaatttaaaaccatatgtcctttttctttctgtgtctttcgtttccatgttaaatcagacaaagagaagacttgagtttaaagggtgcgttttcactttactctcaaaattc

SEQ ID NO: 16560 - DNA, 578 bp, Arabidopsis thaliana columbia
tttttggtaaaaaattgacatgggttttgtgtcgtgttcgtgaatctgggggatctgaatctatcatttgtgtttttggatttgcatgccaatgatttcttattctctcgcttgtgtgatttgaattggcgtactgatctgttttactaatcagaacttttgttgcagttttgtaatttgtaacgatttgatctattccgatctatgttactatgtaactgagttgtctgatttgaatagtggtctcattttaattttactctgtaattgatttgtgaaagtatttgatctaaatcttcatcatttggtaatccgtattattgcccatcttcaggtgtggacactgcaagcagcttgctcctgaggtactatgactttttcaatcacttaaaataggatttgcaagtggagttttttttttactggtctaattcatgtagcgatggctaatgggtggttttatttttgtttacagtatgagaaggctgcgtcacgtttgagcagtaacgtcccaccagtggttcttgctaagattgatgccagtgaggaacaaacagagaatttcaactcaatacgag

SEQ ID NO: 16561 - DNA, 567 bp, Arabidopsis thaliana columbia
gtctcatctttgaccaaaacctctgttcttggtcttaagatatgggccttgcatgggcttcttttgaccattgaagctgctggtttatcattcgtatctcatgttcaggtaaacaatttcgtggttcattaagatctttgaatgcacagttttcatattttgctttttcgttttaaaggatcttattttggtgttcgggttgccagttcggcaaactaaaatgaaattctgcgtatctttaaaattggctaaatgagttacttggttatcacctgaatctgttaatgcttgacagagagagaaattctctggtgcagttcaatagctgcaacttttttaatgtttaagaaagtttatctgccttacaataggtgcatggttataactgctaacttcattttcccagcttgatttgatatctccatccattgtgtcatgttatcattcccattctgtattcattattaggcagcattaggacttgccttggacattttgttgactgaagaaagtggatggatcgatctttctcaaggcattggacgccttattaatgctattgttgct

SEQ ID NO: 16562 - DNA, 558 bp, Arabidopsis thaliana columbia
tttgtacagggtttcttcgatcaaagcggcttatgcgcagttacagcattctcagtctccgtatgactctatcgggattcaaaaagcagataacttggtagtcgccgagcttaagactttgtctgagctgaaacaatgtttcatgaagaaacaagtggatccaaatcccgaaagaactctggttctcgcggagattcaagagctgaggagtctattgaaaacgtatgagataatggggaagaagctggagtctcagtacaagcttaaagactcagagattatatttctgagagagaaacttgatgaatcgatgaaacagaacaagttgacagagaagagacttaaccaaagcggacaactttgcaatccacttgacaatcttcacctatctgcgctaaatcctaacacatttcgtgactaatctgcactagggtttcaagtccaccagaggtttcgtcaagctaatgatcgaacaaatgaaactcgctggatgggatatttcatcagctgctaattcgatccatcccggtgtgttctactcaagcaagaccacaagtg

SEQ ID NO: 16563 - DNA, 1099 bp, Arabidopsis thaliana
acaacaatacaactctgtggcattgtcgctgtaatgaccaatgttacctggcaagttttccttcttgttgttccggtagctgttgcttgcttttggatgcaggtaaatctattttcgatttttcctctgaataactgtgaaagattgttttcgtaatttagtttatattgaaataaaatgcagaaatattacatggcttcttcaagagaattggttcggatagttagtatccagaagtctccaataattcatctttttggagaatcaattgctggtgctgccacaataagaggatttggccaggaaaaaagatttatcaaaaggaatctttatcttctagattgttttgttcgacctttcttctgcagtatcgctgctatcgaatggctttgtttacgcatggaattactttccacacttgtatttgctttctgtatggttttactcgtcagttttccacatggaaccattgatccaagtaagtatctctagttactataacaaaaaaagcatcaacgagcagccggtttttctaatattgatgttcctgttgtaataggcatggcaggtcttgctgtgacatatggacttaacttgaatggacgtctatcacgatggatacttagcttttgtaagcttgaaaacaaaataatctcaatcgaaaggatttatcagtacagtcagattgtaggagaggccccagcaattatagaagatttccgcccgccttcctcgtggcctgcaacgggaacaattgagctagttgatgttaaggtactattcaaaaatactatttttattacctctctgcacttcctttccctgctttcttattgcttcgttcttttcgaaggttcgttatgctgagaatcttccaacagtactccatggggtgagctgtgtgtttccgggtggaaaaaagattgggattgttgggcgaacgggaagcggaaagtcgactttgattcaagctttgtttcgattgattgagccaactgctggaaaaattactattgacaacattgacatttctcaaattggtcttcatgatcttcgtagtcgccttgggattatacctcaagatcctacattatttgaa

SEQ ID NO: 16564 - DNA, 484 bp, Arabidopsis thaliana columbia
gatccccctctagcattcttacacttgacacaccgagcattgtcgacctctacgtactctgcttttgtcatttacattcacttgccaaagcttcattggaccttcattccttagataggcacatcaacatgtgctagatgacacgaatgttacaaatcttatcagtaggatacgcaacgtcaagacccttcacttgacttgttcagctgtcgaggtaagttcttaatatattgtctctcatgattctttttgttaaaaggtgttgtcgaggttcaaacaatattctttgtgtttgttttcaggtgatttccctatactacaaaggtggactaccaatgttcaacaaccttgttgagtaaaaaggaaggttggcaggtgattctgccgcttctgctagagcattctccaaaccttaaaactctggttctcggtatgaagaaaaccctgaacaaatcttaatgtatatgtatgattgtgacatgtg

SEQ ID NO: 16565 - DNA, 500 bp, Arabidopsis thaliana columbia
gctgcatcatcgtagcagtagtgcgcctgtttccccctctcaacctgatcgttttcacagagagactagctttagaaaaaaattccgttcaatctgaagcataagattatagatactaagagcttaccttgaaaagaggtggaacaccaacgtatatgcaacccgcgtcaaacaaggctctctgtagaaagtaaatttcattaaatttcacataactcaatcagcaatcaaggctacttcaactaatgttttatcaaactaaactagtacctgatatctgaagaaaaaggtcaacagaagtgtccggatatgtgcaccatcagcatctgcatctgttaagatgataattttatggtaacgcagattctccttgttaaaatcttctccctgaaataagttttatgtcaaactgagttttccgaacataccaacaaacagcaggatatgaaacaggatatattaccttaactccaagaccaaggccaagaataagattttga

SEQ ID NO: 16566 - DNA, 654 bp, Arabidopsis thaliana
tagttgaaagtgaaggcttgaatattcgttctctaagtgtctccataaaagtgtttggtcctatcgtatatccaacaaaaacgccatcagaggcatgcaagaagacatttgtgatggattcaaatggagatactcaattccatatttttaaacataccagcaatagatgttccccagttcttttcaacgccttcaacagccgcagcaatagccttacccttctcaactgatctttccatgcgggcaatagcatcatacaaacactttgcaatatcgagaagcgcgataacttctccattctccaccaccggcaaatgtctaaacttgcctgcatatccactagtcagctcaagtaccaagaccaacaaagaacttataaaagaacaagaaataacaaaccttgaaccatcttttgaagagcttcaacagcaatagtatcagacaaaacaaaaacagggttcttggtcataactttagatacaggtgtttcttcaaggttaagttgtttagcaatcacttttgttgctatatccttaaaaaaaacaaaagagatataaacacaaacataagtgaaaagtccagtttgcatttagaatcctgttcatgaaaacatgtataccctatatgttaggatccacaaagtaatgcattaga

SEQ ID NO: 16567 - DNA, 903 bp, Arabidopsis thaliana
gttacctgattcggcggttggatcacgccgtagaagaaattgcgttgtaattgaagattggtgatcgggaaggtgaagatctgaccggggattgcaccggtgaaccggtttaagctgagatcaaggtaattgagctggtttaatctgagtaaaacccggtatactggaccggttagctggttccaagcgagcgagagatattgtaacgacggcggaagagacgtcagagaaattataccggtgagattgttgcgcttgagatcgattcgggttaaggattgtgagaggaattgaggaattgatccgttcaagtgattgtgacatagaatcagattggatagctccggtaaggatccgattgacggagggatcgacccggttagctgattatagctcaaatcaagcgttttgagtccccgaagctcgcttagactcgctggaatctcaccggagatgaaattccgactgattgcgagaaatcgaagattctttgactgtgagattgtatgcggtaacgaacccatgatccgacccgggacgatagagagctccgttaaagcagagagttttccaatagccgggtcaatccgaccagataaaccgggtgaaccggctcttggatcaccgaggttaagcgcggttactttatcatcgtcacagtaaactcctgcgaagttacaaggatcagaggtgaaatcccatgaatcgaagaaattggaacctggcaaatcatcgagtgatttacgaatcgcttgcagagccaagaaatcaactgggacgatgatcgattccacgattaaaccgaatcgaagaagaagcagcaaaaccgaaaacagagtagcaatcctctttgtagcggtacagccttaaaaacagagactttattaaaaaaaacaccaaaca

SEQ ID NO: 16568 - DNA, 461 bp, Arabidopsis thaliana columbia
gcattgcacgaaacaattctgtgaacttccgattatacccttccccggagatttccctacctacccgacgaagcaacagttcatcgagtaccttgaggactacgctcggaggtttgacataaagccggagtttaaccaaacggttgagtcggctgcgtttgatgaaaaccttgggatgtggcgcgtgactagcgtgggagaagaaggcacgacggagtatgtttgtcggtggttaatagcggcgacgggggagaatgcggacgcggtggtacctaggtttgaggggatggataagtttgcagccgccggggtagttaagcacacgtgtcattataaaaccggtggagatttcgccggaaaaagggttcttgtcgtcggatgtggaaatccggtatggaggtttgcttcgatctctgcaacttcggtgctcagccttctctcgttgtcagagagctgtgagt

SEQ ID NO: 16569 - DNA, 429 bp, Arabidopsis thaliana columbia
cctatacgatcttcctatcaaaattatagatcgatccaagttttagattcgagaattattttctccaaattagatttatatatcaaaaggaatcgaaaatagacagcaatttttgttttgtcggatcgtattgaatcagctgtgaattttagcgccaatttaaccactgaatcgtttgattagaagctaagatttggtcttacgatcgatctaagtagggttcttcttcttaagtgtgtgttttgttaaaattagtaaagagagatggagaagaagaaagtcgcgactccgctagtgtgccatggccattcgagacctgttgtggatctgttctacagtccaatcactcctgatggtatcgtcctcatcagcgctagtataggtaaaaatatgatcttctagatttgtgattgtaagatccaaatttgg

SEQ ID NO: 16570 - DNA, 523 bp, Arabidopsis thaliana columbia
gctggatctgtgatcctaagcgggtcatggagtcagattcaatagcatctgtgaagctaaggattcagagtatcaagggtttttttgtgaagaagcagaaacttctgtatgatggtagagaggtatctcgaaatgattcccaaattcgagattatggccttgctgatgggaaactgttgcatttggttattagactttcagatcttcaagccatttctgtaagaactgttgatgggaaagagtttgagctcgttgttgagaggagtagaaatgttggttacgtgaagcagcaaattgcttcaaaggaaaaagagctcggaatccccagggatcatgaactcacattagatggtgaagagctggatgaccagagactcatcactgatctctgtcaaaatggagacaatgtgattcacttgctaattagcaaatccgctaaagtcagagctaaaccagtggggaagggatttgaagtgtttatcgaagatgtacacacaagcacaatgtggatggtagaagagga

SEQ ID NO: 16571 - DNA, 598 bp, Arabidopsis thaliana
cccctgtacaccattatagataagcataatataacattaacaactcgaagcgggttttaaagtttacgggtaatttttctttttgtgaatgttgtagacaaccttgtgtgttaccttcttaagttcaacctttgggggaggcccttcatgataaaattttggcattgggtttgctttaaacctcaaactttttcttaattgtcttaaagctgcttcggttgcttcctttagatgttgagtaccgggcatacaaagagaaggagaacaatatgtcaaaaaaacataggaaaaaaattgctagctacacaaagtataggaaaatgcatgatcatacatgccaagtatactattgtatcatttaacatatgtgatctgctaatgagcatttttatagaactcaagcatattgcaaaaaaagaatagcaccttgttccttgcttcactttgcgttttctcggcctccatggcttggtgtttccctccagttttgtatagaactaaataacataaaccacttaaaattcaatacacaatgtatcaaaaacttcttaagagtggaaagggtagacaagtaactgattaataaagaaaaagaaat

SEQ ID NO: 16572 - DNA, 513 bp, Arabidopsis thaliana columbia
gttgtgatgcatatagcctgtctcctggcaacgtccagcagcaaaaatagcagtgctccgttgtgcttcagaattcagtggttggaccggagattgcccagtcaagatacgcccatgtaaagtggaaatgtacttcttcatattagtgtctttatgcagttattgatatttcctaaacaactgactaggtgcctctggggaattttggacgtgattggttaacgttcacagtagatatcttcctgtccagggcactccgtgaccagcaacaggttctttcttccactttctgtccagataaagagttccactaatcttgatctgtgcctccacagcttcaaaattatatgacaaaaggctattctctctgtatcactgatcttttttccatatcattgaatttggtattgtattacaggttctttgggtctcagataatggtgttccagacttggagatataacaatgaagagacatttctagctgatgaggtatgtcacaaattgtttatat

SEQ ID NO: 16573 - DNA, 678 bp, Arabidopsis thaliana
gtctgaagaagaagaagaagaagatgatgatgagatttaccaagttggtttggtgtttgatgttcctgcttcgattcggcttcttcacggaggcgattctcgacccagttgatttcttggctctgcaagctattcgtaaatccctcgatgacttgccaggttccaagttcttcgagtcttgggatttcacttctgatccatgcggcttcgctggcgtctactgcaacggagataaagtaatctctctcaatctcggcgatcctagagccggttcacccggtttatcgggtcggatcgaccagcaataggcaaactctctgcactcactgagctctccattgtccccggcagaatcatgggtgcgttaccggcaacaatctctcagctaaaagaccttcgttttctcgcaatcagccggaatttcatctccggcgagattccggcgagtctcggcgaggttcgtggtctcagaacactggatttaagctataatcaattaaccggaactatctctccgtcaatcggatcgttaccggagctctccaatttgattctctgccacaaccacttaaccggatcaataccaccgtttctctcacaaactctaacctgaatcgatctcaaacgcaacagcctcaccggctcaatctcaccggcgtctctccctccgtcgcttca

SEQ ID NO: 16574 - DNA, 845 bp, Arabidopsis thaliana
accatcgagcaccgattcgaggcaaatcgagcacgagacttcgacaggagacgaggaatcctccgggttcccgcgttttccagggtcacatccaccagcaattcggagatcatcatcgcaacccgaatctttagctccggccatatcttcaccagcaggccaaatcggagggaaccaacgaaaattttcgtttttcgaaagaacaaaaaaaaagaaaagaaaggattgtcaaacaaaaatcaatgagaaaccatgtctcgctatcgctatctgtctctccgagttcgtctgccttttggaacgccgatgcggtaaatctatccttcctcttcctctctctctctctctctctctcgtccgacctgttagagatgacgtggttcaaaaccggacaatgacattggactctcccttttcttttctttcctctcccattgtggataattttttattattattttattactttagttttggatagatgatcatcaaaccatccatccatctgaaccaacaaccaaactataaatttgttcatttaaatcattaatctctatttagttgatttgttttcttctctagtctctttcatatgaagtttattataactttcacatccattttgttatgagaaagattagcatattataacacacgaatattgattgtctaaggataccaaaacattgtatgtagtaaacaattacacatatagatgcaaatgtatattgtcttgaatcgttgtttcacatcaagctaatattatttcactttattcttctgaattagaagactatgcagagactttgctttgaccgagtagccttcccttaggtttcagaccg

SEQ ID NO: 16575 - DNA, 480 bp, Arabidopsis thaliana columbia
cctactggtaatgatgaattcgtttccgaatgatgatctcgtttacgagatactcttgagactgccagcaaaatcagttgcaaggtgtagttgcgtgtcgaagctacggaggtccatcctcagccgtcaagatttcaccgagttgtttctgactaagtcctcagctcgtccacgtctcttatttggggtcaaacgagccaacggtgagggcctcttcttctcgtcgactcagcctcggaattcatatgaaaagtcgtctcttgtagtagctgccgattttcatactaagttctctggaattctgacgccacaaaattcgatcgcagactggagcacatatctcatagaacttggtgttatctcagtgaatgatgaagatgtagtgcgtgccatatgtatccctatcacgggaaagtatatggtcttaaactgagaaggtatgtaaagtcgtatagctatttagggtttgatccgattgac

SEQ ID NO: 16576 - DNA, 618 bp, Arabidopsis thaliana columbia
tattggaaagtatttttagttatacttgcacttgttgacccatctttgaattctacaggatggctctgcttttgggtcctccaagttctgggaaaacgaccctcttgcttgccttggcgggaaagcttgatcaagaactaaaggtaaccatctttccctctctctatctctgtttcaacttcatggatatgtttatatgatctgtgtgaatcaattgtaaactttgttctttgattttgtagcaaactggaagagtgacatacaatggtcatggaatgaacgagtttgtgccacaaagaacagctgcatatatcggccaaaacgatgttcatatcggtgagatgactgttcgtgagacttttgcttacgcagctcgcttccaaggtgttggttcgcgttatggtgagtttgaacatttcctcgacttttctatcttctcaaaacattcgatttcggtatgttgattttgctaaccatagatgttttggtggtgcatagacatgttgacagagttggcaagaagagagatagaagcaaacatcaaaccttgaccctgatattgatatattcatgaaggttagttatatcactccgaaacagtactttgtaataattgga

SEQ ID NO: 16577 - DNA, 1179 bp, Arabidopsis thaliana
agacttttgttgaggatttctattcttttttcagaggcataacgctattgagcatggaggtaaaatgtctcggtctcagcgaagtgctgcattacaggtatgtaacacctcttgcatgttgtcattgttaatttatggtccagtttgattgcctgtgtttaacaattggattcaactccagataccgacaagtttccgatacagtcgtggaaatgatcaagagaatcgtcgaggaagaccccgatcatttcgtcgcgagcctggtgatgaagaatataatcttgcagttcatgccgctcttcgtttatctgagtctgagtattctcggcaagagcctgctcctccaccctcaagtgcaccacccggattctctgaaaacaacaacatacacgtggatgatactgatccccttattcagccaatggaatctctatcaactacagatatggaaccctcttcacggtatcttcaagctgtaggaagctttggtggtggtggttcacgtcttggagaatctgcttttcctcctctttctgggcaacagagttctggacagaacgtagagagtttaccaactaacaccatggctgctcgtctaagacgccaaacaaatcgaacttctactgcttccgctattgctagtccttctcaaggatggccagtgattaatcgaggcccaggacaagcatctattacaagtggaggtaatcattcttcttcaggatggccagctataggtcgaacgcctgtacaagcctctagttcttcagtccaatctaggtcccataacagagtttcacaacctcgacctctggcttctgcagttccacaggctgctcgtaatgcaaataggattcctcactcttcctcagcccctaatctatctgatacaagatcacttcagccttctcattcagattttcctccagtttcttctgctgttgtgcaaaatcgtaaaacatcatcaaccactacacagggatcgtcaaacactcaaccccctccagatgtacaatctgccaacaagtcattgattgagaaaatgcgatctgcacttggtcatgatgaagatgtattcgtggccttcaggaatatatcaggacagtatcgtcaaggttccattgatgcaaagacttatttggagtatgtcaaggttatggattgtccacttggttattg

SEQ ID NO: 16578 - DNA, 550 bp, Arabidopsis thaliana columbia
ggcatgtatcagagttttggcatccactcacttgcatacaccttcccttggaaaaccttatacggcatacactatagccatttctagcttggttggaagggcagcagatctttgcttctacttgaacttgtgccatgaccagactcattatgagcaaactcaaaatcaaaattcttcctttcatcttttgaatggtttacttgtttgatcacaagggatgttattatacgtataaagaatacactactaagtttgtattgatgaagttgtcttgaaaccagacttgctttaaatactaggaaacattcggactagattttagttagttactcatggcaaaaaaaaattccaagtagttacaaacgtgatttttgtgtctcttcgttttaacggctaaccaacttatctaagtggtcatgggagttttcattttcactttgaatattataaattacgtttattactatactatgtaagaattattataaactgtaaatatgccccttgatattacataaaaaatcaagtgccgtacgcaacgtttaaagtt

SEQ ID NO: 16579 - DNA, 577 bp, Arabidopsis thaliana
gaatttaatctgatgattattgtttttgtttgtataggtgataattacttgaaaccgtatgtgattccggatccggaggtaacagtgacggatcgaactgatgaggatgagtgtttgatcttggcgagtgatggactatgggatgttgtaccaaacgagacggcgtgtggcgtggctcgcatgtgccttcgaggtgctggtgcgggtgacgactcagatgcggcgcacaatgcgtgctccgatgcggcgttgctcttaacaaagttggctctagcaagacagagctccgataacgtgagcgtcgttgtggttgacttgaggaagaggaggaataatcaagcgtcgtcttaataattagtgttataattagtagtagtattagaataattgttacatagcctaattgtaattgtattcttgttatttttctattttagtttttctcattttaaggtgttttttcttttctattttagttagctcttaattcaggctggggaagaaaaagagctgattaaatagtttgagtatttttcttatttttctattcaggtaatattatacatgtattctttta

SEQ ID NO: 16580 - DNA, 623 bp, Arabidopsis thaliana columbia
cttctcaggcgacttagacattgaggcggatgaattgcaaacttttgggagagtagtctttcctttgtatgcattgcagatttgagctacgagatcatccgtactttgtacgctctgcattcccaataccaaaaaagagaacacaatcagtgatatacttttttgattgattcaaaaatgtaatgaatgaagtcagattattcatgaaataaagagtttataagactttatacgtcatcgagtggcttgccgttgagtgtgacccatggtacgtattcatgtggcggcttcaaattcttggttttggttgcgtacccaagtatcagctgcaattacaaataacacataaaagttggttatatgtgtatattatgaatttttttttgtttttttaatatatacgtacctttctagaaagatcaccattgtaacaatcattgattgctttctcacgtccagagtttttaacacatgattccagcctttcgtatcgctttcgacgcaccgtatgaacgagtattgtgatttcatgcgtccataaccatcacatttgtcaaactgtaattctaacattcagttttcctgaataaaaacttaggaaataaatcaatctttatatcctg

SEQ ID NO: 16581 - DNA, 1235 bp, Arabidopsis thaliana
  unsure (1)..(1235): unsure at all n locations
cccttgaagtcgaatgaagcttaacatgggcatcaagttgatgcttcatcccagattgcatagggagtggctgaacacttccgatgatattgagcaactgaggacaaaactccctggatcaggcaggttttttgtgatctgacaatcgataatggaccttacatgctcagaaaacaataccttctttgtcttgtccttcttaacctttttcaacaaaatggaactcatgtctttggttagcaaattcgcttcctcgaagttgattccattgttgactaaacgtttaacgtatcatagaagttgagtagatgaatactcctaagcatccttcggaatagtagtcatgatcttctctattatggctctacactttttatcatgtacatccttttagatcgacgcttcttcagatacagaactttaggagtgtaaactgactctggcttcgttggaatgaaaacctcataaggtgcagctcatacccattgttgatcgacacttggagtatgtcgatcgacactctatgctttcgtcaatccatctctcttaattgatgacaagtctacattgttgaatgttgacgtaggcttggtatgggtttggtgttgatccacaccctgatggtgatagtcgacactagctttgattgtcaatcgatgctcacgttctctattcgagaaagcttcattagcagattcgtcacacaaatgaccatatggtgtcgttcgacactagtaggtgtcgattgataccagcaagttccatctcgtcttctgtattgagtttttcccaaacattgtgtccttctctgaccaagatcacattgcagctcttccttggattgacatatgttgtttgaggaagacaaccctcttgtctcttaacagattgagtagtttgagttacctaaacatcgagcttcttcatgtgtgagctcaaattgtcagtcttgccattcagatcagtgtagatggcatcacacttctcattgaagtccacaatcaacttggactctccttctagaatctgctcaagcatttattccagcttactctcaacattgggtggaaggggggaagggcttgataaatttgggtgaagttactctatggatatgtcttatgaaaagcaggctttggagtaaaacccaaagacttctggttgcttcaaaatgattancattgtagttgcatacgacggaccaaacttcatgtattcctgactatcaatgtaga

SEQ ID NO: 16582 - DNA, 1229 bp, Arabidopsis thaliana columbia
ctaatgtgtgattcacgaatgacttggaaatattttaaatccgggagtggttccaagtcctgaaatcgatgaacaaatcagaacatatatatttctctattattcctggcactggtaggacaaaaggaaggcaactttaaacgtaggacgcctactctgatatcttcattaagagaagagtctgaactaacaactagcttgtgtagcaaattaaccagttgagatgacttcgcaccagaaattttggtatctgcttcagcatcaatgcagcatgtaaccagctttgaaaccaaaaactaaaaaaccagcagatagagaaaaagtaagccatattttctagagtaataaaacccttggtatttcagaagaggacccaaatgataacattaagtaacacttacttggagttggtcacctagtacactaacaatttctttggcaggattgcttttgaacaaatccagcaaacaggacgctatactacaacactggtcttgtagtgagggatagccgataaattgtccaacaagattgaatatgtagctgaaagagaccacaattaaagataatagtacattttaatgctcgaaaaatatatattcacccttcaatgccactcaaattttaatttacagatgaagctcatgtttagtagcagaacaaataagattaaatagataaattgagaattctgctcactttaaggaacttggaactaacgctctatgaccaagaagaattgtaagctcttcaagagcggccaaatgatgacgcgtatgccgatgatggcatgcagctgacattctatagtgcatttctgtaatgaactgcgaaacaacaacaacaatattgtgactaaagtatcaaattatcaagaacagtgtgacctcattaaaaagctttggcaaattaaaatgttaccatgaacactctatccgggcgaaaaatgtttatcctgtcagtgatggccgcattcttaggataatcagtgctgcataaaacaagtaagaccttataaaaaggaaaaactaaaacaacaagtctacattgagtgagcacgaaattttacttttccagaaaaccatccacaactgtttgaactgcaagtgaaatagtgtcacgagaaaaagtaggaactggaggttccggtgaagacgaagcgcatgataaaataaaactaacaatagacacctgaaaacaaaacaagggcccattagatattcaatacg

SEQ ID NO: 16583 - DNA, 1511 bp, Arabidopsis thaliana
cattttctcttcaaagtttcaatttttcttaatgggtattagccaaaagaggaagaagaaggaaacatactgagtaatcaagaggacatcaatggaagaaggatcaatctcatcgaagtaaggcaacgcagccatgcccgagtacgcaggatgaatcccacaatcaaactgcacaacacaaccaaaatcaactataagacatgccccaacaacaaaatcaaaacacatttgcttgattagaacaaaacggagaagctgaccagaatatttttgcctcggaaggacatgtaaacacaggaacgacccacttcacttccggctcctaacggagtaacgataagttgatctccatctcgcgaaattggttgctctcttcttttcagagaagtagaagaagaagccatgtttcgtctttctcgattttcctccaagagaagaagaaactcaaagaactgagtacagcaatttcagttagtgtatatcttcaaaccctaaaagcctttaaaaaaaaaaaaacgaccacagtgggagtcgaacccacgaccttttgatccgaagtcaaacgcgctaatccactgcgctatgggtcattcttgttacttatatcatgaacaacatggtaagccaaaacttcttctttcctctttcttctttctgttttctggtcgctcgttaccaccaagacctcgtcgaggtttctctctctctgaaaaagtgcttttgctgcgtttccatgctctcggaaggaacttggctgaatcgttggagaattatcgatctggcgtcgttggtgcatctctagctgcgccaattcatcggatccggtttgatttctcctttcgcgaatctagccttccgtgatcttaggtgggttttcgaattgatctgtaattgaggatgtaaatcgaaactagggatttcctagatctcgttagctgtgtatttgattattgcagcagagtttttgtttaggtagagatatagggaattttgatatagggacacttaaattttggtgtatcaatttgctgcagcagccatgttctatggcacagctgtatgggacccttggcttatcgttggccagattatttgcctccaatgctcttactatctcactcttggactcttcaccatggtctttcttggccttcgtgttcctcgccttagtcttgtctacttcttcgattacgctactctcactacttccaccttcaccggttggtctgttattgcctcattcctcttctcttcactcgctgggtattttgctttgcccctagtaatagtatccaccatttatttcctctttattactagtcttttcagattccttgtattcattttaattggcagggctgtgtacatgatatttttggtggagcgagcacggaaatgcttagatttctctgcaactctctacatcatacatctcttcttttgcatcatgtatggaggatggcttcctctatggcgtggtgggttggtaatggaaccggactcgctgttat

SEQ ID NO: 16584 - DNA, 966 bp, Arabidopsis thaliana columbia
actattaagtctagtaaacttggaagtacaatttacataccatgccatgtaaagagaaaatttgaatgctgtcaacagatcctatcccaacaataacaacattcaacatgcaggcataaccaatcaaatgattttcagccctggaataatctgctggaacgggtggggatagtaatcttgtaagatattcaacagtgtgttcctgtacatcgaagaaagatagataaatcaaacatgtctgttcaaccgaaaattctcactggtggagattctgattagtggatttaatgccaacctgtatgttccaaccccgtgtgagagatgccccgcaaagaactgtagcagcagatatcttctcgtcatccgatcctttgactgcaacctcaaatagtttctcgagctctgctaagcttccatcaaatccatgaggtatttcagttgctttactctcggtaaattaaaaaaagagcattacctggctaagaaacaaaaaggaataactgaagaagaagcagaacttaagtcaaactagaatgcaaccactattctcattgtggcaatggtttccttaggttacgactttgaaactccgtagcttaattttgtatagtaattttaaattaccactgactgtatgatttggagggaagactatgtggatgaagtagtgtggagctaatagagcaaaaagaaacaaaaagaagataataactcattctaccttgaagcaggaactgaaactaatgtattcaccattgcggcatttagtggagccctttcacaaatgatgaccagcagggtacttcattcggcagactctgaggtatttggttgattcgccattaacatagccaggccacgaataagctgacatatccagtatgtttcttgcaatacaagcctcgactatcaggtggcgcatgtttccagctacgggcatgtacaaaagtatgttagcgcgaaaga

SEQ ID NO: 16585 - DNA, 572 bp, Arabidopsis thaliana
gtgtcaaaaaaatgtgcctggtgcatatcggaaagaatctgcccgcagaaaaaaaagccgaatttctggcaactctaattgcaatgaaattaaaaggtgaaatctgaaagaaatagcctgcgtatggcgcaggctatgaacagtgtgtatccggcaagatcattcactgaacaaaacgaattttaatctgagttgaggttaaaaaacaatgagcacaaaaccactcttcctgttacggaaagcgaaaaaatcatccggtgaacctgacgtcgtcctgtgggcaagcaacgattttgaatcgacctgtgccactctggactacctgatcgttaagtcaggtaaaaaactgagcagctattttaaagctgttgccacgaattttcctgtcgttaatgacctgcccgctgaaggtgagatcgattttacctggagtgaacgctatcaactcagcaaagactccatgacatgggaactaaaactgggagcagcaccagacaacgctcactatcaaggcaatacctacgtcaacggcgaagacatgactgagattgaggagaatatgctactcccaa

SEQ ID NO: 16586 - DNA, 515 bp, Arabidopsis thaliana
tttgttattgaatagtgttgatttttactatatagatatcaaatagaataaaataaagtttttaatcctgggaaaaaaataatcaaatcaaacgattagatttttagaaattgggttgaaacttattcttctgacttacttttcagtcctacatcgatcaaatcagaagaaaaaaaaaagccttcggttattaatgcgtttatcaagaaatatctttgtcattaaataattttgttcaccaagtcattatttagtttttttagttttttttttaacacagtcattatttagttaatgacaataaatcaggtgtttaatgagaatgaataacggagtttagactttagattataaaccttactataacgccagcgaagaataattctgaagaggcaaattttcagagaataattactttagctgttcgacaatggcggatccactgattccctccccaaccaacaaagctttcttcatcatagatctatctggacaaaaatccaatcctgtacttt

SEQ ID NO: 16587 - DNA, 555 bp, Arabidopsis thaliana columbia
ttcaggtagcttaaggagagattgtcgatgagaatcaagagcagtgtcttggtaatactccttgagataatccgggttaagaacaagatctttacgatgtgggaggtcaaggattagcacaagcgacttggaactgctctgtattagttcgaccacaaagtttggagcttttgttgatgagtttaagaatccagagatgcttgttatattcaaagatactcctgttgggatcttgcaatgtatccaacttcctataacaaaatcaatctgcaaaacaaaacaaactttaagattctctaaaaagtttttttttagggttatgatttacatcgaaattgaagtctgtttctacttaaaatcaagcaattgagctctaaaacaagcatgcaaaacagtcaatttcgatctcataactgaaaaacagagttaatcgtcgcaagtaccggagaagatttgtcgccggatctgatatgaagagatgcttcggcggaaccgttagggttattgaagtttcgtacatctggagggaggttacagggaggagttgtgattgga

SEQ ID NO: 16588 - DNA, 559 bp, Arabidopsis thaliana columbia
cctttcatccacatacttagcccaaaaccgggccatggcacgttcataaggatcttgaggcaagatcgtgtgagttgtcttccacgtatcttcgatgtattcgacaatcaccaatgattcggctatcgatctaccattgtggatgaggacagggaccttcttgtgtatagggttgtacttgagaagcatagggctcctgtttccataaacatcttcttcaatgtactcataaggtatgcccttaagttttaggaccatctctactcttttgctaaaaggacttccccataagcccagaagctttacgtgctcttcttggttcatctatatatcctgtttaaagaaaatataccggtttggctttccctttgtgtgtgtgtgttttattgagcaatgatggttagcagttatttataaccactttggatttggttaaatggatgtatgaagaatagttggtcacgagaataatcagattaatgtttcgtaaaatttgacattaacaaataggatgaatattaggtggcaactttttgactttaaatgagggtagtggttg

SEQ ID NO: 16589 - DNA, 1272 bp, Arabidopsis thaliana columbia
cccatattcagttgccaagggatcagttcgtagaagtgctgaagatgtgcttactgcgcccacagatgaagtttgcaaaggagggggagtccactttgcggacagaataacatgcatgcatctttaaagtgaccatggcgaacatacacccaagcaggttttggcgagcatgctgtagaatcagacaaacaaactcaattgaccaatacaaatgtaaaatgtaaccagtgcaaataatgctaatttcataagaactcagaaagcactcttaaaaattgggtccaccaaagactagttcaagtaagataagtatattctgaggtaattccaggagagcaaacttgcaaattccagaatgcactagaatattattgccttacttcctgcaagtagttggtgcactcagaatagcgtgtagtatccaagttgcttcggggcccatcttcaaagtctgaaccaggtacagaactattcttttccgattccagagatctccgcgacctctctgaacgagggaaagtggatggcatatgcagaacatttaggtatgagtctgctgataaagaatcgtccaaaattgtaggtgcgcttttcgccaaatggtcatacctgacacgtgtcaacagtcccaagaataggatcagatagtggattaccaaagcctttaacctttttcttcaacttatatcaatcatgattgtagtttccaatctccacaattttacgatttcctagagcttagctaatgaagctgcgtttacgtacttacaaaaatctaattcattttgtgttcaactgaagtttatattgaccaaacacattccggttctgtgactggattagcaggatatttttacaaaatatgtctctctactacgccacatactaggataacagttttagctaaacagagacacttacatggaacgtacaattgacacatccacaggcggacctccttctattgtatttattatctcctgaatgacatcaggaatgtcttccccctttaattgaaaggcttgcctataaagaaaacaatgagaactgtattacagcacgcaaattgaggttgcaatatgcaaaaagagtgttaaaattcatgtgttcttccgcagcattaaactatttcatacttgaatttgactcgagcttgagcatagcgctccatccgtaacaaagcaagaccccatgctttccacacggggaaaacatcaatctgaaattaatcaagtaacacacgcagaagttattgcgaatttatgatgaagt

SEQ ID NO: 16590 - DNA, 1193 bp, Arabidopsis thaliana
caagtgtttggcacaagagcaatactatccccaacgtcgacgtaaaatttactaaaagcccaatatggtttaatagaaaaattaacataaagcccaaattcgatgtaatgggctttcatctttcaggaaaaattaacattagcccagatatgccaatagagtagagataatgacgagtgacgacataaaaaaaggcacgcaaagaatataatattaatttcttggtggacaagcatgtttgaccattctcattttcttgtgcccaaacttatatttggtatgctcctcctacatatagacaagacaatggtaattcgacaattcatcaagtctcaaatctaaataagtaaacatgaagagtgaaggtcgtcatcaaggcgtcgtaaggacaggaatgattcatccgcggggctttaatcctcgacacaccaaccgactcgattcaccaccagtttttggagattttaccaaaatgcaaccaaagactaccaaccattcaaatatcatcggagaaagtgagcggtccaagtacagtaattgtcatgtgtcgccggctatcaagtcgggccataaatctaagggtcgccgtaagctacaaccgacaagttggtggagtgaggataagctagaccggctcatcgggtcggattcatcctctgctaaggatattttggatatgttatgtagtgaagatcatgatgagtattaataattatcatgatgattaaccatctcgtttaagatgtatgaagattattgttttttattttatatatgtttgaactttcatagaaatgataataattatgggaagaaatgtaattatacttttgtgtcaaaagcaatctaacgattttttttacaaaattgtaaaatgaataacatggtgttggcaacggtaaaaaaacatgtagctattattattatgggccgaataaagtaatgtagtattataatgggcaaatgaggcccaataatacatccggtagaaacacggaaccggcataaatgagggagataaggagaagaagaagcgaaagaataaaagtgtgacaaattaagaagagagaaatggggatagacggagaaggagacaagaagcgagaaacaatggcggtgatgagcttaatgaaggatcaacagaatccaattcaacagtttcaagtcaaattcaaggagattgagactggttc

SEQ ID NO: 16591 - DNA, 698 bp, Arabidopsis thaliana
ggtcctgcctagggcaaataagattaacaatttggttgtagtcagaaactgagaaatgtaaaattgtgcgacactaaaatcagcagagaaactggactaaacattagaaaatttcataagcagaaaatcaagaatcaataaatagaatataacaaattagcatgtaacatatccatgtttgttttcaacacaattcagtagagcttaaccataggctcaacttcatatacacacaattatttatttggttgtagaaagttaactgtttgagttgttatttttcatctccgaataaaacagtcttcgtgttatggattgatcaaacagtggttgtggcgatatagttccttcgataagcagctgcgtttgttggaatcaacatttccttgaatccttcatccactaaatgtgcacccaacatttgcaaagcccactgttgattcacatagtaaaagtcatcataagaaacatgtttttataatttaacaacaaaaaaagagtttataaccgttaagaaggtagaaattgtgttagatagccaagaaaatagaaaggcttacggcaagaattctgaggctatgccaaaagcgacgaggcgaaggaaacggagagagcaagtggcccatggacgtaagggtgatggctacaagatgaaggactagagtaagagggtgagggttcatgcctccgggggatga

SEQ ID NO: 16592 - DNA, 600 bp, Arabidopsis thaliana
gttattaaaccgtacaatacaattgcacaaaagccttccagagatattacaactccaacaacaaacccaaagacacataaatgatcaatcaatagacaaagattcatctaaaaatgatccaacggccagaaacccattacgatgcaaattaaaaaagcaaatcacgaaaaattcatcagattaacaacgttgaatttgacgtcttcagtaatcggtggtaggcaattgctcgtgggcattttcatcgatgaagacaaagtcgtagataattccggcgagtccaccaccaataagaggaccagcccagtaaacccagtggttggtccacgtccagcttacgacggctggtccgaaagcaacggctgggttcatggaagctccgctgaaagctccaccggcgaggatgttagctccaacgatgaaacctatggcgattggtgcgattgttccgagactaccgttcttggggtcaacggctgtggcgtagacggtgtagacgagcccgaaggtcatcacgatctcgaagacgagagcgtttaatgatccgactccggcagagagaccgaacgctggaattggctgaaaaaacaatcatttgca

SEQ ID NO: 16593 - DNA, 488 bp, Arabidopsis thaliana columbia
acctagaactctcatgacagcttttattatcctcaccagacgacaaacccaaacatcaacgaaaaccctaatttgacttcacctgactctcctccacttagagaagccctccctctccttagcttaagccccattcataagcatcaagaacctactgctaaccaccatgagtactatttcatggagacgacagaaacttcctctaattcaaactttcttgatcaatgccaagacagttatcgtcatgatgtaaccgtggatcttcatctagggttaccaaacctcggtgatggtggaagcagcagcagcgatgtggtccttgattccaccgaccaccaagagggtcaccatgatcatcatcaagatcaaggacttgaagttactatggcttctgaccatgatgatgaacatggtggcttacaaaggggtaatcatcttcatcacttttggatcccgactccttctcagattctgatgggccaacacag

SEQ ID NO: 16594 - DNA, 1401 bp, Arabidopsis thaliana
  unsure (1)..(1401): unsure at all n locations
tagaggatagaggatccccattgaacgagattcgtgtaaaatgaattatccggtttggtgacggacaccttccaacatttaacctctccgtcaagacttccactaatgatcgaaacgacatcgtctaactccttttctctaaccgccgccaacgacttaaccggcttggtatgaccggaaagaacctccaaacaactataactagaatcgggtccacgtcgccaaatcctgaccgtccgatcagctgatccactgagtagcaaatcagagacgttgaacaagctaagtattgctttatcatgtcccctcaacgcacctctcaccgccatgtaattggaagtatcctctctctcccaaaccaaaatagaccggtcacacgaaccggagaacaaaaccgatccgtcgtcgtttaatgctaatgcgttaaccgccgatttgtgcttctctaaagtcgcaactaacgtgtgacgtttctcaccggtcggtttggcccaaacccggatacgtctatccgcggatccagtgtaaacggtgccgttagtagaaacggcaatggcattaacggcgtcatcgtgagctttgattgattctttgcaacgaagatcggaggctctccatatcttcaaagtcttatcccaagaaacagagtaaatgaatccgtcactaacggcgagacagtaacggcgtcacgatgttcgatccagagacgtttcttatgacggcgtacttgaacgtagtttttaggaagagcgaaacgtcgtaaacggtcgtttaaagtaggaagcgtcgttaactgtttataaccgcttttcgccgtaagtttccaaactccgattttaccgtcttgatgcgccgtgaagattttctcaccggagaagccgacggacttcacggttcctgagaaaggatcttggccgttgaatgtgtcgagatgagcacacatgtcgcgatcgtagatacttacttcgtgtccagacacggcgaagaggtaaccaccattgacggcgagacaagttacaggaagactccgttcacggagtttaaacgaggaggtaacggagtgagagacggtgacggtggtggatgggattttctgaagagagggaactgaaggaagcgtttggagagagagactgctatgaaggctgcttgagccggtggttacgtcgctgagtgaggaagatgacgtggcgctttcgccggaatccaaatgcttcggcgatttgggtattcgtcttctgtcggaatcgaacagttttgagataacctcatggtggtttcgatgtttggtaattgaaaggcgtttctatcgattgataactanagtgattcagaagaagggttaggtttgtgtcggagagatgtatatagagagacaagaagcgcgtcgtgcagagagat

SEQ ID NO: 16595 - DNA, 1526 bp, Arabidopsis thaliana
  unsure (1)..(1526): unsure at all n locations
tatatatatatatgagtgtttagagtactagtagctatagctagctagggactaaattaaacgttaagatattagaagagacaaattaattaaggtccctggtgatggcaggaatacagcttgaagtacgggaaatggcgggcttagggataatagactgacccctcgtgcttctccggagcatatctctcatggcatcagcttggaagagagccggatactccctcccgagcttgttgaacctgaggcaggcgctcatgtgctccttcaaggccccttctagcccttcctcttccctcttatccctctcctccttcaccgcctctgagcacagtccgcatatccacttcccaaagaacttctccctcaccctctctatgtactccatcgtgcactcctccctcatcccgcagcactcgcactttgccttctctacctccactatcgtccccagtcctttctcttcttctctgtgataatccagcgatatgtctgacagggacctatgcagtgactttttccctacctttggcgggggcggcttcaccaagctntacgtcacgctcttccttctcccgtttgctgccatatccaatcttctttttttcacctagagcgtctgcgctaagctttggtatttataagcggtgctgtctgtgttgacatattcatgtgtattgtgtggttcagcattgccatctcacgtacgtcgtcacgctatagcgacctagctctttacttactctttgttttacttttcacaacaatactaattaatgaagccactaattcacgtgctacattgcaactggatcctagcctttaatacaactcttctaaattggtatatctctctctgtattgagttcatgcatatatggggatatatacaaacaaaaacattatttattttttgtctgccgtcactaatcgatctcaactaaacttttgtcatttttttaatgaactgtaaacttggtgttcatttcgttctcattaatgtagtttccttagagattgcaaaaattagatacattttgtagcatgaaatctgaattatagaaggaaatcagataagcaagtgtgcaaatatacaaaaatgtgctattcgagctaaaagtgaagatacaaacaattacgtaccaaaagcaagccctcaagaattgtgtggaggtaagtaaaaggaactatatggatcgcagagacaacgatatataggtcacgtgtgtgggagttttgtctaaccacacatataagagaggaacaacatggactcgaggaagaccactcgtaatgaagttaaaagttgaaacttgtaaatattatcaatcccaacaaaaagaagaagaagaaaaaatatatattggttgttttaaactcacttttgcgataacttggaaagtgggaggacgctcacgtgcatgcatacatttcttgtctattatatgtagctgattcaacataactctatatatcttgttgtctatattgcattatagttacacttacattacatacgtagtgtg

SEQ ID NO: 16596 - DNA, 1174 bp, Arabidopsis thaliana
tcaaaaaatgtggcaagagtaatgaggattagcaaactacttccaacagatcaaggacacaatgttacaagaattaaaatttgatgccagtaatagaccaggtatatctcaccccctcgacttgttgtatccattcatgtgcctgacttccctgatcaagtagtgaaacttccttgaaagcaaagaagtccccgtctctacatttaacataaacatccaccataaagcattttggttggcatgagccaaaggcgtaaaggaaaactcgctttcttagtatcgctttgcaactaagaaatctgattttaagttcaacaaacattatcaaccagtaagacttacgctgaaatgccttcatatacggaccctaatgatcctcgtcccagaagttgacccttctgccaacacgtgatgaaagatccttcggaggcataaatcggcgacgtattagatattgtccttgaggagtcacccttgtttacagtgaatgagcatgtctccttatcccccaatgggataaacatagctcccgtctcttccgtttccacttcctcttccctggcttctgaagaggaactcggcggcgcaactgtttcaggtggagcgaaatgcgtaacgaaatcccaagttgatcctcgaggaatatgagatagtttcattgctggttggagctgaagtactggtggtcttagccccttaatatcaccaccaaccgccacaacatcatcgggaattagatactctctcgacttcaccaaaatagtcggcgttcgttcaataccacgggttttctctaccgtaccaccaacaactacttcgttatctgccggagtacctaagatctcaagcttacttgactcagaaggcatcaactcagttgaattggcattgggattggttacaactggcgagtttctcctggagtctacgaataatagttcgtcaagagcagtcagatacgatatggaagagggcagctctttaatgtctgtcctgcttaaatccaaaaaccttaagcatttcatccttctcgacgagtctggaaatcgctccaggcttatgcagcctgaaagatttagagtttcaagatgcttcaacttgtagatgcttgttggaagattcttgagatgtctactgttttccaggtccagtttctcaagcaataccaagttct

SEQ ID NO: 16597 - DNA, 1151 bp, Arabidopsis thaliana
tatctatatattatttagtgtataattgctatatttgaatttaaccgtttaataatataggaacaataacatacagttcattaagttaaaatttataaatgtataaattttatggttacaaaatatttgttttttttatgtgtgaatatctcgaatctcaaacccaaatgcgctacatctcccagaaagaagacccacagcaggttaaatttatttttttgaagaagagatttcttccgatgtgcctcgaagctaacacatgtacctagaagatttaccactgggcaacagctcgtctcggtataaaaatatttgttttttatataaccaaacaattgaaaaaaggtaactaattaatttccgttgaaataattatacttcataaaataaaaaagaaactttacttttcctaatagtaaaattgtaacactgtaaaaccatcaaaatcctattagaaaaaaaagaattaccttactcgcatcctctataaatactctgctttggcctttgggtaacaaatcaacaaatcaactctgaaaacaatttacgaagaagaaagaaaccctaaaaatatgttaatggaagaagagacctgcttggactgcaagagaccaaccataatggtggttgatcacagtagcggtgacaccatctgttcggagtgtggccttgtcctcgaagctcacatcatcgaatactctcaggaatggagaactttcgcatccgacgacaatcacagtgacagagacccaaaccgtgttggtgctgcgacaaacccttttctcaaatcaggcgatcttgtcaccatcatcgagaaacctaaagaaaccgcttcctctgttctgtccaaagatgacatctccactttgttccgtgcacataatcaagtcaagaaccatgaagaagacctaatcaagcaagccttcgaagaaatacagagaatgaccgatgcactagacctagatatcgtaatcaactctagggcttgtgagattgtctccaaatatgatggtcacgctaacaccaaattacgtagagggaagaagctaaacgctatatgtgcagcctctgtttcaacggcttgtcgtgaactgcaactctcgaggacattgaaagagatcgctgaggttgccaatggtgtggacaagaag

SEQ ID NO: 16598 - DNA, 570 bp, Arabidopsis thaliana columbia
  unsure (1)..(570): unsure at all n locations
ccctgtaaattgcgatgttaaagaaactattgctgcatgtgacatgtactctattatccatctggtttgatcaatttcggttcagtcactcggtataactattttattttgtaattccgtttggtttagatcagtttagcaaacacattgtattgtatgtctttttctgtttgcgagaatatcaatcaaccaaatatcaaccatcttcctctttctctctacaattcaaacccgaaccaatccaatccggatatatattgagaggaagaaagcaattgctggtggtctccggatccaagaattgaaggaacgggtcaagaatatggagctaactttgttggacttcaaagttgaacggaataaggagaaggccaaatctgctgctgctgcttctaaagtcttgtcgtttaccgacattctttgatgtcgaaactaagttctagcaatctagcttaaatatttggcatagaaagactactctatgtccatccttacattctctgtnttgtgcactcactattgatttggcataagacattttattacatgaagattagttattagttgagt

SEQ ID NO: 16599 - DNA, 380 bp, Arabidopsis thaliana columbia
gtacttactcatatccttctaagctctattcacactcacgatcgcgccagcaatttgctcgtaatgtacgtatcgaacaatccaacgctcaattcccaacgtagtggtcaacaatttggttgcttcgtctaaaccgtttggtttcgaacttaccccaggagctttcaattacgtgttcaatgcgtatattcgcaacaagcgaatggagactgctgcagaatgctcaggtttgatggtagatcgatagtgctgttccttatcgtgccatatgtgaataatgatctaagtcctttagggagaagtaatcggagagatgaggctaagtcgatttacgataagctggctataagtcgtgttgcttgtgattgtggaactacacg

SEQ ID NO: 16600 - DNA, 606 bp, Arabidopsis thaliana columbia
gcagcattttacagagcaaacacattcacacatctgaatagtcggcgtaaagctattgcaaagccgggaacaagcatacctatatcaccagagttaggctttctcaaaggaagaacagtaggatagtaggagtttctataatcctggcacataaaatgagccaaaccttatgtcacataaaccaacataagagaaaatgggagggaaaatctttttctatctgaagattctagttacccaaggttcaacgtagtcatccccagttcttgtaacaaaattatgaacctcttctccatcttcttgggcagcagtaacagacgaaacagcaggaagaatactagcaggagaagacggattaacatcagaattgggcttgtcatcttctttaggaacaccaaaggaccttattgcaagtggtgacaagcttggttggaatgcaacttcaggagaagaagctgcaagatttcaaaagcttttcaagaacgatatttaatactatcaccttccacacacatggttgtccaataactcatttacagaaattagatcaaacacgactcgttatgatgaagaatgcgagcgaatacacgtataactttcaacata

SEQ ID NO: 16601 - DNA, 551 bp, Arabidopsis thaliana
tcaaactctctgattagctcataaatactaaaccagttgaccattttaatatgataaacaatcaatggcaaggtcaccttgttgcgagaagaacggactcaagaaagggccttggacatctgaagaagaccagaagcttgttgactatatccagaaacatggttatggtaactggagaaccctccccaaaaatgccggtacgtgtcttaattttcatttattattcatgttttagttatgtttttcgaaagtttcaaattgtaatatgtttttgtctcttcatcaggtttgcaaagatgtggcaaaagttgtaggttaaggtggactaattatctccgaccagatataaagcgaggaaggttctcttttgaggaagaagaaaccattattcagcttcatagcttcttaggaaacaagtaagtttgctttttttttctcctccgacaatatctactatgaaaatagttcaagattcttacgtgtttggtttatcttgttataggtggtctgcgattgcggcgcgtttaccaggaagaacagataatgagatc

SEQ ID NO: 16602 - DNA, 575 bp, Arabidopsis thaliana
caatgtactcaccttataaggcacgtaattgccatgccaggcaaccacattgaatggagagaaatcttgtttagcagtaaagagttcaccgccaaacttctgaacaattgtgtattcaggccgcaatccatcctcaaaccatgctgttggtgcaagaaaatctcttgatgcagcaagaccattagcacctgtccacatccaccaataagattcttgcggagaatccatgttattccggctgaatctaaaagaactcaagagtacctattggtccaagatcaggaagctgaaaatgagccccatagatttcagcaacataaccacgagacttcccatccggtaaatctatggagaaacggaaaccttgtggtataacagcaatctcaccaggagttaccaaaagccttccacactcagtttcaatccatagccctaaaacacccactcaaactatcagaactgatccaagactatcttgaatccattctcaatacatgactgactttatttccaaagatgtggtaaggtaaggcattgggactactaacttacttcctgtttgaggactaacaaga

SEQ ID NO: 16603 - DNA, 587 bp, Arabidopsis thaliana
ctgtcttgattatgcacaggtatgcttcatgtcccctaatatttatttttttctttcagtttgctgttatgctttttgttttttctttctggtttcttttttgtttaatcaaactaccctttatcacttcttctctcttacagatatatgatattgttcgttataaactgcaccggctcaagaaaaagttcaaagatgaactagaagacagaaatactgttcaggagtatggctgtcctaactgcaaaagaaagtaaagtccactattctttatgtttttaaatctttacatggtgagttgtattattttcactaaacctgtatagattctcatttctggtatagatataatgcactggatgccctgagattaatttctatggaagacgattcttttcattgtgaaaattgcaatggtgaacttgttatggaatgtaacaagctaatttccgaagaagtagtagatagaggtgacaatgcaaggagacggcagcgggagaaagtaaaagtttggcttcaggatttggaggtctgtgtttactgttttagcggctatttcaatgaaagtatgagaaaacacaaattga

SEQ ID NO: 16604 - DNA, 566 bp, Arabidopsis thaliana columbia
tgcgttgcatttgcatctaaatcacagctgaagcaaaggcaacgcatgtacaacaccgacaatcgatactagcaacaatactatccaacccggtaatgcttctttcttgttccttctcctctctttcaatcccacttcttgaatactttcctttttaagaccaacgcttttctctgattcgactttcgcattgtccttctgaggaaaatcctgattctcagatgttgttgtctgttgagtggctgcttcttcttcagctacttgttgctggctgtacttctcgacatactcgggaaatagtttccggaatgttacactgccacaacagtttgaaaaagatgagaaacataacatgtagaagctatcttgttctctaatcaacttctgagatgtatcctaaacatttttttggtgggaatggaacttaccttttacaattgaaagcaagagatgacttcgccaaccgttgtttctcggctacactagtgtttaacttcccgttgtggggctgttaccatctgtggacacaaggttgtaatgcggaagaatttatgaacgaatggaga

SEQ ID NO: 16605 - DNA, 431 bp, Arabidopsis thaliana columbia
ttcctcgaagccatgcctgatatgccgcctccttgttcgtcatttccacttggataagccctttctgcacctgattttaacatgttttcaacacccatcaatgctcactcgagttacatactcttaagaaaaatttggcttctaacgtaaaagaggttagtttcgtgagatgtgaaaatcttattcctttgcatacatattccaatacagtttatataacattctggttgttctggtttgctacttgctagcgaatagaatttacgaaaggcttgctaagttcaatagagtcacaaattcaggctaagtttacagtagtagtatttgaaaaatcttacctttttcacagcctcatggtctattggcggtaaagaagactttgtgatgggcaagtccttaacagaggatagaaagtattcttcccacggtgc

SEQ ID NO: 16606 - DNA, 445 bp, Arabidopsis thaliana
cccgtatccctgtgcttcgttattgtccggagtgtttggcaccgtgtaagtgaaagtccccataggaatatcattatagtctttcagatcattgagtatagacacgacggcactcatacatggccggttcttgggtcgatggcttaagcattggtaagccaatgttgctgcttttcttgctcctgtctctgagtactgaccttcaagtctcgggtccatgattcgagatagtttacgtgggtcattgagcattggacgagcccagtccacaaggttttgttccctcgatgatctctttttgtctactgatctccgtccggtcaaaagctctagcaacacaactccaaagctgtatacgtcacttcttgctgttaaatgaccggtcatgatgtattcaggagctgcgtagccttgtgtgcccatcactcgagttgacacatgagtg

SEQ ID NO: 16607 - DNA, 524 bp, Arabidopsis thaliana columbia
gggagttgtgtctctgtatcaatatcatgtgatcagttgacgaagaatgtttgtagttgcttaaacaggaatggagattacattcatggcttagaggagaatctgacagctctgcagagagctcttgagcagattgagcaaagacgagaagatttgttgagaaagattttgtctgaagaaagacgaggtttacaacgactttctgttgtgcaaggatgggtttcaaaagttgaagcaatagtacctcgagttaacgaactcgtcagaatgagatctgttcaagtccaaaggttgtgtctttgtgggttttgttccaagaatcttgtctcaagctaccgttatgggaagagagtaatgaagatgatagaggaagttgaggttcttcgatatcagggagatttcgctgtggtggctgagagagttgatgcagcaagagtggaagagaggcctactagacctatggttgctatggatccaatgcttgagagtgcgtggaaccgtctaatggaagatgagattgggat

SEQ ID NO: 16608 - DNA, 580 bp, Arabidopsis thaliana columbia
tggagaatttgtggctgtttcacaggttcgtactgggtgtaaaagagaattgcaatttgttttgaaatctcagtctgagatctgtggtggtgagtctttaggtcggactaggggaagtagaaacttgaatggtgagtctagaagtgtggaggttaagaaatcgattcgcgcgtctggtttaaagagtgggattaagaagatgcgttttagtaaagatgaggaagttggtgaagttgtaatgtctgatactgttggtgttggtttggaggaagaagaagttaagagtgatgttattgatgttgactctgctttggttgaatctatgagtgaagataaaggactagaagagaagaatgatgttgagattgagaatggggatgataatgtggtgatgaatgaggatcacttacttgagcaaactgagaaggtttcagagaaggttatagaggctgagaaggtatgttcgattggaggagacagtgttattgatagagaaatagttgtggcatgtcctgcaggtcttagtgtgatggaaaaaatggcttctagatcttgtaaggttaagttggaaagaggtttg

SEQ ID NO: 16609 - DNA, 542 bp, Arabidopsis thaliana
tttcatactcaaattctctcaacgcacaaattatataactaaagccagaataaaagaaaacacaatcaagcatattgaaccactaaaacagtatacagatacctccaatttctgaagcatattttttaggttttcccgccgccgtctccttgcattatcatctccatcaactacttcttcggaagttagcttgttgcattccacaacaagttcaccattgcaattttcacaatgaaaagaatcgtctaccatagaaattaatctcagagcatccagcgcattatatctacatcagaaatgaaaatctattcaactttagtgaacataatacaactcatccatgtaaagattttataaacacataaagagtaatgggctttacttcctttggcagttaggacagccatactcctgaacagtattcttatcttctagctcatctttgagcctttttttcatccgatgcagtctaaaacgaacaacgtcacatatctgtaaaaaagaagaactgcaagtttaacaaagtataaggtagtttgata

SEQ ID NO: 16610 - DNA, 1091 bp, Arabidopsis thaliana
  unsure (1)..(1091): unsure at all n locations
caatgtcagttgttactttgcctgcggattcttgctgattcagcttttcagctagctcttgctcctccagtatagccgcgtagtaagctttgagatactcatcctgaagaaaaacgaaaatactatatcaaaattatggaaacaaaacccacaaagatactactgtgggaatctccccaaaaggcattaccttcaaattcctatcatcatcaccattctccatagatgagccaccatcatcagcctttgcttcatgtcttatttctcctctttgttcatcggacagattcattcctttcttgatcaaccatgaaggcgtgagtttccttctagaagaatctccaacttcatcagatttgacatcttcgttttcttcacaaggttaactcaatctaaccatgcaacatttaaagaaatcaacaaaccacacaataaaaaaagcaagaatgcagggagagctttgattcatctatagtgtaactaacgattacctctgtctctccgagaaatggcatcggtgttgaaccatacccaccctgtggcctcaaagtatcatcagggttaaggtcaccattttcacgagcagccttagctacacgagtctcccatgccggaaaagattcaaagctaggaaccggtagtcttttattctgtttatatgatccatcagaggtttcagtcgaacctccatattctgaagcaaatcttttagatgatcccgccgactccttggattgtcacttccatctactactacttcttcggaagttagcttgttacattccataacaagttcaccattgcaattttcacaatgaaaaaaaatcctcttccatagaaagttatctcagagcatccagtgcattatatctacaccagaattaatgagaatctatttaggataagttaacataacacaactcatgaatataaggatattataacataaagagtagtggactttacttccttttgcagttagggcagccatactcctgaacgttatctttatcttctagtacatctttgaattctttcttcatccggtgcagtttgtacagantacatcatatatctataagagagacaag

SEQ ID NO: 16611 - DNA, 1111 bp, Arabidopsis thaliana
ccgacatcgacgactttaaggtcagttttattcttgaactggttttagaaaatactaaacaggagctaaaaaatcttgtgggaaaaaataaattatttgaaatatttcttaattagtaattgatcagtccctttctttatcagtggattattctgacttctgatcctctggtttgttaaaagttacactagtgtgatagaattaagattaggtgggttaaatctatgagatgaataaaaaagctgggtctataatctaaattaaaaaaaaacacgttgacaaaacgaaaaggctgtctaagtaagtagaagcagtagagtaagaaaaacagagaggaaacacaaaactcaggctttctcttcttcccaagcctctgtcactcactatcagtttagcagtatttgtctcttatccagttatttttaatttctatttttgtattaatgttattaatttcattagagaaacgcattcgatttagtaattaatttaggaaaaagaatatagttgtgtttgtagcatttatgattttggacccaaatattggctggcttatattcacaacggtctatctcaacagccttttattatggaaaatattttatataatatattgttttctcttatggtacacctttttattccttcaacaataaatataaagaatgattagtttacttgtttcaactagtaaattaattttacttttttaacacggaagttctgcatctttttgacgcataatcttattatccgactttaacgtatgataaatattcatgcagcaattctaccgtgtgagcccttcctttaacggccacatacgtggttcatcagccattcccggcaccgccggagggtctaaaactgttggtcgttggctaaaggaccggcgagagaagaagagagaagagacgcgtgcacaaaatgcacagcttcacgcggctgtatctgtagctggagtggctgccgcggtggctgctatcgctgcagccactgcctctcagtcgagttctggaactgacgagcaagtggccaaaaatgactccgcggtggcttctgcagcgactttggtggcggcgaagtgtgtggaagctgcagagattatggg

SEQ ID NO: 16612 - DNA, 841 bp, Arabidopsis thaliana
cacattatcaatatttaagtttgctctagtatgtactatgctatatgaacatgtcctctgctttctgacacaggaaggtttgaaatttgccataatggttactctgaaagtaagatcaggccatttatcattatatctcaatcctgtttttttacatgaactatagacgaactcctgtactccgttattacatgaattaaccgaggagtccaatgatagaaagaaaaaatgaacaaactaactgtagaaccatctgatagagagctacaggtgaacgtataacagaaaaagaatcagcaaactaatccagaaaatgcgaaagagcccatcttgcggaaatcatttctatctcatcctctctctcagcatcttcagccccatgtacctgcaattaaagccaatgaaatttgtttttaagtctggtcaaaaaggactgatacagtttcgaagagtatacactttgatggtttcttcttaccttccaagcatcatcaaggtagcctgaggattagtccctggagagatattgaaggttgatccatccacgagtctaagagaattaacaccaatgactttgagatcagagtccactacttttcctacaacagcgcctccatggtagtgccagattgtgctcacagttcgtctgcagaaatctgccatcacaagatcatttgattggtccacaggcaatggagctccaacataaccatgaacctactggttcggcaaatccattccctgtatcaataaagtccttgcatagctcggctcctgagtatttctccaatcttcctagtcccattgacacatctctctagatcctgtggataactgaagt

SEQ ID NO: 16613 - DNA, 587 bp, Arabidopsis thaliana
tgaggagagttacaactaaggatttgattgcgtacgtgatgttctcttgtcttttgcattatggtgttgtcaatatttgttttagactatctgctgctaactatcaatttaacactttggcaggaaattcggtcttaaagaagatactattgactttattggtcatgcagtggcacttcactgtaatgacaatcatctccatcaacctgcctatgatactgtaatgagaatgaaggtgaattgctctcatgggactttaaagtgtggatccccttgttttcgaagtcttcttttttgctctcagtatttcatgtttgactctgttgctttaaatgttttatcagctctacgcagagtcccttgcacgttttcaaggaggttcacatatatctatcctctctatgggttgggagaattgcctcaggtttttttcttcttttgtacattgctttatttggttggtgcaactattctggcgttttggactatagtttctaaattctctcttatcttccttggctcaggcatttgcacgacttagtgctgtctatggtgggacgtatatgttgaacaaacctgagtgcaag

SEQ ID NO: 16614 - DNA, 517 bp, Arabidopsis thaliana
catcaatgctacctcccttccgtaaatctaaagcaggactcttttgtcagtttggatgcagcaattttttctcttgcgcagctctatgttcttcaggttggaaaagaagtagttttaaatgatgactaattgttcttttctgtgttgcaaatttaggttcttttggcattagctgaacttctatccgagcttttgaaatgtaaaagaaagagttccgggagtttgtctaaaggtcaagaaacatttccttcacgctccatggatgatattctttcctttctacatggtccacagtctggagataaagactgcttcatatgcgttgttgttcataacattgacggccctgctctaagagatcccgaatcacaacaaactcttgcccggctttcttcttgttcacacatacgcttggttgcctctattgaccatgtcaacgctccattatgtaagcactattctctatctctcctgctaattgcttatcatggctgaggtctattgcaaaaaaattctg

SEQ ID NO: 16615 - DNA, 505 bp, Arabidopsis thaliana
gtgtcagctagcaaaagtgagaatttcttgttcttgctgcggctttctgactcacattccaagttctggaaaccaagagacacattaaatgccatcttcggtctcaatactttatcattctttgcatttatatttaatcctgactctcggaattccagaccgataccagtcccagcagatttagttagcttgtcaacgaactcaggggcattcttttcaacaacagaaagggcagcttgatagacagtgtttatctttcttcctgacctcaaagcatcaatagcagcctcatgtgccttgagaagaacctcatatgccttgctctggagagaagttgcatctattaggtaggtcctggcaacatttgagcaataactattatacctagcaccaacagcacatattatgatactcgctggatcataagtgagcagttcatcattgcttgcagcacttggtttgagatcaacttgcctccgctttgaaatatcggagggtagcatat

SEQ ID NO: 16616 - DNA, 946 bp, Arabidopsis thaliana
ctagaggatgaggatccccatggctgtgaccggatatcctacagtaacattagctttgttgcatgcatatatctctcatctctgttttatggtctgttgttatgaatgtgagccttttaggcaattttaacaatgtgagcctgtatgttaacattattttaaaatgttttataatccaattcaaacaggtcaggaagattggcagggttgctcgggcgattgccattatgagccaccctattccaaacaccaatgattctcagtcggtgcaagtcattctaccccaaaaacaattgggccgcaaatcagacatgtgagttctcttattcatcctttggtttcacttatgtaaatgtgtttgaataatgtgttagctaatctttgtctgaattattctcttgagcttgctgagataccttccttgctacacactcttctcaactatattatttcttgattacaacacatacactctataaaacttggcagtgtgtaacattgagtcgattgatatatttgtttctcggctcatgattacatctttattgtaactgacaggtatgtcttctgttgttcatattcacacaacgttgctcccaagggaaagttcatagcatttgtgtcaacagacgctgaaactgataaccctcaaaccgagctccagcctggaatcgaccttcttggtcctgttgatgagctgttcttcgacatctatgatagatatgagcctgtcaacgaacccactttggacaactgcttcatatcaacggttagtttctctaccccttttttagtgagcatcttaaagttggctggtttctaataaccttttttgttcatgtcctgaacagagttatgatgctacaacacactttgacacaactgttgttgatgtgttgacatgtataaattgatcccggaaaggtaatgttctagaacacaaata

SEQ ID NO: 16617 - DNA, 871 bp, Arabidopsis thaliana
ctctctctctcttctccttgttcatgcatttgcacgacttagtgctgtctatgtggcacatatatgtgaacaaacctgagtgcaaggtattttctctttgtcttcatgacaactctttgttttctttcttgttgtgcaagtctgcaagaggggaatgcaccgtaagattgtattggaggaacgctgtactcatatatagcaatgttaatcttatgccaggtagagtttgacgagggaggtaaggttattggtgtaacatctgagggagagactgctaaatgcaaaaagattgtgtgtgacccttcatacctgccgaacaaggtaatattgcagttcttagcatgtttaaattttcaattactgtgtccatacttatccacgtcaggaggatcgttataaagttgctgttcatgaaacttgtgacttttgccgttggcctgttcattatgttggttgattgccatagtttttatattcattcacacacttagttcttctcttcttgtaatgactagactgtggtcttgttcaggatttttggaaaaatctattcctttttgttgttttttatatgatgattaatcacattcaaacaggttaggaagattggcagggttgctcgggccatcgccattatgagccatccgattctgaacaccaatgattctcactcagtgcaggtcatcataccccagaaacagttggcccgcaaatcggatatgtaagtttttaaactgtaactttgataagccagtggctgaaaggacttgaaaagttgatatacctagtgcatttttggatttcttttgctgtggtacataagctgcatctcaatcattttgagatcagtttttaagcgtgctataagatt

SEQ ID NO: 16618 - DNA, 619 bp, Arabidopsis thaliana
gataattcatccacttcagcttttgaagcactatatcatcaggattcttagtttccatgaggaaaaggatgtcagggaaaatcttaaggcggatttcccttagcctacgaactgttatggggttcctcatcccacaacagttccaacacacaattcttaaggaagatgggttgatggattctgaaaatccatcttctttctcctgatcgctggtatgatattgattggtggtcctgatcgatttgcacttgaggtattctctgatctctggctattttggactttagagctagttgccttatttcgaattctagaagcacttgggttctctgtagtatttgagaaaatctttcctgtagtcgattttctctttggtgagctttgaaccatgaccatgtttctcttgcttgattttactcccgttagttttgcagcaggtttgctgattggtttattgagtggtggccttcctctcttcttttttgctgtccctgctgtaaggattatccacttgagagtattggtaagtcctctaactgagtaattagttgctccgagttgaaagtaggtgcagattggccttctaggggagtttctgtagtcgcagctaagataatag

SEQ ID NO: 16619 - DNA, 1059 bp, Arabidopsis thaliana
atctctgctcctgttgcgaaaccgtttgtggcgctatcagcgggtaactccaggaggatagatgatcgctgtagggtttgttttaacatccttagctagattctcatcttttaagtattctttgtcaggtgtccaagttcttcctagtgtgtcattctgtggcgtgatcaaggggccaccaacattaaccctgtaaacggactggtatgcgtaatcagacaaacccgaaaaaccgttgacagggaaaagagaagtgcctgcatcagagataagttcgtctggagctgacacaagttctataccgttgatgaaagccgcagagcctttcataggcttgaaccttagggcgaattgtgcatcggtcatgttgaggaggtactctttctgaacagtagcttggctatcattgttgtcgttacttagtttaaagttatgaagcaagacatacttctctgttaaaacagagaaagttgcttgttggagatcaaacttgtcattgggaaaggcaaagaaatggagacgaacccaatgccaaccaggacgggtcaaatggaacttgtaaatggcttcttcgcggaagattttcgcggtaaggtaaataggagaagggagtttatctgaaggtggagcagagacctgaatatcgtctttggcttctatgtactgaaccgtttctgagtcactcttaaagactctaccttcaggggttttggttgatgacttgctaccacaatcaatgagaatgtcatcagccggtttgaaaccagcagttgggctaccaccgacggcgccaaccgctgaagctaggccggttaagaagaggaggatggtgaagaggagagtcatgaagggcctggaagaagaatctaagacaagacacatgggtatgtttggcttctctcttatctccatccctccttcgtgaagggagagagagaagagagaagaatgaggaagacaatgacaagacgaaaggcaacgagattgttgggatgcttgtggttgaagaaagagcgagggacaaaagggtcgacagacagttgttatgtgtggctagta

SEQ ID NO: 16620 - DNA, 1115 bp, Arabidopsis thaliana
tctccagcgcataggtctgtctctttttaagttccataatgtcccaagcctgacaaaggagaactctctttacttatatctctaattcttgtgttggcttcttttgttctttctgttgacagtactggccaaaagtacatctacacaggatcgaacgacagttccgtctacatatacgacttggtaaaccataaatcctcataaacacatttaagagacagtcaaatgaaaaagtgtagcactttatggtttatgtttcttaccaattggtgtgtgctgaattattgtctctgttttgaccaatcttggattcgtgatcctgttcttaggtaagtggagataaagtggcagtgctaaagcaccatagctcacctgtaagagactgtaattggcacccatattacccaacgcttataagctcttcgtgggacggagatcttgtgaagtgggaatttccggggagcggtgaggcgccgattatgagtaagaagagggttcgaaggagacatttctactactgatgcgtctctctacacatacatatggtctctataagttatatatgtaaaaagtagagaagaagatgatgatgaataatacaacacaagtgagaatcatcaaataaggcttaagttatagaaaaaaaaaaaaaaaagagaggctatggtgtgtgtctgtgtggaaagtgtcttgttgttgtgataaaaccatttttaaaaggttatatatattccaatggtatgcgatgtagtagtaacatataaacttttgtcatggtttggtttcagacattactttatagagtgaaaatgtattgtatgtttttattcatgttctcttttgatttaggaaatttatgaaatgacacttttattcagcattaccatcaaatgaaatctaacaaaaagtaataccattcataacattttattcgaagcatatgtataatgtgatgcaattaaagttgacatacatcatcattatcattttaccaattcacgaagtcaccaacgaataaacaaatcgtttttgttatctaccggagaaagacacgaaaaatcaaacaacttcttgaaattacgtctttccctcgccactcgctgcactgcgttgtg

SEQ ID NO: 16621 - DNA, 813 bp, Arabidopsis thaliana
ttttaatcatacaaaatcaaattttgaagaacaaaaaaaatgaccaaaatcattagtttcattcagaaacaatttgaaagtggctagaccgaatttgactaatttccttgattctaacttcgtgaccaaagcttaattctgtttcagtctatgtcttcatatcttcttcagcttttgacctctcaagccattccaaaaagcagctgcattgatggctttcttaccagcaagctggacttctagtacctgaatcagcaacaccaaatatgagctatataaatagtagattagtgtctgattaccacatcacaaacatctgcttttcgtattaatagtgtgagtgggtctgtaacttggttgatttagagaatagtggcagtgtttcgtctatcggtttacctctaaagctgtacctcctctgcagggaaatattagtgaacctttcttgaatgttacatagtcttgtttaccatcctggatttccaaatctttgcatactcagtggacataattttaagctctagcacattttgctggccgcttttgtcatcaaggactacaactttggctcgtgttcccggccatcctgcaaatggacgaacctagagaacagttttattttttacgtttatgattattgaaataagtcgtaaagtgttggtttattcattcacacatgggttctacatcgagagaataagggttttcaacaagtaataaagcccatctgatgaacttcccattgtcttgcagccgcaacagcaagaagaaagcgtactgttgtcatcttagcaactggtgcaaaagtttctg

SEQ ID NO: 16622 - DNA, 554 bp, Arabidopsis thaliana
gaagctagttgcattaacattaaacagtggcaaaaacgtaaatcattcactcactaagtttttctataaattgaactactcccctcctctgctttttccaattctaaaccaaacaacagattctcataatcatctcttcttttttcctctttacgaaaagaagaaagatcaaacccttccaagtaatcattttctttctctctctcacacacacacattcactagttttagcttcacaaaatgtgatctaacttcatttacctatatgcaggtttacacaaaaagaaaaaagaacgatggctcttgtcaccttcttgtttattgctacccttggagcaatgacgtcacatgtcaatggttacgccggaggaggttgggtcaacgcacacgccacattctacggtggtggtgatgcttccggcacaatgggtatatttccttgaaccttctctcacaagtcacaaggctttaaagctttcaagatttttcctttaccacaattcttatgaaattttgggttgcaggaggtgcttgtggatacggaaacctatata

SEQ ID NO: 16623 - DNA, 974 bp, Arabidopsis thaliana
cccccgcttaagatctcgagcatcactactccgattgagtacacgtcgccttttgcggtacatctgaaactttggtaatactctggtggtacgtaacctggcgtgcctgccaaggtacttacactcaaatgtgtgtctaatgcgctgatcagtctcgccattccgaaatctgaaactcttgcttccatgtcttgatcgagaagcacgttgctcgatttcatgtcgcggtggattatgtgagggatacaattgtgatgcaagaaacaaagtccttttgctgctccttttgcaatctttttcctctcttcccaacctaaaatcctccgtttttcgcctgttcttggtccgtgaagcacctcctcgaggcttccgtattgcataaactcgtaaacaagcaatctctcttccccgattttacagtatcccaagagcggtacgaggtttcggtgtttgatcttccctaaggtttccatttctgccatgaactctcgatctccttgacaactaagtctaatgagcttcttgatcgccacggaagacccgtctttaagcgtcgccttaaaaacctcaccgaatccgccgtgtccgatcatactcgcggctgagaatccgtttgtcgcctcgataagctgcgaaaacttaagctttctcaactgtcgctgaaacgtcgctacattaatactcaacggctctttctccttctctatcttccatgtagtggcggaattaaccgcctgcaaactgtgaagcatcttcgcatcatccgcatctctcctcctcgcacgaaccgcaatcgcccaaacgattaaaatacaaaccgaagcagcggaaatcaacactcccaaaacaatgctattcgcccaagaagctgccctagttccgtgcttagcacgtttcccttcctctgttccagcaggaagctgattgtttccattcttacattccggtaaaggaacaccgcaaagccccggatg

SEQ ID NO: 16624 - DNA, 1088 bp, Arabidopsis thaliana
gatctagaggatcaacatctttttgattgaccgtcatagaaaattatgaagacatatcatatcgttcaaatgtagtatagattcaacatccaagaaacatgcaatgttcgagcaacgaaatatcttttcttattaattcgcaaatcattttatatatatctagacaagattctcaattcatttgattatcacacacgtacctaacactgataataagctaatggtcaaaatgtggagacacggatttagtatatacaaatgtcatcatgtaccttcttcgtcagaccgcctctgtattaacatcccaacatgttagtcactacttctccacgccgacatagacgtgctttccacttcttcccccatctctatatattctgaaaattctaaccctaaaccctaaaaatcaaaccttttccttcatcatctttagtacatcgtcttaagatttctgactttgttatgtctcctccagcattggttgtgtttgaagatggtttaacccaaaaatggagcaacgacgagtggcagggtttcagcgtttatcccggagaaaaccctaaccctaatattaatttcttggtgcagaaggcgactctgcagaaccagatgactgtctctcgcccatcgctgaacgaagagagcttcagaatggtcttacttctggcaatgtctctgctaagagacaacgctgtgcctcttcctgttcttcctgagccgatgatgaaaccacggaagaagcttagccaccaagaatccatgctttctctacgaaaatctcggtatcccgagaaaaacttctaccaagaagaagaaaatttcaagtgcaatgcgttctgtttatccctccccgggtttggaaaaagacctgtgcgatcaccaaaaagcgaggactctataaagaagaaaatgatcaaagcgtcatcattctcaaattccactgtctcactaagtgcctcgctagagaaattcgaatgtggatcatgggcttcaacgacagctctaacccgcgaaaacggcagattgtatatcgatctaccggtggagatgatcaaatgtggcggtggagatgtgcaagaaccagtgag

SEQ ID NO: 16625 - DNA, 1495 bp, Arabidopsis thaliana
gagaacacacaccaaacttatgactacaaattttaaaaagactccataacaaaagcaaaagcataaagagacaccacaatgacgacgatgatgctaaattaaggatgatgataggaagatcctaagagagctgaccacaatcggcaacaaccacaggcttcgtcggctttccagatgatgatccaaccttctcgatggcctttaccacgtctaagccttccacgacctgcccaaacaccacgtgcttcccatcaagccaatcggtcttcacggtgcagatgaagaactgagatccgttcgtgtttgcaccggcgttcgccatcgacaggatccccggtccggtgtgcttcctctcgaaattctcgtcctcgaacttgctcccgtagatcgactcaccgcctgttccgttcccggcggtgaaatctcctccctggcacatgaagttagggatcacacggtgaaacttagatcccttgaagtgaaggggttttccggtaccgccaacacctttctctccggtgcagagagctctgaaattctcggcagtcctgggagtcttatcggtgtacagctccatcacgatccttcccgcgggctggccgtcgattttccgtacgaagtataccttagggaacgccattcttgttgtttgaaacgtgagatctctatcagactgaagaagaggtttgttgtggatgatgaatagaggatttatcggtgaggttatcgatttatagccggccaaggggaagcggcgaatatctcacagataaacaagattattacatgtgggaaaatctcaacggctttaagatcttaaccgtggttaggttaagagtttgaccaccggttaagtaggggtcagtcagtcagtgcgttggagtatctcagacttggcatatgccctcctggagcaacgtggcacacgtgtcccacaatttctaaacaacttgctaaaaacaacgtcttttaatcttaaaaattaattttatttactgtcagttcaaattcaaaaaaattgaaccgttaaactttagtagtaacgcatactatatgcatgactttcaattaacactatcaatgctttgcgcaatagtccacccctcataaatgttagctgtaatgagtggttttctttttagggttaaatttttcctcatagtaagtaaacgtgttcaagagtagagggaattcaaaaatcagaataatctagaataagtgattatcaaaagttagttgagtgagaattattcggaactgcactttctgcggcctagagtcagagagagaaccaatcataagaatttgttgagaggtaagcaatttaaaaaaatgaaagcaacgagcggcccaaaaggagtggacagcatgagccgaacatttttttaaagctatgatatgaaataaagagaataatactattatatgactaacatataccaatggtacaatagccggtttaatcactcatcaaggaaggaatctaatacatacg

SEQ ID NO: 16626 - DNA, 1594 bp, Arabidopsis thaliana columbia
tttgtgtaacaacgatcatttgcttatctgtgttctacattataatgtttgcttaaaccttgcttgatgcttgcatggttaggattatgacaattatcacacttagccttacttgttgcatttgttcgttctttcagagttatggctctatggactctctcgaaccttcaaagttgtttgctgagaaggatcgaaattcccccgagtcagcgattatatctgcgatcgatcggacaatgaaggcccatgctgataaattgttacatgttatggaaggtgtcagtgcacgtctaacgcagctggagaccagaacccgagatctcgagaatttggttgatgatgtgaaagtttctgttgggaacagtcatggaaaaactgatggtaaattgagacagcttgaaacatcatgttagaggtactctactcttttgggatacctaatggagattaatttgaaattagaaataatcacatgaatctgagatactagacaaacgttcttctctgccttttggttttggatgccatttcttgactggcctgggaattcttgatctgttaacgtcaaacaagtttctggtttcatatttttcatgtttcaatgcatctgagctttcatacttttcgctatatcatctatcaagatcctagattcctcagttccttctttgtatgattgcattcaggtgcaaaacggtgtacagttgttgaaggacaaacaagaaatagttgaggcgcagctacaactttcaaagctccagttatcaaaggtaaaccagcagccggagacacactctacacatgttgaacccactgctcagccgcctgcatctctgcctcagccaccagcttctgctgcagctcccccgtctcttactcagcagggcctcccaccacaacaatttatccaaccgcctgcctcacagcacggtctctcaccaccttcattacaactgcctcagcttcctaaccagttctctccccaacaagagccttatttccctccgtctggtcagtcccagccacctccaacaatccagcctccttatcaacctcctccaccaacccagtcattgcatcaacccccttaccagccacctcctcaacagccacaatacccgcaacagccgcctcctcagctccaacacccgtcaggctacaacccggaggaaccaccttaccctcagcaatcttacccgccaaaccctcctcgtcaaccaccttctcatccacctccaggttctgccccatctcaacagtactacaacgctcctccaacgccaccatcaatgtatgatggaccaggcggcagatccaattcaggttttccttccggatattctcctgaatcatacccgtataccgggccaccttcacagtatggaaacaccccatctgtgaaacccacacatcagagtggaagtggatctggtgcctacccacagctcccaatggcacgcccactaccacaaggtttaccaatggcatcagccatcagcagcggtggaagtggtggtggctcagattccccaagatcaggaaacagagccccagtcgatgatgtcattgacaaagtggttaatcgcatttcggg

SEQ ID NO: 16627 - DNA, 753 bp, Arabidopsis thaliana
ggcgcaccgcatcgctttcttctccttaggtcctgtaggttgtgtccctgcaagagccatgcttcctaatgccccaaccaataaatgctttggtaagatgaatgttatggccaagatgtataataaaagacttgaagatatagtgaacataatccccactaagtaccctggagccattgcggtgtttggagctgtatatggtatcactcacagatttcaaacctaccctgcccgttacggtaaactcaatatagttaattaacttccatctttgagatctttttcaaatgtgtctatgagaaagctgaatcatgtttttggtgaagggttttcggatgtttcaaacgcgtgttgtgggaacggtacactgggaggattgatgcagtgtggaagagaaggatacaagatttgcaataacccaaatgagtttctgttttgggatttttatcatcccacagaacacacttaccgtctcatgtcaaaagctttatggaatggaaacaaaaaccatatcagaccatttaatctcatggctcttgccaccaacaagatcacattttaatacttatatctcccttgtatatagaattcataatgagtttgtatctgaattaagactcgaaatcattgtgaaaacaaaagccagtaagtgaaacttcgctccacttctggtctcttcttcctcttctactgtaacatgaacgctacataatgtttttattgttctctttcatatcattatgaaatacaagg

SEQ ID NO: 16628 - DNA, 1028 bp, Arabidopsis thaliana
tcgaagcgagtttgatgatctttcttgatgttcaactccgattgtaagggtataattgacttttcatgtattacggctccaccacctgacactaaggcactctttgtccatctcgttggtatcatcggattcggatggtaaaaataaaaagagcagaggaaacttgttactcatgcaagcttctcaggtgccacgtcactccattacgtgtcatcttcacacaccatctcgctcaaaaccgatctcatttttcaaaccttaaaggcagaagcaactgattaagttaacactcttgagaagctctcgattaagcttgaacttggaggatcaatggccgacgttcgcactcactcgcaccagcttcaagtgcaccctcaacgccagcatgaaggaggcatcaaagtcctttatcctcagagtggcccttcttccactcaggtcccttttacatccctccttcgaatctcagttatgcatatgtatgtggttttcacgtgacgcacgtgcatgcaggtgctagccgtgtttgtcggtgtaccgataggaggaacgctgctgactatagccggtttgacattagccggttcggttataggactaatgctagcattcccgttgtttctcatctttagtccggttattgtaccagcagcctttgtcatcggtctagctatgactggattcctggcttcaggggccataggtctcaccggactatcatccatgtcgtgggtactcaactacatccgccgggccgggcagcatatcccggaggagcttgaggaagcgaacgatcgtttggctgacatggccgagtatgtgggacagaggactaaagatgctggacaaaccatagaagacaaagctcatgatgtccgagaggccaagacttttgatgtccgagaccgagacaccaccaagggtactcataatgtccgagacaccaagactacataaagcgtgtgttttgagtgaccatgttgaataaaaaaatcgactgttagttcttaatgttcatgtgttttgag

SEQ ID NO: 16629 - DNA, 831 bp, Arabidopsis thaliana
aaaacaattagtgaggatagcatctagatcaagaataatcgcctttctgaatttcaatccttagataagttcactatcagtttggtgagtggatacacttctattgatagatctcaaatccagaaatagagattacaggaaaaggggaaaatcaaaagacattattaccatactaaggagaacatagagcaagcaagataaggaagtcaagctaaggaagcaactccacattatcagaagcaaagcagctgaacccaatttggcgctgcaatggaaacccctaaaaatgcagtctttccaataaagaactgacaactgaagcaatcctaatagcttcccacatccactacacaccaatggccagtgacgctccacaagccctcctatcatctccccaaagcatcgcatcgcagaacaagcatcggagcacatatgtttctgagattgcatccatttccaaccttgcttaaccaacccaatatcctccatcgctaaaatccaacaacttcaatccctagcttagctcaacctcgagttaactcacagagacagaaaccgagatcgacaggggtgagaacataaccaaagagactcatctctcgacgaaactagctgcttctcatccatgaatgacttcgataagaattcacatagaaaaccccaccacgtttcggtaacttaattcaacagatttgccgcataaacttcagagagaagataaacaaatacaacaacaacaacaacaacacagtgttgcaagaagaaaatccggtcacgctgattcgttcaacgcaaatcccttcacatgcaagtttccccaaaaacaacaga

SEQ ID NO: 16630 - DNA, 895 bp, Arabidopsis thaliana
tatttaaaaccaatataaatcttatgtttatgtccctaggccctaattaactaaactaacatatatcgttacgttgtagttagtaatatcgattggtgtagttcaatacaaatttgttaggaaaaaacgacccttgaattggataattaagtataatcgtctaactattcattatgaagaaaaagaaattgaaaaaattaactcattgatattttatttattccattacttgttgtaaagcagttactagtgagttttgtaatttgtaaagaagtgaaagtgagaaaaggaaattcttgcaaatgagtatacttctctctataatttgttttaaaagtaccaaatttcaatctttgataaaaaaaagtaccaaatagttgtaaaatattgattcatacatttattttattaaatataaaaataaatcattagatagtaatttagttacataaaataaatcattaagtaattttaaattcttaatttataaatcattagttgttcttatatatggttttatctttagctaaaaagtaacagaatctcaaaattaattagatttatttataaccatataagattcaaaaagtgatatatatcacagtatgagatgccaaatgaagtaataaatcttatatagagtaatgagacaattaacttgagataatgacgttgaacagatgtaaatatacgtgattttttcttttaattgtgtcatcgtagtttagtcacgtggacctaaaaagggcaagtgtgcgtatataagatgagagtagttgctgctcaaattcataactgaaacttaaaccgaccccaccaattagagaaagatggctgacggaggaaaaatggtttgcgtcactggagcgtccggttacgttgcgtcttggattgt

SEQ ID NO: 16631 - DNA, 1560 bp, Arabidopsis thaliana
aggtcgactctccccgtgttgccataaacgcaaaaacgagggtcgttttgcgttgcgtttcggcggcaggaaaggaattcccttctagtaaggcttctgcatgtacatgaacatatcctgtagcggaaacatctgattactactccctcctcctccaaacgcgttatccacggtggcatcaatgtaattaaacccaaaatcaagggtattgttattgtcattacttacggccgaccaatctttccacttgggctcgctctgaacctcgctcgtgaactccggcgacaccacctgctccgagcaactcgaatccgtagtatgcagcttcggcaccgaatccgacgtgtcgaaatacgcgaactcacttgtctgttgcggcggcggaggcataaccatctccgtcaccttcggcttctcctccatgatttcgtcgccgtaaacaaccggaggcggtggtccccgcctctcggtagctccttttttgttgtaaatccggcagagaacccaatcatccagctgggcaaaaatcaacaccgttgattcaatttaccagaaacagaacaagagattgaaacaaagatgtgaatcagatctgattccataccctgagactattcttcttcttgcgaacggaccggtcaacgtcggcgagacggtactcgtgcatgatccaattggttttctctccctttggagctttgccggcgtagaaaacaagagctttcttaattccgaccggtttaggtagtccgatcggtttatcagctccggtagctttccagtaaccagaaccagcggaccggttaggacgcgaaccgttgggatattttctgtccctgggagagaagaagtaccattccttctcaccatacaaggctaaacctgtaaaattgaatttgagtcagcagagaacaatctcagatttagaatccggcaaagattaaagagaaagagagctagtatgtcaccaggaagctcccatggatcgtatttgtagagatcgatctcagcgatgatcggaacggcgatggactgagaggcacatttgcggcagagatagtgcatgacaagctcttcatcggtagggtgaaatcggaaacctggaggcaactgtaataattctgacatagtttaccctctttcttaatattattgttactatgaatggaggaggaattaggaggaggttgttgaggatgatcctgatcctatcctaatcaattgtagtatctctctctctacctctgaaacttggcgtttttgaaacttggaaagaatgagagaaaagtcaattatataaggagagggagtggacacgtgtcgagatacggaggaggagaagagcttctagaacacacgtgggtggatgacgctgccgggacacgtttcgcaagtagaactccgttgctgacgtggcgatgagtttgatgttgtcattgcttacgtctgtcgtttctgggggtccactcacttgtcgttagaatccaaatccgaccggtccgatacgaccgaacccctgggctctatcttactatggattcttcgtttccggtcggtgga

SEQ ID NO: 16632 - DNA, 1140 bp, Arabidopsis thaliana
aagttgctaaacctggtgctatcattgttcgtcaacgtggcactaagggaacacttaagaacacagaattgttgaaattgagaacctcttaagctcctctttcaattctcttctaatttcaccgcaactctgtcaatttggtcagtttcttatgggtttagctctcaagctctgttttcagattccattctcgaacacatctgggtttaggatgaattttcgtatttagtagctcttgtttctgatgccattgccatttctctggaagttctacgttatgtttgtgtttaggatggaactatattgtttgagaagattgattcatgaatggtgatgtttggtgcagttccatgctgggaaaaatgttgggattggtaaagatcataccatcttctctttaatcgatggattagtcaagttcgagaagtttggtcctgacaggaagaaggtatacctgtagttatactgagtaaggtttataagctttcttaatcttctaggatgttaaaggaaatgagacttgtttttgcagataagtgtgtatccaagagaaattgtaccagagaatcccaatagctacagagcaagaaagagagaaaacttcagattgcaaagggagaagaagaaggcgagacgcgagaattactcgtacacacttcctacaccagaacttgttcttgcatctgcctcagtcgatgatgctgaagccaatccggagtgctagaagattgaatgtggagtttccttgtctctttttgtttagtcttgtttatgaaaaatgatcctttcagagtattaagagttggttgtattgtcgaatccaagcctctcttttgtcaaatttgagtcccaagcaggcggatttttacccaacttgagttattagtgtaatcaaatggttattgttaattagtcaaagcctcaaaggttttaatttagtgaatttctcttccaacttagtaattctgaatcattgataagagagaccaccaaacctttgaatgccccaattagatttagtcaagtataaatctagttcaagtgtctatttgaggtttttttattataaaaattataaaacttatttggatcccaaaaatggatccattgttagtctaagaagcccgagactttatgggc

SEQ ID NO: 16633 - DNA, 657 bp, Arabidopsis thaliana
tttcctgtttaatggttatagagtttttgttttctcttgctcagtatgtactcaaggttcactaattgtttgttctcctactcgatcagctgtggctgccgaggttaccgtggtaccaccttcacggttaatggctttgataggtcaggctttaaagtggcaacaacatcaaggtgattatctaaggaactgtggatgctaccaaacagttctgtcaaacttcatctcgttttcttttacttttttgcctacattactaatatatcaatggaatcaacatatgtaccctctctcatttcctaaaatttacatacacttgtgtcaggcctgctccctccaggaacacagtttgacctctttcgtgggacggcagctatgaagcaagatgtagaagacacacatcctaatgttcttactcataccataaaggttcatattcacactttaatagcttctttagcttagtggtctatgatctgttgctcatgattattttgggttttctcatcagttgagttcttgtctaattttcatatctttttccttgtgctggtgctggtgcagtttggtaaaaagagtcatgcagaatgcgctagattctcaccagatggacagtttcttgcatcttcttctgtggatggttttatcgaggtgagt

SEQ ID NO: 16634 - DNA, 1002 bp, Arabidopsis thaliana
gtatgtagtccacctatgttaacgtacgccaccaaacacttacgttaatgaatctctctattatgctaaaacagaggaatgttggttagtttagttacctgacgcttggcgacttgacggagaagagcaggagaagctgtaaattcgccacatggcaccaccttatttgcgtggcttaggtaattagagtatgttagtaacaaaaaagacaaagatgttacatgttgcatattacttcctccactcttcactaataatcctccttgtgagtattggacttgagggtgagaaattccaggcaataaagaacagataaactcatcagcgttttgcttaaaactctgaaaatactctgcttttcccatcaataccattttggagactaagacattaatcccggcatgtttattatcccaaccaaattcgtggatcgtatctccagctcttagaataacttggttcttcacaatgaactctctatacactcgtttcttcgacgctttatgtagccaagccgctccccatagcaactcatcctacacgcaacattttcatcaacaaatgtttatgaaagatatatcaaactgtggtaaaatttgtataattacctcgtaaccgttgaaatcgcagtaaaaaggacacactgcttgataaagactatcactgtacgctcctcggtacttttgggcgaacgcaaacacctatgtccattcacattttccataaacttagtttattttcgtagatgtcgaaaatatacacaagtcaaaagttctttacattaagtaatgtcacagagttcatacgtcactgacaatgacgaagtagtgccatacttcacattaggtctagactaatgcatctgggtcacgaaagtacggaaacaaacattattagaaactaatgaagagaatatttatcacacaagcaaagtatataaccaattgttaacacttttttgacaaaatcacgattttttttccctatcatttagatggaagc

SEQ ID NO: 16635 - DNA, 700 bp, Arabidopsis thaliana
caaagtcggcgacatgagcttcgaagttggaatcgaggaggatgttgttggatttaacatctctatggacgatcaacggggaacaatcatggtggagatagcaaagacccttggctgcttcaagagctatcttataacgtgtgttccaatgtaaatgacctcctttctttccatgaagaacctctccaaggctaccattaggcatgtactcgtacacaaggagattcgtttcgtggttggagcaaaaaccgagcagtctcacgatgtgtctgtgtctgattctacctagcgtctgaatctcggcgttgaacccgtgatcgtgggaagatccatgggacattgtagccaatcgtttgaccgcgactaggtcgcctttaggcatagtgcctttgtagacaatcccagcaccgcctttaccgatgatgttgtcttccttgagagagtccaagacatcgtcacaagtgaagtctagcctctggaaagcagtcaatctccatgccttggcttcactcgcatttcgcaaggaccgagctttgattatggccactatagcaaacaccatcgaacaaaagagcaatccaaggacgagtaacagtttcgtagtagcagataaaggtttgacatgagactggtgagttcctttgccgcaaggacccaaatacggaccacaaagatgagagttacccacaaacgatgtgta

SEQ ID NO: 16636 - DNA, 859 bp, Arabidopsis thaliana
gtatatgtggtcttcctgggagtggtaaaaccaccatcgctaaacgtttataccaacaactccttcctcaattcgaattgagtactatcattattgatatcaaaggatgctatccaagaacttgctacaatgaggacgacaggaaactgcagttacaaagccatttactgtctcaactattaaatcacaagtttactggtgagattcttcaattggaagctgcacatgaaatgttgaaagacaagaaagtggtacttgttcttgatgatgtggacagcataggacaattagatgccttggcaaacgaagctcggtggtttggtcctggaagtcggattatcatcacaacacaagatcaaagacttttagaggaacaagggatccaatatatatacaacgtggattttccgccacctaatggattacttcccactgtctacatatactgcgaagatacactacaatactccttcgccagccacctctccatggattttcgccggaaaggaatttctgcatttgtaaattacagtgagactctggatgtgattgagagagttagcgcttccgtgctggttttctcaaagagctgcgtctcctccacctcatgcctggacatgctcgtgagggtctttcagtgtcggaggaaaaccggccagctggtggttcctgtgtattatggcattagttcatcagatgtggtggtgcaggagcacaagtcagtggaccggataagagaatggagtagcgcactccaagaactgagagaattaccaggccaccacaataggtaactgtggattgattaatatgtcgtttgcactttgagaagattaaaagtctctacttcaaaatgttt

SEQ ID NO: 16637 - DNA, 498 bp, Arabidopsis thaliana columbia
gttactgtgagtgaaacaagtgtgttaccttgggatgcaatagacctatcctagaagaggtgctaaacacttccacgtgcaatttctcatggactggaggctcctcgagcataaaggagaactcctcattccactttgggtctttgttcttcttcacattctttgtttttctctcctcccctttgaagtagatgtgcacataaggattggtatgatgctttccttcaacatcctcagccgaatgcactattaccacaagcattcctccagcaaccggtgtgccttctggagctttctgaaccgcttgcatttcttcctccgtgaatggcttatacaagagttcaacctccagcttccccctatacttgccaggctgcccttcttcaccaccgtccagagtcttacgcagttccaaggtgaatgctttacgttcatcaggcgccaattctttcaaagctaatacatgcatacccatcttatcgtgcttcccaatctgcg

SEQ ID NO: 16638 - DNA, 868 bp, Arabidopsis thaliana
gattgagaaaatagccactgatgtttcaaacatgttaaatagtttcacaccatcaagagatttcgacgggttagtagggatgagagctcatatggatatgctggaacaattgttgcgcctagatttggatgaagtaaggatgattgggatatggggtccgcctgggattggtaagacaactatcgccagatttctgtttaatcaagtctccgacagattccaacttagtgccatcattgtgaatatcagaggaatgttatccaagtccttgtcttgatgaatatagtgtacagttgcaacttcaaaacaaaatgttgtctaagatgatcaaccagaaagacatcatgattcctcatttaggagtagcacaagaacggttgaaagacaagaaggtgtttctagtacttgatgatgtggatcagttaggacaactagatgccttggcgaaagaaactagatggtttggtcctggaagtcggattatcatcacaacagaaaatctaagacttttgatggctcataggatcaaccatatttacaaagtagaattttcatcaactgatgaggcttttcaaatcttctgtatgcatgcctttggtcaaaagcatccctataatggtttctatgagctttctcgggaagttactgagcttgctggtgggctccctttgggattgaaggtcatgggctcgtccttacgaggaatgtccaagcaggagtggaaaaggacactaccaaggttaaggacatgccttgatggaaaaattgagagcattttaatgtttagctacgaggccttaagtcatgaagacaaagatttgtttctttgtatagcttggtttttcaactatcaaaagattaagaaggt

SEQ ID NO: 16639 - DNA, 967 bp, Arabidopsis thaliana
tacatcatggtgaagagaaccgaagaagtgacagagaccgtgtcgaaccaactccaacaccggaagttccgtggagaaacctgtgctgctgcagatgtgctcctcaggagaacctgtggtccacctcccgttcttccatctccggcaccggcagaggagaagcacgaagactctaaggctattgttcccgtcgtccctagtaatttgcttactatcttgtttttcaacagaaagattattactaactcaagtttggttcaatgattattaaaaacttctgccaaaatatgtttctattaatcaactgattagcgtcgtcaaatatacctgattttcttaaagattattactgattacatttccgattaaaaacagaattttataccttttctttaatatagaaaaataaacaagtttcaaaattctgtaattatgtaagttttaaggttaaaaaagaagaactcaaagatttttgttcttctctaatgtgttgttattaatttttctttattaatacttaataaaaaatttattttgtggcagaagaagtagaggaagagaagaaagaaggatcagttaatcgaggtaattaacgtaatagattcatgactaatactaatattatctgaaagtaaaggatcatgggtgtaatataaataattagtatttttgtcataccggggaacaattaatcaggtggtttgtgtgtcgtgttatcatgggatgtgtctaaaactgaaagatggtttaataatattcactaattttgggtgaaggttgttatatggacatgtgtgtttatcattgtctcttattttcccacaaactctgattagtgattgtatttgcttaataattttgggagtgaagatgctgttctggctagagttgagacagagaagaggatgtcacttatcaaagcttgggaagaggctgagaaatgcaaagtggagaacaagtaacgttt

SEQ ID NO: 16640 - DNA, 1361 bp, Arabidopsis thaliana
acttaactgcttggctccaaagcgcatagttccaaactacaagctttcacctatgtaacatgaactacgaacggcttgatcccttcaaagggtacgtagacagcctctaccgaggcgcatctataaaataaataaacttttgtctgtcaaaagcacgaccgagttctcgagtattcaaaggaagaaattgtttaccctaaaaccctttaattacttattgttacaacctcagtacaaacactatcctggaagaggtgctaaacactttcacgtgcattttctcatggattggaggctcctccagcataaaggagaactcctcattccactttgggtctttgttcttctttacatgctttgtttttctctcctcccctttgaagtagatgtgcacgtaaggattggtatggtgctttccttcaacatcctcagccgaatgcactattaccacaaacattcctccagcagccggtgtgccttctggagctttctgaaccgcttgcatttcttccttcgtgaatgacttatacaagagttcaacttccagcttccccctacaagctgccgttcttgaccaccgtccaaagtcttacgtagttccaaagtgaatgctttatgttcgtcaagcaccatttctttcagatagagtttcgtatgtccgagaattttgaagtaaacaaacctaaccatgttatcacctagattgagatctataccttatttattgaatcatgacatcaggagaaacccccgatgacctaacgcttctcttatagtttatttaaaacttaaatcaataactcaattaaattatatgcaataaaataatatattcgatagacttataaaatctctaaatgagttaccgactgtcacgtcatcgatacacggaagagttatgttgtaggagatttttcagattgtggtttgacctatgctatatttatttgacatggaggtttatcttgcaaaaacaaaattacattgaaggtttttttgcacaaattcttatgttttctaatagagttatcgagtgccacgtcatcgatacacgtaaggattgtattgcaggtgattttagagatggtgaagttgacttgcataattctggaaaatagtcatatcacattcgcttctcttcccactggaggaaatgatctcaaacgcatccgcttcaggtattttaactactcaaaacaatctctatatcttcatgacattcaaagctggaacatgagataaaaactaaccattacttgtgtcttgttctgaaagccgagagatgtacaataagtggcaagctcaacggcggtggggtgagaactatgacaagatcgttgagctttacaatgtacagagat

SEQ ID NO: 16641 - DNA, 1002 bp, Arabidopsis thaliana
  unsure (1)..(1002): unsure at all n locations
ttcagagcgataacttgtttcgacataagtggtatcatgctagatatattgggtggaaagattgtgttggaaacaaagacacgaaaagtcaagttgtttggaatcttcaagttgtaaaaccactactaacgactgtatttttcatccctactctctctctctctctctctctcgctaaatctctcaattctaagttcaactccatctgaacatttctgattcttgaatagaaataacataagagagactaaatactacaacactcttaaccagaatgaactgaagcatcgatagtttcaactctaaagaaagcatttttaccaattgaagctcacaaaacaaaatgatctcatatctgcatcaacaactgtttttcaatattacagagcaaaagtgaaacaattgagcaaaataaaagagatattgaccttagacaagctcaatgtaagccattggagcattatcacctctccttggaagagttctgatgatcctcgtgtatccaccgtttctctcaccgtatctatcaggaacctcagcaaacagagcgtgaacaatctgtttctcgtagatatatcccaaggcttgtcttcgcttgtgcaacgaaccgtctttagccaatgtaatcatcttgtcaacgaacttcctcatcgcactagctctagctcgagtcgtcttgattctcccatgcttaagaagctgagtcgtgagtcctcgcagaagagctttgcgctggtccggtggtctgttcagcttcggaacacgtcgtccgtgtctcatcgcgtagatacgaccaccaccgtcancaattttgaatcccattctcaaagctttgccaatctgcgttcgaaattcgaaaaccctaacgactttggagattcaaattgagccaaatctctatgaaaagtggaaatttacctggaagtccgattgagaggagaggattgaccggagagagaccggagaaagatgggagtgaaggagaagagattgggagacgaa

SEQ ID NO: 16642 - DNA, 598 bp, Arabidopsis thaliana columbia
gcttgtttgattgtaagcagtctctcataattctctcttcaatcttcacacttttattcacttcatattctgctatatttacaaacctagctagttactctgccactctcacacaggttgcaggatagatgctgttgacttgctgctcaaggcgtctggatacttggagtttgcgtccgagaggacatcaagattgcatacaccgattctgtgaccatcgacatcacgggtaataaatgggtgtggtttggatgacttggaacatctctgtatgaatatcgtgtatatagaaggttgtgtaacgttgcattatctaacttaagattcgtcagaaataaatatcaatgtatgattcaaactagcgattgtgtaacaacatacagtattagtatttgggtttagacctgttattgaatttataattgaatttaataacaagagaagagagctagtcaaacaaaagactaagcaaatcctggaagaaaccaatgactataactcatatgataacgaaatttatttggccttgtaactttcccagtggcaagatcgaagacaccggaaaatggctgacggtcatattcaacgaaacagattg

SEQ ID NO: 16643 - DNA, 1228 bp, Arabidopsis thaliana
tctggcaacgtgtacataattcagttttggtatatagtaaattttatgcgaaacaaaagctgaaaattaacatgtttattatcaaaaaaatgtggctgaattctgaaatatcattattagttaggtgcgtttcaggaaatcagtaatgaataatgatcgtgcacaacaataaactggacaaaatagcatttgtcctttttttctgtcacgaataatttcatttaagacaaaaatatagaaagtcatttatatgccaacgagagacaggacattgctaaatccagctcaggacattagaaagttattctcacaatctctataaaataatccatgtcaacaaaaaaaaaacctctattaaacattaatcgaatttctaattcattatgaaatataatcagaagagtcctcatcttattgatcaatcgtaatacacaagaaaccatgactttagaggagcagaagaaagtcataatgcccgaggccgtcgcatcggagccatcaccaccatccaaggaggagaagtccgacgattcgaaagctattgttctcgtcgtcgctgcaagtaacaaatcttttaaatttcactgaacaagaattacatatttaaattgcaaaaactacttcaactatttcatattgttcgttttctctaattttcttcttcttcttcacaatatagtttataacacttgttggtataattattgtttatatatctaatatattttggccatgtaaacaaaatgtttttttttcttttggctaaattaatactgttatattttcggcaaagaactgtaaccttttcaatttttgttgttgttgcagaagaacctacggaagacaagaaagtaggttcagttcaccgaggtaatcaacgttatagttagatcatgattgatacataaccaggaaaacaaaatattttaactttttatttgatttttttacctgataataatagttaatatcagtgaagtttatccaatatctaacttttagccaaaaatttcacctgcggaagaaaaaatattaattaagtttatctaatttcagtaatttacatgataatattagttcatttttctctagattttttttttctgataattcatggtgtgtgtgtatgaagatgctgttttggttagactcgagcaagataagaggatatctctaatcaaagcttgggaagaggctgagaaatccaaagtggagaacaagtgagtcc

SEQ ID NO: 16644 - DNA, 547 bp, Arabidopsis thaliana
caaccaataacccttttagtcactagctaatcgaagtaaacccaaacaattgagcaacaaagagtgtgcacataccacatagatcgttgatcttcttggcgagatccttaatttctttctccactttcttgataggtgcagagtaaggccctaacccctgcagagaatgagatttaacaaggtcagcaacacaacatatggagagataacagatacaacaaagcatgactatgaatatttccacttggaataaattcaaacagtgaggcagattcactcatataagtagtaattagcaaaaaaaactgaaccaagtagaaaaatcaagctcatcaagaacatatctagctcaggaggaaacatcaaattggtttgcaaagagacgaaaccctcacattcgagtaactaaaatctagtgtagatccgaattctccgatgaatcagaagagtaaaaatcgaaaaccccaataaaacttagggttctaaaaggggaaggcttacataagtcttgaggagagcgatatcatcttcatcaagaggacgagga

SEQ ID NO: 16645 - DNA, 858 bp, Arabidopsis thaliana
tatatgttttctacttcgaagtttagaatcctcattcttggttttgcattttaagagagtgtttccaaaaatgttgtaatttcaaaactggattaataaaagtctctgtaacttctcaatgtaagccattgtaaataccaaccagctttgcctttacacaaattccaaaataaatcaaaacgtaatcaatcatatgttacaagaaacaaacagaggagaaattcacaacaacactacaacagtttcaaacaaaacactctccactttattaaatcagtgttatcatcaacttaaaagagacgacaatgctctctttggatttggatcataaaaagaaatgtaaacaacacaatggtatcaatcaggctgtgattgtgacactgcatacgcaagaaccagagagtttgatctcagacgttttccactgtgtgcctggtgaagcatccgggtcatacagtaaagtacattgaccggtttcttcctgagacgagaatagcaaaagcttcccactcagcttaccagactgaaacccggccctcgagcttcctgatagcggaagagccaccacttcccaggtttcgtcttccgcattgaacagcgacatcttccggtggttcttccagtcgatacagaacaggtttttccctacttcaacatgagctgtgaccatctgcaagtgaacatatcaagaagttgaatcttaaaaacaatcgctatactcgaaaaccgagctaaggaataatactcactgagcaaaagactcaaaaagacttaccgttagaacgtttttgctacgatgccaggagccacattgagtgttgtaccatcaagaagttttgagtttcgatagtgaagttg

SEQ ID NO: 16646 - DNA, 1003 bp, Arabidopsis thaliana columbia
ttgctattttaggtggattttggagcatggaggagatgttatgatgcttttgtgggtttttagaggatgtagaatccggtgatgttgacgatttggtaggtttttggcaatggaactgctacgggtatggacaatatcagaatcatgaagacattttttttttggtggtaagatgacttattagaacatataagaatgcttgttatagatgtttggtttgcttgtctacatgattgaacaagtttaaggttttaatgaaaaccaagtttaaggttacaaattcagacataattcaaatcccattacaatatctcatactttaagatacaaacacaattactacaaacaacataactaactaactcatagttcaaacacaattactacaaacaaacaccattagcttaagacaattactacaatcaaacaccattagcttatctctaaacgtgattccattacaaacaccatcagaacacaaatatgtaaccacaatcatcactaagacacacctgatcatattctttaagctttgaagctccattttgcgaagatttctttcttcactacagcttcacaaacttgagtttccatttgaagattttcaatttctgattcacaagcattgaaacccttttgtaatgtgattgaatcttcttccacattactcattttcaacttcaaatcctcaatcatacactcatcagtccatttccctgtgcgataccatcgatcatgtaacacacccaaactcaaaacccaataattcacactagattaaatctgaaaattgaaagtatacctcattggatccgttaggacaagagtgaaatacccttccaggggttttagcagtcctcgacgtacccatctttacagccttatcgcatctgcagctcgttgggaacctcttcttctaatcaccattccaaaatcgtttcactctaactctctctcggtattctatctcacgaagaaccctaagtcttaatttcccaaaatg

SEQ ID NO: 16647 - DNA, 572 bp, Arabidopsis thaliana
gactcttgccatcactcagagtgtcatcttcgtgaacaccaggcgtaaggttgattggctcacagacaaaatgagaagccgtgaccacacagtctctgcaactcacggagacatggaccagaacaccagggacatcatcatgagagagttcaggtctggttcctcccgtgttctcatcaccactgacctcttagctcgtggtattgatgtccaacaagtctccctggttatcaacttcgatctcccaactcagccagagaactaccttcaccgtatcggaagaagtggaaggttcgggagaaagggtgttgcgatcaatttcgtgacccgtgatgatgagaggatgctgtttgatattcagaaattctacaatgtggttgtcgaagagctgccttcgaacgtggccgatctgctgtgaagggagaaaagaagtcggttctgttgctgtgtttgctctgccgtactagtatcaccggagaagaaaggttttcttgttttgcaaggcactctttgatctgattttgaccgtcgtctatcagcgatttacatttcttaaattttcttagttgttg

SEQ ID NO: 16648 - DNA, 559 bp, Arabidopsis thaliana
tgatgaagaatactagagaatgaaaaagatgtatcgatgattcagagagagagagacgggtcaaaaatcaaataagaaatttgcgaaacaagcaacctttcttcttcttcttcttcttcttcttcacagcaaatcagccacgtttgagggaagctcctcaacaaccacattgtagaatttctgaatatcaaacagcattctctgatcatcaagagtcacaaagttaatcgccacaccctttctcccgaaccttccacttcttccgatacggtgaaggtaattctctggctgagttgggaggtcaaagtttatgactagagagacttgctgcacatcgataccacgagccaagagatcggttgtgattagaacacgagacgagccagaccagaactctctcatgatgatgtctctggtgttttggtccatgtctccatgagttgctgagactgtgtggtcacggcttctcattttgtctgtgagccagtcgaccttgcgacgagtgttgacaaagatgacactctgagtgatggctagagtctcgtagagatcgcagaga

SEQ ID NO: 16649 - DNA, 528 bp, Arabidopsis thaliana
ggattcataaccaagtctacctaaagttgataaattgcctctcgaatctaagactgtatctttacctgctgaagaagagcaattctctggttagcagcaggcataaccacagcgcaaaacgggaacctcgatgccttcaagctattactcatcttaaacccttcactagatcgaatactacctccccaagaaacaaaattctcattaacaaacgctacaacggcttcattacaaagcgttccaccacaaaacacaggtgtatcaggatgatccggagaatgcaagtaaacaaacaagagcttaaacgaactcctagatcgctgaagcgcatccataaatccttccacaacaaaatcaatcttaaaagcattattactcccataatctctatcaaacaaagcaacaaactccatcgcttcaccaacagcagaagaaaccgaaacaagccgagccgattccgaaccaccacctctccctgatctaaaccctaacataccaagagaatacgataaaacaccaccagcggcc

SEQ ID NO: 16650 - DNA, 566 bp, Arabidopsis thaliana
aaagggaacgcgttctggtacttgcagccacaaatcagccttttgaccttgatgaggctgatattagacggttaccccgtaggtacattataaatcgcttccctagattaagcttgttttgttaaattgacatgacagttataggttgtgaaaattttgtggtattgacttctgcaggttgatggtgggactaccagatacttcaaatagagcatttatattaaaggttatacttgcaaaagaagacttgtcccctgatttggatattggtgagattgctagtatgactaatggatattctggaagtgatcttaaggtaaattcctagtaattccttaaacctttgttgtggtctgccaaaagtgatagagaaaggcaaagtaattaatgctcatattattttctcttttggtgctctcagaatctatgtgttactgctgcccaccgtccaatcaaggagatattggagaaggaaaaaagagtaaattttctttgtacagagccaagaaaactttacgttgcgtaaacttgtctatagaacaaatgtgtatgatgggatattatat

SEQ ID NO: 16651 - DNA, 727 bp, Arabidopsis thaliana
  unsure (1)..(727): unsure at all n locations
tacaatgcctcccgaagcccttgagatcacaaggaagttcatgaacaaaccagtcaggattctggtcaagcgagacgagctgactcttgaaggtatcaagcagttttatgtcaatgtagacaaggaagagtggaaactcgagacactatgcgatctctacgagacactggccatcactcaaagcgtcatctttgtgaacacaaggcgtaaggttgattggctaaccgacaaaatgagaagccgtgaccacactgtttcagctacacacggagacatggaccagaacacaagagacatcatcatgcgcgaattccgctctgggtcttcccgtgtcctcataaccactgacctccttgctcgtggtatcgatgttcagcaagtctctctggtcataaactttgacctcccaacccaaccggagaattaccttcatcgtattggaagaagtggaaggtttgggagaaagggagtagcaatcaatttcatgacatcggaggatgagagaatgatggctgatattcagaggttttacaatgtggtcgttaaggagttgccaagcaatgttgctgatcttctctgaagcctttctatataatgtatttaactgagaaagtgctgtgtttacccctttaaatggcagcttctctatgctttgattttagtattcaggctactacttagatttatagttcttggctanaagcgaacataactcattacatgattt

SEQ ID NO: 16652 - DNA, 608 bp, Arabidopsis thaliana
tcccctacttaggtcagtatgcctcagaatgcttcatctctctgtatacattaaaaatcagatgcgaggaaagaaaacacagagaggaacaactcctttcattctgaacagcgaatttaatatgaagaaagtaagaaacttactttaacagcatcgacattcttttgcttcatatctcctgcgcaatggagatttgtgaacttggccatggaagtgacaaatgcatctctttgcgtttgcatacccataactgctgtcacatgaactgcataccgaaagcctcgtaagcattcaactgcagcaagcctgtcatcactctgatcaagtgtcacgctgaatgcggcaagcattggtccccaggaaacttcaaccataaaacgcaatattgcaacgtctgtgactacatggtaagctgatctacaagaccaaaaaaataatccagttcattagatcaatgttatgattacagatcctaacatccgtccacggtatttgtcaatattaatcgttttaaaaagatagtttccaattctcaggaataccaatttcagagacaacaatgaacaaggtaactaaggggagtatggtttattacgtataaggaacga

SEQ ID NO: 16653 - DNA, 451 bp, Arabidopsis thaliana
tgttggactaagctttctgtcaaattgacatgtcgtaacaagtttttggtattggcttctgcaggttgatggtgggactaccagatgctcgtagtagatcaaagatattgaaggtgatactttcaaaagaagacttgtcccctgatttcgatattgatgaggttgctagtatgacaaatggatattctggaaacgatcttaaggtaaaattcctagtaattccttttaaccttttgctatggtctgacgaaatgataagtaatgctcatatatatccatgttacatgctcttttggtgcgtgcagaatctatgtgttactgctgcccgccgtcgaatcatagagatagttgagaaggaaaaaagtgtaagtagtctttgtgttaaccaagaaaactaactttatgctgcctaaaactagtctatagaataaaaatatgcttatgatgagat

SEQ ID NO: 16654 - DNA, 706 bp, Arabidopsis thaliana
  unsure (1)..(706): unsure at all n locations
caactcacaggcaacccaaactgtataataacaattcttcaataccacttctttaactttgtctttttaacaactaatcaaattttaattacttatttataaaattacaaaacttaaaactaaattatgtgagtcaattaattcagatatgctaattttcttctccatcataaatttgcctagaatataagataaaatttactatatataatatagaaattgcataaaataattagaaatgaattaattcattagataattggtacttttgttgaaactaaattctataaaaactactatttaaactctatatttagtctctcttacaaactctatatttagtcattatgttaaaatattatattacatatacaatatatatagactttatttctttgtttggttgaatcacctaatacaactattaactacaatttatggtctaaatcaatattttcatttacgaatagttatcaaattttgctataaataagtaagtaacacagatgcaacgaccattgaaacacatcaataacaaaagaaaacaaatcctctcaaagaagaagtagtgatgcatatcacaaaaccacacgcnnnnnnnnnnnnnnnnnnnnnnnngggccatgtcctcccggtgatcgagctagctaagcgtctctccgctaaccacggcttccacgtcaccgtcttcgtccttgaaactgac

SEQ ID NO: 16655 - DNA, 789 bp, Arabidopsis thaliana
cagtgaatcttatcgaccggtttctgtccaacagttacattgaaaggcaaagactccagctccttggtgtctcttgcatgcttatagcttcgtaagtccctactttgttgtttgtgtgtgtttgtcaatttcaggttatagcaatgagaacagcatttccatcactgggagagcgcgaacctatatatatatgtatacttgctaagtagagaaacaagtaaggcttatcttccttatacatttttgttgaaccttgtagaaaatatgaagagctttccgcaccaggggtggaggagttttgcttcattacggccaacacatacacaagaccagaagtaattaacattcaaatcacacatctctcggtatctttaatgtgtacagattcttgatgaaaatatataaactggaatctttgtttcaggtgctgagcatggagattcaaattctaaattttgtgcactttagattatcggttcctaccaccaaaacatttctgaggtaaatactaaagggcagaactatgaatcatcatatctttccaactttgtttaaaaatagtaccactgagttttcatcttaccaatgttttttcaggcggttcattaaagcagctcaagcttcgtacaaggtatgaaaccatgatccatttatcatcaacccgtcacttctacagaaacttggaatctgaatgtagtgcgttgtttcttataattattttgcaggtgcattcattgaactggagtatttagcagactatctcgccgaattgacactggtggaatatag

SEQ ID NO: 16656 - DNA, 1047 bp, Arabidopsis thaliana
tcccctgaatggaaagttttgtaaagatccaaaactagtaactgccaatgattttttttattctggcctaaacattcccggaaacaccagcaaccgccttggtgcatcggtcaccgatgttgatgtcagaagaatccctggtctcaacactcttggcattgccattgcccgcttggatttcgcccccggcggtcaacttccaccgcacatacatccacgtgcctcccagatcatcttagtcctcaagggacagctctcggtcggatttgtgtcgtcgaacgactacaactatacgctcttttccaagattctttaccccggagatgtgtttgcttttcccatcggtttggtacagttccatgctaacactgggaagacacatgcggttgcgattggcgtagtcgggagtcaagaccccggtgtgatcccaataggtgacgcggttttcgggtcgaatcctttgattgatccaaagcttttggctaaagcttttgcgttggacgtgaacatagtgcgtcatgttcagagggtgttttcttccgaagttacatagttaaatagttctataggatatcaataaaccatatttgtgatatttgaacaagaatctaaagtatgtaagtattgaaaatacatggatttagataatttactactactgattacatacgaaattgtttttgtctattacatgcgaaatagattttggtctaaacctggatagggaaaaggaaactaactggatttagatttactagttatcccaataacaaaaaacgtaaataatatttccacacttcaatacacaccactgatcaattttcagttcacttttcttacgtttatatgaagttaatgtaacccatgagggttaggttacgtgtgacaaaagaaaattatgtatttcaagaagaaaccaaagacgacatcactcgtttgaaactctggggacgatgaccagagccattactgatcatctcagaagaaccatcaatggctagtcctttaccaccaaaacacaagtatctgttcataaatgatccctgt

SEQ ID NO: 16657 - DNA, 680 bp, Arabidopsis thaliana
actttattgcaactctaatgaagtccgctcacgaactcttgccactttacggcagctccgacaaccgtcaccggcgacatttctcgacacacgacgtgttgatgctcgcatcattaaaactggcttcgacacagatacgtgtcgctccaatttcatcgtcgaggaccttctcaggagaggtcaagtttctgctgcacgcaaggtgtacgacgaaatgcctcacaagaacactgtctccaccaataccatgatttccggtcacgtgaagacgggtgatgtttccagcgcccgagacctttttgacgcaatgcccgacagaactgttgtcacgtggactatcttgatggggtggtacgcccggaacagccacttcgatgaagctttcaagcttttccgtcagatgtgcaggtcttcttcctgtaccctgcccgatcatgtcacctttactacgcttttaccaggctgcaatgacgctgttccccagaacgcggtcggtcaggttcatgcttttgccgtcaagttaggctttgataccaacccctttctcactgtctccaatgttctgcttaagtcctactgtgaggtaaggcgactcgatttagcctgtgtgttgttcgaggagatccagagaaagactctgtcacgttcaacacccttattacagggtacgagaaggatgg

SEQ ID NO: 16658 - DNA, 853 bp, Arabidopsis thaliana
ttgtaggtcggataaggcgtttatgccgcatccgacatcaacgcctgatgcgacgttaacgcgtcttatcagggctacgccagacagcgcaatagcctgatttagcgtgattttgtaggtcggataaggcgtttacgccgcatccgacatcaacgcctgatgcgacgcttgccgcgtcttatcacgcctacgccagacagcgcaatagcctgatttagcgtgattttgtaggtcggataaggcgtttatgccgcatccgacatcaacgcctgatgcgacgcttaacgcgtcttatcaggcctacgccagacagcgcaatagcctgatttagcgtgattttgtaggtcggataaggcgtttacgccgcatccgacatcaatgcctgatgcgacgcttgccgcgtcttatcaggcctatcttaaccgttggttaatttttcaaactcttcacacccggtatcaaacccttccatacagctcaggttcaaccagtgcagcgccttttgcttgttcttctcgataaaaccttcttcaccgtttaagaacatcattcccgcccagtactcggaataaccggttcgggaaattgcagagctgcgtttgaaataccaggttgccttgtcatcgtcggccttaatgcccacgccgttggcgtaaatcaaaccaagcagcatttgggcatcgacggcagagtcgttctccagatcttccgaggcgttttctaacagcgaaattgcctttggataatccggtttaccgcttgagtattaccagaatatggccacgttacttcaccttctttactgccgcttggccgctttctctgcaagacttttgcttgtggatagccagac

SEQ ID NO: 16659 - DNA, 1207 bp, Arabidopsis thaliana
attatacatattctcacttcgagtatatgtagattgtgcaaagtataaagtaccaccatatctattacacgtcacctagaaaaatccaatacgtgcatcataatattgacctttggatttaaaaaatggggcaaagacaagagacgagtgttttatcatgatatgtacacagtgaaaaacacaatgaggatatatgatatcatgaattcatgatagtggacattcgatcaacaactaacatgagctcaaactatatactgaatccgatccaaaccgacttgggtttgctatttttgtatatctgtttttacagataagaaaaaaaaacttgcattcaatcacataccatgaaccagaaacatgtaaatattgaacaaaaggcctagtacgtagttggtttaagcttttaaattagtcaaacatgtggtgtggctttgtcattgaaaaactcaatgattaaaagagaaaataaggcgatctagggttctttgcgtttctagcaagtatggagccggcggtggcttctccgcctcatccggatggagataagttgccggaagttactcaaaagatggtttcccaacaggaggaagaggctatagtggttttgggtgattcaaaagtttctgcaacaggttttgttgcttctcagccggagagtttatcaaagcaggtcgctggcactagtcagaaggaatcttgggttaaagtggctaaaaaacatgtttttacgaagcaaaagtttgtggtgtctgaagtggatgggaaagagaaagtgtggtaccaaaagaggtctttgctggtgcaaaacctatttggaaagattctctgataggtaaatttttcaatactaaagctccacatgtgggaaagatccatatgattgttaacaaaatctggaggataggagataaatcggctttgatagacgtctatgaggttaacgcgaccaccgtgaaatttcgaatccgaaatgaagttatgagacacagagtccttaacagaggaatgtggaacattatggacatccctatgatcatgtctaaatggaccccatttccagatgatatgcagccagccctgaagtcaattcctttgtggattaccctctctaacattccacccactttgttcacagataagtgtctagaatttctctcaagtgcagtggggaaccctatacatttacatcctaaaacagaagctt

SEQ ID NO: 16660 - DNA, 731 bp, Arabidopsis thaliana
gtgcgaccacctctgtcgccacggatgacgtacatcctgaagtgcggatattccacctgcacagtaatgcctgatgtgatgagtagcacaaccatcaggtatttatggatgagctggatagagggtaacactttatccagccttttgcatatgctgcgtttacgctggcatcgcctcacgcgggataatcgcgccgcgatactgaataacggtacttgcggtcaggtgcccacgtttcgccgcgtcttccgccgtgccgcctgtcagacgtaccgccagataaccggcactgaaagagtcgccagctgcggtggtatcgatcactttttctttcggcagtttcaccgccggaacatccactaacccttcgccagcaatggacaccaggcaagaatccgccccgcgtttcaccaccacttctttcacgcccgcgttatgggtgcgcgcaatgacgtcttccaccggctgttgaccccacagcgcgtcttcgtcgtccagcgtcaggaaggcgatatccgtgcattccagcatttgttggtacacctgctgtgtctcttctttgctggcccacaggcgcggacgatagttattgtcgaaaatcacttttccgccgttggcgcggcattcgcgcagcagggaaagcagcttttcgcggctggtcgggcttaagatcgccaggctaatcccgctcaggtagagataatcgaaattcgccagctcttcgcaaatcg

SEQ ID NO: 16661 - DNA, 587 bp, Arabidopsis thaliana
agtgtgctctaaagcaatattgtggcatttttcggttttcaggggtaatggtttttctgtttctggaaagcggctcgcaataaccaccaacataatgcggtttaatgcccgttcgagcacaaaggatccaacacgtcatgcaagacaccatcataaatttctacagcaccagcgatgactacggtgatttttctaactttgccgcctggcccatcaaggttgacgggaaaacctggcctacctcagaacactattttcaggcacaaaaattccttgatgaaaaataccgcgaagagatccgtcgggtttcttcccctatggtcgccgcacgcatggggcgcgatcgttctaagcctctgcgtaaaaactgggagtcggtcaaagaacaggtgatgcgaaaagcacttcgccgctaaattcgaacagcatgcagaactgcgtgcgctcttgctggcaaccgcgcccgcaaaactggttgagcatacggaaaacgatgcttactggggagacggtggtcatggtaagggcaagaatcgactgggctaccttttaatggagttgcgcgaacaattggctatagagaagta

SEQ ID NO: 16662 - DNA, 498 bp, Arabidopsis thaliana
cagcattggtttgatgtggaaaaaaaaaaaaactaaatttggaaacttgtggtttgcttgttgtggtttatcatgtctcttgaacatcaaaaataacaatgtgagttgctttttgtggtttatcatgtctcttgatcatcaaaaatgacaatgtgagttgcatcttgtggtttctgacatctgtgtaagggtctattattgaagtaaactcaaatctttgcttggtttggattttgttgagctactcatttgagccactgcattgttgttataggtgtacctagaaagtggatactatcttcacggttactgggggattcttgtggacagatatgaagaaatgatagaaaactaccacccgggtctaggagatcacagatggccattggtgactcactttgtcggttgcaaaccgtgtgggaaatttggtgattcccggtggaacggtgtctaaaacaaatggacagagcctttaactttggagataccagattctgc

SEQ ID NO: 16663 - DNA, 589 bp, Arabidopsis thaliana
tgacaacctcaaatcctccattgctgacttcacatcttcgaacccattctctagttcatttgtggagttgccgccggatgagtgtgatctgttcaccggtcaatgggttttcgacaacaagacatatccattgtataaagaagaagagtgtgagttcttgacggagcaagtgacttgtttaagaaacggaaggaaagattctttgtttcagaattggagatggcaacctagagactgttctttaccaaagtaaagctaatgtttcaagatgccctgtttttatccggtttgatcgaattggtatttaacaattgtctgttttatgattggtttgatgaagattcaatgcaagagtgttgttagagaagctgaggaacaagagattgatgtttgtcggtgactcgttaaaccggaaccaatgggaatcaatggtttgtttggttcaatcagtgattcctcccggtagaaaaagcttaaaccagaccggttcactcactgttttcaaaatccaggtaataaacattaatccacttgtgtgacactgacactaatgacattatttttatagtttcttactttcttgggatat

SEQ ID NO: 16664 - DNA, 285 bp, Arabidopsis thaliana columbia
acctttttctaaagtattcatgaacctacatgttatgttatgcaggttctttactctgcttctcttctcaaaaacaacaagaccatccatgaagctctaatggctgcaatgtccaaaaatgcatctgttcttgaatgcattcaaaccattgagacagcttcctagatgaacaatctctgttatctctttaatcgatacaactacgtcccataacaacactcaattgtttcacatgaacttccatatcttgtatatatgtatatccagacactttagttacagact

SEQ ID NO: 16665 - DNA, 558 bp, Arabidopsis thaliana columbia
tttttttgcagtgaagacaggaccgtctatgtcggaaacggcgtgtggggaaggttaatttgacggccaaagcgataacaaaaggaggattcgagtcgcttttcagacagattttcggaacagagccaaacgagacgctgaagaaaactttcgcttgttatctctcgacgacgacaggtcctgttgctggaactgtctatctttcgaatgctcgtgtcgctttttgtagcgatcgtcctctgtacttcacagcaccttctggtcaagaatcttggagctactacagggtaagtaaagtcttgcttttgtaaaagaatgaatttggagattgtttttaacgtaggtctaatgttgtttggtgtttggttttgtggcaggtggttgtacctttggcgaatgtagcgacggtgaatccggtggtggtgaaagagactccacctgagaagtatattcagttgacgacggtggatggtcatgacttctggttcatgggttttgtgaattatgagaaggctacgcatcatctgctgaccagtgtctccgattttcaaaccgcac

SEQ ID NO: 16666 - DNA, 560 bp, Arabidopsis thaliana
caccacatccgtaaccgctggctactacgattctgttaatggaagcttcgttcgctttaatatgcgtaacggaaacaacgttcgagcttggatcgatttcgatggccctaactttcagatcaacgtttccgtcgctcccgtcggtgtgcttcgacctcgccggccaactcttactttccgtgatcctgttattgctaattatgtctcggcagatatgtatgctggcttctctgcttccaaaaccaattggaatgaagctcgaaggattctagcttggagcttgagtgatacaggagctcttcgagagatcaacactacgaatttacctgttttcttcctggaaaactcttcttcttctctttccactggagcaatcgctgggatcgttatcggttgtgttgtcttcgtagctctaatcggatttgggggttatttgatttggaagaaactaatgagagaggaagaagaagaagagatcgaggagtgggagttagagttttggcctcaccgtttcagctacgaagaactcgctgcagctacggaggttttctctaacgatc

SEQ ID NO: 16667 - DNA, 655 bp, Arabidopsis thaliana
gctacacaaaaattcatttctttctaaaccaaaaaagacaaaacttttaataccttgagaatagtttccatgtaattagcaataccagagaaccaatcattgctctgggtcgttttggtagtagtgccggcgacagattcaaaggtttcagaggacgaaacggcggcatcagcgatcgtgtacagcagattctcggcatggtccttgatgaaatcaaaagaatctggtctgaacccgagttgagctacgagagtccgataacgagacgacgacgacgacggtgtgtggctgaaacgggagcggcggaattggaggactttgcctgtggagaaagaggagaggataaggtgcgtcggctttagggatattgttgaagacatctctagggagaagaaggaaggagagttttagggttttggttgagaagacaaaatggggaagatttggattttgttggcagtattgttgtgttgttgtgtcttgctttgcgtctcagtgtgcgagaccgaccgaactgagaagtggagcaaaccaaattttgtttttctgattttttaaactaacacacgaactatatactcaccttttttatgacttttctagggtaatatacacataactatgctccgatgtgctgtgtttcgatcggaaagtc

SEQ ID NO: 16668 - DNA, 611 bp, Arabidopsis thaliana
cggagataaaggcattcctttcttcttcaaactctgtttcgccgcctccgatatcaaaaacacgatctgacttaaccgatcagattttccgacgaaaatgaacggtagagattgaagcaacaccttgtaaccactcgtttgtctcgctatatcgaactctgatcggaaatctacatcgattattaacctttcttctccgattatcacatctatgtactcgtattcacctgtaacatttaattaattcatcagttcaaacaaatttcatgaataaaaaaaaagtagttgttgtgttgaagaagatgaagatcttgtttaccagctgggaacgaaggagatttatcccattttgatttgcagattgaagaattgtaattaagtgataagagtccttcattgacgatcttcttcatatcgtcttttcgtttcaccgatttgttcttatctacaatcttcgccgcgtcggctaacagattcctctctccgacggttgtgcacggaatcaaactctgtttcagatcgacaaattcaaattcagtttcatgtttaaatcaagagagattaagaatttgttgttgttgttgttgtggtaccttgagatgatcagaagc

SEQ ID NO: 16669 - DNA, 521 bp, Arabidopsis thaliana
tcctatttaggtgatcagtacaccaaagtgttgacacttgacaccgtatctctcaattatttaattattttaaactaataaaacgtaaaaattagcaaagacttgcttgatttcaagaaaacccatcacactaattaaattcatcagaacaagaatatgtgaaaataaatcacattagtttgcacacacacaaacaattccaaccaacaaaaaccaagcccacttgagagagcataattaagaaatcaccgatcatgtccctatacgatggaaactaccatgtcctcgtcccgccgggaaacagccatcggcgaaggctgctcaaggagtagcgattgtctacaagtggggcaagaggaacgtgagagcaaccaagtatcgatgcacctcacgtggaagccatggttacatttaggtaaaaccctaactttttctccatcttcgaaatctcccagacagatcaaacactccgtagctttcatgtctatgattcctgatccgtacagtcccacggggatttg

SEQ ID NO: 16670 - DNA, 588 bp, Arabidopsis thaliana columbia
aacactcaattgtttcacatgaacttccatatcttttatatatatatataaagacacaaaagttacagactttcattatcatcttcaagcaccatgaagaagagcaaactatactatactattatagatgaaagtgtacaatagtaatacatttgagagtggtatttatcatttatgaacttaaagatcatcagaccaatcactaggcttggtatcgtagaacagtccatcaacgatctgatcaaccaacgagtcaatgaacgagttgcaactcactgtaaagatccgtccgactctgttccgagaaatcgttaaccaagcaaacatcgccgcgcatcccatcgcggcgagaccagctccaatagcttcactcaatccttccacatctagtttcttaaacaacgagttccccgtaacaatctcctccgtcaccgtcaccgcaaatacaatctgaaaacagtaaatttacgaattaaaccgactaaaaccgagatcgagtttctaatttaaggtttagtgtctaattaccatggcgagtctaccggagatggtttcgaaatcctgactcttcttcgaactctctatgta

SEQ ID NO: 16671 - DNA, 538 bp, Arabidopsis thaliana
ccagctgctgtaaatacacttcctgactatcaaaacgaaagaagtgagagagggtgaaacagttatcctgtgagactgtctaaccaagcaatgaaatttaaatacaattccaacctgaggatcaacagacatggcattgatctcaggcatcggtgaaagcgcaccccaaggacctctataagaaaaagaatggtgattatacacacaactattacgaacactgacatttgaacccacaattatagcattttcagtaacagagttatcaagtagaataaaaaatgaacaaaactcatactcacttgtgttgtggattaatcagttcaagcaatggcttcagatgattctctgtagatcataagaaaaacaaccactaagctccaaaaagcatcattcatatcaaaaaccacaaaaatggcacacacacacctttcaaatgaagagacacatctgattcagcaaattctctccgatttccatcccctaactctaccatcatcaccacaactacacataaccagatcaaaatttcaaactc

SEQ ID NO: 16672 - DNA, 876 bp, Arabidopsis thaliana
tataaacccaagtgtggttcatgccaaatgtttaattataaattttctcttttttttaactgaagaaattccaatgccgaattttagattaattctttgaacttatagaatttaggatttaattaaggttttaaagacatccatgtaataaaaacccaaattctctcagacaagagtattccaattctgaaataaaactgaccaaagtaaattattaaagaaacaccaactcaaaataaaactccataaatgtctaggcaccaacaacgctaccacagccaaggcttcttcactctccacatgttccttcattcatcacctgttttaacaccagtatcgagattaaggtagggttttcaaagaagaaacctaagtttaaagagatcgatcatttaccttcacaaaagatgcttcttcactttattttcaaattcttcagcgcgaccccgacagcccgcgcaactggttcaggcatggcggacgccatcttccccaaccagcgatggtgaggatttgattgattgtcattccgaatcatcatcaagagcttctccatcctcggaatcaaaggcagtcatgtcaagctggtaacgaagtattcctccgattcctccaaaccctctgcaaaactgagaaccttcctgtgacttgttggtcacaaactctaacgcacaaccaaaacgcctgtactcattggcaagccactccagtaacgacagcttctcctccacgtccaaagccaagtcactgtcggctactttgaagttctcagtgttggcttcttgttccctgttcaggtgtttgatcacagtttcaccagtcgcactgttcttcatcacatatctgttgatatcgagattttccatacaatcagtg

SEQ ID NO: 16673 - DNA, 1006 bp, Arabidopsis thaliana
ggcgcatggtaaatggacaacgcttgacaacgtctacaaatacttgatgaaaagagataagaaataagtcttcatttataccacatcagtcttcacgtagatgatcaagacgatccccagattgacaatgtagagaacaccaaaaagaatctgcaaaatgtaagagagtagaattgagacaaatgaagcgatggatggatcaaattccgcagctaatccaaagataggagattcaaagagagggaattgcaagcacctgagcagggtagacttcccctccagttaagttctgcactgcagagtaaacatagaggaaacctgctggataaaccaatggccctgtatcgcctttcaagttcccatagtctctctctcccccgagaaacccactaacctgccccaattagataaatttcacttaaagactactagtttactttgaagaaaccacagttgaccattgacacttacctgtgacatgtaagcatcccaatcgatcttcgtgtctgttaaaggcaaatgacgaaatttggtttaaaacctatgcaaatgcacatttcgagggatacgcaagcaaaaaaaaaaaggaggtaaatagctctcacatggaacataggcgataataagtgcgactaggattgcatcagcaagaattagcgcgaatgcgaatggaactgcaggttttttgaatagatcggatcgattcgtctccttccccagccgacgcgtacgagaagctctcaaactcgccggtgatgaggcgcccgccatgaaaacagagcaaatcgcatcagcgtctagccaacgccgcgtaacagacaactacttccatattactactcttctaattagcccaaattaaatgagcctattgggcttcttgtcttagtcggtgtagacccaattgttgttttattttttaataatgcaaaagtattaagcgataaataaataagcatcgcaatcgtcccaaaactgtgtgtatgatcagacatgagcatataga

SEQ ID NO: 16674 - DNA, 893 bp, Arabidopsis thaliana
atttgaaaccgtgtgaattcgcggttatcaccaaggtaaaacgaaccggttggagtaaaaccgggccggtttgatttgggagggatgcaataagagaacttcgaaatcttagcttgagaaacaaaagagagacgaccacggttcattcccaaaatgcccctatcatcagaagactcagtagcacaaccaagaatcaaaggaggggtaatttcggtatttgagaaagtgattttctctttaacgagattaccctcagcgaaggttccatcagcgtagaagtaagagtagtgacagagacggttcgagtcacaagacgtgggaagggtaaaatcgggaattctaggtttacaaagaggatgagagcaaggtaggtcggagaacgatgaagataaagaaggatcaaacgacgtcgttggaggaggaagtggtttcttgattttcttgggatggcattggatccatgagagttggcttccggtgtcaagaactagctcttgtgactgagatggtgttcctatgggaagagagaggattagagccattgagtatttgatgtttgatcggaaagtgtacggagacgacggcggagatgggttccggcgagaaaggagggaggttttgaaggaggaggagtttgtggttggagtgagacgaagagatgtgagaggaaagtggagagaaagagacgaagaccatgagagagaaactgagtagcagaagaagaagaagatatagagaagttttaagaagagaggttttgaaatggtagacatttttttttgtgagtgagagtgagtgaggagagagatagattatgggagagtggtttatatatagacatcacacgcgtacgaatattataagaagaaaaagataagagaattgagggagat

SEQ ID NO: 16675 - DNA, 910 bp, Arabidopsis thaliana
ttcctctcgagtatggcggatacctgacggctgaatcaccgaaaaggcttctgtagagaaccgccttcttgtgactaaaagcatcaaatgagaatttaccatggtaagcacccattccactttcaccaactcctccgaatggcaatgtgtgaagtgcaagctgcaaaatatcggatgatgataacgcttttgtgtaatgataaaatgctactagtgcaatgtattttagctagtgtctttcttacatgaacagctatgtcattgactactatgcctccagcggagactgtcgctgcgaatctctctttcaacttcttgttatgtgtaaacaagtatgccgcaagtggcttaggtcgagaacgaatcacgtcaaagctctcttccaagttgttaagctgaaaataacaaaagagagttaaaatttgccttcaagagatgaagcagagcttacatagaatgaaaaatagttcctaccgtgaggattggaaggagagggccaaatatttcttcactcatgatcagagaatctaatggtacatcgagcaagattgtcggagcaattttccttataaatggaggcaaaacattagcataagtgacaaatgtgatgatgagaatatctagagaggaacttacgagttgtctctgtccttttcaccaccatagacaattttgtcagacacttcctactcgtctatcaacttagacaagcgatcaaagtgattcgagtttacgatacgtgacatatctttcgactctatagggttcttcccataagatttctccaattcaagcttcatggcatcaatcattaagaagagacaagagaatgtcaaataccacaaattcatcaagaatctgatcttaagttcttacacgttaccagtttaggagcatattcttttgtcgt

SEQ ID NO: 16676 - DNA, 1231 bp, Arabidopsis thaliana
cattaacataaattatacatagatttattttctacaacatatggatatatattactatacgattatgacactattacaaatccataaattggtatcatcttatcgcaaacttcgttgcacacaaacaatttgactaaacttttgatcgtgctacaaaaattctgtgcacaggaaaaaacttctcgtgaacaattatttcttaccaaaacaagcgacctaaagtttgcaatttctttccccccccaatttggcaagttgacaataagtgtttccctagactttctcgagtaaaattaaacttttatcagactggcctcgagtgattttcacgcgcatctcggtagcgcgtcacgtggcatgtctcgtcttattacagcgtatccaaattgtttatctgttaactgttacgtgtgggaactctatgatttagtttatccacattaatcagaccctcaaacatttacatttaccacctccttattttatttatttctaaatagaccccttcactattcagattcccagatatgagatcacagagattcttacttgatttgacgaaagacaaaagagatggtctaaattaaaaattcgtttgcgcttattagatggcagaatattaaacacattcacgaaattacgtactacctttcgtgcaaactttttccatccaaaagttggttttatatattaaatccaacggtggaaagaaactctatcaaacaaggaccactagatttcagaaattaaaattagggtttattagatattgataatatattatggggtgtttttgtaagaaattcataatgagtggtatagttgagattttatttgtcatttcacattcttttggactcttctgcttacaaaaatgctatatatagtcgtccatttcccttcgtttaaaacttatagcgaaatctctaattacttaatctctgaatgcttaagataataactataatctaagagtaattaattaaacgataagtggttaaatttgttgaggttaaaagtgaagcttcaatggcaagaggtcgaaagctgacgatgagccagagcgagaggtacctaggaagcagctatagttacggtgacagtaacggaaactccgccaccgacgaatcagagctcacggaggaggacatctggtcacacgccgtcgatcacagcccggagatgctggaatctcatggagcgtggacacacgcgatgctgtggtgagaat

SEQ ID NO: 16677 - DNA, 623 bp, Arabidopsis thaliana
tgcctcgttctcttgaagtgttaagtttcttcacaacctccccatagacatatgcttttttctcatgaatgggtatgttagccagagccacgagttctttgcctggagttgaggatactcgaggactcgaacccaccggcactagttgaccagcatgagcctctctgcttgtatcaatcatatttgttttaggtagcattgatattctgctgaggctctgaaggaagtcacgtttttcttttctccaatcctcctgtcaagtcaaaattcacattcaatatttagcatccatatctttctaatatatcacttagcaaaccatccacatccatgaaaagtctctttacaaagataaaagcatagtacaaatgtagaattgacaaacaacaacattgcagaattgtatcacagtgacttatcattaaattaaaattaaaaatagccagaatacaaacctccaacactttcatcatgtagtcattaaagcttcgaacattatccttttgggcttcctgaatagctgataccatagccatttcatgaacctaaaacaaaacaataacaatacacatcatatcgaccaatcctcgcgaagaaaatcaatctatatgatgatagatata

SEQ ID NO: 16678 - DNA, 1034 bp, Arabidopsis thaliana
aattaccttttattttaccggtaggagtccatgtttcgtgttagtgggcatatcttcaccggttccgttaaatccttgccaagtgagactaaagccaccgcattgccatcccatgtcgttagcgtgtcgtcccgcgacaacgatctttttcaccttcttcgggagcggcacaattttatcggcgtctgtctttccgttctttagaagcaccattgatttcctcaccgcctctctccctacttctcgatgagcctacaacattgtattattaaagcatatatagttaggtaagtaagacgaaatgctttacttaatttgatggtatcttcatgattttattatttcacacattgtccatattatatagatttttcgttttaactctttaagaagtttatttaataaagtttttaaattatgtatatagtacaaaaccttgtgtccttctgaatttacctcagatccaaactcagtagtgggaagtttttcatctgccaatgagttctcaaagagaccgatagagaatttgactctcaagatccttcgaacagcatcgtcgatgcggctcatagggatgtatcctccgttcactagatttgtcaatttctccaagtactctggatacgcccatggaaccataacctacgcaacaagattccacattttaaatatctcgatcaagaatcagtttcttgatcgagagtaaaattagaaaagtaaagaaaagggccaaccatgtcaatgccggcattaatagaagcttcgatggagtaagtgtagtttgatttttctatcggtgtgatcttatcaattccgagccagtcagagataacaaagccttggaatttgagagtgttcttgaggtaatcagtgatcattgcacggtttgcatgcatcttaacaccgttaagactagagtaagaagccatgattgatgcgatccctttcttcactgctatctcaaacggaggcatatggatccaaagagagtagcgttatcagcacagtgttgttctcatgatccatttattgtg

SEQ ID NO: 16679 - DNA, 479 bp, Arabidopsis thaliana
tgcgttttgtgtatctttgttatcattcactgcattctcttgagcttcttgcagtttaagtagtctgtctgggcattgagaggcatagtgaccaagcttgtcacatcgaaaacacattatttgagaggtgtctcttcccccgtttcgtccacgacctcttcctctgtaatttcctctgccaccacgtcctctaccacgtgaatctccttgataatagtcattgtttgtatctgaatttgcatacatcatctttgtttgatcttcttgaggttcatcgtcatcacagacacgatcctcgtatactttcatacgtccaataatatcctcaaaagatgtgttattaagatcaagaacttgttctaaagaggcgataatatggatgtatttctttcttggtagactattaaggaacttcttaacaagttttggaacttcaatgttaactccaagggctgcagattttgtagatatttcagaca

SEQ ID NO: 16680 - DNA, 1195 bp, Arabidopsis thaliana
tagaggtgaagaaacgagtctatgtttgccctgaacccacttgccttcaccataatccttgtcatgctctgggagatcttgtcggcatcaaaaaacatttcagaagaaaacatagtaaccataagcaatgggtttgtgagagatgctctaaaggttatgctgttcaatctgattacaaagctcatctcaaaacttgtggtactagaggacattcttgtgactgtggtcgtgtcttctccaggtataatttcttgttcctctctatcatttgattttcttttgacccattttataaatcaattatcggtattattaattctgacaagatatgcaaacttttggaaggatttgttaagtatttctaaaatatacaagtaatttgactctgtttgtcttgtatatttaggagatcatatagaaagacaaatatagaaaattcttctagggaccaaagactaagattgatagttatagtactatttgatttgactatccttcatgatttttactaattctgtgtattgatgtgtatgcatcagagttttttaatatatctcttgactatttgtttggtttttgtgacataaaaagaaagttaagcacttagattaatgacattgaccccaatctctaaagaaatattttatgtatttaggttattattggaccttttttcgacacaaaggttataattggacctaaactcatattaataatatatatttttgagttcaaaggtatttaataaacgacgtttaaacagaaaaacttaatataaaattattaactttgtcacattttcataatcctacgtcatataaattatgtaattgataggtttcttttcttcttttagggtggagagttttattgaacatcaagataattgttccgcacggagagttcaccgtgaaccgcctcgaccaccacaaaccgcggtaacagtcccggcatgctcttctagaaccgcctcaaccgtcagcactccgtctagtgaaaccaattacggcggtacagttgcggttacgactcctcaacctctagaaggccgtccaattcatcagagaatctcatcttcaattctcaccaactcatcaaacaatctcaacctcgaactccaacttcttccattatcgtcgaatcaaaaccctaatcaagaaaaccaacaacaaaaagttaaagaaccatctcatca

SEQ ID NO: 16681 - DNA, 1056 bp, Arabidopsis thaliana
cctctctttctaggctcgtttctcccttctcgtagctcttcttctcaacttccgacattgtcttttgatccattgtccctatagacagactaaggctggtctcatcagcacaattcctcgatggaagtagctgaagctcgatactaccattagtaacgaagggatagagcaaagtggatggttgttgttccgacggtggggattgtcttctttgtaaaggatgtccaggcaatataggaccaatggagaggtccccgttctcgttgttttccgcggttgaagcggtttgtgtagcgtttgtggtatgttgttgctgctcatgtaaacggtggttggagggttgggatcggcgtacggtgcaagtgtcttggtgctctatgaaactttccactctgagaaataagagtgtattatataagttaaactaaaatggaaagcacaaaggaatatttgtatctcgtgacagataatataaataattaagttagtggagttaggtatcttttggattatatatttgagtatgagatatgcaagacttcgaggtttagtatggtatatacttaacaaagtttgataatgaaatctattatggggtcaacgtgagtaatcaaaacatagttcctaattattaaattaattaaaagtattttcagacaacagtacatccaaacaaacctcatcaggttccattagtaaacgttgtttcaagatctatgtgcgttatctaaaaatcaaaacatggacacgccatactagaaaaaacattctttgatttactttaaggattccgataaatatatatcctaaatatataataaaaataaaaattaaaaagctagggtttgttactaaggaatggaacctggaaaaaactcggccgcagtcacaggagtggccgcgagtgccacaggttttgagatgagctttgtaatcagattgaactgcttagccttttgagcatcgctcgcagatccattgcttgtggttactatgtttccgtcggaagtgtttcttgattcccacgagatctccgagcgcgtggcaagggttgtg

SEQ ID NO: 16682 - DNA, 503 bp, Arabidopsis thaliana
ctcactcatcatgtataagctatgaaatattgtgattctaatatcaaggaaatctcaaatatatctgtgacccctataataatgctgtatgattttggaatccatggcactataataccaacctgatgtgactgtacaggtaaggaggggtgcggatagagcagagatctacagtttggccttctcttcaaatgctcagtggttagctgtctcaagtgacaaaggaacggtccatgtctttggtctcaaagtcaactccggatctcaagtgaaagactcatcccgaattgcacctgatgctactccctcatccccatcgtcgtctctgtctttattcaaaggtactaaaccaaaaatcagttactttcacaacttagcagcatatttgatcagaaactcacctcataaagctcccattgacataattaagcatataactcttttactctctttaggagtgttccgaggtatttcagctcggagtggtcggtggctcagttcag

SEQ ID NO: 16683 - DNA, 905 bp, Arabidopsis thaliana columbia
gaatgtaaccaagacatcttaaaacaagcgtcatcagagtcgttgtagcgaaatgtaaaccagttaacgttgtagctgcaacatgataagtaaacaaattagaagaatagctacaggtttcaaagaaaacgtcttaagtaagagcaaaagagaaatctttaccaaagctataaccataagtcgccattaaagctttattaacaatgatgataccaacagaagtgacgacattgaacatccacgcagcagcatctacggctgccttcttatcagctttactcactggagccatttttctgaactaactttctctcttcctcaatcagtgaatctcttacttcttcaatctcccattctcgagaagactcactttccgctaaagaatcgagtcacgaatcaagagtcatgaagatatcacagaatcgaaaaacatatgaattcgatcgcgatcgctaagcaacagtaaatttgaatgtaacacgattcgatcagatcggatcagtcaccggagattgaaatcggaacgaaatttccgtaagatctaagatcgtagatcaataatttcgacagagcaattcactgattgaaatcaaatctgaggagaggaagcaaattgatgagacggcgtggagttattacctagagaggtgaaaaatgcaaataggaaatgaatcgtgcggaggtgatcggagtaccggtgacggcgacggcgagagtggtagaaaccggagtaatctgaaaaaggcaggcggttgggaagcgtagggctcgtggagtgacaagagagtgtatgtttaaagcaaaatcgttaattgttactattttaagttttttatttctcaattttcatatttccaatatacagttttttaaaagataaatttgtaaatattaaaagataattt

SEQ ID NO: 16684 - DNA, 543 bp, Arabidopsis thaliana columbia
ttagttttctggtttttttttaatgtgtcacgtggaaattagggagcacgtgaattaaccgaggtacacggtgggacatgcggtggtcaatcttgtatcacacggtgacgtcacctcaacgcctaaaagtaaaatgataaattataccttcgtatatgtaatttcataatattaaaataaataatgagtcattttgactagggatgattctaagttcatttttgttttaaattgccctcaaacctaaatatatcatgaaattcgtgtcattagctcccacagccaagttgatcatcaagcattattagaactcatactaaacttttccatcttaactgctaagaattcttcaaacttaggggaggatttctaatcacttttcatttcaagaagagcgcttctaacagttcaaagacaactctgaaagcacaatacagaacttaaaaatgaaatacaagaagagatgtttctttcccagtctgagctgaacgcagcgactcgtgccgggcagcaccaagtcatcgccatggacaacattcattt

SEQ ID NO: 16685 - DNA, 1003 bp, Arabidopsis thaliana
tcccacttgtcgggagtgtgatcccttgttcgatgtaatcgatgattggattctctagtcgttgtacggttcaggttcgtacggggcaggttgttcgggggtttcgagctctggctcttcctccgatgcacttgcctccgcaactgctgcgagagctctagctgcggcggtggtgcttcggattactcgcgtgaagttgcaagttgtcgaggtttccattccagcatgtttgaccgttaggtcgatgctcggatgttctattccttcgaccaggataattcttttgacgaaaggatctgacgtagaagcgagagctgccaaggtgtctatagaggtgttttctcctctggggatcctagttaattcgaacgattcgaactgttaggtcaaggtcaaggttttgaccagtttgaggtacgcttccatgtgctcgtctttagcttcgtattccccgtgaaactggctggtgacgaggtgagagtcgctatgggcgtgtatttcacggatccccattcattgagctagcttaatgccagcaatgagggctttgtactcagactcgttgtttgatgcgttgaatccaagtcggaacgattgttcgatgacttccccggtggggaaggtgagttgtattcctactccggatccttctcggttggaggagccgtcgacgtggaggagccatttcttattagagttggttccatccaggtccactaaagggagctcgattacaaagtccgctagacttgtgctttcaagctggttctagtgcgatattctatatcgtactcgcttaattctatggcccatttcgcaagtcgtcctgattgggttggactatgcagaatggttctgattggttgggacgtcatcaccacgatggggtgtgattggaaatatggtctcagttttcgagcggacatgactacggccagtgccagtttttctattgtcggataacgggtttcagcgtctatcaacgttttactaacgtaataga

SEQ ID NO: 16686 - DNA, 1065 bp, Arabidopsis thaliana
ttcaatgacaccaaaagttctgctttctttccactgattctctttgagcatgtcgaagtaacgttgagaaaaacgacttccgattatagcttcaatttggattccctatgaaaacaacattggaggatgagttatatagggaataagataagaacaaggttaagtacgacttgtatcattagtgaagattccattacccactcatcgacaaagacgacccgtagttcgaatgagttatctgtgaaaaatgatctgtacgttctaagaaccataactcaaatcatccagcaagttatgcaaggattcaagtcgcggaggccgtcgtaacccatggtgaaattccgagtcgttgaaaagtaaagaaatattttgaactcgtgaacttttgtttgtgagagtttaggctttgggagtttatgggagaagccgtttttataggcgtattaaactggtgttaattgggccggatataaccgttaatcggttagtcagtaaatcaaatggaacttcaagctttattgacaactcagccgtaatgtgggttaactcagccgtaacagtacaatttgccaccaaacacagccgtaacctagaaaactttcctgccaaacggtaagacacgtaacctttcgtattcctttacctgtcttattttataattcttgacaactcagtcgtaacattgttacatgtcttgagtgtaactcagccgtaacaatatattttgccgccaaactcaaatgtaacatagaaacctttcccgccaaacggtaagacacggaaccttttgtattcctttacttgttttttttttactatatgttacttcatctcatcatttacaggtctcatcctctcttccgaacgacatggttgttcctcacattgacggacagtttatcaaagatgtcgaagccgtacttaccactcctgattgggcgaatctcctagttctaaaccctagcttgggtacatgggttgacagaccactgttacgttgtattgggacaatatgcgggcgctgaaacgaggatgggcgtgtggtttagataagccgtggtggat

SEQ ID NO: 16687 - DNA, 872 bp, Arabidopsis thaliana
tgaaattgtggatactatctgcatgtttgagaggttctttcctccaagtttcttcgatataatggtgcatttgacagtccacttaggcagggaagctcgtttatgtggaccagttcatttccgttggatgtacccatttgagaggtacaatccactagcttataatgttttttcttttacagaatacttttatgcttaaaggtagctgttttatcttcaggtacatgaaagttctcaaggattttgtcagaaacactgcaagaccagagggttgtattgctgaagcatatcttgctgaggaatgtatgcgattctgcagtgatttactgaaaaagacaacaaatgctgaagaggaaattgaaagaaatgctgattatgagaactgctctatattggagggtcgacctatatcagcagccacttcaattactcttactgagaatgagaagaacatagcacatcttgcagtgattcataatatggcgcaacttgatccttatgtggagtaagctattctcttaacttactctttattatttttttaggatattcacaatggtttagatgatgttttgctttctttcaattttagcatgcacctagaacatctacaagattctaatgaaaggtgtagacgggattcaggatttttatggaatactcattctcagaaatttgcttcttggttaaaagaacaggtaaattttctggttttgtattgtttcattctatgagatgctatctatatagctcatgacacttgattttctgacctagatacctatgacttctgatactgaagatgcagttatgtggttagcatatggtcctcgtctatgcgcaagatcttacacgggttacatagtcaatgg

SEQ ID NO: 16688 - DNA, 1100 bp, Arabidopsis thaliana
gatgtgaatgtttgactcatcagatgacttcagaaccttatgcttatatgcttttcttgtttcatctccattcgtgcatccagaagcaaactttttatgagggctagattttttttgttgttgtctgcctttaatgctagcaccttctcatgcattgatccttccatcagcatcttccttctctgcttcattacatcaaacactttggttcgagcttgagctctcctctgctgacccttcaacaactttgttggagctttttttttgtgtttgatcttttcttcttactgtttatggttgtttgtctgatattgttgttgttgttttggttaaggaggatgtgggtgcttgtgttgtattactctccaagtacgatcctgtttttcttcttcttttctcttctctcatgcataatctgattctgaatttatagtgtttgtgttgatatttgatgataacagttgtgattagatgcaataatcttgatgatcttaatgaaaatgtttgtttggtaaaaattaaaaaaattaagtttgaccgagtcacatgataataccgacattagtattatctaatctctatatatttgtgctttgcctctactctcttttcactctctctttttctctcgattccattatctctctctgtaagacacaaaacaaaccctaataatgcagtcgtcgaacgtaactgattgcacaatgaggaaaagaggaacaaaaagaaagattgaaattgagaaacgcatgactaaacaacaacgatccgtcgcttgcagcaaacgccgtcccacactcttctccaaagcggctgatctttgccttctctccggagccaacatagccgtttttgtaacttctcctgacgagaactccgatgtcgtttattcattctcgggctactctcatgcctctgaaattgttgactgttacctcaacaacaagtctcctcccaagactactattaaccctgaatcagccaagttttggtgggaagagcccgatctttaccgtgattgtgacgatctgtctgagttaagaatcatcgaagatcgtttgatgagaacgaagaagcatctcatggattatcttgagaag

SEQ ID NO: 16689 - DNA, 827 bp, Arabidopsis thaliana
gcaaaaggctcacacatctgaggatcaacagatctcgattcgattagtacgctagcttcaggaatcatcaaagccttcttcatctgcctcttcgaggtattaacacttgttttagccttaagggtctctctttcttgattgggtacagcaacgacattggacatattcggaagctctccgagaacaactctcttcttactaactgggttttcgtctaacgccatggacgacgcttttcgtttcgccgccgctctcgtcatcctcgcacagttctgattctccgccatggggttatttcagtgggaaagtgagatttgagaaaaggggtaatgtacaaggtaggtaaaaggaaatgggttgagtaaaagcgccatttttgttggggaagttttgagatttttaggtcatggcgcttctctgtgtaaattttccgatttcgaaatttttagggatttgacttttgagtatccaaaatttggggcttttttgcagatttcatttccacatttatttggcggctgttttctcctttttacccttcaaaaagtttcactcctatatttagacaatcattattgttttattcacttaattaaagatgaaaataacaatcaatgaatgcttttaattaaggaaattattagtagttgatttgtttttttttcggttttggttaagattcggaattaagtgagatgcttttaaaaaatttaaaaaaaaatcggttttgcatttgttttttttttatactttttttgggtttagttttacatttttgatttttttttggatacagaaaaataaatccactaaaccagggatcctct

SEQ ID NO: 16690 - DNA, 576 bp, Arabidopsis thaliana columbia
acataaatacttgcataattaaaacaaagtggttcacatggttcaaaagtaaatacttgcataatgaaaacaacgtggttcacatggttcatacatggttcaacgagaaccacgccctcctctagctcggaggatactaatagcagtccggattgatcgtaattccttgaataattgggtctcaagctcagtgatccggtcattcataatgcgtatcttctcgtggatgggctcgaacatcggaacttgccaagcaggaggtccttcttctcgcttgtccttccggctacagtacttcgaaaacttctcttcagtggcttcctcccaccacttatgcaagtgttctccatccacctcggtcagatttagtggacatcggaatcttgttttcccgtggtgattgccaccaaccacattacccttttcaacgtctcttccaccgtagcacttagtcggaatgcccaattcccgtcgcgtattgcattgtagtagtcgaaaccgtcagatttctcaataggagaggagtcggagcttccgttaaaagagataggcatgtctgtcaaatacaaaatagaa

SEQ ID NO: 16691 - DNA, 614 bp, Arabidopsis thaliana
gaaccagtgccaacagccttttctctgttacatttaacttcacttttgagctcctctttctctgcttctaacttttccaacttttcttcaagttccttagttcgagaagtcagtacttctgagttctctatatgaacaacagcctcttctctgttacatttaacttcattctcgagctcatgtttctcggcttctaacttttccaacttctcttcaagttccttaatgcgagaagtcagtacttctatttcagaagctaacgagttctctgagggaacaacaacctcttctgtaactgattcaggtccactcttaccgttcccatctggcgtctcaggcaatgctacaagacgttccatctcaagaaaatcacccatgagatcaagttcaatggaagaggaagttccctgaaggcttctcttctcaatcaatgtggatgatgcccatgaatcagagcaactcacatccattcgttcccctccatcagaatgactatctgtagatcgatgatcgttaaacgaagctgatgacttagccaacatccgaaacttcctgcactcagcctcaagtcatcgcactttctttatgctatctaactgctgcttgctggcggt

SEQ ID NO: 16692 - DNA, 1139 bp, Arabidopsis thaliana
tgatacaagagatattgcaaaaaggatcctgtgaattcagaaagagggtggacaaggtaagtacctaggtctaccggaactctttgggagacagaagaaggacttgtttagcctaattgttgaccgcataaaacagaaggcgcttggctggtcctccagatttctttcaactgttgggaaattaaccatgctcaaatctgttttagcagctatccccacctatacaatgacctacttccaactcccaaactccctacacaaacgcattcagtcagctcttacaaggttttggtgggatgccaactcagaaaagaaaaagatgagctggatttcttggagaaagatgactaaatcattcaaaatgggtggactgggctttagagatattaaaacattcaattctgctctattagctaaacttagctggcgcatccttcaaaatccctcctgtttgctggctcgggtgtttacaggaaagtattgccaaaacagaagcttcttggattgttttgttccttcttcagcttcttacgggtggcgtagtatctgtgtgggacgtgacctacttaaaccacatattgggaagatcattggcaccggtgaaactacttctgtgtggaccgcgccttggctctcactttctactccgctagcccctatgggacctccaacagctgattcccaagacttgacggttgaagagcttcgagatcctatcactctggaatggaacaaactcttgataagaagactcttaccagcttatgagaaggctattcttaagttgagaccgagtttcaaaggggcagctgatacctgggcttggttgcctacttctacaggggaatactcagttaagtgggggtattttgaggctcttcaggagacccctctggaagatgatcccacttacccccatcctccatctgacttcagctggaaagccaacatctggtcaactaaaagctcaccaaaatcgaaaatgttattgtggaaagcagcatagaacgccttaccagttggggaaaatcttaagtttagaaagataaatgatactgcaggttgccctcattgtcgagctgaggagacagttgtgcatattttcttcaaatgctcttttgccaagagtctctgggaca

SEQ ID NO: 16693 - DNA, 1042 bp, Arabidopsis thaliana
tcttcaatttgaagccgtaaaacaagatcaggcctaatccttttcctttctaaattttttgctagcagaccatttatcttcttcaaactgtctgttcttttcttactaaggaactctgcaccttcttcacaaatcagatctttaatatcatatgctaatgtgagattgttattggcattggctgttgcagacccataagagtcaagttttcgagtgaaaaagggaaaatcaaacaacggtccataatatttcctggcagaggctgtatccttgggcggctggggagagtttgcttgtggaggaaccttagattggcttccatcagatgcaacagcctttcccttatcagctgtagaatcacttctaggattcttttgagtactagaatctgctccttggtctgacttaacagggaatacatcagtctgttgctcctctttcgtagccacgtcagtagaagtagcttcttttcccaggttttgaaataattggctgtggcctgtcgtcaaagctacttctgtatctccaacattatcttcctctttagaaaaaattggtccatttgaagaagcagcagcctgagactccttgccacactctagcgaccttgcttggtcttctccagttttgtctgaagatctatcctgaactttccctatggcaggagatatttgcctctgcgtctgtagttcaagcggtggtggagaaatagcttgaagaagctccggaggcaaagaaccttcccctttctgtcaaaaaaaagcaattaaaaacattcaacctggcttgcagacacgttatttataggcatacatctccagcaaaacatacaataaaaatgaagacataaggaaaaagtcagagctgaaaaccttcaaacgcctaaatgccagtatctgggctttgagaacatggagttgctgtttggtaaatcctgatcgctgctgtgcttgttgggtccctgtccactctgaagggacgagttactgagtggaccagtatcagatggcgctactaaatttggagtcggtgtattcagttg

SEQ ID NO: 16694 - DNA, 629 bp, Arabidopsis thaliana columbia
cgtcccgagccgagaatgagttcttcgcaatcaccgtcgatcccgagcgcttcttttatcgattctagcgattcaaaccatccagacgatctttctccgatctataaacggagatcagtttggacgtcttctgaagatactgtttcttcatcgaattcccccgagcagacgactcccttcacggctcgggaagacaccaatgccgacatcgctcgggaattggatttacccgacgatcccgagccgcctctcgttcggaggtcctttgctccggtcgacgaagctgggacatccaattggcaagatgtgcccgagcccctcatgccgacggttaagatcgaggactttctttacttcggcccgaatgagacagaggatatcttgcgtcttaacgagcagaaggctttcgaaaaggctgagaagaggaaaaagaagaaaaaggcggtaatgccagatcctcccggttcgtcattgtgtaccgagcgatctctctcggatcttagggctcgatttggtcttggcgctgtaaccttgcgtgttccgagccctgaagagcgagccgacagtcctcctgcaggtttctatactttgtacgagggattcttctacggctgtttcttatggctgcc

SEQ ID NO: 16695 - DNA, 731 bp, Arabidopsis thaliana columbia
tcccggcgccgttcttcttcgcaacgactgctcttcttcttcgacgactgttcttcttcgccgccgtgtctacatcttctacgcctctactgttccatcaaacttcaaggtaatgttctgaattttgagtttctgttcgattagggttattagagtttttgttcttatcctgaagcatacgaatttctttcaaacgaatctctaattagggttttttcaattgagtttttaaatcgattttgttgcagagtctagaagtctattagggtttctcgttttagggttctgtcgagtttttatttgtagatctaataagggtttcgcgtttgcggttgattttcattgtagatctaattagggtttgtcattttcgtttgattttcattgtagatctgattagggttttgtgtttccaaatcgatttactaatgttttcttttttattgcaagatgtctttctctgggaatgattatacctggtttcggtctcagcagcaacatcaacagcgtcctcgtagtgaaggaaacacatcggcggttccgagtaatcgccatacattaccactgacaccaatcaattcaaaccactaagcagatggtacttctcctccacctttcaatcaatcccctcgcggttcttccaatcacattactcggctagctgtccgactcaatgacctgacaatagatgagctacttgctagtcctggtcgtgctggtttcctagatta

SEQ ID NO: 16696 - DNA, 1326 bp, Arabidopsis thaliana
ataattgattgaaaagtatagaaaaccataggtattcactagtgacatcaaggggtttcacccactttgtgcactcatagaatccatctagaaaatgaatcctattctagcattgaacctcagaggagattaaatccaaacttgaaagaagttgtaaaaaaagagatacttaaactattagatgcaagtgtaatctaccctatatctgatagcacttggtatctccagttcattgtgttcctataaaaggaggtatgacagttattaaatattctaaagatgaactactacccacaaggaccataacaggacacaggatatgtattgactataagaagcttaatgcagccactaggaaagatctcttccccttacctttcattgaccaaatgctaaaaagattagccaatcacccctattactgttttctagatggttatagcggattttttcaaatccctatccacccaaatgaccaagagaaaactacattcacgtgtccctgtgggacttttgcttataaacgaatgccttttgggctttgtaatgcgcctgccactttccagcgatacatgacttctattttctccgatttgataaaggagatggtagaggtattcatgaatgatttttctgtgtatggctcttctttctcctcctgtttgcttaatctgtgcagggtactcaagagatgcgaagagacaaacctggtgctgaattgggaaaaatgtcaattcatggtcagagaaggaatcgtcttggggcacaaaatatcaggaaatgggatagaagttgatagggcaaaagttgatgtcatggtgcagttgcaaccaccaaaaactgtgaaagatattagaagttttctcggacatgctgggttctacaggagattcatcaaggatttctctaagttggctaggccactcaccaggctgctgtgcaaagaggctgagttcacgtttgatgaagaatgtctggttgcattcagatcgatcaaagaagcactgatctctgccccaatagtccaagcacctaattgggatcacccttttgaaatcatgtgtgatgcttcggattacgctgtaggagcggttctaggacaaaagattgataagaagttgcacgtcatctactacgctagcagaacgatggatgatgcacaagtaaggtatgccactacggagaaagaactattggccgtggtctttgcattcgaaaagtttaggagctacctggtaggctctagagtgacagtttacactgatcatgctgctctaaagcacatctatgcaaagagagataccgagccaaggttgctgagatgga

SEQ ID NO: 16697 - DNA, 1052 bp, Arabidopsis thaliana
tgagacactacccggccgacttctcacactgtacattgatgatgccggaacttttgtcacaagcggccggagtttccagtcatgcctcgtcttatatcctacacaccaaagatcgacaattgtgttattattaccagagaactttaagaaacactcttcttgcgagtcagatcatccagcttgggcccaatgtttaatctatagcgagcttgtgagaaactctcaatcgaagattttcggatgctactctactctcaacaaagaaaatttgactaaaattgtgagacgtgatcgtaccatatgtcttatggccatatcgattgagcttttggagaggtttctaccatatccaaggctgttaaaagctgagctagatttccccgatcctcgaccaccattctcggttagccgcggtggacctagtttcctcatgttcaccactctctcaaccattttattacccatagccactgggctcaagttatcacagccacttccgccgttgcttgcctttgctcgcccacgcacaccagtgagactcccgttggtgttcccgataggagcccgacctctggacggcgaacaagattgccttcttgcatttccgctgccgccgctggtggggccacctccgcgttctatggaaccagatcttgaacctggtgctgaggctactccaggtctgcctcttgaagctgagaccggtctgtctgctaaagtcgtcctcagattcggtggagcttctaaagagaaaccaggcatctctggtggtttccacggcctcgacgaattcaaagtaggagaaggagaagtccctcgggacggagccttactcaacgaattcacagtaggagaaggagaagtccctcgcgacggagccttactcgaaactattgatggaccggtcggggttgaaggcctgcgggttggtgtggctggccttgacactggcttttttgaagatgcagaagacggtcgaggattagaccgagttggagtagctgatctcgctgaaccgcttgaagtagtagtggttcgtggagctgctgtag

SEQ ID NO: 16698 - DNA, 520 bp, Arabidopsis thaliana columbia
atgatttgtagtttttgtggattaatggttgaaggtgagaaatggggcttcgatggatttgaaaagattttgtatcttcgtggaaatgagatcgttggagattgcagcaagtcatctcattcgtattcacgggtttgcttaggtactttggagatattgagagttttggttgtttagtctttgataaaaaggttgtttagtttgttttcgagcttagagatggatgaagaggctacttcgtggattaggagggctaagttttctcaaacggtttcttatcgtttgaattcttcaaagttagcttctcttccttttatgataaaccaagataagttttctggattaaaagctatacctcagagatcatcttcttcgtcgtcggcatcatcatcggatcctaagttggtttcgagtaactcacagactacgggagatacttcgagtttggaagctgctgatgtatatgttgttgattcggaaatacagacaaacccggttactcataagcagagatctgttt

SEQ ID NO: 16699 - DNA, 556 bp, Arabidopsis thaliana
tagtatagtaacttccgccagtctaaagaattcgccatcgcggctcgagaaaatatgatcttcggggatgccaaactcgcggctgagatactcccgcttctctggtgatccagccgtcacaaacacctcggcccccaccctctgcgccagggtgattgctgcttggccgacacctcctgcagcagcatggataagcacggtttccccaagctgaagacgtgcagtctcgtacagggcgtagtatgaggtcgtgaatgccatgggaatggaagcggccgcgtcaaaagtcatgccgtccggaatggcaacgacactagtccaatgcaggcgtacacgattctcccagtgtcctcgcatgagagcacatacgcggtctccaatcttgaatccgtgctgggatgccagtgagcccacctgggtcacgacaccgctgcattcgaagcccattacatccgtgctcaactggcccatcgcgaccatgacgtcccgaaagttcagcccaaacgccatgggctcaacttcaattgactcctctggtaacggatcggtttgcatg

SEQ ID NO: 16700 - DNA, 1133 bp, Arabidopsis thaliana
ctcgtgtctaaaactctaaactaaattatatcctctttatattttataattgacacattttgcgcgaataaaaagacaaatcattaactatacaaatataccattactttattagatgatatttcctctatttcaaattatatgatgttttagattaaaacacacactttaagaaatttatttttaattataaaatttgttctcttgatattaaaaatacaaaatacaaaccaatagtcaaataatcaaataaaatatatttaaaaattgcattgatattagtaaaacatcctaaataaatctctgaaatatcctatataatgaatcagagtgagtgttaaatttaaaacaaaaatatgaataaattaaagaataaacgtggaagtttatttgaaaagtaaaattggaaatttaaaataacatgtttttttttgaaacaaaataaaaattccacaagaacactagtggttgttatacagaaggactattattaaatattttaaattggatgatttcattgcacgatatataaacgttgagttgttttttatttttctaaatcttgaacgtataatattcatcatgcataaacgttgagttgttttttttattgaacagaaataaaaatcctcaaaatataacttaaagctcatccctctttatcgcggatggacttaggccgtgttcgtttcatcagtcagatggatcatctagatagagatgagttttgatgttcgtttggtgccaaaaacggttcattcagatgatctatccaaataaatcatctggatgactttgaaaatttaagctaaattttgaaacttatttggctgaatttaattggatcatttggatggagatgatccagtcaaaaataacaaataacaaaaataccttaattatttcaattgattatttataagtattttttcgataaaaaaacaaatagacttaaatcttattttacaactatttttaaaaaataacaaattaaattttccactaaaaccgcaaaattatttttttttccgttaaaaccgtaaaattttgtttttcgccaaaaccgtaagattctgtttttccgacaaaaccgcaaaatcacgttttccgccaaaaccgcaaaatcacatttt

SEQ ID NO: 16701 - DNA, 557 bp, Arabidopsis thaliana columbia
tgataccaatcatgttacaactccgatcttcgattaaacgtttctctcacaactctcaatcactcgtttgtactctcaagaacttgaaccaactgataagcaggtttttcaagtctgcttatactgaagagtgtgtgttcagttcaattcctctaaaacacaaacatgtcgatgcagttatagagggtgtcaatccagtccactgtattgctagcaatcaagatatgtacaaaaacgactaagtcaagccaggttataatgatggtgggtttctagtaacaatcctaggtcaggattcaaacaagtaaaaatgagaactttaaaagccctactcgatcattgggtcgagtagaaccaacaggtgagaaaattaagaattaaaatgcaatcaacaggggatgaaaatagaggatgcaaatgacaggtaaataaaaatgcaatcaacaggggatgaaaatcgatctaatagaagttctaaggatagtttcattgataagggtaactctagggttcatcaaatggctaataggcgaaaggtagatacccatgacgataga

SEQ ID NO: 16702 - DNA, 802 bp, Arabidopsis thaliana
tgactaccacatcacaggtaaaaacatatgagacaactctctctacaagactacaactaatcaaccacaaaggccaaaagcaatgttttcgataaagttatgaatcttttgtttatacttacttatcaagaacacaaacaactgtattctcagcatcagagaagcttccgttaactttcgtcaaagacccttcttcatcattctcattatacggaacctgaacaggactcttacccaaaaacttaagattcggtgatgctaacaaagccaaagtcttgacatctctaatatccaaaagctgagaatcagattcattcttaagcttacgaaacgcgttcatggcggatattggtttatacttcctcaagtaaaacatcacagctggataaacaacaagataggtaaaagtacatcccgctacgaaaaatggatacttgttgaagaaattatcaattgtgaccaaaattgactctaaatcgatttttccagaagatgggtctgatgaaattgagtcgaatgattcagatgcgagaacaggggaagtgataattagttgggaaatggttacagagagattggttttggttaggagatgtattggaggttgttttgtagaattttgaatgggttttgggatttgagaagttgaacaaggtttggttaggtttcgcagtggagaggatgcgaggattattggaagagacgtcattggtaatttgacgacgtgtggaagcgcgaagaggataagagacaaaaagaaaaaaaacaatagatatgccacattttgtttttttcttgacat

SEQ ID NO: 16703 - DNA, 944 bp, Arabidopsis thaliana
catggtgttgccaaagtccatatgagtctttggctttgtgtcttctagcaaggatacactacttaggcttttaagatcgagttgcggtttaagtcttatactcaattgatatgtctataatttgcatgttttcagtgtctattcatcatcactttgagtctagtttcgtatcattcatcactgttttatatcatttctcatcattcttgcacactttgcatgattaggatagctttgcatacgtattgcatttctgagttgttttcaggtgatttggagctgtttgcgagcaaattggaagaaacgagccagaaccagaagacatactcgacccccaggccgagtgactttggagccattcttcccacatactcgacccccaggtcgagtgactttggagccattcttcccgtccactcgaccaccaggtcgagtaacctcagctcaggccactcgacgacattactcgacccccggtcgagtaccgcttcgccacaccacctgaccacactcgaccattcactctaccacgttactcgaccccactggtcgagtatcatcactcaccaccatcaccatcactcgaccggacactcgatcacgtcttcacagtctactcaaatccgcactcaaccagacaagctgagcacaaggaagaaaagaggagaagacaaagtgtttggaagcggcctggacctccatcggatcacgaagcccatctcggcccgttatcactctatgggccgggcgattaggttattggcccgtctactatcattttattttgtttggtataaatagatgttttagggttctgtcctaaaacatctagtcgacattgcgtttttgcttcagttttattttcagttttactctgctacgccgcttttgcttttgcaacctgtagttcgcgatttttccaagttattgagattcgcgtttga

SEQ ID NO: 16704 - DNA, 1228 bp, Arabidopsis thaliana
aagcagaataataaaaacactcgaccaacacagcttgttaccaagcactgggtgtggtcgagtaaacagcagagacaatgacaaagatactcgactgcacagtctgttaccacaactgggtgtggtcgagtatcagagtgataacaggagagaaatgcaaaaactaagcaacatgtaacaagatgcagtagacaatagcatagtaaacaaataaatcaattagatgaggaattcccgaggatgggtaattgagtagttttgtttcctcagtttacaggtgattgacatgctcaataaattatccctagacaacaagtttaataaccaaatctaagtgtcaccgcaacagagaccctcaagttacaccagtcccagactcaatcaccattgacaagagctaacttaacaggcattaacaataaccaagttaaagccaaaacgctccctgtaaccaataccttggtagagacccacaaatctctggaattagtggttcagacatttcatcgaacaccttttgggtgcggaaatgtttgggctctaattccagttgatcagaaagcaataggcattaagaacaactaatccacaagggatctataaatcaaagtcaaccacctagtacacagaggattctaactactctaacccatcctcagaaacctagtcactactcagacatcattgttgaaagcataaacgatgataagaatgataacatgatagcaacagagtaatagcgagatgataataggatgaacaacttagtaaacgaaatgaagagcaaatactgaatagattaagagaaatccatattacaaaatgtcaagaacacacaacgtctgcggaaaaaaaccttgtttcgaaaaatgtaaagtacaagctacttataggaaaaaattctgaaaccctaatactcaaaacaacacagtactgggacggatttaagaacgccactcgacccaggtggtcgagtgattggttggagtcttcttctcttacttgcgctcgagtgtcttgttgagtgcggaatggagaagactctgaagctggcagtcgagtatgatgtcgagtggtggaagatggtggtatcgacttggtggtagagtgattggtcgagtgtgcgatgatgaagggactcgaccatgtaatcgagtgggagatcgagtgaaatgatcgagtgaaggtgatggtggtatcgaccacggagtcagtggtgatgtgaagt

SEQ ID NO: 16705 - DNA, 1378 bp, Arabidopsis thaliana
cttcaccatgaagatcctcctcctgtagtactgaacatcccactccaatatccattattagggcttgagttattattattattattatttccatgactcttctgttgttgattatcatcatgatcaacttcttgtgttatgcttgatgaaagctccttcatttgatccccaaatggaaacaaaactctaccttgttggtgatgatcactatgaagagcttcagacctattgttgctattgtgtccaagcccttgatgatcggtagagaaggagagattacttggcttgtaatccaccattgttggaaaccctgaagaagtgtaaagcacagtgtttgaatccatcattgaaccggaaggcatgaacgatgagttaatccctgatcttgaagaaacattaactccggttcttaaaagttcaagagctgaaacaggagacgacgaggaaccatagacagaagaagatgatgaaggctgctgctgatgagttatgtaccatttcctccatcttaggcatctgaagaaactgagacatatggacatgatgatgatgttgatcttgcatgactgggaaagacaacaagttgagatcttgtgatgaccctttcgatttattatggatttggtttgagaagagtattggcgggtttagatctggaagtgaagatggtattgtctgaaggatgtttgatgaagaagatgaagatgatctcttgttctttcttgagcttcctcccacaggaacattcctaagagatccaccttcggtccaataccttcgacaacctttgcagaagtatcttggttgtgtgagactatagttgttgtagtaacaaaactttgtgttggttgagttgcatcttggacaatttagtttctcttgtggtcttgctttcctctccgccacaaccgccgtattgttattgttgttgcttacgccggagacggttgctccagcagttgagacgccgttagatgtgagaatggtgtttggccttgcattggatgtggtgtttggttgatgtgtgttgttattaggaatcatgatctgctccattggtttaacgttcatcatttcttgaaaaccctaaaaatttgaattttaaagagttaattagagcttaattgaaacccaatgtacatgtatattaattatgtatagaccataattgatacataagttatataataagctaattaaaacatatggttagttcgcacgatgctttgcaattttaagcactaattaaacagaaaaatgaaacatgaacattagattttccttattagatattctatagaactatgtatataggatctcgtggaaaacgaaaatagatgaacaccaagaacaaagggtaaatacaaatcatcggttc

SEQ ID NO: 16706 - DNA, 684 bp, Arabidopsis thaliana
tagtaacgtcggccagtgtgctctaaagtaagcgctggttaaggtgtgggttgtgcctctttggttgagggttgcgtcgttgctgacttaacggtcggacgcgtcgccggaacattgtcacacggttgctctttcgggcagatcaaatccagcattttcagcgtcacgccattggtccagccaaagccatcctgtaatggatattcgccaccgccgccccccgttccggtggtgctgacatcatatttttccaccagctttttctcccggtcataggtgtgctgaacattggtcaggaagtgccagctaatgtccatcgccacctctttttgcccgtagttttgtaatccttctgtcgcgacccactgtaacggtgcccagccatttggcgcatcccattgttgcccacttttcaccgacgtggtgttcaggccgccgggttgcagcagatgtgttttcgtcgccgtcgccattttgttggcgcgatctttcgctgccgcattgacgtacagcgggaacagggcggccgcggttaactgattgcgcactttatgacttttcaggtcgtaatcggcataccagccttgttgatcgttccacaggtatttttcgatccctttttgacgggcatttgccagcgtttcgtactggtttgccatcgcgttatctccggcagctctttag

SEQ ID NO: 16707 - DNA, 970 bp, Arabidopsis thaliana
cactctctccagatcttgttccccgagaggctgctgagaaatggcttatgtaccttagggagaatttccagctgttgccttcaagtgtagcacccaggaacagagatcaaacttgggttggaaatcatctaaggcatcaaaaccaagcaatatgttgcagacgagtgattgtcttggagcagacactcttatcaaattgttgaagaactactcaagaagtcatgaggttggttccatagtttaaactttaatcatcctaccttagcatcaagttatatcattcagtttcaattaaatcttcctttgttgttctttggcagttaaaaaaatctatcacagttggtattattggactgcctaatgtcggcaagagtagtcttattaacagtctgaagagagcgcatgttgtcaatgttggtgccactcctggactgactagatctctgcaagaggttcacttggacaaaaacgtgaagttgctggattgtcctggagttgtgatgttgaaatcatcaggaaatgatgcttccatagctctccgaaattgtaaaagaatcgagaagttggatgacccagttagtccaggtaattggatataagctcaagatagaatcacacttatttttgtgctttgtcttttaaaggttataatctgagtgacctaacttggaaatcttctgctttgtgaaaaaaatagtgaaggaaattctcaagctttgtcctaaagatatgctggtgactctctacaaaatcccgagcttcgaggcagttgatgatttcctttacaaagtcgccactgtaaggggtaaacttaaaaagggtggtcttgtggatattgatgctgctgccagaattgttttgcatgactggaatgaaggtgcggatctttttttgtcctcgtaaacttgaagcgtaaaacgatttttgaaaaccagtttcttaactcatcattgtctctaatatgaatggt

SEQ ID NO: 16708 - DNA, 545 bp, Arabidopsis thaliana
ccagctctcacctctctcttctgcaactctcttaagtgtatcttgaatcccaggcatcattcctttaagcccacagaagtaaatatgagctccattgtccaaaagcttgaagatctcatcactatattcttcaatcttgtcctgcacgtacatctttccacctttcttgttcttctcctctctgctcaatgccttgtcgaacctaaagttgtctggatggtcttttaggtacttggtaaactcttcgtcatagagaaggctatcggtgttggccacgcctaagaagagccaagctaagccgctaaatgtcttgtttgggacgttttccatgaacattcgacgtaagtagcctctgtatggagccactcctgttcccgtggctatcattatgtgtgtcgcgtttggatcactctcgggtaatagcattaccttcccagatggacctggttttgaaatgtatattgagttaaaagaaaacttagtccaaggggtctttaagtatgagatcagttggttgggtaattagtttacatacaggtgatttg

SEQ ID NO: 16709 - DNA, 1075 bp, Arabidopsis thaliana
taaatccttactatcaggatttgttggtattattttattccattttttagttactggatgtgactataagatcatccaagaatacaaatgtttttttgggaaaagacaaaatttgggtctaactctccataataaatgtaagtatccttttgtaagaaatggataatataggtgtcaaatttgaataattttattttcttcatttgtactcttgtcttcacagatgctatatatactcctccatttctctcggtgtgaaccttatagcaaaatctctaataattgattatatgaattaatggttaaattttatagtaattaaacttgaattaatcagtgattaatttagagattaaagaagagggtgaagttgttgttgcatggcaaaaggtcgaaagccgacgacaatgaaccggagcgatcgataccttggaagctacacttacggtgacagtcacggaaactccgttaccgacgaattagagctcggtgaggaagacatctggtcaccggccgtcattcacgacgacaccaccgagaatgaggaatcctacggcacgtggaacttacgcgctaccttgggaaaaaacgggcgcgtgggaggattgtcgctggctttcgagggctctttggttgctccgccgtcgtcttcgccgatgatagtgcagaagattcacggcggaggaggtgagggagaggaagaccggagaaaattggcgtcttcggcgccggtaaacgtaccggactggagtaagatataccgagttgactcggttgagtcaatacacgagttagacgacgaggatgacgaggatgaggaatccgggatgatgccgccgcatgagtaccttgctaagagtcaagcacggcggagtagaaagatcggaggtggtggtgcgtcggtgtttgacggcgtcggaaggactctcaaaggcagagaactaaggcgcgttcgtgacgcgatttggagccaaacagggttctacggctaagtataattaacaaaactagagaaaaaaacattttagatttcaattagaattacttgtttttgcagtatagaagtaattttgtg

SEQ ID NO: 16710 - DNA, 848 bp, Arabidopsis thaliana
ttcatgtctaatgattgactttcttggttgagttacactgtgtccattaattgacacgattattcagttgcaaaaatggcgaaaaccacagaaagactattaactcaatacacttcaacatgccactgcttgttcttcctgagctgagtaagtttctgctcccagctttcgcctcgctcttcagcgactctcttaagcgtatcttgaatcccgggcatcattcctttaagtccgcaaaagtaaatatgagctccattgtccagaagtttgaagatttcatcgctgtattcttcaatcttgtcctgcacatacattttccctcctttcttgtttttctcttctctgctcagcgctttgtcgtacctgaaattttctggatagtccttgcggtacccggcaaattcttcatcatagagaagactgtctgagttagccacaccaaggaagagccaagcaagtccgtcaaacttgaaattgggaacattctccataaacatacgccgtaggtatcctctgtacggagcaactccggttccagtagcaatcattatgtgagtagctttcgggtcatcttcaggtaaaagcattacctttccagatggacctgtcaacaatatcgaacattttagaccatacaaattcaacaaaaagaagaggttctatatcagcaaaacacataaacttaccggtgattttcactttatcgccgggtttggcattgcacaagaagttactgcatacaccagctttggaaggatcttcttttcctgtctccggatcatagtacatagctcgacggacacatagactagctgttttgccacaaaagactctccataccgtgttga

SEQ ID NO: 16711 - DNA, 972 bp, Arabidopsis thaliana
  unsure (1)..(972): unsure at all n locations
tggtaggcttgaacttattaaatcccaatctctttgcaaaagacaaagacatcaaactaaccgaagctcccaaatcacaaagactattgttgaacactaagggtgctagtgaacaaggtagagtgaaggaacctggatcacctagcttctttggtatcaccttcttttgtatgatagcactgcactcaaaactcaattcaactatttgctgagcttcttggggtctttccataatcatttccttgggagtatcaaccaagggtactttctcttctaactctttgatacacttgatgaacatcatcttgtgtttctggaagatcatttcatcaatctgtgcaatcctttctggaaatgctggtttaggtacatagggagatggaatatggattgggttgctagggtcatgtgctcgttcgacaagccgagcaaagaagtcgagttcaatttcctgtcttgatcttggtctcaaaacctccccttcttgaatcccactgtcctcagtggcagaagtattaactgtggagatagcatgggcatactcctttggattttgaacagcttttccaggaagttgtccaaggtgcttaggagctgaagtagaagcaatgtgtccctccatgctcttgactctagtgttaagtgcatcaatctttatgttcaagtcgttataagagcaatcaatcctagtggtgagctcagctagcttcttatccatggtcatggaacatgaagcatgtccttgcacaagttgttgaggtagagtcttcatctctgagtcttgtgctgaaggttgttgtggttgctgggtgaagcctggaggtccaaagttctgcttttggttgtagccttggttgtagggtcaaagggtttagcttgagtcggttggttctgtggggggtagacttgatcttgtgggtttgcacnnatgtacttctgtaagagagatttagatgagtggtttgtagtgtg

SEQ ID NO: 16712 - DNA, 870 bp, Arabidopsis thaliana
taatgcatagatctccacaatactcaacgagtctcttgttgcaactatcatatccgtcgtagtccattggaattgaaggtgtgaattgaaggaggctgagcggtgataaactaatccaccaaattgcgccggttaggtctaaggcatagacttgtcctttatgaagtataatgtccaagaaatcttcaacttggtttttgatttttgtccatattctactactctcttctccactcttgcagcaccagattttgtcatcctgtccgactgcgaaaatcagattgtctaggaaaacaactctagacaatatatgtgatggtccttctttacctatcacgccttgtattaaatacttatcaaatatatgaatctcgtaagattggcgaatctctgaaacctcaaatttcaaaaggtctagggtttgttgtgaaggggttaggagctggcgaaagaaaggagacaagagattaatcttactggattcagagacttgtttggttctgatcagccatcctttgtaagaacatgaagaagggccagttacacggaagaaagtggtgggagagagaacagtctctatcatcttgttggaggaaggaaggttgcattgaaagctcttcggtgtcgcagccgccgaacgccagggtttacagatgctacgtacacggaggacgtcactaatggaggagaaagggtttgcggttaaattgatgaggtctccaggtaattcagaccactcaggtttttccatctttgaatcaatcgacgatgtgagagcgtgatcaacatcggctcgccctctctgttataactccatatatatacacaacaaaacttaaaccgtagatacttgaggacttacgtgggctg

SEQ ID NO: 16713 - DNA, 770 bp, Arabidopsis thaliana columbia
tagatctacccgatccccgcacttccgagccgataacgcgtgaaaagctgaaagaaaatcgtctgggattggcttgagaacttgagggtgcgttctcatctaagaagctaaaactacagttagaaaaagaaggtaaaaccgcatcgggcacaaaattccccatctcgttagaaccaacccgaggaggtcttcgtgaacagcgtcctcgatggctacaaagaaaaagtgatctgtatatggctcatccttgctcgggaacccatcaataactttcctacccttagcaggagaaatgtaataccgatccacttcggatttgggaacctgccaaatctcaagaagatttctcaaatgagcaagcgttatgtcagtttcagactcataactctgaatcaaaatcccgaccacatgtctcaaggaacgcatcgtgatatgggagagggcaatctggtacgatgtcacgtactccaaaaccagcctcgggactggcaaccacaaaaaacaactatagaagaatccttcatacagagtataaaaacccgcaggggtgttgtcggctcgctcatcggggctcggcacacgcaaattgacttcaccaagaccaaatcgggatctcagatccgaaaaggaccgctcggtgcataacgttgagccggggggatccgcattatcgcctcttattcttcttcctctcttctctcggctttctcaaaagcctctgctcgttgagacgcagaatgtcttcggtctcattcgggccgaaataaaga

SEQ ID NO: 16714 - DNA, 1424 bp, Arabidopsis thaliana columbia
caaaatctcaaaacccttaatgggggaaacaacatgacaagcaatcaactaaaagaaagaagaaaaaaacatacattttgcttttgtgaccctctcggagcagacggcgaggttacgcttggacttggcgacgaacttgttgaactctgcgcgacgagtctgttcaggtgtaaggccagacgaatcatcggcgacggaagtggtaacggttacacgaggcggcgagtttgctacagaacccaaatcacgggaaccaccggcgacggagacggcagggaaagaggaggaagaaggggaagctttgaggcgtttggcaggttgaaaaaaatccattagggttttaggtgtcgacgaagccatctccgtttcagaagtgaatcagtcactatgaagaagaagaagaagaagaagagatccaattttttattctcaatttttttttatgtttcccagaaaagtttcagagaagagttaaatggcgggaataacggtggtataggccggttaaggaatctcttcaggccgatataaaccggttaaaggaagattcgcacactcagaaagtcagaaacaattccaatttcaatttgacattttagtttaggaacgaatttagtagttctgtaacttgttctgttgagaagaacaaaagcaaagggctaaaagacaaattcaacatatataatagtcacaaagagatcactgaaattggttctaagtttctatataaaaaaaacaaaggacataaacgcaatcttggtctattatcagacttggaccatatcacattatgtcgaaaaagaagaaaaaagaattgggacaaaatctctctaatggggacaacaaagcatcacctgctcttctaagcatcacctccaaagattaacaaccatttttcactgcagctctcaagatttatgatgatggaaagataaggaattgtattaagacaccatgggagtacaattcatattaggtcttcttgattttgccgacatatgcctggagagacaaaacaagagttaacaacatgtgtatgttctgcagttgatttaagttcaacaaagcaaaagagtaatgtatatgaaggaacctgaacgagcttggtaagctttggtttcgaagcggatagataatggtcaatcttctcctgtgtttgaggaacgtttccactttgcattgtaccagtcactttctcagctaccttcttcactatgtttttgtaaccatctttgttcagcttaccttctttccaagctggttttaaaagctcttttacaacctcaactaaagcaaacttaaacgcccgcattcctttcgggtctttctctttcttgttctcttcgtcgctcccatcatcatcactattttgattgattcagtcccaccttggggtgcttcattagtgtcttctccagttttct

SEQ ID NO: 16715 - DNA, 889 bp, Arabidopsis thaliana
gtcaagtcgaacctccgagaataagcctcgagtaacctcacacgaactcaacgttgatccgacctaccaacctataaagcagaaacgtcgcaagctaggtcccgagagggctaaagttgtgcacgatgaggtcgatcgattgctcaagatcggatcgataagagaagtaaaataccctgactggctcgccaacccggtcgtcgttaaaaagaaaaacgggaagtggagagtatgcatcgactttacggacctaaataaggcatgtcctaaagacagtttcccactgccactgcgggacacgaactattgtctttcatggatgcattcttcgggtacaaccaaatacttatgcgcccagatgaccaagaaaaaacagcttttataactgaccgaggcacctactgttataaagtaatgccctttggtttaaaaaacgctggagctacttaccaaagattggtgaacagaatgttcgccgaccagcttcgtaaaacgatggtggtctatatcgacgacatgctggtcaagtcagctcgcgaaaaagactacgtcccgcagttaagagaatgcttcaaaatcctcaacaaattcgaaatgaagctaaaccccgagaaatgctctttcggagttccctcaggttaattcctcggatacctagtaaccgaaagaggcatcaaggccaatcctaagcagattgcagccttcatcgacatgccatcgccaaaaacggcacggaggtccaacgactaaccggctgtatcgccgcccccaacaggttcatatccaggtccaccgataaatgcgtccctttatatcagctcctccgaaaggataaaaagtttgattggaacgaggactgcgagcaagccttcaaacaattgaaagcgta

SEQ ID NO: 16716 - DNA, 869 bp, Arabidopsis thaliana
gaagagattccatgtctcttggtctgctgcatggaggacatgggcgtcagtggtgggttccactgtgtcttcttgtctttcttctgtgctctctgtttactgtacaaacccgaggaaatctcgcaatcttctgtaaacttgataaactctctataagactctgtagcttctattggtcgtgtaaaatgatgatttaaatttttttaggtttttaaacatcactcatactcgaccactgtactcgatctctacgccatttgtagagtaaaagttttgaattttcactctagcttcacgttattcctctattcctgagaaccacaaacacaactaaaacatatcaaaaataacaagaaagtaaaaattatttacaaggataatcatgggacttcctcccaagtgagcttgtttaaagtctctagcttgactcctcacacttataaagaagaaaatgaatgatagagagggtctgcatagtcctctctagtatcatcatcatactcagctttctccctggagaggtctacagcagaatactcaattcccctctcttcaaaatatgcttctttctcttctggagggtaatctatctcttcagaccatcttgaagtgaacttctttctcgggatagtgtcagtcctgcctttaggttgagcttccttctgcaactgattcagcttacttctaagttcctcaacagtgtgggctagcttctctatagtttcatcttgcttatcagacctctttttaagttctttcactcttttagtctcatatccttctcctgagatcgctctatcatttccagaggttcttccaatcgcatgttgaccgcgtggagttttgttgatccaaactgcaacttgatg

SEQ ID NO: 16717 - DNA, 973 bp, Arabidopsis thaliana
cagctcatatagctgctctaacggcaaacttgaatcggccagcctcacacgccacgtgtcaactcctgattccttctttattttacttgatttcccacgtgacaaccgcacgtgtggggttatgcatcaaggttcaaccgcctgtgatccctctagtatctctcaaaagagtctttctctgcaaagggtgaagaagaagatgcagtattgtaatgtaaacaacaaataggactcaaattggtcctagcttgttgccaattcctaatactggatgagaaaataggaatctgccgaacaagagccattcaacaacacacacacacacacacacacacttgcacatgattcaaatcattagtatcatcatatagaacagtcatcaacatatagtatactcagaaactatgtgattggtaaaagagaaggattcatcaaggaggaactaagaacaccaaaagagcaacaagtaggaccaaacccagattcaattttgacaaaatttactccttccattgaaaaccctaactatggtctgggcccttaagtctaatagatgttagaggatccatatgaagcccaatatagtgtctcatgagtaacccaaaagcccatgaaatggcgcatgtaacaagggttagcaagatagtgactcatatatttagttatgtaaggagaactttgatggtaagtttgagaattgtctcaaaacaactcttcttctcatctttataaaagtatccaatggaatcattgtgctcatggtgacaacaaagtaatctttcctcttttagttgctttgaataataaagctcttaatgagccatctactttcagtcttatatatctcttaataagcttatttgagcatagatatcagtgctttagagatgtcaacaagagtacaacatcagagtccgacacaaataagtcgtaattaaacgccactcgaaaacgcgctcatagatagacaaga

SEQ ID NO: 16718 - DNA, 967 bp, Arabidopsis thaliana
ccttctcttcttctctttcacgatcttctcaattcttattcttctcctttcttttctttacagatcatagcagtttggttatggagaaacaaaacacattaatgttggaagaagacatgaacaaagacaataatgggtcgaacatcaataagttctctcgacgttgataatgcggagactacgacgacgataacaaaggctcacgaactcacgtttcaacaatgatgatggtggctgacttagtttagggcttaagataccccaatatatatgacacttacaaaaccctattgtttgtcatcaaaaagagattgggccatttatgggctatatcataatatcaaaacaaattggcccaactatgtgggagtgggatgttacggttggaagcataatgtattctatgataggcactagaccggaacttgcttatcctttgggtgtgatcagtcagtttttgagtaaaccactgaaagaccactagcaatcgactaagtgggtcttgagatacatgagaggcagaaagaaaaagaagttgtgttacaggaaacaagatgatttcttgttgagaggttactgtgactctaattatggaagtaattttgatactcgaagatcaatatcaggttatgtgtttacagtaggaggaaataccgttagttggaagtcaaaactgtagaaagtggtagctctttctacaatagaagccgagtaaatggcacttatagaggcggtaaaggaagccctatgggtgaaaggtttagctaatgagcttggtttcccacagaactatgtggaagtacattttgattctcagagtgcaattgcattggcgaagaacttagtgcaccatgagaacaccaagcatacagatatcaggttgcattttgtgagagatgtcatagctgaaggaaagattaggctagtgaaaattgcgagtgaatgcaatccagtagatatctttaca

SEQ ID NO: 16719 - DNA, 946 bp, Arabidopsis thaliana
catgcctctcaggaagcaaaggtgcttttgactcaacatctaaattacttctgctggctctatagaaactcggaggattactcctgagcgacccgaagattggtgatgccgcaatcgtataagaatcagtcgtttccctaaaagaaccacaaaacttgtcaatgtttcatcacaaaatctcaaataacaaaactttatgagatgggttacaaggaaagtttcgagctttacaattaattacctgaagctttgaggccattgaacctgggaaatgaaaggttcatcgatgtcgtcgtcacgatcaacagcatcaccaggaagatctccgagatcgcgttgatcagattcacagtggctctctcacacatagtgctggcgtcttgaagatcgtcgttatcttcgtcatcttcgaacgtaacgtcggtttttttctccttatcattgttcttgtcctccatatttcgaacaaacccaagtaagaatagatctagagagtatcaagaaccttagaggattaaatctcaccgaaaaaggaaaaaaaaagatcaaatctttatgattgattttggttacagagtgggttcgagaactttgcagagaggtggcaaaagactaataaggaaagctgagtgtctgagcacaaaatgtccgtttttttttaatcaagaattttactttttcgaggatttgtgtgatttgattgctcttgttctccgtctctctctgttcgcgagagttgattgcccctagttataaggcgggaaaatagtgacgtggcggtgatgatagagactagaggaaagagatcaaagttgagaagcaatgtttttagacttttgatcgacgacaagtgttgcgttgagatggttcgatatattgatccctcgtagggatgtgttgccgtagccgggatcactaggacttggaaagttatcctctagtcctc

SEQ ID NO: 16720 - DNA, 656 bp, Arabidopsis thaliana
cttgttgaagagtttgttttaactgtttctcattttcttttacacgttttcagtgttaatgatccagttgctatgaagttgcttggcaaagctggtgagatgggcactttggaatcgccagacgatgaaagcatcaaaaccctttacgtcggtggacttaactcgagaattctcgagcaggacatacgagaccaattctacgctcatggagaaattgaatctatcagaatcttggccgataaagcctgtgcatttgtcacatacacaagccgtgaaggtgcagagaaggctgcgcaagagctctccaacaggctagtcatcaacggtcagaggctaaaactcacatggggaagacccaaacctgatcaagatggtgcaaaccaacagggcggtgtggctcatagtgggttactacctcgagccgttatatctcagcagcacaatcaacccccaccaatgcagcagtactatatgcacccaccaccagctaaccaagacaaaccttattacccatcaatggacccacagagaatgggtgcagtcatttcaacccaagaggctggtggttcaagcactgagaacaacggagcttcatcttcttcttacatgatgcctccacaccagtcatacccaccaccaccatatggatatatgca

SEQ ID NO: 16721 - DNA, 841 bp, Arabidopsis thaliana
ctttcttcctcgagccaaaacagctctttacaattatattaggctcaagatcttcctctgttagaacaggatcatacccatacaaggcctgcctgttgaaacagcagccagtgcccacatacacaggaccttgtataccatctaaccccttcaagttgatctgcacaacatagtacacatctgagttagcttaagtggacaagatatgaccgagaaggaaagtaaaagacactggttgttaatagtagagttaaactcacatcaaagaagacagtattcctgttggcgtatcgatcatgcaagtcaataccatcgaaacgttgtggaaactgcacgtagcaacacttctttccgattgcagggtccatcatgaaacacatggcttccttaatcgccttgctgttgttgaagtaatgatcacaatcaacgttcaaaagatacgccccattagtaagaacagcagaaacacgaatctgtcaaaatgtaagaaatctagatcagaagaaatgcatactcgaaagtaatagactaagaaattccctagagatgtagtcatggcaacacagcttcttgtctaataacacaataaaccgcttccaagccattgaacaaaagagagcacaacagattcacgaaagataaaacgaaccaaggcattcatagctccagccttcttgtggtgctgaaatccaggacgcttttcacgggacacatagatgagcctaggtagctcatttccatcggtatccagacctccactatggcctaagaaaacctgaattgtaacaaaataattagaatcaacaaacattatagataaatatttgcccatctaggagaa

SEQ ID NO: 16722 - DNA, 674 bp, Arabidopsis thaliana
atggtacttaaccatgttaaattaaaccgatatttaaccggtactcttaaaccaatagcgtttgaaattggcgcaaaacaactataattgagcgagagtggtagagaggagcagaggaggtttaatggaaatcgagcgtaactgcgtgcgtcttctccacggccacaatactcgaacccgtttacccgaaatccacgcccatcttctgcgtcacttccttcatggttccaatctccttctcgcccacttcatctctatctgcggatccctcagcaactctgattacgccaaccgcgtcttctctcatatccaaaaccctaacgttctggtcttcaacgccatgatcaaatgctattcgcttgtcggtccgcctctagaatctttatctttcttctcttccatgaaaagccggggaatttgggctgacgagtatacttacgcgcctttgctcaaatcctgttcgtctctttctgatttgcgatttgggaaatgcgttcatggtgagcttataagaactgggttccaccgtcttgggaaaattaggattggggtggtggagctttatacttccggtgggagaatgggtgatgcacagaaagtgttcgacgaaatgtctgagagaaacgttgtcgtctggaatcttatgattcgcgggttctgtgactccggggacg

SEQ ID NO: 16723 - DNA, 601 bp, Arabidopsis thaliana
ttttggtgcaagaacttggtattggcagggagcgagacggccattgtggttctggtttgggcggtatccttgctcttgaacaacccgcatgtcttgaggaaagctcaggaggagctggacagcaaaattggaaaggagagagttgtggaagagttagacatcaaagatttggtttacctccaagccattgtcaaggagacatttcgtctatacccaccagtccctctcgttgcttacagagctgtggtggaagatttcgacattgcattttgcaaatgtcatgtacctgcaggtaatcaaaggctacattaccaattaatcttgagattaaagttcaacaaatattaccatattaccaaatgtcgttagttcaactggtaaagatcctacgcgaacgttagagatcacatgttcgagtgacgttttagacgaaactaatattataagttgtggttccggagtagagggattatgggttttggttcataaccttctggtattaaaaaataaaaaaagtcaacaaatatgacagaatgaatgttatcactctaatatcatagtcatttactatcagggcacaattgatggtgagtcatggaga

SEQ ID NO: 16724 - DNA, 558 bp, Arabidopsis thaliana
  unsure (1)..(558): unsure at all n locations
tcacgagcactagtcttgtctctgcacttcaaactcttccatgcataaacacaacctactttatacctaattcgacttacgacacaaaccgtcgcgttattctctcattgcttccttctaatgtcacatcacactttggcttcttcaacggttcaataggtcaagctcctaacagagtatatgccgtacatgnctgtcttccaggtactgaagaagagagttgcataggttgtctcttgtctgcttccaatacattattagaaacctgcctcaccgaagaaaatgctcttatctggatcgcaaacagaactatttgtatgatccgatactccgatacttcctttgttggttcgttcgagttagagccgcatcgtgaattcctcagtattcatggttacaaaacgaatgaaacagaattcaatacagtatggagtagattaactcaacgtatggtacaagaagcttcctcaagcacagatgcaacatggtctggtgctaagtactatacagctgatgtagccgcttgcctgattcgcagactctctatgcaatgatgca

SEQ ID NO: 16725 - DNA, 532 bp, Arabidopsis thaliana
ccactcctcgggtgtgaacgcaaatgttgagagggtctccttgcatctcagtgcttgctgctgaagctgccacttcaaatcttcaaaaatccttttggttgatccaagagcttcaagaagatccagagtctctaactctttcataatcagatccttctcaagctccactgtctgttcttccattctctttatgtcaaattctcccacacagtcctgaagaatgacaaaccacaaaaacataaaacaaatcatgctatataataccaaaaaaaaatcttacataacatcttgctagttccagaatcaattgccgcaaatgcaaacatcaaattagctatcacttattacaaaatatctactcagtaaccaaatcgaatcagctatcagttattcagtttgttagcatacttaacagttagagaacatacatttcaaactttcagtgacattaatgctcaaactttaaatgaacagactttgtaaatcggaaactagaagagaactcacgtaattgtcttcgagattgaaggga

SEQ ID NO: 16726 - DNA, 1665 bp, Arabidopsis thaliana
tcatacatcaacagtatcggctattattgcccatactcctaaaagaaacatcgtgaaacaaaagatccgtagatcaaccgtcagcagcgcaaacgtcgtcgtttgattgattggtccatgccaccctaaatccctgccttttttgcaaaagctacacagaagaaactgcaattcccaataagcccgcaatcaacggcccaaatcgagtaatcagtcaaccatcccatacaaccgttctcacatgaaccttgtctttaacaccggtcaatctaaacaaccaaccaatcataattcaccacgtcatcacgtcgttataatctgtctctgtgtctctctcttcttctcactctccgagtggggtgatagtgtgactctgtaacgagaaagcacaatcatatcgattccttcttcaaaagctcttttgcttttttcatctccttttccctttctcttttcttttgtaattttattaattatgataagtgaaaagggctcctctttaaaacccttcgaattcgtccatctcttggttctttgtggtggcgatggcattggcagaggagcagcatcagaattatcatgtggctgaggcgattccgggtacgcctgggatccatgatgtcaggattcaacccggttctgagaattccgggttctgtgttgatccggttggtgtttctaatgtacctggaattaggagagttgggttgagagctgaaatcgatacttctcctccattcggatcggttcaggaggcggtgactcgattcggtggtcgtggttattgggttcctttcaagcttgatgacactttcgtaagttttgttctttctcagttttttcttcaatgtcagatcagtgtaatatacaaacacattaatatgcattgcatactaacatttgatgctttgatggtgaccattttccattgttctttacagtcgaatctcatgacttctgtggaagtatgtaaaattgagttcatgacctttgtgcaattcagtagcattacaatattgagattgaatataactcgagtctagaatttcataatcgaggttttagcaacatatatgtaagttgttgaaagcatcaagatcgtttaagctgttgttctgtctctgagatcatcatcaccattaagtgttgatcgtcgagtgtaaaatgcacacactgattttgtaacaatgaatctcggagtatctgtgtcactgtgtgaggttggattaggagttgagatatgattttcattttcttttggtttttgtcaacgttcagaatggtgaatttgacattaagagaatggaggagcatgcagcggagcttgagaaggatctgattgtgaaagagcttgaaactttggatgttttagaagctcttggatcaaccaaaaggatcgttgaagatttgaagcggcagcttcagcaagaagcactgagatgctctgaccaactcagttcagatatcaaagagatgaacgatgagcattgccatcacaatcccatgtcatctcctgatttgatcttgatggaattgaagcaagctaagatgaatcttggtaaaaccatggacaaccttgtagtgatccagtcctctgttgaatctctgaataagaaaatgaaagaagagaaagacttccttgagaagacacgggctaagctaacg

SEQ ID NO: 16727 - DNA, 1294 bp, Arabidopsis thaliana
caatctggtgcaaaatgtcccggctttccgcacatatatcaggctcttggttcgtaagtggtcattacacgtcctccttggttaccaaccttaggctttccacgatcattattttggtttcgtcctcccgattgattagtcctcaaaacacaaggctaaaattctcgattattccccttcttgccttcggacttttcgttctcccgtaacttctctcccttttctaactcaatccattcttcaacattcacggccctttcggtcaattcactcacgttggtataagtcacagcctgaagacctccccaaattttaggccttagccctcttagaaaccttcgtaccatcattgcttcagcatcccttccgttgtacaaatatctccgaagtcttgtaaaaatttgctcatacgcccggacactcttttgctcttgctcccaactcataaactgcagctctaaaggatcacgtgcctttggtggaaaatacttagactcaaactcgttcttaaacatttcccatgtgataggatggtcgcgatatcgtgaacaacactatcccaccaagctcgaccatcctcatcttaaaagtataccgctatgtggcccttaaagtcttccgggcaccttgacttttcaaaattcatttccaggttcctcaaccacttatccgctaaaacagtattctgctctcctttaaacttcgaacacctaaatccttcattatccataaccagctttaagaactttgccgaaggagattcggcacgctggcttttctgcatctgttgttagtgtagctattgttgaatcatatgagtcaacaaggtctgaatcatccccaacatcgattgagtctccaacacactttgaacattacgaccttccccatttccttcatcaacttatcttggcagcgacggatttttgtgtgcagtgggttgattcacaggaacatgtgatcttgtctctgactgtgaccctttggatgtgctacagtgcataaaccttggtaaggagtattctggtatggttgcgggaacatcccaatcaggcgttccatacatattgggataatagtatccctcatccccttctcctccaacatacggtacccagtcttccggcccgaagtgctgactccagttttcataaacaggtgagaaattcatcgactcgttcctctccgttctttgacaagaaatctgcattcaatcaaccaaggtaaacttaacccatctacgtaacaatggtgaaaagacaggattactcgataaaacattttgaaaacacga

SEQ ID NO: 16728 - DNA, 826 bp, Arabidopsis thaliana columbia
accaaatttcattgggcatgcattgatacatttaaacagctaaaattttggcgaaagtatttccttgacatagttggaggcactaacgaggaaaaaatacaattgttagaagccatgactagtgtttctcggaacaaccaagacttgtcgaagaggttgggctctggacattcttatggcagtccaaattcaggaggcccaagttttcagcaatgggaacaccaccaaatgttcacaatggggacaccaccaagtactcaacaatgggaaacaccacctagtatacaacaatggggcacaccaccaaatgctaaacattgagaaacatcaccaaatacttaacgtttgggaacaccaccaaatgctcaacaatgggggacacaagcaaatgcttcccaatggaacacaccaccgaacaatcaacattgggggacacaatcaagcgcttcccaatggaacacaccaccaaacaatcaacattgggggacacaatcaaatgctccccaatggaatactccaccaaatgctcaacactggggcacacaagcaaatgattccactggggtacatcaccaaatgttccacaatggggcacccaaccaacagcttcacaatggagttcacacgaaatgatccacaatggaattcatcaccaaatgcttcacattggggtcttttaccaaactttcaatcttggggttcacatcaaatgttcaacaagggcgtaatacaccaaattttcaataaggaagctcatctgcaacaactccaacaaatatttagtaatggttttcagtgggaagtcaagaagataatataagggata

SEQ ID NO: 16729 - DNA, 741 bp, Arabidopsis thaliana
cattttcttcaattgtttagtctttgaaagtgtcatgataccctccgggacttctggtacaggatgtagttcaacggtatgtgaagtaaggttgatgtccgcatcattccctccgtcttcaaaaggttttgtcctcacagctgaatctcctggatcataagcaaacaagtcagcaacattaaaagtgtgagaaatttttacctcacttggtagctcttaacgataggcattatcattgatcttttcgaggatcttgaagggaccgtcgcctcttggtgctatagcttggatgctctttgtgtaggaaacctctcaggccgcatatgtagctactgtcctatccaccaagataaagcattttcggtgagcggagcggctgctaaggataccttccgagattctccataccgatagcattcgaaaatgttctccatccgtcgctcccaatccatgtacacctctggattagattttcctgcaaaactaggaggtgttagtttgatatctcggttcagttcacgcagttctactcctcgtgcacggtttctcatcaatggatcttctctccgttgatgttggcgtctcaaagggtcgggtggtggatcatcatcatcatccaactcaggaaactcctccgcctcttcgctggcattccacgagcctggtcttgcccaattcaccctaggatgtggctgctccaaacgactatctgttgctgaatccgttaactctctgcaaagt

SEQ ID NO: 16730 - DNA, 630 bp, Arabidopsis thaliana
ctcgtctaggttggactgggtttgaaagcgggatcctgctgaatggtcgagtccaaccactgaaatttcaacctgagtagaaacctccccgtcctgaatatcactgtcctcggtgattgatgtggagacatgtcgagtaggcagctctcgatcatgacagatggtgatagcttgagcggtggcgtattccttcgggttttgtatggactttcctggaagtcctgttacttttggagcagaagttgacgctgtttgtccttccatgtatctgaccttagaggtaagtgcctcaagtttgatattcagatcgttgaaagtacaatcaaccttgttgtggatttctgccatctttttggcgagatccattgcgcctgcagcttgtccttgtagaatctgctgtaacatgttcttcaagtctgaatctggagttgttgaagctggttgttgttgctgctgtgtgaacccaggtggtggaagttgctgctgatagttgccctgatactgctgcttaggaacatacccttgaccttggttgtatggaacaaagggcttgggttgattctgctgctgtgaagggtaaacttggtctgcgggtttgcaacgttggtacttctgtaagacagattggga

SEQ ID NO: 16731 - DNA, 820 bp, Arabidopsis thaliana
tcgggttgcggtttaagttcttatactcaatcatacacatgacatcaagtcatattcgactccaaaacactaaccaaccttctcaaagctttcatggtgtagccaaagtccgtatgagtctttggctttgtatcttctaacaaggaaacattacttaggcctttaagatccggttgcggtttaagttcttatactcaatcatacacatgacatcaagtcatattcgactccaaaacactaaccaaccttcttcttgcttctcaaatctttcatggtgtagccaaagtccgtatgagtctttagctttgttgttctaagaaggagcttcaagacctcaagagaccactcgacccccaggtcgagcagaggacatcaccacttcacttcaccactcgaccacgaggtcgagtgccctcgtctccatcactcgatcacttcactcgaccatgaggtcgagtgtcttcaccttcactgccagaccactactcgaccacatcactctgcctagaggtcgagtacctccatcacaccactcgactgcatactcgatgacaagcttcagagccttcttcattccgcactcaaccagacactcgagctaaaggaagaaaagaagactccagctattcactcgacctctcactcgaccacctgggtcgagtacagttcttaacccgtccaaatactttgtcgttttaagtattagggtttcgggatatttggctataagtagcatgtacttctcattttcacaaaaaagaagtttttacctagtttttatttccgcagaccttgtgctctagactttttgtaatctgga

SEQ ID NO: 16732 - DNA, 1275 bp, Arabidopsis thaliana columbia
agagtctattagttatttctagagtcttttctagtccttttcagttctttacatgtttgggatgcatttggagataatggagcgttctggagtaaaacagagaagttatgctgcatcaagaaatctgaagactaaaaatcgcataggtgtcgaacgacccacccctggtgtcgagcgacccaatacctgacggcaattcaaagatgcaacttattgaagttttaaagatttctaaattcgacccttatttttaaagaaggcccatcacgttttaggtcatatatatatataaaggttatttttcagacttaagcttggagaggctaatctccttatctcttttgttccctaggagcaaaaccttgtggagactccctttagagaagatctttcttactctttttcttgatatgttgactattgattttttattcagactatgacttgtttttctatgatcatgtttgagtagttttcttgttagggttacagtttctcattagggatttagatgatttagtagattgcctccttgctaggttatctgtaggattcttcatcttgattgttcttaatgctagttctagtgtagctaactagaaattgatcttagataataagtatacccaccataggtacctgctaccagaactatcatagatgggcctaagtatttaagaaagaacaggtaggctcatagaaggtctctggtttagatactgaggtgaactaatcaaacttgataataatgcatgtttaagtataagatttcaacgctccactggaaatcttagctctaggcatagtgagtttcgtggaacaccactggttattctaatattaaagtttgagtttaagaacggttcgataacaacctagctattactatatctactaatcatttgtttcctgagaataccctaagcctaacgctttttatcttgtcttacaacctcacaatttgttattgcttactttttgtttctttttattttcattattattttacttagcttaattcgataaccattagtttattgcgtgatttgagaactttgtgaattcggtccctaagttttgtaactgacctctttatttgagagagtggtctaagaattaatttaacctacatcaaatttggcgccgttgccgaagttctctttgattcaccattagactaggtgtagaatctagactaagtttttatttttctttcttttgttatcacgcattttctttcttctttttcttgtgacaggagagctaaaagatgga

SEQ ID NO: 16733 - DNA, 684 bp, Arabidopsis thaliana
tttaatttaaaggctaaagaacgacctccggagtgatttccacaagttccatcatggatttcttttataactgtccgggtctgttctccgaagatacaaatagcatccggagccgaaatgattcttctgtacagaatgtcatctgctaagcagaaacgtgcacaagtggccttcaacttccgagcctcccatttgtcggtgggaagtactccgttgaagatatagttccggattggttctctccaatctgccccccagtcgtgaggtagattgtactccgttgaatcttcgtcagctacaagcgggacagcttctggaatctcgtcttcgtcgtgaagttgttgcagctcgggattgtttgcttgcacctcgagttgcctacgcatggctcgagtaacaaagtttatttcctcaattcggatattgggttgagctattgtttcaacagagattatccttctgacagttatttcgggtgtagaagccaacgcggctaaggcatcagcagctgagttttctgcacgaggcactttgatcagttcgaacttctcaaacttttctgcgagctcccgaagcagatccaagtaagcttccatgcgattgtcttttgcctcgtaatcaccagaatactaacttgcgacgagttgtgaatcgcaatgagcgaggcgaagtcaagctaacaaa

SEQ ID NO: 16734 - DNA, 1447 bp, Arabidopsis thaliana
tatctcatatataactttgctatccttaagaaaatttgtgagaatcagaatggtatgggcattgtgtcggaatgtgaagtcatggccatttctagatcttgaaattaaattctataacattgcttttgattttacatccggattcattgtacatagaccgcaaaccatattggatcggtgtacctgtccgttgccagtaacatatcttagctttagaaactaaaatctgaaagacgaagaaatgaaaagcaaaatatcacaagtttgatacaacgaacaagagcaacagcaaaaagaataacccggttcagtaaaaccagaaaccatatccttgttattaacatgacgtcgtcaaagggccaccgcagagacattggttgtcactaaacgacgtagcttcaaggtgatcaaaaggaaaacccgttggaatacgcccacaaagcttgttatggctaatatccaaatgtcccacaaacttagctgacgacaacgaatccgggatccgacccgatagactattgtgtgacagatcaagcgaaactaaatacgtttttgacccgaaaacgtcgggtatagttccttccaacgcatttcggctcaaattggcaacatctaaaccggaattgctaagaagcgaaccggggattggaccggttaacgaattgcaatcgagattcaaaagtgagagtaccttcatgttacccatccattcgggtatcggaccttcgatatggtttttggatagatccagatccgctaaccgttccatacccgagatcgactctggaattgacccggttagttcgttacggcccagtaaaactctgctcaacatcttcaacgatccgaaatcggccgggatcacgccggtgattccattttccgtcaattcaagatgcttcaactcgatgagtgacgtcagtgacgccggaatctcgccggacatttgattctcggcgaggtttaaaacagcgagtttcgagagtttgccgatttccgcgggaatctccccggtgatcttgttgccggcgagatcgaggatacggagcgaagctagggaagtaatgcacggaggaatctctccggtgattcctttccagtcggcgagaacgagggaagtgagtgcggttaagtcacaaactgctggatcaatcgaaccggacatataaccggaccggcctgccttttggaaaatggcgtcttcagattctccccggagagaaatatcagtgacccgacccgaatcaggatcgcagctgataccgtaccattccttgcaacaatcagtgttttcagaccaagtgttgaagataccgaggtttggttcgctcagtgacgacttgaaagcattgagagccgtctgaactttaggagagcagcatctgacgacggagatgacggaaatgaaaacgacggcgagtaatgaactaaacggcgatgcaacaac

SEQ ID NO: 16735 - DNA, 562 bp, Arabidopsis thaliana
tattgggccaaaatacctaaaatattaataaaactttattggattaggggttgagataaaaatatattatgcttacatgtaggcttgtatggggctcattcatgagcggacccacgttggtcttgggtggggcatgtgtcctatgggaacagataaaggatgcccccggtgtggcgagtcagaagagacaataaatcacctcctcttttattgtccaccctcgagacaaatttgggcactatcgcccattcctttctcatgaaatatttttcctagaaactctttattctataattttgattttctcttcttgcgtggacgagaattcggaataggagaagatatcttggaactctttccttggatactttggtacatatggaaaagcagaaaccgctttgtttttgaaaacttcagtgaacctccccctgaaactttgacattgactctccacgaagcagcggtttggaaacaggctaccttaaaagaaaaagaaaccctattttctacccgctgttctgggtccgactccggctccggacacctcgttctctgaatgcca

SEQ ID NO: 16736 - DNA, 582 bp, Arabidopsis thaliana
  unsure (1)..(582): unsure at all n locations
cgtctttatttttaatttctcaactttctttgcattacatcttccaactatataattaaccactctactttctcaaatcccacactcagagaagaagaagaagaaaaaaaacagagctttacaatttctctctacagagatcgaagatatggaaggcaaggaagaagacgttagagttggagctaacaagttcccggagagacaaccaatcggaacatcagctcagagtgacaaggactacaaggaaccaccaccagctccgtttttcgaacctggtgagctttcttcatggtctttttggagagctgggatcgctgagttcatcgctacttttctctttctctacatcactgtcttgactgttatgggagtgaaaaggtcaccgaacatgtgtgcttccgtcggaatccaaggaatcgcttgggctttcggtggtatgatatttgccttagtctactgtaccgctggtatctccggtaagtcctctacttctccaagtatacgcctttttactgtaattaggttccgagtgttntgggtgtgaagaagacgataagctataacttgagaaaatgtgttaga

SEQ ID NO: 16737 - DNA, 538 bp, Arabidopsis thaliana
caagaaaatcgacgacgaaataacgggttaaatagcgttcagcgatctttgcaggatcaatcacaagctcaccacgaccaaacacacgagaagaaggagctatataagctgtacgaaactgaagagccattctagttaagtaaaaaacgtcaacaatggttctaagagtcgtcgttgtaacagctagtttcgtatcaatccctatacagctgcttccggaattatcgacaatgggaagatagaagaacaaaggatcaacagagacagctaaaatacacgaaatgacgaacaatctgttccatacgagaagtgttttgtcttgaggatcaaagattttcttctctgttattcttaagtcttctggaaaaaccgctcttgtaacggatttaccgatggttattagaccttctgatctgatttttttaactccttccctgaaagatttggatgctttcttcttttcacctcctcggttctttaggttaaatccgaaacagtttctctgcatcatcattccagtcgcaggagaagaacttga

SEQ ID NO: 16738 - DNA, 794 bp, Arabidopsis thaliana
gagtcggctttgagccatgattgtaatgaatggatagcttgaatattgcgaccacactaataattcccgtcaaatatttgtttaacttaatgtatgacacatgtattttacgagcaaataaattcaaaaaatttaagcattagcgaaaacattgtttctccgctccacaagacactaaaacataaataatgaattaaatcagtcattctacagaaaattaatcaccgtagtcggttgccatcattccaaaaccttaaaaaaaacccatgtaaaatgatcattaacaacaacaacaacaacaaccaaaccaacaaaaattaaagtaaaaacagagtccaaagcctcgtcacatctgcccataaatacccttcaccgactcaccatcttaccacatcaattctctcatatctctctctcactttcgaatatatcttaagataacagagacacatactcttaagtttggtgaagaataagaagacaatgacgaaggaagtggttggtgataagagatcgttcgccgtgaaagactatcaagacccaccacctgaacctctattcgacgctactgagcttgggaagtggtctttctacagagctctcatcgctgagttcatagccactctccttttcctgtatgtcactattatgactgtcatcggttacaagagccagaccgatccagccctgaatcctgaccagtgtacaggcgttggcgtccttggtatcgcatgggcctttggtggcatgatcttcatcctcgtctactgcaccgccggcatctctggtctgat

SEQ ID NO: 16739 - DNA, 577 bp, Arabidopsis thaliana
gggagttaagagagcaccaaacatgtgtgcttctgttggaatccaaggtatcgcttgggcttttggtggcatgatctttgctcttgtctactgtactgctggaatttcaggtaaccttctctcgattttcccatttttctgtaatctctgttttggtgggttctctgttttggttctgctttatttgctctgttttgtttctgaaaaccattatgtgagtcctctgtttttgttcatgctctgtttgacctagaaaatgtaaaggaaccaaaaacagttataaagcaggaaactttgggttcttttgatgcttgggcttatctagatctgtatgttacaccaattttactgttgatttctcagataaagctcacatctttgtgtaacatgtgtttgtgtttgtgtgtttttaggtggacacatcaaccctgctgtaacattcggtctgttcttggctcggaagttatctctgaccagagcagtgttctacatgattatgcaatgtcttggagccatctgtggtgccggagtcgtcaaaggtttccagccaacgccgtaccagactctcggtggtggt

SEQ ID NO: 16740 - DNA, 564 bp, Arabidopsis thaliana
ggagacgtattcattgtttgattcgtagggagtgtcgaaggctagaggatggacttcctatctatgcctaccggcggcagattttgaagaaaattcatcgtgaacaggtatctttaagaatctcgaagttgacaagtggtctttgggtccaagctagttttgaatcacttgagtacagataatcgttcctcagtgatcgagttatgctgttgtcttgttgtagtagttcatattgtctgctaaggttcagttttctctgttttataagtgagtccgtgtttggtcattttgagtctgtattaattgattttaattgtgtttgtagataatggtgttgattggagaaactggttcagggaagagcactcagttagttcagttccttgctgattccggagttgctgctagtgagtcgattgtttgtacacaaccacggaagattgctgccatgacattggctgatcgggtcagagaagaaagcagtggttgttatgaggaaaatactgtttcttgtactccaactttttcgtctactgaggagattagtccaaagttgtatcatga

SEQ ID NO: 16741 - DNA, 938 bp, Arabidopsis thaliana
tagctcggatctcgaggtcgtactatccaacactctcaatcgtttcgaaaagcttccgttcaattatctcatccaccgagctctatgtagccagatctcacctccgaaacaccgaagagtgtgtctatgtctgtctatctgataaaagttttgaatttcccaaatggtttacactctgggttaaccctaatcaagccaactccatggttgagaagaagaggaagaagaagaagacaattggaaagttgttggttccaattccctcttctaatctttctcctgtatcaaaatccgccatagctgttggttctgaaatatatgtgatcggcggaaaagtcgatggtgcactgtcttcggccgtgcgaatcctcgattgtcgcagtaacacttggcgcgatgctcctagcatgaccgtagcccgaaagaggcctttcatatgtctctacgatgggaaaatttacgtaattggagggtacaacaaattatcagaaagcgaaccatgggctgaggtattcgatataaagactcagacttgggaatgcctttctgatccgggtactgagatacgtaactgtaccatttacagaatagcagagatcgaaggaaagattcactttgggtatacacaaaaaacgtatgcttatgacccaaagcaaggtgaatgggaatgctgtgaaggcgaggttgcatttccgaggtcccaatgtgtgatggagagtgtattgtacacctttgctaataactacacttgggaggacgactacgggtgcaagtggtggtcaacggatggatatggggaaaaggtaaaagggttggagtcctattagagataccaagaggaatggtggccaagtgataatcgactaaactagttcctgtggtgggaactcttcttttatgggagggtcatgaacataatcgaataatggaagagattg

SEQ ID NO: 16742 - DNA, 811 bp, Arabidopsis thaliana
taattatcattaatcaataacaagcattatcagtattcagcagcagcaaagatgataacgttaattatactatcatgcaattaagttaactaattaactatcatcttgtttatgttttaattttgtttccatcatcttccaaccttgagtttcggtcactataaaaagccaccactctctctgcttctctgcaacacataacccactcacagaaaaacctagaaagctctagagagaaagagagagagagatggaaggtaaagaagaagatgttagagtcggagctaacaagtttccggagaggcaaccgatcggaacttcggctcagagtgacaaggactacaaagagccaccacctgcgccgttgttcgagcccggcgagctagcttcatggtccttctggagagctgggattgctgagtttatagctacgtttttgttcctgtacatcactgttttgactgttatgggtgtgaagaggtcaccgaacatgtgtgcttccgtcggaatccaaggtatcgcttgggctttcggtggtatgatcttcgctctcgtctactgcaccgctggtatctccggtaagttcactggtttctccgatctaacgatttcgaatatagatcctgtgttagctaggtagcgtaattcaaatcttagcatgtttaggattcaatcaggaacaaattagggtttacaaactcagtaaatgggggactttgatgttagttccagctttgttctgcttggaatcatttgatttgcagatgttttaatctgtgtttgtgtatgttatgacctttcaggtggacac

SEQ ID NO: 16743 - DNA, 1141 bp, Arabidopsis thaliana columbia
tagtacaacaagacaacagcataactcgaatatctgtactcaagtgattcaaaactagcttggacccaaagagcacttgtcaacttggagattcttaaagatacctgttcacaatgaattttcttcaaaatctgccgccggtagcgatagataggcagtccatcctctagccttcgacactctctaagaatcaaataatgaatacgtctccaatcataggccccttccaaagaaaacacggccacgtcttcgtcatcttcatcatctacatcaaactcatacccgtcttgtcctatgagatatcgcaaaatgctcttcatggcattattgaattcgtcaagccgattcacaaccaaatctctctccgcttcaagagccttctttttctcaaaaacctcaaatttcagaccccttttagacgaaaaggacgcaacttgacgagacttgtcatcaatctccattctcaccttcttgaccccttgtccattttccataagcgaaagaacatgagacgagaaaagatcacgaagcctgtctttaagctcgtccatgtcagacggaacaacaacattaggaatcagctcaggaagagaatcatgtctcccttgaagacgataatcccaaagagccacaacggcagaacgcgcatcgacccactgacgaaaactgaaacttccagcgatacaaccaaattgaggcacgtgaattgattcctcaggaatttcgcaaagcaaagcgagactctcgatctcttgtttcttagtcgaaaaacacagctttgtgtcactgttagcggcggcggggtgaagcagctgaacgatgaaattaggtctagcccgcgtaactggaggcgagtatcccgacgacggattacgatcacgcctgtaatttggcgggaaatttgagttagggtactgagagtgttgctggttccaagtaggacggtggttgagcggcggagaagattgtgcagagcgagagttataacggttcgtggaggatgagtgagacgactgctgacgacgatcacgcgtcgatcttccacgtctgaaggaggaaaagagttctcatgatgggatgatccagtttttgttttgtgtgtgtgtgtgtttgtttaacaatgagagagcgaaagagaaag

SEQ ID NO: 16744 - DNA, 469 bp, Arabidopsis thaliana
gagattctatttgttcaaatgcagcagaacaaagatatggatgaacagtctaagcttgttgataaggtctgtttcaatgtcccttgccttgtttatgatgaaaacaaaccactattcgttgtgtatttatggatttgattgtggatttttgtagttgcctcctatatctattggtgatggtgctttggatctagtggttattggttgtggtcctgctggttcagccttggctgcagaatcagctaagcttggattaaaagttggactcattggtccagatcttccttttactaacaattacggtgtttgggaagatgaattcaatggtaaaaatctcgatgatccattgttttagtcactatcttcatggtctgtgttgaacatgtagtttatggttaatgttgaagatcttgggctgcaaaaatgtattgagcatgtttggagagagactattgtgtatctggatgat

SEQ ID NO: 16745 - DNA, 512 bp, Arabidopsis thaliana
caggaaggaaccaaaaagtgatccatatcacgctagtgttcttaaattaccttcaagagcgctagacggagcctgcggattgaagtcgtcaagtgccccatgctttccaggttctcttttatagctgcatattctactttcattctgccaaaacaatagtgatttatcgcagaagcttccaagtacgataagacaatgtagatgtaggatgccaaacctggaatattcgatgttactggcataatctgcttcagtgttcaagtgacttccgcctcttgaacttgggtcaatccaacggtttatgtaagatttcttccacatattctttagtcttccatctttctcattggagataactatcctgccactgtttcccgttgattcttcctctcttgtaccactcattttgctggcaaatgatatagtatttttagaggaatgtaacagttacctctacataagaatcaaaaatatttacaacacagtatcatccctgagaaatgtcactagca

SEQ ID NO: 16746 - DNA, 551 bp, Arabidopsis thaliana
acttcccacccggaaggatgcagcacgttatttcacaatagtaatgcgccagccgctcgacgaacttcgctttctccaggccaaccagataaccttcttcctccagatcctgcatcagggcattgccctctttttcgatataagcaaagtggcagaacggcgtatcaccctgataaatatcaacttcacgcagttgccctgcccagtcgaaaatatcctgatacagctggcgatggatagttcgcaaatgcggtaaaccgcgcaccagcggaccaagctcaatggtcgcagcacgcagcgccgtcatttcgtaagcggcctgttccagccgctgctgctggcggatgttcagccggttacgcatgatatcaaggcctggataaagatacggatcgcgcccttcgccgaatttatcgctcatagtgactcctcagctcttcaaggcgcgctaaagcctctgcggcagtaagagtgactaaaggcatctcgacgccttcaagacggcgactggcctgaaaattacgattacgctgaagctcccagagctttag

SEQ ID NO: 16747 - DNA, 509 bp, Arabidopsis thaliana
atgttcaggaacaatctatcatgccgatgaataaatctactaacctcaggtccagcatcattcaattgctcatatcctctttcaatcgctgttctgacagtagaatcaagagcgaggtccaagaataacagatccttgaggcggtcatggaacttcagcagaagtggccttagctcttgacgagcttcaagcaaaccctacatcaatattccttcccatggtaagtatacgattcacagaagtcaaattaacagtacaaataaaatcgacctagtaattatgaaaacatttcacctcacagaagtggctctacattcttctcttcaacatgttctacggacgaaacgaagcaagtcctgttgagggaagtgccaacacagtttaagttggactgatttaacaggtgtattaaattcttgagctgagtagcgaagttgcgagaaaagttactggatatacacaaggcaatcctgatacaggatttatctgcaccccaaccatgaaccttc

SEQ ID NO: 16748 - DNA, 1121 bp, Arabidopsis thaliana columbia
acctactcttactagaccaaatccacaaagatgatttctctgaggagcaagaaaggtccgatttgaaagccgttctatacgagaaacgtattcgccttgctgctcttcccgcttcatccttcaaccctcagcacttcgaggagttctttacccaatcaccccccttgggtgaatcgggtttaaattgggctggtaaactttcatacttaaagcttatcatatatcggtttcttttatatatatatctttttgactgatttgaactgttctcctcaggatcaagtgagcccgttgatactgccgcacccgaggtgcctgctacatcgatagggattgttgaacctgatcctgctttgccttaagctccttcgatcgtggatagtgagacggtgatcatcccagatgatgaaggtgatgccggccatgaaccgggagcctcttctgagcaagtccctaccgtcgaaccgaatgaaaccgagccggttgatgttgagctcgagatggctacggattcatagtggctgcgtccacttaaatttggggtttgtccaaacatttaagaatttgaaatttaatattcggataattatgtttttgcctaaagaggctttttttttgtttgaacaagattttgcctgagcaggcttttaaaccttttccactataaccctttgagggtattgctaagatggaatgcgggtttgcaaagtccgcattaggtatttttgaccatgtggttaagtttcaagatttctcggcttattcggcctttctcttagttagtgagaacggagctcgttttcaacgtgaattccccaactcgggtttagtcaattcagtaaacttgttgggtttgggccttaactgttttactttgtatttaatgggctttttgtctttaatgcgacggttgccattttccttcccattcctcgagacacaggaaaaaacttcacgcctttgaaacaataattgccttttttcgatttccaaaaatggtttaaaccattcggacataccataattattgaattttctgttgcaagacaaaacctaaccctctataaaataagacgtcagatgccgctgaattttcgaagtatgatttcataaatttactt

SEQ ID NO: 16749 - DNA, 1079 bp, Arabidopsis thaliana
ttctttaatccgaaaggcattaccttataacaatagatgcccctgtccgtgataaatgacgttttctcttgaccttctggactcatcatgatctggttgtatcccgaaaaggcatccatgaaagttagcaattcgtttccagcagttgattccacaagacgatctatatgtgggagtgggaaactgtcttttggacaaagctttgttaagatctgtaaaatcgatgcacactctatcctttccattcttctttttgaccacaacgtattcgccacccaatccggatactgcacttctcttatagatcctatttttaagagtttatccacctcgttgtttaccgcttttgctcgttccactccgatccgcactttccgatccggtttatctgcttctagaattacttcgaccacaacatcgtccacattttgcccggctagaaacctcgcgactactcctttctttgcgggcttcgttaattgctattggattttcaatcggtggctagctaaataacaagttctccaagcttcttggtctccccggatagtttccactccgtttggggttggaaatttgaggcactgatgatacgtagaggggaccgctttcatctggtagatccatggagttccgaggatgatgttataagctgctggtttatcaaagacgacaaagtctacaatctttgatatctttcccgccaaaactggtagcttgattgttccgagagacattgctgattcacttgtgaaagcttctaaaggagatggcggtcctactacatccgccctgcttatccccatcctttccaaggtgtttagaaagcttagacctaccgaactaccggtgtcgacgaggattcttgaaacctcgaagttagctacatccagcgtaattactagtgcatcatcgtgaggtcttttgaggtgctgcgtttccttttcctcgaatgatattgaagcgccttgaaaatctatctcttcacttaacttgactttagaggaacattccgtttatgctttttgattgtcctgatggaatcacggcaaagtttggaacctccaagaattacgtta

SEQ ID NO: 16750 - DNA, 868 bp, Arabidopsis thaliana columbia
caaaagatccagacaacagattttgatcacaaactggttgcattatccgaagatatgaatgggatgattcaattattgaacaatcggaccgagcatttgactacaaatatagcagatattagtgttatccagttaaggagtggaaaacaactaaatccagtacttcaaagggaacttcctacagccaaaatcgtcaatttgaaagaaaatgatgatgcagtttttgcaaaccagacaccagtgtcgaccgtcactgctgggtgtcgattgacaccagccaacgcagacactacagaacccgacagtgtcgaccgacacgaactgggtgtcgatcgacaccaaccaagtccaaacatgcaaattctccaaaacccgatatctgttgcagaaaatgtaacaaaacccaaggtttcttttcccaagagtcctaggaagtccaaacaggagctagatgatgctagatgcaaagctatgatggataagcttattgtagagatgccacttatagatgttgtgaagtcttcttctatagtcagacattatgttaagagaatggttactaaggatttgaataatgagcatggtgtgatgatgttctctgcacatgtaactggcattatttagaacaagactccacagaaataggaggacaaaagaaagacaagggttgtctcagaacagattgtagagctgaatactgtcgatcgacacccacaacagactgcactcgaatcgtttatcacggctgtaatcgatgctgcaagtccaagacagactgccaaatcaagcactgcacctctactactcaatccacctcctaaacggctaaggtactcatctcctccacctacacctcctgatttcatct

SEQ ID NO: 16751 - DNA, 1079 bp, Arabidopsis thaliana
gctcatcttcgatgatcatattatgcattatgatacaagatgtcattatatcatgtaatactgttttattccataagcgtgatggccccgccacgattgcaaacctcgactgcaaaactccgaatgcacgttccacatcttttctacaagcttcttgtttcatggcaaataatttctttttgggaccacgtggatcatgaattgtttgaacaagagtggaccactttggatatataccatcagctaaataataactcatattatagggtttttcattgataacataactagcgggtggagcagtaccttcggctagattagcaaaaagatgagatgcctctagcacattaataccattattagatcctggtaacccaaaatatgcatgccaaatccacagatcataatcagctacagcctctagaataatagtaggagatctactacaaccagcatattgtcctccccaagctgttgggcagtttttccttttctaatgcatgcaatctaaactacccaacatacctggaaatcctcgagattcgccaatgtgaagtaggcgtgcaacatcattagcgtcaggtgatcgaagataacaacatgcaaacacctcaacaatggcacgacaaaatcgtttcaaactttctagagctgtagactctcctattttgatatactcatcggtggaatctgctggtacaccgtacgctaacattcgaaatgcggcagtcattttttgcaaaccagacaagccaagtttaccgactccatctcttctttggacgaagtaattgtcatgtctttttatagcatcataaatacgaagaaacaaagaacgactcatccggaatcttcgtcgaaacattgtctcaggaaacacaggtttctctgcaaaataatcgttgaaaagattgcgagcagcattttctcgatcacgattgataactacatgaccaggaatagatccaccatgcgaaccttctgagttatataagtgttgagagcaaagaaaattattgttagtagtaatttgagataccacttgcttttctatatcatcttaataattattatctgag

SEQ ID NO: 16752 - DNA, 1031 bp, Arabidopsis thaliana
  unsure (1)..(1031): unsure at all n locations
gcatgcatgtttaggttaaagatctctcggcttctccaattattcttggatatagacatagggagtttcgcagaacagcaccggttattccataattagagtttgagtttaagaattgttcgataacaacctagcttccatttgatctactaacaaatagtntcctgagaattctctattcctagctctttatttaatcgtttacaaccaatcaatctactgtctttttaccttattttattttactttcaatcattccctgctagcttaatcttgacatcgaattcattgtgtgaaccaaagaactttgtggaaatcgatcctgaaatactgcaactgatctcttatttgagagagtagttcttatggtaatttgaaccttatcaaatttggcgccgttgccaaagttcttgggaataaccattgagtctagtttagagatttggtctagtttttacttttattatgttactcaagcgtttcttgttttcttcttttctgtgtttcaggtgtatgcctaggcaaacaaggagcacacaacagaaggagctgatcaacttgtttgttttggattctagaaatcttgaacgcaccaaccgaaaaactcagagattagcaatggctgacagagtcatccgagctgatgtagaagttttgaaagatgaggatgggcaagcctacaatgaggctagtcagatattggatgatcatggactaatcctacctgaggacaccaatgaggatcaggcacgtctcaatgcgcaattagctgccagagacgcagcagggctcggtgtcgagcgacactaactgggtgtcgatcgacaccttcaggagaaaaatgcatacgcgattggtgtcgagcgacacaacagaggtgtcgattgacaccaaccccaaattcttgtagctattcctccagctgcggaaccacgttctactcttgcggattttaacaggcctgacctgttctatgcaaatcgatcagcgattgtacccccacccttctagagaacgattatgaacgatta

SEQ ID NO: 16753 - DNA, 566 bp, Arabidopsis thaliana
aaatgacatagcgcttagaggtagacctgttaaaaaggacagctggtttcctgggtaagagttttcaattaatatttgtccttaaccagttttacatttgaaacagttgacctatttccttcactgtacttatcactcatttgatacctcagtagttaagaaatatagctcagtagctattatagatcctaagggtttccaagttgtatgatttgaaaactagctttggttcaaaacaagctaattgtttagagcattagcatataaagcagctggcgcagtttgttgtaagaaaatcgtttagaccaagtgttcatagacatatgctaacttgtttagagcattggttcatgtactttattaagcagacaaatctgtgatctttcaagtctgattgatgtcttaaatctgcaggtatgcttggacaattgcaaactgtgcgacgtgcgaaacccagcttggttggcatttcacagcgacaaacaagaagttgaagccatcgtctttttgggcagttcgtggctcacaggttgcagatgacatgcgctgaaacagcattaaaacca

SEQ ID NO: 16754 - DNA, 742 bp, Arabidopsis thaliana
taacggccgccagtgtgctctaaagatccgggcaccggaatcctgcaacgccagtccgacaaaaatcaggatgaaaatcacccagaacataacgttcacgccaccattaaaattgggcgtcggggagttataccagaatagattcaaaaaaggcgtattcgcctgcatcatatcgatcatgacatgagtaaagtcgagcatgaccgcattaatgccttccttgttttcctgccgggtattcataaatttcagcaaagaaatcaatgtagagatcaatgcaggtataaaaatcacccaacccaaaatccttttcaaaacagcaatgcgtccagcttgttgatacgtcatgagttctccttgattaagacgcgtcgtttcacttagtttacctgtagatatctgttttcgcccattctttaaaggcgatatgataggcgcttaatcataagcacggcttaataccttacacataatgctctaaaggagaggttgtaatgtcaaccccgcgtcagattcttgctgcaatttttgatatggatggattacttatcgactcagaacctttatgggatcgagccgaactggatgtgatggcaagcctgggggtggatatctcccgtcgtaacgagctgccggacaccttaggtttacgcatcgatatggtggtcgatctttggtacgcccggcaaccgtggaatgggccaagcctttagagcacactagagacactggcggccgttac

SEQ ID NO: 16755 - DNA, 992 bp, Arabidopsis thaliana
ggtggtgcgtataaaactcaaattctctaactctctactaattactgttctcctttattacgattatatttgaagttgtaataaataaaggtttttacagtttttgtgaatggaaagttctgtaaggatcccaagcaagcgaaggcagaataattcttcttctcaggcctcaaccaggcaggaagcactaataataaagtcagatccaacgtgacaacagtcaatgtcgaccagattccagggttaaacactatgggaatatccttggtccgcatagactatgcaccatatggacaaaacccgcctcacacgcaccctcgtgctactgagatccttgtccttatcgagggaacgttatatgttggttttgtctcttccaatcaagacaataaccgtctattcgccaaagttctgtacccgggtgacgtgtttgtgttcccataggaatgatccattttcaagtgaatatcgggaaaacgcctgcggtggccttcgctggattgagtagtcagaatgctggtgtatcacgatcgctgatactgtgtttggtcaacgcctccgattaatccagatattttagctcaagcatttcaattagatgtcaatattgtcgaggatcttgaggccaagtttagaaactaaatctagtcaccacaatacgagtgtttatggttgtaacacttaagtaatgatgtaacaagagttaaagatttatgctcaatataataaagaaaggtgttgttcacctaatttgatatttaatatgtttactttctctatatttgattcaggcttacataattttattttcagtgtattacaatatttttagatatttaaacaagtctttaagagttgttaaaagaaaaagaaaaaaaaggttaggaaacataggccatcaaatagaaagcgataacatatatatagcattagtttgctactaaattacataaaacatcatagactattaaagaaatttttttgacttttac

SEQ ID NO: 16756 - DNA, 586 bp, Arabidopsis thaliana columbia
gaacagaaaagatgaagttagtaactgactcccccagacttagataacactgtccccagagttattaagctagaggaatcgaaagaaaaataatcaaaagttaaaagttagagaaacgtgagttgccacctgagagtggtgtcgatcgattataggttggtgtcgatcgacactcaggtcatttttgcatcgctttgcgaattcagctcatcgttgtagagctttggttagtgttttcacatggatcctccagttagactgttaaatcactaaaacacacatcaatagttccaacaaagcataggaaaataagtgcaacaagttccaatacaaataacaaatagtctgaaataaagcaaaaacaaaatcagaaaacaaagcaagatagggaggatggctagtcctcatgctccgaacgggaggtgggtgcgggagaacgatgacgacgacgagtggaagcaacacaaccgcagcgagagagtgtagctatggcgttccaaacgctcttgaagctgtcgacgatgtattgctgaaagacatatggctctatcgggataggagtaggagaaggcagctcatatggtag

SEQ ID NO: 16757 - DNA, 764 bp, Arabidopsis thaliana
caaaaaaaaaaaaaacatgaacttgttcttaaggacaaacattttattcaaatataaaagtctgaaagataagagtggtcgacataagtcaaccgaccttcctagctcccagttcgactgtagctttcctagctcccagctcgtctgcacttcgcctagctaactgctcgtctgcagatgcgatctggaaattctcattttccttttccgagaaacactaatatttgcattttctccaaaactgggaaaatgggaatttacttgattacgggttgacttccctcacgggacctcctggaaatcccgagctccgcaacggtttcatccttgtcttgatcaaggatagttaggcccgcgttgacctcttcgctcgctgacgcggcggcataaacgacgacggagcggtcgccggtaacactttgaacttcaggttcgacgacctgaacagattgattttgatcgcacttggcgatctcttgagctggaacgacgccggccccttcaaaacacatcctgtcttgagaatccggattgaccgtctcacgggagacctgatcaacaccggaagggccggcattaatgggaggatttgacgtagccgcctctccgtccaaaggccgagtctcttcgatgggagctgggggaggtggcatatttaaaagcccggcagcaaagctaatgaaggatttccggaccttccccattatcctgttgacgcgcgacctcgtgatgtcgagctcggtagattgcctctaaaactcttc

SEQ ID NO: 16758 - DNA, 641 bp, Arabidopsis thaliana
tgtgaaaggcgagagagaagcggttgagtgcctgaggaaaagagatggtgaggtcgagtggtgctttggacggatgatgatggcgctgaagtcgagtgatggaggagatgacgaggtgataaggtcgagtagagagggatggaggtcgagtgatgtggtagacgtcgagtggaggagaagagatgaggggggattccttgtccgttggtctgttgcatggaggacatgggcgtcagcggcggatcccacaatgtcttcttgtctcttctcttttcactagaaaacctccaggaaatcccacaatcttctgtaaacttgataaactccttggaagaccctgtagcttctgttggtcgagtaaaacgatgatttaaaattttttgggttttaaacatcactcatactcgaccaatgtactcgatctctaggccatcaatagagtaaaagtttaaaattattactctaacttcacgttactcatttttttttttttctgagaaccacaaacacaacaaatcaaaattaacaagaaagtaaaaattatttacaaggataatcatgggacttccccatagtgaacttgttttaagtctctagcttgacccacacacttatcaagaagagaatgaactgtatagaga

SEQ ID NO: 16759 - DNA, 827 bp, Arabidopsis thaliana
tactatgaggtactcagtttcttggttctgagtaactagaacttagaagtttcccagcaaaatactgatacttaaagcacgaaaaatggcaaagaaaaacaactgcagcgttttccttgttggacttgaaaaagatatttgatcctaaaagacatcataaagagtgcataggcagtagatcggagttcaccttatcagcaataattgggacatgacgaccatatgtcataggtacaattgctgtctgaccaacatattttgagtaacgatcatcctgccagatgccaaatacatttcacaacattaatcctcaaacgatacccaaaaaagagcacctattccaggaaacgactagaagacgatctacattcacatgagatccaaaaaaatcagcatctactttgtagattacatctgcttacattaaattggaccagcaacctgacaaactacctggactacattttcaatttcatttaaattttacataatagaaatataaatgaaaaccacaaaaggaagaagaaaataaaatgtgttacacattatatacttttcctccctaatattaaatttgcttctaagtttttatcaaaaaaaaaaacttgcttctaagtttgttaactgagctctgtgtgtattcaaaaattataaacacgtcaaacagactttgataatgccatctgtcattcccgactgcctattatcaacgaaaccaaaaaaatatcaccacctacctcaggatgcacggcaagggccacgtcaccaaacaatgtctctggacgagtcgttgctatagtaagaaaatcaggactgtacgaggaaag

SEQ ID NO: 16760 - DNA, 462 bp, Arabidopsis thaliana
ttattagaaacattgccaggttcaaccaggggtatttcggtaattgtatacctttttacgtggaggacgacgaggccgagatgctctggccggggagtttccggcaagctacgaatgcggttgcggttgaagcgggtaatgataatttaggtgaaagaaaaatggatttcttggacgtcaagcaagcgatggatatggagagttctcttccagatctaaccttgaagctttgagctttcgtttcttatgtttcgccatttgctgaatttggattcttaatttggtgcatcagcttcataactctattatgtacagtgagagtttcacaaaccatttctgatatgtgtatggtcactatcgattgatcgaccaaaagtcaattctagtgtctgcttacgtggataaaccatttaaacgtttatgtattgtaaacttaatattaagtgaagtatgcgatcaatg

SEQ ID NO: 16761 - DNA, 506 bp, Arabidopsis thaliana columbia
tgttgtctaaacgagacagagtgagccaaagccgtttgtcttttgttgagtccttcaaggatgaaggagaaggcaccaaaagtgagacaactctgtagcattgcttgcggtgcacctgcaaacacatgatcatggagacttgttagcttagccagagtagatgtgactatgttcatcatcaaattcctatagacagctctatcaaacgtaaatagctcacatagttcatcatatacttgcaaatgcggagatatgaattcagttcttaccggggaaactaagagcaaggccagtacaacacccagcaactccaacattaatggctgcagaatggaggaaatttgaacatataagcaaagtcatgctacgagttgaatattacatcgtacgagtcagaagggataaaagagccgcaccgtcatctttgcctcgtatttgttttagaaggcaaacaactaaactgtgtactccagataaaaccgcaaaagtctaacaaagaaaccaca

SEQ ID NO: 16762 - DNA, 1502 bp, Arabidopsis thaliana
tgggtccttcttgtcaacactcttgataacaccgactgcaacagtctgcctcatgtccctcacagcgaaacgtccaagtggtgggtactcagagaaggtctccacaaccatgggcttggttggagtcatcttcaccataccagcatcaccattcttcaagaatttaggctccttctcaatctccttaccagaacgcctgtcaatcttggtcaagatctcagagaacttgactgcaatgtgagaggtgtggcaatccaggactggggcgtaaccgttaccaatctgaccagggtggttcatgatgatgacctgggaggtgaagttagcagcacccttggcagggtcatccttggagttggatgcgacgtaccctctcttaagatccttgacagcaacattcttaacattgaacccaacgttgtcacctggaagtgcctcaagaagagactcgtggtgcatctcaacagacttgacctcagtggtcaatcctgtgggagcaaaggtcacaaccataccaggcttgatcataccagtctcaacacgtcccactggcaccgttccaataccaccaatcttgtagacatcctgaagtgggagacgaaggggcttgtctgacggcctcttgggctcgttgatctggtcaagagcctcaaggagagttggtcccttgtaccagtcaaggttggtggacctctcaatcatgttgtcaccctcaaatccagagatgggcacaaatgggattttgtcggggttgtaaccaaccttcttcaagtaggaagacacctccttgatgatttcatcgtacctggccttggagtacttgggggtagtggcatccatctacaaacaacatgtaacaaaccgcaattaatgagacagaacacaaaaatagaagcaatgtgtagtcacataacagatgaaagatatggttaccttgttacaacagcagatcatctgcttgacaccaagggtgaaagcaagtagagcgtgctcacgggtctgaccatccttggagataccagcctcaaaaccaccagtggtggagtcaatgataaggacagcacaatcagcctgggaggtaccagtgatcatgttcttgatgaaatcacgatggccaggagcatcaatgacagtgcagtagtacttggtggtctcgaacttccagagagcaatgtcaatggtgataccacgctcacgctcagccttaagtttgtccaaaacccatgcgtacttgaaggacctcttgttcatctcagcagcctccttctcgaacctctcaatgacacgcttgtcaataccacccaacttgtagatcaagtgcccagtggtggtcgactttccagaatcgacgtggccaatgaccacaatgttgatgtgaaacttctctttacccatggttagagactgtcaacaaatctgcaaaaaaaagaacaatcaaatattgaatcaataaaaacagtagacatatataaccattatgaaaatcatctttaacacaaaac

SEQ ID NO: 16763 - DNA, 504 bp, Arabidopsis thaliana
gtatttctggattttcatctccatatctttgttattatacagattcagcgcttctgaagacgcatcatccgcacctctagtgggaaatcgttctagcaatcgtacatacttatcacaatcagagcctggtggttttggtcaatcgagggaactgttctcatatgaagaacttgtcatagcaacaaatggattctctgatgaaaatctcttgggtgaaggtggatttggtcgtgtgtataaaggagttttaccagatgacagagtggttgctgtgaaacaattatggataggtggaggacaaggtgaccgagagttcaaagccgtggttgataccataagcatggtacatcaccggcatttgctttctatggatggatactgcatttccgagaaccggagattgcttatgtatgattatgtccctagcaacaacctttacttccatcttcacggtaagtaagagttctagacatgcaagcacaaagccagaccacatttacttat

SEQ ID NO: 16764 - DNA, 929 bp, Arabidopsis thaliana
acctactaagtgagcgatacatatttaaacaccgaaattcatgtcttagggatccctgagcaagctgaagttccaccagttgcccgtcctccagctagtgccggacagcctgcaaatcctccagcacagactcaacaacctgcagcagcacccgcaagtggtcctaatgcaaatccgttagatctcttcccacaggtaatacaccttgagatagaaagcagatttggttcatttaaactcttgattatagatgggtgtgcagctaaaatctgctctttatctctgacagggcttgccaaatgttggaggaaatcctggtgctggaacacttgacttcttgcgcaacagccaacaggtataagctgtttttttcttttctcgtacacttgcttacagagtttatcagacatcaatgtgaaacataaatactatttttgtatatattagttccaagctctgcgagcaatggtgcaagcaaaccctcaagttctgcaggtatgttgttctaattcacagaagaactgaaatcactgtcggttttcattaaatattgtttcaaataattttgtccttgcgttttttcttcagcccatgcttcaggaacttgggaagacagaacccaaacttgatgcggttgattcaagaccaccaagctgacttcttacgcttaatcaatgaacccgttgaaggagggggagaaaggtatgcatatgatgactttacgattatgaattaatgattcatatgtaacatatatatcaacagcaaaacgttgggaggattttgattacctaaatagttattctgtgcttggataatttgttgtgcattgtgtaattcagtggcaacctccttggccaaatggcggcgggaatgcacagccacaggcgattcaagtcacacatgaggaacgtgaagccattgaacgg

SEQ ID NO: 16765 - DNA, 958 bp, Arabidopsis thaliana
taaaaattcattatgtaaatacatattatatgtatatttaattttagacacatatatttgtttgttttattatgcaatttttcattctacaaatttatagttttgcaaatttttattctcctacttatgtcattaaaaggattatacggggttatctcagaacttgtgatttcaaatcttgaaaacacgttttacgtagtcaatatttatgtaagttaattaataaataaatgcactaagagaatcaaaatcttataacaaagacaaccttacatgacgtttcttttctgtttggcgcttacaaaaacatcctactataaccaatagttatttaaaccactaaaccctaatttaacctataatatcgatttaggtcggttaagctattatttacctcactcatactaacgaaatacctaaattccggtaagttatttaaaccggataaaaatcgacaccttccagatctagatccagatcgaatctcacgtattttgtctatgcccagtcccaaaggcaggctgtcacaacttggcggaccccaaccaattatcaaatctcattcaataaataatcaatttcccacaaaaatcatggaaattaggaaaaaaagaagatctcgctcaccgctctcatttcctcaattctccgtccgtcgaagaagcgaatcgctcgaaattagggtttctactgagagaagatgcgagaaatcataagcattcacatcggacaagctgggatccaggtcggaaattcgtgttgggagctttactgtctcgaacatggaatccagccggacggaatgatgccgaggtataaaccctaattcactctttgtactctgtttctgtggatcggaagatttttgagatacgagtcttttgcgttgttgcagtgatactacagttggtgttcacacgatgcgttcaatactttctttagcgagactggatctggg

SEQ ID NO: 16766 - DNA, 613 bp, Arabidopsis thaliana
actttaaaggactattctggcatttccgtcgcactcgatgcttagcaagcgataaacacattgtaaggataacttatgaacaagactcaactgattgatgtaattgcagagaaagcagaactgtccaaaacccaggctaaagctgctctggagtccactctggctgcaattactgagtctctgaaagaaggcgatgctgtacaactggttggtttcggtaccttcaaagtgaaccaccgcgctgagcgtactggccgcaacccgcagtccggtaaagaaatcaaaattgccgcagctaacgtaccggcatttgtttctggcaaggcactgaaagacgcagttaagtaagattgcgtggcagtgaacagttttaacgaaggggtggtttcacccttttgtctttctggcgtcgatcattgatgctggctggcgctctgcttctcactgcctgtagtcataactcttcacttcctccctttaccgccagtggatttgctgaagaccagggcgcggtaccgatctggcgaaaagacagcggcgataatgtgcatctgcttgccgtgtttagcccgtgcggcagtggcgataccacgacgcgagagtatcgctggca

SEQ ID NO: 16767 - DNA, 709 bp, Arabidopsis thaliana
cttcttgaatctaagtcgtggaaactctaggattgtttgctgtatatctcttgaaattgcttgtttgattgaatttagctcgcttagctcagatgatagagcaccacaattttgtggtagaaatcggtttgaatccgatagcggcttttaacaatgattgttttttgtgttcatatgtctactgtttttattgattcaatatttgattgttcttttttttgcagatttgtctgaaaagtagctaaccatgggtaaagagaagtttcacatcaacattgtggtcattggccacgtcgattctggaaagtcgacaaccactggacacttgatctacaagttgggtggtattgacaagcgtgtgatcgagaggttcgagaaggaggctgctgagatgaacaagaggtccttcaagtacgcatgggtgttggacaaacttaaggctgagcgtgagcgtggtatcaccattgacattgctctctggaagttcgagaccaccaagtactactgcactgtcattgatgctcctggtcatcgtgatttcatcaagaacatgatcactggtacctcccaggctgattgtgctgtccttatcattgactccaccactggtggttttgaggctggtatctccaaggatggtcagacccgtgagcacgctctccttgctttcacccttggtgtcaagcagatgatctgctgttgtacaagg

SEQ ID NO: 16768 - DNA, 582 bp, Arabidopsis thaliana
attcttggcgtttcttttttttctcaatccattatgctcctataaatatactctttcaagtttcaatgcttgtaactttcttcaggacatcttttctggacttacaaacatttctcgatcatttatcgatcagcgtaaggtttcgagaaaaccacttcagttagagagatggtggaagaagcatcgaaatcagagcagataaatatcacagaggtgtggacgacgacatgggagacaccttacattatgcggctggctctctctgccggtattggaggactcctcttcggatacaacacgggagtcatcgcaggggctcttctctatataaaagaggagtttggtgaggtagacaacaagacatggcttcaggagatcattgtgagcatgaccgtggctggagccattgttggagcagctataggaggatggtacaacgataagtttggtaggaggatgtctgttcttatagcggatgtgctcttcctgctgggtgccctggtgatggtgattgctcatgcgccgtgggtcatcatcctcggcagactcttggtgggttttggggttggtatggcttctatg

SEQ ID NO: 16769 - DNA, 662 bp, Arabidopsis thaliana
ctaaagcgccggtattggcctcgttatccggcccatactccagcccggtactgatggtcattccgttggtcgtaccgaagacaatctggttgtcatgatttgccagtgttccgccgttcacggtttctcccgggtgcacaacgatgtcagcagccagcaccgggagtgacgtgactgcggcaagagacagtgcaaccgccacaccgccacgtttaccccgtgcgcgggccagttcggaggcaaccacgaaagcgcccgtcatgtgattccataccagcctgtagcaggtattcagatgtcgtttcatcagcttttccttagattgagggtgaataaaaaagccggtacccacaaacgtggataccggcaggtaaagggttacagtgccggaggtccggctgtgggagtttctgaattgtggttctgttgttccctgaatgtctttctgtacgtatctgtgcatgttactgacaaaggttattattagcttatcgatcgatataaacgatcgataaaatagatattgatcgttttattctattattgagctattgcacggacaagagagacagtaacgaaaacagtgcttttgtgagcagactcagagtcagggagggcatcagtcacgacagctttaaagcacactggcgcacgttactaga

SEQ ID NO: 16770 - DNA, 782 bp, Arabidopsis thaliana
tagcttgaattggattggtctgttttagcttgaattggattggtctgttgtggcttgaattgaatttgtatgttgtggcttgcattgtgtcattgtgattcaaactgaattgaatatgttgtgtttttggtttgcaaattggcagtgtgtgtaaacggatatgattatgttgtgaaactgaattgaatatgttgtgtatttgtgtttttggcctgattcagttgtgttgttggtctgaataatatcattgtattttcggcctaagagttttgcattatgtctatatgtttcgactttgctttgatcatgtttgcttgttttggttatgagtttgtgacaggttgctcctaagaagaaagacaggatttatggggctggttcattgcagcatgaggcgtcttcagctcatgccggtccggtgcttcctcgagatgatccggttgtgctttcctagaagttgcctgctgctgaagccctcattgcaaaccaggctgagaagatcaccagttttgacgcatactttgattaccttgccgaaaaggatctggagtttgctgccttgtttcgagccagatcctcttcaagaactgaaccagtcagctccaatccacctgatgcgcctaatgccacagctgctgggatcggatctgaggctgtcgaacctaaggctgttgtagctacccaaacactgggtcatcccatctgaggcttctaacatcctgtattcagttcttttcactcatcaaacttgaacttttttggtttgtatgtaaatatttgtt

SEQ ID NO: 16771 - DNA, 1038 bp, Arabidopsis thaliana
gatagtcctcttttaggtttctccacccatcgatccattatcacacaccattcatcccgagtccaaactccagtttttaaaatttcaagtaaatcatcctctgatttaaaaagaaattgaaatctttcttgtgaaagagctctaattattattattacacctcgaacccttgagtaaagtctcaaaattctcataaaattattattattttctctaaaattaaatactcataccaaatttctcaataaatagaactcaaccttggcgtgtgttctccacacttcactgatattctccactttcattttcagtctttctcatttaacaaaacaaagcaaaaccaaactatttaagtttaaccatggaatctcacaacaccttgaacctagacatggagaaagatcaagaaaaggcttttgactactccaaacgagctcaatggctaagagccgctgtgcttggtgccaacgacggtcttgtctcgacggcttcacttatgatgggtgttggtgcggtcaagcaaaacgtcaagatcatgatcttaactggttttgccggtttagtggccggagcttgtagcatggcgattggagagtttgtctctgtttactctcaatatgacatagaggtagctcagatgaagagagagaccggaggagagattgagaaagagaagcttccaagtccaacacaagcggctgcagcatctgcgttagcgttttctcttggggcgatggtgccgttattggcggcagcgtttgtgaaagagtataaagtgaggattggtgcaatagtggcagcggttacgttggcgttggtgatgtttggatggttaggggcggttttggggaaagcaccagtggttaagtcgtcgcttagggttttggttggaggatggttagctatggccattacgtatggttttacaaaactcattgggtcacatagtcatatgtatgtgtgagttttactgaccaaactcactcttcttcatgtttcgatgtttcatgcttcaagtctataaactgaagaaaaata

SEQ ID NO: 16772 - DNA, 563 bp, Arabidopsis thaliana
gaactgattttagaaaattacgtgattcatttcagtttttgttatcaacatcactagcttcaatcatgcatgggctgagcatgtaacgcaggtagagatgtcaaaatgggttaaaattcatgggttaactcaactcaattcaacccatgaactctaatgagttgaaaattttgactcaaatgagttaatgggtcaaatgagttgatgagtcaattggtttgatgagtaaaatgagttgggttgtaatggttaatgatttcaatggtttacccaattaacccatcaagttttgtaaaattgaattaaaccaactaaaatttctaaaccaatgccaatttaagtttaaccaacacatttaaaccaatttaataaaattaatatttttccaaatttcttaaatatacaagcgatgaaattgataaaaagtaaactcgtaatttttcactaaaaagataaacccgtgattttcccgccaaaaacgtaaatccataattttcccgccaaaaacgtaaactcgtaatttccagccaaaaacgcaaatccgtaatttcccgccaaaaacg

SEQ ID NO: 16773 - DNA, 563 bp, Arabidopsis thaliana
  unsure (1)..(563): unsure at all n locations
ctgctgcaatgacaatctaaacaatctcagtgagtccttcaatagaacaattagagaagcaaggaggaagccattacttgacatgttggaagacattaggaggcagtgtatggtgcgtaatgagaagaggtatgtgattgctgatagattgaggactcgattcacaaaaagggcacatgctgagatagagaagatgattgctgggtcacaggtttgtcaaagatggatggctaggcacaataaacatgagatcaaggtgggtccagtggattcgttcactgtagatatgaataataacacttgtggttgtatgaagtggcagatgacaggtatcccatgtattcatgctgcctctgtcataataggaaagcgtcaaaaagtggaggattatgttagtgactggtacacaactagtatgtggaagcaaacatacaatgacggtattgggcctgttcaaggtaagcttttgtggccaacagtcaataaagtaggagtgttacacctccatggagaagaggcaaccaggaagaccaaagaatcatgctaggagnaaaggcgttttt

SEQ ID NO: 16774 - DNA, 646 bp, Arabidopsis thaliana
gtcgcgttcatctgcatataaagatacttggaaatcttgaatccctctgcaagtttctctgcaggagtcactaaccgcttccacggtagcttcccatgttgtttccaagccgtgaatagacctgcaacttccccgggaacgcctactgataaggctcctttcttctttaggtcaacattacctccatacatattctgcatcaagtgaaacaaccaataaataatgcctttgattcaaaaacgtataaggaaaacgttatttaagctcatgagaaaaaaccaagactgtgtactattcacaaagacttttaacgaaaacgcttattacaaaacgcatatttgatcagaggataaagaaagacattattactaaaacgcgttttacctcagtggctcttagaggagcggtttctctagaatcataagcaatttctttcccaccagctatcttaaccactgtaaacgctccaccgcctataccgctagatgcgggacttacaacgcccaaacacagagcagcagccacagacgcatcaatcgcgtttcctccttcacgaagaacacgcatcccgataacagaacaccgtccatcatctgtcgcaaccgcaccgcgagacttaacaatactttgctgtcctttctgagcg

SEQ ID NO: 16775 - DNA, 1028 bp, Arabidopsis thaliana
ctgaatggtcgatgaaaacctagatattaccctaatctaatcaatcctcaagaaccctaatcactactcatgcaacattctcaagaatacaaacccagaaattactaatatcataccaaaaggtagatctaaacaacctagacagctattctgtcaccaataactgcggaaccgaaatagattaagagtaattaagttttgaagattcaagaacacaaagaaaacctaaagataaagcatatatcctttggacaagtcccaaagtgatctatttatactaaaatattggaaaccctagatttactagaagacaagtgacttgaggcggtttgggctaataatcgatcttggggatcgagtaaagagggtgctgcaaagtctgcgcctttgtgtctatgctccgagtgatcaattagtcgagtagatgcttcatcttctcctatccatatgcgcagatgtctggttgagtggggaatgaggaggatccgaagacgctttgatagctcaacaagtcttgtagagttggtcacccttggtcgagtaaatggatcgagtaggaggggcgagtagatcaatctgcttcttcatctgaggttgccttgatcgagtaagagggtcgagtaaactgcagccttctttgtagcatcctggatcgagtaaagaggtcgagtagaatgatgcctcttctgaagctgcctagatcaagtgaatggatcgagttgagtcctttttacctccttctgcacctgaaagcacaccaaaacatgcaatgcatatgcaagatgatcctagatgcctaagtatgcaaaacaagctaaagtggtgcaaaatgatatgatacaatgagcaaatgcaaagctaaatgatgataaatacacacctaaaatgagtaaaatacagtgttatcaccaatcgacccacattgaatacccagaagagactagtttccatataagcttcaagacactaaccgtattagcctcgtatagcagtcttatccccaaaccaccctttttgttttggtttac

SEQ ID NO: 16776 - DNA, 479 bp, Arabidopsis thaliana columbia
ataactagaacgctcatcccaaggattgccgattgttgccgcgcgcaaggtcaactacagccagatcgatccggcgttatgtcgtgaactctttattcgccacgcgctggtggaaggtgactggcagacgcgtcacgcattcttccgtgaaaacctgaaactacgggcggaagtagaagagctggaacacaaatcacgtcgccgcgatattctggttgatgacgaaacgttgtttgagttctacgaccagcgcatcagccacgatgtaatctccgctcgccacttcgacagctggtggaaaaaagtcagccgcgaaacgcctgatttgctcaactttgaaaaaagcatgttgatcaaagagggcgcagaaaaaatcagcaagctggattacccgaacttctggcatcagggcaatctcaagctgcgtttgagctatcagtttgagccaggcgaggatgctgacggtgtgaccgtacata

SEQ ID NO: 16777 - DNA, 990 bp, Arabidopsis thaliana
tatccaaactgaaaatagtgatggcgcgataccaggagtttcatgtcagatctagtcaacctcattgtagtacagttgccggcccttttactccagtgagtgagcagttggaagagaaatggtttgcgagcactgaggagctcaggggtgacatgcgttcagcctcttcaaacatctatagtttgggtattcttctttatgaggtatgccatcttaattgtagcttttgacctgcaattgtaagtatgtacatccatgagttgaaatgtgaatctgcaagcccttaatgttgacacacatatatatgttttcccgtgggattatgtctttaactgggacatatcgtgtgtgggtcatgtttgggtccagatagatttagatagtgtagcatgtttgttaatgagatggtaacagtgaagtttctcgttgaaagtacagttggctgcatggctcataggtttatgtatatattgattcgactgtttcttggtcaaaacataacattttcattgatatactaatttgtttttttccgtcagttgctgagccaatttcagtgtgaaagagctcgtgaggctgcaatgtctgatatccgacaccgcattcttcctcccaaatttctgtcggagaatccaaaggaagctgggttttgtctttggttacttcatccagaatcttcatgccgaccatcaaccaggcaatgcaaaatctttagctactataattctcaaatgatataaagcgtgttattgaacttttgtatgcttgtttgtgttgatagtttaaggccatgaatccctagtgggtctattggaagataatcttgttgtatatctagaaatgtacatatgcaccaaatgtggaagttttgttctcctggctgtaaacgggaggacgattgtctcgtcaacagtttcacataggattgttaggttctactctgaaaaataattagtcttggtactaactgaggcccgtttatgtgttgat

SEQ ID NO: 16778 - DNA, 553 bp, Arabidopsis thaliana columbia
ttttgtaattgtaatgcaggtgcagacatgggtacttccatgtggttaacaacgactacacacattgggagatgtacgccattggtgggagtgcagagccaaccatcaacagtcaaggaaacagatatgctgctcccatggaccgcttcgccaaagaggttcaacttcttaaacctttgtgtttgcttaaacagagtaataagatgttgttatatgtataagaaagattaaattatggatccacaggtgacaaaaagagtagagacagatgcaagcgagtggaagaagtggaattggagatcggaaggagaccttctactgaatggagcattcttcaggccatcaggagcaggagcatctgctagctatggacgagcctcaagcttagcagctaaaccatcatctatggtcgacactattacctctactgcaggagcactaggttgccgtaagggaagaccttgctagtcgtctctctctataccactaccatagtagctaccctaacccctttcacatatctttggaaagcgcatatatagtagtattacta

SEQ ID NO: 16779 - DNA, 523 bp, Arabidopsis thaliana
gtcatcattgatgtcaatgttgcagtgtaacttgtaaccaatatgagcaccgcaaatacccaaactgtaactacaaatcttgataagttgtgttgtagcttctcccctgtcacacagagtaagcaacaaaaggtaagcatcactacaatctcttctcttatggccaaattggtatataagaatgtgaaaaggtacttacgatgagcataaacaagggtagagaagccaaaccaaatcacaactccaatctgttgaggccaagatccttggaactctttgttctcagctctttctatcaaccaaactataatacccgtcaagacaaagaaagctgcacttgttatccaaaggtttggtgttagaggttggaagaacacccacatacttctctcctttgctgctacaattccaagacccatttcagtgtatggcaacgtaaaatcaacatacatcgatctatcggaagtaattgtaatatctcccacagcagcatcatatgtgtcttctaagggatgcacaaaaa

SEQ ID NO: 16780 - DNA, 440 bp, Arabidopsis thaliana columbia
tgcggaataaccggacttggttatgtgcaacattctcctgaaagcatttctattgatgggtgcatatggagaagctgatgcactttacagggcaatgcagaaatggatctgactccagatacagccacatacgcaacgatgattaaggggtattgcaaaacgggtcaaatcgaagaggcacttgagatgtctaatgagttgaggaaaagctcagtttctgcagctgtatgttataatcgcattattgatgcactctgcaaaaaagggatgctggacacagccacagaagttcttatcgagctgtgggagaaaggtttatatttggacatccatacatctcggaccttgttacattcaatccatgctaacggaggtgacaaaggcatactcggcttggtttatggactggaacagttgaattcagatgtctgtcttgggat

SEQ ID NO: 16781 - DNA, 509 bp, Arabidopsis thaliana columbia
gttgtatgtaacaacatcggctccgagacctttcttctccatctcgttgagaagctccaacgcaatattcagttcaccgttcttgcagagaccgtcaataagagtgttgtagactacaacattaggctcatatcccgatttaaccattaaaatgactaaagagaaggcgtcaccaattctattcacgagacagaatccatggagcagagagccaaaggtgacaatgctgggctcataaccaagtttcatcatttttccaagaacagatagagcaaaggagagacgagagcatcggcagaaacaatgaatcaaaatggtgaaactatagagatcgtgtgagattccatagagttccatcttctgggagaaatagataacagtctcatatcttctcaaattggcagtggcagtaagtaatctagtgaaatcaacaatggaaggtaagggttgagaatgaaccatctcaaagaacaaagcaaacgcatcttcaaacctgatagagtgaagaa

SEQ ID NO: 16782 - DNA, 648 bp, Arabidopsis thaliana
ggatcctatttcttcctcttgaaaatgatctacgaaatacttttgatatatagtctatatgatttacaaaatgtgaacaatatcaaattgggtccatagctcagtgatagagcaattgactgcagatcaataggtcaccggttcgaacccggttgggcccttcctttttttgttttttcttttttttctgtttttcactttacaattaaattccggaaattcaaattgccggaccagaaataaccggccttaaacattacgactgtatctttctccttgtattgtttgtcttaaccagacatctcaattcattacacaacgaaacacataatagttttttctattcaagaaacgataattttcttattagtaaattctgaaaacgaagacacgaaaaggaaaaagcatccgattcctaattcccatcatcgtaaaaaggacaaaccgaatcataccaaaccgaatcgaatcgcatcatcgaccccttataccgatcggtttagtctaatctaaaaaactcaatttatcgtcgtcgttcgttgcttcattccgcggcaccgacactgatcgtaacattcgccgggttttcgcatcggacatcgtcagccgtctgatctcgcttgttatcatactccttaaaacttgcga

SEQ ID NO: 16783 - DNA, 491 bp, Arabidopsis thaliana columbia
  unsure (1)..(491): unsure at all n locations
tagaggatcnnnnnnnnnnnnnnnnnnnnnctaaaggtgcacagacagaatggcggacatcagctcatccacattgaccggagcgtgaaactcctgcgagaacgtgccgtgctgtaataacaggatgcggtcacacaccagcggcaactcctccacttcactggagataaacaccacgctttttccttcggcagccagctcacggacaatacggtaaatctgctgtttggcttcgatatcgacgccgcgcgttggctcgtcgagcaacaaaatctggctggcagcatagacccaacgaccgatcaccactttttgctgattgccaccagaaagcgtgccgatgggtgtttcgctactggcggccttgaccgtcatccgctgcatcacctcttcggtcaggcggcggatggtggaccattgcagcacaccgttggcgctgattttttgccgattggtcacactgtattttcgtcaacgccaaccagggaatg

SEQ ID NO: 16784 - DNA, 286 bp, Arabidopsis thaliana
ctttgaacagagaggatgaagttgagaagaagaagacctagagaaagagccatgcaagctgcaatagaaaatagggtcgaacatatggaagaagaagaagaagaagtagaggttaataaaagaaaaagtttaaaagaaagcacgattggaaaaattgtgttgcaccagaaattcctcaggatctcctgatcgagattctgacaaaattacctccaaaatcagtgttgaaattcaagtgtgtctctaagttttggtcatctcacttgtcctccacatatttttgcag

SEQ ID NO: 16785 - DNA, 574 bp, Arabidopsis thaliana
gctaaccagtaacaccggcaaaacggagagactcttcaatcatacggatctgagcttccttgtgaccagaatcagaaagttgaacagaagaatcagggtcataaaagccatgatgcatatgatctccccaaatctcttcccacaaacccgaagtttcattgtagaactccgctattccttttcttagcgcctcagtggatgtagcagcagccgccacagccacgtttccacgcgttgtcgtcatagagactgaggaggaggaggatggagaccgaaagagaagcgatgactttgagccgaaagaagagttggttcgataagggaggcttgtgagagaagagggtgctgctagagttgctttcatttattggacgttggagatacaaagaaacgtgacgaagtcagggattatttgattattgttacagtgtgactgtgtgagatcaaactttggatatataacattggaccatttttcttaactttagagccacaaaactttctgttgccacaggtcttggggaaaggccaatcgtctacaccacttatcctttgattttctcctttttttttg

SEQ ID NO: 16786 - DNA, 1153 bp, Arabidopsis thaliana
tgtcggaggttgcagagtcaatgaaagcagtgaaagcaaaggcggtgagagctgagatcatgacagtaggtggaagaaccaagtgtgccttgtttgttcaaggtgtcaatgggaatgaaggattggtgaagctcaagaaatcgttgaaacttgtagtgaatggtaaatcatcatcagaggcgaaaaacaacaacaatggaggatcgttgttaattcagcagcaatgagtattttgtttatatacttgtacatctctgtttctcctagtccattagagaaggtagatgtaaggtataaaagcccatgtgttattgaaattgggtggatacttacaagagtctatatgaataaaaatgatgcaattctttctttggagatggtgtggatgttataacaaaatatgaatcatgtgaaattttttgtcccatctttgttcttacccaattgtaccttttgagatgaaacccatggttgcttctagtagatagctttcttctgggaaacaaagatttggtttaataagttgaaccaacgaataactcttcaaacattccccacctacttctcatcaaacctccttataaatagaggatccagcacaagtctcttcatcactcaaaccaacaagaagtagtcaaagcacaatacagcagtagtagtagcaccatggctcctctcaagaactcctttgtaacatctctggtcattgcactaacattcacaagcttcttcaccagcctatccgctcatcgtcaccttctccaatcaacaccagtgactcagcctccagctttaacattcccacctctgcccaaaaccactatgccaccggttccttctctaccaactccaggacaacaaacgttgccacagccacaaccaactctgccacagcccactgggttgccaccgatgccgagcacacagataccatcattgcccaaccaggtgcagcccacaatccctaacattccacagatcaacttccctagcaactttcccttcaactttcctttcaacattcctttccttactccaccaccttcaaagtaagagaagtgaaagctagctcattagctgtcacagatcattatccttctttcctgagacagctttggatcacacactctgctttgtgtcagtttgtatacac

SEQ ID NO: 16787 - DNA, 552 bp, Arabidopsis thaliana
tcgcttctacgtttaaagctttgtgtttgtgtttcttgttcattgttgttgcaagtagtccgactatcacaccaaaggttttcagcgtcagacgctatggttctagaccacacggaaaaactgatgatgccaatgtatgtgcacagtaacttttctaataaatgttaatagttatttgtctagttttgttgattcccagtttatattggcttccagatacattgaaataagctcgactcagtatcaaaatgcatttaaatgatctaataatatatgttgaaaaaacattttgatatgatagtatgtataaatcttcttgactttctacatgacaatatatggattggtattatattaaccagttgaatttaactggatgttttatcagcttctatggatttttttgtttaatgattagcctatcttattcttagcatatacaagattaggcattcacaagtgtatggaaacatgcatgcacaaggataagtggaagtagtaaaatctacgtaccagaaagaacattctacataggtggtgtagagtttgtgg

SEQ ID NO: 16788 - DNA, 590 bp, Arabidopsis thaliana
ttaatagatagaaacagttttgccatgagctttggttcggcagataggacaagaagggttctttttcagccacgtcattatacagtctctgtgaaaaacatgggaacatggtaacttcatgcgactcaccccactagataactccgttaagcatatcggacaatccaacgccgggaccagacaagtacccttttgtttacaacaacaatcaatcctcacccattgttccacgtcgactttaacgtcaacttctaccttcaaacctcctcctgttccgcagcggcggtttctgaacttgacggattcggttgagatgtaacggacaagacgttcttgaatagtttgcgggagatacatcgccgacaagatgatcatgacgtgttcaaggcatgtttcttgagagacaagaaactgttttgggatgttgtcttcgagtttaaatacacgatcgggatgacgttcaagagtggtcttaagttggtgtcatcgagattttcatgacgaatccgaagatttggctggtaagttacgatgaaggaatacgaatctgattcgacctgagaagctttgagatgaatgacttcttttgt

SEQ ID NO: 16789 - DNA, 700 bp, Arabidopsis thaliana
attcccaaagctcgtccagttaaaaacaaacttgatagcttcgataagagtatgtagagaagtgagatgatcgggactaggcccacaactcctccagtacccactttattcacccaaaaatctttatcactatactaatgatcatccagaacaacatctctgccattcctatgaaatgcattattaaactctgtttctctagaaatattatgtcggctctttgcgtataacatcaacagcagcaataagcacattgtttcccagtatgatcattgaacacgtctagaggcacatagacagacattaaatagtgagcaatgacataaatatatattgaatatcaactcaaagggatggaggatatgcttattaatctcacagagactataaagaagataaaatagattttgatgtttcaagatttaaaaagaaaagacagactctagactcaaactcagttccaaactagttgtctatattttgaggtggaatatagacaccggtccccattctagtaagatcaccaacgatggaggatctggctagattgaaatatccgtcttcgtcagcatccatgtattcaacattgttagggaaaaacatgcgtggtaaggagctaagagagacacaaaaaggttcagattttgagaggaaaatgcatagatctccaatgtctttagtgtaacagcatttcttcgtc

SEQ ID NO: 16790 - DNA, 579 bp, Arabidopsis thaliana
ggacaacatctctggaatcttcggtaactcatcaccaacacctatacgtatcaaaagcgacatgaagtgtgatccttctttaacactccatgccgttttgccactaaacatctcaactacagcacatcctaaagcccacacgtcagccgctgatccatactcgttatcattaacacattcccggtgccatgtataacggcgtccctctaatctccacactttttcttaacgccgttaaatctccgtcaactctcatcgccaaaccgaaatcggcaattttaacagagccgtcgttaaataacagaatattcgcgagttttatatcgcagtgtgcaaaccctttagcgtggatgtgacgtaaccctcgaagcactgatcctgtgtggcgacgcacggtggactccggtaaaccctcaccgccaagtttcttcatgtaactcgctaagcttcctctcgaagcgtactctaataacaagttatgcatctcttctccgtatctcaccgttgaatcctcgccgtaacaccgtatgatctcaggcaatcaccgagtgaatcaacactgattctcgttggagagtg

SEQ ID NO: 16791 - DNA, 952 bp, Arabidopsis thaliana
ggatgaaggaatatcactgcaaacctgatgtttatgcttacaatacaattatcaatgccctttgccgtgtggggaattttaaaaaagctcggtttctattggatcagatgcaattaccgggttttcggtacccaccggatacctatacttacaccattttgattagctcctactgtagatatgggatgcaaaccggatgcagaaaggcgataaggaggagaatgtgggaggctaatcgaatgtttagggaaatgctgttcagagggtttgtacccgatgtggtgacttataattgcttgatcgatggatgttgcaaaacgaatcggattggtcgggctctggagctgtttgaagatatgaagacaaaagggtgtgtaccgaaccaagtgacttataattctttcataaggtattatagtgttactaatgagatagaaggtgcaatagagatgatgaggacaatgaagaagttgggtcatggtgtacctggttcgagcacgtacacgccgctaatacacgctcttgttgagaccaggagagcggctgaggctagggatttggtggtggagatggtggaggctgggttggttccgagagagtatacatataagttggtgtgtgatgctctgagctcagaaggactggcaagcacacttgatgaagagctgcataagagaatgagggaaggaatacaacagagatatagcagagtcatgaagatcaaaccgaccatggctcgaaaagaggttgttcgaaaatattttcacaagattgacgggaatcaaaattttgcaatggaggaaatctgacacatggtataattccggctcaaatttgcatggctttcatgatacattagatagtttgattgaaacactaattatagacttaagtttatgccagagccactggaagatctaactgatcaagtgactaaatgttttctgtggac

SEQ ID NO: 16792 - DNA, 1045 bp, Arabidopsis thaliana columbia
ctacatgatcatcaaatgggcatatgtctcatttgtactatttttcccttgtcaagttttgtcccaatggtttttcttgacaaggtttttaatgaggcaaatgattcacattcaaatcacccatttgataatccaaacaatggtataacattcagaagttggcccaatgtaatatatatgaagtccaaccaattttatgaccatcacaagctcaagaagaccccaaaccaagtggataatttgctggtcaagagaagtgacgaaaatagcatatcaagagtcattttggagccaagaagtggaagggttatttttaaactttcaaactagtctgtattttccaaggtagtcttgtgagtgtgttccaagacttctttctttataaactccttgtaatctcttatgagaactcatctatctttttatcaaaaactctctcttaaaaatagatcatggatccattttcgtatgtcgaattttgatctttctcgacttatcaaaaggattttccgcatccttttgtggcgtcattcaatccatcatctcgtctttgagttgtgtgtcgtctctatttcgagaatatccactccagatcttccaagtgtcgaaattgggattgattcctcaccaagatcatatcatgtggtatcagagaacacttggaggttgagtcttttctgtctgtcatcttgttttaattttcataattatttggtgtgtcatgaatttgcgaaatcacttgtcacgggttcgaaaaagagtctagtattttgtaaatttgtttttagaatttttagaaactatttgataatttttagcgtccgattaagtcgaacagtcgtgattagggttgtaggagagttttgtgtaagttgaagggtcattttgtgtttcttgtgttgaatcctttctattacaaaaagcacttgttactggtgtatttttgctttgtttctcaggtcgcaatgtcaacaactgaggagagatcaagccacaaccgcaacaatcgtctaattgaagctcttaccattgaaatggaacaaat

SEQ ID NO: 16793 - DNA, 920 bp, Arabidopsis thaliana
ttgattttggtggtaaacgcatctttgacaagaagtccacaaatggactctccatatcttcctccgatatcttgactgttgttgaatcatctttttcggtagaagaagccaagtgactttgaacaagcttgaagaatttcatgagctgattcttctccaacagagtcaagctcttgtccttgaatatagcagctctcgaatccggcacatttcgtagctcaccgctcgaatccccaacgaagctggcatcgatgctcttgaactcaacgtagttgttagctcctgatttcagcatgagattaattgattcatcggcacagaagacaaccctaggaccagccaagtcaacgttgaatcttctagagtgttcttcgaggatctccgattcgaagctcgaaatctccacggaggaatacaaggatcggttaacgagatccacggagataaaatcatggttgtttgacggagggagaggaggagatgacggcgacggaggaggagaaacggagtttgagtgaaggaaagaagtgagatcgggaagggaaagagaggcgaagtgagagccgtagaaggggttagggtcgaggtggagaacagaactaccggaggaggaagcagcggcggctaagacggactcagagactccggtgccgacgacaatgagatcgtagttggaaggatcaagcggcgggtaaggagggatgtcgatcatggtggctcgaacagatttgtgtatcaaaagtcgaaccaacgtgacttcagtagcttgatcgatacacgagcgttgaataatctgggaagatgttgagatgagtgaggagaatcgaggaagaggttcaagagaagaagaagtttcttcttacattacatatacaaacgtaatgggcgtaagatgtaaatgaataaaagaggtaagtgtg

SEQ ID NO: 16794 - DNA, 742 bp, Arabidopsis thaliana columbia
cttttttaatacgtttggttgtagcacttatacctggatggctttatccgaggatttgtagaacctgtgccttgattgctttatccattttgttcttgaaattcaaagttcttggttggattctttctttaaatctgaaccgttttattgagtgaaacttctcggttgtgacccgatccgattcacttcccaaccagcatttagaaatgagctggggtaccggtgtttagagtaaccgggtttctaaagataaaagaattccgagcagaagttatctgaaggatgttatcttgtatttatatagtgcgctgttgccgagcaagcgtaagagatactctgagctgtcgctcatcgtattagccgaagcgtttgaaaatcgtgaatcgatttattatttatgccaaagttaacttacaaaataataaatgggagtatggatatacggacccactcccccctttttaatgaggggggtagctgaactcggccgaagatgaggtgcctacgtacccttttcaaggatcaagccacctcgtagttcaagtttagtcacttcggatttagttgttgtatttccttaggtgcactgcattccaagatctcggaacgctttgccgcttaggtcggcaagttcatatactcctggtcggacgaccttcgagatcaggtacggtccttcccaattcgccccgagcttcccagcgttcggttcggcggtgttttgaaaaacttttcggagaac

SEQ ID NO: 16795 - DNA, 1177 bp, Arabidopsis thaliana
  unsure (1)..(1177): unsure at all n locations
accaatatatttacttttgatcttaacctagtattttataaaacatttcaggcaataattacttcagtatactatgtgatccattcatggacagtacgtcacaaaggacctctatacttagcgatatttaagcctttgtcgattttaatagcggtggttatgagcgcagtttttctcaacgattctctctatctcggatggtatgtgatcactcatcaattgtcttcattaattatacacatttataaacaaaaacattttcaagcttttgcttcattttgcagtttgataggaggactattgataacgttggggttttacgctgtgatgtggggtaaagcaaacgaagagaaagatcaattgttgttagtttcaggaaaagagagaacccctcttctattgaacggctaaaatggccaaattagaattaaaaataaattagaactaatttacatattcttagccacacttttgggtaatgtgtacatgtatattactactgtatttcatgttgcgctttgtttataacttgaataattgttttaaccatgaagtaaagacactctatatccatggttagtaaataaggtaaattgcgtacagtagccgttgacccacttttaatttcaaattttgacactgtgggctgggcatttcatttcttagccattcagccaaaaactgaccaaaatgccctgacgaaactgaacccggtttgtacgtacggaccgcgtcgctggaatccaagagaaccgggtttgtacgtacactgttcatcgacgagaaatgcattaaatattttctgggtttcggcgaatttgacacttgagattgaaattaaaatttttaaaaattggttgggctcagaagtttttaatgctaaaaagttttgacaaaactaaaactcatgattacctattataatatagattatattgtaagatatttacataattgagattagaattctgggaaaaaaacgaaaatcaaaattgtgttacggtgaagaatctgaagtttttagttgctgtttacaaagtttgaaggattgaaggggagacaatctgtgttctaggtaagacattcgtgtaatcctaataatgtcacttgagaacgtgatatganagtaatgatacgtttttaaaaatttttgangtcataaaatgtttgttggaga

SEQ ID NO: 16796 - DNA, 819 bp, Arabidopsis thaliana
acgggtaccgagctaccgtctcactggtactcgagtgcagggtctcaggtgcaacagaaaattttcaaaattttgtactccaacgggctgtacactcgatctccaggtcttcgacagagtaaaagttttaaatttttactctatctccgcgctgttctcttgtctctgaaaaccacaaacacaactaaaacaaatcaaaaatatcaagaaggtaaaaattatttacaaggatagtcatgggacttcctcccaagtgagcttgttttaagtctctagcttgactcctcacacttatcaagaagaaaatgaactgtaaagagggtcagcataatcctctctgataccatcatcatattcagcgtcctccctggagaggtctgcagcagaatactcaatccccctttcttcaaaataggcttccttctcttctggagggtaatctgcatcttgagaccatcttgaagtgaattcttttctcgcgatagtgttaatcccgcctttaggttgagcttccttctgcatctgattcagcttactcctaagttcctcaatggtgtgggctagcttctctatagtttcatcttgcttatcagatctctttctaagttttttcactctttcagtctcatatccttctcctgagatcggtctatcgtttccagaggtttttccatcttcggttgacccttgtggagttttgttgatgccaaactgcaacttgatatgctttccaaggttgagacttattttcccttccctgacatctatcacagctcccactgacgctaaaaagggtcttccagtattaaggggccttat

SEQ ID NO: 16797 - DNA, 879 bp, Arabidopsis thaliana
tattgaacctgtgcaagaccttatcaatataagtatcctaacttagtccaattattttgtttaatctatctctatagattcgtattccaagaatataggcagcttcacccatgtctttcttcttgaatagccatttacactctatggcttttacaccatcaggtaaatcaaccaaagtccatactttgttttgtgacatggattccatttcggatttcgcggcctctaaccaattatcggaatcggggcccatcagtgcttcttcgtatgacgtaggttcatgactttctataataaatagagcatgatcatccatcacccaatctccaaatctatcgggttcgtgacgactcctttcggacctacgtacctcaggttccacaggtataggttctacgactcttcgtagatccaaacatatgttcttcctgagaagttgaaacatcaccatgtggttctcgaacttcttcgagtaatactttactcccactagttccttttgaaagaaactctctttccaaaaaggcaccatttcgagcaacaaactctttgttgtcagtagggtggtaaaagtaataatcgttggtctcttttggataacctacgaaatagcacttatcatatttgggtccaagcttatcagtaatcaatcgtttgacataagcttcacaaccccaaattttcagaaaagacaaattaggaacctttccagtccatatctcatatggtgtcttctcaactgatttttatggacatctgttgagcataaacgcagatatttctaaagcatatccccaaaaggatgatggaagatctgtgtgattcatcatcgatcgaaccatatccaataaagtttgatttctcctttcagatacacca

SEQ ID NO: 16798 - DNA, 621 bp, Arabidopsis thaliana columbia
gtgcttggggttgggttgggaatttgtaatccgctagagatcccggactcattgagtaatctaaaattactcatgattctaccatatttgttttgcaggtgaccaataaagggttattttagagggtagctagacgctagggaagccagtgtagttttttttcctttttgtaaaatatgtttgaatagaataaggcttcatattaattttaggatactagctcccggccgaaaaccttattttttatttagttgtatttactcaaatgatttaatgtgaaataaataaagctcgctttatattcgagttggctcttaaatgattatgttctagtccggactgcccaaacactcgttcatgggaaaggttggcaagccggactcatgtctgagtgggatgacccgtggtacggacgactagggtgatcgaattcgttttggtaaccccggttgtctgtctgcgatcgtcctcaagtagcattctcggctgtcctgtccctagaacggttcgggggtgttacccggtaccctcaagaacgagctgaaatataagtcctagtccaaggcaaaattttgagatcaaacctcatatcattggccttgtgaagcaaaccaattccat

SEQ ID NO: 16799 - DNA, 657 bp, Arabidopsis thaliana
ctggtgttgtccatcaaatgaatttgttacaaaggaattacgtttccaaaacaagaaattcccttgtttataactgaaatacgaaaaagaaaactaaacaatgaaacaattcacataaagatatcttacttatgggattgtacaattactctattattgttttttgctaacatataacttagaagcaccactaaaatgcatatcaaatgaataaagattttagttctgaagcaataaacgaaaattacggaaaatcttatgatgaaagaaagaaactctaattataacagtatggctaaccggggttcatgagccggcaaacatgtggaagcacatgcaaatatggagtaagctagtgacgctctacgagtaagtcagaaaggtacctaaaaatgtcaaaatatcagagagtaaacaaaacaaagttaacaaaccaactgaagattagttaccgaaaaatcaaaacacaatgtgaattgatgttatccaaatatagttgaccatgagatcatatccaacatgtttaaaatcacagccaaagtggaaaatgccaaactatgagagagtaaaaaaagattagttactgcaaaatcataacacaatgtgaattgattctgtgccctgtccacaaaaagggcgactgctaattatgtacag

SEQ ID NO: 16800 - DNA, 1332 bp, Arabidopsis thaliana
tcccacttctttattacagaatgctttgatgacttatttaaccctctaacattccatgagaaccccgacattaacaacgtttaagagggggtttcttggtctgatctttagggggaccccttgctgaatgagaagagttatgtgggatcgctttatgagcagttttagatgcacgaggtaaagacgaacgcaaaaggacctcctttatctcctcgagttaagagctccgtgtcctcaacctcccttgaaatcgtaattcttgtatctgtcacaaccaaagcaggctcctggtctaccttttccgctacctcctctgttgcttctactgctcccataacttcctcttcacccaaggcagagaacgagttagagaggatagaaacctcaccgtacttaagaccctctgttttccccggactacgtcctgtattagccggcgtgatccaaccctcatccatcttattattaattcataccgcttctatttgtgcaccatcactactttttgccgctagatccttttcttgaagctgcaaatcacactctacatgtgcaggctgttctgaaacaatttgcagacctggagatgtgtccatgtttgtcactacgtcattaactttcaacaaatccagggctgaggtatccagagtggacttgttctccggagaaagacaagtttcacgtagatgaccccattttttacagcagccacaccttggtggtaaccatgggtaagagtacttaatgacagagtctagctcaccttcctcttctcctgtaaagttgtactcctttagtaattctttcgttaagtcagcctctaccataatctgagcttcatcaaaacagacgcacacatctgttttaggatgtagacggattggtttaccaactgcacttgctagaaactccaaccccttgtctgtaaacatcattggtgggacattggtgagagtgacccataaaggtattgatttcatcgccggctgagcctcctctgcaaaaggggtccactttgatactatcatagggatatccgtgatgttccacattcctctattcaaaatcctctgcctcataccttcgtttcttatacgaaacttcactgtagactgattaacttcaaacacatctataagtgaagaacggtctcccaatctccaaatcttgttcacaatcatatggattttccccacgtgaggggccttagtattcagaaactttccaatcaagaaatcttcccatagaggttttgcacctgcaaacacatcctttggaactactaccttctccttaccatctatctctgataccacaaacttttgctgagag

SEQ ID NO: 16801 - DNA, 860 bp, Arabidopsis thaliana
gcatatacccgtaaaaagtgagatgtcgtctcggcatacttccgagattccaggagagtatctggaggaggaagcaggggacctacgcatcccccgagcaagttggccgaggcaatgcgatcttcgaagatcgggagcactttctccgcctcggggccataagttttcttcttcttcttcttcttcttcttcttcttcttcttcttcttctttgacggttcattgtcaacccgaacgcgtttacccgccgctttgtcgctcgcaggtaacgccacaaccgcttcgggtgcagcaacacacggctcagcttccagagcttcaacgggtgccgcatcaacccgcgcagcggcatcaggaataacatccccgtctcgggtcgcctcgagagcggctgcagtgagatcaatcccgcgtcagcaaggcctttctcctccgccaatcgcctctccttgtcctccttctttttggcgtaaacctcccgcaaagtaagcttcgtcgactgcatgtctacaaaaaattgggtacagtgattagaagaccctgagctagtaggacaagaagcgccgtgaagaagacgaagcgcacgttcaactcgctcacgagaaaaatgcttcagccaatcgcacttgagagtgcgctctgcaacaaagggaaaactagttagaaaacgaaactaacatcgcatcgggtacaaataaatttctagctacaactacccaaaattccccatctcgttagaaccgtcccgaggagatcttcatgaacagcatcttcgatggctacgaagaagagatgatcggtatacggctcgttcttgcttgggaaccatcaataatttctttccatagcaggagagatgt

SEQ ID NO: 16802 - DNA, 548 bp, Arabidopsis thaliana
tgatgccgctgctatttttgccaatgcacatctacatctagtacaagctcagactctaattctgtccaggttcgtggtgtctctcacagcacgggttcttctaataatccttgaaaattccaccggagtactaagttaacttgtttatcaattacagcggaaatgaccaaatactacccagtaaatatgaaggcaaacgacttcggaaaaaactgcttaaatgtgaagtccgctcattcaaagacaacggccattgcctttttctggtatatctgtctcggttcttctcactctgctgtcttttgtgcgaatacaactgccatacactaaatttcatctcattcaaagatgtaatctgagatgcttcatattacatctccttttgctttcggatatgacaggaggacggcattgatctggtcagtatcataaaagccacttctttttaccggcgtgggtctcgtcaggattacgtctccgactacatcccaccaaccatctctgagtttaacaaaagttatgggatcaacaggttaatacacatacaa

SEQ ID NO: 16803 - DNA, 530 bp, Arabidopsis thaliana
caatggatttgaccacactgttggaagagactttttgataacatgaagccatctatacaaatcatcaacactaagagagtgcccggctaaatgttgaatacagtgaaaaaaaactgctgcattccacatcatagtggcgtccttggatattatctcctccactgatcgcaagagaacacataataaacccgccaccgaacacatagctctgtttcttgtgcaagaacgtaaaatcgctagtaatcctcgaaccatgcgggtccttggggacatgaaactgacactgtcaccagaacaaggtaggcaaggaataagctcgccagaaacaatggcagcacgagagtttaacatgacactaggagggttgctactaaggatcagctagcaaatccggttagctactcagtaggctgtatacattggtgcttgcctggtcttcaaaatcccgaggtgttttcgagcccgcctcgggttgattttccaagtcttatcccgaggcgttcgaggtcgggtcggggattctttatgag

SEQ ID NO: 16804 - DNA, 995 bp, Arabidopsis thaliana
  unsure (1)..(995): unsure at all n locations
ctttcaattcctgccacagtatcttacgttcttcggcactgttcaacgcataaacaaaagagcaaaagatttcatcttgatggttttcgagtttaactgagcaggtaatcaactgagcattcttatagaaggggcttagtcttgtactcgtacgccacatgacccatatgcggcctcttggattatgctcgtaatttgttataaccgactaattcttaaaaggtttactcctcaaactttctgctttcttctccttaacccttgtctctaacaaacaaccaaactgaanattgagtttcctccacccactttttgattacagcatgctttgatgtcttatttaaacctctaacattccatgagaaccccgacattaacaacgtttaagagggggtttcttggtctgatccttagggatatcccttgtgaaaattgaagagttagtagaaatcactttatgagcagattttgatgcacgaggtaaagatgatcgcataagaatttctttacttcctcgtggtctagtctccttatcttcagcctcctttgggaactcctttcccgtgtctatctctgtcataacaggctctaaatctccattaactacttcctttgattccttttcttctcccaaaactttctcttctcccaaagtagagaaagagttagataggatggatacctcaccaaacttaagtccttctgcttgtttccccggactgcggcctgtatttgcaggtataatccaaccctcatcgtccttattgttggtcccctcctcttttccttgggcaccaccacttcttgtggcccctagctcaatttctttaaattgcaggtctctttctgcaggtgcaaaaccaagctgctctgaaacactttgtatggcagaggaatggtccgcattatcgcttcgcatcaacttgggacatagctggaggtgagatacttaagtggacttgtcttcggggagagcatgtgcacgtagatgaccc

SEQ ID NO: 16805 - DNA, 888 bp, Arabidopsis thaliana
attgtgacaggtctatgtagagaaatcctccttgcgctcgggacttacacatgcttgtgttatataccgagatttgaaaccagagaacattctagtccgagaagatggtcacatcatgcttacagattttgcctctcactcagatgtgcgtgaacccgactcttctcagatcaacttctccacccgagaaagatcccgcaaggatgtccggtccatacagcacatcgaattgcatacaacctctatgtattgaaccatcatgtcgggtcccatgtttcagccctaggctcttatcaacccaagcaagaaaccaaaaaccaagaaaaccgaaaaggcctgatcttttgacacagcagttcagatcattgcctcagcttgtggctgaaccaaccgaagcaagatcaaattcgtttgtgggaacgcacgagtacttggccccggagatcattaaaggagaaggacatggtgctgcagtagactggtggacatttggggtccttctctatgagcttttgtacgggaagacacctttcaaaggttatgacaatgaggagacactgtccaatgttgtataccagaacctcaagtttcctgatagcccgctcgtgagcttccaggcaaaggagttgatcagaaggctgctggtgaaggatccagagagtcgtcttgggtcagaaaaaggagctgcagagatcaaaagacatcctttctttgaaggattgaattgggctctcatccgctgcgccataccacctgagctgccagatatctatgacaatggtgccacggaagcgacttctcctgaggggaataataggtatcttgaatgtaaagccatcggagatcatcttgagttcgagttgttttagaggatagtgaaagacaata

SEQ ID NO: 16806 - DNA, 880 bp, Arabidopsis thaliana columbia
agaaggaccaacaacattagccctcctctaagaatatcttcatcatgtctgtgaatcttattggagtgcaacaagttggtccagggcaacaaaatcaaattgccactcaaaaacgatatcatcattgctctctaaaaatttgaaaaaagagttttatctattgtgttttacatgttagtataaattaattcggtcgtacattggacccttcttttgtgccatccacccaacgatataaacagttgttgcagagaaatatccatgtacaatggagaatgagtttcaatacaaattgtatgactgagccaaaacacttcttgattcaattcaacttacctcataaaaagacgctagcagtgttacatcacgataatttttccaggctttatggtcatttctctcccatattagtgcagtgatcgttgatccagtcgccctgatgcactacttatatggataaaaagccaagccaaactaagtaaaattattaaagaaacattatgatctacaagttttttaccagaagaatagcatagaagctccaactcaagcagctggacacaagcactagccctcctcttaggatgtcttcatcatgcttgtgaatcttcttggcgtgcagtgacctggtctacggcaactgaatcacttggtagtcatttgaggtcttgtattcctatagttttgaagttattacgagcgcaagaaacaaaacaaaataaaaaaaaaacatagaaacaaacaataaggtatggtagtcgtacctttcaaatacaagagaaagggatgatagtattgtagctgcgataactagacgctcagcaaacaagattctcggagaaatctccgttatctagaacatattttgcaatgattgaca

SEQ ID NO: 16807 - DNA, 465 bp, Arabidopsis thaliana columbia
gtttgttaatcatctgtcttcaacatgtttgttaatcggagaaacccaacttaactaacccaatctcttgtcttgtttcaccatcaggccgtagcaaagcagcttgcagaactaagcggaaagggagtaaccacaatcattggaggaggtgactctgttgctgccgtcgagaaggttggtttggcagacaagatgagccacatctctaccggaggcggtgctagtttggagcttcttgagggtaagccacttccaggagtcctcgctctcgacgaagcttgaaaatcctcacgttggatttcatcgctattctgtgttgttatatgcataacaagtcgtctggttatcctgtgaccagacgagcgagccattatttatcagcttgagattttcgtctacggctctctttttatgagtcttttagtttggagcctttttttcataatacgagatgctactctgatt

SEQ ID NO: 16808 - DNA, 609 bp, Arabidopsis thaliana columbia
catatctcattccatcaagtacatacaagtctttgtgttaccaagcatatcaagatctcagtatcacctgtaggaaatggagcaaaagatttagcacaaccctctttgataacatccaaatcatctgatataacaacagatccatcagcagctatgccccagtatagcttcacccctccatcagatccctacatgaattacatcaaattgacttattcaaatctttaaacattgaaattgagttccaacaggcgtggactgattttgtgaattagtaccagagcagtgaagacagagccggctttgctatcataaaccacaaaggaaaagctaccgtctaagtctttgacgacctgatcagctggataaggacctctgtctctaagagtcctataagcttcgatcacaaacatggcctcgtttgttgtcttggtgagacatactgtttgtttagctgacacagattgttcaagctcccaaagaagagacagtagatgtcatcaaatccacaaaacaacctaacaaaaccagaagattaatggagcagacaccttagaacagaagaagattaagcaagatttgtgtatgtgttacctctggtggatggag

SEQ ID NO: 16809 - DNA, 332 bp, Arabidopsis thaliana columbia
cgagttaagagccattctttagcaaatcgatcatcatcatcatcatcaaatgactcagctccaggtagtggatttggtattacagcaacaataaaggaatctacacgataaaatcaagacttgtgcataacctaaagacgcatttaacaaacacagataagcattgatgcttataacattgtcagcagaacctgtttaccttggtccttgagcgtaacgtataaatcatctccatcttcttcgtcttgcaatgcctttccacgaagaatcatccttaaagttgaagcgggaaatttacccttttccgcaattgcagtttctcaaatcacgaa

SEQ ID NO: 16810 - DNA, 450 bp, Arabidopsis thaliana columbia
agtagagagatcggctttacccacggtgacgttattgcaccattgaactcaccacgccagaacccgtcacatcacccatgcgggtaaagtttttatcccctactgcgccaaaaacctgaatatttggcagttcaccgattagctgattcggtagttcacccagcgccttaataacgtcgttgtctttccaggtggcggtagtcaccaccgctttattcaccggcagcgcagcacctggcgacatcatcacccagtcggcaatgttgtctgcctgctccataaaggtgacaaatttttctgctgcttccgtctcttcggtcttttgcccggcggtaatggtcagcgaggtcaacatgccgtagaccgcagagtttttctcggttggcacacgaaaccgacgtttttcagggtcgcttctttaatcacagccaggaaggatataggtggagt

SEQ ID NO: 16811 - DNA, 462 bp, Arabidopsis thaliana columbia
tcaaaaattatgagaagatccacagagcaccaatttatgatagataaacaagtggaggaacacgtttagaaaaacaagccgcgttcttaccttacaagttaaggacatgtcggcatacacgctcagaaggttacttctgcaaaaaacaacaaaacaagattgttgaatatacaacaaatgtttaaccaagaacaagccttaactgttgctgattcaagacaaaacacttgtattctttttttccaacactgtatccaactaagtattctataagacataattcctcaaaactgcataaataagaaattcacctgctaaagagtaggtgatcatatgtgttcttcagttttcgatcaaacctgcaatattagttcacagcagttaagacctgcatgtaatctcgattctcacataatggccaaaagaaaacaagggagataacggtttcactaaccatatatg

SEQ ID NO: 16812 - DNA, 514 bp, Arabidopsis thaliana
tgctcgagaattcatgatccaaagttgaaagaaaggttacgctttattgagatcttcttcattatatttatttgatttgttacaaatctgaatcgattcgtgtgagatgtggctatcttgcatgtttatctgtagaggttaagactaagcttaccttagaatgtcattttacgcatttatgtgaatgagttttgattatttctgtttcagcttcgagaactctccgaggcatgattcctatgtgcctaaattcgaggctgagcttgcacagttttgcgagaagttggtgtgtaatgcttgtcatacttttttttttcttttctttagagtttgattcttctctatgctaagatttggaattggttacaggtgaatgatcttgataggaaagttaggcgtgggcgagaacgtcttgcacaagaagttgaaccggttccaccaccttctctatcagcagagaaagctgaacaattgtctgtcttggaggagaaagttaagaaccttttggaacaag

SEQ ID NO: 16813 - DNA, 378 bp, Arabidopsis thaliana columbia
attttccaacctttgtaattgatcattccaaataatagtatagtatatggggtcataagtaacattcctacccctattcactatctggaagtcgtctcaatctctcgttattattatactattcagtctcagaaggggcgacgaccatagtcttcttagcacattggtctcagtatcaggtatgaacgcggagtcgagatctacggatactgaccgtttgcggatgtctaaggaactgcagtgtgatttgctccagccttagtggtagagttggacactaggatatcctctagccggttagtttgccagctagacttctcaatagtcggatatagtcgaccctgcagcactcatacatcgggtcgcacttacgaggaa

SEQ ID NO: 16814 - DNA, 473 bp, Arabidopsis thaliana
taatttcgtaattaatatttgaaaaattaaattcaatcaagtttaaataatcatcatcaggaataagtaaattagctacgttgagatgcaaactctatgactctttattgtcatatcatctagtacgaaactacattttgtcatatcatctagtttactagctaataataaatatattttctctatccaggactgtaaactttttaattgaaggtttcatgtgtcacacacacaacgcagcatggcatactctacataacattatatgtgggacaggaagcaaactcgatacgtatctagacatcgtacgagatagactaaagtgcaacgtgaccatcttccacggaggagacgacgaactcatccctgtcgagtgtagctacaacgttaaacagcgaattcctcgggcacgagttaaggttattgagcacaaagatcatatcactgatggtcgttagcagacaagatgagtt

SEQ ID NO: 16815 - DNA, 304 bp, Arabidopsis thaliana
tatgctttatataagaaagaaaatgacaagtatgatcgtgaagacaacgccggagctcttcaaaggaaatggagtgttccgtacggatcatctcggagataaccgaatggttagtcgatcacaccgactaggtgatggatcaaagcgtttccttagaatcgctacaatccacttgacaggcttaagtataccaaacaccggtttgcatcgtgagacgaaggctcgagtcatatttagccgtgtgtccgatccggcgggttccatagcccaaaaggtaaccctgtccatttcaagcatactggtg

SEQ ID NO: 16816 - DNA, 724 bp, Arabidopsis thaliana
tagaggatccctgtttccacataccttcgttacggttactcattgtagttgtcgaggacagcggaattgctgagaccgggttcgatgcagcggaatgattgttatacccatcagacccaacaaaactaccaccaaagttgttttcaccttcctgcattaccggcattatagcataaccaggagaagggttatgaagatccgacccaaagtttgctaatggtcgcatttctgctttcgggtttgcctggaatccaaagatgttggaccaataatgatcagccgggtctggtttgattggtataccagtgtggtaaaaagttcctccatggtcattgaccggtgttgccacattgaacgtgagggacggtgtggttagagatggagagtcggatggagaaagatcaacggttttgtcagccgctgcggttgctggagaaggtttaggcattagtccacccacagggagattacagctagcaattgatttgacatcatatcgactgatgtcgaaattggtgactgcatttagaccgcggaatttgatcgctgctatatcataagcttctgcagcttcctcttgagtgcctgaaattccgcatccaaatacttttgtgttaaatcataatcataacaattatttagatcagaattcataaaaatattgatacggactcactaaatgtattcataaaaatgttcaaatgggactcactaaatgtgccaa

SEQ ID NO: 16817 - DNA, 505 bp, Arabidopsis thaliana
cccacgtagaagaagagaccaaagtcaaactcagatctcacctcaccttcttcattttcgtctacttccattggaactttgagctctagagtcagacgaagaacacgtaaaagagtatctagaccttttcttcttatgagtattccacttgaatattgcctttccatcattctcttcttcaccttcttcctcctcctcttcagacttgtccactctctggtttccaattcacctccttcgctctttcttcttcttgctcttcttcatcctcctcgctcgtcccatcactcacagtttggatagattctatcacttttttgctcgttgatgtctttgtgttgcttgcgttctcctctctcctattatatctcattgagagttttgacaggtcttcaccgctctccacggctttcagccactgtaactcgcttagtgtgtcgctgtaaacaatctctttacgttttcgcttacctgtgacactaccagaatggaactttccgttgtc

SEQ ID NO: 16818 - DNA, 730 bp, Arabidopsis thaliana
gctccttgtctcttagagaatgttcttgctgagatggtgatttcagctgttccaagtattgaaatggttcggtttgttaactccggtacagaggcatgtatgggtgtgctacgtcttgctcgtgccttcacagggaaacaaaagttcatcaagtttgaaggttgttatcatggtcatgcaaactctttccttgtcaaagcaggtagtggtgtagctactttgggtctacctgactcgcctggggtccccaaagcagctacttcagatactttaacagctccatacaatgatattgctgctgttgagaagctttttgaggcaaacaaaggagagattgctgccatcattcttgaacctgttgttggtaactcgggttttattacacctaaaccagagttcattgagggaatacgccggatcactaaagacaatggtgctcttcttattttcgatgaagtcatgactggttttcgtttagcctatggtggagctcaagaatactttggaatcacacctgacttaacaactcttgggaaaatcatcggtggtggtcttcctgtgggagcatacggtggaagaagagacatcatggaaatggtaaagctagagttgttaacaattgaaccgaataatcttttgaatttgctgcaagagattgagaaagtcctgatcctttatcactcatgtctttttgcaggttgacccgcagaccgatgtatcaagctggtac

SEQ ID NO: 16819 - DNA, 574 bp, Arabidopsis thaliana columbia
ctggttgacatgaattagtgattcaatgttataccaaaagaatttattaactaaattacaaagtaattagctaacttgcaatcgaaccaatcttttatctcgttcttcttctcagttgaaccttgttcttgcccaggagttttggactccccacctgtagtctgcttaacaggctcaacaataaagaaaactttgtctggtcctttgttgatatacttaaatagatattttatggagccattttggttacaccattccacattgatatgaacattattgatataaccctatttttaccggttttagttatgttttaggtataggttttagagtctatttgttatttgtagagtcttttctagtccttttcaggtctttacatgtttaggattcatttggagataatggagcattctggaggaaaacagagaatttatgttgccaaagaaatccagagactaacaagcgcgtaggtgtcgagcgacaccaatacctgacggcaatttgaaggcgcaatttatttgaaggcgcaacttattgaagttttgaagatttctatattcggcccagaact

SEQ ID NO: 16820 - DNA, 516 bp, Arabidopsis thaliana
agtttcccagtggacgggtactaagcccaagtttgacagataagagttgaaagatttatggatcaccattggcagctctgtaccgctgaattcttctagatccaagagcaatcagatacgcagtcttatcatcaggtacttccagcattatgtagctaatgtcctctactcccgagagataacatggattgtcaccaattctgatatggagatgatcgctttggctctcaaaggcactctccgccaaaccaagaacaatatgtctctccaaggtgaaaccaatgacacatatctctctatacttcttctgataaacctgtgtggatacaagagttggtctgtcaacaataaccacaagagagcacgaggcgctctttgcataggaggtgttgtgacaccgattctgatcgcttgtggagtcccaaagacatctgatggacttgaaccacgggaaatggatatcgagcaattacatcactacgaaatccttgagttcgcaatggttggcgacatgca

SEQ ID NO: 16821 - DNA, 585 bp, Arabidopsis thaliana columbia
cttcatggctacttctccaccacacgatctctatataaaattctccacctccattcctcgccaaaaagaattttatcttcctctttttccttctactaaaacacacattttccttagaaaaataaaccaagtccaagaaaatggacccatggtcatggatatgtgagcttccagaagatcctgagttcagcgagtctgattcacacgcagtgtttcagctcgctggcgatttgacacgttcgatcaaacttagagccgaacggactttgggttctgaccaagaatctcactctctcacctttacagttgtagcagagggttttaacctccttaagtcgtcgaccatttgggtctccaacacatgtcccttgtcgtcggagaaaccgttcctccctcttgttctccagcttcttcaagaactaatcacccgttcccctaccacacacgacggcgcgtgcacaaagtttgaacaacttgaaatcaaaccaagtccagttagctgggtcatggactctcactcacctgaatccttctcatcagtctttaatctaatcctcctcacacgcctcttctggttgtgtgtgt

SEQ ID NO: 16822 - DNA, 554 bp, Arabidopsis thaliana
gactctagataaagatcaagcgaccggtgaggtgacgagagagtattatgagggaatgcgcggtttcatgtatcaagcgacaaacgaaccatttgctcgtgagaacggtacaatattctgtccatgtcgtaagtgttattgagaaatatttggaatttaatgtagtgaagaaccatctttataatagaggatttatgccaaactactatgtatggttacgtcatggagagggttgtagagatagcgcaggaactagtaatacgaattatggtgtcgcaacctagtaattttaataatgatgcgaattatggtcaacaagtacctaatcaatttggttataagcataaccaggaaaatagatttcatgatatggttacagatgcatttcatgaaactattgctgcatttcctgaaaatattagtgaagaacccaacgtagatgcacaacacttttacgatatattagttgctgcaaatcaaccaatgtacgagagatgtagagaagggcattataagttatctttggcatctaggatgatgattattaaagctga

SEQ ID NO: 16823 - DNA, 1164 bp, Arabidopsis thaliana
tccgcaattagtagctgattactaccaaacatggggactttactgctaaaattgttatcaatcacatttttttcttctgattttctctctttccgttgcttgttggtctatagcatatcagcatgccgccagtacagcaatcttcttctcagcaacaagatcacttactatcccagcaatcacaacaggtacttttatgtggatccaatccctcaagtcttatcaagcatgtggttttaaccaactgaatatattctttagtgtctgagatgattgagccacaacttccttttcgtgtatctgatagaacaaccgcaaaagaaaagggccttcctcttctggtcctgctaacagcacagggacaggaaacactgttggcccatccaactcacagccatcgactccgtcaacgcatacccctgttgatggagttgctatagctggtaacatgcaccatgtgaatagcatgccaaaagggccaatgatgtatggttctgatgggatcggtggtcttgcatcatcagcaaatcaactggtatgtttcttaatttctcagaagaatgataacgacaatctagttttcctccaataacatctggatacagcatgcagttgtgttgtgtgaaacaagtgctttcttagcagcttgaatattttttttatatcccatggggccgtgtttctttcagctttcttatgacaagaattaatagctgcaggatgacatggaccagtttggagatgtgggagctctagaagataatgtagaatcatttttgtcccaagatgatggagacggaggaagcttgtttggcaccctaaagcggaactcttctgtgcataccgaaacctcaaagcgtattctaacaccccaaggataagtatgatacaagtagacgatataaatatatactaacacggtcctttttctcgtttcagctttcagtttcaatgaggttagttgtataagaaaaagtgccagtaaggtcatttgctgtagcttagcatatgatgggaagttgttggctagcgctggacatgataagaaggtgcaacttcataatttctgagatacggttggctgataaactggtcatggccctaaaacagctatagatcatttataggtaggtcacattttgtttgtttaaaaacagataatgt

SEQ ID NO: 16824 - DNA, 1035 bp, Arabidopsis thaliana
ctaaccaaaaaatgtctcaataatacataagtgtttggctttgtaaaaggtgagcaatatgacaatataagtgtgacaactgttaccatgtcttcggcaagtctaaccattcccctgcgactacaagtatgtggaatctgattgcgctttctttccttgtagctattgcttacaacctaacagatgaatgctaatttctatagtatatagataaatttacaaattccaaatgcataccttaaattcttggcttgttttgagcttcacaaatttacgccaatcaaaaggagaaatgtttttaggtcgcatgttcatcctctcttggttagtcttagcttctctaatatttgtaacttgccttgatttccaggaccttcacaaacgtcccatctgcctaagcactgtaaccttttgatactcttcatctagttcaaaccttgcctgcaatcaaaaacaaaacagtcaagtactcaccaatatcaaataaacttgtaaattttacacaaagcttacctgaacagatttccagagaactgtcctgagttcttcaccaattttagtccaacgttcaattgtgactagaacgtgttctcttaccaatgcccctacatatgatgccagcttaactgagcctttaccaataggctctcccatgttagtgaactctactcttactctggcatttggatccttggcaatatccttcagcctagtttgtcctcgatgtcgcttacgctttggctcaacacaatcatcaccctcagataaaacaagctctccgtgaggctcttcctcattgaccttatccagatctccatcaaccacctgatccggatctgctacttaatctggttccaaatgatcttcatcattcacctgatctccatcaaccaactgatctggatctgctacttgatttgcatctgatacttgaacttcagctggttctgcatgttcctcatcattgacttgtggttcaattgttccaatatactcgacctcatcattggcattctttgcattgacctttttttg

SEQ ID NO: 16825 - DNA, 462 bp, Arabidopsis thaliana
caaatagtaaggtccagtttgtcttttcatccagatcatctggatgaaaaatgatgtttgtttttgacaaattaacagatcatttggatgaatcatttggatggtccatctgaatgactttgtaaatttagactaatttgtgaaactcatttggatgaacttgatcgaaccatttggatggagatgatttagtccaaaaaaccgcaaaatcatattttcccgcaaaaaccataaaatcatgtttttccgccaaaatcacaaaatcatatttctcgccaaaaccgtaaaatcatattttcccaccaaaccgcaaaatcatattttttccgccaaaaccgtaaaatcatattttcccgccaaaaccgtaaaatcgtattttcccgccaaaaccgcaaaatcgtattttcccgccaaaaccgtaaaatcatatttttcccgccaaaacctaaaattgtattttcc

SEQ ID NO: 16826 - DNA, 1029 bp, Arabidopsis thaliana columbia
attttgcacacttatgtatttaggatcatcttgcatacatattgcatgttttggtgtgttttcaggtgtagaaggagcttacaaggaatctcaaccctctactctatcaaaccaggagggaagcagcatagcatatcactcaaccagttactcgatccaggcaggtacagaggaggcagcagaaactactcgaccccctactcgatcctctactcgaccagttactcgatcaagggcaacccattccacaagacttgttgatcgttcaaatcgtttttggataaagttgtttatcttgtttagatctacattttggtatgatttcagtaatttctgggtttgtgttcttagttatgttgcttgagtagtgattagggttcttgaggatggattagattagggtaatctccaggttagtcaggtggttaagattaggttggatcccttctggattcgttggcccctatgcgtttttcactagctaatgttagaattcgaccctagatatccaacgtccaaaagacgttcaaatggatgcctaatttacgaattccaagagatttgtagattctagcccaagaggttggatgtttagacttttcattgactttcgtatatcgttgcttaagcctaccttgctatgtttcatcaacgagagttgagattaggaagtagtaaggttatgaggatctctgtcacgagagtggattgatctggttatgaatctatcgtctagggtatttgtctttcgcatgttagccacctgatgaaccctagagttgcccttatcaatgaatccatccttagaacttatattcttcttagatttacttgtattcaccccctgattgcacttttatttacctgtcatttcattcacttgttaagctacttgttattgtatttctgttcttaaatttgtcatatgatggttatactagacccaatgatcgagtagggcacttaaattatcattttagttggttgacacttgatttaggattgttactagaaacccaggattattat

SEQ ID NO: 16827 - DNA, 713 bp, Arabidopsis thaliana
tatgtacttcgccacatgctcgtcgttcaatacttccctcttgcagtctaatacaatgacttcccatttcttcaaattgatgacaagcccaacccaatgctgcctctcgacctgcattcggcagtagatgacatcaacctcatcaaaccatttcggctgcaccatgaatgggactcttgtaagtgtggggaagtaaaaagcactcttatctgaagctgcacaaaatttgttgtactggcgtcgtagctctgtcaagaaacgtgacggtagaaaatcaaaacgcaacaacttctttttatccagccgcatctggatgaacctcactaacagatctggtccttgtggaagtcagtttttttattagcacacaccattaatattggtaggcctactaaagaagcagtgagcacacagttttatttgaaacaacactgattgcatgtataacttactgattcatctagtagtgtctgtgcctcgtaaatagttagaaattcagtattctccattacaacgccatcagccagagcataagatctacatggtaccatataccagcaagttagttgcgataacaaattagttattatgaatatatagggcctgtaattacactctccgttccatttttttaagaaaacatttcactctctctggacttggaacagcaaacgggtcaaacggaccaataaaagatggtggtggatttggag

SEQ ID NO: 16828 - DNA, 1123 bp, Arabidopsis thaliana
  unsure (1)..(1123): unsure at all n locations
ctaattgacactgtctcgtcagctgattcgtcccagctagaattgcgttgtgtcaatcgccactaatgtgagtcggtcgacagcaactctgcagcagcgagctccaactcgtccttaacgtttcattctttccagctttcctccttagctctgaccatgatggcgttacagctcttccttgtattagtatcaggggtatcaagaagataaccctcttgtctcttgatagtctgaacagctagagctacttgaacatccagtgtcttcatgtgagagctcaaattgtcgatcttcctattaagatctgtgtagatagcatcaaacttcccattgaactcgacaactagcttggactgacccttaagaatctgctcaagcattgattcaatcttactctcagcagtgagcggaggaggggtttggtaagaagaattaccataagtcctagtgaagttgttctaaggaaagatcttctagaaggcaggttttagggtgaaacctaaagaactctagttccttgtaaacttgttgccctatggctgtccaaatttcttataaactcgaccttgagtgaaggcagtcagcttgtttcgcagctccttagacttagtatcatcataaaagttattcaggaaggctatcttgatgcttctccaagtagtgagtaaaccagccttcaattgcttcaaccaagaagcagctttcccagcaagtgaggtaagggaaaagcttacacagtaagtagttttaagagactccattagctttaatgctcattacaaggccctcaaaacgctcgatatggtcaattggcttttcatgagataagtcatggaaaggatgcttgcctagtagtgcaaagtagcaaggcttcagctcatagtcgtatctctgaaagggtggggggtacgatcgctgatcggttggaatagaacatgttaggcttgttgaaatcccaagagtacgaagcggttcagtagctagtggattagctgcactaagattttgtggttggtgtcgatcagcatagagccgcaccccctttccgaccaacaactctaggatgtgttgggactcctttaagnatgttttatggtgttttggatgttgtgagatgatgtga

SEQ ID NO: 16829 - DNA, 690 bp, Arabidopsis thaliana
aaatattcatacgtatacattcctaccattttcctaccatacctctcctaccattttcttaccatttttctaccaaataatctaactggttcctacaaaatacctacgaacttaataaaaataacattaattacattgttttcagtaattatattaatttcaagaattatattaaatttttttataatcatcaattattaatctgaattatgtataccaaatcaaattgttttacaaataaaaaaaaaaaaaaaaatctaaattaatttgaaaacagaagggtcccttgtgcctctttccaagcttgtctccctaggatttcttagccattccttctccagttccactgccaaacacaagacagtccgtttggtgttattactactactcaagcaagaatcagcaaaaccaaaaaactttgcagataaatcgatcctgtttgaaggagatatgggggaaaagaggagtttacttaaaggtcttttgaacctcttcaccagttactgcgtttgtagatgagtatttgtttcttccacggataaaaactcgtgtagttgcgatggcatcactgcaccagttactgtgtttgtagatgtgtttttgtagcttccacggataaaaactcgtgtagttgcgatggcatcaatgccttctgttactgcattcattgagtactcagaagagttgtat

SEQ ID NO: 16830 - DNA, 606 bp, Arabidopsis thaliana columbia
actaggtatctatccactcaacatgtacttgttccttctgctcgtgcttccagatctcaagggaatgcatctagaaactgtgatccaccctcacctaccagtcaaaaccaacaagccggtttgtctcctccaccatccaattcaaacacgcctaatcaatctcattcagctactcaaccaccaactgcgcgtctcaacgatctaacattggatgagctcctttgtaacaccccaaacccaacatcaattgcccatcctatttgttttgtcagaaagcaaagcccatggagcccatttaaacccaagtgaagcaactccctaatgttaaagggttttgttacgtgtgttgttggttgcacatatatataggtgaatctatctcccttttctctgagccactaaaggaaaccaaataagaatcttgagaaagcaaatccaaagcatcaacacatgagttctatagtggggtcgttaccatatccgagagagaagagagttcacaagtgaaggaaaccaaagcgattcatgcaaccgttcctaaaccgaggtcaccgcgtcgtcttaatcttaaccctaattaaaggtcagacactaccgttgttgttg

SEQ ID NO: 16831 - DNA, 520 bp, Arabidopsis thaliana columbia
  unsure (1)..(520): unsure at all n locations
nnnnnnnnnnnnnnnnnnnnnnctaaagggcaatcgcggcgtcaatacgctcatcatcggaaccttcagtgatgttccagacgcgttcagcatattgcagcagcttagcgcgcttggtatcgcgtttttcattccacagtgcaggcaggacgatagccagtgtttgcgcgtgatccagaccgtgcatcgcagtcagttcgtggcccagcatatgcgttgcccagtcctgcggtacccagcgccaatcaaaccgttcagcgcctgagtcgccgcccacatgacgttggcgcgcacatcgtagttttctggctctttcagggctttcggaccatcttcgattagcgtcacgaaaatgccttctgcgaaacggtcctgaattttggcatcaaccggtttggtaacatactgttccacggtgtgtacaaaggcgtccactacgccgttagccacctgacgcggcggcagggtgtaggtataaactggatcgagcacggcaaatacaggctgaacatgggcagaa

SEQ ID NO: 16832 - DNA, 1094 bp, Arabidopsis thaliana
  unsure (1)..(1094): unsure at all n locations
taaccatatacttgccaaatcccctatgcaacaaatccagccaaaattaagaaccaaacccttggccggatagaagcaaagccaccccaaaactaaaaccactcaatcaaaaaacaaagactttcacttgaaacaatgaaacattttgatcttctctgatttcacaacgataagaaacaaacagattctccaatttttgaacagtctcaatcttcttgacttcaacgtgagacaaagcaaacacaaaaccattgctaaaacatattttaacaagaaccaccaatgtacgtttatcttagtcactgaatcattacccaattcaatcaatactgaagacttttgaaccaaaaaacacaaaaaggtcaaatcttttccttaaaaattgaacaaaggtcacgtctttaacccatacctaagcaagaacagtagaaaacctagaaaaatccaaaaaagaaagcaagaaacatacttgatcttcgacaagtctttgagggtatcaattgaatccttggcgtcgcagcantttctgtaggctttaacaaatttcatctcctgatattcggacaaacccttgggcttatgatcgcgtttgttggacatgggcctagcccttatatcttaagaggcccaaaacagatatgcacaagtttaaaaaaggcttcaactactaaaaaggcccgttaagtttggaagggcaaaaatataatttacagaggagacataagggattttagggtttagattctctataaatactcaagcattattgggaaggggagaaatccagaggtgattagctgagagacaaaaagaatcgttgccttgcccagaatcgttaccttgcccgaaatcgttgccttgtccagaattgttgccttgcctgaaatcgttacctaacccgacatcgccgcctagcccgaaatcatcgcctcgcccatttctgcactttgtctttctgcttttacgattaagtctcggttcgggggatagtctataacctccactcaacctagcagccatccgtgccgagcaggatccctcgcgccgcatcttgttcacaccagtcacaggaggcgaaacggatcatgttcagg

SEQ ID NO: 16833 - DNA, 1110 bp, Arabidopsis thaliana columbia
tatgtgagccttttaatccccaacttcttcattttcgttaatttatagtggtttaaaataaattgaaagctgactgatggggatgtatataatgatagattcgtcgtgagtgggtggatacttgtggctgtgacatttgttctttgtggagtctttctgatcctaaacaagtaagattttgctgttctgaatgtttgttttctcttgccttattaagtagactcgcaaatgtagtcaactaaatgtcattgttttggtgtccagtgcaatttctgatacgtgtgtagcaatgaaggaatgggttgataatcctcacgcagaaacagctctcagcagcattctcccatgcgttgatcagcaaacaacaaaccagactctttcacagagtaaagttgttatcaacagcatcgtgaccgttgtaaacacctttgtctatgctgttgccaatacaaacccagctccaggtcaagaccgctattacaaccagtctggacctccgatgcctcctttatgcatcccatttgatgcaaacatggaagatcgccagtgctcgccttgggaactatcaatagaaaatgcatcatcggtactttcctactcacctatctttgtatatcttgaacaaaacaccaccaggtctgagacatgtcttactaaacttctcttttcaggtctgggagaattacaaatgcgaggttacaccatctggaatctgcaccaccgtggggagagtaacgccagatacctttggacagttggtagcagctgtgaatgagagctacgctctagagcattacacgcctccattgcttagcttccgagattgcaactttgttagggaaacatttatgagtattacctcagattactgtccaccgttagtacgtaatctgaggattgtgaacgcaggactcggactgatctccgtaggagtcttactatgtctggtgctatggatattctatgcgaaccgcccccaaagggaggaagtgtttgcggatccacaccctcaaagaaaagatgatagctttggtaacggcttggatactcatcactcagatgacgaacctaagctttctgtagaatgcgtatagtatagaggtaacttta

SEQ ID NO: 16834 - DNA, 485 bp, Arabidopsis thaliana columbia
aaatattagaactaaatttcaaataaaaataaatacaaatttaagtaaaagaatattagaaatatatttcaaagaacttttttacttataaatatataatgtatatatttagttgatacaattatgtaattattattcttaaggcaagtgagttgggagataaagtgtcttcgttacctaaaggtaaaactccgtcacttttattgccttcaattccttatattcgtggaaagaattggccgatcattcctaattaagcagcaacaggcaacagcgttagtggatatggttgacgattgttgttttttttcttcttgtttttgacatcactctacgctctgttttacactatgatgctctgtttgattgttttctttaattggtgagtttcaatttagacaattttctaatctttttttttttactatgaaaaatgaaaattatatagtagaccagcaaagtcaaaacttattgaattattgatg

SEQ ID NO: 16835 - DNA, 465 bp, Arabidopsis thaliana columbia
caggtgaccaaggatcaacgatggtcagtctgatacctctgttggtacatcttccccttcttttttcagtgcctaattctatctgtatttttataccagtttgcgtttaacatggaacaagggcttcctgttttgcccgaatggttatgtttcaatcgagtgactggacgtgccaggaaaggcatacacattggaccagctcgtttcctttttaggtatgctaacttcctttgaggcatataattttcttgaggtctctatttaccttttgggattcgaatcatcatttctaaagttttatatagtgtatcttaccttgttcatgtttatagtctgtctggtggacatgtggtgggaaaattttcacctcatgaagcattcgtcatcggtggaacaaacagcgtaagaggttacgaagagggcgctgtaggatctggtcggtcatatgtagttggttcaggggag

SEQ ID NO: 16836 - DNA, 565 bp, Arabidopsis thaliana columbia
catcccctcagtcgagaagcttttgatctctcccgcaattcgcttgacaaaggtaaaacaaagaaagatattctagtacacacaaaagcaaacggagaaattccgcacaccaaaaagcttccaagagatcctgatataaataatacgtaccgtaggaaattcagaacaatcaaaattttcaatctggctaataccactgttgccttgtagcaaattctcatagaaggtatgtgggtcatgacccaatgatgtttcaactcccatgcctgtcactacaactcgacgctgctccgtaggtggtttcttgttaaccgcagcttccttttccatctccatcactgccatggctccacctaaaacccacaaagccagttgatggtagataaacttaatcagctactatccacaaaccacatctcaatagcaagataaacaaaagaatcacagccaacttcaaaatttagatataaaagttcactgccatttggtcagctttcgaagctctgtatcatctagagactaacctcacagagtttgctttcatatgaaagatgataaaacatgg

SEQ ID NO: 16837 - DNA, 531 bp, Arabidopsis thaliana columbia
gagaatggcccgtcaatgacgtgcctcagcctccttctacgggatctggatggccggaatacaggccgtgtaaaaagactcgacctatttcggccgaggagaaagagaaattggcggcgaatatgcttcagagagatatccatcgcacctgtcgcgagttcttcggtcgaaaatccggtgaagaagatagctcagtcgccggaggagatgaatcggaaatcgatgaaggagacgaagatcagtctttggagaaagaagaatcttcttcttccaaggagtttcagtttctatcgagagtttttgaagagaatgtgaagttgaaggaatactatgagaagaacactgggaatggagagttttggtgtttggtttgtggtggcattggagagaaaagttgtaggaagttcaagagctgcttagctttaattcagcattcacttactattcacaagacggatttgagaattcagcatagagctctcgctcaacgttgtctgcaatgttcttggctgggacgttacaatccagttg

SEQ ID NO: 16838 - DNA, 453 bp, Arabidopsis thaliana
ccttctccaactccttgaacttcattttcactttgagcaactcaagcttcaagtattggttttcccggtttagtttggagagttcattcttgtaggagctgagctcaggaggagaaagagttttttctgctgttgctggtgctggagaatctgaattgcttaaattttcttggaaacgatcgttttgagctgcgtgacatacacatctcgcgatactgttttacagtccattaagctacaaactttcttcttctccacttcacttatattcggatgtgtctgcaccaacaagattaaacaacattttctaagatctttaaacttttcaagatataggtcagaacattttgataatgttaaaagctctagtttattcatcaatatagttttagtgttatcaaataaatgtataccttgaggaagatgtcaatggctcgatacatcctagactgt

SEQ ID NO: 16839 - DNA, 499 bp, Arabidopsis thaliana
ttcccgtgcgaagagagaagacaataatcgctcatcattctcgcagagaatggtagtagataaatctttgagcataaagatgacagaagtgaagtcgaagcacggggggacacacggtgttgtatgtgcttcgacccggtctcgataagaggggacactgtagtggtcttcttctgctgccatgcttaccacgagacgtgcctcatggatgcagccttcagtaacaacaatcacaagacaaccaaaggttcttcggggtatgaatatagctacgataacggtgtggatgaggaggaagaggatgaggaagaagatgaggatggtgatggagacagacctgggcggtcgcgtttacggtgcatataaagtactactgccgccgctgcgtccgctcggtagcgacccctttaatgcatgtgtttgtgaagtatttatggtgtgcttcgaacatatatatatcgaccaaccccagcggacatgttcattgtttgtactgtag

SEQ ID NO: 16840 - DNA, 618 bp, Arabidopsis thaliana
agataagaactcaaagcatcatttggaaatcttaagttgtactggtatcagctggaaatcataccatcacaagtagcgctgtaatgtacgtcgaagaatgaattcaaagcttactttcacaaatggagttctaagcgcactgttcttgaagttttgagttctatccggagagcgagaaggtagaacccaatttctgacatggaaaataagaaagatagttaactataccatgtgccataacaagctattacctaggaaagttgaacatcactagacaaggacatactctttgttgtcaagaattgcaccccagtgtaggaacaatgtgtcacttgtataagctatctggatatttacttctcttacagttgtagaagtgacttcaacctattcaattacattcataaaacctaccattaagtctacaaatgccaacaagatagacatttccattatttgtaaggatatacttaccagtaaatcgatatttccgtcaagactaaatttctcggctgcctgttaaaggatgaaactttttagcacacatgtcgataaaataactatcttatgcattcaattggaagacaatgcatatgattcaggcaatgaaaaagtttt

SEQ ID NO: 16841 - DNA, 542 bp, Arabidopsis thaliana
cagaacttgaaatcgtcgaggggtagaaatcacgtaaatctaaaactggaaaatcccaaaagaataaacttatctgcacatttcctatgcaatctttgctcaaaaaaacgggacaaagcttcatcatgatccaaatccatttctgattgattcaagaacctgcacaacctcagccatgctcggtctcttcagtggattctcggacgtacaaaggagtcctaacttcatgacttgaatcagctcattctcttcaaactctctcatccttctgtcaaaacaatcagaagctgaaccagtctccaacaaatccctcacatagtctctcaagatcaagacttggttttccgatggagactccaccggttttctacctgtaaccagctcaagaagaaccacaccgtaactatacacatcgcatttctcactcgctctcaaactctgctgagctaactctggagcaatgtacccaaccgcgttgtggaacttcttagtcaaaccaaagctgtccataaccggaagaaacttttctaactccatatatc

SEQ ID NO: 16842 - DNA, 313 bp, Arabidopsis thaliana
gcgaagttcatcggatttgctgaatgtattccgaaacagtctaggaatgtatcgagccattgacatcatcctcaaggtatacaattagctgataacactaaaactatattgatgaacaaactagagctgttaacattatcaaaatgtgctgacctatatcttgaaaagtgtatagatcttagaaaatgctggttcatcttgtcggtgcagacacatccgagtataactgaagtggagaagaagtcagtttgtagcttaatggactgtaaaaagctatcgcgagatgtgtaagctcacgcagctcaaaacgatc

SEQ ID NO: 16843 - DNA, 435 bp, Arabidopsis thaliana
ctccttgatgaaagatacgaggcaaagctatcagattacggtttggaaaagtttcttccggttttgaacagctccggtttgactaagttccacaatgcggttggatacatagctccagagctagctcagagtttgagagtgagtgacaaatgtgatgtttatagctatggtgtggttcttcttgagcttgttacaggtagaaaaccagtggagtcgccgtctgaaaacgaggttgtgatcttaagggatcatgtgaggaatttgttggagacaggttcggcttctgattgttttgacagaagattgagagggtttgaagagaatgagctgattcaagtgatgaaattaggtttgatttgcacaacagagaatccattaaagagaccgagcattgcagaggttgtgcaggttcttgaactgatcagaaatggaatg

SEQ ID NO: 16844 - DNA, 579 bp, Arabidopsis thaliana
tccgtgcggcataacgctggcggcgttggcgtataccagcacggtaccgaacagaccaaaagcgacaccaacagtacaaataatgatgtacttccatgcagcttccagcgatgaacgctgaccgtaaatgcctaccagaaacgccgagcttaaggtggtggcttcgatcgccgcccacatcacaatcaggttattgctggtaacaaccagcagcatggtgaacaaaaacagatggaagaaaccgtagtaatcgcacagcgtaacgggtgaaagctcgccgtgtgccacttcatgacgcatgtagccaatcgagtaaataccggtgagaaagccaatcacaccaagaatggcgaggaacaaaccgcccagaccatcaatatgagaagtggatgctcacagtcagctattggatggatcacagggcccccaatggaggagctagagaaagtatccaaggagctaaagagatctgcaaccctataggtggaacaacattatgaactaaccagtaccctggagctcttgactctagctgcatatgtatcaaaagatggcctagttggcatcactggaaagaga

SEQ ID NO: 16845 - DNA, 775 bp, Arabidopsis thaliana columbia
cctgaatctttccagctcttgatagctcggcttatgaatgtcatgtttttgtttgttttgggtttagggacgataatgtgcttccaagtgggcttcaaatcctgctagcatgattgctcaagctttaacaatgtacaaaagccttgtcatcaatggtccaagcaaagatcaccaagaaacacaagcacttgatgaaacagatttggaagagttggaagacatgggtgagaaacatatatcagaaggctctaataaccgatcaggctcaatatcatttgacacagagaaaccaggtcacaccggtgaaccacgattttctcttcagaaccgcaacaaggatccgcagtaggcagccgaaccggggatgagataaattctttgggcttgagaaaactggaaaccatttttcatctttcaaatatgaggcagtaaccatcttttccgtttgaatagctagaatatcatcactttgcatatagaaacgaatctgaacatctgttctccgataagaattttcctactggatttgttatgaacatggtccttgtgttcttattcacctttattcccattgcattgcttattacctgtacccgttattattcggttcggttgcagagtattgcaatctaaccaggaggagcttgtgaatccatgagatgtcagaatttgccagcagaaaagaagccattgccccctaaacaggatatagaagaatggtggagataaaagttgtccccggataaataggtcccacagagaatcaaaggtgtat

SEQ ID NO: 16846 - DNA, 528 bp, Arabidopsis thaliana
gaggctgatggagagactactagaggctgtcttcaggtggatatatctaaagcctatgataatgtcaactgggagtttctcatcaatattttgaaggctcttgatcttcctttagtctttatccattggatttgggtctgtatatcctcagcctcctacagcatagcgtttaatggagaattgattggttttttccaaggaaaaaagggcattcggcaaggagatccaatgtcttctcacctatttgttcttgtgatggatgtgctatctaaatcgttggacttgggagctttgaatggtctctttaaccttcatcctaattgtttggctcccatcatcactcacttaagttttgcagatgatgttcttgttttctcagatggtgctgcttcttctatcgctggaattttgactattttggatgattttagacagggttcaggtcttggaattaatagggagaagactgagttgcttttggatggtggtaactttgctaggaacaggagcttggcagacaatcttggc

SEQ ID NO: 16847 - DNA, 805 bp, Arabidopsis thaliana
cgtcaaccattgcaaactccaagaattcgaagtgacgtagctgctcgatatccattgctcgcagctcgagtccatcagaagtgattgggactccacaagcgatcagaatcggtgtcacaacagcacctatgcatagagcgcctcgtgctctcttgtggttattgctgacagcccagctcttgtatccacacagatggatcaggagaagtacagagagaggtgtgtcattgatttcaccttggagagacatgccattcttagtttggcgcagagttcccttaagagccattgcgatcatctccatatcaaagttagtaacagtccctgtgatctctcgggagtagagtacattggctatggaacgctggaagtacctgatgacagggctgcgtatctgattgctctttgacatggaagaattcagcggtacagagctgccaatggtgatccacaagtctttcaactcttctctgtcatacttgggcttagttcccgttccactgggaaccaaacaatccttccaagcgcttgattgataacctatactcatgaccatacacagagaatctcaagaatcccaatccttcacaatccaactcatcagaggtcataccttggtagagctccacttgcagcgtggagaggaactgaattgtctcatcttcataagctacatacggataagccatcagagtgtccagatgacaactctggtacaggtgctgaacatcctccaacaatccgagatgtgaaagtgtggtcgagcaagaatacctcgtgctacagaactcattcagcttgaaga

SEQ ID NO: 16848 - DNA, 510 bp, Arabidopsis thaliana
ttcgacacgtcatcactaaaatcaacggacaagatcggctcatgcgcatcctctaggttcgctttcaccgtatctcgcgacggactcgacacagtcaaaccatggtgtctcacgttgactgacacgtcatcaaccaaactaggacacaacacaggcgcgtacatctcaccgcttaacgcgcgttctttctctttcgcgtcaccggcggctagaagcgagccattcggtggtccaaggaggagcttcttcgcttccactccgatgccagctaggaccaccgaccgtcactctatcggaaccctacgggacccgcggatacctcgcccgtctttcttccaatctccggcgattttcttccggcgagagtcacacgtcagcaaaagtgagaaacacgagattcgttcgttcagtttctcaagttttatcgtagaccgtacgatgagatgacttataggtcaaagatgaggccaccgctcggtggtcttgtatccattgtttaactcagattag

SEQ ID NO: 16849 - DNA, 984 bp, Arabidopsis thaliana
  unsure (1)..(984): unsure at all n locations
aaaataattatgtggaccatctccggatttgtttataccgaggttgtaacaataatgattaaggggtttggggagaatggagtaacttctttattaatgacgaacggaaagacagtaattaacagaacggaaaaccgtaagtacagaacggaaaaccgaaagtacaggtcggaaaaccgatattaatggtcggaaaaccagaaaatacagaatggaaaaccagaaagtaagagataaagagctagacagcaattctctcttaaattctctgagtggtgataggttctggatctctcttcttagtagtgtctcctcttatttataggcaaggagctgatctagggttctcttagtctctcttgcgatttctctgttttgcccttctgaatttatcgggttggaccaagccgtgatgggccgagcagtcattctgatgggccgttgttctgatggccgttcttccttgttaggagctttattgacttgttctatttgtgtttgggccgaattgggcatggagggcaaagccgtatcccacacctctataaactcaaacattttacccaaaataccttaaaaagaccttaaaattagcaaaaattgggtctatgatggtttcacctgtttgattgtcgatccatgattctagtgtattttgcatgacttctgcttagactctgttgaaaggtttctcttagattttgtcatgatggtgtgacttgactgttttactttctcaggagaatggggtcagagggaaacatgaagaacttggttgtttcacaagtaaccattagtgggtttggggaatcaactactacaaaagaacttacagattaccttgaaaacgaagtaggacaactcatttgctcggtatgagaataaattgacaatagtcttagattatctaaagacacaaaggatgaatacagagcacgtgaggccgcagacttacgttcanagtaggggtgcaattgaccccga

SEQ ID NO: 16850 - DNA, 789 bp, Arabidopsis thaliana
catgtcggcataagatatttttccacaggaagtcctcaacttatttctcggttacctgttggaaggctttactcaatccatttagtagagtagtcggtaaggaccagcaggttttttagtctcttcttcccaccgaaggcttccatgggacctacgacatccatggaccacttcatgaacggttaaggagaagatatcgaggacatttcctcgggaggttgatggagagtaggtgcgtaaagttggcacttatcgcacctgagtgagtgagctaagcaatcggctagcattgttgaccacaagtagccttgctttttgattctgagggcgagggtacgtccactacagtggctaccacattgtctcccttccatgatgcagtaccttgcactctgggctttgagttttctggcctcccacttgtcgggaggtgtgatccctcgtttgatgtaatagatgattgagattctccagtcgttggacggttcaggttcgtacggaataggttgttcaagggtttcgagctctggctcctcctccgttgcacttgcctccgcagctgctgcgagagctctagctgcggcggtggtgcttcgggttactcgcgtgaagttgcaagttgccaaggtttccaacccagcatgtttgaccgttaggtcgatgctcgggtgttctattccttcgaccgggataattcttttgacgaaaggatctgacgtaaaagcgagagctgccaaggcgtctttagaggtgtattctcctctggggatcctagttaatttaaacgat

SEQ ID NO: 16851 - DNA, 571 bp, Arabidopsis thaliana
tcaccagccttctgtaaaaagccagagatctcatttctgagtcttgcagttctggcgttggagaagaactttgatagaaaggccttcttgcaatcatcccaggtggtgattgagtcatggggcagattcttctcccaaatgtgtgctttgccgcccaaggagaatggaaacaaacggagattgaatccgtcttcaatgacaccattgatttttgttaggttgcagagcctatcaaattcatcaaggtggttgagtggatcctccattggcagaccatggaatttgttcccctgaatcatcgagatgagaccactcttaatctcgaagttgttgttctggatcacaggaggtgcaatttctttccgctgacggagatcacgtggtgcatccccagcaccaatgttggcagggccattttcttgattatgttcgtcatccatttcgagtggttgttgtggtacaaggttgactgtgtttctcctttctcttagttcgcaagctatgcggtcgatgtagtcgttgaaaagaggttctgattgactgttgatcgagtttgcatacagaagagggg

SEQ ID NO: 16852 - DNA, 880 bp, Arabidopsis thaliana
tagaattttgtatcataactggactggaatgtgggaagtatcccaagaagaaagccgtggaggtgttataaaggtgaaacttgggtgtaaaagtgtttggaagactctgtttaggccgaggtttgggaaggaaccgaatccaactattgctgaattggtgagctgggtgaaggacggaggaaagcatggaagggtggaagcaactggttctctctcttacaattctggtagatggtgtgatagcgtcccacaataaccccaacagtccgattttgaagactgttgaaaagacgaagaacgtggaattgttcttcaaatacccatggggaagggtgtcttttacccgtactttgggcaggatagcaaaattacaaacaccttctgatgttgaactactgataaggtgtttactggatgggtcttatgcactttatggcttcccattagaactccaactatttgcttttgaaacactctcatccattgctaagctagtacatgatgatcaagctaacaggacatttactcagaggtctatccatcggctttcctcactgcaggcaatccggacatctagcatattggagtgtgaggctgctgatgaggtgtgttcaattgtttatgtacgtacataaaaagtaagtgtacattctctatggttaacaaacttatttgtgtaggttgaggtcaactatattctgaaaccatcggacaatgtgtaggctgatgatgaagttgatgatccaaaagttgattacattgagcgactgttgatagatgggcacgagtggcaggaggatgaatgggatcgaggttatactggagtaacaaagcaggtgcgcccacaacaacaagaagagataggtaagtataaatgttg

SEQ ID NO: 16853 - DNA, 621 bp, Arabidopsis thaliana
cccctcgtcgacttgaccgcgctctagtcatctagtcttctcgcagcctaggttctcaatggcagatcaatagcagccttgggatctggcgatcaaagccaggttcgattccacctcagctgcttgcccctccagtaccgtgtattcctttttggcgacccacttctccttgatcccagccagcagcttcgaatacgcagcagccagctcaaccttagcattgtgaaccgccttcttcgtcccttgtgcaatcgaagtcaggttcaccaccattttggagagctcttccctcttctgctccaagcgatggatctggctcctcgtcgtctgctggtcggcttgcaacccctcgagctccatctccatgaacccgatcttctcagcaaaacctttctcgaggtcttttgaagtggacaactccattttcagcctctcgatcttcgcctgaaataacaatcaggttagaatcatcaaatcatcgacgaattatttataaacaagtcaaaactgaggtgtacctggaacgagacttcgcgatcctaaccagccttcacactcgacgtcagctccaggatgagggcctttccttcttcaagctcgttcgccgaggggacctggctc

SEQ ID NO: 16854 - DNA, 646 bp, Arabidopsis thaliana columbia
caaaaatataattctacgatcagaataaacaaattttgatattgccaagagtccatggacagtttatgaaacaaccctgcttgaaatttttagtccaccgtaaatgaatttaacatatataggctcatgtaaaaaacaaattctctcattgctatattcaaaatttacttgtactttgtatcaatcaatatggcacaaataatcttattttttaagttaagtttactaacgtatataatgtttgtttcagctgtgaatcagataagagcacagacatgtgacgagaacctaagctcttgtgaaaattgcgaccaaaggtgcaaggccaaacacggaccatcgtccgtaagcaaatgtaacggtccggatgggacgtgcggatgtgcctcatttaaaccagccaaactgtgcatcggtgcgactgatatgtgcactgataaatgtcctacaagttgttgtgatagacaatgcgctataaaatataagaatggaaaagggggttgtgtcgactatgctggttataggatgtgcatttgcgagtacacttgctaaaacatatagacaaaatttgtaaaaaaaataatatggtgatacataattgttaatctattcaatacgtagataattactaagagaatgttgcacg

SEQ ID NO: 16855 - DNA, 1285 bp, Arabidopsis thaliana
tacaatcaagtaaacaaattagagccaacacaagagagttgtagtgttgttgagtgaagaaccagacttttcaagagatgccagagccatgattcatggacatggagttcctgaaaaaatctggacagaggctattagtacagcatgttatgtgatcaatcatgttaatgtgaggattggaggcacattcgacaagttggtcaaagcgtttgtgaagacaatgacaactgagttcaggttgagtatggtaggcgaacgtaagtactttctggggttgcaaatcaatcagattgatgaagggattgctatctcgcaaagcacctatgctcagaacctggtgaaacgcttcgatatgtgttccagcaatccagttaaaactcttatgagcactaccaacctctgcagctgctgtactaaatttctttggatgaaacacatgggtttggattaaggtatgtctttttctgaccctttacttgttaaatgtgataatgaaagtgctattgtcatatctaagaattcggtacaacactcaatcactaaacacatagctataagacatcattttgttagagaattagttgaagaaaaacaaattaccgtagaacatgtgcctactgaaattcaacttgctgatattttcattaagcctttggacttgaacatgtttgtgaacttgcaaaagtcccttggtattggtgaagtctaactatcttcttgatgagtgtttgtgctgaaacagggttggttgtacagtgagaagcaagttttcatatctattttacaaagtgtcataaccggttttcaaatcttctgctgtaaaaagttcaccaagagaaagagctacccttcatggttcggagatgcaaagtcagtaaagtgtgtgacatacatagtgtgtagagcattaaggaagggatgaaatgcagaaaggggcagaaagaagcatttcatttcataagatgaagcatgagcttatctaagacacgggggacaaaggagaaatcttgtcactaacccgatgggaacaaaggaaaaatcttgttcacctacactttggagagaagggatgtcaaacaaaaatattgagagaacaaataagaaagagcatcactacactctgcaacaagacaagagaaataaataaaaaaataaataaaaaaagggggggcgcaaaaacaatttctctcagtgatatcgggtctctttcgagaaggagcagtaagaagcaacaataagttctgaatacaaaagatcagacttgtaattatcaatagcctgaatg

SEQ ID NO: 16856 - DNA, 817 bp, Arabidopsis thaliana
atatcatgatcttggcacgcttatggtctttgcctcctccacaagcaccacgtaccaagaccccaaagtttaaatattatgaacacatggtaaatcaaacacatagactcatcaatatcccaacacaacttcccaaccataaacaatagcataagaatcgaaagatcacatatgcaatctaatataaccattcacatgattcatataactcacaatcaatcaagaatgcatgaaaatatgattatgaaacttaaaccattatccagaactcactcagtaaccaactgaatgcttaaggtcaattagccatgcattcgcgcaactttttaaaatttgaagtcttgcccgtggtcgatgtccttacgtgggtcagtacaccgaccctccaatatagagcagttctcataattaacatttctttcaatttcctcatctgcatttgttgtcttttttcaggaaatcactacagaaccgcatacattcgtcagcaagatatgcttcagcaatacgacagagtccttcagaactttcatgtacctgaagataaaacacatgtaacttttaagcattaaagtgtattttaaaggatacaacattataagctactggattatacttcttaaatgggtatatcaacgaaaatgaattggtcatcataagcgagcttccctgcctaagtagactgtcaaatgccccattatatcgaagaaacctggagggaagaacctctcaaacatggagatagtttcacaatttcattctccattatagaaactgtctctctgtcaataactcgcggacacagtttgttgaagaa

SEQ ID NO: 16857 - DNA, 782 bp, Arabidopsis thaliana
caactaactttgtagtcctggagatggatgaagagccaaagaccctttgattttgggaagacctttcttagcaattacaggagctatgattgatgtcaagatagggaagattgatctaaaccttggcaaagattttgggataacctttgacgtcaaagatgcaatgaagaagcctaccatagaagggaaactcttttggatcgaagaaatggatcagttagctgacgagttactagaagagcttaagatcaccttaatagtgctttgaccaaaaatggtgaacacggtttctgcatctggagactttgtgctactagaagttgttagactcacataaagcgatggaagagttagaaccctttgaggaattgaatggggcaacaacagaggtgatgacgatgagtgaagaaaggtcaacacaggttcaacctgctcactcgaggacatactcgaccaatcactcgatcgcaaccgtcagcgacactgtggagctgatcattccagcttcaaatgactggtctgaactcaaggcacccaaggttaatctcaaaccacttcctaaaggtctgaggtacacattccttggttcaaactctacttaccatgtgatcattcatactgagttaaatgatgatgaagttaacctgctattgtctgaacttagaaagtatagtagagcaattggttattcattatctgacattaagggaattttacctaatttatgtaatcataggatccatgttggaaacgtatcatactctagtagtctcatagagtta

SEQ ID NO: 16858 - DNA, 541 bp, Arabidopsis thaliana
ctcttggtttgatccggttgtctcttctttacctggacttgttcctgatgggtttatatacttaagggcgagtccagacacttgccacaagcgaatgatgctcaggaaacgagcagaagaaggcggagtctctctgaaatacctccaagatttgcacgagaagcacgagagctggctgcttccctttgagagcggaaaccatggtgtattgtctgttagtagaccatctttacacatggacaactctctgcatcctgatataaaggaccgtgtcttttacttggaaggaaatcatatgcattctagtatccagaaggtaaacttatctcttttttgcattctttgtgctaaaagtctgaagatagattttgcttagactggttcattggttgtaacaggtccctgctctggttttggactgtgacccaatatcgacttcagccgggatattgaagcaaagacacagtaagtgctcacactactgtaatgtcaccataacttatttggaatcataatctaatagatactttcttgattgatg

SEQ ID NO: 16859 - DNA, 552 bp, Arabidopsis thaliana
ctcttgcagagtctcaggatccgtttcccgggacttccccagacaacgctggacatgaacaagattcagtacaacaaggtacattatagtttggagtgtgctttgctggttgcatcatgaaacgatgcttagataatttaagagtttgtgtgtgttcttgcaggatgtagggcaatcaattctggagagttactctagggtgatggagagcatggccttcaacatcacggccagaatagatgatgtgctttatgttgatgatgccatgagaagatccatctctgtcacagaatcgctatccctattcagcatcaatggactcaaccctcaaaaagcgttctctgtgcagagctctccgcacggttcaccatttgcaacgcctgccctaagtgtagcatcaagaagcccgaggagagcaccgacgctgtattcagtgaagaggaatgggacgagagagaagggaatagtgggagaaacagagaaagcatggtcgtatgcagaggaatctgagttcgagaagagtaacgggagtgacaccggaaagagattaag

SEQ ID NO: 16860 - DNA, 851 bp, Arabidopsis thaliana
cttgatccaacaaagagagaatcacataagaagatctacaaaaagtcgagtacttgaatatggtgatcaaagaaacattcagattacatccaccatctcccctcttgctaccaagagaaacaatgtccgatatcgagattcaaggctaccacattcccaagaacgcccttatcaggatcaacacttacactataggacgtgatctgaaatgttggtctaaccctgagaggtttttgaatacctcaatcaactacaaaggtcaggattacaagctcttgcccttcggagcaggccgtagaagctgtcctggtatgaacttgggaatcaccattcttgagctaggccttcttaacattctttacttctttgattggagttttcccaatggaatgaccattgaagacattgacatggaggaaaacggagctttaaacaaaacccttgagctcataccaactcttccatcagcactggtcaacaaaagtattagataagctcaagatttgtatgtttgcctcttttgtaatctgtttggtatgttttgtgtttttttcttacgtttatcctggttggtttgtactgtgatatgatttaggccttgtttgtttgatcagtcagatggatcatctggatggagatgagttttgatgttcgtttggtgccaaaaacggttcattcagatgatccatccaaatgaatcatctggatgagtttgaaaatttaggctaaattttcaaactcatttggctgaactaaattggatcatttggatggagatgattcagtcaaaaataacaaatgacaaaaatatcctaattattccaattgattatttagatgtatttttagat

SEQ ID NO: 16861 - DNA, 965 bp, Arabidopsis thaliana
tgggagatgattggggctctttgtcatctttggaacttgtatcaaatacaggcttcccaaacacaaccattgcctggaataagaagataattttaaaaacaatccaaacagagctgtccattaaaacataccagaaaattatgatacatgttataccttcataggatcagtgttgtctttacaaactcctgaatgaattgctgcagccgtctccatggtgacctgaatgtttagggttcacaaagagatggtgagaaaaacataagaatatataacctgcaaattatctcgaatccacaaactccaatccaatataaaagtgaacatgcaagcctaatttagtttagacataaggatgaccttctttttggagaacattgcaaacccagacaatgaatgagctgctggaggcgtctccatggtgtcctgaaagttgaagtacacaaaaagatggtgagaaaaacataagataatattatctgcaaatgttaaggtatacacaaaatcatgtcgattataaaagtgaacatgggagcatttttctataaatgtttgttgcataatgcttgagagatgcatcaaacctctacaatctccaataaatcaaagaatgtaaatcattagctgaaactagttagaaatgtatacctccataggatcattgccaatcttttcttcgggttgagcctccgacactgaatgcgatgatgcagacatctccaaagtaacctgattgttgatgtagacatgtagctagttagaataaataaaagaaattttgcctacattttatgaagtaacaagagaatgatgtccaattacacaagaaccacaacacataaaacttgatgatgattgttacagtataccttcatagaatcactgtcgatgttgacttctggttgagtcctagcaatgaatgagatgctgcatatgcctgttgagaattggcctataaatgttgt

SEQ ID NO: 16862 - DNA, 643 bp, Arabidopsis thaliana
gaataaagcaagaaactttactgtcttttgctctgttttgtcaataaagattctattgaggatatgattgatatcctagattgctactgtcatggatacacatatgtaaagtcgtatatattctcattcattacgttgatgtaccctagctactcactcttgtatatatattgtgattctcactatgtaatgaaatcatctcttctataaacatctatatggtatcaagagcttagatccataaaaaaataaaaaaaattaaaaaaaaatttttcctctttcttcgttctctctccttcaatggctactcacgctgaagaaatcgttctcgtcaacaccaacatcctcaacgtgaacatgagtaacgttaccaaactcaccagcactaactacctcatgtggagccgccaggttcatgcgctcttcgatggctatgaactcgccggttttctcgatggctctacacccatgccgcctgcaaccattggcacagatgcggttcctcgtgtcaatcccgactacactcgctggagaagacaagacaagctcatctacagtgcaatccttggagccatctctatgtccgtacaacctgcggtatctcgagccactacagcggctcagatctgggagacacttcgca

SEQ ID NO: 16863 - DNA, 680 bp, Arabidopsis thaliana
gttgggcacatattcatgggtctcagattcatcctttgctgattattaggagccagattaatatctttcacagtccgggacttgtatgacctccacagactgcccatttgttttagaacagcaaccctttgaaactcttcatcaagctcaaaccttgcctgcaatcatttaccatcacacaaagtatggaaatcaacctttacacaactaacaagcagaaaaaaagactgaaaagaagaatttacctgcacagatttccaaagaaccgttttcatatcctgactaacatccttccaagtttcaattgtgataggaacatgttcacgtaccaatgtgcctacatatgatgccagtttaactgaacctggaccaacaggatctcccataatagtgtactcaactatttctctaacagttggatccttggcgatgttcttcatctttgttggtcccctttgtctcctacgcttagccggacggctagattccttctgacaattccatctcacctatcgcctcttcctcattcagcccatccttatcagtcactaaaggattctcctcagcttgttggtctattacaggctcagttagagactcagtttccttagcaggctcagtttcattatcaggctcagtttccttagcaggctcagcgtctgtatcttggggctcaatgg

SEQ ID NO: 16864 - DNA, 965 bp, Arabidopsis thaliana
tgcaagtgttttgttccaaagagacgtggaactgtactccatcctttgcaactacttcgaaatactagctccaaacagccaaaacagacattcccaaaccacctttgaaccgcttcataagttccctttcaaccgcaatcggactttccccaactaatatagatatttttagcctccgggattcaaaccacctagcaagcattttccttataaattccagcaatgccacaactggacttcccttagctggtagtagagcattgttcaaagaatcaacaatgttactagacatcatattatatctctcccctgtaaaataaacgctactccaattcgctagtcccatctcttctatgtattttcaacagcccatactccttttctttatcctttcacatatatcatcaaaatctttgatacgaaatgagttacctgcttgccacattaaagctggaaggccactcttctgtctatatcttcctttaacattccttcttatgtggaccaaacaagctccatggtgagcttgattgaacataatactcacggctttgaatattgattgattccgaactgagacaaacgtcaagtctggtccatctttgattatttctgtaagcttattcatgaaccatgtccatgattcgtctgtctcgctgtccactacagcaaaagctattgggaaaatttgaaagtttgcatcctgacaactagcggtaagaagacagccaagaaacttaccaaacaagtgggtaccatctactacaacgactctccacaaatattttaacccttttacactatcccccaatgctaggaaaacatatttaaaccgctcatcaccaatatcatcaatctctgtttccaaatgataaattgtgccaggatttgcaagttgtaagacgtgaagatataccggcaacaaggagaaagagctctcattcgtgccctgagcagtctcaaca

SEQ ID NO: 16865 - DNA, 830 bp, Arabidopsis thaliana
gtgcctcagggatatcaagtttctgaagaacaagatcagctgctcctcttccactacagctattccacagggacatctccctcaggacatgccttcaaggagatatgacgcgcccgagccaagtcggcgcaggcctgagcctagagagaaggagattctgcatgtccctgcgaggcattcatcattcgagcctcgggaatctgggaggaagaggaggaccacactcactcgatctagcagtaggagcagacgacttctgcagtctcgtagtttacgcgaccgcggtgctggccgcagcagaaggagagaggtcgagtatcctcagagcggtgctggccgccagagagctgatgaggtcgagtacccacctgctggagctgatacagaacaaggtggttcgtctatggcctgggagcaatcacaggcagccattgacgagcaactacattcattcttcgactgaggtaagcgcctcacttcaccattgtattatatcaactgttgtgatttgtttcttcattttttcttgtttctgtgattggatttgtcctgagtactctcttccaagtttattcgcacagtggactgtgtgatttaagtttgggggagggctcaagaagtgtgtgttgcattgtatatatcttggagtctgtagtcatctaaggcatagaaaaaccaaaaaaaattgaaaaattttcagaaaatgatttcacaaaaaaaaaagagtgttcatgtagttgcattacatttaggatcgagtctagagtgtttcatttaggattgttgcatatgcataggggatgatgatgagatagccttgtaagcatttt

SEQ ID NO: 16866 - DNA, 515 bp, Arabidopsis thaliana columbia
ctataatgaaattgagaggtttatgaacaaaccctgccgagtaattgaaccatagatactctcgaataaggaaccacggactcgagaagcgtgttcgacgctccaggaaccgacatcaaccaacctaaagcctgaaagagaattcaatttcgatcactcaaaagcacagagcaatcacatacttgtgtatatacgaatcaatcataaagagagagagtgaaaccagagaggcaccgccgcaaagatagacgacggcctgcgtcggagatgagtgaatggcttcgacgacggtacggatcgcagcgtctcccattgtttctctcggtttcgtctcctcccattgccgtgccagcaaaaagccaaattaagccccccaaagtttccgtaatttcaatttatccccaacagtttccgtaataacaattcatgcccaaacgtttccataattacaatttatgcccaaaataattttatattgcactaaaacccaagttgtttgatttactagtatgtag

SEQ ID NO: 16867 - DNA, 1056 bp, Arabidopsis thaliana
taatcagatttccaccatcttcttctcgatctggctcatcccttaacgtcgggatgtcaatctgattggctcgactagattgggcctcatctcctcggctttgaacaaaccgagaattacgacgaactaacataatagtctcactgtcataagaggagcaggagacaataactgccttacccatggtcctgaagttgtcaaaaatcaacgaaagcacaaagaacagaaaatagttcgtaggagaaggagcgagaactaccttcgatacttcttttgcaagcggcggaaagtgaagaaagaatgggttgatcgaatttatatagaaggcaatgtgcggcagacctacaaaaataatcattagacctacaagacggttcggttgccaaactccacgcgtgcgtgcggatgccaggctatgacacgtgttggagacgtccgagaatatgaaacgattcagaaatctaatgattaattcacacattcctaagttataaacaaaagattgacttcctaaattcggaagttccggattaaagtattcggatctcccgaactgggggaggcctaattgttggtgcaagaattaacacctccgaaaataccagcttaaaccggaggtattgtgaataaaatcgagaattcgactaaaccggtgaccccagttaacctaccaaagcaatgaggtcgccagccgatctaattcagcagttggagatcgcccagccgacttcctgaattgaagaaaaagaagacttccatgtaaactaagagaatgtcatgaagaatggaaggaatgaagattcaagctttaaataattagaagtttagcatatctttaaaccatctaagtgtataaatagagggatttgtcctctattcaattcatcttgaacttaatactaaaaccctacttttctgagagaactcttgagcaaaaatcctagcttccttctcaagctaccatgttcttctttcgtatcgagcctttgattacttttgagcctaagagagaagtaaatttatctaaacccttagtataaattcattgtttgattt

SEQ ID NO: 16868 - DNA, 443 bp, Arabidopsis thaliana columbia
atcactaattctccatctcatcatcatcatctgatttatacatatatatatcgaaataatcaatacaggttccatttgctgtcggaattcgacaacgggaaacggagctgccgtaagcgacttgctgaccataaccgccgccgccgtaaatgtcaccaatcagcctccgccacccaagacaccggcaccggcaagactactccaagtacgtacttaattctcttatcatatatatatatatatatatatcctctttcaaattaagataatctctagatatatgtgtgcatataattgataaatgggaatatgtgatgatgatgatgaccagagtcaacgaacgattcgggtgtctacgcgtcatcgtcaccgtcagtcaacgcgacgcctacgatatcactggagtgcttccggcaaaggcagttccaaacgacagcgtcttc

SEQ ID NO: 16869 - DNA, 760 bp, Arabidopsis thaliana
gggagtaaccatttgattaaaaatttgatgtcggttaagttcggttttagtatttggtttagtttggttaagaaaaaaataagaaacgtagtccatatataattcttatatattaaggagctttgctgttcaatgtaacactcaaaagtagtaacaactaagaatggaagatatcatcatcggcgtggtggctctcgccgcggttctccttttcttcctctaccaaaaaccgaaaaccaaacggtacaagctacctccagggccatcaccacttccggtgatcggaaacctccttcagcttcagaagcttaacccacaacgcttcttcgctggatgggccaaaaaatacggtccaatcttgtcatacaggataggaagcagaacaatggtggtgatatcttcagctgagctagctaaagagcttctcaagacgcaagatgtcaactttgcggaccggcctccacatcgtggccatgagttcatatcctacggcaggcgtgacatggcattaaaccactacacaccgtattaccgagagataaggaagatggggatgaaccacttgttctcaccaacacgtgtggccacctttaagcatgtacgagaggaagaggctaggaggatgatggataagatcaacaaggccgcggataaatccgaagtagtcgatataagtgagcttatgttgaccttcacgaactcggttgtgtgtaacaagcgttcgggaagaagtcaatgaagatggagaagagatgaagag

SEQ ID NO: 16870 - DNA, 546 bp, Arabidopsis thaliana columbia
ccgtaatagaccaaaccaatcccgaacgcaatggccattaccgcggataatctcttaagcgcccatcttttctctaccaacaccttcatggtcgtgaagatgttaacattagtactaggcttctcttcatcttcttcaaaaggtaagctcgaaaaactcatagatattgcaccaccactgcttacatcagtagacggaatcgaagcaacccttttgagaatcgaaatagcttcttctctacggcctctaacgaaaagccaccttggagactcacaaacgaaaaaccgaacaagaacgcagtatattatcgttggaatcgaagtccatgcgtagagaatcctccaagaacttcctctgttcatgtaagccatcaaaggaagagacaaaaagccaagcatgaatccgaagaaactgattatccctactcgtcctcgccatttcttcccaactaattccgtcgaaagaacgagcgcacatgtccctatcgtcgctcgaccaaatccattaacgaatcgaagaacagcgtaaacccaaatgtctggtgag

SEQ ID NO: 16871 - DNA, 586 bp, Arabidopsis thaliana columbia
gacttataaaaatagacataatcgaatcatatcattgattatttagagatcttaaaatctttatattatttaattattgcgttaacttggaagataaccataaatccagatgttattatgtgtagagattgactctcataatgattacaataaggtacatgtgtttatatagagaatacgataataatgtaagttacggtttgctaatattcggaataacatttacacaactcagaactcagaaggattaatatttcaagagtaaaaagagccacacggcgtcattattactcgttttgtttcagttcctagccgcaaagtgtcaatgcctatgaacgacactcacaccttgctcacctctacgacagtttaggtggatccatgctttctaaagaagcacgtccatccaaatgtcgatgcccatgaacgacactcacaccttgctcacctctacaacagtttagacggatccatgctttctaaagaagcacgcccatccaatctaggcgacaagggttcacatttcgttcatcaccttggtcgactatcgaataaccggactcccatcaaaagatggttgccaaga

SEQ ID NO: 16872 - DNA, 518 bp, Arabidopsis thaliana columbia
agactctagaggactcgcagccactatttcgaatcttgaaaaggactctggtttattcagaaacccaagaaacaacaaggctgggaagtttcttacattatccgagttcttgtttcttccaaaccgttacagctctctcttaggcctcttgatagaagtggaggtgggagttctatctgcaaatcttgtgtgtaaataagtacaacacatgactcttttcttgatatagcattttttcgtttcttagaatgcagcttatttagtggaacatcaaggaattagcgtggtcgatgcggtactagatgaattgaagagagctactactcaacaaaacaagacaagtgcaagaacaatactgatccagtctactgataagtctgtcttgatgaagttcaaggagaagaacaaaatgaatcatgacgagctggtctatagagtcgacgacaacatccgtgatgtagcagattcggcgatcaaagacatcaagaatttcgcaggctcgattgtcatcagtaaga

SEQ ID NO: 16873 - DNA, 544 bp, Arabidopsis thaliana columbia
atcaagaatttcgcaggctcgattgtcatcagtaagaaatcagtctttccctacaaagggtttatcatccttgaaaaggagacaaatattgcttcaaagctaaaatcaaacgggcttcgtgtttacgttgaaagatttagcaacgagtgtgtaactcatgcatttgacttttacgatgatccaacgttagagatagactcttttgtccgcgatgtccaaattgatggcatcatcactgacttcccagcaaccactgcaagatacagaagtaagaaagtagtctcatcttctctttatatcttctttaactttccttgagccaatctgagattatgtttgattgcagagaacaagtgttacggcgaatttggtctgactacaaccggtgagctcataactttcgcgaatccaatgcttcttccaccagctgaagctccatatccagcactacttgactcagatgtgacggaaccaccattgcctgaagcaagaagtcagcctcctgcttcttctccatcaaaggcagaggaaaaagcaatagaag

SEQ ID NO: 16874 - DNA, 487 bp, Arabidopsis thaliana
cattttgtcaacactcaaagtactacaccagtggttttaaatgatacttttaatctcataagtcaaacgaaaaccaattctttatctaatactataacttatgttatacacgtagtaattaaagaagcactaacataagtttgattctctacgttagtatcttctatgtttctcacctctcatttccttcactcatgatcacaagaagcaggtgtcgaagatctttgttatggtttctagtgttccatggcggagtacagccaccggagctccctctggtgggaaagagctttctcagacgcctacttgggcagtcgccgtcgtctgcacctttctcatcctcatttcccatctccttgaaaagggtcttcaaagactcgccaacgtctgctttcttcttcttcttcttcttttcttacgagtgttcttgttcaaacattcattgtctgaaacatatgaatttgtttcttctcagtggctatggaag

SEQ ID NO: 16875 - DNA, 552 bp, Arabidopsis thaliana columbia
tgttgtcgcgtttgactcgaaaagctcctacagtgcacggtttgatgattaatcagtctggttaacgattatttgcaagaatcaattaatttccggcttaaccgattggttaaatatgattaaaccattggttaacttcatatctagaggacgaatttaaatccctgataaattctaaaaagtcccatcatcgccgtcgtctccgtcaccgtcgctgtgaaatggcgacatctaatctccgtagacacttgagcgcaagtagcctccgcttaaaccgcttcatctctacttcttcttcttatcattcacatcgccgtgttgttgtcactggtctccttctctctccatgtacatgtattcacatatacttatctctgtaatttctctgattcgacattgttcctgtaggtctaggcatggtgactccacttggtagaggcgttgaaacaacgtggaggcgtttaattgatggagaatgtgggattagaggattgacacttgatgatctcaagatgaagtattttgatgaagagacaaagttatataattttg

SEQ ID NO: 16876 - DNA, 1392 bp, Arabidopsis thaliana
gataaagagtaattaaaattggagtttctgatttctagggcacaaaatctttagattcggtgaagtcattcattacttcattgccaaagcttgtaaccaaaactcccatggccgacgaatcttcttctccggccacgggggatcccaattcacagaaaccagaatccactactcccgatttcaattcccaatccaaatcccaatccttcactaacaccaccgccgcctcaacaacattcgcaaccaccagtcgctcctctggttccacctggtccgccttatgctcctccggctcagattcctagctcgcttctccccaccaatctcccgccgccaccaccattccgtcccggtatgcagttcactcccgttgcgaattttcaaaaccctagctctggagttcctcctccaggatctatgcctcagtatcaaccgcagcctggtatgagacctttccagcctatggctaatggttatcccggaattcatggtgttgctcctcctggtgccatgcctcctcatggtgggttcttctatctcttaattttataagttcttactcttttttttgtttatgatgcactttaggctatatagtttattttcgtggcgttttttttcgttctgtgtatgttgaatgtgaatttgtgatgcttaaagtagtgaaggggaactatatatgtctatgtagttggattagattaaaggtttagagtaaaaagaagttttattgaaagaggaattagggagaaaactagaaacaggaacaccgatgaccgggtgttttctcctacagcgtcttgattgagttccctgagaatggttgcaaggcatcaaattttgggtagggactcacttctacgactccctcattttggtatgcgcaaattcgctttttgttcttcttattctcttaatttatttagttagtgtaacacatctttaaccaaaccgcttacctaaaggttcttgaaagatttgccccaatttatatgttaagttgagaattactgtagttttaagaacaaaactttgaacttgatgggttaatcaactgccagcagcaagcatttgtagcgactgagtgctccttggtcttgattttgaggtattgcaattctttcaaattacaccttccgttacatcttcgacatgtttcttttttctattcccttctgtggtcaagctgctaatggttgaaataaagctattatgatgggtaataatagtttttataagttctatatgggcatgaaatgatgggagttcaatattactgaatctcaaattcaacagatgattatagattcttacctatttcaagttgccctgtgaggtatgactacttaatgtggtaataatgactacgatcctggtgctacttctcaatgt

SEQ ID NO: 16877 - DNA, 419 bp, Arabidopsis thaliana
ctgcaaaacccttgttaactcataaaccttgatgcctaagccaatatagaaaaacagagaggaaaaagtacctacagaggatttaaaaggactaaaaagaacagagttctttgccattgtctctctatcgcaaacacttttacttctcggaaacttcgaactcggcggaacaacacagctcttcctcatcattgcagcaggactctccgccattttcgacaaaagccctccaccataagaacatctaacaccaccaggtgacctccctctagtcataacattcggagacgccgccataaatctccccgtaccaagcctatgtttcgccggcgtacactgatcaaaatccaaaggtgcaggctttaacacatacggagacgatacgtccccggttagaccccaagaacctcttctaggtc

SEQ ID NO: 16878 - DNA, 535 bp, Arabidopsis thaliana
gttaatgagcagatggtccctcgtctcggtggaagctgagcagaggcagcatgtcgttgatatgttcataccccaagaagctagcctttgtctcgtcggcaacctgttaagttgagcaacccacatgttgaaggcgtgttttggtattgctcctttaaaccaaatagaagaggcccaaatcatctcttcccctctaggtctgagtacttcccaagtcttagcagcagagaaacaattgctaaaaacatttccaacaacccagaaaaagtgatcctcatcagcagaaaaataaggaacctgcgctgttgtaagaaatgcatgaaataagactgcacggtccgagcgcggagacggaatagaccatcccaagtcagaaactgcatcaatcactttggaatgaattggtaatcttacgtctctaggcccctcaggacccaagaactttatcaaagggccgaggtgcgaccatgagtcaaaccagaagctacacctacgcccgtgaccaactttgcatcttagaaatttttctgccaaa

SEQ ID NO: 16879 - DNA, 494 bp, Arabidopsis thaliana columbia
tacacgaacgtcttcgtcgctagtttcgacacgctttgagcttctgtgaaacgctgttgaatcacggtaacatggaagtgattgttggagaagttggttggcctacggatggtgacaagaacgctaacgttccaaacgcggaacggttttattccggtttgcttccgcggttggcgaacaacgttggaactcctatgcgtaaaggttacattgaggtttatcttttcggatttatcgatgaagatgcgaaaagtgtagcgccagggaacttcgaacgtcattgggggatatttaaatttgatggccaaccgaaattcgcggtagattttcgtggacaaggtcagaaaaagttcttaacgggagctcaaaacgttcagtactttctgaaccagtggtgtatgttgaatcctaatggtcgtggtagtatgagtaggctcggagataatatacactacgcgtgttcgcaatcggactgtaccgctttaggctatgga

SEQ ID NO: 16880 - DNA, 574 bp, Arabidopsis thaliana columbia
atttttgttcttgtcttggaactataaacccttcaggttgtttcatgaaaatttcttcttctaaatcaccatttagaagaactgtttttacatccatttgatggatctctaaatctcttaatgctgatatattcctactagcactctaattgaagttattctcgtaacaaagaatatgtgctcaaagaaaccagcccttctttctcccggaaaccttgcaccacaagtctagccttgtacttatcgattgacccatcagttttcaacttttgtttgaaaatccatttattcccaagaaccttaaacccttgcggtaggtcgattatctaataagtattattttaaagaattgaatctatctcactattcacggcttccttcaaaaaaggagcgtctggtatagacattgcttccctaaagtttttaggttcattttttgcaagaaaggctactatgaactctgaaccgaaagttttttcttttcgagatgttttaatccgtctaagttcatattcttctttgtcattgatagtcgtgccaagctacttgcctcatttccggagatgcaagtgtt

SEQ ID NO: 16881 - DNA, 584 bp, Arabidopsis thaliana columbia
agtaagttcttcaaatcgatttttgtttgttagggctttggttttgttgtcaatgttgatgctattggtgacctgattctgtgtttataggtttgatttgccagaagctagaatatgattgtagagaatgattcagtccatttcttgaaagctttagtttgtaagagatgaaagagaagataaaatctatgttaatagagggtttttggtttggaataaggtttgatatggctttgtttttgtgtagttaatgatgttattagtgatctgaactgttatttataggtttcatttgacagaaactagaacttgcttgatgagaatgagtccttccatttttgttttcagaataggtatagtctctagcttaaagactatagtttgaaagtgaatagagtttcttgatttagtgaaagttaacagaggaactttgtttgatattgactatgtggtgttaatctcattatttaaatggtgttgatgatgcagcacaagacaagattgcagattttgagatgaagctgatggatatcgacagtgagcatttaggaattcctgatgctgagtacactcgattgtgagaa

SEQ ID NO: 16882 - DNA, 493 bp, Arabidopsis thaliana columbia
catattgatgagtctttcagatcacatttttgtatacgaaccttaaaagcaaaatttggttctctctttctaaaaaatctgtaacttgttatgtcatcaaacgctgacaagatatgttataacgctgataattatctataaacaatttgacttttgagaattggggtcttaatgaaaagttaccaaatcatttagaataatactactcgcttgtcagaagttgcttagtatagtagaaacgtgaggacaacagcactaccagctatccttaaacttctttacatctgtattcgacacaagcttagccttgacaacaacaggtttatactccggcaagaaacctttccctaaaaccttaaaatatcccaattgagtaacatcaatcatagacgcatagtgtttcgttgcttagtccataacgtcctgaggaaccatcgtccaaagcttgtcaagattgacgatctggcagtaaaaattgttcctgagcttgtgg

SEQ ID NO: 16883 - DNA, 983 bp, Arabidopsis thaliana
aaaatacacacgtcttattgatattgtgatcacttgatgatcttaatcgggacatgatctaaacttttttctttttttgcaaaaacaagacctaatcagcttaagtattggttacaatgtctataccctaaagagtttcacattgtcacctatcagaacttcgctaacacatcttgggaacgaatcagtcgacaccatcctgcgtgggaattgggtgactccttttgacagttttctgtggtacaatggattttttcgttttggttcgggaatcaccagcaactattcttaaaggaacatcaattgggatcttcactgaacatttccttcacgatcatttatcttttcgagggatttcatcaaatctatgttaaagagtataccaaaaaacgcttcgacatctttctttgtacaccgacaagtattgttctctctcccagattggctacgaaagcttatctcccgaaaactcttagcgcagatgaggtgagagcagaactgaggaacctcatgcctgatgatccaccagggaagtaggatatacagtagtaaaccagcgcaagaacctgtccattagcacaaaaagaaacagatactggagattatgagattcagcagaatggcggattttgcgagcagaagttctcaaaacctctacaagtatatctttcatacagtccaaatagataacgggtgaagaccagataagtatcaccacttgttcgagagtctaatgtttgttgctaaactctggagattcgaaaggttccatctcaagaccgattcaacaatgaggtgagttactatatgatcttaaatactttggtgaggtccaatattgttttccacttgctcatagcaatatctcattttgaaaaacttaaactcataattagagggaatatcctaagaattggaagatgaaatgtttagtaccctgtacactgagagacaccgagagaatgtagctgtggagaccattg

SEQ ID NO: 16884 - DNA, 563 bp, Arabidopsis thaliana
tcatctcaatgacggctccaatctttacctactgacccctgccttttcacccccttctgtggattctgttttacaatggatatcgaatgacaaaggtattgtgtagagttagtcggaagtcactggactgcctaatttaattcaatttaacatattctcaaagtttcaatatacatgcttaaagcgttttcccttacgaaaatggtactgtccctgattaagatattcatttcattaaaagtaagtgaaaatgataacttttgttttaaacttttgaatttttccacgtccaggagactctaatattgattcagaaaaacaaccattacgagataatcataatgatcgtggagcaagtttcactgatcttgcttctgcatctaatgtggtgtctgtgtctgagcacgtggagcagcataataacctttttgtgaattcagaatcaaatgcttatacagagtcggagatagatctgaaacccaaaggaacgtttcttaatcttaacttgcaggccagtgtttccaagagctgtctcagatttcaggcctgatgggaaatctggg

SEQ ID NO: 16885 - DNA, 661 bp, Arabidopsis thaliana
atagcaaaatattccgaaaccctaatactcaaaacgagacagtattgggacggattaagaatggcactcgacctaggtggtcgagtgaatggtcgagtgataagctagagtcttattttcttcattgtgctcgagtgtctggttgagtgcggaatggagaagactctgaagctggcactcgagtatgaagtcgagtgatggatatggttgtactcggcttggtggtagagtggtcggtcgagtgtgtgatgatggtgagactcggccgtgcaatcgagtgagtggtcgagtgaatgtgatggaggtactcgaccaaggggtcgagtggtgtgatcgagtgatggtcaggtggtggagttgatgatactcggccatgtggtcgagtggtggtgcaaagtgacgaggccttctactcgacgagggggtcgagtggtttgttgaagtcgtgaagcatgtactcgacagggggtcgagtggtttgatacgatcaggtccgcttcttccaattagctcgtcaacagctccaaatcaactgaaaacaacacaaatatgcaacatgcatgtaaaactatcctaaacatgcaaagtgatgacaaagtatgagaaatggtataaaactgtggtgatatgatggtaaagtgatgacaaatggatgctcaaa

SEQ ID NO: 16886 - DNA, 562 bp, Arabidopsis thaliana
ggagcagtgttctagaggacaccggattctcgttcgtaaagtgtaaggtgacagggacaggggttttgtatcttgggagggcatggggtcccttctcaagagtcgtttttgcttacacttacatggacaacatcatcctccctagaggctggtacaattggggagacccttcccgtgagatgtaagtttactttactcctctttggtctcattttaattatcacgtataaccaaagttagtcggtatagctatgactcaaaaagcttgagagaacatgccatacttgatacttgattacaaattgaacaacacatatcagtccaactttacaaaacattatctcgttgcttcatctatttcagcgtcataggtcccaccggccactacatatttcagaccgacttcatttttgtctttttaccccgaaaaagttgcttttgagataatagtaaattagtaatactttgtttgtgtgcgcatgcatttgtatagatatattggaacttaaggccatcaacgtacgtaggcgtgcatagtgtcttttagtagctccaaaacgca

SEQ ID NO: 16887 - DNA, 909 bp, Arabidopsis thaliana columbia
ccttgttccgtcaaaactttccttcacagatgaattccgacgccgagagacctgaatccccatcctttgacgagggtggttcttgcaacgacatatgcactcgtcctaacgatatcgctggcccaaatttcagtccacttgtactcttcactcgctcgagcgattaaaggaactttgccgcattctgcctgaaattatggcagaatcgaagatgcctgagcccacagaatctacggaagaccaccgctccggttacttttgtgtttacaagatctatttcaagggttgcggactgactttccctctcccgaaaccctagttcgatacctaaccgccctcaaaattgctctaccctagttaacccccaatcatctctgaaccattatggagattataaacgtcacggtggaagccgaatatatagtcggagttcccgagttgaacgagcttcttagcgtaagaagttcatcaaagaaaactggctacttctcggcataccagaatgccaacagaaatttcatctcgcacctcccaaacaaggatgaaaactgacatcatccttggtttttgattaagaaaacccctgcctcgatcgggagcctttccgaagtgctcccatcgaaatgatccacaaaatcgggtagagattttggaaagaaacgcatttatcttttgtttgattacccgttcttttactaatccaaagcgttttttttttttttttgcagctttcattgccctggctcttccgactgaagaatttatcgagttattcaaagtggttctcgaaggcaaaaccctttggaactcgtttaccctcgaccggttcatagaagtcaaccgtaatcttagaatgagtcctcctaggcaacttcatcatgttccgccgcctcctcccatacctcaagg

SEQ ID NO: 16888 - DNA, 554 bp, Arabidopsis thaliana
ggtctgacactcatgatcgtgttcatccgatcattgaggatgaagctgggctggcgaatctgctctgccatatcaaagggctgaactaccaggtccctagtgtgaagaacatggcaaaggcggcctatgctgatatgatggtgaaggaggcccatgtaacaatcgattaccgtttcttgccaattccactttttgtgctagttataatatccgtttcgttttcaacaggcgattgttgcaacgaacaagctggttgctttttacgagcaacgtcttagcaaggtttctccggcgagtgagctcgaagaagggaagaccctcatccaggaactgaaggcgactgggaagtcaggtaaggagcgtgaggcttcgttccaggtatacttctgttgtttttttttttttaatggtggaatgattttaaccaagctacaatttcaagtggagatcgacaggttgaagatggagctgtctacctcgaagggtctcgagaaacgcttgttgatgtggaaattcaaccataggtatcagcgtcaaaagacgttcaaatggat

SEQ ID NO: 16889 - DNA, 860 bp, Arabidopsis thaliana
tctaaagaatcttatgttttttgcttcatacactttccatgttatcgagcttatattattgctcatcaataacgttgaacaggcacaagttgaagaggtattttcttgacaatagagatattaccagcttcttccatatcaatgtcttcacctttagtcccatcaggcatactccaatcaaaataataaagcaaattcatcaatgctagttccacactagcaatcgccattggcattccgggacaaatccttcgaccagaaccaaacggtaataggtcaaaatgttgtcctctaaaatctacagagctatttgcaaacctttcagggttgaattcttcagggtcattccaacgcttagggtcacgtccgatcgtccacacgttaagctggatttgtgttttcggtggaatatcatagccttggatcttgatgtgagacattgtttcccttggcaccacaaatggaagtgccgggtgtaacctaaaagtttccttgagtatgtggttcaaatactcaactttgcctaaatcttcttcagtgattctttccttcttgagacccagagtggttcgaatactttcttgagccttcttcatcactctagggtttctaataagttctgtcatcgcccaaatcattgttaccgcgcttgtatctatccccgcgagaaatacatcctaaataccacataataatgatacaaaatttttgaatcaatataggttaacataggatataaagaaaaccaaaatttgagaatttaccatgacaattgccttgagattaccatgttgagtttgaaagaatctgaatcttcttgtttatcgatcatatccaaaatcaaggtgacaatatcttga

SEQ ID NO: 16890 - DNA, 559 bp, Arabidopsis thaliana columbia
acctcccgggaagtcctcagattacacatatatataattctatttcaacaaactgattatatatgataaagattcatgtttacaaaatatatatactaatggaccgacgacgaatcttgttaataggccgttctcaacgtagtcttaaacaatatgattttgcatgtgaggtttgaattagttatattttaataatctttgggatgtgaattattaattaactaaaatttgttcctcttttttttttcttgttaatcgtttttttttttttgttataaggtgacgttggcgacgttattgccggcgacttaccaaggccaccttgatgtgacaatatggtcgccgtttctgtatggaacaactgtaccggtggcaccatatttttctccggcgttaacctaagatctaacggcggggatggtgcttctgaatatcaagatcgatggttgggttagatggaaagtgggaacgtgggtctccggatagtaccgcctccacgtcaattgtccagcttacattaccttagccggacatttttctggtgatggtccaccgtgaa

SEQ ID NO: 16891 - DNA, 861 bp, Arabidopsis thaliana
ccaatcgaaaaagtcaagcaaattcatcagtcctagctccacggtagcaatcgccattgatatcgcgggacagatccttcgaccagaaccaaacggtagaaagtcaaagtgttgtcctctaaaatctacacaagtatttgcaaaccgttcagggcggaattcttcagggtcggtccaacgcttggggtcacgtccgatcgtccatacgtaatacgttaacttggatttgcgtttttggtggaatatcgtagccttgaatcttgatgtgagatattgtttcccttgggaccaaaaatggaactggtgggtgtaatcttaatgtttccttgacaatatgtttcaagcaatcaaatttgcataggtcttcttcagtgattctatctcttttgagcccgaggacgcctcggatattttcttgagctctcttcatcactaagggttttttaacgagctcggtcatcgcccaaatcattgttatggcgcctgtgtctatccccgcgagaaatatattctgagcatcacataaacagacatatatacataataagcttagtagtttaaactaagtgtttattcaatggtttgaaaaataaaaagatatatgaaccaaaatttgaactttaccatgaggactgctttgatgttatccacattgagcttgaaatcatctttatgtccttttttctttatcatatctaacatcaaggcaacaatatctccggaggaatccaaagttgatggcttcaagtgatcatcaatcacatgctggtaaaaagcatcaagcttctccgagactttgtttatatttgtttgcgtacgaaacaagcaatctaagaatcttcgaagtctacttgggaagaa

SEQ ID NO: 16892 - DNA, 387 bp, Arabidopsis thaliana columbia
gaggatcgacgatccccgggaattggttgatgtcaattcttgcccactgtcattgagataagtgttgaaacaccagatgaatcccaagtgacactcaaggtttgatgagcttaacactaaataacaaaacattgattgagaaattgtttataactcaaaagccaatgaatatgattctctatcaagttgatgatgatgatgttgtgaattgtgatgatgatgatgttatgatagggtatctccacagacagaatcttagatgtgaggaagctcttggcggtccatgttcagacatgccacttcatcaacttctctctctctcaccagtgtttcttcaatcaacatttatgtggcttctgttcttcatggctaatacaatgtagacat

SEQ ID NO: 16893 - DNA, 608 bp, Arabidopsis thaliana columbia
ccgattgacactcacctagtgtcgatcgacactggacgcagactacatcgctgaattgttaacatgctaaggaaagtcgagttgtagcatgagtgtcgatcgacaccaccactcgcgtcgatcgacacacatcactggttgaagaaaatcatcttcgatagctacttttcaagctaggatcactactatcagtctaagaactactgtcacgtcaaacactacacctctcctacttcatccacctcctaaacggctaaggtactcatctccttctcctaaacctcctgatttcataaataagaccttaaaattctcaaaaactattttactgttaagcaagccacgtgtttctcatcgagcgcttgtgcgttcttttgatgattgtgcagaaaaagagtattccacccatacatgatcccaccctactgatgctcctctcttcctagatagacctcatatgctaactgcttatacgtcagcatggatgatgagaggtctttctccgcgatatttactaccaccatctaatccgcctatccccatattccatcaaagtcaagctattgacgctaaacaagcgcttagtgggaggcaacccactagtatgg

SEQ ID NO: 16894 - DNA, 1168 bp, Arabidopsis thaliana
cctgaagatatttgtcgatgcagttcttcaaccagagacgtttatatggaggccaacgatggatgtgacttatcttgaggactgtttaatgtcttttgttgcatggcctatcaacaaagttatctttgaaaacccttcagatgcaacatggcagaaatctccactttagacttctgctgccagaggaaaatcaccattggaagcagcaacattagtaggcaagtttgcagcatcagtaggcaagtcagcaggatcagtaggcaagtcagcaggatccgagaaagcagtagcgtccgggaaagcagcagcatcaagttcacaaactgcagcagcaggttataagccatcccctgagatatctacagcaaaaggtacaaaatccgttgcaacagtttcaaaggccatagctgagaagtccatagctaaaggttcaaagtctcctgtcaagaaaagtcagctgctggattcacaactccctctgagtagatctccggtattttgtatgttgttatacctagctattgaatatggttatttttctgcatacattaaaactggtttatattgtaacatggcagcataaaggtgtagctgaagttatcaaggccaatcagaagtgtaagttaatggatatcagtggaaggaagcaggtggttgctgaaggacgtgtgcattcagtcgacccagaccaaaaggtacaccatgttcgcttgggaaataatgcagctagagtttgggtggatatagtgaaaatagatgatgcagcagtttggagggcatcagatgaaatcgagtatatgagagattcacttggttcatctattgcatggccaatggataagtttgtcatctattgagtttaagaataaactgggtaagtttctagattacagtgatccttgtactttggttttatatatgaaactgaaatgagacattgttgattattgcagggaatgaagaaactttggtccagggtagctagtttaaaagtagtcttagactagactaatcaacctgtattatgtaattcagaataacacttgttgtctactttggatttagacttatgatttagacttatgttatgttgaatgatttgtatggatttttcctctatgttgtttttgattctgactttagatgaaatttctattcgagagtcgac

SEQ ID NO: 16895 - DNA, 671 bp, Arabidopsis thaliana
catccatctccaggactacaaagtcagttggtatctccacagtaccgatcctgattgggaggttttcgagcaaaccatgagggatccttactgatctgtcagctaggatgagggatatattgcaggacttgtattgagtgaaccccaatcttttggcgacagatagcggcatgagactgactgatgctcctaaatcgcataggcatctattgaaagccaatggacctaaagagcacggtagagtgaacgaaccaggatcactaagcttcttaggaatgatcttcttctgtatgatagcgctgcattcatgactcaataccaccatcccttgcacttcttgaattctctccacaatcaagtctttcagaaacttgtgagagtctgggattagcgctagagcgtcaacaagaggtatccgcaactcaacctccttaatgttcttggcaaacatagctctatatttgtctgcgaacgctttcttgtgacggccaggaaatggaagctgcggtttgtagggaggagggacaaaaaccttttctttgtttttgacagcaactggttttggagcagttggtgatgctgctgggatgacaggtcgagtggttggtcgagtaacgctgtcgagtggcagatcgagtggttgctcgagtgactggtcgagtggtttgtca

SEQ ID NO: 16896 - DNA, 980 bp, Arabidopsis thaliana
gtttgttgtgatagttagtggctatgaaaatgcattcttatacttagtgagaatgggttgtctgttgtgattgttgaactatacggctggtcatattttcttttgttggtcatatttcaggggttttactcttacttttctcaaagaaatggaactggaaaatcaccattagatatgtacttggaagagcctgtgttagatatggtctcttttagagatatggatgttattgcatattggaaaaacaatgtctcgcgttttaaagaattgtcatcgatggcatgtgatatcttaagcattccgatcactaccgtggcatcggaatcagcttttagtataggtagtcgtgtgcttaacaaatatagaagctgccttttacctactaatgtgcaagccctcctatgtactagaaactggtttcgtggatttcaagacgttggtaatattcacatcttgaactcgtttataatagtaaacttatatggctttttccgcgagtgatagtggaggatgcagaaaaaataacgtatgaagatgcaaagactgcattaagaagaggattactatatttcacggcattgcaagctgatgatggacattggcctgctgaaaacgctggttccatattcttcaatgccccttttgtgagttactatttactactcccaaacactaaaattttacatttatagttaaaacatgaattatcgatccaacaatgattgaaaaaataaaatcatggtgcataggtgatatgtctgtacatcactggacatcttgagaaaatcttcactcacgagcatcgtgtagagttacttcggtacatgtacaaccatcaggtacatctataaatatctcgtgtgcacacacatacatagggtgcaaatattgtgtgtaaatgaatgaccagaaacaacttagtcgacaaaaaaaaaagtttattattcaactcattcctctgcgaaatagtaacggctgca

SEQ ID NO: 16897 - DNA, 941 bp, Arabidopsis thaliana
aacaacattaaataaaaggaagtatccatcataaatattactagagactataggacacttcaaattctactgagcaacacaaatgacaagataattaattaagattgtttttgatataaaccaacaaacaaactgagaaatgaaactctcttaacttcagactctaggctttagacgaccttcattagcaagcttgaaggtatgggcctgctttgtggctgccttgtttgaggaaagtcctgcaacaaagtggtctctaacttgaggggttgtgaaagggaacttatggttgaccatggagtttaaccaagaagctgtgccttcacggtagagagcaccaatgggatcagagcgggtgttggaaagtgcctgaagaaggttcatgtgaggatcaaaccctggaatgctactgggaatactgactgtaccaaaagctcctccaacagttccccaccatccaagcaagccccatatcaatgtagggtggtttctccagtaactacacaaaagataaacaaaacacatgaagtgtgataattgatatcatcatctgtcttatgatgtttgtataagagcgaatgttttgacacttactcgcatgttccagtgattggtgggaaaggagcaggaatgaaaggagttccaggagtgcctgggtcaatgataggagttggtgggcttcctccaatgatgggtgtgcctggatcaacaatgggtgatggtggagtcacaacaaccggagttcttggtggaggagatgagtaatatccaccagaaggagggtgtgatggcgttgggtgcgaaggagtggaagggtgtgaaggcgtggaagggtgggaaggtggacttccacagttacaaggaggggtgtgtggagtggcgtgtgtgatggagtgtgtgaattggagtgtgtatggagtggaagagttgagtatgtatga

SEQ ID NO: 16898 - DNA, 853 bp, Arabidopsis thaliana
acccttcaaaaaggaaaaccaaacgcaggggcagcataccttattcgcaatagacgaggcagctgaggactagagtccagaacttgacctcggaaaatattgcaagtgcctcaagaaaagaggacattccacggaggagtgtcgcgccgttaaaaagttaatcgcagctgggggaaagactaaaaaaggttcaaaccccaaagttgaaacccctccttccgacgaacaggaggaggagcaaactcccaagcaaaagaaacgggaacgaacaccggagggaagtgactctcccccacctgctaggagagaacgcatagacctagtctttgcagaactcgatctaggtggcgggacaggaaggtcagtcaccacacctccccccgccccgtataagaaaaacatgaggtttccattacgcctctcaaaattctgcagaagcgcaaccgagcacctctcccctaaacgcatcatttcatcatgggagggtctcagctctgcaacgactcaatcaattcgatcaaaactcatcacaggaaggcaaattcttacacaaaaggcaagagcccgatgatgggacctgaccaccagatcacattctgggaaagcaaaaccaccgacctcgataaacatcacgatgacactctcgttattcgaatcgatgtaggcaactacgaaatctcccgtataatgatcgacacgggaagctcagttgacgtactcttttatgacgccttcaaaagaatggggcacctcgattccgagccgcaggcagtgaaaacgccacttaccgggttcgccgagatacgaacttttctctaggaaccatccagctccaaccgtcgcacgaggagtg

SEQ ID NO: 16899 - DNA, 459 bp, Arabidopsis thaliana columbia
tgtctgaatttcagttacattttgctgataaatttttgtcttaactaaaactgtaaatatacactacaagaaaatacgccagttgcgagggaagaaaccgtcgctagtccctcgcaaagagcagttaacgagggaattgcgacgaattttagttcctcgcaaaactcgcgtcgcaaaatcaaattcgtagcaagtccctcgcaaattttgcgaggaacaaattacctcgcaaaacacacgcaatttgcgagggaagtaatctgtagcaaattcacggcaaattatgggtctcgcaaatttctcgctagttgcggcggacgacctgactcgcgaagcacacgcaatttgcgagggacgtactcggtagcaaattagctgcaacagaagcctcgctctttcctcgcaagttgtgagggcatgattacgaattcgagcgcactttactagagctactagaga

SEQ ID NO: 16900 - DNA, 655 bp, Arabidopsis thaliana columbia
ttggtaagaaagagagcgtcagaatcaaattcttactaccaccaataaattctagtatacagaatctacctacctacaaattattagctaagtgacagaaaatgaaatcacaagtcattatacctgacccagaagagcaggaacattatcaggggcagtgtctaacacaatcttaaatgcctgaagagcattatctatttcacccttagccagtaagagctgacctgtaagcagacaattacatttcaggattctgtatcttagtaaacatagagcatcatcacaaccttcaaattcttaaagcgtacattgtacagggagaaccggaaaagaaagattgttataggaattgcttgcaacagaaacttatcagtcgaaacgaatctggtagtacctttcccaacccaagtggaaggttcatgcatatcgattctcgatgctttgttataatatcgtgtggcagagataaattgctcctctttctctctgtttttggtctcagttttaccaaggtagctataatacgcacctagagcattcaaaatcgctattctctcgtacttaacatcggcatagtactcgtcaatgtcttgccaaaaagaaacaaaaaggacttatattttcgaaataaccaattctagaacaaattgaagca

SEQ ID NO: 16901 - DNA, 1137 bp, Arabidopsis thaliana
ggatccctgcctagtcccacggcttcttatccaacgaatctgatcttcaatgaggtttgcaatctcaagtgcttcagtgaaacttgataccttattgagaaagttatctagtaccaaaaagccttgatccatagaaccgcaacataggaggaagattgcaaaagcaaactgagcatggaattggttccttaaccttatttttaaatgctgggaaaacaaacttattttgtatgccttttggaacttgaatttggtagtgtttagattgacttgtttgttttcaaaacaatttattacttttggatgataagcaacatttttattaggaattaacaacgtacacaacgtaatatcttagcaatgtacgtacagactatgagtccacctgtacacagtgcacgactgcagtaacggtaacattgatttgacaaccatcaatgtaaaattaaattgctcattgaatgtaactgtaatttctccaacaatatctacatccgtggttattaatgggaggaacaatttgacctcttcggagtatctcatttctaacatggtcaacccgactatttccgacgacttactcgttaagatagctaaaaaagtggcagacaaatgctggttggaccttaagccactgctacgatcaggcactcgcggaagagacattgtctaccgtccggatatccttaaagacgctaacatcttcagcttgtgcggtgttcccgatcacttccaagtaggaggtggccataatccaaccggaccccaaggagaaagccgcaatcgaccatttttcaaaaggtgccttctcgctaacaatccgatggctgtgtataacgaagcaatacgtgttctaatccatgaaagtgacatcaatggagcatttaagctcatgcagcgtcatgcacccgtgcgagcagatgcaaccatcgcctgcgccatcatattcatatgtgcgggatatgattatatgggtggattgtttcttcagctctacacacgcaaccatcatccattggagtcggatatcacttgagatttgtgtgaggagtcctcgaggagataaagaagtttagcccccgtacaataatacttacggttatctttctgttatggaacaccatggaattaagatgc

SEQ ID NO: 16902 - DNA, 611 bp, Arabidopsis thaliana
  unsure (1)..(611): unsure at all n locations
atcccagtttgtattatagtatgccgcaaaagagatcacgtcgttgggagtctgtggaggagggacggtcctcgggtctgccgtccaggcgttatgaccttcgtgagagagtcggggtaggtgtgtgaggagggatgtggccgagtgttcccgagttatatcggagactggatcgagcgacacggttgctgattttagtcttgcagagatagctgccattgtagagtgggaggatgtgcagagagggcatgggatgatgattgattcggatggtgaggatgactgtgtgattacgggagtgaggacggtggagcaggagctggctccggagggaaaccgagatcgtgatggttcatgactacgttagtgtttcctcgagcagttctgctacaccatcctttgtactcagcccgtatgagtcagatccggagatggacgaggatccaccggtctcgccatatgttctggaggctgtcgatcactctcccgatagctctttcgcacttctatgggagggcacgtcccattctccgttttgcagccaacatgagggctgatgctattccgacgtttgacgggggnccacatcaggtatacagatacggttttgt

SEQ ID NO: 16903 - DNA, 521 bp, Arabidopsis thaliana
aaaattgttcaatcaaacgacaccgatccaagacatgaaccattggccatcagactgcagcaaaaccttaatgaaagtgataggagaggaattagaccaaagagcagagtttccggtgacggtacttaacattacacaactctctggctatcggaaagacgcgcacacgtcaatctacaagaagcaatggagcccattgacgaaggagcagctagcaaatccggctagctactcagactgtatacattggtgcttgcctggtcttcaagatacttggaacgagcttttctttgccaagttattttatccatgattcttttctctaaattcaagatttttttagaactgtaattgtaaattatggttataatttttgttaattacgtacacttattgttctacaaagagaagaaagagagaaactctgctattcgctatattaactcaatagatgagaagcaacagttcatgatccaaggaaagaacaaaaactatagagttattaaatattttttcattgt

SEQ ID NO: 16904 - DNA, 407 bp, Arabidopsis thaliana columbia
acttatatatatctaagaaacatcaactacaaatcgtaaaaacactgatacctagagtatagtaagtttagatgactccataacagagacgaatttacttgtacgcaacaacatagataagcaacaccgtataacttgataatattcagtaactgaaattcacaacctcaaattaagcagcttccttcacaggagcaggagctggagctggaatcttaacataacccaatttcttcaagctagcagcatcagattcatcattctcataatcatcttcttcgacctcaaaataatagctttgacgattcgcaacaagagcccatacaagatacatagtagccgcggttaaggcaccacaaccaacatcgatcaacagcgcgacgacgacgctgggaatatctctggta

SEQ ID NO: 16905 - DNA, 560 bp, Arabidopsis thaliana
tagtaacggccgccagtgtagtgtgctctaaaggcgcctgggccacgattttagtacgttcctgttctgcctcagctttcgcttcgtccagaatctgcgagcggcgtttgttcgcctgctcgatgattacctgggcttccgctttcgcttttttcagctggtcggtcgcgctggcctttgcaaggtcaaggtccttatgtgctcgttctgcggaagaaggccgtcagcaatttctttttgacgtttttcgatggctgccattaatggcggccatacgtacttcatgcagaacagaacgaacaggacaaacgcgatggcctggccgaggattgttgcgttaagattcacagcacaatgcctctatttagttaacgttctgatattgctctttaaataaaagcaacgcttactacgcgacacgaacatcacgtacagacccagacctacagcgatcatcgggatagcatccaccagacccataacgataaagaactgagtacgcagcagaggaatcagatcaggttgacgcgctggccttccaggaatttcccccgaggatg

SEQ ID NO: 16906 - DNA, 683 bp, Arabidopsis thaliana
ctaaaggcctttaccgccacagcagccttcgccaccgtgttcatgaccgtgatcgtggccatgaccgccgcagcaaccgtcgtggtcgtgatcgtggtggtgatcgtgcgcgccgtgaacgtgaccatgagccagttcttcttcagtcgcttcgcgaatcgccacaacttcaacgttgaatttcaggttctgaccggccagcatgtggttaccatcaaccacgacgtgatcgtcttcaaccgcagtgatttcaaccggtaccggaccctggtcggtttcagccaggaaacgcatacctacctgcagttcatcaacgcccataaatacgtctttaggaacacgttgcaccaggttttcgtcgtactgaccgtaagcgtcgttcgcgccaacagcgacatcaaatttgtcgccaacttcatgaccttccagcgccgtttccaggccagagatcagggaaccgtgaccatgcaggtagtccagcggcgcactcaccggagactcatcaaccaacacaccgtcttctgtacgtacctgataggccaggctgaccaccaggtcttttgctactttcatgatatctcctgagcatgggaagaatagtggcgcagattgtagcggaattctgcagccgtgtactcactagcttaaaaaaactcggcgcatatcgctagtccggatgaaaa

SEQ ID NO: 16907 - DNA, 444 bp, Arabidopsis thaliana columbia
ttctttaagaccggagcctgatcatatatgtttcaaatgcaaggtcagtccaaagacaagaagatatctgaaactgaaagtgtgtggatcatctagaagaaaatgacatgcctgaatagcaagaaaagcagccatgcaagtgcaattcccaatcaatcacataactcccaaattccatcgcccaagtccattataaaagccagacatgaagtgtccagatgtttcagtgtgtcttgattcaccatgacccaaggactcagcatcagtttccccaaacaaagccagtccacgaaacacaaccatcagcaccgcaccagcgacacaaatcagtgtgactcctaccttagcttgaccttctagcttgaataaattcagtctctcatgttctgcagcaacgacacgaaaatggaatgttctagggttggaagagtcagatagacagta

SEQ ID NO: 16908 - DNA, 115 bp, Arabidopsis thaliana columbia
catggcgcacggcatcgacatgcttgaggttgggaccaagctcgataccctcgacgacgatctcgccctcctggaactcctccagcgcattgatacagcggatcaaggtcgactt

SEQ ID NO: 16909 - DNA, 323 bp, Arabidopsis thaliana columbia
ggcttgatgtaaatagaaaattctgttgaacaaggtaacaggagtgtttagtaatgatgtgtaatgctactggaggtagagatagggaaagttttctttgtaaaaacagacctctggctttaagtcacggtgcacaactccttggagatgacaaaatgaaacaacagttagaatttgtacgacaatcgcctttgcatcatcctccgggtatttaccacccctgagacaagagaatgcagtgtttgagcatagatatgaataaattctcagcatttaacttgaggcatatgcagagaaacacctaaaagagtaatcagacatac

SEQ ID NO: 16910 - DNA, 623 bp, Arabidopsis thaliana
taatttaggaactcctttgccagactcaattgtggtccgtgatgttcagggtaatactgcccgtgttgcagtgacgtatcctcgacctcctcctaagtgtttgaattgtggcagatatggacacttgttgagcagatgttcaaagcctcttatgaagaagcttcccttcaaaaaggatctcccttctggttctaaggaagttcagatcctagttatttctttacctacttctcaggaagctcagagaggcatcatgttagagtcctcgattgaggaccagaaaactactactacccaagcaaaatcaaaatgcagaagatctcgatctaagaagcgctctgctagtttgccttctgcttccatcggaccgttggagatccaaaaaggggtaaaggaaggtaaaagtgacagattagctgctgtggccaagccgaaatggattgtcaaggctgatgtgaagaggccagggacggcttctcagccaactctgtcttcacctactatcattgatgcttcttgcgagctttagagtaattcttctctggctccaactggattgattgggaggcaggtcacaccggtgaataaaggaaaaagcatcagtgttgtggttgctccccttt

SEQ ID NO: 16911 - DNA, 1017 bp, Arabidopsis thaliana
gtctctaccaattcctaatctttcagtggccatcatgagaagcaatttcatgcatgatttgctttgctccacggtgcttcctgatttcaccataattcaatctctctctctcacagaaccggaccctgcagaatcttgttctatcagagaccagtcaagcttcctagattatatggcgttatactggattgtgtagttctctgctatgcccacaggttcctgggttatatatatgattcagcttcatttggaaactgagagaaagttcagatcttgtaactttactgttcttgtaattacatgacaccaccatagtgaatttgtagaagtttgtcagtgataataagattatacgagtaactgaagcttcgatcaataaacaagatgcattccattaccaaggttttaacattatcgcctgaaactagaaacatcgaggacactacatgtggggtggatcagccagtgactgaaccaaacatcccatccacaacagacaaagttttgcaactcgtactggatcatacaagggcatagataaaggattaaagaacacctatctagacacgaccttgccacagacaatcttgctggactttcccggtcttcaaaagcttctcgatttcattgggagggttcatcccaagacgcactgcacgctcccatcgatcaagtctcgtcatacccaggcacggaccataagtgatgttcatgtcaaattgtctaagcatctcctcctccttgtcataatcctctgttaattaaaacacgacaataccacaaaatgttatcagtcagaagaaaatcacaacaagtcaacttaataaaatgccaagtttcgattgttcctaaatctcatatgggattggaaaattaaaccctaattttcgaccatgaataaggaatcagatcatcaatagaaaaaaaaaactaataagttacaatttacaaagaaaataaaagccgtaccgttgagatcgacggagccgtgtgaaatcaatgcggcgggctgggtac

SEQ ID NO: 16912 - DNA, 600 bp, Arabidopsis thaliana columbia
gagattgatgggcaagccggattggatagcccggctaagaacgttcttgaaccggcctgcgttttgaggtgtagtgacaatggttatagtcaccccgcgctgagccaggagccttgcaatatctaccattgggatcatgtggccttgagccatgaaagggaagagaacaaaatgaagaggaggacgaaattccgatgccatgaggaactctcttctaaggtttattttttttgctttggttccgataatgtgtgtgtttctctgtgcctacatatattaagatgtgatgtaagaaagaacaaaaggaaattggcttattattcgtaatagttacaaaacacactaagtggttcacagtacatatcgtggcgggcactcatatgttcttttgtattcatataagcccaaaattttaagagaaaatatcttttagctagaggtacgtcgaaaagatagtgaaaagtttatagccgtaaaaattagtattggataaacgagataagaaagaaaaatcaaattcggaatatctcagtctctccttctttttatgtcgtatggacaaacaagcctcaacatttgtcttcaaactaaatcaaagtg

SEQ ID NO: 16913 - DNA, 472 bp, Arabidopsis thaliana columbia
ctctaacggaccgaccaccgccaagtttttaattttacactaatgctactgccacctcttattccgccagatccaccaccgtctccgccgcatcactgattcctcaaccgtcaccggagataaatccttaagcaaatagaaaatggcgacgaagaactcaaagcaaaacatgtccgtgttgttaactaagctcggagatcgagatactttcacaatggcggctcgtgagcttgatttaatggctagacagattgatccttcttcctcctccgggaatctccagtcgtttatttccgttatactctccgtcgacaccggagataaaccggcggttcgtaagcattgtattcacttgctcgccgttttatcagtttctcttcctctcaattctctatctcctttcctctctaagatcctcactcgcatcacgagacgtctccgtgatcccgactcttcgattcgatcaacttgc

SEQ ID NO: 16914 - DNA, 458 bp, Arabidopsis thaliana columbia
cagaagacaaaagcaacccatgccatggaagaggatctttgggatattgaacttcttggcgattttgcttgtataaggcaaacaaaaatcagaaattagacagcttggtcgagggtacaactctacaatgagcttctggactggttctacgagaaagttaaccgctttaaagaaaggtatcaaccgctccattgtgtcaagagactcgatattctcttgtccttcttgcaaaccagcttctagatatggaaacttgacttgcactaagttgatgggcaagccagactcaatggcacggtttaggacattcttgaacctcgctgcattgtgaggcgtcgtgacaattgtaatgatcacaccacgctgagccaagagccttgcaatatcaaccatgggaatcatgtggccttgagccatgaaagggaagccaaccaagtgaagtggagaagatttggttg

SEQ ID NO: 16915 - DNA, 602 bp, Arabidopsis thaliana columbia
atcatcccttcataagaaaaaagaggtatgtcctagtggttcatcaaattttaattgcgattacggtggctagttaagtgcctctgtaaacatctagctactaagaggatatatcttcaaatgttttggttattgggacctggaggtgttctgtttagttgaaatgaaagtgttgttgaaggttgtacagatatataactttcgagaatgttaatgggtgttgcttgttaaagatctcatttgacgtgtgttctaaatcactttcaggatgagtctcaactaactaagataactcgggatagcgcaaagataactgtggaacaggtccatggactaatgtcgcaggtgagtaataatattgaaacgaaatggtgacatatctcccttaaggttcgtgtatttcacagactcaaaatccatcattgttgtacttgtaggtcataaaagatgaattattcaactcaatgcgtcagtccacaacaaatctccactgactcgtcggatccagacctatgattacatattgaagttgccttcttttggttctagttttggattgaccatcatttgttgtccttcatttattttctgttgtgtaagaa

SEQ ID NO: 16916 - DNA, 565 bp, Arabidopsis thaliana columbia
  unsure (1)..(565): unsure at all n locations
ctnnnnnnnnnnnnnnnnnnnnnnnctaaagaacagctccctgacagctaaccgactcacagtagatgttgttggtcaaacctctgccatcggattaacttaattggtgactatacccatgctgacttaggcacaggcagcaccattaagagtaacgatgacggcatcattattgggcatagctcaacactaacagccactcaattcaccattgaaaactcgaacggtataggcctaaccatcaatgactatggcaccagtgtcgatcttggaagcggaagtaaaatcacgaccgatggaagtacaggtgtttatatcggtggtctcaacggcaataacgccaatggtgctgcgcgttttacggctacagacctgacaatcgatgttcagggctacagcgccatggggataaacgtacagaaaaactctgttgtcgatctcggaacaaacagtaccattaaaaccaatggcgataatgctcacggcctctggagctttggccaggttagcgcgaatcactcactgttgatgtactggagcgcggcaatgcgtcgaagtcgtggtg

SEQ ID NO: 16917 - DNA, 394 bp, Arabidopsis thaliana
ttgacaggcttgtggtcatgcgcccatggctgcttgaaatgttgaagcgattctttgcgttcgctaacaatcagtccctgcaagataatccaaaaagaatgttttgtaaatgaacaagaaatcaaaatcaaacaatcatgtagccaacaataccttggagtccacaagccaaatcttcttccgggtctcatcgattggttttccagtctacaagacaatacagtcacaggttcttggtaagaaggagcaaaggaatcaaagaaatgtcaagaaggcgcggaaccgcgaaaaactatctaacctctttcgaaattttaagagcaattagctcagcgattccggttccagccttcaaagaagataaaaagctttagcaacataacaaatacttaac

SEQ ID NO: 16918 - DNA, 898 bp, Arabidopsis thaliana
  unsure (1)..(898): unsure at all n locations
acactttcacatctaatgagagggcctcacctgcagtttgtcgcgacaacattactgaatcagcttagagtataggactgacaccaaagaaaattccattaaccaacttaatccggatacttgaaccctccaaaggttataactacagtgatgttgacttttttgcaaaaaatttaaacgttggtggagttagttttacaaagaaacttcagaataccacattgagttctacaaattctggatgacgaagagagaatttaccgacgtggtataagacaagccagctcatacagcaagaaatctcaagggaagatgtttaaaaaaattgttccaagaatatttcatacttcataccttggatatatgaaccccgagattcctgtgaacaccagagcattgaatgcacaacaaaactccaagatttaacgatgcccaatcgggctcaggagcattgcactctgcacatgcattatttcccggaagtcctctgagtattgttgagacatcatccccgatattttgtcttgaatcattatgtcgaatttgatccccggagacgacagcattagcaggagcagaactggagttgtctttatccaagtatcgcacaggtgactgcagaaacgatatgtattactaataaggctttgctatcaatttagtttgtaactgaaagccagaggtgtattgtgtcaaccaacctgttgcagaaaatgagaattgagaagcgtccctatagcttttgtgatcttatttacccagtccatcctatctgctccattttcagcctggtaaggtagcataattgttgtcagcattctgaagtacttggatcaggggaagaaggaattagtatagagatacttaagtatcaattgctaagagnggccatgcaggt

SEQ ID NO: 16919 - DNA, 510 bp, Arabidopsis thaliana
agatcgggatgggtttctgttgtctgtttgattgggatagagactttgaatctattgttaagaaattggataactttgggagagactgttgatcagtttgaatgatcccacggaatttacttagtctctttgttgagcataagctgagcttaacttctgtttagcagtattattgtttgtattaattctttcaatctatgctgttatccatcattatagtgagtagtactatctggcaggtttcatttgctcccggactttgatgaaggaaaacgcagctgtcggagaaagctagagcgtcacaacaacagacggaaaaggaaacctgtagataaaggaggtgttgctgcagaacaacagcaagtgctttcacagaatgataacagcgtcattgatgttgaggatggaaaaggtataagtgaactgcgcaaatctcaaatcatatcaccatgtggtttctttgttttagttgtttgctttgcatattttgctagttacccacgtttagag

SEQ ID NO: 16920 - DNA, 540 bp, Arabidopsis thaliana
tgtttaaagaaaaccctcatccagacgacaaacaaagaaagagattaagtgctgaacttggtcttaagcctcgacaagtcaagttttggttccaaaataggcgtacccaaatgaaggtaagctacaaattcactctatcacttcaatttgaacaattattagattatataatcttgatttctaaagtctcatctcaaattaaaatatatttcttatgaaagtttccacttatgacaatgaaatctccaatgttagtacgttcatataaaagattaaaagtattttcgacaatctaattaattactttcgtgagttgaatcaataggcacaacaagacagaaatgagaatgtgatgttaagggcagagaacgataatgttaagtcggagaattgtcatcttcaggcggcgtactggtgcctctcttgtccttcttgcggcggcccaccgtccttggcgacattcctttcaacgagatccacattgagaactgtcgcctccgtgaagaggtacccatttgcatttaacagtgatgtgtaaag

SEQ ID NO: 16921 - DNA, 492 bp, Arabidopsis thaliana columbia
cgtttcaactgccaactaaacaaatatacaaaaaccagaaggagtgggagaattctactaatataggaaaacacactgtgccaaatctcattcaatctttgaccaagacaatctcggtttactctggttaaatatctcatcataagtagatgtttatcttggaaactttttctgacttgacaaggaaaaatgatgtaagaaaactgcaagatgtcatacatatggccaatttcttattcgattcttattattattgtaaagattaatcaatcattatgacaataaaacacacacactaaaaacatgaaaatccaggtgcaactggtgattgagcttaattaagttcaaatagcgcttggagattataaggtttagtgacgttggtcggcccgctccaaatcagctctgcaatttgttgatgtgctttctcagtccaatgaaaatgatcaaagaaccagtgatctgtaactttttcgcaaaactcgtaacttt

SEQ ID NO: 16922 - DNA, 489 bp, Arabidopsis thaliana columbia
gaaaagggagatttttttaattcaggccttgacacatctcagataggtatcacgaaaactgaaacaggacttttggctacagcttaggacatagaggatgctagcatacatgtttgcaggcatggtaatggaagatgcaacatagaaactaaatggtcacattatcttccagatgaggcaaaactatacagttctaatcagtcgatagaattagaacacctttctacttaactattgtctaagaacatcagtctcacctcatgtctgtactctctgcggttgacaaaggaatgagaaacattgatgcaatatgataaagttccctgaacattatcgctcttaatgatagcttcttccaacttatccaatctccggcattctatcgcaatgcccatggcttgttgatacttcccatcactgatgcatctgcagaaggaaaaccatgtaagaagaattgaagcactatgaaaacaagagcattaaatgtat

SEQ ID NO: 16923 - DNA, 514 bp, Arabidopsis thaliana columbia
ccttttgaccacaaaatactcctaatttgtgatacaatgtcaaatatctcgaaaacaccaacacatatgctagctctgattctattgtaatcagtacattttctaatgcagtagtaaataaaaggacatcatcatcacctggttaagcgtcgctaaggctcctctcaattttctcggactaatttcggcgatgaagaccggtacctacacaaaatcggtgccaaatgtggatttccaaaaagtttcatatataaaaaggaatttttatttattgattaatttataacactatgcatggctttttatccataaggggaaaatgcttatgaaaatgtcgtaccacaaaggaaagggtaccgcaaccataacccgttagaaatcttccgaaatccaaaggtacgtcaccctaatattaaaaaaaaaacatcactatttagttgcagattttccatgttattttaaagctttttttgaaaccagctattgaagaaattcagccaaaagaataaccttg

SEQ ID NO: 16924 - DNA, 590 bp, Arabidopsis thaliana columbia
agatatctaataaggaatgtatccttatcctaacatttaaagctcttttgagacctcatgagaatattgatgattgtgtaggtattggtcaagataaaactgtgatgctcaatctgagtcaagagtcacgaaagccaatatctttgaaaactctgtttgaggtagtttttgatgatttgcagaggtcgaacgacaatcttttatcagttagtacctcgtcaacacttcttttatggtatcttgatagagggttgtgtttcttatgtaaatgcccttcttttatagattgttggtgcagaaaatccaatttcaaagatgatcaatcaacctaatggtttctacttgctcttttttacagatcctaccaataggttcaaagtgtgaaactatgatatattcgtaagaaggtgttcaaaacaatgaaatagctttaagagaagaggtatgaaactgaatcagtcatcatcactccatataaagtgaaactttttttggctggattagttccaatttgtgaatattggatcagaaaagttggattaagaaactcacttaaagggctctaccattagacatagaaaaaattttaa

SEQ ID NO: 16925 - DNA, 525 bp, Arabidopsis thaliana
actttaaatcaaaattttaccaaatctacacttcagaacaaaatgaatctgaataaaattagatttagggaaacgtaaagacttcattatggaataaatcgtgaggacttttaagtcattttgcatctcactctcacgccgtaacagtctctctctatgacacaaagcgacggtgttcccgttctgttccgttccgttaagtttcggacttatattacagaactgaacaatcgttgtcttcaagtacgagatttgtctgatttttccaaagcgccgattcgaagatttgaatccatttcagtgatgccgttttggaagatgagcgcaagagatgtcactggattcaaattcctcttctcactcgtcttcatctacgctttaatgtcagctattgtttactccgtcctccacatgaaattcatctctccgcttccggcaaacgctcctctcgaacgattctctgaagctagagccgtcgaacacatccgtgtcttggctgaagagatcgatggtcgtcaggtgatg

SEQ ID NO: 16926 - DNA, 1534 bp, Arabidopsis thaliana
aaggattggtacactttattcagataattgggggcgaatttgtggtcttagcgggattatttatcgcaacacgggatctctcatttcacctctccaccgcatactccagaacacaatggtctatcagaaagaaagcatcgtcacatagttgagatgggtctcaccttactctctcatgcctctgttcccaagacgtactggccgtatgctttgtatgtggcagtttaccttataaatcggcttcccacaccgctacttcagcttcaatcgccgtttcagaaactttttggacaaccgccgaattatgagaagctcaaagtttttggatgtgcctgttatccatggttaagaccgtacaatcgtcacaagctagaagacaaatcaaaacaatgtgcattcatgggttattctcttactcaaagtgcttacttgtgtcttcacattcccactggcagactctacacatctcggcacgtgcagtttgacgaacggtgctttcccttctctacaacaaattttggtgtatccacgtcacaagaacagcgttctgattcagctccgaattggccatctcatacaactctacccacaacaccgttagttttgccggctcccccgtgtttgggtcctcaccttgatacgtcgcctcgtccaccgtcgtcgccgtctccactatgcaccactcaggtatcgtcttctaacttaccttcctcttcgatttcttctccctcttcctctgagcccactgctccaagtcataatgggccgcaacccacggcccagccacatcaaacacaaaactcaaattcaaatagcccaattttaaataacccaaatccaaacagcccaagtccaaatagcccaaatcaaaatagcccattaccacaaagcccaatctcatcaccccacataccaacaccttcgacgagtatctctgaaccaaactcgccgtcctcctcatcaacctctacgcctccgttacctcctgtgttacctgctccaccaattattcaagtcaacgctcaagctccggtcaatactcattcaatggctacaagggcaaaggatggcattagaaaacccaaccaatagtagtcttacgccacgtcactggctgcaaattcagaaacacggacagcgatacaggcaatgaaagatgatcgttggagacaagcaatgggatcagaaataaatgctcaaatcggcaatcatacatgggatcttgtaccgcctccaccaccatctgtcacgatcgttggttgtcgttggatattcactaagaaattcaattcggatggctcactagatcggtataaggcaaggcttgtcgccaaaggttacgatcaaagaccgggacttgattatgcggtaacctgtagtcatgtaatcagatcaacttccattcgtaacgacttgggtgtggccgtagaacgatctaggcctatccgtcaatcggatgtcaataatgcatgtctacagggtacacatagcgacgaagtatacatgacgcaaccagcgggtattgtcgataaag

SEQ ID NO: 16927 - DNA, 501 bp, Arabidopsis thaliana
aaatctagtcattgtgctctgtcttttttgttataaaggaatgagagaagaaacggagagagattgtagagtcggacaatgaccacgtggcttaattgtttggatacgtgtttgataatctaaatcagaagagtaagaaaaatgtatgaaaacgggataagctttataatctctttacttatatgtggatgtgtgaagagtgaggagatgatgaagcaacatttcgtgctagtacatggttcgtgcctcggcgcgtggtgctggtacaaggtgaagccgctgctcgaggcttcgggccatcgtgtaaccgccttagacctagctgcttgtggtatagacacaaggtcgatcactgacatttccacatgcgaacaatattctgagccgttgattcagctaatgacttcattgccgaatgatgagaaggttgtgctcgtgggtcatagctatggaggtttgactttagccatagccatggataagtttcccgacaaaatctct

SEQ ID NO: 16928 - DNA, 485 bp, Arabidopsis thaliana
tccctccgtcttaagcggatgttatccgaggagagggggcttcgtgacagcgaggtggctcgggccgttcagacgacgaggcgggaggtttccgagaccttcattgccaaaatgaagaacgccgagcacaaagtgtcgctccttgatgaggtcaatgaccgattcatgtacttgtctcaggcgcgacacacgcgcagctgatcgaggccctcgaaggtggcggagttctggagagtgagaaggagcaagttgatgagtggttaaaagatttcgccgatgctgaggtaaatcttaatcgcttcatgtccgagctgaaagatgacctcaaagctccagctcccgagcccgctcctctgagtccgggtggtcacagatcggtcgagtcattggctgacgaggcgggaattatagatcaagccggatctctcctccctgccaaggataatcgaccatccgaagatctcgactagggacccgaggcggtt

SEQ ID NO: 16929 - DNA, 565 bp, Arabidopsis thaliana
cccaaatcatgtattatattcttctcttttcatattttgaacatatcacatgatgtttagatcttataaatgcagtaatttaatagagagattagaatttggaagaaaaaaaagttacatgattaaacgaagtaattaatcaagttgtaagtagttattttaaaaacaatattagaaaaatgttttttggttactcatacagtaatacttaattcgtcaactgtgtcagtgttacaaaaaggctaaaagaatgggccaaatgggctactcttgtatcgggtcaggaacgggtcagttccaacccgatcggatctaaaatgggcggggcgcttccttttcattttgatggcaatcaatcatcatcaatcgacgcttttttagagacaaacacgatcgccgatccatttacgagccgtcgttgctctacacatatcaacaacaaatcttatcctcccaactatcttttctctgattttcttttcttctccagtttccatttctagaatcgatcgatattgaaggagagaagatgcctggtttaacatgtaacgcgtgtaacatggag

SEQ ID NO: 16930 - DNA, 971 bp, Arabidopsis thaliana
  unsure (1)..(971): unsure at all n locations
tataagtcggagaagtataaatcaaagccgcgaaataaaatgtccaaccggccgtttaacttctttagctataacattgatctcatcctcaacaaccaaacctttagcaatgtctcttagcttaggcttaaggatctttccattcccgtttttgggcagttcttccaaaaacaccacttttctcggacacataaaatgtggcagattttcacggcaatactcaatcagaattctctcatctgggctgcactgtatccagacgatgagcttgaattgtgaagccccaatttgtcaatgttcaccttgtcatgtggcattctcagccgttgaaggccatattctagaccatcctcaagagacattttatttgctctttccttgccaatttcctcaacaagcaaatctacatcgtcaattagactgttgaactctgcttgtagagcatcatctaattctgcaggaacctttttccctgttacagtatcataaagatgacagaatccatgtaacacgctcaactccagacctaattggtacagaccaataccgatggatctggcattctttcagatggcacatcagcctcaatgcctgtaattatgctagccccaagatccacaggaactgaaagagacgaccggtctgtaaatacacgaccacctactctactccttgcctcaagaacggttacagaaaaaccctggcgctgtaaatgacgtgctgctgttaatccagcaggaccagctccaattactataactttcttctcatctataacctcacatggaacacagtcccttcctctcatttgattactatgtgcagaggagagtgtgctagacaaagcagcgttcgctactgaaaatgtttcaggatgcttttcaacattagatgcagtactatcctgtaaagcattcatgctcacagaacgtttgttatcatcaataatgncttgtcgcattttttgctga

SEQ ID NO: 16931 - DNA, 641 bp, Arabidopsis thaliana
taactggtcatgtgtgccattggataaaagagagaggttatttctagagtttgcagtaagctgtcatgcatctctcttactttcttaactttacagcttaatcttttaaatttcactaactaaatctactctttttttgtagaaaactcacagttgggatcccttaataacagggacactgtagtattacttcaatgagatctgtagacgatgcttgaaggacatggttagcattgcaaggagaactcgagagcagcctccatagattggttgaactctgtggggtgttatgtgcgcttactgagacaccgaaccagctcaaaaacggagttggacctattacaaagctcgtctctctgaccgtaacggtctcggtcctcacatccacttctctgggccaaagtcttaccaagaaatccaagacgaattggtaagtgtttttgttacctcttcagttacctcacatgtatgtttttgagtatttgagctgtgttggtttcattgtaggaggagaaatccggaagaacggtcactctttatgaggtgtttgtagagacacatactaagtcggatggtacgtatgttgatcggaaggcggagaagattattcaaatatatgagtataatgtgagagataggtt

SEQ ID NO: 16932 - DNA, 620 bp, Arabidopsis thaliana columbia
caagcaatgatccgagttcaaaactatcaacagagatgctgcccgctactataactccaatatcaaaattcatagattcgaagtggagagctcgtttacgaaaagtgtcagcaacacgagagagtaaacgccacaaagctgggaccaactgggaaggtccctatcgaatcaccgaggtggtacgtgacggcgtctataagctagagaaagttatcaacagggtacctgagttacggccttggaatgccatgcatctcaagaaataccacgaataggtactcaaaaacaatcaaactacgataaggcttgatcccttggtagggtacgtaggcagcttcccccaagagcgcaaccaccactttaatcgaactacgataaagcttgatcccttggcagggtacgtaggcagctccacccaagagcgcatccaccacttcaatcgaactacgataaggcttaatcctccaaccggttatgcaggcagttccctccgcgaatgcagccaccatcttaactcgtccgtttgaaacatttttcatcaacacggaaaacggacatcacatcctccatcaaagaaggttagctgctcacctaacagttcaaccatctcgcgatatcaa

SEQ ID NO: 16933 - DNA, 643 bp, Arabidopsis thaliana
ctgccgatttgtggaaggtatttgcagctttcgagtgtttgtgctacatgcggggtcgaatccatcattcccgaagtaaatattgttagatctggatttttaagctcacaattagtatcttccacaaattttaattcgttagtaattgttgataagcaagttaagttcttgtcgtcacaggtgaaacctgtatacgctaatactgtttctagatggcgaaccaccctattcctcgtcggttgtttcggggtggatctgaaccaaacggtgagagagtccagtcttactgtgagttatctttaatcgataacatcgccgacgctttagatgaggaggacatgaagattctaagggaatcacagtttggaaaattatttgatatcccggaggaggccgcgtattctggaaagcttattcactttctgctaacgaggcagctagttgttagcaagcaaaataaaatctgggtaatattctctggtccccaattcagttttcgatatctgagtttaaaagagtaactaggctcaactgctacaaactccctcatgtcaaagagaggaaggggaacaaaaactacttcatgacaagtattagtacaccttatttgactggagtgatgtatctgttgagcgggttgttg

SEQ ID NO: 16934 - DNA, 599 bp, Arabidopsis thaliana
gatgtaactgaacatttctttcttttttcgaccaaactgttcgggaaggcccaaatacttacccccacctccttgatttggtatattcaaaagagtttttagacgtaattgagtagagccataaacccgggagccaaaagtgattaatgatttctgaacatttattttatgtcccgagtaatattcataaacgtcaaaaacatcttttagagcttggcagttttttacattagcttgacagaagaagagtgaatcatccgcaaattgtaaatgcgttatcgccgttgcgccgttgccaatacgcactccacgaatatcaccactcaatgctttagttttaatgagatggctaaagatgtctccgcataagatgaataaatatggtgataatggatcgccttgtcgaattccacgggttggagatatatatccatgtggtgatccattaatcaagacagagtagtgtacagatttaacggcagccataatccaccctatccatttgtcacaaaaaccaaagagttgcattgtcgtttccaagaaatcccattcaactctatcatatgctttgctaacatctgttttcacagccatatatg

SEQ ID NO: 16935 - DNA, 1586 bp, Arabidopsis thaliana
ttattaaaaaaaaaaacagaccaaaacgattagagtgaaaattgaagcttgtcaaactaaactctataatcctcgatcctcgttgtaaaccattcacaataataagtaatctcatcatcgttagatatcagtcctcgatgatgttattttgccaacacaattataaagatcagaaaccaaattctatgttgatttagagttgaacagagttggtgtcatcatgttacaattacaattgttactagggtctattgttgttacataatattggttgatatcgaattatggcatgattttagttatcataatgttggggcttgggagttgggagtgaaccgactctctaatgggcctgcgatttcctttctataagtgttgggtcttaggtgtgatcataattattatgacccggatctttaatgggccttctatttccgttctatcagtattggggcttaggacttatcataactatgatccgaatctctaatgggccatcatcttccaccggattcacttcaatctgtgtctatcagagtcgacagcaatgagatcagtccgtgtgatgaatgccgtcgagtttcttgaaccaaagaagttccaattgacaaagacaacaaacatggctctactaacattccgctgaagaagattcacaccaacttgaaaaatatatcagtttggaatcttcacaaagatgaatgctttaaataacaagacgcttcctagctagtagctaggccaatttgggattctgcatgtgtgagagaagagatcatcaacttagtaaacgactactttgggcaagatagatcaaacatgtgctactctgtttcaaaggtgacgtattttattcaacgcttagcgatttacatggttctcatcgaaaagactaaaaaagggaaacaaaacacaaggaaacatactaaaaaaaaaaaaaaaaacagcgatcaccgattaaacgatccaggtcctgatccggatctaagcttgggatccggatttgtggaggtagagttttccaaagacgtgaagagcagtgacgaagccgatgaaacagagactcatgatcagaacaaccgtcggtgagatcttcaaccccggagcatcatctgtgtagaatctcagcatgttgctcgatcctgatccaactccagatccgccgcctgaggatacgccaccaccgccaccgagcctgcggcgacgcatgccggcagtagcggcggcggaaccacgaggagcggccagaccgggccgggcggttgaagaaccggtggaggttgattgttgggattgggaagagcctctcgccattgttgtacggtcaagggttagaagaaaaaggatacaaggtgagagagaggttatggagatggagtaatgttagaaagggtagtatggtaaataacgtcaaatctgaagggtacttaagaatgttgatgatgattaggaagagacgtggggttctagtggaactagatacaaattatgaattcaataatactcccaacgacttttgttgggcgttagtacttagtagtaactagtaagatgaatattctatcaataaaccttaaattgataag

SEQ ID NO: 16936 - DNA, 707 bp, Arabidopsis thaliana
caaaatcaacagaatgccctacaaacattggtgctgagatgcaccaagggccaccgtcaaaggaaaggaattgcacctcctgctatccagaacaacaacttcgagatcaagagtggtctcatctagatgattcaggaaacaaattccatggtctgccaatggaggatccactcgaccacttggatgaatttgatatgctctgtaacctaacaaaattcaatggtgtcagtgaagacgaattcaagctccagttgttccattctcttttggagacaaagcacacatctgggagaagaatctgccccatgactcaatcaccacctaggatgattgcaagaatgcttttctagcaaagtttttctccaacgccagaactgcaagactcagaaatgagatttctggtttttcacagaagactagtgaaagcttctatgaagcatgggagcgcttcaagggttacaccaaccaattcggacatcattgatgcacgtcaagtgaatacaaggtagagtatgagaatacaagtatgtgatgtattaagcgtttgtgggcaaaataggccatgtcttcttcaagttagcctctctgtttatataggtcttcttcctaggtcatttggttcgaggtcagcgcaaacttctcctacatttcaggtctgtccaaacttcttcaatattttagttgcgttccgagattcctcgtggctg

SEQ ID NO: 16937 - DNA, 702 bp, Arabidopsis thaliana
ttttccccttttatcttctttaattaatcatttcacttttaaaaaaaaatacataaaccaaaaaaaaaagacatttttccgataaagttgggatttttaattctgtaatttttgttcagcgatgagtcaagtctgaaactttatgaaacccagatacaaaattcacagcaaatcctttaaaatgttcgatggggaacacgaaaactctcatttaatcttcttttttcattggtgaattcgtaaagttatcaaatttcctaaaaccgatcatttgaaaattacaaacgaaaacaaacaaaaaaatttgctcaaagtttggatctttcgtcttcttcttcttcttcttctccttctacagtttgtccatcttcttcggttttggtcacggctaagtactcaagcgcagtgactacatcactcatcattggtctcgttgctgcttcttcttgaagacacattgctgctactgcaagcgcttgatacaatccttttattggatactttccttcaagcaatggatctgccattaacgtgaactttctcctatctttgaacaatggactcgcctgcgcattttagcaaaaccaaattaagagaaccaatcaaatggttttgttcagattgaagaactattgcgtactcaagtgactaagttctgttcttcagttggttttgttgtgtcaatgactcgtcttcctgtga

SEQ ID NO: 16938 - DNA, 855 bp, Arabidopsis thaliana
tatcaatttttatgcaagtctttctatagaatatttctctctcgtcatgattaatgctaattttcagtttttcacctccacaaacaaaagacggttctactcgcacgtgttaaaagacggttctgctcataagcatacaaaaatagaaggctaggatcataaatcttataagttacaaatcaaaataacatatatattcactaaatactttacatgagagattgaattagaaatggaaataatattagtcactttgtgcttaacaacgctccttgcacttcttctccttaaatccatactcaaaagaaccgccacaaaaaactttaatctaccaccgtccccttggcgacttccggtgatcggaaacctccaccagctcagcctccatactcaccgatctcttcgttccctcagtctccgatatggaccactcatgctccttcattttggccgtacaccagtccttatagtctcctccgccgatgttgctcatgacgtcatgaagactcacgatcttgtttgtgccaaccgcccaaaaacaaaagtggtcgataaaattctgagtggtgggagagatgtggcttttgcccttatggtgaatattggagacaaatgaaggtagttgaaagaacaactagttttttttttcgcttttttctttgttgcgtaaatttttcctagaagaacattttattcataactatgtgttggtagttttgtcacacaaaatgttttttgtacaaaacattttgaatctacgttggatgcagagtatatgcatccagaatctactcaacaataaaatggtcaggtcgtatgagaagataagagaagaagagatcaaacgaatgattg

SEQ ID NO: 16939 - DNA, 650 bp, Arabidopsis thaliana
attttcagattcagtgctgttctttagtatccattttccaactgtgtcacaatccacaggacggtgagcctcttcactgcaattccagcaaaagctatgcgaacacaagcacgaaacatcataattactttcggtcccagcagcaaaactaattgcatgctcacatcctggggcaggacagcacttcatctctctgttgacttcaacataagacctaagaaaatatctataatacctctacttgtcttccttggaacacaagttatcgatcatatctcgaccaatggccgcaggacaacaagggtagggacattttagcatcaaacatcctgggccatcattgatgcttgtgcttatataacccgtgtaacatgtagcgcagaatgggtgaccacaagaaaccgatatagtttcctcaagagggtaggattcaaagcatattccacatgtaaactctctgccatcaggtgcaggtccctctagtatgccaacagttctacgaactctgtcctcatccgcaaaccattcatcattaactttactgacactccagtgatagtgaagaagcaaaagacttgcttggacatcggttatggagaggacaacggaaactcgcccaacgtcatccttctgatgcctgcgaattcccg

SEQ ID NO: 16940 - DNA, 545 bp, Arabidopsis thaliana columbia
tgtttttagggctcataaaaaaaatggcaccaagttgcttagccatgtggattgtgggacgacaaatacagatttcaaagtgaacacagagtcgctcgtgggtccagccaccgacactgacctttgttttcttctctcttattcgttttctcttaaatctctctctctctactctttttaatacgtgccgactcttctctacataaactctacacttaaatctgtgtcttagagttagagagagagagaccacgccagatatacctttcttgtttcaccggttttcatacacaaaaatggcgggcagtcctcattcgccgccgcattattcatcggactctctcttctcttcgccgtcacggatgaagatccgtacagattctttgaatggaacataacttacggcgatatatacccactcggtgttcgccaacaggtatcgatatcagtttaatttattcccggttttcgtttatagatccggttattaaaaactatggatctctttgcattttccggtttagggtattttgatcaacggggcg

SEQ ID NO: 16941 - DNA, 596 bp, Arabidopsis thaliana columbia
tatttgaaaataatcagcaagttttgaatcctaaatgtaagttgtactccaaatattatggtgcttcaattaaaatcttattattttcatgttgcctgtatataagtaactctgtataatctactaagtagtcacgtaaagtagacgatattttttttcttcggggaaggcgttgtattcctatttttcagcaggatagtgtttgtataaatcgcatataatccacaaattacactagcctccaacaaaacagtacaatgtaaatcgcaaacatcgctattaattgttgaatttcaaaacaaagagtcacagattacataagacccttcgggtttggttgccagcttttgcacttgtaagactcaagcagtacgtgtttctggagacaaggcattgaacattttgatagcgtactgtttagctgcccctcgcatcttctcttcgtctagtttagcacaatagtccatggcgttaactgaatgtagctcaagtaagatcacacacgcaattccaacaaggcctgaaaaacacacgtgaaatatatatgtcatccagtcaaatataaaacacttagcaaaactcaatcatggaagaca

SEQ ID NO: 16942 - DNA, 518 bp, Arabidopsis thaliana columbia
atcccccctaattatataaaatattttcttctaccgtttgtctatataaccatatgtgttgtctagtgcatgtattcagccacgaataagagaatagtctactaaatcaatggcaactttacgtataagttcagctcttatttaccaaaataccctcacccaccattttcgtcttcgacgtcctcaccgtttcgtatgcaagtccatgaccaaaacgacgccggatactactcttgttgaactcagtcgacgctccggaaactatcaaccttcaccgtggaaccattgttatctcctctccatcgagaataaatatgcggtaaagttttgtactatattttcataattttttattgttgcacctaagtttcacttttatttatgaattcttttattaacaagttgttactacgtgcatgtttaaacatatgtatgtatatacagagtgaaacagaagtaataactagagatgtgttgaagacaaaagtgaagagcatgcttgatgatgagaagaagag

SEQ ID NO: 16943 - DNA, 544 bp, Arabidopsis thaliana columbia
ctgttatgacaaaaataaaaatcaaaccaatgtaagattctcataaaaccacacctattaacttaggaatatccaatcaattatactacttaacatctttcacttaatgatagattctcagagaatacgacgaaacacttacgttttcttcatgagagctttctcagcatagtttttcttagcaatcatcttacccttgatacctagagactgcaattagagcaaaagcagaagaagaatcagtaaaaggaagctaaaaatggaagaagacgaaggagaagaaagtaagaaccttttgagccatggtggagtgcttgtgaacttcacgcgcctccttcttgcgctttctctcgaagtggtcgaggcgatatccattcctcttcctgtgcaaatctatgtaatctccctgaggctgtttttcatccacaatagaagacccacagaaattgttagagatcaaacgctcaagctgttatatctgagaaacgaaagctgtaagaagaaaaaaaaggtcatccggcggcggagaacgtaccatggttgc

SEQ ID NO: 16944 - DNA, 477 bp, Arabidopsis thaliana columbia
taattactcaatattagcatcaaattaacagacgatttgtcttattattacctggaagggtttgagggtgagtgtagttgataccaacatcttgagtgactgaacatataaagtcttggataagaagatgtggttttaagccatcaataccacacttagcttccaaatgctcaatcacttcctcatcggttggctcgaatttcacacctttaggaaggcctggccatggagtcagtacctgacaaagcaaaataagaaaaatactatctcagtattcacataaacagggccataagctctagttacatgtgttctatatgtgttactttacattgctgttgtcgatgcggtaagagcagttaaagcagttgatataagctccgcagtctttaatctgcagagctgaagacagagacgcattctttacattccttgagatccatgggccatccactatccaagtccttgtgtagagtt

SEQ ID NO: 16945 - DNA, 583 bp, Arabidopsis thaliana columbia
  unsure (1)..(583): unsure at all n locations
nnnnnnnnnnnnnnnnnnnnnnntaaaggaaacaataacggcgtattaaccgcctgagtagcactatgttaaccgagcagtagcgatgtggctacgattgcattccaggggaatcttgcgggaataatgagaaagataaaaatagggctggcgctgggatctggcgcggcgagaggttggtcgcatattggcgttattaatgcgctaaaaaaagtgggtattgaaattgatatcgttgcaggatgttcaattggttcgctggtgggcgctgcctatgcatgcgatcgattatctgcgctggaagattgggtgacctctttcagttattgggatgttttacgcctgatggatctctcctggcagcgcggtgggttactgcgcggcgagcgtgtcttcaatcaataccgcgaaataatgccggaaacagagatcgaaaattgttcccgtcgctttgcggctgttgcaccaatttaagtacgggacgtgaattatggtttactgaaggcgatctccatcttgctattcgcgcatcatgcagtatccaggactcatggcacctgttgcacataacggctacctttag

SEQ ID NO: 16946 - DNA, 594 bp, Arabidopsis thaliana
  unsure (1)..(594): unsure at all n locations
aattttgtttgtccatggaccatcctcaacgtaaacactagaattgtcccaaacccaaaaaattgaaccaaccaaataaaagaaaattataatagccgaatgagacctaaatctctaaaaccaaaaacctcgtaattggaatagaaccgatctaaacttaaacgaatatccaatacgaaataaaaagccactatttaatagcaataaatcataaattcttttctttttttgtaaatcataaattcttacgtctatttttttacttattagttacctaattcactcattagcttgacttaatcgataattatatttatagatacagtatatggtaaacatcaaataactaacgcttattgaaaatttcctttaaaatgactaatgagacgaaaaaatcaaataattaaacaaaattacaaaactgccatttcttcttaaattatttcaagtaataactgtactaaaagctgtttttgttctttctctctctctctctctttcgctgctctcacacgcaaataatggctcatctcttcagggagctgtctctgggccactccnaagagagagtctacgccgccgccgccgtcacat

SEQ ID NO: 16947 - DNA, 794 bp, Arabidopsis thaliana
tgagagagtggcaaataaaacttctcattaaactcggggccttattaatagccaaaatagttctgaagaacaattaatgatggcaatttatgttttgtttgttcaatgtagagaaggttgtgagggcccgcacgagcaccaacgaacagaacacgtgtgtggacgaccattgggccttgcctttgacaaatccactggtgacctttatatagccgatgcttatatgggccttcttaaagttggcccaacaggtggtgtcgccactcaggtgttaccacgtgagctaaatgaggcccttcgatttaccaattctttggatatcaatccacggaccggagttgtctactttaccgacagtagttcggtttatcaacggaggtacaaaattcttggaaatttaatgaaaaacatgtttttatatgagtgaaaaagatcattgtttatatgttttttttttttgttttgtttatatgatgcattattagtacgtaaattgttttttttttccaggaactatataggggcgatgatgagtggggacaaaactggtagactgatgaagtacgacaacacgaaacaagtgaccactcttctaagcaacttagcgtttgtaaacggtgtcgctttaagccaaaacggtgattaccttctcgtcgtcgagaccgccatgtgtcgtatcttacgttactggctcaacgaaacgtcggtaaagtctcaatctcacgataactacgagattttcgcggaggggctccctgggtttcagacaacataaagagaagtcacgtggcgga

SEQ ID NO: 16948 - DNA, 1184 bp, Arabidopsis thaliana
cggcagtggtggcggaggagtgcgccgtagagacgcgactagtgaaagaaaacctaactcaattcgcggcggagatgaaaattcgtttccagattgagtttgtgctgatgaagacttttgagatgttatctttcaaagcgattaggtttgttgagggggagaggaccgtcgttttgatttccccggcgatatttcgtcgtctaagtggaatcactgattttgttaacaatttacggagagtatcacctaaggtcgttgtattcgtggatagtgaaggatggacggagatcgccggatctggatcattccggcgagagtttgttagcgctcttgagttctacacgatggtgctggagtcgctcgacgctgcagctcctcccggagatttggtgaagaagatagtggaagcgttcgttctacgaccgaagatctccgctgcggtagaaacggcggctgacaggagacacaccggcgaaatgacttggcgggaagcgttttgcgccgccgggatgaggccgatacagctaagccagttcgccgactttcaagctgagtgtttattggagaaagcgcaagttagaggattccacgtggcgaaacgacaaggagaattggtgctgtgctggcatggaagagcacttgttgccacatcagcttggcggttttagataaaccgggtttggtttaacaatatgatatagaatagaataattgtatttaccgcctttaatatctcttttctttttgctgtttatctttcaaataaagaaataaaaatatttcttacgaagagtctctgtatgagctagagtcttttaatgattcataatctcctctattcaaaacacaagtgaccttttttttgcgagtgtgcgagttcgtcgtcaatttggtaaaaccgtcgtacgaatcgccgatgagcgggtttgcttcacagattccatccatggcgcttcttggatctggactcaccggcgaggtaatcttcctttagtttgattgatgtttccgattgtacggcttttgttccgatccgtgatttggggattcgtgataaagtttatgattaaatatgtatatttaggatccttcatcctctgccttgtcggaattcagatttcttctgtactggattgtttttttgtttggattactctttgacaaaagccgattagagaaagagg

SEQ ID NO: 16949 - DNA, 561 bp, Arabidopsis thaliana columbia
tttgaattcctgtaactctgggtccattcagcctcgaaatatctatcaatgggccaagtgttgtccaatctgatcatcatgccaatcattatgatgaacgagatgagttttgtggaagacatttttttagttactgtgaaacaaaacaagcaacgtttcgttgtctattatttagcaaccttttatttatacacacaaatgtaatacgaatgcaaagcagggagagaagtgacaaataatcaacttcatttacatctaaagttgaaatttctattcacttatccaaaagtactaggacaatatgactcatcggtgaaggcgtctggtgctgacaagttcaatgtcaaaaacgagagttccaagagtagaaccttctccattggcgagacgtgttgggttaaatatagtcgtgaagagtctctgtctgtcaaagaactgcaaacacaacaagaaacaaacaaaggatttttaaaccaatctttggtactatatgtttctgcaaacaatctgaataatatgactggttctctaaaactttcatatcaaacagattgatactag

SEQ ID NO: 16950 - DNA, 911 bp, Arabidopsis thaliana
  unsure (1)..(911): unsure at all n locations
ctaccaattgttcctcatccttcactcccatctgtatacccaatcggcgtagtgagtattcacagaaattcatatagatcgagttaatataacccggttttcttacatcgtcttcatcttcatcatcatgatggcttgtaaaagcgtgtctatttggctcaccaatattatcaatcagtgcaaatcttcctcttaactcttggtcgactatctgccaatgttttcctgtacgcatactacaatccccctatatccccagtgggacatcattccacaacggttaagtccggattgggttaataaaaaccgaaccttgattttcttgttgaaattcctttcgttcctcttcttcatgtacctacgaatcttctctttcctttgctcaggggagagttttccaactttgttcaacgttgagtcttctaaaccgtttatatcgaccggtcctaatgctggatgagcttgaggtgtcaccaagtggctctggttctcggcgccaccaccaagtgccttcttcaacaaaattaaaccggttagcatcacatcagaataccaacnccggtcttgtgaccggaaatcttagctccataccggttcttaaagataaccaaacgttaaccggaaaatatttgtaacaaaaactcaattacctggagatcttctggattaaacatacgtttgatggaatccggacaaaaaaaaccaccattatcagcttgaaagtccatcagtggatcatgtggcttattgatttctgatcccacatgaatattcccgggaagataaccgagattactttcagcagataataaaccggtactcatatacgccggtaaaccggacgaacggaagaaagagcaagaagggttcaaaccaagattgtaacttgggactgaagaaagacaatcttc

SEQ ID NO: 16951 - DNA, 439 bp, Arabidopsis thaliana columbia
gatcctctcttagctagtcagaacactagacccattagcttgtttgataatgatggtgtgaatcaaataaattctatcaaactcggggacgatatggaataggattagagtactggtatagttctagtccatgggtttggaggaggagttttctcatggtggcatgttgtgggagagttggctcttgagctcggttgcagagtcgttgcctatgaccggcctggttgtggattaacctctagacttatccggaaagattgggagaagagaaatctagctaactcttacaagcttgaaagccaagtaagtttctttagatatgtaactgctgaaaatgtgctgtacataagttgtatacggttcttctgtctctatctctctttgtgacatagttgattcacaggtagatctactactatcaaggtgatctgagatgggg

SEQ ID NO: 16952 - DNA, 609 bp, Arabidopsis thaliana columbia
  unsure (1)..(609): unsure at all n locations
cctgcaggtagaggattngagattcgtgtataaagagtgttcgagaagtgtaagttaaatctagctaataaagatcaaagatctatgtatagtagaaaactaagtatttgatctaaattatcagagacacatgtacataaaaacccgagtttctaagctagattttaagaatttaaagttaatgatattattgcaagctagggtcagacttcggatatgataaggtgaaaactctctctgtacctgggaaccagatttgtgtgcggattgaggatccaacgccggaggaatgagaacagcatgaccaggccacttttcgttgactttgtacaaagtagcatagtcttcagcgatcacaagaactttttcttgatgtttctgtctagaaatgctagtcaaccattgttaagaattgcaagaaagggtagctaacagcacagacgatcacagtctcgttcttagcaacaaacttaacggcttgagcaagggaatagtcgcgccagtcggagactgtaaagaaaagtaggagaaagtggagaagatgttgtgtttggagacatgtacaaggaagattttgtcagaggtaagaatacaccgaggatacaaaga

SEQ ID NO: 16953 - DNA, 529 bp, Arabidopsis thaliana columbia
tgccctcttcacagtagccattcacaatggtaccgcagtacgtacattcggtttaactttattgtgtaacatccttggtatgatcatatcctcagctgtacatgttgacccgatccgcgcatacgcttttgccaatgtgttaaacgtaactacatcaggttttaccccataagattgcatcttatatacaatgttccatgcttcttcaatcttcctctggttacaccaagcctggacaagtatgttacatgttctgtcatttggttggagcatctcatcccgtaacatcatatccaggagtcttgatgattcctccagcttaccaattttgccatatcctttgatgagagtattaaatgtacttgctgtgggtttacatccactttccttcattttttcgaaaatcttcattgcttgatcgagatttccagactcggaagaggcgttgatgatggcgttgaagagaatggtgtcaggtttaaggccgtttttctcgactttggagatgagggagaggagagactggaag

SEQ ID NO: 16954 - DNA, 562 bp, Arabidopsis thaliana
atggtgttgaaggcttgctgagcttttatcaccgtgggtattgtttaatggtggatgttggtgggaagatgatggtgttgtgggatgcgtctgtgtattattcaagtagacgtaaagagaatgtgatttggtgtgcggagatttcgcttgaaaggcgtggtgatggagatgagatttgggggaaagttgagtggtttgatgctgtgcttccagtccacaagtcttgtcgtttgttgtatgcggatggtctttctgctactctttgatggcttgaatggttaacgcggataatgtcattttgttttgattagtatgttcctatgatgaatatttggtttacggttttagcgaatgcaattggcattgttttgcttcctcttacaaaatgtatttgaatacacttttgttgtgttgcataaattagaaggctacggttctctttacattaatgtcactgtttgtgtgtctaatgtaagttacattatgtaacattggcgtgtgtcactgttaccagcgagaacagagcaaaaatgcctatacgcaagagaagacagactttagt

SEQ ID NO: 16955 - DNA, 524 bp, Arabidopsis thaliana
cctccaacccaagccgaatacatccccaaattctccggcatatattctggcggtttcaccagtgttggcctaatggcagatgagcacaagtttgcttctttctggaatctactttcgaatcctgccatcgaccattccaacaaacccttcagttttccgacccaaaagatattcaaacacactatgatatcaagtgttgttagtacctgtcatggaggttgtaccaccacaaagtacagtgttctccaagagctgcctatggttctcagatgacactgtggagataatccggacaagctgctcaacgattccatgctcctccagtcccagtattgatggctgaaacagagcttctccaaccgagtatctctctcgcccgatgcttatcacctataaggccattggttttgttatctatatgtataaggtaacaacacaaaatgtagaatcttgatttcacacaaacctgtccatcaggaagagtatgctgctcgatttcacagttttgggtttttttgtaagca

SEQ ID NO: 16956 - DNA, 393 bp, Arabidopsis thaliana
aatagtaaaacggtgaattacatattgaactaaagtctatatatcttgtgagggacaatattagcaacaataattgttagaacaaaatccatagcgcggatccactaactggagagtaaatacatgaatgccgagaaaacatgaactcgttaatcatcggggtttaaacaaattacagatttacaggagaaaattatcgatgatacgtgtccttagagagattggaattgtgacattgtgaactttatcgactccagagtcaaactcccaaagtaaaacgcagtgttcactcgatgtgagcctggagacacagttaccgtatgagcaagcttgcttctggtgttgttaaacttcagcttctttggcgaaaccacgacattgaatccgaatgga

SEQ ID NO: 16957 - DNA, 555 bp, Arabidopsis thaliana
gcacatcattaaatggagggacgtcaacaatgggagctgctaatctgcgtagaagtctttctcctctccatgccgaagttgacgctttaccctgggcaatgaagtgtatgattggggccgacaaccaagaagtagctttttttatagactgttcagacctggtgaagatggtgtcttccccaaccgaatggccagcattttcagcttatttggaggagtttcagagcgacaacgaagaattcattagtttttctttatctttaatttctcgtaatgcaaatgtcaaggcggaatatttggcacgaaaaattcgtaccgaatcgcttcatatcacttatgtaaacaactttccttaagattggctcgtttgagccctaaataatatctgatgacaaaaaaaaaaaagattcccaaaattacctcgcactcctctttattagctttgcaaaaaaatagactatcatctgcaaacaacaccccgtaatcaatttactttgttctgcttttcgaatatttgcaataagcacctccgtacataagataaataaataagga

SEQ ID NO: 16958 - DNA, 509 bp, Arabidopsis thaliana columbia
atatttgcatatgtgatagatatcagagccttagagtcgtctcagaatgaactcactcgccattagagtctccaaggttctcagatcctcttcaatatctcctttaggtaattcttctttcttatcacctaaatcttctgcctttttctcagaagactatcaattgtttcttcttgttgtgacttcgatgtgtagcaataagtgctgagagaggctctaagtcgtggttctctactggtcctatcgatgaaggtgtagaagaagattttgaagataatgttacagcaaggcctgagcttcaacctcatggagttgatcctcgtaaaggttggggatttcgcggtgttcatagggtaaacagatttgatccttaacacttacaagttatgcattcttagctgacgaatatcagaatcagattaggcttagctatagcaaaaaacccgcttgtcaaggtacggtttttatgtatgtgccttggataagagtttggaactagatttcgatga

SEQ ID NO: 16959 - DNA, 482 bp, Arabidopsis thaliana
atttcaagagttttgattcttagatgatagtatatgacatctcttgttttgggctcatttaattttgacatttttacatcatgattagaatgctgtggacatggctttggcggattcttcttgtgcagggcttgaaaccacagaatctcgactctcttgctttttcaataaggttgatcttcctatcccttatctgtttttccacttccagatctttgctgcttaaaagctttttttgcccttattactgatgagaaaagtgcaggctattgtcaacgtatgtggcgatcttgtcaaactcgttccaggtcgagtttctactgaagtggatgcacgtcttgcttatgacacaaatggcattatccgcaaggtagttactacaccatgtatataagataatttgattatatgtctcctgtatcttcaaatcactaacttgtgatgtgatgatgtgtgtaggtcatgatctgctgagactatac

SEQ ID NO: 16960 - DNA, 656 bp, Arabidopsis thaliana
tattaataaacgatcaaacaaaatcggtaatcattacaaaaacgcttattcgaaaagaattaaaacgatcaaacaagatcggtagccatcataagggcgtttattcgataaaaaacagaaggaaaaacgatctgaatgccactaaggatcatcttctatcacgacaaaggcatgataagagaacatttcacagcattcaggcgagctacaggccagataaagcatcagatcgccctattcgaaaacaacgcggttgtccctgagaaggcgatctggcataggccacaccagctgaagaccaactttctcccaatcctctgagcgaatttccagcgctctgatcgtctgttcgacttcatccagacgagtgacgatccttcttcgcttcgccttcagcttagtgatcagagcttcaagctcctcgaggcgggaatccactttcgtttcttagtccggaagtactgcagctcgcggcactgatcttggtgcataaatccgacctgaagagccaaaacaacgaagttataagaatcactccaaaaccaaacgataaattaaaacagttctcacctggttaatgaagttctgacacacggtggtcttggcgtcggaagcagccaatccaagatagaacaaaggaggcggtctgggaatga

SEQ ID NO: 16961 - DNA, 1103 bp, Arabidopsis thaliana
tttgatattaaaatattaattattttggttttgagatattcaaaagagtggttgttcactgatgaagatactctatagtcataataataaatcaaaatagtgagatttgttctctatgtatgaaagagagatatatagcaagcgacgactgctggaactaaacatatgttactcgggataaaatgagataaaattatttcaaaaaaataaagaaaatgagataaaatcccccgcacagtttaataaacgctttgatacaatattcagttacataatttatttgacacaatatgtaattgttcaatgaccatagtttgcttgcgcagagaaatggaacatctctcttttattttattatggatatataaagagttgaaggtagaattgaccgtgcatttttctcaaggctgaagccgccgtagagcttgcgtgtatagtgtgagggccaaagagaataaatgttcctatatgttggataatggagcagcacattcatattgaataccccattacttcctgcaaatgtataagaacaaaacttcagattataagattgatagttttattttggatcaacatgttgacatgaactttgaatgtagatgattacataacaggaacactaacacatacccctaaattacataatattagtttatagtttcatgcaaattatatattagagtgtatgaaaaagagacatgagattataactacctgttgcggaaatcaccgttatccaactgtaaattgatcactactttggcagcacgatgaaccggcaaaggatctctctccatctgaccacccataattagaaccataagcgcttgtcctgtactcactatatttgtcttgtttcctgctaaaggagtatatttcttccttaggcaagagagatagctctctccccaaccaccctcctggttttgcgtgtcgagaaggaaacgaactgctcgacgaatgggttcacagttatggaaagtctttcctgcagccacaagacctcttacggcaaataaggtcccatagataaagcacactccccagtttccgcaccatgaaccatccttcatttgcaaatcctcaatgtatttcactcc

SEQ ID NO: 16962 - DNA, 565 bp, Arabidopsis thaliana
tcctaggatctaatctatggtaatgcagatccaagaattgtcataaaattcaaacatgaattcatacaaaaaagaatcatatcattacattgcttaagtatgagagatcaaagactctatttaaaaacgcaacccaaaacaaaccaaatcaagaataataacaaatccatatctcatcaaaaacaaaatgaaatcaagaaatttgggagaagaagattacaagagttttggattcattagccttctgaagctgctcgttccatgtctcaacggtgtggcaggcgatcacttgtccttcttccgaagccatcttctctctttttcttctctgttctgtttcttctcctcttgtgttttttttttttcaattacttagcatgcgcgtcacctaccaatcccaattttgcccgtcaatagtttttctcttctactttattcgacgcgtgattttgtttccataattacacccaccaattgctactttccttctttcccaaatcataaatattccacttttagcctcaaagttttacttgtacaaattaccacacacaaacaaagttgt

SEQ ID NO: 16963 - DNA, 889 bp, Arabidopsis thaliana
atgatcccagcttccaacagttttatgatctccttcttaacaacatccttcagattcgggtttagtctctttgatgctcaactgagggcttagactcatccttgaggtgaatcctatgcatacataagtccagagagatacctgcaatatcatcaagagaatagccaagagctttgcgatacttgcgcagttgcttatcaataaagtgagctttgccttgtttaaagaatcattaacaatgacagggtaaatagaattgtcaccaagaaatgcgtaccttagccctggaggaagtgattttagatcaactttaggagctttttttgggctccagtcgccaactgttgctgcgtttgtagatgtgccaattaactcctcctgagcaactaattgcattacatgctcagttctatccagtagcttaccatacccgtcgggaactttgtctattgaaggaattagagcatgcttcaaaggatcggcatgtgtcatcttcagaaattcgtcagccagagaagagatagtatccacgtagaaagtctgcccatcgatggtaggcttcttaaccacctaattcatgtcaaactgtattgtaagatcacctacattcaagcctattctgcccttccttacatcaattagggcaccagttgtggctaagaaaggccttcccaagattagaggatctttaggttctttctcataagataaaaccacataatttgtaggaatgtagctagaaccgacttgtatagggacatcatataggataccatcgggtctacggacagtcgatcagcaagaacaagagtgatttgcgtaggctctaaatttgtcaaaccaagccgaaacgcaactgaacgtggcatcaagttgacactagaaccaa

SEQ ID NO: 16964 - DNA, 872 bp, Arabidopsis thaliana
cttcccatatttgtaatgacatttcacaaagtctagaactatacgggtgaatttgataatcatactatgcgtttaggtacgtggatgccaattcatgttttataggccccaacatcaaagagctaaaagcatacccatggaatgtgcaatgtccgtttaaattacgtcatttttgtggatttgtttttttgcgggttgtgtgtcggtcacaaataatctgcggaaaagaggtttaaaatgtgatacaggatgtgtcaaatattgcgtggtagagaaaactattaatcatacgcttttcttttgccaccgaacgcgtcagatttgggcactatcacagatacccacggtccccggaaactttctctttgattctgtttatgtgaaattgaatcatttattttggagaattgatgcgtgttttattttgcctcaggcttttatctgaaagaccacacgactactgcaagtgcacaatatattggagtagtattttaggatcgaatccataaggagagaagtagttcagagaaattcttaagaagagagtgaagctagggccaaaataaaagagtgggggttgttgtatgcaatgagtaaccataataaaagacaagtaactaaactaaacggtaagcaataaaagagaagcgttaggtctttgggggtttcccggatgtcatggttcaataaataaggtatagatctcaatctaggtgataacatggctaggtttgtttactcccaaattctcggacatacaaaactctatcaagaccagctaaccctaacggttagtaggttaaagccggttattatcactaatatcctgcatactcagttgccctatcggttattaggtgctacatggtttc

SEQ ID NO: 16965 - DNA, 1354 bp, Arabidopsis thaliana
ccattgtcccgtcgcggcggcgtcgtgtggctgggatggaaactcgtaatcgctttctccgtcgcgctttgccttcttgctcttcttcgaatccaactacagtacaattccttcacgacattgtcgtttccactctccgtcgcgagatctcagacaccgcttcacaaatactccggtgatcgtcccaagctcgctttccttttcttagctcgccgtgatctcccacttgattttatgtgggatagattcttcaaggtcaaaaaagattcttagtcctattaatacttgtccgttattctaaatttcgaaaaaattgctgattctggtgattttgcagggagtggatcatgcgaatttctcaatttatatacattcagtacctggtttcgtgttcaatgaagaaactacacgatcacagtatttctataatcgccaattgaacaatagcattaaggtgagtgttcatgagaatttctccatttgatgtttttttatagtgaaacttaggggtggtgttgttatggttataggtagtatggggagaatcaagcatgattgaagcagaaagattgttgcttgcatctgctttagaggatcactccaatcaaagatttgttcttctctctgacaggtttgcttctttcagcattactctttcagatcatcttatgcctgaccacttattgcatctgactttgagcacatttgtggtttgtacggacttatttcattttcatctactttctgttttgcagatgtgctccattatatgactttggctatatatacaaatatcttatctcttcaccgaggagttttgtggataggtagattgaaagtctgaatttatgaggtttcttagtacttcatacttgatatatatggcctgataactggtgtattataagaggagttgtctagatgttgataactatgtttgttgctctctattggcagttttcttcatactaaagagacacggtacagtgtgaaaatgtctcctgtcatacctgaagagaaatggcgaaaaggatcccaggtatcttcattttcttgcttaggaaatgaacattgctaccaagatttttgaagcctgagtttcttgtgaaaatttaagcattaggaggatagggaccttttaaagttcatgaagtttttaatctcatcttagttttatctattgcagtggatagctttgatcagaagtcatgcagaggtcattgtaaatgatggtatcgtattcccagtttttaaggaattctgcaaggtaaagattaagctttatgatcatgactttaatttcaatcttgattctttgttgctgaagaaacaataacttacttcttgaggggag

SEQ ID NO: 16966 - DNA, 639 bp, Arabidopsis thaliana
tctggattctcagcttctttaagcatatctaacagcttctggtaccccaaagtttccaagtgtaaatctccttccttgctatcttttgttagagcactctctagatggtcctcttatgctagctcttctagcaattcgtcagctaacatatccatctctacaatccagaagacgtttccttctattgtaggcttcttcatggtgttggtgctatcgaaggtcatcttgagatctctccagaggttaagattggtcttccccttcttgacatcgatgatggctccagctgtagcaaaaaaacggtcttcctaagatcaaagggtccctaggttcttccattgagcaacaccctgctcagtgttttggttaagatgtttcttggtgggtgctcttccgcttcttagagtgatagcgttaatatactcctttggggtttggacggctttcccagggagatgtccttggttgtttgaagccgatgttgaagccaaattgccttcttgatatctcatcctagtgctcagcgattcgaacttgttgttaaggtcattgaaggtgacatcgactttgttgtttaactcagccatcttcttagcaatctccattgctcatgtagattgtccttgaattatctgcagg

SEQ ID NO: 16967 - DNA, 1492 bp, Arabidopsis thaliana
tttgcgtctatgatctttatcaaggaagctgcaaacaaagagcaacacagttataacacaacaacagctagctgaggcaattatatctactgcttatgctctatatagttttacgaaacaaaatgaaacgcaaaaatcgcaaaatcacctgtctacaaaactctttggtgaagaaactagatatctgtaaatgtaaccaaagtcgtataacggaacacagctgcatcacaaaagagtaaaaaccaatggcttaacttcaacgtcaataagatcttctagtcagagatagaataaagagaccaacctatcagacaagagaacaaatctttgattagaaggatcttccaaagcagatgcaagcaacaatctttctgctgcaatcatgcttgattctccccaaactacctgaacaagtgaatcaattcatccatcaaaatcctcagaacaaaaaggaactatctaaaatcaatgcatcgaaagagatattgcctcaatgctattcttcaattgacgattgtagaagaaatgtgatcttgtggatgattcatcgaatacgaaaccaggtattgaatgtacatagattgagaaattcctctgatctgcactctgcgaaaacacacaataacaatgagcaaatgttttcaaaattcaatgaataatcaaagttttttttaagaaccttgaagaatctgtcccagagaaaatcaagtggcaaatcacgtcgagcgaggaaaaggaaggcgagtttgggacgatcgccggagtatttaacgagagggatacgagatctcgcgacggagagagacgaagacagtgtcgtcgtcgtcgcagtggaattagactgacggttgatacagaagagagcgaggatgcataatgcggtggagatagtgatgagtatcttccatcgaaaccacacgacaccgcgacgagacgacggaagccgcggcattagtaaactcgagattacttatctccggcgatctgcatcagaactccgggagaattgggaatccaaaatcgaaaaatcttaagggttttgttgaaattgagattttcaggagaaatcgaaatcgtaaggatttgacatgtgagagacgtagaagaagaagaaggcaagtcaccaaggaagacgttgaatctgatgaaaaacgacaccgtgtctttgtccacgtgtaacgttttttgttttaattagggaatcaaattaatactacaaaagagaattaaaagatcattgaatggtttgactagggggattaagagtgtgagtcttttattaagacgtttcttaggaagttaatgcggtaaacgaatttgttttggtatgtttcattttttttcttttacagtgttttggtctgtttcatcggaacacactaacttcatttttttttttatgtttgttagtttttaagactaaaatagagatagtagtattttttaacttcaactagaatgcatatgttattaatcagggatcgtatctcta

SEQ ID NO: 16968 - DNA, 532 bp, Arabidopsis thaliana
cggaccaatgcgcctgcatatgatgctaacttaaatgagcctttaccaataggctctcccatcatggtgtactccactctcactctggcatttggatccttagcaatatctttcatcctagttggtccacgctgcctcttggtcttaggttgaacagcatcttcatctccagataattcaagctcgccttcaggttcttcagctgcttgcacttcaacttcgttttctgtctctccattaatgtcttcagcttcgttttctgtctctccattgatgtcttcatcagcttctttttctgtctctccattgatgtcttcagcttctttttctgtctctccatcgatgtcttcaacttctttttctgtctctccatcaatgttttctgctggaacaacagtttgttctacagctgttggctcaattgtacccacatactccacctcatcattgcatttcttagcagcaacttttttaggttgtctccacgctttttcttctgttgcccattgtaaacacttgagaaaaatgataa

SEQ ID NO: 16969 - DNA, 771 bp, Arabidopsis thaliana
ttcaaggccagagagagaacatagagaatatgatagtttcagaagaaaagctgagatagcccgagggaagagagcaatgacaaagagatatgagcttatagctgaggatctggaagacgagtacatgcctgagcatactcgaagagccaccaaacttctgcataaacctgatgtattgtttgttgaggaatatattaagctcttcaaattgaaagagttctgtagcacaaggtattcatgctcgaccacactcgcacaacttggattgctggaggatgttcagcacttgtactagagttgtcatctggacactttaatggcttatccgtatgtagcatatgaagaagaaacgattcagttcctttccacactgcaagtggagctttaccaaggtatgacctttgatgatttggaatgcgaaggattgggattcttgagattctctgtgtatggtcatgagtataggttatcaatcaagcgcttggaaggatcgtttggtttccccagtggaacgggtactaagcccaagtatgacagagaagagttgaaagacttatggatcaccattggcagctctgtaccgctgaattcttccaggtcaaagagcaatcagatacgcagccctgtcatcaggtacttctagcattctatagccaatgtcctgtactcccaagagatcacagcgactgttaccaattctgatatggagatgatcgctatggctctcaaaggcactctccgccaaactaagaacaaaatgtctctccaagg

SEQ ID NO: 16970 - DNA, 609 bp, Arabidopsis thaliana columbia
tgcatttcctgtaagataccgatcaacgtagtttactgccaaatacaacgtctcgggcgaaacgtatactcttcagcaacctgtaggtttatgaaaatccagaaaacagctttgtaactacctattgctataaaacatttggtgtattctattactaaacttattgccttatcaatcaaaactaaatatcttgccttaatgaaccaggattcatcaaaagcttacctccacaagccagtcaatcagtatagaacgcatgctagcattgatgcttgactgagttctttccatgtaatctagagccggtcttttgttcacctgcagagcataataagcaaaatttcaactttgacaattcagaaacagaatcaaatcagtatgagaactgtggcagagtaaaacaacagccatcctacctcagatacacgcaaatgctcgtagatatcacaagcaaaagaagcacaaagctgtggatccatcaagtcactatcaatgttaacaatctcatcatcatcatcatcatttccatcatcagtagtggcgtcgaccatgtaatctcaacgtggttcgtcaagagcatgagtggaattgcgggcagatgagtagaga

SEQ ID NO: 16971 - DNA, 526 bp, Arabidopsis thaliana columbia
ttttctatctgacctttccatttttccacaacagagagggggtctgtacttgaacctttctcatctgtatgctgcatgagctcctgctctatgtcgtttcctagactatctgcagctaatagattttggtaataattcttgacccgacgtttcttgactcccgcaaatgcttgccagagctgaatatttgtatatatattttcagattattgagcagaaaataaggataataagaactaactatcaatagcaggagaatgctagaaaagagaatgacaggatttattacctcacccctcagagccataggtgcaccgccatgaataagaacttcaagttcgtctttccaggggcatgcagatactagggaagctgcatcagcagcagcagacatgctggagacacttgtgccatctgaagaaccatcctgaattggatctgatctctccgcatcatagaactcgtcttcggaatcattctcacatactccctttgaagactcggtctcatcagttgaggctaagga

SEQ ID NO: 16972 - DNA, 568 bp, Arabidopsis thaliana columbia
agaggatccccctctgctaagtctgaaccatgccttaatgcttttgttgatgctgactggggaacatgtcaagatacacgacgatctgtcactggattatgtgtatatctaggtacttctttgattagttggaaatctaagaagtagacagtggtgagtcgtagtagtacagaatcagagtatcgtgcaatggctttaggaacttgtgaattgttatggttttcacagcttctccgagatttgaaagttaaggtcacatcttctgcaaagatgttttgtgacaacaagtctgccattcacattgctcataacccggtgttccacgagaggacaaaacatatcgaaatcgattgtcatacgacaagagatcagataaagaatggatttcttcggctgtttcatgtgactactgataaccaacatgcagacatcttaaccaaagcactccagccaggtccgttctactcgttgttgaaccggatgtcaatatcaaacctctttcttcccaattctggttcagtttcagaggtttgaggggggtatattagatatatcatatagtgtatat

SEQ ID NO: 16973 - DNA, 535 bp, Arabidopsis thaliana columbia
cgtactagtacaaaagaggagaagaaagaagaatcaggctagtgaattgcttttatgcttctttgggtaagattggaagataaactcaccccatagaaggctccaagagaagagcattgaatagctgcaccaagatgattaacaagatcatcgatgcaaatgtgttcatcttccatgaactgttttgccccttgctcagcacaacttcctgatcggtatacaggtagaaactctgatttgtcatcaagtgacttcataaccaagttacaaacatccacatcctgcgcacaaacagaaaccagttacatcattcgaatcccattgtaacaaagaaaaggaaaaagaaaaagcagggtcaagtatattaccgcattggctgcaagctgcagcctagtagcactgcttgtgaggtgcctcggaggttttcctttacttatctgcctagtgtcatctaagttctctaaagtatcaatttctgttgcagaagaagtattatccttgttgaaatctcgctcaagaaccgttaacaaaggtg

SEQ ID NO: 16974 - DNA, 523 bp, Arabidopsis thaliana columbia
gtcaatgactgacctgccccaggagagaaactggcggcgatgtatgctttttaacatccttataaatattttgaaggcattgataaaagtacctcgaagaaaggcatccgaacttcttaaatgtcaggaattagatggaaatattaggaaaatcgagggtgaagcttaagtgggcaaaactatgtcatgaaactcactttcaaatatggtgacataactgtagtagcaggcttcaagaaagcagatggatcaccctttggtttctcaaagtttgccacccatgcctacactacaaataaaacccataacgaattcagcccttgactttgataaagaagatataaatctatgaagtcaatgtaagaatatcaattctaaaatcttaaagtgataaaattcaagttctccaggagtaagtttccttcagtccgacaaagtactcaatcgagcagattcctaccatttttttctaaaagagaaaaacttccaagttcttgaccataccttatcactgattgattta

SEQ ID NO: 16975 - DNA, 497 bp, Arabidopsis thaliana columbia
ctgtgcacttcttttccggagactgaatccgataactcagcacaagaccccaatacaatcgccacaagaacacaatctggcttcttaccactcattctcagctcagcaaacagatgcaaagcctccttgtgattcccgcatctcgaataaccagttatcaaagaagaacacgcaactaaatcaggctcagagatgctattaaacacactacaagcagaagcaatgcacatgcatctcgagtacatgtacactaaagcacaaccaacataagaatgagaatctaaattgattttaaagcaaaatgcatgaacagaccaagcaacgagtaacaaactaggatcaatcaaaccacttgttagggctaccattgtataacaattaggttggtgtcctcgatgttgcatcaagttaaacaaattgattcctttatcccaaaatccacagcatccatatccaggaatcataacattccaaagagcaagaactggatctggtat

SEQ ID NO: 16976 - DNA, 544 bp, Arabidopsis thaliana
cctgctttggagacagattaagaaccacagtgaaatcagcaagtccaggaagctcatctaggaaatctcctttatagtaatgaagcactttctttgtcatctcccgcaaatcttggattactttaattttcactgtgaaatcctcgctcttctgcagggtgtgctccacagtttcattgaacattgaagccatatctgaattacttccagtaagtctccccctgacatcgcatggagtataagccaagattctcttcacagcagatttggaggtatccaatttgaggaatttgggtcgaacaaggttcagaatgttgaaaacctcctttacatggttctgataaagcgttcctgagaggacaacttttcttggtgtttggacttgggcaagtgactgcaataaatttgtgtcctcattccttggagtgtgtccttcatccaaaatgaggatcgaaggtaccttgagcagtatctcctggcaagaaagtgagtcggttgtatcacacacacaatagttgagaactgctggtcccaagaaataaga

SEQ ID NO: 16977 - DNA, 1419 bp, Arabidopsis thaliana
ttcaagagtggatgtgtccttgagtactgaaaatgagtttactcgcacttgatgcttctaactggtgctctttttggcttctcatttgtagtgcaatataagagttcttggaggacttatctctgctcatcttcttgcaattgatccaaataataggttgattcagggttcctacaacaatcagcttcttcgattagctgaagaccttggaaaacgttttttacccgcgtttgaaacacctacaggattaccatatgcatggattaatttgaaggtattgaatcgtcacttatgaaatgcacttacttcactgaaatcctggctatctaatgcgaaaaggaacagtcactttgagcacttacttcactgaaatcctggctatctaatgcgaaaaggaacagtcactttgataattttcattcaattcttaaaggtttctatgcttaagtttgagcttgctcttctagttttcttggaaaatggaatatttgaccctgaataatatcttttggcagaatggagtaatggagaatgagacaactgaaacaagcacttcaggatgtggtatgtatcttgttatccctactttcttttacattctagttttccgaatgtgctcatgaatttattgatatgcattttacgctttaggttctctcgttcttgaaatgggagcattgtcacggctcactggtgacccgaggtttgaatcagctgcactacgtgcgcttcgtcagctatggaggatgcgaagttcgttagatctgcttgggacaacattggatgtggtaactggggaatggatagagtactcctctagcattggagctggtatattgttcattcagagggattctagtggcagttcttgttccgaagagatagcaaaataattttacttatatgtgtggaattaacttgtgccttagattgatgtagctctgatgtgtaatttcatttctggtcttttaaaggggttgactctttctatgaatacctcttgaaggcttatattctttttggaaaagaagactactggcgaatgtttcattctgcttatctggcatctcagaagtacttcagacatgggccttggtaatatactagcctgaaaaaatgtacttccgcaatctctgttatgacacttaagacttctattgggcaaaatctgaaaattgctaatgagtttatctacctggtttaggtaccatgaagctaatatgtggagtggaaaaccaacttactggcagctcacaagtcttcaggcgttttggcctggtctgcaggtataatgaatgaatggattacttaaatgtcatagaaagaacagtcgaaaagggtatcttctcattgtcattcttaagttcttgcttctaggttcttgttggagatattgcagctgcaaattcatcgcatcgg

SEQ ID NO: 16978 - DNA, 349 bp, Arabidopsis thaliana
ttaccatgagaaggatgatatgttttctcttgaactccacgcttctgagagccataagtatttatatgttgcatctgaaagcaaaactacaagatttgtcttctcgcttgatgtgtccaagactcaggatggactcagggtgttgacacctcgtgtagatggaattgattcatctgtcagtcatcgtgggaaccactttttcatccagagaaggagcactgaattttacaactcagaactgatcgcctgtccagttgatgacacatcaaagacaactgttctgcttccacatagagaaaggtaaactttttttgttagaatctggttgccattgtggcctatccaaaat

SEQ ID NO: 16979 - DNA, 532 bp, Arabidopsis thaliana columbia
gtcaacattggcaacatgtggcgagtatctaccaaagtcagcgaccacaaacatcgccggaaatagcttatgccttgccgtcgacatactattcggatgatgcgccatgatcacatgatccttccctcctgaggtcttccactctttttgggacgttacgtatttcaccacattttcctatcaaaaatttataagattcatgtcaagttatttgtagattatgtttacactcttgactttatttcattttgttgcgttacgaatacatttcttttttcatttgagtttgtgattacgttatatgttagaaaaatgtgtattatacttaaacctttgcaatttagtatatttcaacgttttacgcaatcagtaggaaaatgttaagaatgaaactttttaaggaaaaataacaaaatgtgtaaatatttggatatagttacctgcaactctttgtcctggctcttcttctgcttttggttaaccttagagaatcggttatagctcaatgaagagaagaagggcacgaacacga

SEQ ID NO: 16980 - DNA, 539 bp, Arabidopsis thaliana columbia
  unsure (1)..(539): unsure at all n locations
nnnnnnnnnnnnnnnnnnnnnnctaaagcataaaaacaaacacaacacgcacccggaatgatgaaaaaatatctcgcgctggctttgattgcgccgttgctcatctcctgttcgacgaccaaaaaaggcgatacctataacgaagcctgggtcaaagataccaacggttttgatattctgatggggcaatttgcccacaatattgagaacatctggggcttcaaagaggtggtgatcgctggtcctaaggactacgtgaaatacaccgatcaatatcagacccgcagccacatcaacttcgatgacggtacgattactatcgaaaccatcgccgggacagaacctgccgcgcatttgccgcgggcaattatcaaaacgttattgatgggtgacgatccgagttcggtcgatctctattccgacgttgatgatattacgatttcgaaagaacctttcctttacggtcaggtggtggacaaaccgggcagccgattcgctgggaaggtcgcgcaacgaacttcgcggattatctgctgaaa

SEQ ID NO: 16981 - DNA, 908 bp, Arabidopsis thaliana
ggtaaccataagtatcgtacgttgatcgaatttcgctcgatgaatataaacaatgagataacctgtgagcttggacaaaaacatgtggtgatcaaggctaggaacgcaggctaaatgaaccgctggatgctgcacgtgacagtctaagaatagggaacagattttaccaccacgtaagggactcagagaaagactaaaagcgtgtttatggtcgagccagtaacatctcgaattagccacttaaaattaagccggttactaatccgtgtgagcatatatggtctacgagaaaaagaaagcaattgcctgttgcgcaagaaacaagaagaataaatcctgattgaagcaatgatgaaatttcatcttaccaaaattaatttaattattgtggattcagtatatatatcattttatagatttgagctgaaaaaaaaagaaaagagagaaaaaaagtaagagacttttgaaattcgaacacacaaagcaaattaaatcattataaaagtctacggatcacgtaacacagtcaaacaaccctaatgacaacaccatgttgaggctctacaaggagtttatggcttggagagtgctgataagtcggggaaagagtaaaactgaactttgagacaataagtgaaacaagcactttcacttccatcataccaaagtttttgcctacgcatgttcttggtccaaggccaaatgggatgtatgactgagggtatttgcaagccttagagattccctcactaaacctctctggcttgaagtcgtttgcgtctggtccccagatctcggggtctcggtgtaaggcaggaatgagtgtccaaatgcacactccttttggcaccacaaggtctccaagtcttatgtctttggatgcttcctttccacgattggtgctggtg

SEQ ID NO: 16982 - DNA, 550 bp, Arabidopsis thaliana columbia
  unsure (1)..(550): unsure at all n locations
caggtcgatctatnnnnnnnnnnnnnnnnnnnnnnnctaaagtccgcgaagaatttgaggcgggaatcaaacagccgttcagcaatacccatttgattaatgggattcagccgaacctgctgaaagagcgctggtaaccgaatttcgattaacgctcagtctctgactgagaaaactggaagcatgctaatggctacaattcatgtagacggcaaagaatacgaggtcaacggagcggacaacctgctggaagcttgtctgtctctgggccttgatattccttacttttgctggcatccggcgctgggaagtgtcggtgcttgccgccagtgtgcggtgaagcaataccaaaacgcggaagacacgcgtggtcgcctggtgatgtcctgtatgacaccggcttccgatggcacctttatttccattgacgacgaagaagcgaaacagttccgtgaaagcgtggtcgagtggttgatgaccaacctaccgcacgactgtccggtatgtgaagagggcggtaactgccatcttcaggatatgactgtgatga

SEQ ID NO: 16983 - DNA, 638 bp, Arabidopsis thaliana
tgtctatccgtagtatgtgtgaaagtctgtttgaagttttgttaaaccattcaatggcctattttcttgtcaggggtttcaaagctcttaagcagactgtgaagatctattatcgtctaggtaaatacaaagaaatgatggaagcctatacagagatgcttacatatatcaagtcagcagtcaccaggaattacagcgaaaaatgtataaacaatatcatggatttcgtctctggatctgctagccagaacactggcctgctgcaagagttctatcagaccactttgaaagcccttgaagaggctaagaatgaggtttagaagctattcattcgttttgtataagctactgattccttctcaatcgtttggtgttgtgaacatatttttttctttcacagagactctggttcaagacaaatcttaaactctgcaacatctggtttgacattggtgaatacagacggatgactaaggtataatgttgtttaacaaatcttttgactgacgctgattatgtctagtgacctagtatggacaataacatctattattgcttgcagattctgaaggactccataagtcttgcaaaaggaagatggactgatgacagaagacaggaagcagctgcttgaggtt

SEQ ID NO: 16984 - DNA, 412 bp, Arabidopsis thaliana
gtgtgctctaaaggatttcttcgtgggaaattgtaagcaaggggtggaacatcgaggggaaattccgagacgagagcgcccccctgatcaagcagactggcagccagtcgggcatgacggcggggatgaatggtattaagtccattccccgatacagcaatgcggacgccattgacctgtaaggctgctttatgcgcgacaccatcgattccacgcgccagtccactcgtaattgtcacgccacgcgtcgccagagtttcgcaaaatagtcgtgcccatcgctcgccataccatgaatgcgcccgactccccactacggcaagctgaaatgaatgcagcgcgtgcagttctcctgcaacaaacgagtgcgcaggggtgatctgtcgtcgccagaagttgaggaggataaaag

SEQ ID NO: 16985 - DNA, 624 bp, Arabidopsis thaliana
tatcttggagatcttcatcttctacttcatcatcactatctctgtcagactcaatctcaggtccaacatagttaccaaactcatcatacaagctactttccatctttatgtaaacctgtcaaaaaagaatcccatgagcaatcaggattttgtagcagataaacaataacggcaaaaaagtcaaatgagtgcattaccacaaaatcaagcttttgatagatctatctgggttatttactatagcaattctgcaacatattttatttaacccattggcgagtaatctcctctaatgctcaacaccaagtccaagagaacaccatgaaaaagctagaatcaaccagaaacttaaggtaattagactagagcaaaaccctaggagagaatcgagcagaagcttatgctaagttggactaaagaaaaacaacaaggcgagagtcgagcagaagcgttggagtagagcaataacctagggtagaatcaacaagctgaacaaagttaaggagtgagaagacgaaccggtggggagagagagcgagaggcgttgcgatacgtagaggaaaatgcgagttggctcgcaatagggtttgttccactgagactgttatcgcggacaagggaatg

SEQ ID NO: 16986 - DNA, 619 bp, Arabidopsis thaliana
tgctctcttttctgggaaaatgatttgattatatgctttttgtgtagcaaattgtaataatgattgaagtgatacagcaaagacttcctggactcaagaatatctatgaacattttggaattatgttcctttaactatatatattgtttctgttgaatgatcttaagtaacaactgtttgtgacttgtgttgttgttctcagtatgattagaactaatggattaggcaacaaagacatgatcttgggatctgaatttgtgtttatgattcgcaattgttgtacaaagaagctaaattttgttctggttgctgcttaaagactttaagatgtttggtgttttgagatcattgttcttctgattgatttggagtttgaatttgcagtattaagtcacatttcaagtgttgtctgatgttgaactcttatgttgtcttgatttcaaagctcaaatttgtgaaattttgtttctttcattgaaacagacacaccctttgtggagaaatggaccaccagagaagccggtattgtgcaatgcgtgtggatcgcgttggaggacaaagggaacacttgtgaactacacaccgcttcatgctcgtgctgatggtgatgagaatgatg

SEQ ID NO: 16987 - DNA, 450 bp, Arabidopsis thaliana
cattgtatcttcaagagattggacatctaaagacgatataaaaggagaggaagaaagggtatgtgcattcttggctagacaaacacttagtctgttcccaggaacaccaacaatgatctcgtaataagaactctgacccttggcgtaatcctctgacgtattcacgacgcgtccattttgtgcctccaatgatctgatcaaacacaggtgggttgtttttaccgtcaaagttaccgtagtagtaagtggttcgaataaggtacttggaggtctttgcgacagggaaattataacagtgttttcgcgatgacttgtcgggaaagtaacgtagtgtggagaggatcggaacgaggtctttttgcttaatggtcgtcgtattcccacggaaatgaatccttcgtccggtgtgtattctatctcgcttgagggttgttgaaggagatgatccac

SEQ ID NO: 16988 - DNA, 876 bp, Arabidopsis thaliana
acttcgttgagtctatctggttgtggtttattggtatgttacttttagcatttctgaatccaaggaagaaactttgattaggaattgggttatgctgatccgtctttaatgctttgcaatgttgggcaggtaatgccagttgaagtgactgagttacctctgcttgagaagctatgccttgagcacaataaactgtcagttttgccacctgagatagggaagctgaagaaccttaagatacttagggttgacaataacatgcttatttctgtcccaggtgaccgttatcgcatcttaatgataaaaaaaaaacatattggaatcattagatttttcagctgatgttggttgaaactcttgtgtagtggaactaagacagtgtgtaggtcttgttgaattgtcgttggaacacaataaacttgtccggcctcttcttgatttcaggtcattggggcagagagctggtattactgttttaatttcttcttgaagttagttaggatgctgattaagtatacgattgaaatgcagggcgatggctgggttacgaattctacggctttttggtaatccccttgaattccttccggaaattttacctttgcatcagcttcgtcacttgtctcttgtaaatatcagaattgtgtctgatgagaatctaagatcagtaaatgtacagatagaggtaagaagaaaactcatcagactatctgctgctacttttcattctctaggtcactaagtttatgctaaggataagttttcatgattgcagacagaaaacacttcctattttggggcatctaggcacaagctcagtgccttctctccccttatattccgttcgtcgtcttgtcatcatcctcttctagcatc

SEQ ID NO: 16989 - DNA, 553 bp, Arabidopsis thaliana
  unsure (1)..(553): unsure at all n locations
nnnnnnnnnnnnnnnnnnnnctaaagcagcaaccatctccagcgtggtgttggcaatcccttgtaattctaataatttcagggcttctcccagtacatcttcacgttgcacgctattttcctccgtctttcccactgcaagtgtcgttcacggttggcgatcgcgcaaatgtgcgctgaaggtttcagcatccataaagcccgtgacgcgtgcttgtggatgctcctggccttgtccgtcaaaaaagagaattgtcggtaggccaaggacattaagatgctttaacagcgccacatcttgtgcgtcgttggccgtgacgttggcctgaagtaagaccgtgtctgctaacgctttttgcacctgcgggtcgctgaaggtgtatttctcaaactctttacaggcgacgcaccagtcggcataaagatctaacatcaccggtttgcctttggttcaacgagcgcctgatttactcatctaccgttttgatttgtgtaaagttgagatgcgtctgagtttgcgcggtatgcgtcgaccaaatgccaatcctgaagtg

SEQ ID NO: 16990 - DNA, 451 bp, Arabidopsis thaliana
atttccatagtagccttcaggtaatggaggctcgatagactagcggatgctgacggatataaccaaatccgtaatcgtgtcgggatttagcttcatggctcgacatcttgctctccaaacgtaggccgcaagaacctccacggtcgtgatcttcatgtgcttctccttctcattggtaaggttctcatcttcgataattatgttcttgagtttagtgatgtcttcggatgtaatgttcagaatttcacggaccatgtcttccgttggtgtatcgggcgaagaacaatctttctccacatcaacgagttttggattatttttgtcgttcccgagcttgcctaaaatcacgacgtgttaaaattgtcacatggataaacgtaatatagatccattttcataagatatactgtattgatcaatgatctcagtattcaaaattggaccaaactaa

SEQ ID NO: 16991 - DNA, 737 bp, Arabidopsis thaliana
ctcacactcattaggctcaaggaggatgatagagtagaattgacgtctcctctccttcctgggtagatacaacatcaaattcagcatgctctcgtgacaagtctgtaattgagtactcaatgaccctttcttggtaagctcctttttcatcatctgtatagtcgtcttttctagactgttttgatgtgaattcacatccttcttttctaaccataggaataacttcatcatttgggacgtccttgatgtcgagtggagcttggttggctttcccatggagctctttaacttgatccttcagctctttcacagtgtgtgttagctctcttatagttctatcgtgccattttgacctctccttgagttctaaccaatcatttgatgccctcacgcttgactctagctgtttggttgagcattctagtcgagtatcagttgagccttcctcgttcaatgtaacatcctctgtttctgacgcaatgacacctataaagatctctaatcctggtacttcgttgtgtgagtctaatgacatctcatagctcaaggtctcactggagagaaatccagcttcactactttcagttaaagtagtttgaaggtgatctctgtccacaatctcctctagcagttcattacctagctgatccatttcctcaactaagaaggtttgtccttctattgttggcttcttcatagcgtccctgatgtcaaacttcattttgacatcctctccc

SEQ ID NO: 16992 - DNA, 506 bp, Arabidopsis thaliana
  unsure (1)..(506): unsure at all n locations
nnnnnnnnnnnnnnnnnnnnctaaagggccagttcaccaagctggcggcctttttcttcccaggtgcgtaccagatgaccgagcgcattcggcaactgcttgagatcgtttttgatcttgccgatttccgcgttcggcgcgaggcgggtgatcatctccagcaccacgctgtagcagagcagcaggtgaatttcccagatacagtcggcctgataatcaatgctaaattccgccgccgaggtaatcgggctatccgcgcgtttggtgaacgccgcagtgagtgcgccgcacgccggcccagctccagcgctttgattacctcttcggttttaccgtagtcagaaacgccaattactgcgcaacgatcgtcgaggcgatacggggtgttatcgcagaactcccagccggaaatggcgtagacctgaagatcggaaaagcgatccgccagatgtttcgccgtttgcgccgcgttgagtggcgatccgcaggcaacgaaataaatacga

SEQ ID NO: 16993 - DNA, 847 bp, Arabidopsis thaliana
cgagaggttggattgatgacgtagctgatcctcgtgttgacagcttattgcaacttattagagaggatcacctatttaagggatccatgttcttaggtggtgtagtccctgattctttgcctgatgaaaggaatgacaacagcgatgtttgtagcactcatgattgtggtgatgatgacaacaaccaaactaatgaaaccatggatgcctcctccaaaactcgtaaagctaaaggccagtttagcataccagactcgatcaaaaactatattgacaagaaagacaagcgaatggagactcgtatgttgaaggctatagctgattcggaggctagattaagcaccttactgagagcaacccatggcaaacatcatgtgtacgaagaggttcaacgtcctggagtgggtgtgaagggaggatctgttgttgatatggatacatctgtgggagtgcataccatgaagaatagtgcaacagatattcttgatcaagttttaggggaagtgatggaagatatcaatgatgattcacctacccagccgacaaatactaaacatcgcttattttcggaaggcaaagccactgaaccgtagtttgctggtaataatttataagtttatcttcttttaccttttatttgttaacatttattacttctataactgtttgtcatctgcagaagaggaggagagtacacaatagttcaacgtctaccacccttccacttgtggaggtagacactaggtcaggagatattgctgcttctgtagagaacctcaacagcaagttaaaggttccgggattgttggcgactccgatgaagtacctcaggatggaaatcatgaca

SEQ ID NO: 16994 - DNA, 853 bp, Arabidopsis thaliana
ctaaagacttactttttcttcttgctcaaaccccagttggtgatgtcgtcctcggttcccatttcaccatcgggccctgctgaaagcagatcgtatgcaccatgttcaccaggattaacgaggacataatcattgccccagggatcggcaggcagacgcttgatataaccttccttgttatagtttgcggccagcggtggcagtgtcggcgcttctactaaggattcaagcccctgatttgtggttggatagtgatgattgtcgagtttgtacatatcaagggcgttttccagcgccacaatatcgctgacggctttttgcttatccgccttttctttattgcccattaggttaggaaccaccaggctggcaagtacgccgataatgacgatcaccaccataatttccagtaatgtaaaaccgcgttgcttatccgttgcgcgcatatgctttccttaattaatcattgagttaagttgaagaagaggttggagtaccgacacgacaataaacaggacgatcagtgccatcgtaataatgagtgctggctcgaagatggagagcgttaaggcgatccgattttgttggagtgtctcctggttatctgcggctctgaccattaatgtgccgagctgcccgcttttttcgccagaggccaccatgtagagcatcatcggcgggaaaattgcggtttgttccagcgaaagatgaatgctgttaccctggcgaacgttctctgccgcatttgccagacgctggcgaatttcgaggttgttgaggctttcggtggacaaattcatcccatccagcagagggacgccgctggattgcaaaatctttagagcacactggc

SEQ ID NO: 16995 - DNA, 1025 bp, Arabidopsis thaliana
ctaaagatgcatactgaactcaatcccgggacactatttctgataaaaatatattctcctttattattaagcgcctcaaatcgtccatcaggtgttgcgagataaaatgcttcaagattattatctttacttcttacaagatttttatcgctacttgaaaaaaattcatcaacataatcgccatgactatctgcaccgtgagtatgataagcagcaactctatctgtacctgtgggacattttcttttcagaggatatgactcctttcttaaattatcagtttctgccttagatgcaaaatattttccattagtatctttacagacaataccagagtattccatatcattacatagagatctattctgcgtttctttcaaagcatctaacgcagcatctgcagtactatcaaatttacttggtcctattatacgtgaaagaacaccacaaactccccccgtacatgctccagatctggcatcatcccaagtctgcaataatcccatagggtcaatttgttgtagtggatttaaaggatactgatataaattccatccccctttcaaccccatcgggtcctgagtaatataccgcccctgcaacggatcgtagtgccggtgacggttatagtacagccccgactcctcatcatgctgctgccctggcagacggtacggctggtgcaggtgatgcgggttctcctcattaagctggttgccccattcatcatactccccgcgccacgccgtattgccgtcttcgctgatgagcgccacgtcaggccccggtggtcgcagtggtaaaaatgaacttttcgcgccggtgtgtattccggctccacctgtctggccagttgctccaccgtcagcccgcactgcgcaacgcacgcccggctttcactgctcacgcggtctgcccggatttcttcctccagcctgtccagcagccgcaccagttcagccgggaacaccacgccgtggccgttctcactcccttcctgctggagcgtctctgccaggctgcgc

SEQ ID NO: 16996 - DNA, 546 bp, Arabidopsis thaliana
ggtcacaatcgggtttcgcttctatcccacggaagaagaactggtttcgttctacctacgaaaccagctcgaaggaaggagtgatgactcaatgcatcgtgtcattcccgtacttgacgtctttgaggtcgagcctagtcatcttccaagtacgttaacggttaacctcacctgaattgtcgatatatatatctactatggcatcaaaatcgtcatatcttaatattacttgagagtcattaggacatcatacaaagttaggttttatagcacgtaaacttctccattttggtgtttgggtttcttgttttacgaaaatagtaacccgattccagatcggtttagtcggttttgaattggttcgggtttggtataatcagattgaacaccctaaaatacatgaatgccataaagactatatatgcgtaatgtttttatatatgaaactcacacaattttgcagatgttgctggagtgagatgtcgaggagacgctgagcaatggttcttcttcgtgccacgacaagaacgcgacgaagaggaggca

SEQ ID NO: 16997 - DNA, 473 bp, Arabidopsis thaliana
aacgcaatgtcatgccgcttattccagcattggacagagtaccacctacagttaaatgcaggtaatccgtccatgattttggtgcaagcccgtacttgagggtctcatgcaaaatgtttatccacagctcaccaccagacacatcaacatatggagcaggggaatccacactgtagacctgcagcttctggggatggagtgattccatgtgtataacaattccatgtcttgtttgagcttggccttggagtgaatgtccaccgactctcgctgccactgtaagctgtgaatgagtgcccatcatccagatgtgtcgtatcgttaaggcgatgtcgcttaccgatttgggatgtaagaccgccaaagggatcaactggtatcgatttccaaaatctttggaggcgtgatggacatgttcaaactccaaatggcctactaggggaagcgccttcaaagaagaaatgctgctagag

SEQ ID NO: 16998 - DNA, 562 bp, Arabidopsis thaliana
taattcgctgaaaatggaaaagaataatattttgaacaaaataatttccccattgttgcctatgactagctcgcacgttttaagcctaatctctcacgaatacataaaaataaaattaaaactcattgaccctttgaccttaaagcgcgtacctaacactcgcttctattttctctcttccctttatattacaccatcgaaccacttcatatcaacccttgaaaacttcactcgtcacacattcgattctttcatcgttgtgtctattataaatatatgtcaatttggtttctaaaaaattctaccattgattgattgatttttttttctttaagagatgaatttatttacaagaatctcatctcggactaagaaggccaatctttactacgtaaccctagttgctcttctctgcatcgctagctaccttctcggtatttggcaaaacacggcggttaatccacgcgccgccttcgatgattcagacggtacaccgtgcgagggattcccagacctaattctacgaaagatctcgacttcgacgcgcatcacaacattcaag

SEQ ID NO: 16999 - DNA, 461 bp, Arabidopsis thaliana columbia
cagtgtgctctaaagacttatgtatacgattatcatttttggtctcactctctggctgataccgaaagagtttactgtcgcattcaatgcttatactgaaataccttggctctttcagattatcgtttttgccttttctttcgtggtcgccatttccttctcaagattgcgagcacatattcaaaagcattattcattactaccagagcaacgagtattgcttcgtttatctgagaaagaaatcgctgtatttaaagatttccttagaacaggaaatcttattatcacttctccttgccgtaacccggttatgaaaaaattagaacggaagggcatcattcaacatcagagtgatagcgcaaactgttcttattatctcgtcaccgaaaaatactcccattttatgaagttattcgtggaacagcaggagtagacgttgtaatcgttagcttactgtgtgc

SEQ ID NO: 17000 - DNA, 609 bp, Arabidopsis thaliana
tagtcgttaatattggtgactattttacgactatgatacgactatttgacgactattggacgactatttgacgacgacattttgtgtccaaataagaatttggtcatatcttgatttctttgttggttggtcatcgattctgagaattcggtttgtttgttgttctaaatgctataaagtataacaaaaacacatttttatgaaaatcctatcaaatacataaaacacaacttacacttaaggttcaaagtactaaacacacacacaaacattattgttcaaagttcaagtgaaaagggactgaaatctaaacctattgatcattctgtggagtagctggtagaggctttgtggttgtcgaagattgagaggccatgaagtcaaggaattgcggatctgtttgtcggagatacttctccactaaggacaagtgttcgagcttgtccttttgctcagccgtgattcgggcagtctcagcttcacgcgcacgaatctcataatcacgcttctcattgtaggctgcctgctcctcaatcttacgtatcgcttccttcagccgttcttctaaatctaggaaggacgatgatgattgtctagggagattgcggt

SEQ ID NO: 17001 - DNA, 489 bp, Arabidopsis thaliana columbia
agaagaccattttatctatagccctaatccgtaattagggaactatcaataactaaacttatttgaagtaatatcttattactttagttaccagaagagctttgaaagataaagaagcaacagagagactgtatcaaagtttagcaaaccgaggttttcttttcatcatctgagcagaaacagcttcgttgagatcatctgatataagcatagccgagttccaagttgctacatagtcaagtccttgttctacactcacctctctgcttcttaataacactgcctttgtccctgtcacagctaaaggagacttgcctcctattcctgaaaacatccataaactccaattctcattccctcacaaatcaaccatctcggaatcaaaactgagacaaaccaagcatagaatcaacaggacttaaccaaccgattaaacgaaaagtcgaaaaatgaaacgaattccgagaaaattggttcgaaaaacgtgat

SEQ ID NO: 17002 - DNA, 588 bp, Arabidopsis thaliana columbia
acgacttcgaactggtccaacttggaacgagcattgtgacgtcctgcatcatatggtgtatatatgagtaattgcctgattaggtaaagtttactcttatattagagtgggatcacacttggtttgaatcattaccatttccttagttcttcatagaccatgcttgttatcgtctccttgctaagttcattgacttcagaatctacaggtgaaattttctgctttgctgctccttctgctgcttctttgtttgggataacaatagctccaaggcggcgttgatcctgagaacaaaagatcaaggacgcatccaaatcgaagattaattaagtgaaacagcccataccattgttcctaaaccaaagtctccaaacaagtacctgtccaataaccactatttgttgaatcaaattgcttctcatggccgcttcttcaatctccaatggttccacattttcacctacaacaattaaactgctatcaaatattcttagcaatatttgtgcagcaaggcggttacaattcacttggattcatctttaacttgagaggcacattttgttgttaagacttgtagtgtttaaatgt

SEQ ID NO: 17003 - DNA, 656 bp, Arabidopsis thaliana
  unsure (1)..(656): unsure at all n locations
tggtagaaagctgcaacaatggcagcatcgaagccatcaccaaccgatacctgggattctactctccccggtcctcccagccgtaacaacttcggatccgccgatctcagtccctccggtctcttcgcctttgcctctggctcctccgtctctgtcgtcgattctcgttctctccagctcgtttccactatccctctccctcctcctcccggtgctctctctcccttcgtcacttccgtccgttggattcctctccctctcccccgcgatctactctccaccgaaccctccgcctctcaccttctcctcgccgttgcagatcgccacggccgtgtcgctctcgttgacttccatcttcgctccgtcgtcgtctggcttaatccttcctccgatcccaagctcggaattcaagacctttgttgggttcaagctcgccacgattctcatgtcctcgctgcgatttctggatcttcgtttctctcgctctacacgacctccggtggacttttctggaagtacgatgccggcacggagattctctcctgtctccgcgcgatcctatgattntgccatttctgtgtgcttggcttaaaggatcctattgtcggtaaggtattggagatagtgagaacgatgtgtgattcagagatgagata

SEQ ID NO: 17004 - DNA, 862 bp, Arabidopsis thaliana
cctacacaaccacctggaaggaacggattccctttataacctggggagttacagtagcagtccctatagctgaatccagaaaagtagccgtatgagcaactacacctcgtatcggaagtgtacggtgttgtatctgacgcatttttacaacttatgggttgtgtatcacgagaatcggaagtatcaaagaaccatccaagctcgaccgccgcgtatccatgaccatgaaacttttctggctctgtaacatttaaacttgaatacttgtcgctcgtcaaaaacgcaactctgcatcctccttctcctgttgtgttgttaccttgagggatctctatatccacactgattacttgcggctgcccttccggtatcctcgtctggcaacatttattaccactgcagattttgtttcttacaacttggctgctactgtttctctcgtcgcaacttgactcgcaaccgatgatctgcgatttgacatccatcataacggccttgacgttgcaaccaacggccatgaggaggttcttgtccgtgaggaaatagggactgccttggcctgcaacgtttaaaggctgcggtgtaagtggttgagatgttccggtagaacaccctgaggaagttacgggacctttgatgtgaacaactccgttagagtagtactcagtaggatctggaagatagatgttcaccaattctctgttgatcctcgagaggaacggaacagaggttgtggtgttacatacaacctcgtaccacgggtttagatagcattcttttcaccgatacagaatgggaaaggaattgatattcatccgcagactctgttacacagatatggaggttttcttgctgatgagac

SEQ ID NO: 17005 - DNA, 507 bp, Arabidopsis thaliana columbia
gtaagatattttttttttatatgagataaatacttgatagcttataatatagtatgtgtttttttttattgaatcaggtggaggatacttggaaggataattcatatccagagtggttgttgagtatcgttcatggtccaatggttaaagttacttgttggccaatgtatttttgtcgtggatacatatttcatacatatgatcatggaaagaacaaaaagaatgccaattatggagtttgtgtcaaaggtacaacatcttctagctcaaatgaagaagctgatttctatagaatattgagagaaatttatgagcttcattatcctggacatgttgatcttaaggtcgtggtcttcaagtgtgattggtatgattcaaaagttgggagaggtatcgaatagtcaagtcagggattattgatattaaggctaaaaggcattatgaagagtacgatccttttgttttggcttcacaagcagatcatgtatgttatgtccataccacgga

SEQ ID NO: 17006 - DNA, 484 bp, Arabidopsis thaliana columbia
ccgtggtataaagaagaggattatgatgaagcagccgaggattcagtaccttgccttggttttgctcgagacgtgtgttaagaactgtgagaaggcgttttcagaggtggcagcagagagagtccttgatgaaatggtaaagctgattgatgatccacaaacagttgttaataaccgaaacaaagctttgatgctgattgaagcttggggagaatcaaccagtgaacttcgctacctaccagttttcgaagaaacttataaggtaactatgacctggtaccaaataattttacgctattaaattcaacaatacagtttcatttacaatactttattgaagataccactatcttatgttgagttgaactgttttggccaaagcatatgggttttgaacaaaacagacaaatgactattgtttcaatgaattggctcaatcgactagcttgttgcaggaattgattgaaaaatgaaaagctgtgag

SEQ ID NO: 17007 - DNA, 884 bp, Arabidopsis thaliana
gtaacgtccgccagtgtgctgtaaagagtgtaggtttcagcacggtcgccgttaccgatgtaagcagcggtgttctgagcatcagtacgtttggagctggagatcgcaccaccgataccgaaaccttcgtaatcataagtgatagaaccgccgacgccgtcgccgttttgacgcagtgcgtcacgaccgttgttagttacgccactagtaaagccttcaccagatgggttgccgtttttaccctggtactgaacagcaaagttcaggccgtcaaccagaccgaagaagtcagtgttacggtaggtcgcgaagcgttaccacgctgctgcatgaagttgtcagaaccgtaggtgtcaccaccgaattctggcagtacgtcggtccaggaagttacgtcataaacaacgccgtagttacgaccgtagtcgaaagaacccacatcctggaatttcagacctgcgaatgccacacgggtccaggagttgttttcgttttcagcgctgttgccctggatctgatattcccactggccgtaaccggtcagctggtcagtaacctgagtttcacctttgaagccaagacgcatgtaggtctggtcgccatctacatctttgttgtcagagaaatagtgcaggccgtctactttaccgtacagatctaatttgttgccgtctttgttgtaaacttcagcagcgtttctgcgcctgctaccagcagagctgggaccaggagggacagtactttaactttcatgttattaaccctctgttatatgcctttatttgcttttttatgccactgcatactgattaaccctcattaatcagtcggcaagtccattctccccaaaaatgcagaataatccaacacgaatatgactttaa

SEQ ID NO: 17008 - DNA, 558 bp, Arabidopsis thaliana columbia
gttgataccatcgtgattagcatcactatttcttggcatttttatatattaattttgattgttaaattacaagtaatcatagtggtatggcttcttgtttgactcaaaccaagcccatgaccatgagtccacaagttcttctaccatctttttttttttccttctaccatcttcacaagtaacaacgatgacataaggagagtctatagagtgatcagaaaaatattttctatttctttcactttgacctctataacatccaaaccgactaataaaaccatcccaaataagcaaacaacaatcaagctaaggaaacagcaattggactcctcacaacatggactttatctgtccaactaaaccatccaaattggtattgacccttttcagtcgcattcatcacctggttcttcagtggtttaataacgattttaaaccgctgcttctgaccaatccggttaaaggacaatatattcggtatagccttaaccgaaatacccgatggcggtttaacgctgaataagtatgtgcttgttgagttcccagtccaacatttgt

SEQ ID NO: 17009 - DNA, 449 bp, Arabidopsis thaliana columbia
gatattgtaccattgtccccgaatatagccgtcttgtttaaagtgatatggcacatctcacacactttctcgtagactttccctggaaaacagatacaaacaaaatcagacagaattttaaatttcgatcgacgagtagttatgtttaggttgagtgatttcagtacctgttaagcccataggagtgagatcccacagcaacaaatggttgtctgtaccaccagtaaccagtctgcattttcttctaagaagagctgctgctaaagcttgggcgtttttcttcatctgttgtatgtaagctttgtactctggagtggccacttgtttcaatgcaatggcaagagcagcgatatggttgttgtgtggacctccttgtagagatggaaaaacagcaaagttgatcttttccgctagatcgtaatgcgtggaagtgtccaatggctagagtg

SEQ ID NO: 17010 - DNA, 523 bp, Arabidopsis thaliana columbia
tttcgcatcttctcttcctccatagcctctccacctaaaggtctctagatgagacaacaagcatccgggaatagaactcggctggttccaggaaagtgagagacactcgaagtcctggtatcagtactatatattaagttcatcaaaactagatgcacttatttttaaggaggatggaaaacttacattgtcaatcgtaggagttttaagtttaggagaattttgaagcgaaaacataagcggcatcaacgaatctaccagactagttggataacagtaaaactctatgagccaggagaacttgatggcgttacagcatgcaacctgcgtgtgatagaacaaaattagtattatagttggttaagcaacaaggaacaaagaagaggtacagagatatgtaatatagctaccattgatttgctggacagtaagaagagatgtttgactgaagagagagatctcagaagcttttcatcggggtaaggaacattgctgatgaatgcctcgtcaaggaaagacatat

SEQ ID NO: 17011 - DNA, 665 bp, Arabidopsis thaliana
cttttgtttagctctttgacaaatgtcacaatgtataactcctttattcctttgtttagaaattccaagaacatctgtaagcatatcaatccgagaaaaagaggtatgtcctaatctcttatgccaaacagcagagtctattacatcattcaaactataagaagatagttgtcttgaatctgcaggttcttcaacatccaacaagtaaagattagcaatccgtctacctcttccaatcgtcaatcccttggtaggatcctatatgaggcaagaagcaggatcaaaaataactcgagaaccaagatctgtagtcaacgagcttatactgagaagattcattctgaaatctggtatgtagagaacattcttcaaactgatagaagtgtttataatcactgttcccacaccagctaccataacaacactaccatttggaaggttaacatgctgactaacagaagcatctagatcactgaataagctcttatcatgacttacatgatgagtagcccagaatcaattatccatgatctcttatttgtacactctgagtacagttaaacccaataaactataggtagatggtgagaagatatacagaagtagacctcatttgaggactgaacaggaactgagtagtggtgagactgagtagcatgagtgtg

SEQ ID NO: 17012 - DNA, 533 bp, Arabidopsis thaliana
ggagaggtcgctaccaagcgtggtgacttgcccaacgccaccagcgtgttgcgcatcggccagcgtccatttcacgcctaactcacgcaaacttttttcattaatggtgacaatatgcgccgacagctcaacctgcccgaccggcagatccatttgcgctacccactgttcaagcgcgcttaacgccgttttgttatctcgtagcaaaaggcgattggtgcgtttatcgacggtcatactccctttggcactcagtagcttctcccccgctttcgccagttctcccgcgtcggcgtattgcagggttatactgcgattttccagcggcagatttgcctgcgcccgcgcctgctccgcctcctggcgggcgatattgttattctgccaggcaatggaatgcactgagagaatgttgccttcctgccgcgttatcagtccggcgcttttcactacagtttgtagtgcctgcttccagggaacatctgttagatgtaacgacaccgtaccgctgacgtctggcgacacgaccaggt

SEQ ID NO: 17013 - DNA, 324 bp, Arabidopsis thaliana columbia
tttgatttagtgggtgattcatactccatagtttgccaaatctcggaatgagaagtatttgtgaggcttacgttatgaactgtggaggatcgtccaggttcgtggaaccgaggattacttctcttttgagttttgtggatagtttgtggcatacttttaactggaaatcaaagataccaggaaaagagatcagcacatatatcatgaatctatgatgttaatctatccccaacggagatagccttttaccatagctgcttagctgtgatctagtcgctccaccgtctatgggcactaggatacggtgtcccatcgtcctgaaat

SEQ ID NO: 17014 - DNA, 841 bp, Arabidopsis thaliana
tagcatagcataaagtggaagaacacgtaattttcctggagaaaacttgttttttacctgctcagcctcttgattctctgctgcaatggactttgccggctcagcagatacggatccatttttgtctgccaaagcattaaacgctgctcggagacatcaagcttcccttcctctacaaatgaacttgcaaagccgtcatcaacagtttcccagtccctgtcttcatcagactcatacatgtcttcctcttcaaaatcatcatcatagttaccatcaccaatatcagaaggatcttctccatgcgagctaaacctggaattttgattgttggagtcatcatcaaatgcttcagcaatctccttcatgtcaacaccaccaaatgaaccatcatcgcatttcttcttcacataagcatctcttttagcagcttgaacaacaagttcctttgaagacttacgtaacttctcacataaatagtcaacttctctctgcccagtcacaaaaacaagtattcctccttgtggtaactttttgtgaattgacatcactttcttataagcttcacctatataatcaacaatctcagtcttcttggagaaatgtatagttactggatactgtcgagtgggaacctctataagaggaggtatattagggaataaccttttccccgatacaaaatcttccactcgcaaagtcgcactcatcaatataagtttaagtggcgtgatttggcattctgaggttactgtgcctccagattgaagactcttttgttgtcctcgtagtatcctgtcggattttgatgctcgagtgagcatccaattagaatgtctgtgtc

SEQ ID NO: 17015 - DNA, 620 bp, Arabidopsis thaliana columbia
aaaactactaaactaagaacttacttttaagaagcaagagagaggagagactttagaatttagagtgttttatgtttaagagcttaagaaataatgagaggttgggtctctttatatagtagagggagataggattttgcagaatattctcagaatatgcatgacatattttgagactatcctgagaatattttgaaactatcaggagaatattttgagactatcctgagaatatttctttaatattcaactcaggaagcccaataactcacaagcatgacggtccgcaagcccgacagcccttgagccgacgacggaacgtcctgacaacccgcagcccggttcggttcggtttggtccggtttggcccaagtgtcccattttacattcttatttctcattcaatagaactccgtttttgacgtatgagtataccattttgtattactctttaccagctttcccatgcactaatgacctgacaattccgttcagccgtttggccggaatttggccggaaagtcaacggaaaagttttgtcaaaaaagtttcaacacttacaacttttgttcaacttgatattatttgtattttctttactcttgaattttctttcttca

SEQ ID NO: 17016 - DNA, 800 bp, Arabidopsis thaliana
aacaacattatatttaatgcgtatgtcacgctgtgttcaaaatcctttttcttccctcttttccaaaatcaaaacgcgatttcatggcctccgcataagattccgatcgtaacctagggtacatgacccgcaaggatgcagaattgaagcttccacggatgacccaggtcaaaaacaagactccggcgccaatccaaatcaccgccgagcagatacttagagaagcgcgagagaggcaagaggctgagttccgtccgcctaatcagacaatcactgactcagctgagctttccgactacagactccgacgtcggaaggagttcgaagaccagattcgccgtgcgagattgaacacccaagtttgggtcagatatgcgcagtgggaagagtcgcagatggatttggagcgtgctcgaagcgtgtgggaacgagccttagaaggagaaaattaccggaaccacacgctctaggtcaagtacgccgattttgagatgaagaacaagtctgtcaacgaagcgaggaacgtttgggatcgtgctgtttcgctcctccctcgagtggaccagctttggtacaagtttattcacatggaagagaaacttggtaatattgccggcgctagacagatactcgagcgttggattcattgttcacctgatcaacaagcttggctctgctttattaaattcgaacttaagtataatgaaatcgaatgtgctagatcgatatacgagagatttgttctttgtcatccgaaggtttctgcttatattcgatatgcaaagtttgagatgaagcat

SEQ ID NO: 17017 - DNA, 819 bp, Arabidopsis thaliana
tgggccattgctcctggttttgggccaatattgagatatcctgagcctaacttatttaggcccattaagaacccattctattttgtgcgtgtatgttacgctgtgttctctcgttcaatcattttcttctctcatttccaaaatctagaaaccctagagcaaaaagtgatctcatggcctccggcgaccgtaaatttggttatatgaccgggaaagatgctgaagtaaagcttccacggacgacgcgggtcaagaacaagaccccggcacctgtgcaaatcactgcagagcaaattctaagagaagctcgagagaggcaagaagctgagatccgtccacctaagcagaaaatcactgattctactgagctttccgattacagactccgacgtcggaaagagtttgaggaccagatccgtcgagcgagatggaacatccaagtttgggtcaaatatgcgaagtgggaagagtcgcaaatggactacgcacgtgctcgaagcgtgtgggaacgagctttagaaggagagtacaggaaccatacgctttgggtcaagtacgcagagtttgagatgaagaacaagtttgtcaacaatgcaaggaacgtttgggatcgttctgttacgcttcatccctcgagttgatcagctttgggagaagtatatttacatggaagagaagcttgggaatgttactggagctagacagatcttcgagcggtggatgaactggtcaccagatcaaaaagcttggctctgttttattaagtttgaacttaggtataacgaaatcgaacgtgcgagatcgatatacgagagattt

SEQ ID NO: 17018 - DNA, 565 bp, Arabidopsis thaliana
cacatctgatgacctgtgattgtccgagtaggaattagctcgtctttctcattcttgactactgtaacatctctcttcttaggaactacatgaactcgactaacccaactgctatctgaaattggatagataattccttcttccgacagtttcataatctccttcttaaccacttctttcagattcggattcagccttctctgatgttcaacgaagacttagactcatcctcaaggtgaatcctatgcatgcatacatctggagatatacctgcaatgtcatcaagagaatagccaagagctttgcgatgattgcgcagcttgcttagcaataaggtgagctctgcgggattaagagaaacattcacaataacatgataagtagaattttcaccaagaaaagcgtaccttagccctgctggaagtggtttcaaatcgatttgaggagcctttgctggatcccaatctgaattaatagtcggtgttggaatcacagatggaagagcttcttcaaccgtaagttgcatcacatgttctgtctcatcttgcagcttagtatatgtaga

SEQ ID NO: 17019 - DNA, 682 bp, Arabidopsis thaliana
caggaaaatagaggaaaacagacgagtattagtgaacgattccagagtcccagacgtgaaaccgcattctgctgccaatggactccagtttcagtcatcaacccaaatacctgagaaggttgcttctgcagccaagagcagtcctgcatgggatgaagattggggctccccgagcaaagattctgctgtgggaaatcctgcttcttctcgtcataacacaaacgatcagtttaacaaatccacagatcagtcacagccatcgatcatgtctactctgcccaacaagacaacagcgccaacaacatgccctgcagtggacatcgagtggcctccaaggcaatcttcaagcctcactgctccagcaactgataatcagacacaactaaacacaggaacatcatttgcttcgggtttcgatgagttagatccgtttgctaattggcctccacgtcccaacaatggtgcttctgttgcttctactggtctcaagaatggcgctgcatccaattttagcaacaatttaccaggcggcacccattttcagacagctaacaatgacaactgggcattcagcagtgcctccttgtcttcgctaaaaccaccccagcaagggaatcaaggtatctctgcaaataatcaagatcactcaactctttcggtgtaccaaacagagccaaggatg

SEQ ID NO: 17020 - DNA, 611 bp, Arabidopsis thaliana
aactcaagctattttattacgtattcttatatctcaataatctcaatacatacataataattaaataaaaatagatggtgaaataatgtttgttcctcatattgaacagttatatacgtatatgtgtaataatgtacgtacatttttgttggtaaatgaatgtatgtacatgtgtaataatatacgtacatctttgtttgtgaattgaattatcaagaaaaatttattgatacaatattaaaccaatattggtagtggctgagataagacattgtttgttgtatgacttttctgttcttaaaaacacttctcaatctatagtgtacgtacattggtacaaaccatgttgacacatacttcttagagtcatagctggtgtacggtcacccgagtgagaaatgttatctccgcgaggtacacgttgacttgtgtacgtacactctgccaatagacgactgaattcccctggtgtgagaatgacgttctcctcaacattccctattccatattcttctacaattacatcgttctacttgttataatcataatcttcgccactaatttcactaccgtcaatagtatgatcgagggtacttccccaatagatcatc

SEQ ID NO: 17021 - DNA, 826 bp, Arabidopsis thaliana
tgtctaaaaaaaaaaagaaaaaaacggaactcgtacctataggcagatcagcctcggggatcggttaaatctacgggacctcttcgatcggatctagctgtgctgctggaaggacgattgcgggaactgctggagctaagggaactactgaagctacggcatgagcagctacgatgcgatctctgctaaaagtggcccagttagtctgaccacgtcagagaagggttaacagctcgagtctctgagagagtaacttccttggtctttgctgcaaaccatcaaagggaaaatagcattgatatcagtactaacgttcagcaaaagcagttaaggactcgacacaaacaacaaaaaaccaagaggctcaggtctccatctgacccaggttggtggactaggtcctcgttatcctcgcgggatcaaaactgccgattgaatgacgatctactctgaataagaagtacttggatcgccaattggtgtctcgataagcctttaaaccgcctaggatcagagatccgggacgagcactgatgtagtacgtcccctggtcgctcctagcattggtcttgacctggcagagctgaagcaggtcatggcagttgaattctctatctacttcccgagccgggtgaataacgccaatacatggcggacaaagttcgggcatatctggggaaaggcgaggcgagacagtagagcatctcgaggatacacaccggaaacgggaaaaaaaggccacatttctcaaagaaattggcataagcgcacgaccaccgaccggcacgttctcacgatgcagtggcggccttgggagtatcatagt

SEQ ID NO: 17022 - DNA, 620 bp, Arabidopsis thaliana
gctctataaagtctatccatttatataactttccatttttcttgttgtttttgatgcttttgtttaagtgtttcaagtttgttttattgaccctaaggaagtcaacggttgagtaaattcaaaacaagtcaagaatcatctcaacaattgatcgagtaaagtgaggaggagagctttaagccggttatttgaatccaaatgagagaagcatcaccaccgtttcatcgagtgacttcttgaggtttattctggtccgtttgatcgagtgatcaaaagcaaagcattctccaccgtcagatcgagtgaagaaaccaaagagaccaccttgtggactctgacgcctcgtgacccgcctccattgaaacgctgttgtctctttgtcttctttccccccccccataatcgctttggtccccccattgcaattcccgaactcaacaacctcatctctcaacctcccataccaaagcaatctcgaatgctcatatctctctctatctctttctcttgcacttcctctttctatcaaaaactcaacaaaatccatctattttcttcatcactcgatctcttaacctttgagtctctctttctcaatgacaaacaggcgcacgctcctg

SEQ ID NO: 17023 - DNA, 510 bp, Arabidopsis thaliana
tttgtttttgtagaaaacacaccattgggatcctttgataactggtactgtccagtattatttcaatgagatctgtttaaggcgaatgaaaggcatggttagcaccgtgagaactagtcgaaagaaacctaaatggatcgggaaaactctatgggaaacaatgactgcatactgggacactgaagaagctcaagaaagaagtcaaatctattcatcagaccgtctgtttgactgtaatggtctaggttcctcacatacacttctcaaggtcgaaatcatatgagcaaatcctagacgatttggtgagtctactttctgttttaatcctttgcaactttagtctgacttttctctacgcttctatgacttgttcttttttcattacaggaagaagaattgggcagacctgtcagtgttggtgaagttttcatcaaaacacatacaaaacctgatgggacatatgttgatcgaaaggcggaccagattgcaaccttatacctgaagaatgtg

SEQ ID NO: 17024 - DNA, 891 bp, Arabidopsis thaliana
cgccagtgtgctttaatgcggctaccagtacaaagtttaaagagctttatggacagattgaatccatgaaccaaaattgcggtaagtatctacatgatatagaaatggctaattggacaaggttatatttcaggggacatcgtttaaatctgatgactagcattatagcaaagacgttaaacaaggcgttaaacaaaggccgatcgtcacatattgtggggttgataagatttatcaggtctatgttaactagatggtttaatgcgcgtcagaagaagtctctcgaacataaaggtcccgttcctccggaagttgacaagcaaataacaaaaaccatgttaacaactaatggaagcaaggttgggaggatcaccaactggagctacgagataaatggaatgttaggtggaagaaatgttgttgatcttgagaagaagcaatgtacttgcaagaggtatgataaactcaagatcccttgcagtcatgctttggtggctgcgaatagttttaaaatttcctacaaggctttagttgatgactgcttcaagcctcacgcatgggtttcgagttacccgggagcagtattccctgaagctattggaagagacgaaaaaatactagaagagcttgaacaccgatcgatgttgccaccatatacaaggagaccatcagggaggccaaaggtagccagaattccatcaacaggagaatacaaggtacggatttttttttgctaaagtagtactttctatttgattgttaaacctaatgcataatgtggtttgtcatggtaaatgtagaacctaagacaggaaggacggagcagacctggtgctcgaggtgcaaaggcactggtcataacaggacaagttgtacaaatccaatttgaac

SEQ ID NO: 17025 - DNA, 521 bp, Arabidopsis thaliana columbia
tagagaggaccccctgcatagatcagaaaagcattgtaagttgagatttcattatgcatcaatgagaatctggtttaatgtgccaagaacaagacctgcattctcaaacatataccccaacaaaaatgaaacttttaattgacacttgtgaacctccaaaacagtagtaacaattgcatatatacatagagtagaagaaaagaaagatttgtctttttaactacccaacttgaaagcatcaacaaagagacctaagcaaacaccagctttccaaaaattcataaacacaacaaaagactgcaacttccctgaaaacattgaagaagacggtttcttatacataagcataccgattccttcgatcgcagcaacgacgattccggcaacaagcacatcccaatcaccagtctgtccaagaatagtagctagtgcattggcagtgtagaaaccaagaagcagcagaaatatcttcattgggaagttttttcttgcagagtttatcttcccaagtaactgtttgc

SEQ ID NO: 17026 - DNA, 560 bp, Arabidopsis thaliana columbia
ccattcgcaatgacgggtaactcaactctgcctccccttctcaacgccctcgagatttatacagtcgtagacattctacagctagagacaaacaaagatgaaggcaagtgtggtctttctttaaaagaaatagtactgtctttttaaaacttttctttttggtttttgtgaatagttttcaatgtgatgatcagtttctgctatgatgaacatcaaagaaacatatggtttaagcaaaaagataagctggcaaggagatccgtgtgctcctcagctttatcggtgggaaggtttaaattgtagttatccggactccgagggatcaagaatcatatccttgtatgttacgtattctttatcacaaggttctctagttttggttctttcacaaaattctaacaattatggatacttttcttgtttcacaaactttaggaacttgaatgggagcgagttgacaggttctataacatctgacatatccaagctaacactgttgacagtattgtaagcatccgaactgcaacaccgataaacttagtacgctttatttctatggg

SEQ ID NO: 17027 - DNA, 546 bp, Arabidopsis thaliana columbia
caccataacgattgcttcttacgcaagaaatttctgtttctgccaattcctgaaaccctagatacacagattcaatgtgtcatctttagaacagcgtatagaggtctcaacgtatttcgatcggaatgaatttttgtggacagttacgtcgcactatagggttgagaatcaacggtgggattaagaagttaacggtccattgttaagttactagcacgttttggtgacacttaaagattgatttggttctccaaattctaaatttcagtttgattttccttttcaggttttaaagtcttgaatgatgatgaagaccaaggaggccgatgcctcgaccgtgaacggggcctcgaccggcttcagttgggacatcaacaggtgttcggctggggctgcagcgacaagccgtctggtgggacatcaacaggtgtccgcttcccaatgacgttgatgttcgtcgggtgagtccgtttataaaacgggcgttggagaaattaggctacactggtgctctcacaaccactgccattggcatactaacagacg

SEQ ID NO: 17028 - DNA, 1219 bp, Arabidopsis thaliana
ccccccggtttaaagggaatcttgtaatttttttcaaagaagttacatttactttactatcttactataaattactaacttttgctgtataaatatgaccactgaacgtctgtgaagttcacgaccaaaccagtcttactctctcttaactaataatattgagatggcagacaatttgaatttggtgagtgttctgggagtcttattggtattaaccatcttccataatccgatcatcgtctacgccggcgagggtgttcccaacgtagctttgttcactttcggagactcttactacgacgccggaaacaaagtgtttctcagccaaaggaaagatcttccacaaacctattggccctacggaaaatcccgcgactaccccaacggcaagttttccgacggccacatcgtccccgacttcatcggtatgcttttgattattctaagatatctatttgattattacagatgtgcatatatatacaaccataaatatagaaacaagataattattaaacatggtgactaatgactatgtagctgatttcatctctattccgaatggagtactcccaccggtgcttaaaccgggcgttgatatttcacgtggagtcagctttgccgtcgccgatgcttctattctcggagcgccggttgaatctgtaagtccgttttcaatatttgttgttttgttttaaagagatagactttagggtttctaggtaaagaaacaatgttaaaaaaagtattagataaatgaaatcattacaaaaaaacgttattttaaaatcttatgaaacactattttttaatgtactaatattaataagttttattttcttgtgtttatatccagatgacactaaatcaacaggtggttaaattcaaaaatatgaaatcgaattggaacgacagctacatcgagaaatcactgtttatgatatacattggtacggaagattatttgaatttcaccaaggccaaccccaatgcagacgcttctgctcagcaagcttttgtcactaacgttattaaccgattaaagaacgacatcaaagtacgttgtcaaacaaccaatgtacaagctttttcgcactttaattatgttcaaatgactaactataacaagttattttacagttgttgtactctttgggagcgagtaaattcgtggttcaattgctagcaccattgggatgcttaccgatcgtgagacaag

SEQ ID NO: 17029 - DNA, 573 bp, Arabidopsis thaliana columbia
cgcaaagtgatatccgtgttgttgtgtaagttgagacccatttgaacttttcctttgagatagcgtaagactcttttgaggagattgaaatcagcaactgtgggggaatgcatcttttgacacacaagattgactgcaaattgaatgtcaggacgagtaagagtaagatattgtaacttaccagccaagctccgaaaataagtaggatcagcaaagctttcttgttgaccaggaactttatccaattgaagaggcaaaggggttggcattggggcacaatctgccattcctgctgcaacaaggagatccatagcatatttctcttgatgcaagaacaacccttctcagtgaaaatgagcctgaattccgagaaagtaatgcagcattcccatgtctttcatgcggactctttattcagagagacaagcagtgtgtccaacagttcactattgttgcctgtgagaagcatgtcgtccatatagagcaagaggaacatgagatctcttcctttcagaaacacaaacagagaaggatctgaataggtacagatgaaaccaaactccaagagaaaag

SEQ ID NO: 17030 - DNA, 391 bp, Arabidopsis thaliana columbia
caccttgctcaataagctaaaatgctcatgtgatgagaggatcaaggtctccactgtgttaaacatttttcccccttgtcaattattttaatagttccaacacagttgaacacaagatgtcacaacaagaaaaagagcttcaatggtgatggttacacatactttgtcgaaatatctttgatgcttttagccatacgaagaacatgctcttcggattcgatcacatttggaccagccaataagaaaaacggctcagcaacctgcaatgagtcattgtccgtacgataagataactcaattcaccggaagaagatagttgcaataacactgaacctagtaaaaagaactcaaccttgagctgatcatacagtagtgacgctgaattcgccat

SEQ ID NO: 17031 - DNA, 519 bp, Arabidopsis thaliana columbia
tgcttaaccttttccttttctgtctttctgaactattaatcaccagggtgtcccaatgatttacatgggagatgaatatggctatactaaagggggaaacaacaacacgtattgccatgacaactatgtaaaccccttatgctttgcttccagggtgattataagtaattttttcgatcttagctttccgacattaacacaactctgatgcagatgaactattttcggtgggataaataggaagaagcacattctgacttcttcagattctgccgtattcttatcaagtttcgtgagtatgtaatcttctttcatgagtctatcgatcttaattgcttagttgatcgcttcacttagtctcaaatccaataattgacatgcttcttccttttcacctactgctatgtgttttctttcttttgcaatcccctgtttctagggtttcctctgatcgatggccattatgactgtattgtagtgaatgtgaatcacttggcttgaatgattcccaacagcaaa

SEQ ID NO: 17032 - DNA, 946 bp, Arabidopsis thaliana
tgggtgaactaggtgtatagccataattgaacaaaaattaagaatatagccatataatttacgtaattcagcaagtaaccaaaaactctaactaattacaagtctatccctgcattatttccctattttccaatttgccatgactcatcatcttcttcgttttgttgatcagatattgatctaaaggtaatattccatatgttctaaaggtaatggattgtgaatcagatattgatctaaaggtaatgtttttctcacagacctttttcattcatcatcttctttgtcgcttctcctctcctctccaatccaacacaacacttccagaccatttcactttctcctatcaatccattctaattccccaccatctattgacttacgacaactaaatcctaagacactatatatgggaccaaacaaaaataattaaactaaatgaaatcatctcaagactcagtttttagaaatctgacaaaatcatgtttatatacttttaatctcttttctcctttccttaagcgaattgaaatcgattcgattttgggtttaaatttgtgttaggaattttcaattttagatattgatcaaaccagaaaatattcaataagatcttgtgagtctttgttttcatttttcttcgttctaactagcaaatagaatggtacaaaattgaaagtaaaatagaaaactatagttcggttctgttttaattaagttaaagtagaaaaaaaaagatgagaggcgagagagatgaaacaagcaatggaagagaggaagaagtgattaaggtggtggtggtgtgtatggtgtgtatggtgtaggtcgtagtaatatttgtgttggtggttgcagtggtcgtgtgtcaattgcggccgcaataatggtgatggtggtagagatgacagcgtaatggttgtttctatggtggtgacgattgcagtgg

SEQ ID NO: 17033 - DNA, 562 bp, Arabidopsis thaliana columbia
gtaaaatgttgcttgactttatatctctgtgaatgatgggtggacaacaatcatgatgcaaatatgcgattccttttgccgctcccaccgcaattttatatctgtttatccaacaaaaagggacaaattaatcacttttctttcttataatcttggatccatgattaaccattttgaaactggttcttattgactagagagtaccttttgagccaatccagttctggtagaccgcctttaatattgttgccaagagcttgatacaagttcccattctccatgaactcaaacaccaaatatctagaacctcttccaaccaaacaagcgtagagtttcaacacgtttctgtgtctaatctttccaagaatctccatctccgcaacagagacctctgttccatcaccttcttctcctcctcctctcttcaaccacttaaccgccactgtcccgccaccttttttcaaatcaacacggtacacttttcctgcacttccagatccaatcacatgatcttcatccaatctacaaatctcatcaacgtccaactccatttgatgaaaag

SEQ ID NO: 17034 - DNA, 504 bp, Arabidopsis thaliana columbia
  unsure (1)..(504): unsure at all n locations
nnnnnnnnnnnnnnnnnnnnnnctaaagatgtttaagtaagtggttcatcccctttttgcctcggctatgaaggggatagccaacaatgaccccacgactcatctcaattatctcgccatgacctggctaagtcccagtccgatctcttgccgtcccgttcacacctgaatgacttctcctgaacttaagtctcagacctatttggccggtaatccctctcgaatttgctctttttgcgccccgccttccatcaacctgtaacagacccagccattttctgcgtaattgtgatctgagttgtaaaacgcagatcattatctgtgttttacagatttaatgttgacctcaaaaatcatgtgggtaagtatgatggccatctaagcaaaactaaacacagaggatgacgcaatgaaagcactggctcggtttggcaaggcctttgcgggctacaagatgattgatgtcccacacccatgtgtggcccggaagatgtagtgattgaa

SEQ ID NO: 17035 - DNA, 514 bp, Arabidopsis thaliana columbia
cttcctggaggccagtgttggatctttgatgttcccttaaaatttttgatgtgacagataaggaaacttgatgccactgaatttcgaaatgctttctctagtgcttatatacgggtatgttgtattgctttctttgattttgttaagcataagtggatatggagtcatctctgaatttactgttcaggtgagggaatatgagtcgaggagtgtgagtcgaagcccagatgattctaaaagctatagaagcaggagtcggagccgtggtccaagctgtagctatagtagcaagagcaggaggtctttttttttttttttttttcataaacctaagacatataagggatttttattgtaacttatttatgaaattaactgacttctaaatgcaatgcagtgtgtcacctgctagatccatttccccgcgttcacggccccttagtcgttctcgctcgctatacagctctgtctcaaggtatgagtgttagatttgtatcattattatatatgtagt

SEQ ID NO: 17036 - DNA, 610 bp, Arabidopsis thaliana
  unsure (1)..(610): unsure at all n locations
caaataataatattagtttataaaataatcttattagcaaattgtgttcttgttggtcttcttagtctccaacaacttcttccagtaggccgtgacttctctctgcgtctcctctggcgtcttcttaacaccgttaacttttccattagccatcttggcgtgaaccctcgccggaagcgtatcgagctcgtgtagaaccttctcgaaatcagctaccaatctctcggctaaggttcgagagaaatcttctcggataacaactcgaaggacagtgacatgctgcgcatccgcaggcatcgtgtaggccggaacgatccagccgaagcgacggagtgtatgggccacctcgaactcgttgtggcggctactatctttgagagaaaacgccactaacggaacaccgttttctttggagacgattttaaaacgtcccgttttctctaatccttgtcttagtaccatcatgttttccgacaattatcatcacattgcgataacctaaatcaacaagaaaacattattaattacacaatccaaaactagtcatgttaggacgtttaatcaaagtatagtacaagtancacttaaatataatacatctagttcttta

SEQ ID NO: 17037 - DNA, 388 bp, Arabidopsis thaliana columbia
aacgactgtgtttcgaaatatatagcagctaaattacaagacaacattctctcaatcgaatgtcctgtctctggttgttctggtcggctcgagccagatcagtgtcgtcagattttgcctaaagaggtttttgatcggtggggtgatgctttgtgtgaagcagtagtgatgcgttcgaagaaattctactgtccttacaaggattgctctgctttggtttttcttagaagagagtgaagtaaagatgaaagattcggagtgtcctcattgtcatagaatggtgtgtgtggagtgtgggactcagtggcatccggagatgacttgcgaggagtttcagaagctagcggcgaacgagagagggagagatgatattttgcttgcgacgatg

SEQ ID NO: 17038 - DNA, 617 bp, Arabidopsis thaliana
tggaataaaatgagtatcgatccagtggtgaagaagaacgtttctaatcgtgatgtggcgaaggacctctgggatcatttgaagaaaaggttttctgtgatgaatgggcctaaacttcagcaacttaaatctgagttagcgtgttgtaagcaaagagggcttacaattgagacatattatgggaagctaacaaagatttgggacagtatggctagttttcgtcccgtacgtacctgcaagtgtggtggttgtgtgtgcgatcttggtgctcttgaggagaaggatcgtgaagaagacaaagttcatgaaattcttgtttggacttgatgatgctttgtttcgaacagtgagatcaactcttgtgtcacgtgttcctgtgcaacctttggaagaagtgtacaacattgtgaggcaagaggaggatctgatcagaaatggagcaaagattatggatgatcaacgtgaagtcaatgcatttgctgctcagatgagaccgaagctttaccaaggaagaagtgatgaaaaagaaaagggaatggtgtgtaacactgcaatcgcagcggtcatgcgtccgatagctgctatcagtcattggataccggagtggtggggagata

SEQ ID NO: 17039 - DNA, 551 bp, Arabidopsis thaliana columbia
catggtcatagttgtttcctgtgcacgagtagtcatcgaacggaaagttaacaaaactgattttgcctgtttggttttggatccgagatggttccttcgagcgagacagcgaccgtacgagtcctttgcctaaagctgcttctctacacgaaccatcctggaactctcaaatggctcattggttccgcatttttcacgcctttcaccgtcgtctccactttccgatgtatcatcactctcctgatttccagcaagaatctggtgaggagaaacccgtttctacacttatattatgtcaattaacagaatcagaatgttcaattgcatgaatcatgtgctttatttacgaaagttgaaatttttatttatggatcaaattgttttgtaactgttgttatagagtgaggaatttagaaaaaacaaagtagccatcttacaacttgtcttttaatgatcattattaggccattgattgtcacaaagatagctcttttgggatttgtatgcagatgatctctggaagttgttccacaaggttttgaagcattgga

SEQ ID NO: 17040 - DNA, 743 bp, Arabidopsis thaliana
tctcatcgtgatgtggcgaaggatctctgggatcatttgaagaaaaggttctctgtgatgaatgggccaaagcttcaacaactgaaatctgagttagcgtgttgtaagcaaagagggcttacaattgagacatattatgggaagctaacgaagatttgggatagtatggctagctttcaaaccggtgcgcatctgcaagtgtggtggttgtgtgtgcgatcttggtgctcttcaagagaaagatcgagaagaagacaaagttcatgaatttttgtctggtcttgatgatgctttgtttcgaacggtcagatcgagtcttgtgtcacgtattcctgtgcaacctttagaagaggtatacaacatagtgcgacaagaggaggatttgctcaggaatggggcaaatgttttggatgatcaacgtgaagtcaatgcatttgcagctcaaatgagaccgaagctttatcaaggaagaggtgatgaaaaagataagagtatggtgtgtaaacattgtaatcgcagtggtcatgcatccgaaagctgttatgccgtcattggctatccggagtggtggggagataggccacggagcagatcattgcaaactcgaggtcgtggaggaccaattcgagcggagggcgtggacgtggtgcagctgcctatgccaatcgtgtgacggtccaaaccacgacacatatgagcaagctaactatgctctcactgacgaagacagtgatggtgtgaat

SEQ ID NO: 17041 - DNA, 1007 bp, Arabidopsis thaliana
aaaataaattcgttatcacgttgtagcctgagtattatatttccagtatgtgataacgaatttattttattgaaaaatttgtaatatacttagaataattttattttgagtaaaaataactttttgaaaacttccaaattagaatagtaatttgaaatggcccattacggttaagaaattgatataaatgcggtagggcaaaaacttatggtgacgtaaatatgaggaatatgagaacatgtagggtgaaagtcacgcaacttgcaaattgtataatttaaaacggtggggacaaagaagaaatatattgataaagacgagtctctatcttacatcaataatagatattttttgagctatcgatctgatttgcgggagaggttatcacattttgcttatcacattcgaaaaagacagaaatttgaactttggaacattatctctttggtactggcaatgttctttgtacaggctgtctttcccagcctccaccgcagactaaatgatatgaacacgatccaacggctgagagagcgggtgtattattgtgcgtactttgctttccgaatgaaacctccacaaaagtcataaaacataggaccaatagatgaataatatcgtttatgaaataaacagagtttctctgatctttattatgaacgattacatgtacatatatagtttttagagaacaggatctctatgttatcataatatcgtatcttcacagaaaatataacaccaatattaacgatgcagattttatggaatgaatctgatacatatcgctgatttaacgccaacttcctcttcacgtaactttgtagctaaaccaaacccggtttacctttcaacgaaatctccaactccaacaccccccctctaagttggagcatacaaatttcgtatgcctaacttgatcctgaatgctgagaaacaatcacgtcctaagggctttgtgaagatgtctgcgagttgagacgttgtgccaacatgtcgaggagtga

SEQ ID NO: 17042 - DNA, 550 bp, Arabidopsis thaliana
agaggaacgatgataagtcgtctcatctgaccttagtggcatcaaacaacggtgtcaatcgacaccactaccgttgtcgatcaagaccttcgggtttcacagacagaggattctgcacattctcttcagcccacaccacttgaggacctatgtgataagttctcttctctctcttctcctgtttatctttgattaattctttggattattcgaagactgcttcacaagataacaagcgtagagttcctcgaaagcttttttgtcctattgttcttacaggtgacaagaagagtgtcgatcgacacaccccttcgtgtcgatcgacaccaaaagctgctccaaccagatctgtttacacaccgccttggaaggcgaggaggcagcagcattcctccaccacaccacccacatcctgaactccgccaagtcaaactattgactcaaaacaagcgcttggtgggaggcaaccaactggttttaattttcttttccctttcttttattgtcttttatttttgatttattttttcactttctctggatttgaatg

SEQ ID NO: 17043 - DNA, 619 bp, Arabidopsis thaliana columbia
gcctttcagccagtgagagttcttaagataactaccatccatagtgaatctcgtggttttgacctcttctccctcaaagttattgcgaaagtgcccaaatttaggagtaagaagactgccaactctctcagatttcttccctttacctgtaaagggcttggtcttgactgagaccaagtgatgagcaaatacagcgccaaagttgacatcgcggtcaacctcctcaaatcccaaactatcagaaaagaaatcatcaacagcatgatagagcaacaacagctcagaaagtctcatcttgccaggctccatcttgcacaacaatgtgctactaatcagcctaaccaaatatcgtagaacagggtgacgaatctttgagtgtactgcgtccttggaatcataagttccattaccaaaccggctccagaaaacctgagcatccttaaactgtccaggcagtgcaactccagtgagatcattgtcaaaactatagatgtcacacaactctctctcagtggtagactatatctaacaccgcggatgaagaagataagagctccttcctgagcattgcgtttcctgtcattcacatagtagaccctaacagaagccatgatttgtc

SEQ ID NO: 17044 - DNA, 813 bp, Arabidopsis thaliana
ctagtataatatacaagttgttactatactttatgactacaaaagttcaaaaccaagaatgtactaaatacattccataagattaaacgttcctaaattgacaagttttggttttgtagaatagctaataatctttttgtttggtttagggatatcgcaacgtgatggataattgccgcgagaacatgatggtactaagacaaggattagagaaaacgggacgttttaacatcgtctccaaagaaaacggtgttccgttagtggcgttttctctcaaagatagtagccgccacaacgagttcgaggtggccgaaatgcttcgtcgcttcggctggatcgttccggcctacacgatgcctgcggatgcgcaacatgtcacggtccttcgagttgttatccgagaagatttctctcgaaccttagctgagagattggtagccgatttcgagaaggttctacacgagctcgatacgcttcccgcgagggttcacgccaagatggctagtggaaaagttaacggtgttaagaagacgccagaggagacgcaaagagaagtcacggcctactggaagaagtttgtggacactaagactgacaagaacggcgttccgttagtagcaagtattaccaatcaatgatgggccaaatgtatattcaaattattgggtgcagacaaatttttttttagctaaaggcccaactacaccatagcaaatcagcaccattcgatctcagaccattcaaacactgtaataaaaacatttttagttttagttttatttttttgcaaaacacgtataacaggtaaattat

SEQ ID NO: 17045 - DNA, 518 bp, Arabidopsis thaliana columbia
taagctgatttgtcaaacttactattctgatatttagaactctaagttccaaattagttttcgagaccactcgtaaaagcaaaaaaaaaaacaaatttggagtacaagaaaatgtgcaaattgtagaacccaaatgtcttactttattgacatcgagatatatttggtcggacttgcaatcaagaccaacacatagcataagtgtaacaacccgccccaatctgcagatcaattggtaacagcttgtcctctgggaaggttgttaaagggtgaggtcttgggttcgagaaacgccaagcgcaccaataacctacatgtgggctttggtggcccaaggagagaggttagggtcgatgcgctgcagagccagcaggatgccacgtggcagagagtggccacgtgtgcggattgttacaaagattgtataattgtagtttgattgttaattgtaggattcatccataatataccatattttattaatctcgactcacatccgtcaattctaacactgcaac

SEQ ID NO: 17046 - DNA, 729 bp, Arabidopsis thaliana columbia
aatcatttttaccatggttttcataattttagtaatacgtttaaaactgcatcttgccatttgtttaacttaaaaaatttggagtaaaatttggcatattctacttcgtaaaaaaatcaattttatgtatagaaaaacaatattcaatggacaacaaattttgtttatgctttaggcatcatcaagttatgggtcggtcctgccagtacaattaagttccattaattttctatatatattgacatatatttagaccatttacttaaaatcatcaatctatggctttccatagttttaatttaaatttacaacctcaaaatcatgaaagagaatttttgatttatttgaataacaatccaccaagagaagaagaagatgatcctcatatgaacttcgataaatttttcatttttttctttcacaaaacaccatttatattaagttatcgggaagagactatccgctagagagagccattcaggaaccgatgtgcttatatgggaaaaaggctattgcgagcccgagcttttttagctaaacaatcagctcgagtattagaagtacgaggaagaaatctaatacggaaagaagggaaaaaacaaactaaggatcgataggatgcaaattccgctgcgaaagtcggccaatcgtctagattgtaaaagatagaaatcaggtctgaacagtcggtagcgatagtgccagaagtatcgccaacagagatcatgc

SEQ ID NO: 17047 - DNA, 903 bp, Arabidopsis thaliana columbia
gtatgtgtttgtcttccttttacctcttcgaacggttagtattcatagatcttgactccttgtttatacctgatattgagacccatgtgataaagaaaaagtgttcctctccccttataaaaagaaaaagaaatgagagattgataggattttcagatactgtatagaggtaggaatgtttcctatgaccccattattatacattatttggaatgatcaattacaaagtttagaaaaataccgagggtgtcgatccagtatgcgagttcccttttgtttactctctaaaaagaataagtctcggagagagaaagaacaccaaagaaaaaaaaataataataaaagaatggtcgatttatcatggtatagtacatggatgagtctagaaggatcttgaatgttagattgtttgattagacccagcgatgaaagcctggtggatatagttgtggaacttaggtatggaatgtagaatgttgtgcaaacttgcagagaagtacaggttggttaggatttgattaaacttgctaggcatatggatttggttagaatgatcatggcaatggactagagaatgttggaggtttctttgtgttttcaaacctcttccacgggttcggcttttgtgttttgcttgagggcaagcaaaagctaagtccagaggagttgatataaacctatttttatctgttttacctatgatttaggtataagttttagagtccttttgttatttgtagagtcttttctaatcttttttaggtctttacatgtttgggatgcatttggagattatggtgcattctggtgcaaaacagacaacttaagctgcaaaagcaatccatagacaaaaattgacgtaggtgtcgatcgacacaacccctcctgacgacaattcaattg

SEQ ID NO: 17048 - DNA, 590 bp, Arabidopsis thaliana columbia
taaagtcagtgttgcttaatatctttttgtagggatctgcaaagagtcttcctgtttcttgtacctcaaaaatgaaaccagaactcgtacgtgcttaactaaacataccaacatcgttgatcttgacacttttttccatctatatatggaccgatatcaaagacttctccgatcgttttttgcagtgtttcttcccgcaatacgtcgttccttccatgcgaacaccgctctttgtcatcaatgccgcttttgattcttggcaggtcatatactaaccatgatatacttatatacataaacattcatttcattataaaatatacacaaatcggatacatataaactgaatttggtgattttttcagatcaagaacgttttggctccaactgctgttgataagggaaaagagtggaagaattgtaagcttgatcttaagaaatgtagtgccgctcagctcaaaaccgtccaaggtaattccataattgttccggtttatattggtttggttttgaatacgatcagttcggtttatcgagatttaaatttaaacagggttggttaaacatttcagggtttagagatcagatga

SEQ ID NO: 17049 - DNA, 461 bp, Arabidopsis thaliana columbia
  unsure (1)..(461): unsure at all n locations
ccctcgaaaaatcttcttgacatggaatgtgatggaacccaatcgtgtaccacaccacaatgtccttattctctatatctctatctctgcatcacaccagatagagacactacatcaatcgtaacaatattaactatgctataactaataaaaaaggttattctttgcaactaatcacctgtcggaccaaaccgcaagagtatcatctccatggctttggtcactgaataatgcactagtcccnatgcacggacttattgtagggagtaacccccatttggctattagtcaccgcacctctcttctgcggtggatcatcatggtcaagtagactagcttctgtggctctagggacaacctagcgacccgtcgggttaccaactcgagttgttttccaggattaatgacgtggtattctgatggctcgtacaagctaagcttgatctgaccgtctttttcgg

SEQ ID NO: 17050 - DNA, 454 bp, Arabidopsis thaliana
aaatttgtcaccctggaagataaccgctgattggtgttaccagagctatcctgttcgctggagcaaatctttgatttccgccatgaaatgcgttatcagttctggcacgattttctcggcaaccgccgaccattccggcggtgctctacggcgtgaatgaaacgcgtccggagtcagtgatagaagactgactgagccaatagtgtagtgctataccgaccgctgttagcccaggatcaggcatatggctatgtactgacgggggcatccgtgtgatgctgcagaggcggtgaatatgtgatgtttacctatgaaggtctgggaaccggcgtgcaggagtttatcctggcggtatacggagacgtgcatgccaatgctcaacctgacgcgccgtaaaggtcaggatattgagcgatactagcccggcagaagaatgccaagcgggagatcgccc

SEQ ID NO: 17051 - DNA, 773 bp, Arabidopsis thaliana
ttttgcatcacttgtcaattatctagctgaacctaaacattgactctagtaactttttatttatgcatcatgccttaggctaaagattcatcagccgttaaaatcatcataattgattggaatatggcttgttctgtggttggtgagggtcggttgtgttcaacagaccgactagaacttgtgaacaatatgcctcttggtccttctgcgggaattgttaaggttgagaaattgtttaacaaagacgcatatttgtggagagcaagtccagaaaagtttgtgatgggagatgtactaaatgagaacattgcatggtcacttcatagtatacaatatgtgaattcatctcctccacagtatgaaacagcatcagcagaaaaaagaccattaccaccatcagcagataaaagaccagcatcagtaaatttctgcactttaacttacagcctataaaatcacttaagtattatttctgcttgaatgcttggtattatttctgcctgaatgcttggtattgttttttaatcttgtagagcttaagccacagtactactagcactagcaaatctgccaagaagaaatgcatcatgttagattacaagaacggaagagaaagagttgcagaaggaagagtatgtgcctctaacccttcagacacagtccaccatatgcccctaggtccaaatgcgagcaaggtatgtgtagaagtttcaaagattggagatgctgctgtgtggagaccaaactctgaaattcaaaccattgccgatgca

SEQ ID NO: 17052 - DNA, 576 bp, Arabidopsis thaliana
  unsure (1)..(576): unsure at all n locations
ctnnnnnnnnnnnnnnnnnnnnnnnctaaagctttgattctcgcctgcgtgaattaaacatgggtgtgctggaaaaaagacatatcgattctctgaccgaagaagaagagaactggcgtcggcagctggtcaatggcaccgttgacgggcgtattcctgaaggcgagtcaatgcaggagctcagcgatcgcgtcaatgcggcactggaatcttgccgggacttaccgcagggaagccgaccgctgctggtgagtcatggtattgcactgggatgcctggtgagtacgattctcggattaccagcatgggcagagcgccgcttacgtctgcgtaactgttctatttcgcgcgtggattatcaggaaagcctgtggctggcgtctggctgggtcgttgaaaccgcaggggacatctcgcatctggacgcccctgcattagatgagctgcagcgttaacgacggatcggaatcagcagttcacagcgtagattaattgggcgatctccgctttggcatcttctgccgggtagtacgctcaatatcctgactttacggcgcgtcaggttgagcattggca

SEQ ID NO: 17053 - DNA, 504 bp, Arabidopsis thaliana columbia
atcaaaatttattaacaaaatcaattttaatcccaaatggacaaatacttatctatgaaagctctataatgcgcgcacccatagacgctactaacgtgcgcattaaaacccggccgaaagaagaagacgatcactctcacaagcaaaaaaaattcactttttgtttttgttaacactcacgtgaaagcttcgttcttcttcaaaccttttgaacaatttctccgatgccggtaaatcaccggtttacgtttagctaccggttactcttcctcatcttccttttgagtttcgaaacggcacagcgtttggtcaccggtgacccaaacgacgaagcatgcttgacgaatctccgtcagagtttagaagatccagctaataatctccgtaactggacaaaatccttcttcataaatccttgctccggcttctcttcttatcttcatggagtcatttgcaacaatggcagaatttacaaactctccttaacaaatctctctctccgtg

SEQ ID NO: 17054 - DNA, 777 bp, Arabidopsis thaliana
aagttgtttgcttctaacatagtggttcatttttctgaatggtttttcgatttatctttcattttttggacttaagtttgatgagccatgtttcatgtaggttcagatgttttaccgcaaggaaatgcagtttcaaaagatacctctagagggaatgcagactcaaaagacacctctagacaagggaatgcagattcaaaagaagtctcacggtcaacattttctgcggttttcagtaaaccataagtatggagcatcgtttttttctttttgttcaacgtatggagcctctatattttgcaattttaaaactgtattggatgggtacttcttcatgatacgattttgtaatctgtgttcaacagacggattctcagtcaaagaaagcctttggtaaagaactagaagatctgggatgtgaaaggaggaaacacaaggctggtagaaagcctgtaacaaggctgagcaacgggtggcggttgttgccagatgtagggaaagctgagcacagtgcaaagcagtttgattctggacgtaacgaatcaaaagggaataagaaatccaaggaaccttatggaaagaaaaggcccatggaatcttcgacttattctctgattgatgatgatgatgatgatgatgatgatgatgaccacgacaccagtggccatgaaactcctaagattcgttgccaagctgtttctgctactagtttgttgttttctctaagggttctcaagtttaccactgctggttactgcaattttgttgtgacatgac

SEQ ID NO: 17055 - DNA, 449 bp, Arabidopsis thaliana columbia
caatctcgttaccaagataccaatgtcaaaaatagaatagttgttattgacattcaaaatgacattgcacaatgtttcaagatgtgctacaacagaacttgcaagatttttggatatttggatacttggtgtgaattcatggctggattgatgatatgttcctaggatatatatattgacttatttgttttctagattgccaaataatgatcatctggaacgatttacgagttagtaaacttcgtacatgtgaaatattctccttatcgatcatgtcgttaacatcctaacgtcccatccaaataatgggcttagaattgggcttagcagaaacatgggctaaaatccttgtgcgtggatctgaaagaaaggcatccaattaatgtgcctaaatccatacactgtaatgcagccaattatttcgcaagtaattaattacctatgtaaat

SEQ ID NO: 17056 - DNA, 543 bp, Arabidopsis thaliana columbia
ctaaaaacagacagggttcaagtcaccaaactgatatcatccggagtcttggaagtggcagcatcggatctagatgcatgtataaaatctgcagcacatcatcatggagttttgtccgctttgatgacagtaaaattcgctccagtatctggcaagacaaatatagttcgttgagtaaaaggaggtataagttagaatactgtcaacaggaatggtaagaaacacaccgggaaaatgaacgtgaatgtatctacaggaagtggtcctgatttacaagatatcgataacccatttacaatcctctcaaaaagaccctcatatgttttcccagccttgtcaactgatggacgaaaatcaaatgaagtatcaacttcatcaatcgcgatcaaacgcagagcagttgaaatttctagagcccagttacacagtggctgaactgtacaacgtgcaagcttcaccaagttttcaaaggctgcagcacttacaataggtgatcgcagcaatggaatcaaaaaagtagcctgagtaagtgataaggtgagt

SEQ ID NO: 17057 - DNA, 414 bp, Arabidopsis thaliana columbia
ccgcgtcctcttggtagcttgagaagctcgtttgattccattttgtctctaatggctgccctcgcttctccctccctcatcccctcttctctctgcttcgctgccgccgccgatggtccccgttccctctcttctaatttctctgccttttccgacggcggttccaatttcaggtatcacaagagcttcttgtcgctttcatcttcgtcttcttcgtctacgccttatcgaaatcgacggggccgttccctcgtcgtatttgctacttccggagactactacgccactctcggtgtctctaaatctgccaataacaaggagattaaagctgcttatcgacggctcgctcgtcaggtttacagctcctcctcatcctttctatttctttgtaattcagtttttctgctttgtgaa

SEQ ID NO: 17058 - DNA, 406 bp, Arabidopsis thaliana columbia
gttggtgttatttacaaatctgtatttcttaatcattcataaccttatatgcctgaaacattgtccctacaggatgccatgtctgttgcaagaaacattatcaaaaacccaaagctagttcctggtggaggagccacagagctaaccgtttctgccacattaaaacagaagagtgcaacaattgaaggcatagaaaaggtcggttttgcttttattacattttgtttccttgcctaaagttgtgtgattttgtgtcaaatctatatcgagcctctaaaacgagtatgctgttcccacggtcgctgataaatgttcttttgttggtctgaatcttatttaaacagtggccttatgaagcagctgccattgctttcgaggctattccacgtaccctggctcaaaactg

SEQ ID NO: 17059 - DNA, 289 bp, Arabidopsis thaliana columbia
taaagtggcgacggccagcgcgttggtttcatgcccggcgttgacggtgcgcttgaagtcgctggcggagatattgtttttggcgaagacgtagtagccggggacgaggaagccagaggtggagttaggatcgccattgccaaaggtgagatctttccgcttcgccagcagatcgttcaggttgttgatcggactgtctttgttgacgatcaacacgctccagtaacccggcgatccatccgccgcgaccgtctgggcgaagactggccattggcgcgatccaccgctt

SEQ ID NO: 17060 - DNA, 281 bp, Arabidopsis thaliana columbia
attcttgaatgtaaaagcacgaggaaggtgcaattgaggagcgggctcgggattacaatgcaaattggatgtcagcggttgagatactcgatgatgatatttacctcggtgctgagaacaatttcaatctgttaacagtgaaaaagaacagtgaaggtgctactgatgaagaacgaggacggttagaggtagttggagagtatcaccttggggaatttgtgaacagattccgccatggatctctagtaatgaggctacctgattcagagattggtcagatc

SEQ ID NO: 17061 - DNA, 565 bp, Arabidopsis thaliana columbia
ctggttcttcatctcgtcctgaacctgacttcaaacctgacttcaagcaaagacagtggaatcagaatccgccaatggtggcgaatcctaggaaaggaaccgaacaaatatctattgcgaagaagcttgattcagtgaagccgccacaacctacattgcctcctcaattagtcgagccgtcacgcgttcaatctccttctcctcctccccctcctccggtgatacagcctgaacttccgcagcctcaaccaccacctccacagcttgaaattgaagtagaagcacctcctgatgtgagtgaagtgtcaaaaggaaggaaggggaagttgccgaagcctaaggctaaggatccaaataagaggttgatgacgatggaagagaagtcaaagcttggtatgaatctacaagacttgcctcctgagaagcttggtcagttgcttcagattctcaggaagagaaacggacatttagctcaagatggggacgaaattgagctggatatagaagctgtcgacaatgagactctatgggagcttgatcgttttgtgacgaactacaagaagat

SEQ ID NO: 17062 - DNA, 603 bp, Arabidopsis thaliana columbia
taccagatcgcgctttcccagatcactactcgttccctaaggcatctcgtcgggattatagtgaggaactacgagacgtggaatgagatcacgctcacacacttgagaaactatttggagatttgccgagttcccaagtccgtggtggatagatactacatttccccggcaaaggatcagaaaatcatctaggggtttcctagcaaggacgagaaggtggctctcgacgatgtcagcgttccttaagatttaatcgggaagattttgacgagatggggcattcttggtagttagacattggcgtctaacttgtttaagtgtttctttttgcagctccttccattcgatttctcgagccgtgttccgacgacatcgtttctattcacggagagctatctgctcggcggtgcaattggctggatcacttttccagggttagagtcgaacgagccctaaagttaagctgcgttgtatcttgcacttctagttcggagtcttcggatcatcaattttctcacttcgtcgagatgcagtcaccaaagttactctaagggaggtttcgcgaagaagaaagaagataaggagaggcatttggcagaggag

SEQ ID NO: 17063 - DNA, 462 bp, Arabidopsis thaliana columbia
aaaaccctaacgaatctcatcatctcatcaacaacaacaacaacatccttattattactctcttcgtcgaatccatacatcaccggcaacggtgcatcgccgcaacacttctccttcacaaactccttaaccctccgatcaaattcaccactgtttctcagagaattcaacgccacttaatcctccgaagtgtttctcgttgaagaaaatctgaggaacttgagaactccctgttctttcaaccagctctttctctcttgacgaatacacgtcgatgttgatctccgagaaatcaaatcctcgttcccggagaaacaatctgacggcggttgaatctcggcagttagatctggagaagaaagttatacgacctttgatttcttcctcgtttttcatcttcacgagaactttcactccagagattttgaactcggtcacgtcatcgatcgagtcgtcgtcatc

SEQ ID NO: 17064 - DNA, 298 bp, Arabidopsis thaliana columbia
taatctaggatcattattaccgtacattcctggataaacctataaatcaaggcaaacaaattaaggttgtgttaattatgatgtcctgcaagatatccttatatttaggacggaagatcaaacctgccaaccagcttcaatagtattacgactagtgccatctccagatacgattccaagtctgtgacaagctgaactcgctgggagttgctacatctggtttccagacatttatcgaggcttttgtcccgtaaaactttccgtttctcacacccatgaacgcgttctgaaccagggg

SEQ ID NO: 17065 - DNA, 797 bp, Arabidopsis thaliana
tgcaattcttggatcccgcttttggaaagttgacagacacagaagtagagagtacgggagcaaagccttcagcaatgagcgtgtttgcatatgcaacagcgggaaaacatataataatatttggaggtgagatctggcgagacccaaaggcacattaaggtccagccgtccagggacgttgtctaccgaagtgactgcgttgaacactgagacaagtctgggagaagtttggaggaggaaatgaaccggagatgccacgtggttggaccacctacacccagtgccggctcataccatttatgtgccttatagcaaaaaatttaaacatatatattttgtgtctcttttgcatgtataattttttttttgtacctctttggtatatacaaaaaaaaatattgtgctcattttttttttttaaagaaaatttcccggatatagggcggtcgcattgtccgcctttttacttaacccggcactgcctacaccactgccaccatctatggaaaaagaggtatcttcgtacatggcggaaagcttccgaccaacggccgtgctgatgatatctacttctatacatgcagtcaattcagcttaatgcatatgttaaggtttatgttgtttttgtggttagtcgtgttaattattagtttattactaataaagagccaattttatataacctgttttaaatttgttgtcattgtaaaaattaccataagtacatgccagtatgagtcttttaagtacgtgtttaagacaatacagtgaaattcctacaaaattgtcatttgatt

SEQ ID NO: 17066 - DNA, 813 bp, Arabidopsis thaliana
tattgtacggagggtaaacttctttatctcctcgaggactcctcacacaaatctcaaggatatccgactccaatggatgatggttgcgtgtgtagagctgaagaaacaatccacccatataatcatatcccgcacatatgaatatgatggcgcaggcgatggttgcatctgctcgcacgggtgcatgagtgcatgacgctgcatgagcttaaatgctccattgatgtcactttcatggattagaacacgtattgcttcgttatacacaaccgtcggattgttagcgagaaggcaccttttgaaaaatggtcgattgcggccttctccttggggtccgattggattatggccacctcctacttggaagtgatcgggaacaccacacaagcacaagcttatggatatccggacggtagacaatgtctcttccgcgagtgcctgatcgtagcagtggcttaaggtccaaccagcatttgtctaccactttcttagatatcttagcgagtaagtcgtcggaaatagtcgggttgaccatgttagaaatgagatagtccgaagaggtcaaattcttcctcccattaataaccacggatgtagatattgttggagaaattacagttacattcaatgagcaatttaattttacattgatggttgtcaaatcaatgttaccgttactgcagtcgtgcactgtgtacaggtggactcatagtctgtacgtacattgctaagatattacgttgtgtacgttgttaattcctattaaaaatgttgcttatcaccaaaagtaataaattgttttgaaacaaacaa

SEQ ID NO: 17067 - DNA, 569 bp, Arabidopsis thaliana columbia
gaccctgtaggtttgtataatattagtaataagttataactcatagattataagcggtctctagcaaaacattataaccacctaatattatacaaatatcaaacctcgacattacaactttaactagagtaaagtacaactgatttcaggacattcccaacaatcttccacgtgtactggaatcatctattcccataatccatttgtctctatatctcgatctcagcataaggcaagaaattgtcatccttattcagctagaccatgtttatcgaactccgatttatactgataaaacaaacgactgacattcacctcgtttgagcgcggccacgcatttctcagtatcaaatcttcgataggcccaaagatatttatctcccgttatatgggagggacaaatcccatcttgttccatccatgttccttaaacaattcataacgtgcccaatcactgtctttataatcccttttacggctaacgtttgacagaatcaaagcgaactaatccatgaataagaaatcatgacgaactcaggtcaaaggactatactctatagttgtgatga

SEQ ID NO: 17068 - DNA, 762 bp, Arabidopsis thaliana
tcaacaagttaaagccaaaacgctccctgcaaccaatacctaggtacatagccacaaatttttggaattagtggttcagacatttcatcgaacaccttttgggcgcggaaatatcttggctcaatttccagttgatcagaaagcaataggcattaagaacaactaatccataacgatctataaatcaaagtcaaccacctagcatactgagaattctaaactactctaacctatcctcagaaacctactcactactcagacatcattgtagagaacataaacgatgaatagaatgaaaacataatagcaacatactaatagcaagatgacaacaggatgaacaacttagtaaacgaaaatggaaagcaaatactgaatactgaatagattaagagaaatctggattacaaaaatgtcaagaacacagtgtcagcgggattaaaacttttcttcgaaagtgtgaaatacatgctacttatagggaaatataccgaaaccctaatactcaaaacgacgcagtattgtgacggattaagaacgatactcgacccaggttgccgagtgaatggtcgagtgataaagcttggagtcttcttttcttccttgcgctcgagtgtctggttgagtgcggaatagagaagactctgaagctgccagtcgagtatgaagtcgagtgatggagatggtagtactcggcttggtggtagagtgatctgtcgagtgtgtgatgatggtgggactcggtcgtgggtaacgacgtat

SEQ ID NO: 17069 - DNA, 790 bp, Arabidopsis thaliana
atattcaatttacagtgtacgtacacgaaattatttattgaaacgtatatggtacgatttctaataactcaagctattttattacgtattcttatatctcaataatctccatacatacataataattaattaaaaatagatggtgaagtaatgtttgttcctcatattgaaaagttatgtacgtatatgtgtaataatgtacgtacatttttgttggtaaattaatgtatgtacatgtgtaataatatacatatatctttgtttgtgaattaaattattaagaaatatttattgatacaatattaaaccaatattggcagtggctgaaatatattctaagacgttcataggatgtaattttgaaacattctgaattcttgacgacttgagcagtcaaatgtcatggacaagtatcatcaacgcataccatctccaatcttgtaggacatgacctaggttgcttgtagcaaaaaaattgtttgattgtgagataagacattgtttgttgtatgacttttctgttgttaaaaacacttcccaatctatagtatatgtacattggtacaaaccatgttgacacatacttcttggagttacagctggtgtacggtcacccgagtgagaaatattatctccgtcaggtacacgctgacttgtgtacgtacattctgccaatagacgactgaatttccatggatgttgaacagtcaattgtgtgagaatgacgttctcctcaacattccctattccatattcttctacaactacatcgttccacttgttgtaatca

SEQ ID NO: 17070 - DNA, 705 bp, Arabidopsis thaliana
gatcaatcttttttcacgacgggtttcttacctaaaggagtcaactctacaatcttagctctaatccccaaaaagaaagaagcaaaggtaatgaaagactacagaccaatctcttgcttggaatgttctttataaggtcatttcaaagatccttgccaaccgactcaagattattctcccaaaattcacctcgccaaaccaatcagccttcgttaaagatagactgctaatggagaatctgctgcttgcaacagagattattaaagactaccacaaggatacagtctcccctcgatgtgcaatgaagatcgacatatcgaaagcttttgattcggtgcaatggggtttcttgctaaacactcttcgtgcactgaacctcccggagaaattcattctgtggatacagacctacatctcatcagcctctttctcagtgcaggttaatggtgaacttgcaggttattttggcagcaaacgaggtctccgccaaggctgttcgctcagtccttacctcttcgtcatttgcatgaatgttctttctcacaagatagacaaggcagcaagtgacaatcgcattgattccacccaaactgtaaacaactgaaactcactcacctatgttttgctgatgatctgatggtctttgtcaaaggaaacataaaaggtgctcttgaagtctttgatgaatttgctacacacacgggg

SEQ ID NO: 17071 - DNA, 453 bp, Arabidopsis thaliana
tgataaaaaggataaaagccttcccaggcacccaagtacttaaacgaacaaaggataaaagccttcccaggcacccaagtacttaaacgaacaaaagataaaagccttcccaagcaccaagttcaaaaagcaataaacgaaaggataaaagccttcccaggcattaagtctgaaacaaaacgcaaaatcctaaaacaagcaaggcgcgaaagtgatcactccctcgattctccggctggcatagcaaagacagtaccagaaccatccgcgagacctcccggaaacgcgtctttattgctcccgaactcatccaagccaattggcgtcccttgctcgtcgacgtcaattggacgtaccaccgaaatctctgaaacatgcgggagatccaacttgcttagagtaaagtctgatacctccttcgatttgcaccgagcctctaggtcatccagctct

SEQ ID NO: 17072 - DNA, 676 bp, Arabidopsis thaliana
gaacccataatatcatatccttacgtagaatgttatatatagtacccttgtagacacttctcttcatcaaactgatcaaacacataaaagtcaaagtcacttctcatcttcacccaaagatatcacaatctctttaacggttctctagtaccccattttcatccctaatctcgcatcttgtaatcaaaacataacctatttcatcctcctcaagtcacttttcaaacacactttcaaattaacaaaaatggagaagctacagaagatgacctcggagaagtcgttagtgatatttagcaaaaactcatgctgcatgtcgcacacaatcaagactctcttcttagaccttggcgtaaatccgacgatttatgagctagatgagatcaacagaggaaaagagatagagcaagcattggctcagcttggctgcagcccgaccgtgccagtggtgttcataggagggcagcttgtcggtggagccaatcaagtcatgagtctccatctcaaccgttctctcattccaatgcttaaacgcgttggggcgttatggctttgacaaaatataaagaaatagttacttattgattgtagattggtaataataatgtattgaaaccaatcatatacatatgaatgttttgtgtctatctaagttttgaaaggatagattatgagg

SEQ ID NO: 17073 - DNA, 1363 bp, Arabidopsis thaliana
tcatagctaagacccgggaatttgtagtcaagaacacatagaaagggagacttatatctttagcaacgtcaatcatagggagacagaaaaagtcaacaactaatcccttgaccttaactccatccaatgcaagagaagttaaaatatccatgactatattcctcacaagagggatatttctctcaataacatcatacacataagcttccacagattgtgtactaccaagtgtaggtttctcctctaactcagggacatcaatgaatctaacaaacggttgagaggaggcaattgatttaacataagtgtctagatgagactgaccttgtagtttcatcaagaggattgtgatacggatcctatcatcttgctcaatgagacgcctagcaaattcaagaaacggaacaagatgaccaacggttggtgtggggatgaagatgagctctacattccgcatctctaacaacaagagatagcttttgattttctcttcctcaatctacattcaaagaagagaattagctaccttaatgttgacttttgtcacatgtgatgattactgatgtgttgcttctacctaatgttgaggtggcccttagcaagcacgagagggaagataatggccggcagataaagatggtagagtgggatccacaaccaaagaaagcttctaattatttattagagagttatttgaacatgttatcagagaatctccattttatacaagattttcagttaacatgtttttggctgagtcactttatatatttcaatccattagacatttctatctttaatttttaatctattagacatctcctgatgattgaaactgaatattaccaaggactcaaattgtgacttagataatcagcaagttttatataaaaatgtcaaatgcaactatggaatgaaggagatccatttgaattatcataactcaattacattaattatttaaatagtgatagagtcttactcgaagactcttaactctgagtgaactaaaaagccgacacaccaatccagtgaggctcaacaccaacacacaatgaagtaagatcttaacgaaagttgctgcaagctgaaattcactagagatcatggagatgggccaaaccaccacatgaatcccacatctttcctacttttatattcaatcaactaactttaaaatccatgattgattaacactccttcatgaattgaaattgaattctctagattttacaattcgatattattgtgtggatttcaaaatctatacaattaccttgggtttttattctaataatttacttatgaaactttatgagatttcatttcaaatgacttcatatacacatatttcaaggaaaca

SEQ ID NO: 17074 - DNA, 910 bp, Arabidopsis thaliana
atctgctgttagtcacagtataatatggagtagaccactcactgcaaaacgagtagagatcgatggagctactgcttattctgttgatggtttgtttctattgttaatcatatggtgttgaatgatatgatattgtttggcttgtttgttacatttgttggctcttgtcttttatcctttggataacatatggttttgtatgctctgaaggaactcctgcggattgcactggtttgggcttatcggaagcactctttccttctcgtcctgacctggtaaaccatattatttgtgtgtccctgtaaaagccttctgatgtaatgttagttttaaatgatgtgccaatagatctttcgatttgtttttaataacttaaacttctgcttaattttataggaaacatctaagatttgttggtctttgtagtgttttttttttccttctattgtcttttctggagattgtgaatttgtgatgtatgattgttttctccatgcaggttctgagtggtataaacgtgggtagcaactgcggttataacatgtcggtgaacatttcctcctctgtttctctttgttttggtttcctatttccttactatgttatgtttttgtacagattattagggtgcaactgttatttgtccgttttaaaaattgcattttaaactttataaaactaccaaaattgctgaaactttgtttaggattagaacaagattttgagagtatagtaagagaaactctagttagattgtttcactggaaaccagatttcttctatggccaattcaaattgttatagaccatgttatgcttctatggttcctgcctgagtttatcaaactagcacttacctggctgttaattccatcccagcgtctattctggaactgttgctggcgctcgtg

SEQ ID NO: 17075 - DNA, 906 bp, Arabidopsis thaliana columbia
cctactcgacccattcactcgatctaggcagtcatagaggaggcaacaattcactcgacccacttactcgatcaaggcagcctcataagaagcagcagatcgatctaatcgccccttgtaatcgatcctctactcgacccatttactcgaccaagggtgaccaactctaccagacttgttgatctatcaaagcgtcttcggatcctcctcattttccactcaaccagacatctgagcatacagataggagaggaagaagcatctactcgaccaattgatcactcggagcatagacacaaaggcgcagactttgcagcgccgtctttactcgatctccatgatcaagcactcgcccaaaccgcctcaagtctcttgtattctagtgaatctagggttttcaacattttactatcaatagatcactttgggatttgtccaaaggatctagcttttatcctttagtttttctttttgtttatgaatcttcaaaacttaattactcttaatctatttcatttttgcatttagttgtttaagtaaagttgtttagcttgtttagatctacattttgatatgatttcagtaatttatgggttcgtgtttttgagaatgttgcttgagtagtgattagggttcttaatgatggattagattagggtaatctctaggttagccaggtggttaagattaggttaaaacccttctggattcgcttggcccctatgcggttttcgctagctaatgtggagattcgatcatatatgtccagcgtccaaaagaggttcaaatggatgtatgatctacgaattccagagttttgtagactcgaccaagacattatcttgtctgcttattggctttggtagattgtttcttaaaccttgtccgctatgttttatcaacgac

SEQ ID NO: 17076 - DNA, 1298 bp, Arabidopsis thaliana
aattgaaaccctagggatggagtttgagagtaaagtcgaagatttcttccattggagcatagagacagacctcgcgccatttacgaacgagcgaactcgcgagttgtgtcacttcgagtttagtcttattttactttgaaattttggtttttgtaatttgtaatttcactttcaccactgccaataacacaattacattcgatttttttggtctttctatggtcaaattataagaagtagaggttgtgtattgtgaagtgcttgtttctactttgtagatgtataatgaacagtttgttggaacttaaccaaactaggccaaaagctcaaaagacataacaaacaaattcttcagaagaaaaatagaaaaaagaatgaaagaataatattcaaaccagaatcaatcaacatcacaacatctaaagaagaaaccaaagcaaaacaattttaaacgtatcatatatcgtagtaaatcaattagagagtaaggcaatttcctcaaatctttacagttaataagaaaaagaatccaaaaaaaacctgcaatttctccactcttatggtttaaagagagggtccactataaccttgaccggttttcttaatctttcccatctccatttctcgtgtggcttgaccttcactgcttgaaccagacgggtacagtccgtagtcactggttggattactgtactcgccggttgtgccgtattcttgagttccaagagccattttcctaaactttatcatgtcgtcgttgtattggctcgtgtcatagtctgtgcttcctccatatgagctgtatacgttgctgtgacccggtctcatcccttcgttaagatcagacagcgatacatttccttctaacgcccgtactatctgctcattttgtacagcaaatcactcactccattagcattaacatatgttaaaatgacaatccttggcaaaatgaaaacaaaagaaactgcagccaattcttttgacatattcaatcggtgttgtttagatagtatgatgatgggtaacaaaaagtagggctaggcataagaacataactgaaccgatctttctcacaaaaaccatatcaaaacctttctttaaaaccatacggaaacatattattctaccaaataaacagaaccaaaccaatatgctcttctctagagaaaaggattaagttacctggctcatgcgaggtctgcggcgagctgaatggcgaacacaagccgcagcgcaacgaacctatgcgagccatctcctctctgtcatactcattacccatctttgaatcagca

SEQ ID NO: 17077 - DNA, 591 bp, Arabidopsis thaliana columbia
aaaccgctatttcacattttctaatcgttattcaaataataagtttgtgtgagtctaaaagttagatagcaaaagttgcaaaactattgaatttatttttccatgtttttttcggaaatactgtaatgtgatgagtataattggatctgttagtttgttggttttaattagaggttactactatagaacattttatagttttaatgtttctataaccaaccaaaaatccattagatcaaagtatccgaattcaaatatcgtgtcaaaaaaaacacgatcatgcaatatacatttaagtgtcataaattaaccgttacgtattacattgtgacctatatgatagttacatttatttattatacttatataagcatagtccgtccctatctcatatgtataaataagacccaacccatccatcattgttttgcctcctaaaatcttacaacacaaaaaaaaaaaaaacatttagttaaatccaatgagagactcttcaacaactgcatccaccaaatcctcaccgttatggaaaccctttgcctcaaactgttgttccgttgatgaccaaaccgtctttggcaatctcagccg

SEQ ID NO: 17078 - DNA, 297 bp, Arabidopsis thaliana columbia
tataatttatatgcagcaatgatgagcaggcactgactgagaaaatcttgagtaaattaggtcttgggaattatcaggtatggtgggctgagaaaccaaatgattttcgctattgcatggctcttgttagatactctaattgatttgctaatacttggaatatctttcacagctaggaaggacaaaagtgttcctaagagctggtcaaattggcattttggactctaggcgggctgaagtccttgatgcttctgcaagacttattcagcgaagactgagaacatttgtaacgatcag

SEQ ID NO: 17079 - DNA, 762 bp, Arabidopsis thaliana
ctaaagcttttcgcgccttcatcaatccacggcagcgtgctgcgtagttcagcctgataatccttcgcctgctcgcgctgggcggcattcagggaatattgcttaccgttatacatcacgttgccgtctggcgtgatcaccatattgccgttttcgcccttcacctgcacggtttgcgggctgacaatcacatcgtcacgcggcgtgacgctgcactggtagtcggcgtgacggtcattgccgtcactgaaagtgctgccgccagcagcattttgcgcatcatagtcttccctcaagaaaaaatcaggccagcatttgctgccacaggattgataacaaagtacgcgttttccatgccggatgcggcgtaaacaccttatcccgcctactcgatcgtgcatctttccaggcctgataagcgtacgctaatcaggcagttttgcatttgtcatcgcccgtatgctttcttagtcccaccaaacgtcgaaaagttcgctggtgcgtacctcatccagtttgcgctcttccagccacttacgcacaatcgcctgatgttcttcggtgcatttgccgatttcctgcatgcagatcagaccttcccaggccagataaccgctgccgtcaaaggccagtttgttcggttcgataacctcgttaataaaatcatcaacggttttatcaatctgttcttccgatgtaccttccgggaatcgccatgccaccgaaaatcctaattcctggaattcgtcgatgtgcattttt

SEQ ID NO: 17080 - DNA, 742 bp, Arabidopsis thaliana
gttgttccgttgatgaccaaaccgtctttggcaatctcagccgttgccgaccttcgagatcagaattctccaagaaccatctcggaccacttccttcttttcggcgactctcctttgctgatctaagccgttcttcttcggctaggatcaatgaagatcttgcacagactcttggagccgacttagtggattttcagatgtgtgaactcaagatgatcactcagagtttctccgggaactatcttctcggagaaggtgggttcggtaaagtgtataaaggttatgttgatgattatctccgacaaagtctcaaggctcagcctgttgctgtcaagctattggacattgaggggcttcaaggacatcgtgaatggcttgtaagaacgtttaccaataattgcatgctaattattgtgttatttttcttgttactgttcagtaattattatttagttatgacatacatttgattacgcatacgtatatggtttaagttataggacatcccaaatattattctaaaattacaaaccactcctcatggtttttatattttgaagattctttggactcatttatttttaattactttaggctaggaaactatattaaaaaatgtgtttggtcataatatggactaattaagtacgcatacgatacgagcttgttgtttctttttttggtgcacgtacattgtaagagaactttttcttgttagtctgatatatgtaagaagtgggta

SEQ ID NO: 17081 - DNA, 490 bp, Arabidopsis thaliana columbia
aaaagcaataacaattttgaacgaaaaagagagtgtagaatttcaaagactgaagatggaaacatgtgaagtattgcagtaccgttgcgagttcgacagatcaaacatgcaaggaatggacccaaacttgttcaccttgtctcagccaaaccttggtttttatggacagatttaagggaagctgtggtgactttggcaattcaatgggatcaaagattgaagttataggtctataaaatgtttcagtttatataatttatgttcatgccgagagtaaaaatgatagtaactgtgtgaggcttcctacttttcctttttagctgtgtttttcttaatcactttttatataaatatagaattatttatcctctttgtcaaacattcatatctgaattagtttccttaatcggtttgtcttattcaatatgtgaaaacactacaattacattgtctattatttcaattcagtaagaatagatccatagatatg

SEQ ID NO: 17082 - DNA, 525 bp, Arabidopsis thaliana columbia
cgcaagccaaagaattccgtgtaagctgtaatgcttatttggtagacaattccaggttccccagtagagttaggactttgcattttaatgtttcttcctgtccgacatttcatagataactcacatggagatgataaaagggattcaaggtcacggatactatgatgaacttgttgtcccaatcatagagaacacagcatatgagaatgaactaacagattcacttaccaaagctgtaagtctaattgttctgaggaagcttgaattgaatatatgcaacaaaataatggttttaattagttttgacatatttcactctcatttgcagatagaagcctatccaaaagcaacagcagtgttggtacgcaatcacggagtttacatttggggtgattcttggatccatgctaagacacaggtttgtgcaagttacttcaatatttggttgaaagttgagaaccaacaataagttctcgccattttcttatgttatgtcatatatttgtttgttctatttataacttt

SEQ ID NO: 17083 - DNA, 588 bp, Arabidopsis thaliana columbia
cttttgtgatgtaatcaatcagaatcgagataaaatttcgtcacaggacttgaagcattgatgaattctagtcaatttcagagaaccaaacacaagctactactccaaaaatccgaactttaacacaaatttcaaaaccctaattgaatataggcggaagaagaactgagagaagcttacgagcgacgataggttggagagagggaacggaaggtcaagttatacgattgatggcatcgaatcgacaatacgatgtcgttagatcatgggtgacacgctctcggttgtctctaaaccgggtttaatgtataaaccaaaaacattacattttcaagatttttctcatttatctaatgaacaagcaattttttttggttctgtaacatcttaatctcaaaatatacaacagatcacgtcttagcgagatgacattcttttgactatttctcttttgtgtcatcttcgtttacccaattgaaacgattttgcaaaaactgattagccacacgatcgtctctatagcaaagaactcgcaaaatcgtgtttggatcgacctgttccacgccagtcgttggaggattggaagtt

SEQ ID NO: 17084 - DNA, 1108 bp, Arabidopsis thaliana
  unsure (1)..(1108): unsure at all n locations
cggtggtgattccggtagaggtggttgtccggcgatggtggttatggtggtagttccggcggcggcggttatccggcgacggcgacgtgtggttgtccggcgatggtgacggtggttgtccggcgacagtggttgtccggcgacggtggttgtccggcgacggtggttgtccggcgacggtggttgtccggcgacggtggttgtccggcgacggtggttgtccggcgacggcggcggtggttgtccggcgatggtgacggtggttgtccggcggtggcggcggcggtttccagcaacggcggtggttgccggcgatggtcgttatggtggtgattccggcggcgtcggttttccggcggcgtcggttttccggcggcgtcggttttccggcgacggtggttgtggttgtccggcggcggaggtggttgtccggcggtggagttggttggccggcggcggtggttatccggcgacggtggttatccggcggccgtggttgtagtggtggttagtggtgttagtggtggggataaaattgtaataatatatattacatatgttatattgttaggttgtttttattggttagtttgttaatttataaatgcttttaagttatatctgcaaattatccaattaataatgtatttttgtttttataatttaattaaagttgtatattatttttggaaagatatctttttgttaatttcttttttataagatgaaaataacttggtaattcgatttgaatacgaaagtaacggtatattgaaattagtgacacccatacccgatccaaacctgatgggtggttatccgaatccgatccgagatctataaatatccgaacggatcctatacgtctacacccgaatatccaaaaacctaaaatatccgaaccgaattcgaatgggtatccgaacatccatgcctatttgttacttttgatattttattgacgtttagaagaaaaagaaatattagtagaactggaatttggtaatttgattaggagaaggaaatagtggtattcaattgtanaaatataaaatcttacatttttaaataaggaattctagtagactcgtaaattgactatatacac

SEQ ID NO: 17085 - DNA, 435 bp, Arabidopsis thaliana columbia
gcaacctccctttcacggccaatctgacattgcaatgagataatcataacgaatcagttccaagtatcacagaagtaagacttctaacttccaagatacaacacataccgcacatttcaccatccacaatttcggatcacggactgatggcaaaagcgcttgttgctcaacttctgtagcttcttcatcatattcttcatgatgcctagaggagaaccgctcttgaattcttctctcgagatcttccacatcctcatcattttcgtctcgaggaagaaactccgttcgtaccgtctatcaccacgctcatccggaaggtccgttccattatccacaatataatctgcatttcatattcaaatccttcaactagtgaacatttccagtgactaagctaccaattcttatcaatggtgacttctgagaaccaatctc

SEQ ID NO: 17086 - DNA, 914 bp, Arabidopsis thaliana
cttgggaggttgaaggattcgtctacggtttttcatgagattacttctccagatagtatggcgtggactgcaatgcttgctgcttatgccactcatgggtttggaagagatgcaatcaagcatttcgagctcatggttcactatggtattagtcccgcatcatgtaaccttcactcacttgttcaatgcttgtagtcattctggtcttgtagactaagggaagcattatctcgaaacaatgtcgacaagatacaagattgacccgaggttagatcactattcatgtatggttgatctactgggtcgatccgggcttctccaagatgcttatggattgatcaaagaaatgccaatggagcctagttctggtgtttggggagctttgcttggtgcttgtagggtttacaaagatacacaactcggaacaaaagccgcagagagattgttcgaattagagcctcgtgatggtagaaactatgtaatgctctcaaacatctattcagcttctggtctatggaaagatgcttcaagaataaggaatctgatgaaacagaaaggtcttgtaagagcttcagggtgtagctacattgaacatggtaacaaaattcataagtttgttgttggagattggtctcatcctgaatcagagaagatacaaaagaagctgaaagagattaggaagaagatgaagagtgaaatgggatataaatcaaaaacagagtttgtattacatgatgttggtgaagatgttaaagaggaaatgatcaatcaacatagtgagaagattgcgatggcgtttgggcttttggtggttagtccaatggagccaattatcataaggaagaatcttagaatttgtggggattgtcatgaaacagcaaaagcaatatctttgatcgagaaaaggagaatca

SEQ ID NO: 17087 - DNA, 894 bp, Arabidopsis thaliana
ccgggtgcattccccggaaatagcggtacgtccacgacactaaagccaccgttccgacaagaaatccggagaccgttaagaacccgccaacgacgacaaaaacgggaatccatatcggactcgagatgatgatcaatggaagaaagacaatgaagccgagcacggcagcggtgacgcttacaccaaggaggaagaggaggatgccagtggagataaagagagcgaggaaaccaaagagctgcgaggatgttggtgaatgggatcggagctgatggaaaaacgacgagatggggctgttgctaacggtggtggtggcggtgctaccataattgggccaatattgggcctcgccgctagagaacctttccgccattgtagagagcgattgttgttttgtgtgtgtgtgtgacagagaacagaatgaggaagggtaaaacaaatggaggacagattcagctttgaggtggcattcatgcaatgtttgtaaacacgtggagattggtcttggttttcactttgtctaaaatcgagattttggtttagattcggtttagtctaaatcgtattgattgggtttggtttgggtttatttgccgaaaaccatggaaaagggccaatgccaattgaagaacactaaaccaaaccttcaagttacaagaagagacaacagaagcgaaactagaaatactacaatagcaaattgtgtacctttatgacaacaattttttgtatgttaaaaatcagtagtagccaacgcctctaagctcagcagaactcggttgctgcatatcaccggcttttcccaaaaacacaactcggcctgtaaggagagaaaacagagatcaatatttaattgtttcccaatgaaatatgtaagaaatggagttttagggg

SEQ ID NO: 17088 - DNA, 616 bp, Arabidopsis thaliana
cctgtagtttgtaacggcataccacagaatctacaacatttatacgatatcacgagttaatcttttgatccatctgtaacataagcagcctaaattattaaggaatatatatttatatagataaatatacctttccgaatttgtctttggcaacttctcccgctttctccaaggtagctcgatttccatctggcagatcttgacctagattgagcaccaagattcccatgatgatgtgcaaccaaccgggtacaaagaaggcgatcctccaggccgtgaagtctgtggaaccgcagcgcctaatgatttcatacacaatgggcatgagcaactgcgttatgccgccacccatgtttccccatccggctgctgtcccattcaccagaccaatgatctgactgttgaacatagtgctcatccagtattgacaagacacaaacgtcgccaggcaaaaaccaatcatgaacctcaccgttatgaagcctgctgcgtcactcacgaagctcatggagacaccgttggggcagacaacatcacaaggaaggccaaccgtaacggggaccaatggagccaattatcataaggaagaatcttagaatttgtggggattgcatga

SEQ ID NO: 17089 - DNA, 567 bp, Arabidopsis thaliana
cagaagaacgaaaatccaagtcctgtaatttgtaacggcgtaccatagaatctacacgatttatacgatatcacgagttagcctattatatccgatccatctatgacatagttagcctaacttgttttgacatattcatgtagatagagatatacctttccgaatttgtctttggcaacttctcccgctttctccatggcagctctgtttccacctggcagatcttgacctagcgtgacaccaagattcccatgatgatgtgcaaccaaccggggacaaagaaggcgatcctccaggccgtgaacgctgttgatccgcagcgcctaatgatttcatacacaatgggcatgagcaactgcgttatgccgccacccatgtttccccatccggctgctgtcccgttcaccagaccgatgatctgactgttgaacatagtgctcatccagtattgacaagacacaaacgtcgccaggcaaaaaccaatcatgaacctcaccgttatgaagcctgctgcgtcactcacgaagctcatggagaacaccgttggggcagacaacatcacaagga

SEQ ID NO: 17090 - DNA, 706 bp, Arabidopsis thaliana
cactaacatatcgaaaaacataacacgacttattcttaatcaccccttaatacaataataatgcaaaaacacacagtttctttagttaatcacatgacaactcttcctgatctcaccattaaaaccagtaagaggctgaatgtttcccatgttaaccatcgactttgcgaattgttggaagaaaagtctctcgtcttcggcataagctttcactaatgcaccagtcttgcctacattgccagtgagaagcacttcatctgatgtcaataagcctttgccccatagaaggagcttgaagtatgtgttgtcgaatcttgcaggagaggctaagtctagaggtgaaatattgttgtcaccgcctgttggtggacaaattgacctgagaccatagtagtaagacctctctagcgtctcgtctggttggttattaccgttttgattgtatagtctttgtttaaacgttgtgcacctcgctactccaatcgtatgtcctcctgcaacattttggtttggttaaaaacgttgttatcattcggttttaagaaaccggtctcggtttggtttccttgccaactccttaaacaaaagataaatacatgttaatctcacctgatagggaaacaaggtcttcttcgttcaaacctttacgttggaacatggttaagagattttgaatagttgagttaggtgcaggaatgttcgtgtt

SEQ ID NO: 17091 - DNA, 447 bp, Arabidopsis thaliana columbia
ctttttcaacatgaactgttgtatcattccccgactcatctgaaaaacatatacgttcaaccaaaggcttctgcaggttcacctctactagaattctagccacatccaaccttaaacatcgttcagtattaggatgaagcttgacaaatttcccagtcgtgttagagagaacactcaagccttcatgggagtagagatgcgctggaacttctttcaaatccacccacaatggcatcgctgaaagatccggcagtgcattagcagacgttgggttccactcattgattaccaagggaatgttcgcaatatgccagtagcagcgtttcagaacatggtctctaatcctctcactatctattctagacaaaacagtagtcttgtttaagaattaaacatcaatctttgaagatttttcaaggacagtccagattcggtttacagtagcgt

SEQ ID NO: 17092 - DNA, 570 bp, Arabidopsis thaliana columbia
agtaaagccaaacctaaaagattgatataataataataataacaacgtatcaaattacagatcggacctagctagttgagttcctgcaatgaatcttctagtttacgtttcattgtctcgagctctgcttggaaccgcccgatactagttaacgtatctacaacgctctctttcaccttggccaactgatctgttttgactgagcaaggtttcgtgtgctgcaagtttccttcaataccactagatttgttagatgctcgagagggttctcccgtttcagctattttctcccttatctcaactttcggtctcattgtagatgctcgagagggttctcctttttcagttatctcaagcttcggtcccattgtagatgctctagaagtttctgctcccttatctgtttcctggctcctattttggactcgagctctcttgtgtctccatcctctgctttgaatgagggttgcccatctgaaaacaagtcgttatttgatttagcaaaacctaaaacgtggattgcaagctatttgacgttcttactgaccttggagcagaacttgagcaaag

SEQ ID NO: 17093 - DNA, 584 bp, Arabidopsis thaliana columbia
tcaatctcaaatcaaatccatctgtttctgttactccttcttcttcttcttttggattattcagaagatcttcatggaacgagagttttacttcttcaggtacttcatcgctttcttcgttcctctgtttttttttatttttccccggaaaaaaccttaaaggtctcaccttttactctacttttcaatcttatgcatgcagttccaaactcagattcgtcacaaaaagaaacaagaactttcatccgaggaatcgacgtgaacagaccaccgtctacagcggaatacggcgacgaagacgctggagtatcttcacctaacagtacagtctcaagctctacagggaaaagaagcgagagagaagaagacacagatccacaaggctcaagaggaatcagtgacgatgaagatggtgatactccaggaaaaagcttagactttccaaagatcaatctgctattcttgaagagaccttcaaagatcacagtactctcaatccggtaatttttttctcttttacttattgtttcacccgagaaagtttggttttactgggaaattaatggctatgataattgtggaac

SEQ ID NO: 17094 - DNA, 544 bp, Arabidopsis thaliana columbia
attcaaatctctggacacgtctcttaccttgatttagcgttttcttcttcacatgtcaatttcaaggtccaagcgcaattcaaattcactgtttccatggttttgcggtggagtttttgcaaggcaattcagttcagagactaagcgagttaacaccaaagtcaatttctctctgtctgatgatgattcagatgaggaaactgaaactcaggttactgaagattcaaagaagcaggagcctccacctcctccgtatgaccctttcagcaagaaaccggcgattgaggaaccagaggatcctaagaatctccaagaaatattccacaagatgagaacagagggttttactaatgaagctgtgaaaatgtttgatgcgttgtctaaagatggccgcacacatgaggcgttagagctcttctctcagattaaagataagaatcgaatgccagacgtggtggctcatactgctattgttgaggcctatgctaatgcaggccaggccaaggagactctcaaggtttcatgcgtatctcgccagtggtgt

SEQ ID NO: 17095 - DNA, 621 bp, Arabidopsis thaliana columbia
cttcaaggaaacgagaacgccgccgccgccaccaaatcttgaggaacgagaccgtcgttgacggattccccaccgcaacggagggagaatcaccgccggattatccgacactaccgttccggcatgcttcagccgtaaaagaagctcaacgaccaaatcgtcgtcagttatcgctacagccacccaatcatccttggccggaatcttagacgatgtaaccttcttcatcgacgcttacactactcaaatctacagctcccgtaaaaaagggaatcagatacagaagagaagcagcgaaagagagagagggaaagaaagagaagttacagaagagagataatgacgaagggagagagaaggagaagaagaagaaatatcgaaatagaggagaaagagagagagagagatgggaatggtgttatatacgaggctccctctaaattattcctctatctcttttttcttccttttctcatttttctttgttcttttcgaaaagaaaaaaaaaatgatttattttattgccattttaatgtcgatgcgaaaatgcaagatcgggtctgtggctggatggattgcagatttggatttaatttttttactcaatggtttgtctgtgat

SEQ ID NO: 17096 - DNA, 1099 bp, Arabidopsis thaliana
atcccccatacctccatctagtaatacagaaacacaggatatagattctaatgctgtacccattactaggtctaaacgtactactagggctccttcttatctgtctgagtatcattgttccctcgttccttccatttctacattaccccctacagattcatccattcctatacatccattaccagaaatttttacagcttcatcacctaaaaagactacaccttatcccatctctacggttgtgtcctatgataaatacacgcctctttgtcaatcttatatctttgcttataatacagaaacagaacctaaaacattttcacaggctatgaagtcagagaaatggattagggttgcagttgaagagcttcaggctatggaacttaataagacatggtctgttgaatcattaccgcctgataaaaatgttgtaggttgtaaatgggtgtttactattaagtataaccctgatggtacagtggagagatataaggcccggttagttgctcaagggtttacacagcaggagggaattgattttcttgatacattctcacctgttgcgaagttgacaagtgcgaaaatgatgttaggccttgctgctattacgggttggacactgacgcagatggacgtctcggatgcattcttacatggagatttggatgaagaaatcttcatgagtttacctcaaggttacactcctcctgcaggtacaatcttgcctcctaatccagtctgtagattgttgaagtctatatatgggttaaaacaagcttctagacaatggtacaaacgtttgtcttcagtcttgttgggagcaaatttcatataatctcctgctgataacactttgtttgtgaaagtggtttctggaggttttgttgcggctttagtatatattgatgatattatgatagccagcaacaatgatgcagaagtggagaatttgaaggctttactgagatcagaatttaagataaaagatcttggacccgcaagattctttctgggtttggaatcaagatcatcaaaggtatctcagtttgtcacgcaagtatgctctcaatttgttagaagatgcaggcttacttggttg

SEQ ID NO: 17097 - DNA, 783 bp, Arabidopsis thaliana
attactaattagtattttcttctcaccgcagttaaaatttgtgaccttgaaaacttttgtgttttatataattcattttgattcagttttttctttttctttgatcaggatgaagttaagtgcttgatggccttgtttgagaaatacttagcgtctgatatgccttacctccgaagtatctactccaagatgtttttttctttatcctcttttaaagccttatatgtcttgatgctaatttcccctttattttttagtgataagatcaagatctcggttatcgggaaccgtacaaaactccccgagtcgcttctaggtttgatagaagaggtagaggaagctacaaagagttacgaagggaagaatctcattatagcaatagactatagtggaagatatgatatcttacaagcatgcaaaagtcttgcaaataaagtgaaagacgggctgattcaagtggaggacattaacgagaaggcgatggagaaagagttgttgacaaagtgtagcgaattcccaaaccctgacctgttgatcagaacaagcggagagcaaaggatcagtaacttctttttatggcaatctgcttacactgagctttactttccaactgttttgtggcctgattttggcgaagctgagtatcttgaggccttgacttggtatcagcaaaggcagaggcgattcggtcgacgagtttaaaacttagaatttgcatgtctcatagttgatgcaatagtacgtagtgatacggttgtttaatttcatgagacctaaattgtt

SEQ ID NO: 17098 - DNA, 569 bp, Arabidopsis thaliana columbia
ataatcaagttctattgcactagccaaaaaaaaaaaggagagaaaaaaatgatagagtaattgcaaagcaaaggtcaatgatataggaactttaattcttccttcttcaatccgttggaattcggtttcttgaagggattaccagagaatctgttcatcctcgatatcgccgtggcatacttgttgtatctgtaactcatcccataagctccccggcaaagcgcttgttattttaacccagttaaatcgcttcagggaggacttctttttagatggacatggaaaacaacacactatacccttaagtgcacaagttggaggtggggctcctacaaatatcagaggaggtggtggcagtggcgcttctctacgcacacgagtaggtggataacaacaacacagaacttctgcatcaaacatcggaagtggaggtggaggtggaggtggacgtggtagtactcttctacgcatagcaggaggaggaggtggcggcagtggtgctcttctacgcataggaggaggaggaggtggcggcagtggtgctcttcttcgcataggaggaggaggag

SEQ ID NO: 17099 - DNA, 544 bp, Arabidopsis thaliana columbia
  unsure (1)..(544): unsure at all n locations
actgacttaaccaacaaagtctcacaagttgataatgactccatcgagtgttggcttgtgcaacacgacttcaaaagctctcgtctagtctttgtcggcacatgaaagttttaaaactgtaaactctgcaacatgatttcttgctgagattgtggagatcccatgatctagtgaagtgacctcttgatccaggaatgcaaaacatgtcatctttcttggactaatgacacgggaggggaaggagcaggggtttgcgatgatgatccacttgaaatttttgctttgagcggatctataatgctaaattgagatcccaagaacttgacaaccacaaccagctccacccaaagaaatgatgacctttgggcaaaaaacgtttttgggctttttagtattataatttatctattttattatttgtaatatttttggcattttattataatcaaaacaaattatttttaaaattgtgggcttttttcagtctttttattnaaaaaaaatggatctttttgtaaacagaaaaacaccaagctgcgttttg

SEQ ID NO: 17100 - DNA, 666 bp, Arabidopsis thaliana
ggtatacgtgatcgatgatcatgtcgaggaaacagagaatgtgggagaagaacagagaaaccagggggagatggtttcgatgaaaataatgatatacatgtcgaagatgatcaatgtttcatctaacatgggtagtggtgaactaacgcctccatctacaccaagaagatcggagaggcagaagaacaagccgtgttatcttaatgactacatcatgctagctgaactcgaaattgaaaggctcttaatgacaatagatgaagaaccgtgggactacattggagctacagagttaagagaatggagagaagcttgtgaagaagaattgacgactataaacaagaacagaacataggatttagttgagcttcctgctggagttaagccaatcggactaaagtgggtattcaagacaaaacaaaattctgatggtagtatcaacaagtacaaggcaaggcttgtggctaaagggtatgtgcaacgacacgggatagattttgatgaagtgtttgctccggtagcacgaatcgagacagttcgtctcatcattgctttggctgcctcaaacggatgggagatacaccaccttgacgtgaagactgcgttccttcatggagagcttaaagaagtagtctatgttactcaacctgaaggatatgtgacaaa

SEQ ID NO: 17101 - DNA, 444 bp, Arabidopsis thaliana columbia
ttctttctctttttaagagttttgaagatcccgtagcagcagttggaattgctaaacagttgcaagaacactgtaatgaggtttttagaatggtaaaagagacaaacagcaatgaacactgtaatgttccttctacttctgagactttgtactctcctcttggatatattcaaaggtgaagctagtctccatactggttctgaaatgttactcaatgacaatgtggattagccttaagatgactctgagaatggtgattatgatcctgaagcgaaggaagacggaaatagcattagtggcttgggaaatgctagcgatgaagatggcaacataacttcaactagcttgagctgctcttctataggactcggcagccgtgttttagaagactgtcatacgtcacttggaacagggtcccttaggtgaacaacaatgaagaaatgt

SEQ ID NO: 17102 - DNA, 483 bp, Arabidopsis thaliana columbia
  unsure (1)..(483): unsure at all n locations
gtactcagacttcaaattgagatttgctcttaaatcaaaaacaactaagatcagactgatgttttgagatacaaccgcttaccacgaaatgatatgtggcttttgaacatttggtcaaaaggacgaaaaaataaactacttttagtctcttctgctacctacgaacatatatcaatcctgacgaaacctatcagcaaaacaaaaagggtaggatgatctctgatatatgttcctgttatggccctaagattcatcatctattccattcatagtctcctccatagttaggcgaacggttgttcacacggcttgtctcttctggtttgatggagtttgcaaatgcatgccagcctataaggtaaggcaagacaaacttgcaatatagaagaaaaaaaggagtttagtaatgtttctttgaaagttcatgccggtaatgttanagatgagatattttctgatcttacattgaatgcagagataaga

SEQ ID NO: 17103 - DNA, 881 bp, Arabidopsis thaliana
atctaagaaactatcttctgatagcaaaagatgatgccaaaaacctacctaattctaaactctctaaaaccaaacaaaattaataacaagtactaggaattgaaatttacatccgggggctgctgctccgacgcatcgtctgctggttggctaacaagcttcgagtgttcatcggccgagttgatggaaaactcagctagtgaactaactgcaacagacattccatggcagagaaccttcacagcaacctctgcaagtttctcagcagtcatcacaacatcttcttctcccttatcagccactacaagctccatgctttctgacccggagtatctccttgacccgcttccactccagtttggatcttccctaacttgccttgcatatattgaacccatccctgaggcaaagaactcaagtttgtccaaaactggtttttcattcaagctgttaagcaaccttgaccattgaatgcagactcggtatatcgggtgaagacatgaggataatctaactttttcggggtcaggatcacatctgaaacatcttagaagccaaccagataatgctttcatgtaggatctctgagaggtgatccagaattcaaaacaggttctccagtttcgaagctgagcttcaagattcaaagcagattgagctaatctttgagagttaatacctctggcattattggaggttgtctcttcttgtgacgctttgaaaccggtgtgcctgcaagtaacagtttggcttcgtctagtgttcgtttctgtatctggtgactttccgccattactttccacatccttgttaatctgttatgatcatgattaccatttgtcagtctgaggcttaaaagtgaaaccgaagagaaggaaaaa

SEQ ID NO: 17104 - DNA, 847 bp, Arabidopsis thaliana
  unsure (1)..(847): unsure at all n locations
ttccagataattcttccaatatcttgtcaacttctattgagctaagagtgagaatagctcgccaatacagatcttttttgaccccaaagcttccatgagaaaacatataatcccatttcccaaaccatggtcgaccatatgcaacaccatggagcagcctcagatccatcgctcccttcttcgatgtatcatccaaagatatcttcctgcagccaaaatacataatcattgattaacaactccataaacactaatcaacaactcacttaacattatccactttggtttataattggttttgtccatttttaaaacatcttcaaatctttactaagattagcaaaaagatatctaacatgaatgtcacaatctctcctcctataagtagtaaagcaaacaactttttaagtaatcaatgtagctagagaacaaagagtggtacctagtgtggagagtagagcaaagacggtcccaaaagtccatgatttggtcaccagagaggtgattaggatcatcaagatcagtgttgatacaaagcaaatgaccaaaaccattgcaatgaatcaaaccatgcatcaaatgtgaagaaagcgtcaagctttctctcttcaatggctcattccattcatcacggtttgggattatcatatgatacttcctcttcgttacatagtgatgacccaacctatatatatacacacacgtaaacgatccaaaatcgaaactttaccaagaacaacgaaaaaacaaaacctaagatttattatttacgaaagcatcgacagaaatcgcagagagggtttggagaagaatcagagatttgttgttcgatgatgtanagagggaa

SEQ ID NO: 17105 - DNA, 651 bp, Arabidopsis thaliana columbia
caacgacgacctctacccctaatacacctccttacagaatcccttcacatgttttcgcgagaacaacctctacagctccagaatggagtactatctccaatgaatctcttttcagcatccatatgggtaacaatagcttcaccggtggagattatttcaaatccggcgaactcacgtttcctcagcctccttcaccaataacttctcctttgccttctcctttaccatctacgccccacaacgtgaaccaaggaggagccgtaggagctgctgcggaggtaaaaactccggtggatataggcaagaaagcagctgaaacagataaagcttaccgcgcaagtaaagaagacgaacaaaaagctgcagcaagtataagagaggttatcatggctaatgaagctgctaacaacaacaacaaaaccaataaactagatcgttctgtttctcgtcgcacagaaaatttaagtgtcaagtctttcgcttttccagtgtaagagataaaaccttttcttgatcacttacctccgtttcatgtgttttcttttctcactttatgttgttgttgcatttcgtagaatggggaatgcagacaaaggcgggttacaaggttccacgcctgaagagaagcagaggaatccttcgcagccagag

SEQ ID NO: 17106 - DNA, 1137 bp, Arabidopsis thaliana
tgaatcaaccaattttgattcactgtgcatctgaatgttggtattctttaacttctttcatatttgtccgatgactaacctcgagttttttatatctgtgatttccttgtagctgacggaacttatgctatgaagaaagttttgattcagaacaaggagcaattggaattggtgcgtgaggagatccgtgtttcttcattgttcaatcaccctaatttgcttccactccttgatcatgccattatttctgttaaggtaatctggactttcattggttgatgctttttctgagtattttgctatttgtctctgtaattttcttatgtaaaaatccgatttagaaagagttacttttgattggttaggacggccaagagggagcttggaaacacgaggccttcttgctgtttcctgttcacttggatgggaccttgctggataatttcactttgatgaaggctaaaaaagaaactttctcaacaactgatgttttgcacatattccgtcaggtaacaaattctatctttgatttctgtttttaacttgtgttttctgaaactctcttcttcttttgcaactaactattatgtttagtttactgagaaccatgtgagttactgtatgattagtcataaattgaaagtcgtttgattttccactgcagctttgtgatggacttaaacacatgcactctctggagccaccatatgctcacaacgatgtcaaacctggcaacgtccttttaacacgtagaaaaggacagcctcctcttgcgatattgatggactttggaagtgctcgcccatcacggaagcaaatccgttcccgtcaagaggccttacagttacaggttctatatctatccctttattatactcatcccaagcttttgagatcgtttactactacatattctccatgaatcatcgacattctctctcagatgagaataactacttacaattaatatctctgaaaattcttcatgtcttaggaatggacatctgagcattgctcagcaccgtttcgagctcgcgagctctgggattgccaagccatgctgatattgatgagagaacagatatctggtcactaggctgcacattatatgcaataatgtaatacaataatatttgg

SEQ ID NO: 17107 - DNA, 893 bp, Arabidopsis thaliana
ttcgtcgtccttgaagaagagtttgatggagttagaagggaagaagagtgagccttacccaggaggaatgccgaagatgggtccattcacagggagagatccgaatgtgaagaaacctgcttggttgagacagaaggcaccacaaggcgaaaggtttcaggaggtgaaagagtccctttctcgtctcaatctcaatactgtttgtgaagaagctcagtgtcctaatatcggcgaggttagctatttcgattttgtgtttatgatctcgaagattgttattaaaatgtatcggttttatgaattgtgggtatgagaaattatgagtaaactacatgctagttcaaccatcattactctaaatttgtgatttttttctgaaaattagattatgtgatgtgtagtgttggaatggaggtggtgatggtgtagcaactgcaaccatcatggttcttggtgatacttgtactcgtggctgtagattctgtgctgttaaaacaagtagaaatcctcctcctcctgacccaatggaaccagagaacactgccaaggccatagccagttgggggtatgtaacttttatttgattcctgatctgagtaatctgcttatattgtcctttagattctcttcatggtcgtgttcagaatttttaactagataggataaatggagaggggatgaaaattaaaaatagtgtctctcaacagtcactactgcatctttgttaatttatgatgggtgtatcatgatatgctattttgcattttcctttgttgcagtgtagactacatagttattaccagcgtagaccgtgacgatatacctgatggtggaagtggacattttgcgcagactgtcaaagctatgaaggttattaatattctatttgttta

SEQ ID NO: 17108 - DNA, 553 bp, Arabidopsis thaliana
tggatggatattagaatgagaagagccttcttcttccacagccttgtgagctaattctccaagctctctgactctttttcttctctcttttgcttcatcactctcgcccattatttcgtccactgccttcttcactccttctttatccactaacactccaatactctcctcttctccccatttcatgacctcttcaaccccaacacttacacctgcttttagcacctgcacgatcagtttctggttgcagaattggtctccaaataatggccaagtgatcaatggaacccctgaggtgattccttctaaagttgagttccatccacaatgtgtcaggaatcctccaacggcagggtgtgaaaggataagcatttgaggcgaccatccttttatgagaaggcttctctctttggttctttcttcaaaaccgctctctaagatccactcagctagttcatgatactttccccacctcttatgaccaaatgaatggtcttttagttgctcgaggctagccgagctctctaagctgagcagaggaagattgcatata

SEQ ID NO: 17109 - DNA, 1175 bp, Arabidopsis thaliana
tgaattaaagaaaataaatcatcggctttatttgaattatcagaaaacgaaacacgagtttgttttgctctaaagcaaacatcacaacattcctccaaagcactagtactactactaaaagcaccaatttctgaaagaaaagtcaaaactctcggtgaagggtgacccattcttttatgccacaaagcccgagcatccactgtcccgacacgattcacttgaggaataaccgcatccgcaagatgataaaccccatcacgttcagtacccactccaatcaaagtcctcgaagcttggtcctgtatcacacaaaactttttagtaaaaatgacagtgcttgcaatgtcacgcaagagttgtgatacagatataagtgtaattgacaattctgaagcataaaacacgtgatgaagtatgagctttccaccaaggataagtgtgccatatcttgttgcccaagtgatcttgtcatttggcaatttgataggacatagatctattttctgaatttctgtcaagagattcatgtcaccggtcatgtgatgggatgctcctgaatcaataatcaaattataacgactgcgagtccatacaaaatcagcttttcgctcttaccagagaatccctctttacttgctccgttagactttttatttttctcaatgaactcagctagagagctcaattgactgtccgtgagttgtggagtgctagttgtcgttgaagctgtagttactgcacccgaaacatgtgaagcggacactggaccaccacgaccgcgtcctcttccccttgaagaaccacgacctcgaccagaattacctctccccgcagttgaagatgatggttcattccaccattcaggataaccaacgattttgtaacattggctcttttcgtgacctgttttcccgcagtgagagcaagtcgatgattgtgatttgaaagcacctgcagctgatgctgaaaacccaacagctcctcccttttcttgtggttcacgagtagcttgaatgtgtctttcttcttgaattatttgcgaataaacactctctaggttcagatcatggagacgagaaagaagatttgatcgtgttgtgccaaatctttgattatcaagccccatcaaaaattgatgaatatgaagcccatcttgtttcttcttatatttcttc

SEQ ID NO: 17110 - DNA, 516 bp, Arabidopsis thaliana
ccaatcgtcatctctactagtggccgaaacgcgacggtttccgccgctgcgattcacgtttccgttaacgttaacgggaacgttgggagcttcggtttgttgtttaacggagacgtcagttcgacaaatgggacaattaggatgatccttaagccacgtctcaatacataacacgtggaacgcgtgtttacactcgcttagttgccggagttcatcgctgtcggtgaacaccatgagacacacggagcactcgtttccaatctctttagaatgtgtatctttgtggaatttccctccggattccgaagttacggtggtctcggtgatcggcggggtgtcgacggtggcgtgaggtgtatcgtcggaggaagagctggtgcgggaagaagaggagttgcggcgggaggaagaacatgggccgttgaagaagagagcgtaaactaaagcgggaacggcgacgaaggcgatgacgacgaagattagtttgagaggagtaaggtcgatgctccggggagg

SEQ ID NO: 17111 - DNA, 570 bp, Arabidopsis thaliana
aagatcttttatttgggtcataagaggttgggaaaagtataatgaactatatgagtggatgatggagagcggttttgaagaaagaatcaaagagagaggacttcttattaaagggtggtcacctcaagtccttatcctttcacatccttccgttggaggattcctgacacactgtggatggaactcgactctcgaaggaatcacctcaggcattccactgatcacttggccgctgtttggagaccaattctgcaaccaaaaactggtcgttcaagtactaaaagccggtgtaagtgccggggttgaagaagtcatgaaatggggagaagaggagaaaataggagtgttagtggataaagaaggagtaaagaaggcagtggaagagttaatgggtgcgagtgatgatgcaaaagagaggagaagaagagtcaaagagcttggagaatcagctcacaaggctgtggaagaaggaggctcttctcattctaacatcacatacttgctacaagacataatgcaacaagtgaaatccaagaactgattacagcatttttagtaacagttaccata

SEQ ID NO: 17112 - DNA, 862 bp, Arabidopsis thaliana
tttcattaacaaaaaaaaacaattctaattggtttatttctacttctttttctgtcttggtttgatctctattactatattgattatgaaaaaaatatgaaaccaaaaccatttattatgtcttcaattccatttttaacccaattatttcactacaattgtaataaccgggttattgcacccctaattataactatttaagcaatcgcatataccaaaccagcgagttaaaccaaattgtttcccaaattatgctaaacgacagcgttttcacaaattaccaaaaaaacctatttttctgtatctatctgaattcagagtcctgaccattttatctcactctcacaaagtcttcacttttgaagtgtctcctccacacgcactgcgccgccaaaaaacccttctttaaaccctttcctcctcgcgccgtcatgcaagccaccatcttctctccacgcgccactctcttcccctgtaaacctctcctcccttcccacaatgtcaactctcgccgtccctcaatcatctcctgctccgcccaatccgtaaccgctgatccttcaccacctatcactgacaccaataagctcaacaaatacagctcaagaatcactgaacccaaatcccaaggtgggtctcaagcaattcttcacggtgttggtttatcagacgacgatttgctaaaaccccagattggtatctcgtcggtttggtatgaagggaacacttgtaacatgcatttgctgaaattgtctgaggctgtgaaagaaggagttgaaaatgcaggaatggttgggtttaggtttaatactattggtgtgactgatgctatttcgatgggaacgagagggatgtgttttag

SEQ ID NO: 17113 - DNA, 618 bp, Arabidopsis thaliana
taatactatttttgaaaacaccaacatctgaaagaaaagataaaacttttggagaaggatgacccattctcctatgccacaaatcccgagcatcaactgtcctgacacgatttatttgaggaataaccgcaccagcaagatgataaaccccatcacgttcagtgcccgctccaatcaaagtcctcgaagcttggtcctgtatcacacaaaactgtttagtaaatatgacagcactcgcaatgtcatgtaagagttatgacacataaataagtgtaattgacaattcaggggcatagaatacgtgacgaagtatcaattgtcctccgagaattcgtgtgccatatcgggttgcccaagtgaccttgtcatttggcaatttgatagggcaaggatctattttatgaatttatgttagaagattcataccaccagtcatatggtgtgacgctcctgaatcaatgatcacattaaactcactatgagttccatacaaaatcagtttttcactcttaccagagtatcctctttgcttgctccatttgacttcttgcatttctcaatgaatttggccaatgtattcaattgactatcaaagagctgcagaagaccagttgtgga

SEQ ID NO: 17114 - DNA, 540 bp, Arabidopsis thaliana
gaaaataccatgttcctagctttttattaaatcgtttacaatccaatcgaacgaagtgttagaacgaaatgttgtgatcataactccgacacctacaaatggaccgccatactttttatactttcactttaaaacctaccaaaacccctaaattaaatttatacgtgtctatatatacgatctctcgtcgagacaccaattaattttgtataaagattacaattctcacaaaacatgaaaactcccatgagttcttctatcacgtttgcactcgtcttctttctcctttctctcaacccaacttcatcattaccgtccaaacgcgaaagctacgttcaaaacgcgtgtagtgttacacgctaccaagacctctgcgctaaaacgctattgccgtttgcatcagtcgccaagaacagtcccagcaaatgggcacgtgccggcgtttccgttgccataaccgacaacaaagacgtccttagacaccttctcaaaacgaggctttcaacgattgggaaacgagaccgaatcgctttgtcggat

SEQ ID NO: 17115 - DNA, 846 bp, Arabidopsis thaliana
atcatgttgaaatttgaaggattaatcggccttgaataaaaaatataacattttcaaaagatggatagattcacaatcattaatgggaataaattatctaacaatatgttacgaatcatttcacctcaaatgtttttgggacattgaaaagggatagaaaaaggttatgtcgtcaatcgttcttggtttaggttatctcgaactttaaaccaactttgtcaaagtaaggataactcaagaatgtgggaagttccactagttagttgtcttctgctaattcgtacaaatgtgtaactaagactctgttttaaatttcacaaatacagaaaacaaaaactatagaatgtttaaattcctttgaaaatatgacatatactcaattattggactgtgctagttgcattatgtcttgtagcaagaaagtgatattagaatgagaggagcctccttcttccacagccttgtgagctgattctccaagctctttggctcttcttcttctctcttttgcatcatcactctcacccattagttcttccactgccttcttcactccttctttatccaccaacactcctatcttctcttcttttccccatttcatgacctctttaaccttgggacttaacaccgacttgtagtatttgtacgaccagtttctcgttgcagaattggtctgcaaatagtggccatgtaagcattggtagaccagcagttatcccctcaagagtcgagttccatccgcagtgcgttaagaaccctccaagagaaggatgtgaaaggataagcatttgaggggaccatcctttgatgagaagtcctctatcttggattctatcttcaaag

SEQ ID NO: 17116 - DNA, 608 bp, Arabidopsis thaliana
tgcccgtcgcgacggctgatatgtcggctcatgttacgaggcagccttttgcttccgtcgcgaagccgttgattgagactttgattcaggaaggtgattcgaatctgcagatcggagcggcgttgtgtttagcggcgtctgttgatgcggcgacggatccggaatcggagcaattgagaaaatcgttgcctaagattgggaaattgcttaagagtgatggttttaaggctaaagctgcgttgttgagtgccgtcgggagtataattaccgccggtggtgcgggaactaaaccggttttggattggttagttccggttttgattgagtttttgagcagtgaggattgggcggcgaggaagtctgcggctgaggcgttgggtaaagttgcgacggcggaagatttggcgtcgcagtataagaagacttgcacgacggctcttgagagtagaagatttgataaggtaaaaaaaatagagacttaaagttttgtttttgtgtcaatcttaaatcagattttgagacttagtggattccaatgtaggtgaaaagtgttagagaaactatgaatagagcattgaatctgtggaaggaagttcaactgatgatga

SEQ ID NO: 17117 - DNA, 623 bp, Arabidopsis thaliana
ctctcaagagagagagagagtgcgagagattaatacacacaagtgaagacgctccttaactctctcagaattgaaactttagtgagaaagagaagagagagagaaaagatgtttgcggcggagaatggtctcaaaggagatccaaggcttgaagctatatcagcagccattagggttgtccctaatttccctaagaaaggtctttaaaacttcttgttcctctgttttttctgttctttgttctgtttttgcaattctctgaagttgtttcttggacagggattatgtttcaggacataactacgttgttactggatcacaaggcgtttaaacacacaattgatatcttcgtagatcgttacaaagacatgcaaatctctgtcgttgctggtaagactcctctgttttttttcctttgttcttccttatcctctcatttctttactacagtgtttcgtcatcaagtttgttaagtaacgccaaaaactatgtgtctttctaaaatgggtttacatcatataagcaaacaaaagacaattaaaaaaaggagaaacaagaattgtgtttttcttcattaagaaattaatatgtttgtgtacatcaaatggtatatataggagttg

SEQ ID NO: 17118 - DNA, 893 bp, Arabidopsis thaliana
taaattattatgcatgttaattaacttctagaatcagtcacactttctaaacaaaatcatgttgacatttgaaggtaaatcggctttgaacacaagagataactttttcaaaacattgatatactcacaattgtactttttaatcattactgggggaataaaatcatttaacaaaatttgtgtggaaatttcacctccaaatggtttttgagacattgaaaagggacataaataggttatgtcaattgatcttggtttaggaaaattaggcgcacttaatgttagataagtctaaacgaaccttaaaccaactttttcaaagtaaagatgactcgagtatgtgaaagttacactaattagttgtcttctgctaattcgtacaaatgtgtaactaagactctgttttaaatttcacaaatacagaaaacaaaactatttaatttttaaattcctttaaaaagatgacgtatgctcaattatgggggtctgccagttgcgtgtaagttagtggtgggtatggggtatgcgtgggggggatgggagagtagatgattagaatggaggggaggtgtgtcgccaagctctttggctcttcttcttctctcttttgcatcatcactctcacccattaattcttccactgccttcttcactccttctttatccaccaacactcctattttctcctcttctccccatttcataggctgttcaaccccggatcttacaccggcttttagtacctcaacgaccaatttctcattgcagaattggtctgcgaatagcggccatgtaagtagcggtagaccagcagttatcccctcaagagtcgagttccaaccacagtgtgttaggaaccctccaactgatggatgtgaaaggataagcaggga

SEQ ID NO: 17119 - DNA, 577 bp, Arabidopsis thaliana
acatcattcaccatgaccctgtccaacttcttggcaatgagatcatgttctcttttgtttgaccatgtgtaaagtggaccatgatgagccatgtccgtatgagaacaataattcaccatcgatctaaagtcacgcatgcccattgaaaccacaggattatcctccacttttgaatgctcttctagttctaacgtctcattaaaatctccaaaaataatccaaggcttcttcttaatgataggagaatcataatgatcctgcaattcattccaaagaacctttctatcatccctgaaattggatgcatacacaaacgaacaaaaaaactcatcatcccggttctctagctttactgaacaggttatgagctgttcactcttatagaaaggactcaaacgcacatttctcctccatactacccaaatacgacctcgactattgtattcgaagtttgtaatcatcgaccaatcattgaacaacttactacttaacacctgagctttatcctcctttactcgcgtctctaataaacaaccaaacagaaaatcttgtctctccacccaactctttattacgg

SEQ ID NO: 17120 - DNA, 531 bp, Arabidopsis thaliana
aatactttcaaaggtatatatacaaattcgattgtgattcttttgttttgacatattctctctggttattcattaccaagaattatcttgttgttacagaaaggaagttcgcgtttctgttatcgggaataaaacgaagatccctgaatctctcctcaaagaaatccatgagatagaggaagctaccaaggctacaagaataagcatctcatcatggcagtagattacagcgggaaatttgatatcatgcatgcttgcaagagtcttgtgaagaaatcagaaaaagggttgatccgagaggaagatgtagacgaggcattgatcgagagagagcttctaacgaattgtagtgacttcccaagtcctgatttaatgattaggacaagtggagaacaaaggattagtaacttcttcttgtggcaacttgcttataccgagcttttctactcgccggtattgtggcctgatttcgataaggataagcttctagaggccctcgcttcgtatcagggcagggaaagacgatttggt

SEQ ID NO: 17121 - DNA, 731 bp, Arabidopsis thaliana
cccaattaaaactattaagagagaattgaaatagagcataagggatgaatttacctttttcaatgttatctagctcaacaatgtcggcaagcaactctttaatggtaacaacagatttattacctaagtgattcacattcttcatccactgctctgtgcacaacaacactttaaccatataatgagttaaacaactcctatgtggctctatgactcgaccactgttactaaaagcactttcagatgcaaccgatgacacttgcattgcaaggacatccttagttattgcagacaaaacaggaaacctaccacaattgagcttccaccaagaaagtacttcccactctaatccaatgatagttttaggattctccactttctccttcaaatacacatctaactcgtccctaccatcatcaaccccaatctcatcaaccaactccttataagcaaagtccatcctctcataccccatactatcagacatcaaatcagagggctcaccttggctagcagtaatcgaagtctgagtggactgtgatgatggaccactaccacttgatgttttctgaaaacgactactatactccttaaacaaggaagtcaaaacattgttgaccttttcagccatctctttagcatcagtagtatctaaaacataaagctttgcaaaacacatattagcaaactgcattttcttccttggatcaaagacacttgcaactatcaga

SEQ ID NO: 17122 - DNA, 870 bp, Arabidopsis thaliana
gtgtggcagtttcatgcgaattgttttagttatccttaaatatttcgccattttgtatctctaataacttaattactcagattgaagtcaaatgcttgatgtatttgttccaacgttacctcaagtcaaagatccaatttttccagaggtatatataaatgagtgagcttattcgatatagtagagcttctcaatagctcagtttgttaccaataatcttgtttgtttcagcaaggaaatccgagtttctgttatcgggaatcttgcgaagatccctgagtctctcctccgaacagttcacgagttagaggaagctacaaagagttacaagaagaagcatctcatcttggccatagattacagcgggagattcgacatcttgggtgcttgcaagaacattgtgaagaaatcagaacaaggtttgatccgagaggaagacgtggacgagacgttgttcgagagagagcttctgacaaattgtactgagttcccaagtcctgatctattgattaggactagtggggaacagaggattagtaacttcttcttgtggcaacttgcttatacagagctcttcttctcgccggtcctttggcctgatttcgataaggataagcttctagaggccctggtttcgtatcagcgccgggaaagacgatttggctgtcgggtttgatcctctcgtccgctctgttctgttatgttcatctgagatttctatcaaactacttgttccacagtcagagatcattatgctgttgtaactttatgtcggtaaattgaaaatttgctaataaaaatcagcggttactttgtcgttacttatcactaaaacaaatatcttgcaacacaaggaactgtactatctca

SEQ ID NO: 17123 - DNA, 486 bp, Arabidopsis thaliana columbia
ctgccgcatctcagaaactacagagtcagatcgttaaaaatactcaacctgaggctccgatagtgagaacaactacgaatcaccctcaaatcgttcctccacctgtctatgtgtaacactcgatttctctaaaccaagcatcttcggcaccaaagctaagagcgccgagcatggaattctccaaagaaaacttcagtgtttctttaaactcctcattcatgtcgtcggcgataaccggagacggcagcgtctccaatggaaaaatcttccttgcttctgctccgttgcagcctgtaaactcttccggaaaaccaccgttggctggtcatccttacagaaagagatgtctcgggcatgagcactcagagagtttctccggaaaagtctccggctccgcatacggaaagtgccattgcaagaaaaggtattgttacgtcacccacctgtcgctctaacaactactcagtgacttcagttatttaattt

SEQ ID NO: 17124 - DNA, 613 bp, Arabidopsis thaliana
cagactcatccacggccacatcagtagaccaacggtggatattccaccgaggaagcttctttcctccgccaagtctccgtcgtcagtttcaagtccccttcgcgactataaagaacagaaagactattgttacgactctgactctgaggatccttacgctggagaccatttccggatgtacgaattcaagatccgacggtgcacgcgtaccgtagccatgactggaccgactgtcctttctctcatcccggtgaaaaggctcgtcgccgtgaccctcgccggtttcactacaccggagaagtatgccctgagtttagccgtcacggtgattgtagccgtggtgatgaatgcggtttcgctcacggggttttcgagtgttggcttcatccgagtcgttaccgtacggaagcttgtaaagacggtaagcattgtaagaggaaagtttgtttctttgctcattctccacgtcagctgagagttcttccaccgtccccggagaatcatatttccggtggttgcggtggatcacgtcgtcatccctgcatcggttttaagcaataaaaataatcgatgttgcttgttttgtcccattctcgacgagtactctcttgaa

SEQ ID NO: 17125 - DNA, 1076 bp, Arabidopsis thaliana
tagaggattctcgagtctacttagaatttgagctcctgaaatttgtttgtttcatttgatttaaccaatggcttcttccacattgatctaatgcagtgatcataaggaaagggaactacctggtccagagtaatgggaacaaccttcgcattggttttcaattctcttctccgaagtcgcgcctaaaggagtatattagagaattatgagctcagaaacttcacatttttttaaaaaagttcggaggagaaaaatacaacaaaaagcgaaacctgagcaagaaaagcttcagcatcctcttgtcgaaaacagagcaaaccgatagacttgcctccggtaggatccgagataagaacgaattcgttattggtgttactgactgtaaacaccgacgtcccagcgagactttagcgacaagagatggactcaacgtcgtcgtcggggttccagacttggattgtgagacggaggcgaaaggcggcggagtaggaagagagaaacgtcgagtagctagggtttcggcgaatcgtttcgtgtcttcgattcgggcggagaggtcggagctgaagcgggtacactggtggtgaatgaaagaagagaaggagaggaaaggattgggtttcactgatgactccatttttggatttgcagagagaagaaagaagtagaagaagaagaagcaatttttgatactatgaagagagtgaagaaaaaggcttcagagcaattcgtttgggcttttttatttgggctttattggacttgattggttttagtttacgtttaatatggcccttgatcaaaagtttggtgacaaagcatttattaactttctaaactcaacttccacaccattctaaacacatgacatgacttacaaaaagcttttgtcactcaaaattcatgtcgatgacatttttttcctccaaatttctcctccttataaaatacttactagatcaagcaaacaacacactaaagaaaacaaaattgttaaaactctcgttaactgaaaaatatgaggaacattactactacaacccgaaaaatgttactacttgtgattacgatgggga

SEQ ID NO: 17126 - DNA, 818 bp, Arabidopsis thaliana
gagcgattctcggggatctcgagaagcgctgttctagaaaatcttgtctctccacccaactctttattacggaatgtttttctaacttatttagacctcgaacattccattagaaactctgcacgaattgttctcgggctttcgactataaaacaagctttagatgttgccaagaatctatccgcgactggtgtgatattctatatagacacgtatgttctatccacgtagatgagtcagacgtcggttctgcacctccgtacgtacatgaacatggtcttgagatactgtcatcttcacagttggaacttctgtaccagggtcgtctttcttagtttcttcacccgcctctgggatcttatttccctcctccacatcctcatctccactcaggaccgagtatgagttggataatatggagacctcaccaaacttaagctcccctgtttttatagttggactgcgacctgtttttggaggagttatccagcccttatcattctcagattcacttgaaacaatcgcaactgagttttcttggctgcagtttcctgcactttcatttgttttctcctctagactcttcttctctgcaatgtgtagaggcgattgtgtagaagtggcagctacttcaacaagagtctctttttgacttaaacttacattagattcttgtcccttgacagacagacatgaatcaattaaatgtcctcatttcttacaacagccacatctaggaggcaaccaagggtaagcatattgtataaccacctctaattctccctcctcttcacccatgaagctatattcagtaggta

SEQ ID NO: 17127 - DNA, 692 bp, Arabidopsis thaliana
ccgtctgttcgtgtggatcaagcctatacatccttatgtgagaagcagaaactcgctttggaaacagcttcttctgaagcaattgcagaagaaaatcaagcttacactcaatggaattctctagcagtcttggaagaaggttatttgcagcaaaaatctaagttgcattggttggatgtaggagacctaaataataagtattttcacaatagtgttaaggccaggatcgccatgaattcaatccgagaaattttatgttctgatggcattgtgcgtacgagccaagaggatataaaagaggaagccgtgcagttttttaaaaggttcttacaagctaagccagaggattttgagggctctagtgtcagcgaaatccagagtctcttatcttatcgtagttcaattttggatcacgaaagattattgagagatgtcactgaagaggaaataagaaaggttctattctctatgccgcagcataaatctccaggtcccgatggttatacagtggaattcttcatacatgcttggccggttttgggtaaagactttgtaatcgctatacaatctttctttctgaagggtttcctgccaaaaggtgtaaacaccacgattctagctttaattcctaagaagcaggaggttagtggtatgaaagattatcgcccaatttcttgctgcaatgtgttgta

SEQ ID NO: 17128 - DNA, 556 bp, Arabidopsis thaliana
cgctccagtttcacattgctttaatctaaatggaagcagttcatactctgaggtaaacaaactcgactcgctggtctttaagactaaattttgatgtttttggattgacacatcaaaagtatcttttttttttctctctctctctctcaggtggatgggattcaaggaatcatgacttcatacaccagtgcccttttcaacgtctctcttgcagggcctaccctttttggtccagtgatcaacgctgctgcaatgatcgccagcgcgtcgctagctcaaggttcacggaaatattacgtcttactgatcataacagtgagtatatatataaaaagaaaagccaagatcacataaaataacaaatcaaacattgtttacataaatcataaactcttgtttcaggatggtgttataactgatcttcaagaaacaaaagacgcattagtcagtgcatcggatttgcccttatcaatcctcattgtaggagttggaggagctgattttaaagagatggaggtaacaaataaaaaataagacatttaagattaaggtacta

SEQ ID NO: 17129 - DNA, 942 bp, Arabidopsis thaliana
agtttcgactgtctacgtgcctactgaaacatcggacacaagcttggtaagggattttgtctgtgaatcttttgattaaagagtcatatgtttgaaattgcatagagacaaatgactaagcagagtgtaactctgcagacagttaaagatggatttcaatggaggaaatacggacaaaaggttacaagagacaacccgtcacctagagcttactttagatgctcgtttgcaccgtcttgtccagtaaaaaagaaggtaatttacacacatcgagtttattgtatttatagcttcatttgtaattgtttatctctgcttgcttcttcagttgtctaatgatctgtggtattactgttcaggtacaacgcagcgcagaggatccatctttacttgtagcgacatacgaagggacgcataaccacttgggtccaaatgcttctgaaggggatgctacaagccagggtgggtcaagcacagtgactttggatctggttaatggctgtcatagactagcgttggagaaaaacgaaagggataatacgatgcaagaggttctgattcaacaaatggcgtcatcgttaacaaaagattcgaaatttacagctgctcttgctgctgctatatctgggaggttaatggagcaatctagaacatgaacgtttttagtgaatgtattgtttttgtttgtttagaatgattcttcgttttcgaattgtgtctttcgattaggagataaaagatgtatataaatataataaatagatgaagaaatcgtataagtattcgagaaactttaaatgtacgaattctatataaccagttagatgtcgtctgaatactgtatatgaccctattgaaataaatgatgtggttaacaaaaggtcaccataaatattcaatcacaatagtctctttcatttattggcaatttggagtcatttg

SEQ ID NO: 17130 - DNA, 764 bp, Arabidopsis thaliana
  unsure (1)..(764): unsure at all n locations
taacgtcttcgaattcaccggttaacgttgaaccgaggatggcagcgacacaaattgtgttttcgtctaccatttcgaccgcctttacagggtccatcacgtaatagtcttctcttaggttcacttccttaagctccacttcgaaataccttgcgaatttctcccagcaaacctgtattgaaccggaaattgagtcacacatataacttaaccggattgataaattcaattttgtcttggttaatatttcatcaatttttgttttggtttacctggacattagcaccggttacgatattgggcttatcataaggaagcccttgggccttacgcttattctgccattgtctcttaaaagccaaaccggccaacataatcgcctccgacgatccgacggtgccaacaccaacggcagcttcaccgtcaccaagcggcgcgttgaagagacgtgctatcatgttaacacatcggttctgaagctcagtggtgacagggtactcgtccatgtcgacgtagttcttgttgatggactccatcatgagcttgtcacattctggctccatccatgtggtcacgaaggaagctaggttcagccttgggttaccatcgagcattagctcgtcgttgatgatttggtaagctgcttcttttgggattgagtctcaggcatttcgaatctaatgatgacatgatgatacattaagttanaatacganacatgtccttcttatagtatatacacataataaatctacacataacac

SEQ ID NO: 17131 - DNA, 573 bp, Arabidopsis thaliana
tcccggcagcaaatggatctttcgaaccaagttaaatgctgacagatcactacaaaagctgaaagcaaggttagtggctcagggatttaatcaagctgaaggcatagactatctcgagacttacagtccagtggtgagaacagcaacagtgaggggagttctgcatcttgcaaccataatggagtgggacatcaaacagatggatgtacaaaatgtcttcctccatggtgatctaactgaaacagtctatatggctcaacctgcaggttttgtagatccagacaaaccagatcatgtctgtaagctacacaagttactgtatggtttaaaacagtcacctagagcctggtttgacaagttcagcacatacctcttggagtttggatttcattgcagtattccagacccgtccctctttctcttcagcagaggaaaggatatcattccgctcctcctgtatgttgacgatatgttgatcactgtaacagctcagattcacttgccttattgcttgcagaactaaacaaaaggttcaagatgaaagacttcggtcaaatgcactatttcttggga

SEQ ID NO: 17132 - DNA, 1028 bp, Arabidopsis thaliana
caccaatgtatacaatcagcgtgatgcattggatcagccctctgctcagcggttaggatcttgccacctgtctcggtgtaaactgatgtgtgagcgtcgatgcgatactcagagagctgcgtgatgttgatgactgtcacatgcgtagtcatgtgctttatcacgcttgacactactttcatcatctgcttgttagagcctgttccccaaaacttcttatcttttatcggtttcgtctcgttgaaacacttcgtgccgtttggctttccccaatccgcacttctgaacgttttacataacactttacgttaatcacaaaccaaacacatcaaaacatataataaaactaaatgtttacctagtatgagtaggagacatggtggtgaagaagactctggtcttattagggtcaacggtggagtctacccaattagcccatgtcttgagtcctagcctgtaagccacttgtgtgtctagtgcctctgcaccactctctccatttccgaaagaaccccacagagctttcatgcggagaccactcatccaccaaacataagtgttgaaaaccaaaatatcagctccttcccaaaacttagctcgatctttcactgagtccactttcactatccgtttctttggatccgaaatcacaggtatatctgtgtttgattcgacgatatacggtgcccaatagaactctatagtcgcattgtattcctatgaatcaagaaaaacagagaaacataaaataaaaatctaagctttgcttgtaatacaaggtactgtgatatctgacctaacaaggtttgcgttgtaacgcaagctaccatcacttaacgtacctttgctttaaatacaaagtatttttggctacgcttcattgatttttctccttcgggtattattgattccaccaaacacacgaacgattcccattggcttcgttgcaacgaatctcccacaaaaagtagtcttttcctctgagtttgtcattgctaactcggactaaatctgtttggaatgaaatg

SEQ ID NO: 17133 - DNA, 1682 bp, Arabidopsis thaliana
  unsure (1)..(1682): unsure at all n locations
ctttctggtaacatgttctctggcaagatcccggtttcattgcagagtttgaagctaaaccagctgaatctgtcttataaccggttatcgggtgacttaccgccttctttagcgaaagatatgtataagaatagcttcattgggaacccgggattgtgtggggatatcaagggattgtgtggctctgagaatgaagctaagaagagaggctatgtatggcttcttagatcgattttcgtacttgctgcgatggtgcttcttgcgggtgttgcttggttctacttcaagtacaggactttcaagaaagcaagagccatggagagatctaagtggactctaatgtcgttccacaaactcgggttcagtgagcatgagattcttgaaagcttggatgaagataatgtgattggagctggagcttcaggtaaagtttacaaggttgtactcaccaatggggaaactgttgcggttaagcgtttatggacaggttctgttaaggaaactggagattgtgatccagagaaaggttacaaacctggagttcaagatgaggcttttgaagctgaagttgagacattgggtaagattaggcataagaacattgtgaagctatggtgttgctgttctacaagagactgcaagctcttggtttatgagtacatgcctaatggtagtttgggagatttgcttcatagcagtaaaggaggaatgttgggatggcaaacgaggtttaagattatcttagatgcggctgaggggctttcgtatcttcaccatgattctgttcctccgattgtgcatagagatattaagtcaaacaatattttgatcgatggagattatggtgcaagagttgctgattttggtgtggctaaagctgtcgacttgaccggaaaagctcctaaatcgatgtcagtgatcgctggttcatgcggttatatcgcaccaggttagtcttatgattcaagttaaatgtgctttgtttaatcaacagttttgcttaaggtaataatgctcatttggtacatgttgcacggagattcagatgaaccacatttaagttttattagttgagacttaaatgagcattcactatctattgagacatgtctgaaaccatggctccacaacttctcacttgtccattaatggaatttgaaactttttgtttgtttgtctgtttccctccataactttcatttcaaacttcttgcagaatacgcatatacgcttcgtgtgaacgagaaaagcgacatctacagtttcggggtagtgatccttgagatagtaactaggaaacgcccggttgatccagaacttggggagaaggatttggtgaagtgggtttgctctacattggaccaaaaaggcatagagcatgtgatagacccgaaactcgactcttgtttcaaagaagagataagcaaaatcctcaacgttggactcctctgcacgagtccgttgcccattaaccgaccttccatgaggcgtgtggttaagatgttgcaagaaattggtggtggagacgaagatagcctacacaagataagagatgacaaggatggcaagttaacaccttattacaacgaagacacctcagaccaaggaagtatagcttgagacacaaatggagaaagaaaagtgttttgcccanaaaagctctctcaatttttggtgcttga

SEQ ID NO: 17134 - DNA, 625 bp, Arabidopsis thaliana
gaattcacaaaccccattgttagcttcatgacgatgttcttcgtcgatatggtgacacaattcaactaaatcataatcacttgcgcaaaacgggcatggatactccactgctatatcgtcgtcaacttcttcaaactcttccaaatcttgataaggccctgaaatattcaccactaattaactcgagagcaaaagagaaaaaaaaagtcttctctcatctaaaaagcaaaacgtaaagctacaatttttaacttaaacgaccaactacaaaaagtcatcaaaacagaactcaactcaatcgaaacccaattaagaccaatcttcaatcataaaccctaaaaatgaagtttgaaagaaaaattgaggggatttggataataaacctgattgatacttagcagcagtttccgatcgatagcttctagaagaaccagatgagctaacgcaccacatatcgtcttccatctgctactcccggctcaaccctaacgacccattctttaggctctttctcctccacaaacacaatcgggtcgacccggtttctcccactcgccgatttccgagtcgcttcgccgctctaaatcccttttagtctcgcttccatctcctttccccaaaccct

SEQ ID NO: 17135 - DNA, 758 bp, Arabidopsis thaliana
gctctacttcttcgcccatttctcattgaagttcaatttcgcttcagaaatctctcaaattgatcggattgagtgtctcgtctaccccaatttctgcaaattacgcttcggttttcttggttctgcataaacgcgattgcgatgatttctaggtttctgcttcatgcctacatgtgaagtaagctcgtcttagcctttgaaattgatctagtttgggaattttggttgatgttgaagtcaagtcactgaaggttccattagaaattgaggtttttctgggtagtgaaaagagggttctttagggtttgagaaaagaatggatagaatcagtaatttaccagatggtgttatctatcgcgtgatctccttactttcgacaaaagaagctacttgcttgaagtatacctccaagaactggctgaatctggttaccatcataccgattgctgttttcgttgattcctcggcgtctgccattagtgcaagtttcaaagatttcgctgatcgaataatgttagctcgacttgccagtcaccgtattaggagattctctctaaagttgcagtctttgaattttgctcagtataaaactgtcaatgattgtttacgcaatgtgttggagtgtggagtcttggatcttgaactggacatcaatgtcagaggagattactcactgccttctgagatctcacttgcaagagcgttgtgaaaatgaaactagggtctggttttgttattgacattctccctaagaatgc

SEQ ID NO: 17136 - DNA, 621 bp, Arabidopsis thaliana columbia
gaaagattagggtgtgtaattactgctacaaacagtgggaacaggggatagttccccctgataatggggcttctattattagccttcattttagttcatcgccttctgctagaagcgtcgcaagtactacctctaatagtagcaactgcaccattgattcaactgctggaccttcccctagacccaaaatgaatccccgagctagccgtcgtgtctcgtcaaacatggattctgaaaagtctgagcagcagaatgcaaaatcgcgtaggagctcagatcattatgggcatgtgttagattcttctgataatcaagttgaattctttgtcaacaggtaacttttttctttttgtgtgtgtatatataaacgaccgggtagcttctattgcttaagagatttgcatgatgtccatcaccaactgtttgtgttatactgggtcttttcaaatgattcactattgtctcaatttgaatttattagttgagttgctcattttcgtgattagtagtggcaggagtgatggtgaagctgatgacgatgacgattatcaatctgattttgacaatcttacgctcaaggaaatgactactatggtgccacatcatcgatgaagtagacat

SEQ ID NO: 17137 - DNA, 679 bp, Arabidopsis thaliana
aaggttgcgaattggccttagaagatcacggagtacaactatatccgccaatgcaacggtcatcccaccaccggttaaaggatgtctcatgttgaatgcatcaccaagaagaagagctccaggagtaggaatcggatcagctggcatgcttcggtttggcatggttctgatattacctttctcaacagcggtgatgaatgcttcacggaccttggttggtacttgaggcgcaacccgtgttttcagatactttgccatttcaccatttgcaatgggaggaagtttttgacccggtacatctactaagcaacggacttcagaactgctgatgggatacattaagatgggtgatgggtcccgagaacaacgtgcccgtgatttgcaaatggaagttcacagttctccaagacaagacccacaaaagtagatggcacatccaccttaggtttgcaaagagagcgacgcaagtctggagaaacaaccatcacatacaattgtgagaggagcgaatgatctagactcattgccctcttgtgttctgtatcgacccgtttaattgcccgtgttcttcaacaacgacgtaaccgtccttagtccaatcgtacactgatcacaagcaaaccgttagagcaagctggatcaattaaagaacaatcatataaagattacttgaagagta

SEQ ID NO: 17138 - DNA, 489 bp, Arabidopsis thaliana
cgtcgttacattcaatgtctctcactctatatataaagcaccgctcatctctcaagagtcgcctatgttgattttcgtggttacgattcatcttcagggatcaaggattagacttaatgcgattaagcaaatgggtttttcacgatgactctccttgttgttggggagattcaataaatggactcacaagatcacaaagcacctggctttgttgacatagtcaaatcttggatccctagaaagagtgagtcctcaaatatgtcgagggatttttggatgcctgaccaaagctgtcctgtgtgttatgagtgtgatgctcagttcactgtgtttaatcgaagacatcattgccgcctttgtggtcgagttttttgtgccaaatgcgctgcaaattccattccatctccatcagatgaaacaaaggatagtcatgaggatcgagaaagattacgagtgcgtaattactgctacaaacagtgggaacagggg

SEQ ID NO: 17139 - DNA, 1283 bp, Arabidopsis thaliana
ttttacttttttcactttcgaaattttaaccaccggattgcgtaattaccgtagtgagacgcggaacctttattggaaaccggtaatcccggtttaaagtttcttaagcagaaattataaaaaaaaagagagaataaaacataaaaagagcaccgaacccaaaccaaagtagaagaaactgacaccatctctgtctctctctctccgtatccaaaaagagaaagaaaaaaaatctcaaatcaaagaccaagccagtcaccggaaaatgctgacgtgtatagctcgttcgaagcgagcaggcgatgaatcctccggtcaaccagacgatccagattctaaaaacgccaaatctctaacatctcaggtaaattgaaataaactcactcttctcctccgtctccaattttcgtaattctctcttctgattgagggtattttcgtcaattcaatatcagctcaaagatatggctctgaaagcatcaggagcttaccggcattgtacgccgtgtacggcggcacaaggtcagggacaaggacaaggtccgatcaagaacaatccgtcgtcgtcgtcggtaaagtcggatttcgaatcggatcaacggtttaaaatgctttacggaagatcaaacagttcgattacagctacggcggcggtggcggcgacgcaacaacaacagcctagggtttggggaaaggagatggaagcgagactaaaagggatttcgagcggcgaagcgactccgaaatcggcgagtgggagaaaccgggtcgacccgattgtgtttgtggaggagaaagagcctaaagaatgggttgctcaggttgagcccggagttctcataaccttcgtttctcttcccggcggtggtaatgatctcaagcggatacgtttcaggtacgttactgtgcaccttacttcatcctacggttacgattgttttgttgactctgtttttcttatcgtacggttaggtttagtttggcttcgtcgttgcctcgtttgtttttagcacgtttgttttggtcgtgattttgtgagaatgttcggaaaatgcttgattcttaggaacacagaactgaatttgatctcttattttttttctttataaaatatggatagagattaaattgaaatttagcgtagatgaatatggttttgtggattccatgtctagggaatatattgttgaaaataagtgaaatactagagcatacgaatctaacaacaatcatgccatgtcttttgtagaaaatctactacctaaatttttaaataatatagt

SEQ ID NO: 17140 - DNA, 581 bp, Arabidopsis thaliana
tattgaaggaaggaagaagagtgcacgttatagaaagagatttttctgagcaagacagaatcgttggtgaattgcttcaacctggtggttatttgaagttaatagaacttggacttgaaggtagagactaactaatgagcttaaactgttatatatatatatacttggaatcgatttttgttctatagttgcgttttgtgattgtagattgtgtgaagaagattgatgctcaacgagttcttggttatgttctctttaaagatgggaagcatactaaacttgcttaccccttggaaacgtttgattcggatgtagccgggagaagtttccataatgggagatttgtacagagaatgcgagaaaaagcccttactctttcaaagtaatctttatattgattgtttctttaattgaatccagcttgactctaacggtttgtttgtgaatcagtgtacgattggaacaaggaacggttacgtcgttgcttgaagaacacgggacaattaaaggggttcgatacagaacaaaagagggcaatgagtttagatcatttgctccctcacaattgtatgtgatggttg

SEQ ID NO: 17141 - DNA, 1223 bp, Arabidopsis thaliana
tcaaatttatttacacatactaacattttgattcataaaacatttataaaagaagaaagaaacattttgtggtaaaagttgattagttacaatatttgttttttttttgctaaacatgggctacttttttgtttgtctcttttgattactttggtcaaagacagatgcatgcaacttaattgtatttatttttatgttatacaaaaattaaagatccaaaattaataaaagctggtatatatgtttataatgaataggagcttgtaatggcggcgccagacaatccatcaaacgccgtggaatgggccatggcggagatggtgaacaaaccggagattctccgtaaagcaatggaagagatcgacagagtcgtcgggaaagagagactcgttcaagaatccgacatcccaaaactaaactacgtcaaagctatcctccgcgaactttccgtctccatcccgtcgccgccttcaacctcccccacgtggcactttctgacacaaccgtcgccggatatcacatccctaaaggaagtcaagtccttcttagccgatatgggctgggccgtaacccaaaagtttgggccgacccactttgctttaaaccggagagacatctcaacgaatgctccgaagttactttgaccgagaacgatctccggtttatctcgttcagtaccgggaaaagaggttgtgcggctccggcgctaggaacggcgttgaccacgatgatgctcgcgagacttcttcaaggtttcacttggaagctacctgagaatgagacacgtgtcgagctgatggagtctagtcacgatatgtttctggctaaaccgttggttatggtcggtgaccttagattgccggagcatctctacccgacggtgaagtgagatgagacgacgccgtatatattttatgaaactacttttatataatcgcccaaccaagtttggtcaattccggttaccagaagataattggtcaaattgtgaacaaacttgtgtgttggtttcttggttctttttgggacacttgaattgtgtctcctttacctcttcttttgttgttttcaataaaaacttttattaccatttcaataaaaagatcatcaaattaacaaatctgcctgtaatatatatatatttggtcaatttaaatctaattgagaatctatgacatttgtttttactgttaatataaagctctgtttcggttttctggtga

SEQ ID NO: 17142 - DNA, 1202 bp, Arabidopsis thaliana
tgcatccattgtattcaaggacaacagattatattcgaaaaatcttgttcatggtgctaagacgctttataggtttgcaactacttctaggaatagatacagtcaaaatggtaaagagtctagcaaattttataactctagcatgtttgaggatgagctattatggggtggtgcttggctgtattatgctactggaaatgtaacttatctagaacgagttaccagtcaccacatggctgagaaagctggtgccttcgggaatagtccttattatggcgtatttagctgggacaacaagcttccaggggctcaggttagttactctatgagacattctttgttctgtttttggaatttgtagtcaatgcttagtttctggatttatgtggtcttttgaagttgctgttaacacggatgaggctgtttctgagccctggatatccatatgaagacatgttaagcgaatttcataaccaaacaggcagagttatgtgctcttacttgccttattacaagaaatttaacagaaccaatggtgagttgtctgtgaatttgaggatttgcacacgttttgaaaacgtgatcaagaaaataatctcggtatcatctctgcaggaggtttgattcagttgaaccatggagctccacagcctcttcaatatgttgcaaatgcggctttcttagcggcactattcagtgattatctagaggctgctgatactcccggatggtactgtggtcctaacttctatactactgaattcctacgcaacttttcaagatcgcaggtatgattcacaaatgaaggaaaacaaacaagattttgaaggagcttatctgatggaactttgtgtcttttgttttggcagattgattatatacttggtaaaaaccctcggaagatgagttatgttgtgggttatgggcaacggtacccgaaacaagtgcatcacagaggagcttcaattccaaagaacatgaaagaaacctgcacaggaggatttaaatggaaaaagagcaaaaagaataacccaaacgctattaatggagcaatggttgctggaccagacaagcatgacggattccacgacatacgaacaaattacaactatacagagccgactctagcgggaaatgctggtctagtcgccgctctggtggctttatcaggggaaaaagcggttggtggtattgacaaaaac

SEQ ID NO: 17143 - DNA, 1113 bp, Arabidopsis thaliana
gtcaattcttacttagtctaaagccctatattgctagtgtttgttgagatttcaaggacgatgtactactccttactttttgacttttgaattctctattcaacattctacttgaacacaatactgattgatcaatgaatattatgatttaagaggcagaattaacttagagttatcacaaaatgttctgccttcaaattgtagccgatggccgataataataagcaaaagagagattgaatttatgttttgacacatttgatcaaagaaaggtactagcgaggactactaagcacatcgagaaacatacggtttattgagggcaatctcatttgctgctcctgaactcttcttctcttgagcagaggctctggagacgaagatgatgaggacactgaagcagtagtggagacattccaggagctatttgagctgtcatcaaagtctaatacaccacttggactgtcctgatcaaccaaattcatcatcctcttcttgcttggattgtgctcaacaacagttcatagcattcatttactttctcctgtgaagtcaatgctgaatcagattctcatctttaacattataactggactaatttacaaagcctttttaagcaacagacctgattgactttgagtagagtcgttatttgagattggtattcaacttcatcacatggcttcaattcctcgaagacaaggatcattattgcagtagctaagacagaagggaagtacctcataaacctcgtatctgcgaccaagactcagaatttaagcaacaagaatccaaacaaaaacatcgtaaaggttttaaaatggaaacctcaccagcaataacagagatcagaagacgcatcacacttcctacagaagtctaattgctggtgccatttagagccaaatcgccggataatgtgatcaaagaaagagattggagtcacagggtgcattctccattgaagagtagaaagaatcaaaagctccattctttgaatcgtcttagcttcaaagagatatcttgcttcttccaccttaaaccacaaatacacaacaaaacaactccattagaactcagcatttcagcaaacattataagaaggagagagag

SEQ ID NO: 17144 - DNA, 1295 bp, Arabidopsis thaliana
tatagaaaaccggatattcttaccacctaatagtgaaagaactttttttgtaactattattttgttgttgtgatataggccggagtgaatataaaggagtggacaaaattatctgtggcgattagagaagccaacaaaagggttaaatggaacgatagagttccatatgcttactggaaagggaactctggggttcatcgcgaaagaggaaaccttatgaaatgtaacttctccgataagtatgatcccatggttcgtctctatgagcaggtatatttgtccatccctttccagcatccagtttaagtgaaatttttgtggaggtctatctcagagcattacagtactagctcacgaatttatagaaaataaatctgatacgtaatagtaatggcgatttcaggattgggggaaggagagggagatagggtttaaaagttcaaacctagaagaccaatgcacccataggtttatatgcaatgaatagctatctcatactattcatgtttaaacttttttggattttgttaaatctttgttgatttggggatttggaattggacattaaggtacaagatctacatagaaggtcgagcatggtcggtgagcaaaaaatacatactagcatgcgacagtatgactctactgatcaaagccgagtacttcgatttcttcggaagaagtttggttccgttagaacattactggcccattaaatctcacgagaaatgtggtgatctcaagttcgccgtggaatggggtaacaacaacactaagaaggtaagcaacatctatataattatatatatagtatccaagatcttatatctatttcaatcatcgataatcgtttgaaatctatatatataggcgcaagttatagggagacagggaagtgattacattatgaagaacctagagatgaagtatgtgtatgattacatgttgtatgtgttgcaagggtacgggaaactaatgaagttggatgtgactgtgcctgaaaatgcaaccgaagtgtgttcggagacgatggcttgtccgatcactgacggtggacggatcaggcagtgcatggacgactcattggttatgtctcaagcgttaaatcggcttgtgatttgccgcggccttatagagatgatgagctgaagaggtttcttgagaaacaagaaagtgcggagagaaaggttgagaagtggaccaatgagtattgggaggccaaaacaagacattgtcacaaagaaagtaagtacaattcacccgggagtaatgcaagtggtatacaatattaaatg

SEQ ID NO: 17145 - DNA, 738 bp, Arabidopsis thaliana
tcatcttcttcaaaaggtggaggcatctcacaagtagccttaacgctcggagacataaccaatgagtcatccatagattgtctcattcggcctccattgattggacaagccattgtctccggacacacttccttggctccttgaggcacttctacattcatcttcatcaacttcccatagctttgcagtagatgcaacatgtaatcatacacatacttcatctttagattctttcgcacatacccacttccatttctccctatagctctggcctataaaacatgagaagatcatagcaaaatgttgttgttacagtacttctcttgctagtttaagagatattattgaatcttttgttaccaaattgttctagaaatctaaacatcaaagaaaagatagagttgtaacaaaacaaaaaaaatattttgtttgaagtttctaaagacacaggagcggttatgttgttatatgatacctttttggtattgttgttgccccaatggacagcactgacaatgtcactacattttgcttgaggtcttatgggccaataatgctccattggaactaagcttctagtgaagaagtcaaagtaaaatggcatcacaagaagagtcatgctgtcacaagctaatatatacttctcactcactgaccaagcccatccttctacataaatcttgtaccttcattatacaacaatctaaataagcccttattactaatattaaaattgaa

SEQ ID NO: 17146 - DNA, 620 bp, Arabidopsis thaliana
cccaagcatcttgaatgttgaattccacctagttgccacatccaacaacaaatcagctttcagatcaataccaacgttttccacacactttacaaataagatctcacgatgttctgatcctttaacgtacttgatactctctctaatcttttctaatgtatcaccaatccctttcagcccaatttgaacaatgatgttgagaatgtgagctgcacatctaacatgaaaaaaatctcctttacacaacaaatcatctcggagtacaagctgagattttacaatttcttgcattgtgtcattgttacccgcgttgtctaccgtaatggagaaaactttcttctcaattccccagtccttcaatttctgtcaatgtaatgtgttgtaagacacatataaccttcatgagtgagcgcagaccacaaatctgtagttaaactaatccttccaggaagttgagctaactctctcttcagcttatccgtctcaatctcataaaacttataaacatctgcagcagctgtgtttcgactaaaaaacttgacatccgcatttaaatacttccacgtttctctaactctctcatactccacataagaaaatggaagatcatgttggataat

SEQ ID NO: 17147 - DNA, 884 bp, Arabidopsis thaliana
tacgctttatctcatctgataatattttaacatatccatatgatatgactttgcaaatatggtgtcagcttatagctgaatttggagttggtgttactgtatttgttcgatgtttcgtggaccaaaaggcgatggaacatcttataactgaaaagcttgggcttgggttctcccgtcctccatttgccgctgttgtggtaagtattctcaaagaaaatactggtttattctgttttctatcaatgcttagtttccgacttgagcttgctttctcattctgcaggttgtttgtacaactctctcgttactggctttgatacctcttggggaacttttctttttccatatgattttgatccgaaaggttttgtatatactttttcttgcaccattttttgaattctacgctccactgacaaacacataaggaaacacaaagctgagcgttgatatgtcacttttgtggctgtagggaatcacaacatatgaatatgttgttgccctgagagcgcaaactgaaccacttggaacatctgtagatgagctagaccaaacaagccagtatccttcacctgcaagctcagctgtgacagccacgagtgctagaagctctctcggattgagcattcaataccgtggtgcctccttgtgtacacccccaaacatattcgtggaccaacaggtaaaaacaccaaatctcttctgttttccgctttcttcagttgtataataaattttgttttgccaggacgatgttatccagcatttggagcctggacctgtacgatccacaatagatcccgactcactttcacagaagaagccacctcagcgtcaacaagtaaggatcaatccatggaagctggcaaaacttgactcaaaag

SEQ ID NO: 17148 - DNA, 545 bp, Arabidopsis thaliana
taagaatctttatctttttggttataagataagaatcatttattaattgtcaacttgcttaaactaatgaaaatattttacatattaattttataggaacttgtaatggcggcgcagacaacccatcaaacgccgtggaatgggccattgcggagatgataaacaaaccggagatcctccacaaagctatggaagagatcgatagagtcgtcggaaaagaaagattcgtccaagaatccgatataccaaaacttaactatgttaaagctattatccgagaagctttccgtcttcatcccgtcgccgccttcaacctcccacacgtggcactctctgatacgaccgtcgcaggttaccatattcctaaaggaagtcaagttttacttagccgttacggtcttggtcgtaaccccaaggtttggtctgatcacttagcttcaaaccagaaaggcatctcaatgagtgttcggaagtgactttgacggagaatgatcccgttttatctcgtttagtacggaaagagaggatgtgctgctctggcgtta

SEQ ID NO: 17149 - DNA, 644 bp, Arabidopsis thaliana
atataacccggttgttgttccatgtatccgcccattggtgctgattcgggaatagggaaattgccgagatggtggtggggaggagagtggtgatgcaacgaatccaaatccaagtcgtcgtcgtcttcttcatcttcgtcggaatctgaatcgaattcgagatgacccgaatcagaaccggaacccgagtgagcgtggttgtggttgtggtgagaagaagcaagcttttgtttttttggggaatttgttgcttcgtcgtcaaggtcaccttttctctgaggaggaagattaagtcgaggagaatcaccgacgttagcgccgccggaagcgacgaaacggtggtggtgattgatgaaaagatggagagagtgaccgatttctcgaagcgaatgagtgtaagccacgtgtgattcagctaaagcgtaacgttgatgaatagcagcttctaagaaagcacagcgttcacggcaaagagcaaccgccggaagatcgtcaagcttagaacttgtacaacccataacactcaataatatgattcaaacccaaaacaacaaagaaaaatagaaacaaaaaaaaaagaatcaacttaaattaaattataaagacaaaaaaaaaagagagagagagagagagaccaagatttg

SEQ ID NO: 17150 - DNA, 991 bp, Arabidopsis thaliana
cgttggaacaaccaccaccacatctgataatggcaaatgcgatcacatttttcaagctcaacaccggcgctaagttcccttcggtgggtcttggaacatggcaagcttctcctggcctcgtcggtgatgcagtcgccgcggctgttaaggttcgtctttcgtaggttgaacttatttgcttcccatctcttgtagattctttggtttgatgataccatactctgtttcaattgtttttcttaggtttttaatgctttttaactagtttgatgttaaccctaattgcagattggctatcgtcacattgattgtgctcagatctatggcaacgaaaaagaggtaaaacaaaaacagatgtttaaattagctaatctgaagttcaatctttttggtatgagttttgtggatcttgaattgatattacatttgcccttcaattcttgactgtcttgttcctctttaagtgtcttttgatctgctttatttgttatcttgtggctttcctctgttctgttttgttgtaagatactgaaaagtgaatactccttaccatgctcagattggggcagttctgaaaaaattgtttgaagacagagtagtgaaacgcgaggatttgttcatcacctccaaactctggtatctttttttcccacctaatcaaatgcatattatgtgaaaaactgtagctttaattattcttacatatattctcaaattgtgtaggtgtactgatcatgaccctcaagatgtcccggaggcattgaacagaactctcaaggatctgcagcttgaatacgtcgatctttatctggtacacatcacttccttgtaactttttttggaatgaatgtaaaatctattcaaccaaaaaaccttgtttacgatatatcattttttcatcgaagtagcttaaaacagagtatttaaattgcagagcaagatacacttccttgtaaaactacttcttgtggggaaagattattgtgtacag

SEQ ID NO: 17151 - DNA, 502 bp, Arabidopsis thaliana
ggtaccgagctgtgctctaaagaccgtggcggtgaacatgaatgacttacccgacggcgtaacagttgcagaaaacgtcatcaaggaaacatggattgaaggcgcgataggttacaaatcactggcttcccgttccggtaaagacgttaacgtcatcatacgcaacgccagcggtcagttccctcccctcggtgcggatatccgccaggatgacagcggcattagcgtgggtatggttggcgaggaaggacatgcctggttaagcggtgtcgctgaaaatcaactgtttaccgtggtctggggtgagcaaagctgcattattcatctgccagaacgtctggaagacacgaccaaacgcctgattttaccttgtcattaattaaggaaaagagaatgacatttattaaaggattacccttaatgttgttaaccatcagcttgggttgcaatgctgcggtgcaacccgatcgcacacgcattgtgtttaacgccaatgacaaag

SEQ ID NO: 17152 - DNA, 542 bp, Arabidopsis thaliana
tactcatgacgcgtagagaatagagctatgtatgcatataatatgatgccaaaatgttctatttctttcgcagcaaactcaagcagaaaaaagcaaaatacaggaagagagaacaagataagtaactgctaaccttatacgcatatatatcttttcgtgaaaaagtgacaagacaatccccagttttaatactggaaactgatgaaacaggaaccttcaaagggactaatggtgaaagcctctcataggtatgaacctgaattcaaaataaaagggatcaagaggtcgtgattacatcaagagtattggtatttaattataaacgagaaataattagagaagaaaaagggactctagctcgaataaacatgatacctcgacatcatctccagttactttcagtatatcttcaacaagaggtacgacagctggatcgccacatgaatgtagctcatcagccgcgattccaagtaaagcacgagtaaatgcaaatcccctcttgtttacatcccaccatctgaaattagggacagaaaggatga

SEQ ID NO: 17153 - DNA, 724 bp, Arabidopsis thaliana columbia
gacactacattcaggtgttgactctctggtgtcgaacatactcgattcttcttcgacaattgtcgactagattgtcatgaatctggtgtatcaagcgattctgtaaatcagcgtcaagcctggtcgattttgcttcgccacagcttgattgctcatatatatgtaatggtgtcgagcgatacaacggggtcttgtcggtcgacactgcctctgctacttcaaattcaacgtcactttcctcaaccttcacgaactcataaaacatgatgctaagaagtcgttaggttgctgttagtccatctagggagaggtctctctaagatccgtcttctgaccttccagaattagttccagtatttattctatgttgcttactagtgcgggtggagaggaagtgctttgtaagaagcaagatcataggttgttgtgaagctgaaattactggtaccgtgaaactgttgttggatatgagacttctaagtgtaacttgtcggaccattgccatagaaaccttcgcacccgtgttggtgtgcaaatctctgattctgaaaacctcatccaccaagataatcgacatcatccacaagtagattgtggactgcgtcaagcttagccgattaaccgagcaatcttactctctatcatgttcatcgctggttccacgattggcgattagacaaacacgtgatacagacaagaaacagaagcgagaaagcgtaagtaa

SEQ ID NO: 17154 - DNA, 569 bp, Arabidopsis thaliana
tgccataatttcaccaaaaaggagtggcctggtagttatgctgatctaccgctcatttctgtcaatgaaaaggagcctgtagttgaacacaagaaacatatagttatctggaaaaggaaactttcgccaacttcttcttctaaaggaactccatcaaaaactaaagttagtacattcacgcgaggcaggaagcgtaattttgaaatggttgatgatgatgaagcagaagataatgatgatgaagcaaaagacataaaattgtgggtgaagtctcagttgtcttctataaggcatgaatttgcggagagtgttaagaagttaagatctcagaatctaaatcttctgaaaaagatcagggttctgcaatctgtcaagtcttacaggtcaagaccgtgtactcgtcatccatccaagaaagtacgctcacaaacacacctctccacagtctctcaatctcctgtcaaccctgttgtagagcgacaaaaatcacaactcccccgttaccaccattaacttcattggaagggggagcaatgttttactgattcagtcatgatggagacgaacag

SEQ ID NO: 17155 - DNA, 822 bp, Arabidopsis thaliana
gttttcgaatatgtttcctaatgctgatgagcatagaagagttctggataagtatgcattattctcgatgaggagtggtgtttttgcagatttatcatgcattgtagcgatgagtactatggaacctaagatttggtaggctaactttggtgctgaaactccatatctccagactttggctttgaagatactttgtcaacctagttcatcttcttgtgctgagcacaattggagtacttacaacttcattcattcacttagaagaaataagttaaatccaagccgagctgaagatttggtgtacatccacaacaatctacgtcttttatcaagaaattgtggtcaatatgaagaagaaaaaatcaagatgtgggatgttggtggagatacatatgatactagggaggatctcggcttcttggagtttgcggctctttcattagatgagccttaatttgaaaatgaattgatcaatgagtagcttatttttattattctttaatattttatactcaaatttcttttatgttaggatttatgagttactttctttatactatggatctatcgatatttttaatactattgttattgtcgtcccgatgccgtccgcgtatccacaaattttaaatatgccgtttttcgtccccgtccccgtacccgtctcggtgcagcataaccagttcaaaaacatcactattaactcccactgtcttgaaacaaatgttgatgaagcatatctttttagctcattctctgaaaccttgaaaccaacaattaccttgccataaaacagccaaaatcaattgtggcaatggtgag

SEQ ID NO: 17156 - DNA, 559 bp, Arabidopsis thaliana columbia
caagaaactataaaaattatgattaaataaaaacagaattaaagcaatatataacatcttatgtaaggcccttgcctttagaaattataagtccaagcaacaatatcactaaaaaacataccaacatgcaacaacataaatattgtttaactaaggcccttgccttagaaatttattgtaatgagtttaaaaccaacgaaaagcatgaaaaagtacgactctccttagagaatcaaacggagaatactcttctcacttatttcaagatttaaaaaaagaaaaaaacaccaaaagagtttagattttcgaactggtaacttaatcaaactctcactgaccatcattcgcagttaagcatggccttgatcctttgaacggcggcgtaaccaaggtattgactgtggtggcagaatctttcaggttaagatctgtatagtaactcggaccggtgacaaagatctgaaaagccaaagtgaggagtgtcatgctgccaccatcaacctcgctagaggaaggatggctgtcacgagagatgatgaaccggaaggagaattggaat

SEQ ID NO: 17157 - DNA, 580 bp, Arabidopsis thaliana
aaaatatcaaaattgatttaacaatcataagtttacaaaagttacaaatgagaacataacttatacactaaccaaactttttctgtatgcgtaacaaagaaactcaaaacatctttctctcttcttcttttactttaactgagaactataagaatatatctctgcctttctataagtttaccaggaacacaattcaacccgaaaccaatcctcaggacaaagagaaaccgttacaaagatgttacctcgaacagcaagagaatgtctttgtcccttcgttctcgttcttaaccaagctaacacgattcacagtcagctcctctttgtaagaatcagagttcaattgctttcgactaatgttgctatagatctcccgaataaccatctcgaaagccgtctttacattggtcgagtccaacgcagaggtctccatgaaaaacaaaccttcagactcagcaagactcttgccttcctcaacactcaccgctcttatgctctcgagatcacatttgttcccaataagcatttttgctactgttgtatcagaatgagctgcaccaaagattcatcattactgtca

SEQ ID NO: 17158 - DNA, 1847 bp, Arabidopsis thaliana columbia
atctttactaccttacaatctttcttcttctgttttgtttccttgttgtttaacttgtgagtaagtgatgtgtgggtaatgccatagccacaaagacatcataaaccaaattttgtctgtatttttttttacctaaaatatattagcattcattctacaattatgcagttgtttctaatacagtatgcttatttttcagtattactcatagattaaaattaacatttacctcacaaacaattatagaaatagaaagacatggaaaaaaaaaaatagaaagacatggaccacaaaataaataatatgtcgaaaacaaaatatccatttgacatacttatcaaatatcaatttattatcaaagattcaaaagtaattgatgtaagtacaaaaaaattgccgaattcttttgcttccacgcttcgaattgtgtattggacccaaatttatgtgtgtgacacaagataatcgttagtataggtctatctaccgtccgccgtttcaatctgacggctatcgtacaagccgtacaatatagactcaatctaacggtggaaatagaaagatcataaatccctcaaatctcacagttacctcaagtttttttttttttttttgttggtggagacgaacaacaacaacaccaacagaagacagaaatggcaaccgcagctctctccgccgcccgacccaaccgccttagctcagcctcctccgatgttcctctccaccccctatatctccctaccaagctccaatttccttcccgtaagactcagctgtggcgctccgccgcgattctcttacccacacggcggcgatgcgctccgcctagagctagttctcgcgccgacgattctccacccttcgatatgtctgtggagacggcgcttaaggttctcggagtctccgaaggagcttccttcgacgaaattcttcgtgccaagaaatcgatcctggcttctcgtaaggacgaccccaacgccatctctcaggtgactgttttcaattttcactctccaatcaacaaattcgctaattttctatatttgttccattactagttttagcttccatggaaagagatagactttcttgttcttaagcctcactgtaattttctcaggctgaggctgcatatgacatgctgctgatgcagagcctaaaccaacgccgagcaggaaaagttgtaagcaacaacattcgctacgctgatgttaaatctagtaaccctctgggaacaagtactgtgactcagtggatgaagaatccacctgtctctgttgatatgccttccacgagcgatctcgggatacaagctggagtctatggagccatgatggttttgacttatgtgaatgggagttcctttgaatcttctgggatgccttatgctggtgctgatgtgcccggacttatattggctagcagctttggggcttccctatactttatgaccaaaaagaaagtcaagctaggtaaatgataacttccatcttcttccacaagcgagcacctctgatgttgttatgtgttttgatacagggaaagcagctgcgttgacggcaggaggattagtggcaggtgcagtggtgggatcagccattgagacctggctgcacgttgatgtggttccgtttctgggtctccactccccagctgcagtcgtgagtgaattcatagtattctctcagttcttggtgtctctatgcttaaggtagaactttgtacattggcttatgcaaatttggctcaacctgtcacgctggtatatgtacttcgtttatatgcattttgtacagaacactcaaaagtaaacaactcctagacatccattttcatactcatta

SEQ ID NO: 17159 - DNA, 1121 bp, Arabidopsis thaliana
tgctaagcgagaaagaaatagaggtgctaaacagcttgatgcattcatgaaagtaagttcattgcatccttcgctgtgttatggtttaaattctgaaacgttaattgtctttaccaaatcagaaattgtttttttgtgaaaggaactggctctacctttaaaaggctacatggaaagttttcccaggaagaaactcttgcatccatatgaaaggtctcttattgacttgacacttggtgatggaaagtatgaagaggtatctatttttaagtaattcagcatcttagcctgcaactgattttagcaaaggcttatagataagtttttaggtgttaggaaaagttgatgttctgaggaagaaggtgcaatctgttggaaaggaacatgcttctctctgcgccaaggtcagactcctcagttccgtcaaaagcatattgtgtcttacattttagttaatcccatatactgtagattgtgattggtactacatcagtaaaggccttataagcttcataccgatcccatttttttcatcttattctatcatatatcagtgtaggaaaagttaaacatctttcaatttcgttgcaggctttgtcaaagaaggaggcagaggaacgcttgagcgaaggtgtggagaagctggaattggttttccaacaacaagggggagctgttgatgatttgctaactatagcgaaggttccttactagaatcttttgtttgtctcttccagtgttatcagaattgtatgtatgaacagagttacgcactttgcaggttttgagggctatgccagttgttgacttggaaatgccgactctttgccttgtcggagcaccaaacgttgggaagtcatcattggttcgcatactgtcaacagggaagcctgaggtctgccttatgtaccaatctttatatatgtgataataacttgcattgtctaatgcttatggttttttcggttgtcagatttgcaattatcctttcacaaccagaggaattctgatgggtcacatcgttttaaactccaacgatttcaggttgcgttgcttacttcgctgcgtctaatcactttcatcatgatagtagatattgaatcaccagaaacgcattgcag

SEQ ID NO: 17160 - DNA, 1745 bp, Arabidopsis thaliana
caggaggaaagacggaagatggaagcagaccttgcttctctcacttctctgactttcgatcgcgatctatacggaggtaacgaccgtgcttcctactcgacttctattgcacctaacgaggaggatgatgcgaatctggacaccactggttctcttgtggctcagcgcctcgcgtcttatactgctcctaggtcaattcttaacgacgtggctcgtcctcacaacgaagatgacgatgtgggatttaaacctaggcagagtattgccgaacgtgagggtgaatataggaataggagactcaatcgggttctttctccggatagagttgatgcctttgctatgggcgacaaaacgccggatgcgagtgttcgtacttacacggaccatatgagggagacggctttgcagagggagaaagaggaaactatgagactcattgccaagaagaagaaagaggaagaagaagctgctgcgaacgatcagaaagattctgctcctcctcctcctgcttcctcttcttcttcctcttccaagaggagacacaggtgggatctccctgaagaagacggtgctgctgcaaagaaggctaaagcagcaagttcagattgggatttacctgatgcagctccagggattggacgatgggatgccctactccagggagagtttctgatgccacaccatctgctggacgaaggaacaggtgggacgaaactcctacacctggtcgtgtgactgattctgatgcaacacctggtggtggtgttactcccggtgctactccttcaggtgttacttgggacgggcttgccacgcctaccccaaagcgtcaacgttcaaggtgggacgaaacaccagccactatggggagtgctacacctatgggtggagtcactcctggtgcagcttacactcctggtgttaccccaattggtgggattgatatggctactccgactccgggtcagcttattttccgtggtcctatgacccccgagcagctcaatatgcaaaggtgggagaaggatatcgaggaaagaaacagaccattgagtgatgaagagcttgatgccatgtttcctaaagatggatacaaggttttggatccgcctgctacgtatgttcccatcagaacccctgcgaggaaacttcaacaaaccccgacacccatggcaactcctggctatgttattcctgaggaaaaccgtgggcaacagtatgatgtgcccccagaagttcctggtggtttgccgtttatgaaaccagaggattatcagtattttggttctctgttaaatgaagagaacgaagaagagctgtctcctgaagagcagaaagaacgcaagataatgaaactgttgttaaaggttaaaaatggaactcctccccagaggaaaacagcgctgaggcagcttactgataaggctcgtgaacttggtgctggtcctttgttcaataaaattttgccattgctcatgcaacccactttggaagatcaagagaggcatcttttggtcaaagtgattgatagaattctgtacaaacttgatgagatggtaaggccttacgtccacaaaatccttgttgttattgagcctttgctgattgatgaagattattatgctcgtgtagaagggagagagattatttctaaccttagcaaagcagctggtttggcctctatgattgcagctatgcgtcctgatattgacaacatcgatgaatatgtgaggaacacaacagcg

SEQ ID NO: 17161 - DNA, 533 bp, Arabidopsis thaliana
tgattggaacttaatagcctaaatctcaaggtgtataaaatactaaaatacttgaacaagcttaatgttctctacatggtttagatatatgtaacatcacttaccgttaagctcttccattccttggatttcaagtcttatgatcgtgttcctctcgatattgtagtagaagacgtaggaaggcataaatgtagatgggtacttgtacgaaaacacaatttcattggtgcaactgccaaccattccaagaagtcgtagcttggtctcttctccaactacattcttccacagaggaggcaacatgtatacatgcttcgaccaatcatgtttttcagcgtcttctaggacccgcaactcgaaacttttacttgttccactaacaatatcggtagactcttccgtcatcaacaaacctaatttgccattgtagtttatcatagttgttgaactaggcaaatctctatcgaaagtttccatgactttcataaagctgaacgtctccgagctaatatcgaagcaaactactatagtaa

SEQ ID NO: 17162 - DNA, 925 bp, Arabidopsis thaliana
gaggaaagacgtcggtatgtatgccaattcataagtcaatgttagaaagggaaaaagggagcaaatattaatcctttgtttttgtctgttttctggttgtagtgagaacccagagtcttacttagaggagttgcaagctcagtacaaggaagtgttggagagagttgagcagaagaagcgtctgaaaacaaacgggtccagtaacgggaataacaagtctggaggtattgggcgaggcgagcgactcagtgctgcacagagggagagaatgcgtctgctgacgacagcagcctttgatagagggaaaggcgaggatacgtttggttctagagatgaagattggcagctctacaaacttatgagcaaggataatgacgatgatgacgaacaacctgattcagacgaggcagagttggctcgtttatcatctagacttcaggaaattgatccaacatttgtgcagaaagtagaaggagaattgagtcagacatcaggggaggtgcccgcgtacgcccattaacagaggaagactacaagatagtgattggtatagaaagattccgttgcccagagatcctgttccatccaaaccttattggtattgaccaagtaggcttagacgagatggctggcacatcaatcagaagcgtaccgcacgacgagaaagagttagaggagaggctaacgagctcgatactaatgacgggcgggtgtagccttcttccagggatgaacgagcggttggaatgtgggattaggatgataagatcttgcggatcacccattaacgtggttagagctatggatccagtgctggatgcatggcgaggagcatctgcatttgctgctaatttgaacttcttggggaatgcctttactaagatggattacgacgagaaaggtgaagattggcttagaaattatc

SEQ ID NO: 17163 - DNA, 839 bp, Arabidopsis thaliana
aagtagatctctttccttcttctatccctaaatcatgacaattaatcatctttctgccccggtgaaatctcaatcttataaataactaattaagaatttcgtgttggttgggacatgggcagaatttcgtgtttcttaccggagaagctgctgttacgattgactgcggtcgtgttgggaggcggtcccggagtagcggatactctgtcatggtctggtacggagcatggagagtctacactgggctcggcttattctctactcatggaggagggatcgcagactcaggacatggagcgtttcttttccaggatatggagagtattggctccggaaagggtacgagtttttttatggcttgtagggaaccaggctatattaacgaatgtggagagagctcggagacacatgggggataccgacgtttgccaagtgtgtagaggagcgaaggagacaattatacatgtccttcgggattgtccagcaatgagtggtatttggttacggttagtgcctgcccgggaacgtgagaggttcttcacaagatctctcttggaatggctttatgagaatctacaccagaaagaggatccgagtaggggagggtggcctacgttgtttgctatgtcgatatggtggggatggaaatggagatgcatgaatgtgtttggcgagttgagaccatgtagggatcgggttcggtttgtacgggacatggctgcggaggttggggcggcgtacttgaaagtcaatgcgggcaggaatttgggagaaagagtggagaggcagattgtttggaagaagctgacgaacgatgggcaacggtgacacggacgggg

SEQ ID NO: 17164 - DNA, 1502 bp, Arabidopsis thaliana
tcttacgatcaacaatgttcatctccttgaacgtgtacctgatgtaagaaactgtaatcattgtcgctgtaccttttatttcatgtgctttcttgactttttttagtaggtctgattttctgaggctgtgtcttcagatgactgttatccttatgatgtctgtaaacaccaatgaggatggttggggtgagtgggatgatgaagtgagagaaagaaggttctttatttgattgaacagataagcaaatgccataatttcactaaaaatgagtggcctggcggttatgctgatctaccgctcatttctgtcaatgaaaaggagcctgtagtacaacacaagaaacatatagttaccaggaaaaagaatcttttgctaacttcttcttctaaaggaactccattaaaaacaaaagttagtacatccacgcgaggcaggaagcgtaagttagaattggttgatgatgatgaagcagaagataatgatgatgaagcaacagataaggctaatgaaggagaagacattaaattgtgggtgaagtctcagttttcttctataagacatgaatttacggagagtgttaagaagttaagatctgagaatctaaatcttctgaaaaagatcaggctcctgcaatcttacaggtccaggccggctactcatcatccgttcaagaaagtacgcatccaaacaaacctctgcacagtctctcaatctcctgtcaacactggtgtagaggcgacaaacatcataactcccccttcaccaccattaacgtcattggaaggggggtcaatgtttcgatgcatgctggagacgaaacagtctcagaaaattccgataatattgttgatgatcagttatggaaaaagatatccatggagacctgcaaggattcagtttgttccccacagaagcatctggtaattgttatgaagttctgtcatattttgttccccacataatgttggtcatatattatgtgcatatgccttttcaggatgaaactccatcagttatattacccaaatttatatctgctaatagcaccgagctccctccctctgatcaaccaatctatgatactgagtctaaatcttgagacgaggtaaatttatcactatcggtttcaagtccataatatgtaactattatatacctaactacatttgcattctaccttagcatctgccttctcctcgacctcctgctgttcgcgataccgcaacgaaaccatctcctaatgatgttaccgaggttttcttcgacctccttctgtactcattttactttgagtttcttagaatggatgttactcatatgctaatgttatacatcttctatcttatctaggagattaagagttcagacttgtccttggctgaaaatgtagacacattgcttgacacagtgtgcaagaatataagttcttcagttgctgcatccgatgaggtcaggaaagagagtcttgaatttatataatgggaaccacccatcaaccaca

SEQ ID NO: 17165 - DNA, 617 bp, Arabidopsis thaliana columbia
tgaagcgcggaataagacggccctcgaagccattgagagagctttaaagccttttccaccagctgcaattgtcaacaagtttgaagatgcggcttatggcagggttggttacactgttgtatcctcgcttgctaacgggtcgtcttcttccttgaagaatgcggtgtttgctatggttaagactgctctcgacactatcaatcttgagttgcactgtggatctcatccccgccttggagtggttgaccacatatgctttcaccccttatctcaaacctctatagaacaagtttcttccgtcgccaattcccttgcaatggatatcggctccattcttcgaggtcagtacctaatagaagacctcagtcataaacatgtgaattcctgaattttaaaagatacttatcaagctaagagcagaacattgttgctatgctgctgttgatgtgtactttgtgataagccattgaacatggaagtctatgagcaatgctctgctcttataaaaatgactagccatagaacatgaagtttgtagcaatgctctgctctctgctgttatcaagataagaacagagcattgtttgtctgctgtactttgtgataggcagagtgat

SEQ ID NO: 17166 - DNA, 1020 bp, Arabidopsis thaliana
ctctagtagatgccgtattgtctaacatctgaaaacttcgttgctaagaagtcttcgtatgtcgtaacgcgtcttctcctctttcctctcttataacacttccaattcagaggaagacaacataaactcttattctctacctgtcctctcttctctgcaactcggccatggggaagaagcttgacgctttgcttggtcgcagtttcaagaccaacaagttcaagtctcttatcaccttagctctcacaaggctctctattctcaagaaccagcgtcaagccagactctctcaagccatctctgatgtcaccgagcttcttaagctcggccaacatgagcacgcttaccatagagtcgatcaagtcgtcaaagaccaaaacactctcgacgttctcttcttcatccatggctacttcactctctgtctcgatcgtattcacctctttgaacacaacagagattgtcctgaagagcttctagaagctgtttcgggtttgctatttgcagcttctagaatcggtgaattccctgagcttcaagagattcgtaatgttttgatttcgcgttttggcaaagatctcgcggctcggtctattgagttgcgcagtaattgtggggttgatcccaaagtaagcaagttctcgattcaacaaatactatattcaatacgttatgttatatatctctcttgatagaacaaaatacttactgagttccatgtttcttttggtgttactatagataattcagaagttgtcgacaagacctccaccgaaagaagttagaatgaaggctttgaaggagattgctgcagagaataacattgttctgaaactagaccaagcttctacgtccactgaggtatagaaatctgcaattaaccaccaagataacaaaaagttgaaaaaatcatgttctaatcaaatttgtaacatttgcagggaacaacaaatatgcagggaacatcagatgttagtaagactaagctaacaagtaaagatggcagaggagaaggttatg

SEQ ID NO: 17167 - DNA, 632 bp, Arabidopsis thaliana columbia
gatgattatttttctaactaaagctctatatacattatgcacagttagttcatgcacagttggtgaaagactacggcttgatattcagcgacaatgttgactatattgacggatatggaaaactaaccgcgaaaacgaccaagtgggcagatcaacgggtttgcataaacaaatggcagaaaatatgcgagagaaaccagttcacagagaatgactccatcctatgtgaaattctccgcaacgaggacaaagtggtttatgcaatcaagattcacatcttccgcgatgcagcagcaagcacttgattctctgatgcagttctgcaattgtgtttcttctctttcgagtctagtcttttgtagtaaactattagaatgtctaatttcaaaacatgtttaagacttttgagttctcttgtagactttgaagtaaacacaatgaggagcaggcttaagcttacccgttaatcactctgtttctcttacaagttacaatcatgtaaaatgggttagaatgatcgttttaatatgttaggtacagatttcgtaatttctcgaaaatgtgatatctcttcttcacaacagaagaacagattattgtgaaagtcaaaacaacactgactgccgttacta

SEQ ID NO: 17168 - DNA, 1693 bp, Arabidopsis thaliana
tggatttgtcaattgatcgcaccgacgcggaaatctttggtctcctcactcgtcagtcgtcaccatcctcgacattacattgtttttatttatttaattaatatgttagttacctctgcactaaattaaatgaatagttttatttgtatattttaggcaagatggattatatataatgattaaataaattaaggtgtgtattcttcactaaatgtttgagatctatccgtcacactccagaggttaaactcagtcatctgtctttggggaggacaagcaagaacctcaccgacgattccataccaaacaaattcccgatctggaaacaactgacctgtgaaggtgaagtgtatcgctggaaatggcggtggccttccgtggaggccggggaggcgtcggatccggccaatctaccggacttcgtagtttcttctcctaccggatctttatctccgctttgttctcttttctcttcctcgccactttctccgtcgttcttaactcctctcgtcatcagcctcatcaggatcatgtacgcatctctcaatctctgagctccttctttatttctctgcttttgattgattttgtaattcgaacaaatttagaaatgaatcggtggcaatttcattgaatctgagctttgatttttgctgtctggtttttagacattgccgagtatgggcaacgcatatatgcagaggacgtttttggctttgcaatcggatccattgaaaactaggttggatctgatacacaagcaagccattgatcatttgacactggtgaatgcgtatgctgcttacgctaggaagctaaagcttgatgcttctaagcagcttaagctcttcgaagatttggctatcaacttctcggatttgcagtcgaaacctggtttgaaatctgctgtgtctgataatggtaatgctcttgaggaggattcgtttaggcagcttgagaaagaagtgaaggataaggtgaagacagcgaggatgatgatcgttgagtctaaagagagttatgatacacagcttaaaatccagaagttgaaagatacaatctttgctgtccaagaacagttgacaaaggctaagaaaaacggtgcggttgctagcttgatttcagccaagtcggttcctaaaagtcttcattgtttggccatgaggcttgtaggagagaggatctctaatcctgagaagtacaaggatgctccacctgacccagccgcagaggatccaactctttaccactatgcgattttctctgataatgtcattgctgtgtctgttgtggtgagatcggttgtgatgaacgctgaggagccatggaagcatgtcttccatgtggtgacagatcggatgaatctcgcagccatgaaggtgtggtttaagatgcgtcctttggaccgtggtgcccatgttgagattaaatccgtggaggatttcaagttcttaaactcttcctatgcgccggtcttgaggcagcttgagtctgccaagttgcagaagttttactttgagaatcaagctgagaacgcaactaaagattcacataacctcaagttcaagaaccccaagtatctctcgatgttgaaccatctcagattttacttaccagagatgtatccgaagctgaataagattttgttcttggacgatgatgttgtggtgcagaaagacgtgactggtttatg

SEQ ID NO: 17169 - DNA, 572 bp, Arabidopsis thaliana columbia
tccccaaacggcttcaaaaacagagatatagacaacaacaacaacaaaaaggtcaactgaatagataccatctttagagttctcagttgattctttgccagcttgcctccctaggcggaatttctgtcgagcaaaacacatacaaaagagagaaacacaacaccatcaaacacccaatattactatgaataacacatataaatgaaacttaaatccaacctagatacaactcttaataccaaagcaaatttcagaatctaaggcgtcaagtcattgaaattctaggtgtggtctcatcaaccaagatagatctaataacagttaattaggaatcagttttgtttatcaaacctgaagatgtgatttgaggtggtagagagtgagacccttcactcccattgttctcataatagttttgggagtcgcttctgtaaattgaacagacagagtcagaacggtctcttcaaaaacatgtgtgaggtaaaagacacacaggagttaatcttagctacaaagcaattcacaagcttcaaaatatttagagatgacactgacactacttaattacaact

SEQ ID NO: 17170 - DNA, 1152 bp, Arabidopsis thaliana
  unsure (1)..(1152): unsure at all n locations
ggtctctctctctctcagaaaatctttaaaactccataaatctaatcaactgtactactcatcgaccaatctagattgctgcaaaacaaggaacagggtctgctctcaaataaagcaaagacatctatcagagtgatactaccacataagtaaaattcaatgtcaagttttaaaacacgcactcagagatactanaattgtttcacacaacactttcgcatacagttttgtgtttctagattcacaattacgatagctacaattataaaccaaatcaagtttccaaacaaaaagcaacgattgagatcatgatcatagaagaagaaaaatgcttaccccaagctacagtgcactcttcacttgtggcactgngctgattagcctggcactggatacctaacaacaaaccaaaacacaaaaacgaaataagcataaacattcaacatcatcgttacaaattccaaaatcaatcgattgttttaagacttacaaagatccatgatgtggtttctgcagatcgcacagttgtcaacaacgatatctgcaaccaaaacaaagatcaatcaatcaataaaactcttaacctaaccaaaaattaacatcgtaacacaaacatcgaaacatcgaaagaccaattgaagatagtgtataaggattttcgaggttaccccaagcccagagagcaacggcgctccacttcttaatttcgaatcgcttagctttcttgttggaagacgacgcggctacgctgctggaggcttctccggcaggaatcatggtaacgtcggagtctagagtcgccattaatctctgatcggaaagaaaatttaaaccctagaaaagccggagaaaaatatcaacgtttgagctgtcgctgattttgttgtagagagagattgtagaggaagaagaagagagatatataaagcagctttgggctttgcctgtatagtgggctttcgtcggaattagattcccgtaaatttccataattcggtttaaggtttcctttttttaatcttactcatcctacgatttacataaatattttaatttttcctttattacccaacgatttttatttatttaattgataaattaaatatttttaagcaaaaagattacggaaaatatctattttatataataaaa

SEQ ID NO: 17171 - DNA, 677 bp, Arabidopsis thaliana
tatctagttatcagcccacttgttgttaactttatttcgtcaagcccacttattactattaactttttggtcttcagctacaaattttaatgaacttatataactctagttgttagggatatggttgctccaacatcgaaccataaagaccaaaaattacgcacatcattatgagatgaactgtaaaagaatttgagaattaaacttataactctttccagaatgcaataagcatttggctaaaatttcacactgtcaagttttaagtggttgagagaccaaagaggatccagcagcttgaataacattgaaactgtcccaagaaattgcaaaacatccataataaagggttcaactaaaaaagaggtacttcaagaaccagctaaacaaaaagctctattaagttttacgaatccgagcaaaccacaaacaaaagaagctagcctcttaattcatcctttgggcagcctcctttgcaataactctttcctttgccttggtctttgcctgagacttagatcccattatgcctcctccccatttcttcctgtactcctcgtacttgtcattgaagttggcctatagacaaaaacccaaaaacacaatcataagaatctccaacaatatgtttcacacaatctaccattctattggtcacaagaagtatttaccttgat

SEQ ID NO: 17172 - DNA, 626 bp, Arabidopsis thaliana
ttttcctcgccgttcgcgacggatcttgcaaagctgcaaactcaaattgggtacagtaacttaaagtcacttcttctctgttgattttactaatttgttcctaaatgtgtattggaggatcataattagggaaattaaggccatttctataagattagatactctcttgatgtgatgattaagttgaatcactgatttggttaaattctatactcttaaagttgtgacctttcctttttttttgtttggtgtagctacaagtttaacaacatcaaccttcttcgccgtgcaatgactcatgcttctttttctcaagagaacaacaaagccttgagtatctttggaacccatatcattgaaaccgcggtctctcttcagtttctcgctaaagatatcgatatttcctcgaaagcactgggccgtttgatatcagaggtttcaaatgtggagtcctcatgtgctcttgacggagaccggttgggtttggggaagataatcagagtttctactaagacagatgcatcgaactcggccattctttgtactggctttagggcaatctttggagctatagctattgatgctggaacggttgatgaagcatcaaggttttctggaggtacatg

SEQ ID NO: 17173 - DNA, 435 bp, Arabidopsis thaliana
ccaaaaacgtgactaagcttactccccatccccgtctcgttgctatcgcacagcttgctggattcggtaaccactggcggtaaaggcgttggctggctgtggccgtggtcagatgaacgctttttcgctccctggcaggtgataaaagtcgcgccgtttgcattgtctcgttacaccacgccgtacgggcatcaggtgattatttctgaattgatgtgggtgtggttgccggggatgctactgatgggaatgttgtggtggcgcagacgataaccggatgcgaaaactcgcatccggcaatagcgcaattacttacgacgccaggtggtcccttgcgggccatcttccagcacgatccccatctcgttaagacgatcacgcgccgcatccgccgccgcccagtctttcgctttacgggcatccagacgctgttga

SEQ ID NO: 17174 - DNA, 862 bp, Arabidopsis thaliana
cgtcatctataactttctctttgccttttacgcttgcaattgaccctggctgtgttactttcggatgcggcctgctagccccaactgtaatatccacgttttcccttatggtaacacctcaagaggtgttgcgttgctccttgtctttgcgcatgtatacgtcgttgttagccgccatggtcgcaatatcctctgcgtcacctgaaaattaatttgttatcagacatatcatatatccatagcccaaccaattatcactaatgttgctaaaagtttaacctgaaatgttccgcaacagcattcttgttagcgcggtaccccacacggctcttgtttctgcgtaattctagtacttatcagatatttcttttgaactcaaaccgcctagatccaggttactacggtaactgttaacatttcgaacatttccacctcgtataatcttcactcgaagatgcacttcatctagatatgcccttatcgccatgaactgcgtgatgtcttcgtcatccaatatatcgattgggttcgctcgcttccaatcaggcctgatcatccactgtggccactggtacgttaattcgatattgtcatctgaactcagccctagcctatcttttaccgccataacaactttcgcaaacccatcacgctcacgcagccggactcctagttcaaactcatccacatgcgagacgtgttcgaagaatccctgttcatctcttttccactccccaggtaccaatctcaccacaaacgccatgcgtaactgcagaatttttagaaataacaaattcgttaccgatatgaagtttagtttcccaaaccctaagttaaaaaagaaattccaaaaatttaactc

SEQ ID NO: 17175 - DNA, 678 bp, Arabidopsis thaliana
gcttgtaaagtcaacgacttcagctcgtgtggatcggctcagaagctgagacgccttgtcaacaactctctgaagatccttctctgtgtttttgtcaatgttgatggttaagatgagttttcttctgtatatgaaacttagcttcggtgtgcctttgtgaaaactggtcacttcaactacgtctcctaatctgtacctataaagacctgaacagagcgataaaacagagtaagtggtgaaacagatgacgcaaaaagctcgttgattataacaattggttatggaaaatgcagaggaggtttttctttacctgtgaaagtggttagaacaagttcatactcctgcccgagtttgacttgagagagcggcacaggtttatcttcgacaaagtcaccgtcaatgcatatgtctgattgattctgccgcctgtaaagtggtataaactcgaagtaactaaaagtgggaatcacagcaaagctcacgtcttctgggggaagatgaggatcaacgttcacaccaatccagctctcggttgacccgtaatctgcgctcaccaggggcaaaccgccagcgtaatgcctcagcttattcaggtacggcagcatagaacccgtcatgattgaggagataattttgcatttgccaaagctttgaaataaaccgaacatccgagatttg

SEQ ID NO: 17176 - DNA, 594 bp, Arabidopsis thaliana
gtatcttgtagcatgctcgaaagggatatcaataagccggagaagaatagagcctctcgagattggaagaaacaaaaacaccatacacaacaatccaatcatcccaaaacgcagacccgttaactccaacagaaaaatactgttcacacacacacacacaaacaaaaaaccaatgattggaatgaaacaaaaagctaagatgggataaagaagaaaatgagtttaagaaccttctgttattgggaagcacgtggaagtagtcaagaacgttgagattcctcaaggtataagcatagatagcccaaaggaaaaaaacagagaagaccataattccaagaaactcagctgcagaaacaactccaaatggtccatccacaagaacaggaaatgtccatagcctaaacctcgggaatttcgttatcttcttccttcacaatcacggaaacacacatatattattaatatgcttaattattgtaagcaacacaatcaaatcaatagaatagttaagagaaatctcaaccgtacgtacttagtgaaaaccgtctcttcccctgagattatcagatagagagaagcaagatgcgatgcaag

SEQ ID NO: 17177 - DNA, 1006 bp, Arabidopsis thaliana
cgtcaatctttatctatctcattagttcagtttcttatttgctattttccttttaatactgtttcaggtgagaactatcttggatattggatgtggttatggtagctttggggcacatctattgtccaaacagattttaactatgtgcatagcaaactacgaagcttcgggtagccaagttcagctaacactcgaaaggggtcttcctgcaatgattggctctttaatatcaaagcaattgccatatccttctctttcctttgatatgttgcattgcttaagatgtggcattgattgggaccagaaaggtaacagtttaatgacaccccagaatgatttttttcatgtccttaacccgatggaagatccaactttactgtttcaatctgctgtgtagatgggcttctccttgtagaaattgacagggttctcaagcccggtggttactttgtatggacatctccgctcacaaaccctcgtaacaaggatcatcttaaaagatggaactttgttcatgattttgctgaaagcatctgttggactcttttaaatcagcaagatgagacagttgtctggaaaaagactatcaacaccaaatgttatagttcccggtcagtgattcacacacaccactgttgtattacagaatctgcatatggatacatttatggttatttatcaagtcctctaaaaatggatgctttgcctataaacaggaaacctggagtgggcccttctgtgtgtaccaaagggcacgatgttgagtctccttattacaggccgcttcagatgtgtataggtggaacacgtagccggaggtggattcccattgaaggcaggacaagatggcctagccggtctaacatgaacaagactgaactttcattatatggttagtctccgtagtaacaaattgcttctgaatccatatgtctgcagtttttgttatctcattttgattcctggggttggtttaggtcttcaccccgaggtgcttggagaggat

SEQ ID NO: 17178 - DNA, 987 bp, Arabidopsis thaliana
ttttgtgaaatcccaaagaaagtttttgctttcaccggccagtcatgggaaactatcggtggccgtcaaagctatcaaagttatcactcagagcaaaacaaacgaatctgtaccgcgtcattctaatcgcgatcctctgcgtcaccttttacttcgtcggagtatggcaacactccggcagaggaatctcacgctcttccatttctaaccacgagctcacgtccgtgccctgcacgtttcctcaccaaaccacaccgattctcaacttcgcctcccgtcacacagcccctgaccttcctccgacgataacggacgcgcgtgttgttcaaatcccgtcgtgcggcgttgaattctcggagtacacgccctgcgagttcgtgaatcggtctttgaatttcccaagagagaggcttatatacagagagagacactgtccggaaaaacacgagatagtcaggtgtcggattccagcgccgtacggttacagtttaccttttcggtggccggagagccgtgacgtggcgtggtttgctaacgtgccgcatacggaactaacggtggagaagaagaatcagaactgggtaaggtatgagaaggataggtttttatttcctggtggtggtacgatgtttccacgtggagctgatgcttacatcgacgagatcggacggttgataaatctcaaagatggatcaattcggacagccattgatactggatgtggggtaagttaagacttcagatcactctgttttgttccttgttgattttgtttctttgtactattcatgtgatgtctgtgtttttttttggctctcttgttaatgttaccatgcttgtgtgatgtcatacattttgattttttttctctgattctttgacatttacgcctcatatttatttttgcaagtatgtgattatttgttttgggttatggagtgtgtttagtggaactagttgtatacattttgatgattgtgcaattac

SEQ ID NO: 17179 - DNA, 468 bp, Arabidopsis thaliana
  unsure (1)..(468): unsure at all n locations
caaagctagcgattccttgacttatccatccccggcctccaccaccacaagcatcaggatatagcaactcacgttccctttctcgagcaggggcactgtcaaacacctgctagaaccaatagattaactagttgaactggagttgattgcaaataggtaaaccttgcattgaacttacattttgaagtcctttgagagactttgcatacaaatagcaatcaagaagcgtaagcncaccatcacgtgttgtggtgagacctccccacggatgaacagacggatcttgcatctcatccgcacatccgttactaacaactgcgttacagtcatattgatatttggatcccctgatttgttgcaaggagaattcctaatgatcgtctccggatgcaaggacttcccatgcataacaatctgcaagaaaccttcgagaagcagaccattgcatctggaacaatacatgttctt

SEQ ID NO: 17180 - DNA, 1238 bp, Arabidopsis thaliana
ttcctccaccacggcataataagtttccatttttgcgaaattgtgtcttttggtttatacgaaattctatcttaatattgatgtgctaaggatgtatttcaattttctgtttatactgaacaacaaactttgattatttataaaaatatatttatttattttcttcccgcaaaaacatcattgttttaagatctttgtaggaagctctcctatagagagagctaatccggcaccaagtctcttggcataagattctattataatgacatagttacttctgtccaaacacatgtgatccgaattcacatataacaatagaaaacgtacaaaaatgaaaataaaagtagtgtaagtagactgactaataaccacttaaatcaaacaaaaccttagaaacatggaaactgatcattaagactattataataaccctaacataaaaagatccatcagctttcccttgtttctcacgcaaactctgaaaatgccaatttgaggaaaaccttctcctttacttttgctattgcctctctcttatttatttctgctctaccttgtccgaagcatgtatcctcctccctgattgcttctctaccgtctgaaacaaaccgttgaagcaagcacgaaaagattcgcattaagaacaccaaaaaggacaaggatctttctcccaagagcagaaaccatttgctacgataactctaaaatcctctcttatcaggacaatctgttgccctgtgtccagatttcccacaaatgaagcatgaacctccaaaacttctgtttaaaggcatcaatcaatcagtaggatggggatgttgtgaaagctttaacacagatttttttaaatactcacctctcccgcgaaggagctctgctgcttgatgaacttctgccaccgatcaaccaatcatcagaacttcctctggaactactaccacctcgggaccagctgcttcctccaccactgctccttctactacctctgtcatcatcacctccccaactatcacggcctcgtgatgatcctcctctaccgcctcttgaccctctagaacctcctcctcctctaggcatcctgtctctgctagagaaccgtccgtagttatcactagatggtccgtcatcttgaagtggaggtaactacaatcaaaacccaagatgtgaagtgttagtcaaaaaggtctaattatgaaaaacatgttatgttggataaagagtgaaagccagtaaaaact

SEQ ID NO: 17181 - DNA, 672 bp, Arabidopsis thaliana
cttatgggaattgtggatccatcggcaatcataacatcatcaccaccggtgtaaggttgatggaaagacagattgttgaagtccgacgtgatatggtgggttgctccgctgtcaagaagccagttgttggcattgtatggagagttgacagcgagattggcgcggggctgcccatggagtgaaccggagaagtcgattgctgttgattggtggttgattggaattgatgaagttgagggcagcgtttggcactgtgtccttgcacgctacatatttggcatcggcccaagtagggtttgggctggcgattatcggatcgagagccagaagacgatggctgccaagagtttgagcgattgttgttgttgttgtagttgcggttgtctccacgattgttctgattacggttggtgttggtgttgcggtgagtaacgacattggcagtgattggtacgacctctgccgagttcaaagcaagaagtttgctctctcgatttatcagcctctcatggatctctgtgagagacggtggggtatctttggcggcaatttgatctatcactggtttgtaatcatcaggcagattttccagcacacgttctacttgctcgtcatggtccataggttttccaagaagcgcaagttgatcgaatctagtgatgaatccttgca

SEQ ID NO: 17182 - DNA, 599 bp, Arabidopsis thaliana
cctaattcccttaaatcttctccaaatatttccttcagttttcacctatatatatgaaaatcattcggtgatcaataacttagctaaaaactggtttctatacaaaatcactagggattgtactaatatattgaaaagtgtgcttagtcaaagtatatacacaaggcttttgtgaaatcaaatcacagatgttgatagcttctctgtgtttgtttgttttgtttttggaaggctgatgaagtgaatagagaggtgaattcatgggttgaaaagcagacaaatggactcatcactaatcttcttccatcaaaccctaaatctgctcctttgactgatcacatatttgctaatgccttgttcttcaacggaagatgggatagtcaattcgatccatctctaacaaaagattccgactttcaccttcttgatggaaccaaagtacgtgtgcccttcatgactggtgctcctgcagatacacacatgtttacgaaggtttcaaagtcatcaatctacagtacagaagaggacgcgaagacagtcgtagttctcaatgcaaatctatcccctgatgagaaagatgggttgcttcaatgttggag

SEQ ID NO: 17183 - DNA, 610 bp, Arabidopsis thaliana
gaagatgaagttcactacattagttttcgttgcgtttgttctctcgtcaatggctccgaccaaagcagaggagaaagcggcatgcgtcgtgacagatctcaaagcatgcctaccagatataataggcgaaaccccaccatcgacaaaatgttgcacaaaattgaaagataaaaagtcgtgtttttgtgagtacttgaaaaacccattgattgctccatatatgacatctgctaaacaagttttagaagcgtgtggtgtacctgttcctgtttgtcaaaggttttaatagtagttatcaaaccattcttacttttcatgtcatcaaaatcacatgttgtaatgttttatcagtcatcgttacatgaacttacttttcaatatagtgttcgtttgattggaatttttgtttacagtaattggaatttctttttgaaccatcaaaattctgaagtttaatatgaaagtgagaatttgaaggaagacaaatttcttttgattcaatttgccaaaagttgaaaagaaggaagactgtaaaatataggaaaggttgattttttaatattttaaacaacgagaacaagaaccggtccagggggaaatgcaggaagag

SEQ ID NO: 17184 - DNA, 556 bp, Arabidopsis thaliana
atccaacttatcctcgccgtgagaaagatggacctgaaagaatcagtaaatgatcaatacgacatcctggagaacctgaaagggtcagttgggaacctaaacgacatcattctgaggttaactcagcacgttatcgctagcaccgccgggaaaacctcgaacctcgtcttctcgccggcgttactcagcgtcatcctcagttttgtcgccgccagttctcccgatgagcttaacgctgtctcctccgggatcgtcaccaccatcctcgccgacagcaccccgagtggcggcccgacgatatcggcagcgaatggcgtctggatcgaaaagactctctacgtggaaccttctttcaaggatctcttgctgaattcgtacaaagctgctttcaaccaagtcgactttcgcaccaaggtactctctttgatccaaattaacctaacttctacataaatcatagatgttgatagcttttctgttgtatttgttgtcttgtttttgaaaggcggatgaagtgaataaagagggtgaattcatggggtgaagagcagacaaa

SEQ ID NO: 17185 - DNA, 924 bp, Arabidopsis thaliana
tttaaaatctttaaactagtttaattgttattgtagaaataagttaactaaaatggaaggattatacgttcactaatctacaaaaatttgggttttctttcaaaatatgactttaaagacatataaatgcagaaattgcatttgagtcaatcgagatcgtcattgttttttctgtcgacaattaaggccattatacgcaaagaaataagtacataagataagtacataaaattatatcttcttgactcttgatattgaatttcttgagatctttcgtattagaatctgtacgtacaggccgatactgatcactttggctcgatcaaaaccgctgaaacgccagctgtcacggcggcacatggaccgagatagagccacagaagaagaggacaacacttgcggacgttttcatggaggaccacgacaaaggttatgacacgtggcattgcaagaaacccaataaccctaatcttgacggtgaggaggttaagtactataaacaaaacggttcaaaactaagcaagaggttctcgtttgttaagaagaagctggtcatgtcaaagtccaaagaggaagaaaacgacttacgtccaatcaagaaaatgcgtcaggtatttaaatttgttttagtcaattccgtaactatgaaacattgatgatgatggatatatgaacatgttacatgtgcctctatagctcaagggaaacaatgtcacgtcaagatctagataattattcgtgcatgttacaattacatcactttttgttgcttcataagtgtactcatatgtgagtaaatattcattcgatgtcaacaagtatagcatcattatatatgtgtatatattactgtagatgataaagaggatgttgaagaagaagatccatccagatgtcgatgcaactaaggctttaaagaaggac

SEQ ID NO: 17186 - DNA, 956 bp, Arabidopsis thaliana
aggatcgatttgggctgagctagagttacattcaagttatcctatattgactatcgggagtttttcatttttggtggttttgcttgtgtaggagtcgcagagccaattccgtggaagactaggatgaaagtagcttttagcgcagaggtaggactatctgtcctccacgaagctgacgtcatataccgagacttcaaggcctctaatattctacttgatgtggtacgccatctactatcaatgcttgtccatattttatttaggaagttgttaaagcaaaagaaaatagaaagctccactttattaaatctagagtagtatactaatatatgaaagatatgaatcattttcctcattgccagttggttttgagttaaaaattcataaatccgaatatagtattaagttctagtttgaccgaagtagattatttgtcgagtttagagcgtgctttgattcgagattcgtcaaagagccatcatctcattacgactaaaatataaatgaaaaagcactccaatggaaaatagtgaaattagaattctaaacatataatttctaaacaaatacgtaagtctatatagaaaaaagtaaaaaccgagttttcttgccacttacggacgtgtacactagaaatatataacattgattcccaaaatcttaaaatcgtcttgtaaatgcaggatttcaatgcaaagctatctgattttgggttggcaaaagctggaccaacaggagatagcacgcctgtgacaactcaagtgataggcacacaagggtacgcagctccggaatacatagcaaccggccggttaacctccaagagtgatgtctacagctttggagtggtgttgctcgaactactctcgggtcagcccacctacgcatatcgtaagtaggagtggacgtaacctggtggattgggaatccgttatttggtggacagaagcaaagtg

SEQ ID NO: 17187 - DNA, 518 bp, Arabidopsis thaliana
aatccaacttaactcgccgtaagaaagatggaactggacactaccaaaaaaagaaagatggacctggaagaatcaatagagaagcaatataaggccatgatggacctgaaagaatcagtagggaatcaaaacgacattgttctgaggttgacagcacgtgatcgccactacctcccgaaaaacctcgaacctcgtcttctcgccagcgttaatcaacgtcatcctcagtattatcgccgccagttctcccggagacacagacaccgcagacaagattgtctctttacttcaggcttcttcaaccgataagcttcacgctgtatcctccgagatcgtcaccaccgtcctcgccgacagcaccgcgagtggcggcccgacgatatcggcagcgaatggcttgtggatcgaaaagactctcaatgtggaaccttctttcaaggatctcttgctgaattcgtacaaagctgctttcaatcgagttgactttcgcaccaaggtactctctttgatccagggga

SEQ ID NO: 17188 - DNA, 1045 bp, Arabidopsis thaliana
ctggccctacaaaatgcaaccttttcacgtattgtacatctggagagacttgttgctgtgcaagagaattgtttggtttatgcttctcatggaaatgctgcgagatagaatccgctgtgtgttgcaaggatggtcgtcattgttgtccacatgattaccctgtttgtgatacaaccagaagtctctgccttaaggtattttagctgtggatatatgcatactgatcacgatgcctacttctatgttttgttgactgatgaagctatttcttttctgacagaaaactggtaatttcactgcgatcaagcccttctggaagaagaattcttcaaaacaacttggccgatttgaggaatgggttatgtgagagaagttttacgcacatgttacagaaaattcaaactcatccatacaaaaacctcgtagattcgattatctgcgaggggattatttgtagctgttattgagatagatatatacgatatcatcacggatgtatttttagtctctcatttggatgtatacaacttctgagtcaataaaggacacttgcaggacaagcacagtatttgtatctgcaagacacataaagtaataagagtatcatctatgtatattatagagagactaagcttcactgttgttgttctctctcttgttcagttctgcgatctccttcttcttttttgtgtgcagggagtagaagtaagaagctagagccaagaccgcccctagcaaagcacctcttctctgccaaccaaattcatcgtccatgaaatcaaaagccaacacaactagcagagccacaaccggtgaagcacccatatgaacaacatcagcgaataaaccggacaccaaaagcaccaaacctaacagcccgaccgcccaaacctgccaagagagagccaacccgaccaaactcagaatgtagtaagtcttccctttcttaaacctctcgctgtcgccttttaactccttaaactcaccactcgcaaacagacccacagtgcaaatgagtgtggcgatgaaggaaacacagatttgc

SEQ ID NO: 17189 - DNA, 1153 bp, Arabidopsis thaliana
aactctataaataggttattgtgttaatcgtctaagtctaagagaatccaaagaagtcaaacttaacacgccgtactctcgtaaaagaagatggaccgagaagcagtaaaggatcaatacgacatccttatcgacctggaaggatcagtagggactcaaagcgacattgttctgaggtggactcagaccagattatctctttacttcaggcttcttcaacggatgagcttaacgctgtcttctccaggatcgtcaccaccatcctcgccgacagcaccccgagtggcggcccgacgatattggcagcgaatggcgtttggatcgaaaagactctctctgtggaaccttctttcaaggatctcttgctaacttctatataaatttactagggcttgtactaacattaacatgcttttgatgtatgtaagatagtaacatgcttagacatttagacttagatgtgtgcgtaatcagatttaggcaaggcttttgtgtgaaaatcaaaccacagatgttagtgtaacctaataaacctaattcccttaaaccttctccatatatttccttcagtttcacttatatgaacatattcggtgaataacttagctaaatactagattgtatataggaatactagggattatactaatagtttgtgctttgaagtatacacaaggcttttgtgaaatcaaatcacagatattgatagctagcttctctgtttttgtttgtattgtttttgaaaggctgatgaagtgaataaagaggtgaattcatgggttgaagagcagacaaatggactcatcactgatcttcttccaccaaactctgcttctcctttgactgatctcatatttgctaatgccttgtttttcaacggaagatgggatagtcaattcaatccatcgctaacaaaagaatccgactttcaccttcttgatggaaccaaagtacgtgtgcccttcatgaccggatgccacgaagacagtcttgatgtttacgaagctttcaaagtcctcaatctaccgtatagagaaggacgcgaagacagtcgtggtttctctatgcaaatctatctccctgatgagaaagatgggttgcttcaatgctggagagcttagcttctactcgtggattcttgaaggacaacaag

SEQ ID NO: 17190 - DNA, 1601 bp, Arabidopsis thaliana
caattccttcttccttcggaaatctcaagaacttgacgtatctttatctttacctgaattatttaactggtgtcattccccaggagctaggcaacatggaatccatgatcaatttagatttaagtcagaacaaacttacaggttctgttcctgattcctttggtaactttaccaagctggaaagtttgtaccttcgtgttaaccacctctctggtgcgatcccgccaggagtagcaaactcttcacatctaactaccttgatacttgacaccaacaacttcactggtttctttcctgaaactgtttgcaaaggtaggaagcttcaaaatatctcattggattacaatcacctcgaaggtcctatcccgaaaagcttgagagattgcaagagcctgatcagagcaagatttctaggaaacaaattcactggcgatatttttgaagcttttgggatttacccagaccttaacttcattgatttcagccacaacaaattccacggtgagatttctagcaactgggagaagagtccaaagctaggtgccttgatcatgtcaaacaacaacatcacgggtgctatcccaacagagatttggaacatgagacaactagttgagctggatctatctaccaacaacctctttgagtgaacttgcagaagcaattggaaatctcacgaagatgtcgaagctacgacttcatgggaatcagtgatctgacagagtaccagcaggtttacgtatcttaaccaatctggagtctcttgacttatcctgatacaatttcagctgagagatctcacaaacctatgactcgctttttaaagcttcatgacatgaacctgagcagaaacacattcgacggaagcattccccgactatcaaagctgactcagttaacgcaacttgatctcagccacaaccagctcgacgggaaatcccatcacaactaagctccctgcaaagcctcgacaagctcgacctctcacacaacaatctctcaggtctcattccaacaactttcgagggcatgatagcgctgacgaacgtcgatatatcaaacaataaactcgaaggtccgcttccagatactccaacgtttcgaaaagcaacagcagatgcattggaggaaaacataggcttatgcagtaatattcctaaacaaagattgaaaccatgccgtgagttgaagaaaccgaagaaaaatggcaaccttgttgtgtggatattagtgccaatcctaggagtactcgtcattctctctatatgtgcaaacacattcacctactgcattcggaaacgaaaactacaaaatggaagaaacacagatcctgaaacaggagagaatatgtccatattcagcgttgatggcaaattcaaataccaagatatcatcgaatcaacaaacgaattcgatccaacacacctcatcggaaccggaggatacagcaaagtctacagagcaaacctccaagatacaatcatagccgttaaacgactacatgacacaatagacgaagagatatcaaagccagttgtgaagcaagagttcctaaacgaggtaaaagcattaacagagatccgtcaccgcaacgttgtgaa

SEQ ID NO: 17191 - DNA, 1538 bp, Arabidopsis thaliana
ctcctaaaacttagctctctctctcttatgttcactctgttttcccaaacccttagccttacacttacttctctctcacttgtctcactcctctgttacagagtcaaaacaagacaaaacttgtggtccttaaacttggtctccaagctggtctctcattggctctttcaagtagggtcgcgaatccgtacgagaaagcaactatgagaacgttaatgcttgtccttagaccttccacacgctttagagacttaccttttcctttgaagacttcagactctctgttgcaatcagagtgtctcattcctcttcatctttcttttgtctaagccacttagtcttaacacctgcaatgttggagagattagcttctactcgtggattcttgaaggacaacgaggtccttcctagccactcggcggttatcaaagaactcaagattccaaggtttaaatttgattttgctttcgaagcctcggaagctctcaagggttttggtttggtggtgccattgtccatgatcatgcacaagtcttgtatcgaggtcgatgaagtgggatcgaaagctgcagctgctgccgcattcagaggaattggttgtcgacgtcctccgccagagaagcatgacttcgtggctgatcatccttttctcttcatcgtcaaagagtacagaagcggacttgttttgttccttggtcaagtcatggatccttctaagcattaatttgatgtccaaaggtctcgggatttgaggaaaatcttcttatgactttcttgacgtatttgattccatgcatcacttgagttaaaagttgaaattgactttagttataatcctcgtgcttttcatctttttaaaaagatttatctcttttcaatgatttttattctttggcctaatatgatggctatataaactaggtttcacaaacaattaatattaagaatgtatgaaaataactatgaaatctcgatcgaaaattcttgaattacaaaggtttttttttcctcaatttgaaaaaaaagaagaagaagaagaagttaggatcttttagctcaaaacaaggtaattagggtttatgtgtgtaaatttgcagatttcttgcttaatttcatatctatttatttatttatggaccgattatcggtttatacaatttacttataaaattattcttgatacattcactatcatttggttctgttcttacaaagaaaagcgataatgtgatgagagtttaggaattggaagaagttatatatatttactctcataatgataagctttgggttacatatgtttatatatagtaaaatggtttcctaaactaagatagaactaaatctttacatatgaatataataaatataaaatattttcatattaacttgtggatcttctggatccttctacaagtactcgttgtcgagaccatctctggtacttgttcaaaacataaaggaaaccaggagaagtccggttaagagaatccaaaaaatccaacttatcctcgccgtgagaaagatggacctgaaag

SEQ ID NO: 17192 - DNA, 1087 bp, Arabidopsis thaliana
tgtatgctaaaagataggttatcatttaacaaaagatttaacatacttttccacattgatacaaggaggtttgatggggatcgtcccgattgtaatattatatttgtaggatcatagtccgtatgtatatacattgaaattttttctgatcatccttcttcattattttcacacattccaaaggtctaacgttcctggcaccatcctatcaaaccttccattaccaaaaaagtcccttcactcgccggaaaatgtctccttatcccagctaaggaccctacaacaatttacttggttgtaaattaatattacttgttaaggaagttgttaattgctaacttatatgttaccgcgatgggtcctctacatgttgcgctattatgccatatcgccctgcatcttcagcaacgtttggtagatgttctctctgaaagaataataatttcgttagatcgaattctttacatgacgaatatccgttaacgataacgttactaataaacattatagcgaacattaccttgaactctccccttgagaaaagtcttcttttctgtggccatccaggtggcctacgcacctaaggtggtgcaaccttcccacctccgacatcatttggggaaggtgccagtgtaaccatgtcggcgataggcatgataacacctttgtacgccaatctcagatatggaactatgtggtagacgccaaccatcgtctctacacatatcctttctttgatcgtggcttctatagcatgggaacatggaattgtaaggagctgaaattctctgcaggtgcatgttcgctcccaaaggtttaccgtaaatgccgaatcttctttttctcgcacttcattaaatacatcaccaatcttaagtacaacataacctgccccttttcaaaattttctgtgaccatctcattcacctttggaggttaatgattcccctcgagctgtgcagcttctcgcctaagatttaaccatgttattagagttgttcgaagagtctctagtagtgatattactggataatcccttgccattgttaagacattgtttagcgactccgctatgttgctcgtcatg

SEQ ID NO: 17193 - DNA, 874 bp, Arabidopsis thaliana
cattactgccaaatcttgccccaacattgtactcgcggtgtgtgtgagtcatacatgtccgtggcgggtttatgcgaccaaactggaggacagtgagaggttcgagataaagtgtgcaacccagcaacacacctgcagcgtagacgctagaggagatttccacaaacaagcgtctacagcagtgatagggcaactcatgagaacaaagtaccttggtgttggaaaagggccacggtcgaatgagttaagaaagatgttaagggatgagtttagccttaacgtctcgtattggaaggcatggagggcaagggaaatatcaatggataacgcaatggggtcggcgatgggcagttacgctttagtccaaccttatttcaagctccttatggaaacaaaccctaactctcttgttgccatggatacggagaaagataagaaaggactggaacgattcaggtacttgttttttgcactggacgcagctgtaaaaggatatgcttatatgaggaaggtgatagtcattgatggaacgcatctgaggggtagatacgggggctgcttaatagctgcaagcgctcaagatgccaatttccaagtcttccccattgcttttgggatagtgaacagcgagaatgacgatgcgtggacatggttcatggagaggctcacggacgccataccaaatgatccggatttggtgttcgtttcagacaggcactcatcgatatatgcaagcatgcggaaggtaagttatttactgataacggataatattaatattacagcgatatgaatatagttatttttataggaatatataccccactattatgcagtatttatcaatcgttaacaatagggttaaatgatatat

SEQ ID NO: 17194 - DNA, 788 bp, Arabidopsis thaliana
gaggtcaaacatgagtgctaagacctgccaaatacaacacatatggcatgattccattacacagacaatcaacactagataataagatcaaaagagaatctattaaggattcaaacctctaaatgggagcaaccattaagtaaatcctccaaagcacaacggctaatacttcgaccaactttctctgctactgaacccaaacataggagcctgaagtttaccaatccgtcagacacagcaacagaaagattcctcatattatagcagatgcatcatcacacacatacctcaaatccttgcatttcctaccaatttcggagatgagatctccgctgaaatcccgacaattgtgaagagaaatctccctcaaagaaggacgtaccaatatatcaatagctgaattaccaagccttccacaatcaagcttgagactagaaagttgttgattcggaaacaacaatggtctaacagtttccattgacaatgaaacattctgaaatccaaaaagactaaaactttttatacagtttcagtttgaaatcgaaatccaaatcaaacccttaaagaaatgtggagacttacgaagatgtggaagttgggagtgaaggtgagaacacgagtgacacagctcttaagtgttttgcaagtagaagccaacgagcagagagacgcaacatcgagtttcgtcataatagtctccaagagagccgccggtaacagatccaggcttctctcgccatcgcaaccctcaacatctcctcctccgccgcatacgacggtggtggtag

SEQ ID NO: 17195 - DNA, 554 bp, Arabidopsis thaliana
ggtgatgggcagctacgctttgatccagccttatttcatgcttcttctggaaacaaaccctaactctctagttgcccttgatacggagaaagataagaaaggtgtggagcaattcaggtaattgctttttgccctagatacagctgtacaaggatattcttatatgagaaaggtgatagtgattgatggaacgcatgtgaggggccgatacggtggctgcttaattgttgcaagcgctcaagatgccaatttcaaagtctttcccattgcttttgggatagtgaacatcgagaatgacgatgcgtggacatggttcatggagaggctcacggacgccatcccagatgatccggatttggtgttcgttttagacaggcactcatcgatttatgcaagcatacagaaggtaagttatataccgaaccccaataattatactattacatcgatatatatatagttaatccctaatttcgtggctatctcgtaaatgttactttaccttgagtaagtatgtatcatacactgatacattatcgctaatgtacaggttt

SEQ ID NO: 17196 - DNA, 837 bp, Arabidopsis thaliana
ttatttatcatacattctcagtttccaactttcatggtaccatcctttcaaacctccttttactcaaaaaacttctttcagtcgccaaaaaaccactccgagttgtagctatggaccctacacataattacttgtgttggtaccatggatggagatgttcatcaattattaataatatttgctaaaattaatgttaccgttatcggtctcctgcacgttgccctattatgtcccattgtcctgcatctggagcaacgttttgatgattttttctggacataaataacatccacattagctctatatcttattgttatatatatccgttaataacaatgttaccttgaactcttccctagagaatagtcttctcttacgcggccttcccggtggcctacgaacgtaaggtggcgcaagttttccgcctctgacattactgggggaaggagtcagtgtatccatgtcgtggacgggcatgattactcctctgtacgccaatctcagatatgggacggtgtggtggacgcctaccattgtttcgacacagattccttcttttatcactgctgctatggcatgagaacacgaaatcgttaacagttggaattctatgaatgtgcctgtcctttcccaaaggttaaccgcaaacgttgaatcttttctctcttgcacttcataaaatgcatctcctattttaattacgagatatcctgctccttttcaaaattttcaatgaccatctcattcaccttaggggcaaaagattccctcgtgttgtgcagcttttcgcctgagggaaaccatgtaacaagtgtgatcgcatagctttaagagaga

SEQ ID NO: 17197 - DNA, 1836 bp, Arabidopsis thaliana
tccgctatgtgcatcgtcatgaagttgacctatctaccacaaaatgtgagcgcgtccaatgttgaacccaatgcatgtaaggtaatcagcacacgggccgtgcattgctctaatctcagcaaatatgcgattgaagtcgtttagccggtaagcccaggccgcactggctaccaaaaactcaaaccctctgacttgaatattaagaaaaaatttctcttaagatggacaacgcaagcggcgtgtgaagacatgtgatagacctggagatgcatgaccatgtgttagggtttattaataatagataatcatgtatcaactaatctaactattagcaagatactagtgttatcattttcataattgtaaattatgaagataacattacttttatgtcgataatttaccatgcgtatgcttgcatatattgacaagtgtctttctgaaacaaagaccaaatttggatcatctggtatagcgtctgttagcctctccatgaaccatgtccaagcatcgtcattctcactgttcactattccaaacgcaatagggaaaacttggaaattggcatcctgagcgcttgcagcaattaagcacccgccgtatcgccccctcagatgagtcccatcaatcaatatcaccttcctcatttaagcataacctttgactacaacatctagggcgaaaaacaagtacctaaaccgctccacaccattgttatcttttctgtatcaagggccactagcgagttagagtttgtttctagcagaagtttgaaataaggctgaatcaaagtgtagcttcccatagcagaacccatggcattgtccatagctatttctcgagccctccacgccttccagtacgagacatttaggttgaattcattacggattatcttcctcaactcatttggccttggccctaccaactcccaagtactttgttctccttaatttcacaatcacagctatagacgcctgcttgtgaaagtctcccttgacgtctacactacaagtgtgttgttgggttgcacattttgcctcaaaacgctcactggtctccagttttggtgcataaacacgccatgggaaagtatggctgacgcacacggccaggagaatgtttgggtaagatttggcgtaaatgaaatgaaactttctccgtattgcatggattgtcagtttagtcgcacaatcttctttattttttaacaatctgccaatgaatagatcatctccttcgtagtcggcatctttcagggctcgctgcaagtaatctgcaataggtgtactatttgttagataaagtttttgttacatgttaaccttttactagcgaaatagaatagtagctacatgatagctacaagattcataacaataatatattcataagtataccagaaaaacacatgctacactaaaatttagtttctaaactttgaattagatcctaacatgttttaccttcttctcccggatcgtcgaaatatggtggggcgtccttgtcatacaacactattggtactggtgtttctttcaaatagatatctgccatctttcggttaatctaggttgccaacaccataccttgttcttgagttaccttacaaggttgttaactctactcatccttggagtatttataggtgccatacagagtggtctatccgggtttgagtagtagtgtgccacctcgtcttgacctgattatatgacggagaagaccatttttcagttggtttccgttagtgttaagtaggaacacatatattatttgctaagctacacttaacaagataacatacctagcttggcaagacaattgttgctagat

SEQ ID NO: 17198 - DNA, 786 bp, Arabidopsis thaliana
ccgttattgaatatgttataagcttatgttatagtttatccggtaagcacgtgctgcactggcgaccaaataactcaacccttcggacttgaacattgatactatgttcctcattagatggataacgcaagctgcgtgggaagacatggggtaaacctagagatttgtgacaatctattaggtttatgaaacatttttaccatgataaacaaagccgtactagatgctaactaaattattattgcacgactaaagttatctcctaaatataacttgttatcagataaattaccttgcgtatgcttgcatatatagacgagtgcctgtctgaaacgaataccaaatctggatcatctggtatggcttctgttagcctctccatgaaccatgtccacgcatcgtcattctcgctgttcactatcccaaaagtaatggggaacacttgaaaatttgcatcttgagcgcttgctgctattaggcagcctccgtatcggcccctcaaatgagtcccaacaatcaccatgacctttcgcatatacgcataaccatggactgcagcaggtagagcgaaaaataagtacctaaaacgctccacacctttgttatatttttctgtatcaagtgccactaacgagttagggttggtttctagtggaagtttgaaataaggctgaatcaatgtgtagcttcccattgccgatctcatggcattatccatagctatttcttgagccctccatgccttcaagtacgacacatttaggttgaactcatcacggagcatct

SEQ ID NO: 17199 - DNA, 970 bp, Arabidopsis thaliana
aattattagcattttcataatttataagaaacacgaaacttgtgaataaaggaaaaggtcacacgaaaccttgatacctatatagtagaaacgtttgtactcatattcagaacaaaacaaaaagaatgattaatcaattaacaaagaacgagttaatcggattatttacatcgattgccgtcctcatatacgttacatgtctcttctacaccaaacgatgtcgtacgagactacctccgggaccaaatccatggccggtgattggaaacattttccagctcgctggtttaccgccacacgactcattgactaaactttcacggcgtcacgggccaatcatgactttacggatcgggtcgatgctgacggttgtgatctcttcgagtgaagtggctcgggagatcttcaagaagcatgacgcagctttggctggccggaagatttacgaggcgatgaaaggagggaagagtagtgacggctcgctcatcacggctcagtatggtgcgtattggcggatgctgcggaggctttgcaccactcagttctttgtcacgcgccgtcttgatgctatgagtgatgtacgctctaggtgtgttgatcagatgcttcggtttgtcgaggaaggtggccaaaacggtatgtattatactatcaacaacattatgacatgcattatatgtaggcttagatccgaatgtgacacatcaacaatactaatctgaatatgactctttatgttgattctaattgaacctataattaaattgtgttttttttttgaaaaaataaaatgtgtattatatatatataaatattaacagtatatatatatatatatcataactctacatatttatttcttattaggtacaaaaacaatcgatgtggggagatatttcttcttgatggcatttaatctcataggaaacctcatgttctcgagagatttgcttgatcctgattcaaaaag

SEQ ID NO: 17200 - DNA, 1047 bp, Arabidopsis thaliana
  unsure (1)..(1047): unsure at all n locations
cacagttatgtttgcttctgacttctaaatctatttctttaataatagtttttgggtttgatgttgcagattaatctttcaagaaccagcggagttgtctcagatctagtgataaaagtgagatagatttgaatttcgtcaccaattcaagaaaagatgagtaaagaagagtttatgaagatccaggtttgttcatcacttttttatatttcttacataacatgaaaaatttgctctgtttttatttactctgtttcttttgttgttgttgtgtagacttgtgttctcaaagtgaatattcattgtgatggttgtaagcagaaagtgaagaaaatcttgcagaaaattgaaggtaaaatacaaaaattttgactttaaattcaaagccaatcttatgtcatcaagctttgactaacactccaaagtctttttgatgatctttaggtgttttcacgacaaagatagacgcagagctagggaaagtgactgtatctggaaacgtcgacccatcagttcttatcaagaagctcttgaaatctggtaaacatgccgaaatctggggagctcccaagggaggatctaacaacaatcagaaccaacccaacttggccaatcagttcaaagccatgcagattgatcatggcggcaaaggcggtggcggtggtggtggaggccctgctaacaataacaaaggccaaaagatcggtggaggcggtggtggaggaggaggcggcggcggaggtggtggtggcggaccacgaagatggttatccacagttacaccacaacagatgcagcagttgaatcctcacagcttcagcagctacaacaacttcagcagatgaaagggtttaagatctgaagcttcctctcagttaaagggtggtccaggccgggactggctctgttctatgacaagaatntcagatcctaataacgtaatcaaaggctgtgaagtcaatgtcctgatgatgatgatgagaagatttagtgatgaatcgatgatgagttgatgagatgcgacgagttgatgatgatttgagatga

SEQ ID NO: 17201 - DNA, 1417 bp, Arabidopsis thaliana
atatttcgacgatccgggagaagaaggtaaaacatgttaggacctaattcaaagtttgcaaactaaattttagtgtagccgctaattttaatgtgttcttatagaatacttatggatacattacagttatcaatcttgtagctgctaatatatatggcgatttagatgtctacctgtaatcaataagttatctaacaaaatggtaaactgcacattatttgcatcacactctaaaggatgccgactacgaaggagacaatatcttcattggcagattgttcaagaataaagaagactgcgcaacaaaacttgcaatacatgcgatacggcgaaagtttcatttcatttacgcgaagtcttaccctaacattctcctcgctgcgtgcgtaacgcatacatgcccgtggcgtatttacgcaacaaaaatggaggatagtgaacgattcgagataaaatgtgcaacccaacagcacacttgcagtgtagacgcaaggggagactttcacaaacaagcatctacagctgtgattgggaaattgatgagaacaaaatacctgggggttggtagggggtcaaggcctaacgagttgaggaagatgctccgtgatgagttcagcctaaatgtctcgtaccggaaatagctatggataatgccatgggctcggcaatgggaagctacgcattgatcaagccttatttcaaacttctgctggaaacaaaccctaactcgctagtggcccttgatacggaaaaagataaccaaggtgtggagcggtttaggtacttattttttgccctagctgctacagtccaaggttattcttatatgagaaaggtgatagtgattgatgggaatcatcaggggggccgatacggaggctgcttaattgctgtcagcgctccagatgcaaatttttaagtcttccccattgcttttgggatagtgaacagcgagaatgactatgcgtggacatggttcatggagaggctcacggacaccataccagatgatccagatttggtcttcgtttcagacaggcactcatctatatatgctagcatacgcaaggtaagttatatccggtaacaagataatgttactagataacgttacacttacaaagctaatttttctagtacctcgcaagacttactttacctgatacgtgagtatatatatatatatatatcataactctaaaacattgtcatgaatctccaggtttatctcatgtcttcacacgcggcctgcgttgtccatttaaagaggaacatagtctcaatattcaagtcagaagggttgatttggtcgccaatgcagctcgggcttaccggtcgccaatgcagcccgggattacctcgaaggcattgggtttgaacattgcacgctctcgcattttgtgggagatattgtgta

SEQ ID NO: 17202 - DNA, 831 bp, Arabidopsis thaliana
ctctagagcaagagaaaagcaagactagatttaagagttctctgtaactaaaaactgcaggagtgagtaagtaaataattcaccaacaggaaaacaaaactcaattatctatagctgaatacacatgtaaatgagaatttattaactaaaacatcttcctttgtaactgatgtgacatttacaatttttcattttgaggtgtaagaaccgtgtgacaagtgaaaaggttaaaataagcaacctttgtgatattttctctccactttttgaaattgggtctccaaaccacagccaatcaatattctttataaatacaaacacacaaacagcatctttctctcaaacacaaacatatcttctatcaaacaccaacagctctattctctacctcatttctcatcataacaaagagagagaaaaaaactatggaattgacactgaattcctcgagttctcttatcaaacgtaaagatgccaagagttctagaaaccaagaaagttcctccaacaacatgacctttgcgaagatgaagccgccaacatatcaattccaagcaaagaactcggttaaggaaatgaagttcactcacgagaagaccttcacgccagaaggtgaaacccttgagaaatgggagaagctcacgttctctcatacccacactccaagaacgacgctagcgttccggtgttcgtcatgttaccgctcgacacagtaacaatgtcagggcatttgaacaaaccacgagccatgaacgctagtttgatggcctgaaaggagctggtgtggaaggtgtgatggtggatgcttggtggggattggtggagaagatg

SEQ ID NO: 17203 - DNA, 1892 bp, Arabidopsis thaliana
gccgttaatattagttttactttagttaactcattataacaattttaaaatgttccatatcagctatcccacctattaactgatattgtagatgtgttatcgttttaaaattttattcatagctgtctccgtaaacattatcgttaacaatatagttttccattttccataaaacctaacacagttgttctatattctctaacacagttttaaatattttatattgatacatgcttgaacatcgtcatcaaaagtaccaaacaacattatagcagttaacagaaagtttatcataatatatcacatgcatagaggaggtttgatggggatcgcccccgatagtaatattacattctaaggatcaaattccgtatgtatatacagggaaaatctcctgatccttctgcattatttatcacacattcttagtttccaactttcatggcaccatcctttcaaacctcctctttttcaaaaaacattttccttcccccaaaaaacaaccccacgctcgcagttatggatcctgcacgtaaatgcatgagttggtaactctaatgttaccgttaattctgtaataataaatagtaaaatgattgttaccgaaaccggtcccttgcacgttgccctattatgtcccactgtcctgcatctggagcaacgctttgaggattttttctgcagataaataacacacacattagcgatatatctatctgtttatatatccgttactaacaatgttaccttaaactctcccctagagaatagtctcctcttacgcggccttcccggtggcctacgaacgtaaggtggcgcaagctttccgcttccgacatcactagggaaggtgccagtgtatccatgtccgggacgggcatgatcatccccttgtacgctaatttcagatatgggatggtgtggtggacgccgaccattgtttcgacacggatcccttcttttattgtcgctgctatggcatgggaacaaggaatagttagcagctggaattccctgcatgtgcatgacctttcccaaagattaaccgcgaacgccgaatcttccttgtctcgcacctcctaaaatgcatctcctattttaagcacaacaaaccctgcctctttttcaaaattttcaatgaccatctcattgaccttggggagcaaaagatttccctcgtgttgtgcagtttcttgccgtagggcaaaccacgtaaccagtgtggttcgcagggtctctaagagagaaattaccggataatcccttgccatggttaagacattgtttagcgactcagctatgttgcttgtcatgaaaaaatacctatctcccacaaaatgcgaccgcgtccaatgctcaaaaccaatgccttcgaggtaatcagcacaagctgggtgcatagcccttacctcggcgaagatgcgattgaagtcgcttggacggtaagatcgggccgcactagccacgagaaagctcaacccttccgacttgaatatcgagacaatgtttctttttagatgcaccacgcatgccgcgtgcgatgacatcggataaacctagaaattagagccaatgtatcagtgttattgataaaacatactccatggataaaacacaaactataaagaaactgacgttcgaatattctgttagcaactaatagaaaacgtctcagctaacactgctgcgttattttagcgacactatttacaaccgttgtcaaaataaaatataagttatcctgtaagatcacactatcaatatgactagggacattccacagacttttaagtatggataactccttagttaacaggtaacagtagaatttatatatcatttaacccgtattgttaacgattgataaatactgcataatagtggggttatat

SEQ ID NO: 17204 - DNA, 581 bp, Arabidopsis thaliana
taaaattgtaaaaggctaaacaacattttgcacaactgaatgtaagaaaattgtaccgtattcatcgataggagcatcatagtcataactagtggtgataaatggacctcctgcggtgcgtccaaagtttgttcctccatggtactgtcacatcaccacacaacaagcatcagaatgaaaccgaaaccgaaaacagtttttcgtaatgttcgtgcaaggactaattaccatgtagtagtttatatacgaaccgcccttttgaatgaaacgagctactccaaatgctagatcctctacaggtcgtttaggaacagttccaccaaactctgtgaaccttttcaccatcatagtggacaacaaacacaatcagtaaacattttgtgtctctaataacattacagttttgcaaagaaagtatttgtttttaccagccactccatgcctctgtccacatagttggcttatacggtttatttggagtaaaataatcacagtagaatccgttgcaagtgtttatctacaaaacaagaagcacaagaaattacaacatagtacattactactcttatcaatcacaaaag

SEQ ID NO: 17205 - DNA, 887 bp, Arabidopsis thaliana
caatatcttcttatctcttatattaaacccacttcttttagggagggaaaggtgatggtgttcccatggtgaggagcggcttcatgataattgggatgatgcagagggttattatagtaagtgtgtttctctctacatgtcaatcatgaatggtgaacgcacttttacgttatatctcttcgttgtaaagattgagtctcctctccttttaggctatcagtttggcgagttacttgatggtagatatgaagtcattgctactcatggaaaaggtgtcttctctactgtggttcgtgctaaagacttgaaagctggaccagctgaacctgaagaggtggcaataaaaattatccgtaacaatgagacgatgtaggtggtgcattctctaggccccaactaatttttcgaattcatatgttttatcatctttatgcttttgtatctgattactgaatcacattttgtttaggcataaagctggaaagattgaggttcaaatattgaagaagctggcaggcgctgaccgagaagacaggcgccactgtgttcgatttctttcaagctttaagtaccgtaatcacctttgcttggtgtttgagtcgctccatttgaatcttcgtgaggtcttgaagaagtttggtcgcaacattggtctccaactctctgctgttagggcttattcaaagcagctattcattgctcttaaacatctgaagaattgtggggtacttcactgcgatataaaacctgacaacatgctggtcagtcacacttttcattggttttctcctacttaattcaatagctttctaactgttgggtctttgattgtccaggtcaatgaggggaaaaatgtcttaaagctttgtgattttggtaatgcaatg

SEQ ID NO: 17206 - DNA, 1066 bp, Arabidopsis thaliana
accttatggcagcggagtcgtaggctctggcgcttcctcccccgtgttgaaggacccgagccagacccgttttttctttaccggatcacggatctccgcagcatatctcccccatggtctcctccttacacccctgtaacgcacttccttactcttttctccgccgtcattcacggccagggccttagttacattctttctcttctttacgcccttgtcactcacttccttactcttttctccgccgtctttcacggccacggccgtagtgacattctctttttctgtggtcatattttggttgggggagaataatttagataaaggacaaaactattgttttatagaagtgacgtaatcccacaaaaggacaaagtgacaaaaatgtggaaagaaatgtccacgtggattgactgacgcgccgccttaaagagaaaacagttttatgacgcctttttatgttttaacctaaacgtccccgttcttgcgtctcgcagttttgcgccatttgttgcttgggctttaacaggttattatctttgggctttttcatattttatctgagaatctgataaacaagtacttagaaattatccatgtcgaatatatacttcgagaaagcttgatgaatctaaaattgtattctttgatacaaaagttataatacataaaaattgagtagatgatacattgctacattataacaaaatttgatgatttattattactccacaatctgcttagactaatattggatgtcaaaaaaagaaaattcgactaatattaagcataatatgaaaatataatgagtttaagtttcaaattttgaacgcgccaataaaatgtataccgttttaaaaatcgcaaaaaatgaattagtggtaatttataatccagtaatttagataataatccagagtaagatttgtttctaattttctcatttaaataccattgtgaagaatctaaaccctaatctaccagcgcgactcttcatcacgtcaaagttgtcaattattttgaaaaaccctaaggagattcaaattacgacactatgtcgacgacg

SEQ ID NO: 17207 - DNA, 641 bp, Arabidopsis thaliana
tacgattgaggattctccaaagcgtatctaacaccagcttgagcagcgagatgcatcacgtgagtgaaagcaaccacatcgaaaagctttgctaacagcttcgcgtcgtttagatctccttcaacgacgaagatccctctcgacgacaacagagatctacgagcacgtttcaacgacggatcgtagtaattgttgaaattatcaagtccaacaacaccatcgccgcgtttcctcaaggcaagtgacacgtggctaccgacgaatccggtagcgccggtaacaaggacggagataccgccggagcgatggatctgagcggaggtacgaacctgtttctcccactggatgccgccccaagaagcggttagataacggctaccggaatcgacgaagctttggaaactcaagtaagaagcggtgagagcgatgaggaagagagcccaaagaaacatggtgctcgtagaagcgaaacaacggtggagctgacggtttgaccggtcaattttgaatttacccggcgttgacggaaacagctcatcttctattgaaggcataatttaattaaactctctttacaacaaaaattcttcctcaacaaaaatttatcggaaaaaatgggtaattaaatttagaggaaatga

SEQ ID NO: 17208 - DNA, 1162 bp, Arabidopsis thaliana
cctgaaatacgaagaactaagcatgaagtcaaaagcgagatatagagaaagataacagcaccaaatgcgaaagagtatatagttcatggggagaccaaaccaccgaactaaaataaaagttgctcaaatgttcaacataatcagtcaccagtaccaaaacacatgtaagcagcagagcaagatcttatacttttcagtgtgagtgtcgatttggacaagcctatgttaccatctcaactttgcatattcaaaatcaggaataactgaaacagcttgagagcatacttaaggctagagagagaaaaaagctaaccagggtcgcattgctggaaaaaatcttccacatctgcaaaaaaaagaaattaattgttcttaattcgaagaactaagcatcatcaacacaatccataacactagagcacaattgttgaaaaagggtctaaataaagccaccaaacgatcgtcatgagaagaattccacgaaaaactcaaaacccataagaaaagtttcaaactttaaaaagcaaagagaagaaagaagagaccagtggtgagagcttggatgatgccagctcgacggcccttaaaatctcgaaagacttcttcgacagttcgagggctgtagtgcgcagttcctccttccatgtccgtctctcctctctcggaaacgatgaaagaacagtgaggtttgcttcttttttttttctaaagcagaatttttgttcttaagtgataaagtaagaaaacttaatgcagactaaaaagttgccccgtggacagtgaccgacccggtctagtcacaacacttatttaaaaataaaaatacataaataatggacattaataatgtcttcgtgcgtttagtttggtgttatctcattttcaaacataatcaagtttgtcgggaaaaaaactactctacagatttcataaatattatgaatgacagacgtaatcaacacattcaagatataatcatataaccatgtcttttttcacttttctcaatcatctacaaagccatgatcatccagaggaaatagttacgatcagatgagaaacaccaacaacaattggaaaaaaaataacccaaaaaaaagaaggaaaactgagacgaagcaaatgcatctgattagcttacacttgccatctccactagctg

SEQ ID NO: 17209 - DNA, 551 bp, Arabidopsis thaliana
tggattgaaagagcaaagcccgagccatatcattcttctcttcgtcggctgatccgggttcaattgttccccaaagtttgtgtactctaagcacagcctccatcctcatggtccatacagtatagttgacggagtttagcatcggacattggatcgacgctgatcctccaccttctttacctttgcttgttgcttcaacgatttcactcatgtttgtgtttcaatatcaaacctagatgctctgataccaaatctagttttcaaagaagattaagaactcaaagatttaagaataactctctttatagtttaggaaaataactcaaaacctaaacaatctctaaatcttaatctctttaaaactcatatggtcaaccacaccttgggactcatatatatagagaataattagacctaatcatactaggattaacattagataactcctaatttaaatatctagataactcctagagatttaacataatcctttgtaatatttaataacttatttattaagttatttcaagcttactccaacataggtttcc

SEQ ID NO: 17210 - DNA, 1150 bp, Arabidopsis thaliana columbia
tatctgatagaatatggaacatacatatataaaaacaaagcaaagcctccctctgtattcatggtgattcgacccttaggtctttttatttatacagatatttgtatcatcctcttcatgtagatacatgaataagattactcacaactgttgacagaacaagatcaacttgaagtccccaggtaaaactggtcaaatatatctcttaaacttggaaaacttttacctgtccatcaaactttaataatactagatagtttgtgatagccatataagcaaacattacatcacccattagttcaaatgtatacctcccctgactgtacctaaaatgtctactagattattgttagatttcagttacaaaaaagagaaaattttcgtagaacatagtgaaatggctgagttccatcgttaaagcgaactgccactattctggtctagatcatagtgtactttttgtgcttgtaaattgtaaaaataaaattgggcagcttctccatcacgggttttcgagtatatttattagtcgaaagaaattgcatattcgattttgagcagaaaataatattttagctttaaaaggaatggaaaaaaggcaagttggaagagttatggaaaagaaaagaaaaattaccataatttggaaacttggtgggcaagacagatcatcagtttttaatagagacatgtgaaccctcatcaactcatcaattagggttttctgtacaatctcttagatttttgctaaagaacatctttcttattcacccgagacatgtctctgcttctcaaccagccctcgaagctatgctttcggagacctgtgttggcgagatcctctcctcttcactctaatggcttctcttcttcctcgttgcaaacccctcctagtatgatggcgctcaaacgtacctattttgctgattacgctcatcattttgaaaaaaaggtgcctcccgagttggtgtataatgatattaaagatgatgatgacattggaacgatcgggtcttcgcatggttgggtagttactttaaaagacgacggaattctacgtctccaagacgatctaaacccggttgcgtcagagacagatcccaaacgcatctcgctgccccctcttgtgactctgcctcattgccaaacc

SEQ ID NO: 17211 - DNA, 936 bp, Arabidopsis thaliana
aggcatctccaaagtaacctgaatgttaaagtacacatgtaactggttagaataaatataagaaatattgcctacaaattatgaagtatccacaaaatcatgtccaataacacaaaaaccgcaacccgtaaaatgatacttgttattactgtataccttcataggaacaccgtcgatgttgacttctgattgagtctctagcaatgaatgagatgctgcagccgtctcgatgttgtcctgaaagttgaagtccccaaaaatatggtcagaaaaaataaaagaaatattgcctacaaattatgaagtaaccacaaaatcttgtccaataacacaagaaccgcaacccataaaataatacttgttgttactgtataccttcataggatcacaatcgatgttgactactggttgagactctaacaatgaataagatgctgcattgccctatggagaattgccctgtggagaattatttctataaatgtttttttggacaaggactgagagatgaagcatgcctctcctgtgtccaataaatcaaggaactagttaaaaatgtatacttccataagatcatcaagttgtggctccaccacttattgagatgctgcatccgcctccaaagtgacctgaatgttgaagtatacttgtaagtatccacaaaattttgtctataataactatgcacatgtgccattatttggtttaaggactaggatgcagaaactctccccaatgtgttatatcaaattatatattagcttacctccgtcattggatcatcgtcaatgttttcttcgggttgcgtctccaacactgaaagagaagcttcaaccgtctccaaggtgtcctgaataatgaattacaaacgaatatggcttaaggactgtgacaataagtatgtttaaggactgggatgcagcaaccctctccgat

SEQ ID NO: 17212 - DNA, 605 bp, Arabidopsis thaliana
tacaattcgaacgccgaagacgttggttaaaaaccctagcgttctccaaattagcagctgtttcacccggatctcccctcgtcggccacccaatctccgatacaaccaccggaatttcaggtaaccctaaggatttcacggcggagtcaacagaatccagcattatgtcgaacagattggtgtatgcaactccagtgtacggatctatgtatctccggcgtctggggctgttcatcggctgaaacagagcaaaatccagaggaatcgaagggaatgattgtttataagcgaggtaagggtaaacgttcaccatgagaggtgaatttgttctttgtagaaaccttatgagtggttccaaaaccgaatcaccgatcgattgatggaaaacagcagtcgaaggagggaatcttctggaaagaatcgcgagagaatgcgttgtggagactttgatcttcttgtgtaatctgtatctcttgattgctttgtgaacgttgaccatagctgagactaggtggttggagaattgcgggagtaaggagacttcgtttccgacggagattgctgtgatgattgtgtcttgtggtaggtagatgaagttctgatga

SEQ ID NO: 17213 - DNA, 737 bp, Arabidopsis thaliana
gttgtgccactctaccaaaaacggtaatgcttcccagatacgatgatcatccactcactctttgttatggtgatgaaaacgcaagcggcaaatattggtgtgatatttgtgaaagggaaacaaatccaaaaacttggttctatacttgtaaagattgcggagtcacgtttcatatattgtgtgtagttggagatatcaggtatgccaaaccaggaggaaagattaacggcgattatgaattgctggctaacaatagctcttcacggccgctttgcagcacgtgtcattgtcgttgcccaggtcccttcattcttaataaggaaagaaacaacatattcttttgttcttattattgtctcgggctcagccgggagcatgcgtactcatcagtggacgtgtgccctccatgggcaatttgaacccaatacttgatgaggttgtagctgattttgttcaagtttcatacccatgtattagatgttctttttatgaaataattactagaatagaacacaattgtatgtttaggcctataatagaacacatctttttttattattcgtatattttctgtacttgtgtaattacacttaagatcctcgatgagttgtagttaaatattattattaaattcgtttttaattaaaaaataaataaaaaaaagtgattatccatgtcattagtccatgtcatttaccctaatctacgtcatctgaaaccaaaaattcccttaaaac

SEQ ID NO: 17214 - DNA, 1226 bp, Arabidopsis thaliana
gctaaggagtttctcagaagttgttttgattataagtttaagaatcacatatttagaggaatgttgtcttaagcacaatgaagtgaaaagagatgctcaaatgctatcactgggaaacggatggacgattggtataattactggtgacacacgaccttttgatccaggaggagctgattgggtgtatgagataggtagagtattgaagccaatcgagaagtttcatggaaccgattggatggtcgaaacgttttcttcaatgtggcatgagaggcaacaaagacctcagtatatcaagataaatggcactagagtagaaaaggaaaaaagaactcagaatatgaagctaagaatcaatgaaggtgatgctatcaagaaaaaatttcagagtttcattcacgggctgggaaaaagattcaaggttcttaaaagcatgctagtgaacaggatagtgacgatgaaggagccagaacatatctttttgcaaatcatttgggcagaatttctcaccaatggtgtgttccacttgctaaggccaccagaggtacgtgaaggagtttctttgttatggtatctgattaaattgctgatgcacaatggaaatagtgagaaagagagagagaagcgtgtagagtgcggattagcgatgagcctgcaacttgaggacaagttggctcttcgaggggagagtattgataggatcacgattgggcctagtgggcttcgtacaggacttattgtttaagcctgttttctttagtttgtcttctatttatcattgcatatggtctctgtaaacattatcaaaagatcaataaaaaaacaatcaatgtcttcttctcctttcttcttctcttctcatctctgattcttcacttcaacctctatttcttatattttctcatctcttttctgttacttatttgatagcccattttgggtgttatcaatatggaaagaagagtggccttccagcgttagtgtggcaagcaggtaactcctttcgtatcaaagattttgatgatatatgtgaaaggataaagaaaaggaacatgggctgttggaaatacatagaagagatgggacttgcgaattggagtagggttcattttacaggggagagatataatttgatgtccagtaacattgctgagtctttgaacaatgctctactacctgctaggggaagtcctgttgtggcattgttggaatggggatgagtcgac

SEQ ID NO: 17215 - DNA, 1090 bp, Arabidopsis thaliana columbia
tgctgaagctgattcagccaaaattgtaaaatgtcaataatacccttatctaatatatggaattacaccaaaaactacatctcttcttcagcttctcctcgacacaaagcagagaaaacaaggttcatcgccgtcgaggtcaatttggttttgtcatatttggttttgtaacatttttttgtcatttgatccatcatatttggttttgtaacattttttctatgaaaaaccattgctaagatttttgtaaagaaaaattggattaaggtccacgttaacgtcgtagatatacgaacacaataaaaaaatcaaaaagaaaataaaatctatactattaagagagaatgaggggcagaaaaattacaagccgcataagccgtttttaaatttcacgttataggaaaaaaaaaagacgaattaagggtaaaaaggtcaatttcctcctgcgtttgagccgacccaagccgtccgtgaatccgaccctgaacagaaacacgcggatcttcatttagacgtaatgggcctctttttttcttcttcacgcgtcatttggcccattaacacgtgaaatctcgcctcaaaaaatcacagagaagatcttgattttccctcttctctaatatattctctgaagaactacaatattctccaaatcccaactaataagttgaatttcccaaatccgtaagagatataatattctctgattgatatcttaaatggatattacctacaactcgacgaatccaactggtctcttcaagatcctgccaagttcaatattttgccgcttctcctagatattcaatattgcgaaaatatattctgcgatcacaaccaaacatgtattattcctatattcgattacgatagatattgagttgtgatttccattaccataaatttcgggtgtggtttagggcttcaactgtaattaatttagtataaatattgaatcaatagcatcaaatctaaaccaactcggattacttttcgtcgtagtctacataggatcaatgagtttacctttaggcttaacgtatcttagtgatgtcaagcctttcaaaacgaattggcgtgtgcgagtcaa

SEQ ID NO: 17216 - DNA, 1048 bp, Arabidopsis thaliana
catactcgggggccactcctcgacgtgtaacttctcagctaaagtcccagactcgtagaagtcaaagaaaaacatgtaatttggagcgtcgcatgtgctgctagtaacttagccacaccaggatgattgagattgttcaccaatccacagcaaagtaagaaaaaaacaacattttgaaaatggtacgaaatttaaaatggaaatggaaaatgaaagagagaccatgagagctgcaaattcctgtggaacttgtcaaggtcatcggaagtagacaagataggcttcttcgctgctactcttcggccatcgagaatcgcttcataaacaacactctctgatcctgaaaatttctccagacaaatcgaattcaaacgaatgaagattgcgggagtgagagggagagggggaactggggaagagaagaaacagtacctttagcgattggggagagaagagtgaaggaagaagaagggagatgaagagggatcgattcactggtgcaacatcctctaatgcatgtgtttggtttcacaatttccatcaccatttttctccaccggaaaaacaaacgacgaacagagaaccgatcgagcgtgatgacgacgacgaattccccaatttcgcagtttcaacagtaacctcgtagaatgcataccgttttcatgtgtttggaacgctctcaaattaatataaaccacacacagcgtgccgctttttgtttttcttatctctttgacctttcagagagaacgaaacgcacagcctctcaggtgaagacacgtgtcatttgttccttgacttgtcactttcataccttaatcgccaagtaacgtaaaagataccgacatggccaaaacctacgaatctgaaatttgaagaagcataagtttgtctattaaagatggaatcaaagacgttctggatcgttactcttcttctctgtggaacaattcaattagcgatttgcagatcagaagagaaaagcacagagaagacgatgatgctaggaggcgttcatgatctccgaggaaatcagaacaagtggaga

SEQ ID NO: 17217 - DNA, 536 bp, Arabidopsis thaliana
tgacccttcacccacccactctctgaatctctatcagcaacatctctcctgcctctgcctccatctccaccagtttcgtccttcaaacgccgggcttcctcgttaatacttttttgcaggttctcctccctctctttcgctgttgctcttgttgcatgcaactgctccacaattgctgtcaactctgggcctaaccccctcatctcctcctcgattctattcctctcttcctggtcttctgccctagccaaacgagtgcaccacacaactttaagacggttacgcagcagaaacttgacaaggctaaatttttcgtactgaaggtgcataagcagcttgtcctcaacaaccctatcatccccttcagcgagtatctttagtagctcttctgcgagtacctggcattgttgtggatcaatctgctgttcatacgcttgagagatctttctctggagccaatatgcatcaatgtcttgaacattaagatttgtgccctcattggcatctcctgcatcctcatcatttatccctgcatc

SEQ ID NO: 17218 - DNA, 961 bp, Arabidopsis thaliana
cccctatagcccatcctcatccacttccaagcatccaatgggaactttaccgggtaaatccgaaactaatcataaggagttttgcaatgctatcttcataaacgattttgatgtggttgaaaatatgagctatacacaatcaagagaagatggtagaattgatgagaatgaaaaggcaatagaagagatctctaaacttctatatggttctaatgttgagaacttagtggttgctagtgatgagaaggccaagaagagtacgaatggaaacgatgtggtaacaaagagtgttgaaaagaatgcggcatcaaaagttgagtctcctccttatgaacctccacttccgtttcccgggcgagttcttaccaaagctaaaaagaaagttttctcaagtttcaaatccaacatgagtagagttggagcgcctttgccttgtgtggaaaacttgtctcaagttcctcttcattttcaacctgcagcccgacaacctgcagcccggctcagcccggttcggttcggttcgatccggtttgaccaaagtgtcccactttacacccttatttctcattcaatagaactccttttttgacatatgagtataccagtttgtagtactctttaccagcttttcaatgcactaatgacccgacaattctgttcaccggaatttggccggaaagtcaccggaaaagttttgtcaaaaactttccaacaatcctccacatgaatagaaataagtctaaacatatgacgactttactaatcctaaggactgacccaactagctagactagacagaacttcgagagtataaacgaaaactaactgtatctgagttggtggcgtttttcagctttgaacctactcattgttagtacctatcgagtttaccggccagatggtgaacatgatgtcttgaaccatccggagtttgatgcaacttagacagcaggtataagac

SEQ ID NO: 17219 - DNA, 582 bp, Arabidopsis thaliana columbia
cccctgaatcttttaagtctgatagatctttcaaattagttgctgaagaatattaaattaacttccttagatcgaagccactgctatgccttcagattaccgtgacaagaaggtaaataagtttctttctctgtcacttaagctcgatagtgtttcagcgctaactaaagaagagtaaagatatacatcaaagttgtatcctttctaacaagatgatgcggaaatcacaggtttggatactttgcaacgattgtaacgacacaacagaagtgcacttccacataatcggacagaaatgtggacattgcagatcatacaacacacgagcgattgcgcctcctgttcttcctcaatgacaaaaccaagatcttcccatgtattgcctccagaaagcaagcaagaactttttgttgctaaaaaaactgaggcatagattgatgatcataacaaagaaagaaaaagaaaaagattgatgatcaatttgatcattggtcacaaaagcaaaacacacatttgtcttcttcatttgatttgttgttgtcttatactgttacatttttccatttgtgtttgggtgttgga

SEQ ID NO: 17220 - DNA, 567 bp, Arabidopsis thaliana
tttctagttaagtagttggcttcatcgtgttggcaacatcaatcacaaatcggtacttaacgtcagcctttgcaagccgttccatggcggtgttgacataatccgcagagatgagctcaatatccgccgtgatgttgtgttttccagccaaatccaccatctcttgcgtctcctttatacctcctaccatactacccaccaccatcttccgccctttatgtatacaaccacacacacacaaaaagaagaagaccatattctcaacgtttagtggctttactcttcaaatatgattagatttgtgacaaaataatcactagatttaattatcaatggaaaagtatacggatttgttactataaccgcaaatttggtggctatattgttgataatgtttaaagatgactgacaaataggttcataccaaagatgagaggaaaaacaggaagctcgagcggttctgctggtgcaccaaccataacaagttttcccttatttttaagcaaaccaagcagcggaagaagtggatgggtcgcagatacggtatcaatgataccatccatagtc

SEQ ID NO: 17221 - DNA, 784 bp, Arabidopsis thaliana columbia
ctttaggattgatatgtctgtatgaatcgattattatgttaattataacaaaaaaacaatgtaatgactgacttatcatcgctcgattcgtgctacggctgagttatgataccgtcacggctgagttctcgttgtttaattcgatgtttagttgagttattctaacgcggtggctgacttgtcatcacacaaatcgtgtgatggctgagttattctaacgtgatggttgacttgtcaaacccaaacttccctcccatcaaagaaaccaaacgtcactgtaggactatacatacaccagtttacgacaactgaatagtcaagaaccccaatgtcgttagagaaccaaacgtcgttagaggaccaaacgacgttagaggactatatatatactggttccctcttgtcttttctcttgtcgattcttagcaactactactcttcctttcttgtcttgtcttctaatctctaagaaataaaactcttccgagatcatggatgcatcaggttccaataagcggcggtgtgtggatgacggttccaacaagaggccgtgtgtggatgacggttccagcaaaaggctgtttgaaatggagaatagtttcgaagccatcatctctttcatcaggagcaacataagggagacggccgagttaaagaagcaagggacgtttcgtatttccgttgacgatgctgacatggaatattacagccgacgtcgttttgaagtgatgaggtgacaagtaagccaccaaacgaatagttcataactgagccatcaagcaaa

SEQ ID NO: 17222 - DNA, 1881 bp, Arabidopsis thaliana
cgaggaatcttggtgagctcaaaaacttcaaaattgtaagagagttctcgtacaaccttaaggtaagcatccattcgttcgtttttcgcctcatagtttccactgaactggctggcgacaagttgagagtcgcagtaagcttgaattttctttacctcgattccatgggctaggcgcagaccagcgataagagcctcgtattctgcctcgttattcgatgctgggaaccctaagcagaacgattgctctagtatttcacctgtcggagattccaagcggacaccaattcctgagccgtgtcgagatgaagcatcgtcgacgtgcaagatccacttttcgacaggggatactcctgcgataaggtctggtgggagctcgatgagacttggcgcatgttcggttcttgtaggcaatatcatattcgctcaattctacggcccatttagcgagtcggccggattggcttggactgtgaagaattgttcggagcggctggttcgtaaggacttcgactgtgtatgatttaaaatatggccgcagttttcgagcagagataacgactgcaaatgctagcttttccagtgtaggatagcgtagtcggcaccgtcaagtgttttgctcacgtagaaaatgggatgttgttctccacgatcttctcgtacaaggactccgcttacggccgaggtagacaccgcaatatagagatatagtgttccccttcctcgcatttttcgtcccattcaaaccgtttgttggctcggagtaactgatagaaaggcaaacacttgtcagttgatcgagagataaatcgatttaaggcggcaatgcgtccgataagccgttgtacttcccgagtgtttcttggagatgggaggtcgattatcgccgatatttgcttagggttagcctcgatcccgcggcgagtgactaggtaaccaaggaattctccggaggttactccaaacgtacatttggacggattcaacttcatgttataacgattcaggacttggaaacactgtctaaggtgagtgatgtgttcttcagctcgcaacgacttgacgagcatgtcgtcaatgtagacttccatcgagtgatcgagctggtcggtgaacatttgattcactagtcttgggtaagtagcacccgcattcttaagtccaaatggcatcaccttgtagcagtatgtcccttggtccgtgataaacacagttttttctcggtcattttggtgcatcagaatttgattgtaaccggagaaagcgtccataaaagacagcagctcgttaccagccgtagcttccacaagtcggtcgatatgcgggagaggaaaactatctttcgggcaagccttatttagatctgtaaaatcgatgcatactcgccatttcccgttctttttcttaacgactacaggtttctcagccagtcagggtatctcacttcaacgatggaaccggcatcgagcaatttctttacttcctcgttcacatcttttgtgcgatcgggaccgagctttcgtcttttttgtttcaatggtttatatgtcgggtcgacattaagttcgtggcaagtaacggctgagtcgattcccggcatatcttcaacggaccatgcgaaagtagctgcattctggcggaggaaattaacaagctcattttggagttctgacggcaagtcaatcctgatgccaacgcagcgagacgggtcgctttcatcgatgttaacttggacgaccgttcctttttgagggtttgggcgttcatcttgagttgggactagcggcgcggtcccgctctgtaattgctatagtggtcgagcgtttcgtaactgtcgttcgatcatgaaacatgttcgtgcgacgagcggatcgcctcgcaa

SEQ ID NO: 17223 - DNA, 593 bp, Arabidopsis thaliana columbia
atcaaacttctctccaaattcggctcttatctccttcatccttgagttgatcctcttcatgtcttcttgatggttatcaacgaagtatcggatgagaccaatgactctatctttcgcctcggcggtccggtagggctcattagtttggtaagcatagttgttcggatgaacagctacaccaaagtctcggatgagaccaatgagtctatctttcgcctcggcggtccggtagggctcattagtttggtaagcatagttgttcagatgaacatctacactcatcacctcttgcaggtatccttggtcatatccgagatattcatgtcgggcaactccataaggatgagaagagtgaagtcctctgacgcgttgacctccgggaatgggctaaccgagcggttagcttgtgggcggttctgaatgaaggcggcggattgatcgttagagtagtgattggcccaaaagctcctccattagacagccaagattgccaagactcgccatgcatttgggatgcatcaggcgtgttgtggtcagttgagaaatgtgatcacggtttgacgatgattcacatcgggtagtagctatgggat

SEQ ID NO: 17224 - DNA, 614 bp, Arabidopsis thaliana
ccaatatccaggttgcccctcaatcacaaataacatttcttaatggttaaaagatgtggtgagtttccagatgggtacgtgtctaacataggacgatgcatacacattgatcatggaagtcaaatgtatggtttgaaaagtcatgactgtcacgtcattatgcagcgactatttccgtttgcattctctgaactccttccccatgaagtccatgaagcaatatcaggtaaattataattatttagcttcagtgtacttatatagttattaatctgtataataaacttattttttcatttatttttttacagatgtaggaatatttttccgcgatctttgtttaagaaatttggaagtcagtgatgttcgtatgaaaagtaatattgctctgacactttgcaatctagagaagatatttccaccatcttttttgatgttatggagcacttgactattcacttaccaacagaagccaaactttgtgggcttgtgcagtttcgatggatgtatccattcaaacgattcatgtttcatcttaagaaaaaggcgaataacaaagcaagtgttgaagggtcaattgtggaacaatttattaatgaagaaattacaaattt

SEQ ID NO: 17225 - DNA, 826 bp, Arabidopsis thaliana
tgatcaagcaaggtttggtgacagttaacggacaagtggtgcgtgaactagcaaccactatcttctcacgctacatactgcaaccgatctcttatttgagagaatagctttaaggcaatttgaaccatatcaaatttagcgccgttgccaaggtttttgggaatcaccattgagtttagtttagagatttcgtctagtttttacttttcttttgttactcacgaatttcttggtttcttcttttctgtgtttcaggtgtatgcctatgcaaaaaagaagcacacaacagaaggagctgattaacttgtctgttcttgacttaggaaaacttgagcgcacaaaccgaaaaactcagagattagcaatggctgacagaatcatcagacttgatgaggaaggagttttaagagatgaaaatgggaaagcctacaatgaggctggtcagagattggatgatcattgactatcattgacttcctctcagccacggccgcgcaccaccaccgccggcgcttctcccccaccgtcggattccccctctgcagctgcccacggtcccatcttttgacctttggccaaaattggataatgagtggattgcttctcaacgagtttgggaggaggatatcaaccgggaattcactaaaggtgactttgtcaatcgtcatttttctccagattgggatgattatgatacattgttttacaatgcttggaagaatgtggataactacctatacggtttgcggattttgatttgatgcgtcgcttgaagatagagaaatctgttttaggattgctagagtatataggtttgggacaattt

SEQ ID NO: 17226 - DNA, 619 bp, Arabidopsis thaliana columbia
gagatgaaagccaaatttgaggagaagttcgatgacctcactaattgactcgaacatatgggcaggggacacttgttgagatcgataacactctcctcaatcatcaagacgatctacaagaccaaaacacgagaatcgtcaatgtgggattcgccgttgatgcggtagagagtcatctagattggaagattgaagagctagagaagaagctcaccaaatcaaacgaattatcggaatgtaaaagcaaccaatcttgccaagaagaagatgagtttcctaagtcccaagcccgatatgaggaggaaacaaaaaagaaatcggattcctagtggaaaaaggaaaagttctaaattcttattccgaaaaaagaaatcttgaccctataaaaaccctagggattttgatccctaatgttcctccccaagaccaaatcgagcaagaagaggacttaaaagaagaggagccatctcattaaaagaagactagatggccgaacacaattctaaagaagaaagccttgagaccgaaaaataaaaagtttgccttgagagtcaaggaaaccgattcgaaaaactttcagaagaaagtgatgaactcaccgacttttctagtgaagaag

SEQ ID NO: 17227 - DNA, 1060 bp, Arabidopsis thaliana
ttctttccaaaaggatgcaagaaattgtgtgacgtacctgaggtagatttcctttccaataacctttaataccttcttcctttccgataagagtaatggcctgtagtcatcccaaacaaaaccaaatcaacaagacttttacaataagaacaactaactaatcctcttaaaaattacacgattgagagtatatatacctcaatgaaaccaatagccttcttagcactttgttgcacagctcgaacaccatgtgtctatgcgttcttcagcagtgatcgacgcgtatctctacattactacaagcctgataacaagaccacgactccaaattagtgattcaagtacccccaaggcacagtagaccgtcattcaatcggcagtttcgatcctgcgaggataacaaggacctggtctaccaacctgagtcagatggagacctgagcctcttgatttttctttgttgtttgtgtcgaatccttgactgcttttgctgaacgttagtactgaaactattgtttgattttgatggtttgcagcaaggaccaaggaagttactctctcgcagacggaactcgagctgttaacccttctccgacgtggtcagactgactggtccacttttagcagagatcgcatcgtagctgctcttgctgtagctccagcagttcccgcaatcgtccctccaacagcacagctagatccgatcgaagaggtcccgcggattgaaccggttcctcaggctgatctgcctataagtacgagttccgttatattttcttgggtttaaaaaatgtacgagttatcgagacagctgcgcaacccgaattgctaactaacaaatgtcatgctctatttgttcagttcctcctgactccagctccacttcagaactcccgctcattagaagaatgagatgtccaagccttcatgttcaacgagccaacgccgaggctcatgctcgtgccgatgatctgtcggctgcggtgactgcggctcgaaacactctagctgtttccacgcatctgcctcagcatctcatccctccttcctgaggtcacac

SEQ ID NO: 17228 - DNA, 707 bp, Arabidopsis thaliana columbia
cggtaggctcattagtttggtaagcataattattcggatgaacatctacactcatcacctcctacaagtatccttggtcatagccgtaacattcatggcgggcagctccataaggatgagaagagtaaggtcctcccacgcgttgatctcttggggatgggacgcaggtggaaggggcctaccgaacggttagcttgtggccgattctaaacgaaggtggcggattgaacacgagagtattgattgttcctgaaagctcctccattagacggttgcgattgccaagacccgccattgcatttgggaatgcatcaggcgtgttgtggccaatagagaaatgtgattcgcggtttaagccgtgattcacattatggtagtagccattgggataattcctcgaattcatcctttaaacttcctgaaacaaagaaaaacaaaacaaaaattaaaagcaaagtgtcctagagttcactctaatccttggacttgtggaactaacaatctctccccggcaatggcgccaaaatacttgatgcgtgttttatttcgcttcaggcttttacttgaaagaccacacgactgcaagttcacaatatgtgggagtagtactataggattgaatccacaaggagagaagtagctcagagaaatccttaagaagagagtgaagctaggaccaaaataaaagggggttgttgtatgttgtg

SEQ ID NO: 17229 - DNA, 800 bp, Arabidopsis thaliana columbia
ccccatttcctctaagtcagtacttactctttactgctaacagattaattacattgtatataaaattaattagatatgaagtaagggcgggcaaaaaaaccggaaccgatgaaccgaaccaaaatcgatctgaaaaatttgatctgattcgaacccaaacccgaagaattattctattgaatcctatatttttttacccgaaaaaccgaatccgaacccgaaaatatccgaatattttaatcgaaaatctgaattttattcgatacccaaaattttaccaaaaaatctggctatttacccgaaaattcgggtataggttccaaaagaggctccaaaaatctatacatgaacccatgcgaacccgattggatccgaacagaaaccgaaccgatattttagatttaccatattcggtcctaaacttctctacccaaaagacccctacccgatcggattttacccgaacccgacccgcttacccgaatgcccacccctaattatggcccctgttatgcaaggacttagttttagtattctttttttttatatgacaaatatcaaatttaattatttacaaatatctgaacgaatatgaatattatatgaattaactgaactaacaaaacatagtatctgaatttgtatagtgacagaggaaacatggttatggttggatactatgagtttctcttgttagccataaacgatcggatgcacataccattacaactctgaaataatgtccccatttgtccaaaataaatcatgtgactctataatttatgaacacttataaataa

SEQ ID NO: 17230 - DNA, 505 bp, Arabidopsis thaliana columbia
gtttgtatttcatcaaaagtctttcgtctctaaagttagttaagttcgttggattgcagaatcaaagtgtttatctttagcaagaatgcacatacagccacctgcaatcgcgactgtaaaaaccgagaatgggattcaacagcaagtaccaattgtgaatggagcttcgcgaaccaattgtcaacctacactcaacaaaccgcagcctatgcagctgatgaacacaacatcagcagcaccagcaacagcaacaaacactcaacatcttcaaaaacctccagctttatcagagaagaaagacccctgaatcagatagattattatactctacttaggacagaaaataacttaccagagagagcacgctgaaatctgcctcaccaccgccctatattatcaggtaatccaccgtaattttacgttctcagtggcggttgttgcggcttcacgcattggcaggtgattagagagagtaatagacacaagcttatattgtgtcgttaag

SEQ ID NO: 17231 - DNA, 773 bp, Arabidopsis thaliana
cacatgataattttaaagatgacatgaaataaacctgatcttttcttgatcgacccctagatctttttggtggaggtgcaacaatctcattcttacacccttgtttgttgtgtccttcatgctggcaattagaacaggtcatgactcgatgtattcgtgataacatggtattggagctagaagctgtttcaaactgagacttcctccttgcatgattgtttggtctacctggattacctcttatgcaaggaggtggcagcactcccaaccggttcactctaggccatagaagcttgccctgtacaggcgtaatgccatcatagtatgtcagctgccacattctagttgtgtaccaatccacaacataatcttccaccttctcacgattctctataataaccgaggcagcgtgaatacatggaattctagtcatctgccactttatgcaaccgcaagtgtggctgttcattcgactgtgaagtccatatcgccacatttgatctgatacttgttatgtctggccatccatctttcacaaccttgtgcacgagcaatcatcttctttatcttagcatgagctcttttggtgaattgactcttcagtctctctactattacatacctcttttgattctgcaccatacattgccgcctaatatcttccaacatatcaagtagaggcttccttcttgcttgtctgatagttctgttgaaagattcactaagattattgaggttgtcattgtagcaacttcctatcctgacgtaagctc

SEQ ID NO: 17232 - DNA, 2015 bp, Arabidopsis thaliana
tgaaaacagttgtaatagaattatcatatgcagaataagcaagacatgaaaacggttgttcaaaaatgttgttatatctaaaatttaatgaaatttaacgaggcattttgttttaagatgcatgaacttggtctatcgactttggatttttttttggtactcaataaaacctttcattgatgagatttgtttttttggtaagtcattcattgatgagaattgagagtcatgaaggtacacaatatatgtatttcttaaaaaaagtcgaatactaaataggaaaaacaaaatcttaattaccctgttatttcgttatatcattttgatttagacttatgcctttcaatttcatatcaaattttttaattttttgtagataacatatagtaaaatatcttgttcttttaaaagtgatggtttcagcatgaagaaaataaaatatttacatgatataaagtccgaacatggtgaaaatgctcatatagtaaatgtatatagagagaagaaaacactagtaatatactaatatttgaagggaaaaatcttatgactagatgacgtaatgaactcaaaaagaatatacaattattagtgaatatacggatagatacgtatatacatgtatttatactgatgtcatatgtgaataaatgttattaatagaaatttacttaactaagtattgtttcacagcacatgtctccttgtcggggcacattgttagattgatcaataatgtattatatacaagcgacattcattcattttataatgcagttgtaatatgatgtgctcatactatatatacttaaaataaccatctatatagagaattatagatccttcatttttttaacttatttaactactgcattaggtaccatcttccaaaatcaaatttggatttgaatttaggaccatagttacaacttacaaagaaaactttcagataataggaaatgactaataagtaaaacaatcaattttaagattaacaattgatatgataatatatagactaacaaaatataagattcttttagagccttaaggataagtcaaggtgactcttctcctgatcctgatcaagaccactctccggcacacggcgggcggagaagtccctcgagccgccactttcgagaaatccttggtagccacggccgtaaagctcaaagcgaccggagaacgggtaaggctgatcagaatcaacagtgtttgaggatctaaagagttctcgactcttcttggctaaggttctctcaagcttatgagcgttttgatgaccaccaagagcttgagagctgtaaaactttctttgacaatagttacatgagaataccctaggctgctccaaacatgatgatgagttcgtggaagaagatgaagaagaagacatggaagaaggctcgagaacaagttctaggtttagttggtggttcttgtaacttggtaggcttagacgtagggatgtgtttggctggtagtccatacctttatatattcttagagatagagagagaaagagagattagagagatgagagaagtgtgtttgaagagtttgggcttgaggggcattatatttaaggtgtaaaggtgcgtaggtttgctcaaaactcatgttgggtgcaacttcaactgtaaagtatggagagagagtagagagatgagacatggaagctgaaagaatcagtgggaatccaagtgttgtcgcctccattaatggcaccctttgaaccctttgtcggtccatctaatattatttacctccgagttttatatatttctcgatacatcattttattatatccaatggtctcgttttagagtgttgaaacacctcaagaattatgtcccatgtggtagttgttaagaccggacacataagatatctggtttaatttgagcattgtagttgaggtatgcctttttctaattggaagtgtatagttataccatagacttgcgtaaattactatgattgtaatgaattatcgatatgtattcatacca

SEQ ID NO: 17233 - DNA, 927 bp, Arabidopsis thaliana
tcaccatttttcaattcggtaaaacgaatctaatttctctaaaaataaaagaaattatgacagtgtaataaaaagtttttttgtttttttgtcaagagattttttataaaagcgtatagttaacaatgatcttatttagtttgttaaaaatttaatgtatttttttcaaaaaattgctacttttgcaacaaaaaaaaaccataattaatcattcacaattccaccgaaacatagttttattcaaacatatatacgtcgtatgtatttacatttgcatgatccaaaatttacttcctccaataaaattttgcactttaaatagaaagtctctatacacatccgtatagaaacgggatcacaaaatagtttttaaggatatagttacccgttcgacattaagaacaaaatagaataaacataacaataacgtaccataatgatgacaagagctcaagcaattacacacatgaaaattcgtatatgatccaaccttacttgcaataagtcaatgccaagttataacaagaataagatattcacttcttggtgttgttgatagactccaccttgccgtcattacctccaagcaaaagatatttatccttgcgagtaagttcggtgcattcgaagcccaaaaccgcgccgataactttctggacgtaattagccacctctataggagtcttgccaccaccgttgacagtcatttcttcaggcaaacgatccaagaaagtggcttcatagcttggtcttgggttcatgaagaagaagtaagggtcccaaaacttcacacccctaactgtggtcccgttgaacattccttgtttacagttcatcgctactggcacaatccggtcgcttagctctgcgaatagagcgctaaatctcagtagatactcttctctacacgtcgtgccttccggacat

SEQ ID NO: 17234 - DNA, 901 bp, Arabidopsis thaliana
gacaccattgatctttgtcaggttgcagacctatcgaattcatctaggtggtcgagtggatcctccattagcagaccatgaaatttattcccctgaattatcgagatgagaccactcttaatctcgaagttgttgttctggatagcaggaggtgcaattcctttcctctgacggtgatcacgtggtgcatctccagcaccaatgttggcagtgcattttgtttattctgttcttcagccatttcgagtggttgctgaggtacaaggttgactgtgtttctcctttctctgagttcccgagctatgcggtcaatgttgtcgttgaaaaggaggttctgattgcctgttgatcgagttcgcatacagcagaggtgtacctggatcaagaagacaacaagaaaaacacacagttagtgaccgaaaagaaaattgaaaaaagaacttgatctaagcaagtctgaaatctcaaatgtaacaaacaaacacccaattggcaacgacaccaaattgataataggcttttaagatcaattaatcctaaagcaatatcatgtcgttgtagtactgaaggttgtcaatccaaatcggtgtgatgctaacaatcaagatgtggtcagaagtctctaagtcaagccaagcaataacagtttgtggcgtgttctagcagttctaagtgaacatgcagaaaacataaattcaagctaaaacaataaaacgctagaccaacacagctctttgcagagcactgggtgagctcaagtgacaagtcgagtgatagacagaaagtataacacagatactcgactgcacggtctgttgccacacaactgggtggtcgagtaacaagaaagaattgcagaaattaagccacagatgacaagatgcagtaaacaatagtagag

SEQ ID NO: 17235 - DNA, 1320 bp, Arabidopsis thaliana columbia
cctaaggatttctctgaactacttctctccttgtgaattcgatcctaaaatactactccgatatactgtgcacttgcagtagtcgtgtggtcattaaggtaaaagcctaaggtgagataaaacatgaatcaagctttttggcgcttttgccggggagagattgttagttccacaagtccaagaactagagtgaactctaggacactttgcttttaatttttgtttttgtttttctttgtttcaggacttaaacaatgaatccaagaaattatcccgatagctactaccctaatgtgaatcacggctcaaaccacttatcccatttctctaccggccactacaagcccgatgcatcccaaatgcatggcgtgacttggcaatcttggtcgtctaatggaggagcttacaggaccgatcattactctaatgatcaatctgccaccttcgttcagaaccggccgcaagctaaccgctcgattaacccgttccaccattgcgtctcatcacctagagatcaacgcgtgggaggacctcactcttctcatccttatggagttgcccgccatgaagatttcagctatgaccaatgatacttgcaagaggtgatgagtatagatgttcatccgaacaactatgcttaccaaactaatgagccctacaaaaatttcgaggcggaagataaactcattggtcatctccaagacttcgttgatggccaccaagaagacgtgaagaggatcggctcaaaaatgtcggagatgaaggccaaatttgaggagaagtttgatgacctcactaatcgactcgaaaatatggagggggcacttgttgagatcaacaacgctcttcttaaccaccaagacgatatccaagaccaatatacgagaatcgtcaatgtgggactcgtcgttgatacggttgagagtcatttagattggaagattgaggagttagaaaagaagctcaataactcaaatgagttttcggaatgagaagcaaccaatcttgccaagaagaagatgagtttcctaaggcccaatcccgatatgaggaggaaacgaaaaaggaaattgaattcctagtggaaaaatgaaaagacctaatttcctattccaaaaaaggaaatcttgaccttataaaacctctagggattcgtccctcgcgtttctcctcaataccaaatcgagcaaaaagataacttagaagaagaagaagtcgtcccttttgaagtagactcgatggccggacacaattctagagaagaaagccttaaaaccgaaaaggaagaagtttgccttgagagacaagtaaaccgattcg

SEQ ID NO: 17236 - DNA, 875 bp, Arabidopsis thaliana
tatattgttggaatctctctttatctgccgctaaatctttttacttcttaattcccttaatttatccagattcattataagcatatttatactacttctaagggctttaatggtttaaacgcagcggttgtggttgcggttgcgggagtttgcaaaagcgggtggttgcagtttcaagcgttatttagcgttttgaccgactagtttagcagttgaaaacgggtgcgtttgcaggagatttacgactggttgatcagcgggtacgatagcggtgaaacaaaatttaccaaaaaaaatttaatatatgatttaagggataaatttaaacaccaaaaactagaattatgaaaaagtataaatttttaaacataattaatgatttaaaactataaataattattcaaataaattttacgttgaaaacaaaaataattattaatattgaaaatttaaagttagataattattttttttagaattaatgtgaatatatataagacttgataatatatataatttaatttgattatttttcttttttagtttctttccttttttaaattaaccgtaaccgcccacaaccgcaaacgcttgcgggaaagagcttttgaaatccagcgatttcgaacggttcgaaacgatatggaacagtttctatgattagtaccaaccgttaacaaccacaactgaccgctaacaaccacaaccgaccgctaacaactactagacagttgttagcggataaaccaatcaagcccttaaaattctcgagttttataatttctaaacatcatataggtctcgtacctttttggtacaattatcccataaaatacatcataactttcccattatacattaatctcgaaccaaat

SEQ ID NO: 17237 - DNA, 854 bp, Arabidopsis thaliana
cttggcctgtgaatgtaaattgtcttcacactctgactactagagaaattgaatcaatgaaatctttgtcactaaagttacaaacacacaagagatatctgttgttatgtatgaaatatctctcaattggcctcttcctcttcctcttcttcctccatgttaggatcaccagcttccccattgctctcttctttttctttctgggggcttgaatttggatgactctcctccattaattcaccttcttcgtctgatgacgataacgcccttcttcgccttacacccgaagtaggtacctgtactcaccaaaacagacttagtgtgacattgtgttttgcatttgtgtagttccatgaattggattgaagtttatgtattacctcatcatcatcaacatcaggatcttcgagcccagcagcagcgagaagatcatgagcatcatcatccacaggttcctcagcttcttgagtagtcatctcatcttccctgttataattagtgttggcgtcttcatcttccacttcattatgatcatccatagtggcagcttcttcttcatcgtcctcgtagtgtcgagcccttgagcttttgtccttctttcttctctttccacccttctttcttctccgctcactgggcttacttccccatcatcatcttccactctatccttccgcttattagatccaggtgtggagctcttccattgttcctagggcattaattattacaaaacaaaatcagcatgtcatcctaaacatcttctcaagacaccatactgacaaagggatacacctaaaaagtgttacaaagagtaattttcccttgacactaacaacaatgttgagaaactg

SEQ ID NO: 17238 - DNA, 1070 bp, Arabidopsis thaliana
tcgtatccgttcatgaggtggtcaatggatatcattggaccattgcataagtcaacctaaggcgtacaatatctcttaattttgacggattacttctcaaactggattgaagctggagcatatctcaatatcaaggattcaacggtgaaaaatttcatttggaagaatattatatgtcggcatggtgtcctgtacgagatagttactgataacggaccacagttcaattcgcttgagtttgaagctatttgtttggattggggtatcaaagttagttactccaccccgccgtatccgcaaggaaatggccaagccgaagctgcaaacaagactattttgagcaatctcaaaaacgcctaagtcatctaaagggaggatggtatgatgagcttcaacccatttagtgggcttaccgtacgactcttaggtggtccacctggaaaacaccattttctttggtatacgggatggaggcagtggttccggccaaactcaacgttccccgattctgccaaaccgaaacacctttaaacgaagcagaaaactcattaatgctcgacgattcgctagataccatcaatcaacggcaggattaagctttgatacgaatccataattatcagcaagcggcagcctgatattacaataccaagattgaaagtagacctttctatgtaggagattatgtcttgaaacgagtcttcgacaatacaagggaagaaggggcgggcaagctcagagttaattgggaaggaccctatatcgttaccaaagtggtccgcaatggtgtttatacgctaaaggacttagaatacagaccagttcaacggccttggaatggggaatggaacaaggttaaggcataattaatagaacatattatcccctgaaatccgtccattattccaaaaagagtgattggcagagaaattcacgtcgtccgactgatccttcatttaaacacatttcccaaaatctatcgtttcaaggaaatattaaaagtttccataaataaacatagttcaaggacatttttgggagaggtcaggaatatggtccttcatcgtcgg

SEQ ID NO: 17239 - DNA, 1100 bp, Arabidopsis thaliana
caagataagcctatccaacttcctaaaatcttccaatgctgacaattcaaaccactcaacaattccacaaatggaaaaagactagccgtgacaaaacgataataaaaacacaaatcctatgtatccctacatgatacatcctactatcttaattcttaactaatgggcatgctctaaatagactagtaagcccatgattagtagaaatataatacatcccacattgattgttacttgctctatttgaaatcttttttttcctagttatataagaaaatagattattatagaagttttactatggaaccgaatttagaagaaaaaaacaaacgtcaatatttaatttccatcacattacatatgatcatgatcaaaacctgttgagtcatcgatagatatttcatacagcaaaactcgttggacaaattttgcttaatcttaaaactaattatatccgattatcagaataagaacattctgattggtccattaataaactaccatcgaagtaaaactgatccaccgtgaaatccaactccggtacaaccaaactagactcgccgtcatccacgtggctttccctcttctgctccgacgttaactgatcggagactgacggttccggcgagcgacggcgaggcctaatcctaaccggctcatacttacaagaaccaatcaaatgcggaaaattcagcttagctttcgatcctctgagctgaaacgccgctcggtcgtacgccaccgccgcgtcctccggcgtctcgtaagtcccgagccaaaccctagctccgttcttcttcggatccctaatctccgccgcgaatttcccccacggcctcctcctcactcctctgtactgcatccccttctgcctcggcgcgtgtgagccactcgccttcgtcgccggaggcttattttcctccgccggagaggtaacgggaggaacggagggtgtccagccggagctaacggcatcacggagagtgttgtaaatagccatgtcttgagaatcgtcgacacttaacggcaagtcgctccagttatcgtttaagataacgttgctgaaactcgggttacggaagtacatccgtgagttaacg

SEQ ID NO: 17240 - DNA, 660 bp, Arabidopsis thaliana columbia
actttgaggattcaacaagtgaggatgaggacttctcagttcctctcctcaatctcttctctacctaaacattgtgagagtcaagcttagtgactttaaacaatctcacttgggaggaagtcccatgtctatccttgtatatattgctttcttgttatttttgatgtatttgtttaagtgtttcagggaaaaagacttctggagaatttcaggccacactcgaccgtaccactcgactacaggtcgagtgtgggcttcaattgaccaaagggccatgattgaatagtactcggcccacaccactcggcccgaagtcgagtatggacctcactgttcaaaggcccaacaagatgcagcactcggcccgaagccgagtcagaaaaagaagcccatcaggcccaacactgtactcgacacgcgcgtcgagtatgtcggccgagttcacacgtgcgaggtcaacacaattcaaattcgaatttgctgggccccaccaatcaaatcctgctccgcaaagcccttcaaagattctgctgcaaatagtgagacatgtccccttgaccaaatgaagggtgaggatctaaggtgtttggagggctaggatcaaatcttcttgtctataaaaccacactcaacaagctaagtcactcacactctctcttt

SEQ ID NO: 17241 - DNA, 924 bp, Arabidopsis thaliana
gttcgatgggagcagattttttgggtaaatatccggatttttggataaaatttcgggtttcgggtaaaatttagatttttgaattcaatattcgggtattttcgggttcgggtaggggaatttaggacccaatagggtaaatcttcgtgttcgtgttcggtttccagtccaatttttcgggtcagctccggttcgggtaattttaaatatatggctgaaacataatagttttgttttcccataacagttaattactataaaactaaagtatttaagagttacaataacatatcagcaacaaatgtttctttgatcagatcaattgtagctctttattagtaaatccctattatacagagagagccaacagaagaaaagaatcctagaatacagtggtcttagagtacttgaaaaagaactcttcattgttacagtaatcaaataaaactgtataaacctgaatcaacagttttgggaacctgctagagaagtacctctcgaacccttcaggtacactcccaagtagttcctgtaattcttttggaagctctctatagtgattcagtttgttccgtatgacccgtaacaaatcgcggatgctgtcaaacttgtaccgcctgtatcgcccgatattgtctaggaatatgctatccagtttctcatcccaccgcccatttaaagtaaccgctgctgtgctttcaagtgcagccaagagctgtgaaccttcttctcggttttccagttcaactctatcgcttgcatcccgaagaaaagacagtctcatgtcagagttccagaacaatggatgatgcataacatcttgtgctctcggtctgcattttcaaatattgaaaaaggttccattatcaaatctcgctagttttgatagcaatattaaccacaagtgccatcatccatacctca

SEQ ID NO: 17242 - DNA, 970 bp, Arabidopsis thaliana
gcagaccaccgccgagtcttcttgaagctcccgcaatgtcccaggagcttcctcttggaagttgttcccttgagacgaagggtggctgttagctggattgtcagtatccggcgactcaggatcttgctgagcaggctcttccggcggtggattgaagtgtacctcttcagatcgaggcggagaccaccaccctgaggttgagtggtggagttctggaacagttgtagtaacggtggatagtcgcgtacgtggggggctgacgttgaacagacagcagcttgagtcggctgcgtcgctggaacttgaaccgccggcgccggagtgaaattgtattgctgagggagatcctgaggtctaggcgtcgttgaaccgccggctctctaagtaacattaggcgtcgtcttccgctttcgggagccacctcgaccagcgttaggcatggaagatcgacggagagatttgtagatcgaagaagatgcagatcaaagagaagatgcagatcgaagaagatgcagatcgaagaagatgcagatcgaagataagatatgcagattgaagagatgaagaagatttatagagatcaaagaagaagaagatcgagagatcgagagattgagagatagagagatcgagacaagtgagagagatagagagatcgagagatggagaagatggaagaagatagaagaagtttgaagaagattgaagaagaagatgaacagatcgaagaagtttagggtttcagaggaagaagaagaagaagagagatcgagagatgaagaagaatttggctaagtgttaggaatgagaaatgattcgatttagggttttcaacattgtagtagtcgcattgtagtcgtattattgtcactaaatgatttgggtttgggcctcgaaattcaaaagcccaacaacttcgtctgtagtcgcaaaagagtagcaaatctgtcaccgtttttattaggttttg

SEQ ID NO: 17243 - DNA, 914 bp, Arabidopsis thaliana
aaatacagttttgcttttatatatgggattgaagaatgttgattaatgtgtgtttttggtttcagctgatggatttgtggtacaaacgggagactccagaggggtcctgcggaaggatttatcgatccaagcacagagaaaacgaggacggttcctctagagattatggtgactggagagaaaacgcctttttacggctcaactcttgaagtaagtctctcaaaatctctccttgtcagagacttatattatatagtcttttaagctttgtttggtttttgggtgttggtgaacaggaacttggtctttacaaggctcaggttgtgattcctttcaacgcttttgggacaatggcaatggcaagagaagtgagtcctttcttcttcttcttcttctttttcatagtttatattattatgtcttatgaaacatatacttattgagtaacatataaacaggagtttgagaatgactcaggatcaagccaagtgttttggctgctaaaagagagtgagctgacaccaagcaattccaacatcttggatggtcgttacgctgtctttggttacgttactgataacgaagattttctagctgatcttaaagttggtgatgttatcgaatccattcaagttgtctccggtttagagaacctcgctaacccgagttacaaaatcgccggttaactcctcttatctttttccttttcttggttcgtaattaatactctgtttattttaattttgtgagagtatattaaaggtgcatgtctttttcctacaaatacagcatatccttatgagatgtatgaatcatcacgatggcatgcttcatactttatcagcaatgctgcacgcattcatccactgaatccttggcacatcacaaacctcgcgaaggtcaggaataaggtt

SEQ ID NO: 17244 - DNA, 557 bp, Arabidopsis thaliana
tgaaaagctagacaaactcttattgactcagcagaagcagatacgctacattactgatgaagagcacttccaaatgcaagaaggggggaatgatcaaactgaagagatcagctatattcaaaactaagaagggttcaacaagggctacaacaactacaagcccaacccaaacctctcatacagaagcactatgtagccaacccccaagatcaagtgtatcccccgcaacagaatcagtctaagcctttttgttcaatacaaccaaggttatgcctctaagcagcagttcaatggaggataccaacagccaaatcaaccaccagggttcactcaacaaccaaagcagacagcaggagcacaagatcctgacacaaagcagatgcttcaacaaatcattcacggtcaaactactggcgctgtagttctggaaaaacgattggcttagataaatagtaaagttgattgttcctacaatgagctaagaagcaaatatgaggatctaatatccaagatgatatacaaggaaagccaagctgcttccaatacgtcctccaagt

SEQ ID NO: 17245 - DNA, 702 bp, Arabidopsis thaliana columbia
  unsure (1)..(702): unsure at all n locations
tgctgaggcagcgaggtggtgattccaagcggtgttgaccctccggctctctgagtaacattggngggttatctcccgctttcgtgaacctccacgaccggcgttaggcatcgatgaagagagacgaagagatcgaagaactgaagaaagcgaagagatcaaagagtagaagaaagcgaagagatcgaagatgattcgaatcgaatgagatctaagaagaagaagaagaactcgattgggtttatgtagagatgagacgaagaacagatcgaataacagatagaagaaggagaagtcaattcaaaatggatcgaagaagaagttgaagaagaagatcgaagaagagtgttgtttggacgaaatgagaagtgaatcgatcgaattagggttttctttatacaggtagtcgcaatttagtcgtattttcgtcactaaataattgggtttgggccacgaaatttaaaagcccaactataaagacaattgtcgccaaatagtcgttggatactcgttcatttttattgggtttgggcttcagaatttaaaagcccaacaaattaatagtgtgtcgcatgttagtcgtactatcgtcgttaacattattaggtttgggctttggaatttaatagcccaactaataaaacgtttgtcgcacgttagtcgttaattcttttgggtttgggctcgaaatttgaaagccca

SEQ ID NO: 17246 - DNA, 1039 bp, Arabidopsis thaliana
caaggttcttataaaaaggcatatagtcaacttccttctttctgcaagaagatcaggagacaaatcctggaagtattgccattttcatgacaaaagaagattcgagtttccatcggcttttcatatcgttctatgcatcaatatctgggtttagacaaggttgtcgtcctctccttttccttgacaccgccgacttaaactctaagtaccaaggggttatgcttgttgctacagctcctgatgccgaagatggaatatttccagtagcttttgcagttgtggatgctgagacagaagataactgggtttggtttttggagcacctcaaattggcactggccgatccccggacaatcacatttgttgcagattttcaaaacggtctgaagactgcattacctctggtatttgaaaagcaacaccatcatgcctattgtctgcgccacctcgctgagaaattaaacatggacttgcaggctcagttttctcatgaagcaagacggtttatactcaatgatttctatgctgctgcttatgcgacacaacctgatgcatattaccgttccttggaaaatataaaaagcatttcccctgatgcttatacttgggttatcgaaagtgagcctctccattgggcaaatgctttgtttgaaggagagagatataaccacatgaactccatttttgggctagatttctacagctgggtttctgaagcacatgagttgcccataactcaaatgatagacgaacttcgagcaaagttgatgcaatcaatatatacccatcaggtacaatcccgggaatggattgtttcaacgctaacaccaaccaacgaagagaagctacagaaagaaatagaacttgcaaggtcacttcaggtctcagcgcctcacaatagcttattcgaggttcatggtgaaacatcaacttagttgacatcaatcagtgtgattgcgactgtaaggtatggagactaacgggtttacagtgtagcacgcagttgcagtggttgaatgcatagggaaaagcccttatg

SEQ ID NO: 17247 - DNA, 606 bp, Arabidopsis thaliana
tctctctgcttctctttttttttctagttcaaactcaacatttcttcgatctccttcaccggatctcagattcttcagctggacttagatcaccggttgttgttttaggatctagcttcaatgttcgattcttagtagctgttttttgtgatcaatgttgtttttgattcgattattatgaatcctctttgctgcattgctccggtttcgattgatgaccggactaatcccgtcgtagcgaaatcatcgaatcatcatttagggctcgaagctattccggttagtaaacacgcttctaagccgtcgttttcgactcaggcgtcttggatcagccaagatcagcttgagagactctcttctgaagtagtagacgacgtcaatctcgatgggaaagatgcttcttcttcttctaataaaggatgtttcttctttgggaactgcgtcggtgctggagctggagttgctgggatcatgtataagtgggtgaactatgggaaaggatggagagctagatggtttgagctggaggatggtgttttgcgtatataagaccatggactgataagatgtgatgaacagctagagagaaagtgtagagtgatggtg

SEQ ID NO: 17248 - DNA, 497 bp, Arabidopsis thaliana
gccagtgtgctctaaagctctgccaggttatcctgtgacaaatcggattcatattcatccagaataacatcaggcaaaataacagctaccggttcatcacccactaccgggtgagcacacaataccgcgtgtcccaggcctttcgccagaccctgacgaacttgcataatagtcacgtgcggtagacaaaatagactgcacttcatcaagcagttgacgttttacacgtttttccagcattgcttccagttcaaaactggtatcacagtggttttcaatagagtttgtagatgagtgtgtaaccagcacaatctcagtaatgccagccgcaatacattcattcacgacgtattgaattaatggcttatcgacaagtggcagcatctctttcgggatggctttcgtcgccggcaacatcctggttcctaatcccgcaacggggataacggctttcttgactttcgtattaatggcagccatttaaattctcctggact

SEQ ID NO: 17249 - DNA, 665 bp, Arabidopsis thaliana
gttgacatgccaccattacaaataactttgctaaaagaactttgatgaacccgtgagatgctcttgtaaagtgagattatattcgctctgtcgacactttgtgctacaggcaaaaagaaagacataaaagaatagaagtatctacctttctatggcttagaatctaaaatcttctatctaactgctgacagattctagattgatgttggtttctgcttttcttgcatctagctgctttctctaaaagtgtttactcttccttcaggttctagaggatcaatcctgacaattacgctctctgttggtgttgatgccattgaatcagcttgactgaagtcacctaatatcttttgacatgtctcaaccagacagtgtctgcatttcggacatgtcaaatgatgttgaagccacttgtctatgcaacgaacatggaacccatgattgcacttggggagcagcctgagctgttcaccagaaacaaaatccgacaaacaaatgacacactcttcaccaatcccgggcaagttcatctcacgtgagtaactcacgactgggaacatcctcagagctttcttcttgattcctttgtttgatgaacttcgtggtgttgaaagactggatataggctcagagatcatgaaacgtgaagaacgtctgaatgcaca

SEQ ID NO: 17250 - DNA, 555 bp, Arabidopsis thaliana columbia
  unsure (1)..(555): unsure at all n locations
taatgttgatcaaaataagagattttttatttgggatgaaggcagtgaagccgctttagagaatgcttttggtacatccgaagacaaacaaaaaaaatggattgaaaaatatgtggtatgaatgagtgagatatcatttgatcatttgttctctttgcttgttaaatatgcttgttttgatgtcacttatatcgttcagcctggcacatttcttgattcgaagaaacaacaaatcatgtacagtgattttgtcaccaaaaagctgaaattatatttcactacgagtaatcaaagaaaacatataaatataaataaaaagaattatatattgaagaagaacgacaagaaaagcaaaaaaataattctaaaaaagtacgaaaaaaaagtaattcaatatattataattgttttattaatttaaatgtatacacattatctaagttttgatagtaaaacattatcgaacaaacaaagaacttatatttattctcttaatattgataaattatgttgctttaactanaatattaactttcacaatgattcttatgatgt

SEQ ID NO: 17251 - DNA, 549 bp, Arabidopsis thaliana
gtttctgttatttcagaaatgctgcttgcttatatgctattggaattggactctaatttctatagttcctagcggattgatgtgtgactgttgtgttttcttgcagcctagtatttcaaacgtggaagatgaaggaattgttgatgacatcaaaacgttagaggaaagctatttgtgaggtggtatgttctctcacgtgctcttatctttttgtcaaaacaatatagcgttggcaaattatgattttttgtcgcttcaatctatcttggccatttttcatgtcgtagcagtaaaggacaaagtacaactgtgttctctagatagctaactttgtgatgttgtctatcttaaaatttaaggtttccaagaagaaagatatgttgaatcggctattaaagcctgccctagagatgaaagaacgtcaggagaagtaagatttgtctttcttccgcttttacttgcatgcctttaatgatctagactgtgatctgacggttttgtgctgacatttttcccttcacagggagtttgagcggctcggttatgaaa

SEQ ID NO: 17252 - DNA, 552 bp, Arabidopsis thaliana
tatcaacctcacttgattgcaccagaacagggttatcgccgtctaatcgaaggggcactgggttactttagaggtccagctgaagcttctgtggatgctgtaagttcttctacagtgtctcctcacttcacttttataaatacaagaccgtaatgagaatggcgcaaatgcaacaggttcactatgtcttgaaagagcttgtgaggaaatcaatatcagaaactgaggtaagttcactattgatttttcttatactggtagaatgtactacacgggtttgactggatctcccttccctggtggcaaaatgcaggagctaaagcgtttcccttcactgcaagtcgagcttgctgcagcagccaacagctccttggagaaattcagggaagaaagcaagaagtcggttattcgacttgttgacatggaatctgcgtatctaaccgctgagttcttccggaaacttcctcaagaaatagaaagaccagtaaccaacagcaaaaaccaaaccgcttctccttcgtctgcaacattagaccagtatggagacggaca

SEQ ID NO: 17253 - DNA, 1157 bp, Arabidopsis thaliana
taattttgttgatttcaaggcagtattttgaggtcctcgcattaattcaggtaaaggtactacgttcaatgagaccaataaaacttgaagatgtggtgataggacagtacaagagccacagcataggaggagtcacttatccaagctatactgatgataaaactgtgccaaaaggtagtctgaccccgacatttgcagctgctgcactcttcatcgacaatgcaagatgggatggtgtaccttttctaatgaaagctgggaaagcactaaacacccgaaggtaccaaactttggaattttttttgcaaattttctggtttgcttgtaataatataaatatatctattgacacagtgcggagataagagtccagttcaggcatgtgcctggaaatttatataaccggaattctggtactgatcgtgatcagaccacaaatgagcttgtcatccgcgtccaacctgatgaagctatctatttgaaaatcaacaacaaggtccctggtttaggaatgagattagatcagagtaacttaaatcttctctattcagcaaggtaagctaagaaataataaagacaagctgtggtgttgttttgtatatgtaatccttatgttcttttttgcttatatctagtttcacataacttttttctgttgaaggtattcaaaggagattccagatgcatatgagaggcttttgttagatgcgatcgaaggtgaacgcagattgttcataagaagcgatgaacttgacgctgcttgggcgcttttcactccattgctcaaagagatagaagaaaagaagacaaccccagaattctatccttacggcagtcgtggtccagtcggtgcccattatctagccgcaaaacacaaggtccaatggggagacctaagtcttgatcagtgaaagagtggaagaacattttttgttcatagattcacgtcttagaattttcattatttgtgtggtttatggaaactttctttcgctttcagagataggagtgagttttgttcgattttgtatctggaataataagtaagaactaccctattcttgccaccctttttgctttcaataaaggaaacacaaatttaagtgtagcctctgcaaagacttgaacaacatgatcctctatacatcaggcatcag

SEQ ID NO: 17254 - DNA, 486 bp, Arabidopsis thaliana
cgcaagtgtgctctaaagacgacgaaatggaaacaaaacttatcttcccaaccacggctgtggattgaccgcctgaccctgacggcgaatttcgaaatagagtgaaggccgaccctgaccgccactgctgcccaccagtgcaatcggctggcccgcgcgaacctgcgaaccaacgctcaccagtgcgctctgattatagccggaaagactcatgtcgcctttaccatgctcaaccaccaccaccagaccgtagccttgcagccagtcagccagaatcacccgaccgtcggcaatcgctataacttcagtaccttcagaagcaccgagaaccagacctttccagcgtaattcaccctgtagctgttcgccatagcgatgcagcgtcagcccgcgaaccggccagaatgcctgatcatgtggcggctcagaccaccggtacgggacatcagcgatttttcgctttcggtcggggtgcactttagagca

SEQ ID NO: 17255 - DNA, 525 bp, Arabidopsis thaliana
cagtttgaagtatctctcggtcacaccattgcatcccatgctgccgacaacttggtctacacacgtgaagttataagatcggttgcaaggaaacagggattgctcgcaacctttgttccaaagtatgtcagtctctcccaccaaattattcgttgtaactgcaaatttttaacatatgtgttttttcttcaggtatgattattgtgacattggttctggatcacatgtgcatctaagtctttggaaaaacggcgaaaatgtcttcccggcatctaataactcatcttctcatggaatctcttccgttggagaagagttcatggccggagttctatttcatcttccatcaatcttagctattatagctccactcccaaacaggtaactcgaaaaccgtacttttcgagtaatttcctcaattgttattaaaagttgtgtgtgcacttaaattccagctacgaccgaatccacctaatacatggagtggagcatccaatgttggggcaaagaaaccgcgaagagcgt

SEQ ID NO: 17256 - DNA, 486 bp, Arabidopsis thaliana
ttcaacaacgcagcaagcctctgcttctcgtcctcaacctcgggatttgccgtcccgagcttctcttctcttgtcccaacaacatactccaatatctctatagcatcatctaacctgtaaagcaagtaacacattgcttgtaccgcagggtaataccaaaaaacataacctagcaagaaaattgttttaagttccaaatttaccttcccattgcgtcgtacgttccagcaaggttactgtaaaccgctaatgtatcgggatggtacggtccacactctttctcaagaatagttttcgcttcttcaaacaaatctgcagcttcattgatcgcgtaacgctgaacgcaagctagtcccatctgattcaaagcaatcccgaaaagagcggtttttttctctccgctattgcggaactttgatatcgcgctcttgaatatgtcgtaggagtcggagtaattcccatcatataagtaaccacacccatttg

SEQ ID NO: 17257 - DNA, 413 bp, Arabidopsis thaliana
gctgatatcggtattgctgttgctgatgctacagatgctgctcgtggtgcttcagatatcgtgctcactgagcctggactcagcgttattatcagtgctgttctcaccagcagagctattttccagagaatgaagaactatactgtgcgtcttctcctatttttcatccttaatttattccaaccacttgcttgcttgcaattgaaactaattactctgttctatttttctctcttgttacagatctatgcagtctcaatcaccatccgtattgtggtatgcaaataaatccgtttgagttctggcccttgttggttttatcttggattaatagtatgctgatcatattgcgttgaaacttgttgcagtttggtttcatgcttattgcgttgatatgggaatttgacttctca

SEQ ID NO: 17258 - DNA, 891 bp, Arabidopsis thaliana
tagtaacggccgccagagtgcttccttttgtttctttttattttcattactatcttacttagcttaatttaaaaccttggtctattgtgtgatttgagagctttgtggaattcgacccttaagtgctacaatcgatctcttatttgagagagtggtcttaaagcaatttgacatatatcactactttaagagtagctaaatagaacttgatctcacataagagatatacccgccataggtatctgttaataaaactactatttgatgagcctggtttataggtgtgtaataagaatcggcttatctactaaggtgaacttatcgaattcgtttagcatgcatgtttaggtatagggtttcacggcacgccaccaggactctcagcatagtgaatttcaaggaacgccacctgttattgtgatagtagagtttgagttttaaaaaggttcgataacaacctagctatttctagatctactatcatctatttcgtgagaataccgtaagcctaacgttttaataatcttagtttacatccatctcataatttgctattgctttctttttattttcttatcttttgtttagcttaattcgataaccttagtctattgtgtgatccgataatgttgtggaattcgacccttaagtactacaatcgatctcttatttgagagagtggtcttaaggtaattttacctacatcaagtactccagtgttggctttggcagagcaaactgagccttatgtggtatatacggacgcgtcaaggattggacttggatgtgtgcttatgcagcatggtaaggtaattgcctatgcgtttaggcatttgtaaaagcatgaggagaattatccaattcatgatattgagatggcggctgtggtgt

SEQ ID NO: 17259 - DNA, 1315 bp, Arabidopsis thaliana
gagaaagcaagaaaattttccttttgtttaaaccaaacaatctatcacaattagccacgtatgcgtttctaatgagtttccaaaaacctaattttaggaacgttcctacaattattgttgaatttttatttaatttaggcccactattctcttagaaaccaactaaaaactatcgatggacttggtcttaatatccatatatggatggaaagttccgcagtgtccgcgagtctaatctagttatattatttttaaaaaaaatcttctgtcatcacgtacatataaaacatattataagaatattatgagaccatcttcgagattaacaaggacttctaagtggagcatttttaagattaacaaggacttttgaaaagagagagaaagagacttgaaaaggagctttgagatttcagatccaacatttcttcttttttcttcccaatctcaagttatacgaccatggactctgatggagtgtcagtaccgttgatccacgagcatcttatgatgccttgtaatgatttgaggagaggtgattgttgtgagcgtttggaagctatcagtgatggctactattgcacaacctgcgatttcttcgtccacaagaaatgtggtgacgaggcctctgaatgcattgaaaatccatttcattccaatcaccctcttcggcttggttttctttctcgtcttcagcgccaacattggcttaaagtagttcgcagttgtgatttatgtggaaagaacatcggggatctattctatcgttgtgagatctgtgacttcgacatggatctatactgtgccaagtatccaccaccagaggttattaacatttccaagacgcatcaccacaagctcaaccttctcaaggagctgatccagtttgactgtgatgctaagtgtggcactaatgattaatgggtttccatacaaatgttatgaatgcgatttattcttccacaaagattgcgtatggcatccgccagaggtaaatcacactttagaggtaaaccactcttaccactccttgcaccctcttaagcttcacactggtcaactaccgaattattctgaccgaaaatgtcgtctatgcgcaaaagaaattgaagttggattgttttatcattgttctttgtgtaatttcaccttggatatgtcttgtgttttaaatccaccacaacgatatctttggaatttgaaagctcatgaccaccaactcaccctgctcccaagtctccgttcttttttatgtagtgcttgcggtttgaatggcgaccgaagcccttacatatgtgttcaatgtgactttatg

SEQ ID NO: 17260 - DNA, 519 bp, Arabidopsis thaliana
agctgtttccagctcttctgcctcagcatctcatccctcgcttcctgaggtcaacgccgggacctctgccgcagcaggttaacagggtaacaatcaggtcgctcaggtaaatgagccatctgcagttgttcgttctgacggtgcaccgtcctctccgaagagagcttggacccagccggagtgaatctggcggctgagttggtcgtgagcgaccagagggtcgctctcccagagaagagaggatggaacctgcggctgctactccggaggcagctgcgtctgcggatatgcgatcctcgggcaggtcccatggcggaggacgaggctccagaggtgggggcaggtcttcaaaccggtctcaagaagtgaggtagacgtccaactccggcggaggatctgcgggaacaggcttttccactggtcttacactcatgaccgtgatcaccgatcgttgaggacgaggctgggttggcgacctgcttcgcacatcaaggggaggactgccaggttcttggagtg

SEQ ID NO: 17261 - DNA, 1410 bp, Arabidopsis thaliana
tgagctttgccccaattggtttatctggtagtcagaaatgcaggcgaccttattacctcctaccattagtcggaaagcattccaatctcgggacatacagtgtggtggtccttcggaagaagttgactctgaagtacttcagtgcgtttctaccgaggctggccggatcagccgatagggtttatcataaaaaagaaaaacgaaaaagtagacgaacgcttttacttttcttgaaacataacatgcataggcgaaacatatagcagcaacacaattgttataatttgcaactaattaaaaacttcagacatacgtaacacaaactctgcactacttgcagttcagatctcttcatagagagagcacattattgcaaatttgagatgagcgccgcatacgtccaaacatacgatagatagatagatagatggatatcccaggaatcctctagacttcggacaaaagcatttcgtccattgattcggttagcttggcaaacaactcgagcagcttctccggagagccaccttctcgtcaatcctctcatattttaagtgacacttaaccacacttcccggtcctcttagctttggggttgcctggatagtgaccaagaagctcttgaactctttcgtcagatctccatctattaccctgagcactaacagattcttctcctgatccactgcctcgatcctctccctcgccaccttgggctgcccatctgcacccaaaacgaagggttaacctatcaaatcttgtatgttgttgcaaaattatattataaataaacgtttgtgtttccaatagcatagttccagaatatgacactgccaactttgccaaactctccctcatgcaaagcacatccctggatgtcaggagtggctttcgcaacatcttgtggtcttccagagagcatgtgatggaacttctttgccgatgctttgatctcaatatctacctcaagttccccttgtagagaagactgacgcgtagcttgtgccatttttcttatacggatgttttgcttctctaggttttaatgagagtgagtgagagtctctttggaaattcatagccacttttatagaggaaagaataagcaatctgtggcaagagtcattattctaaaacaacagagtttcggaatgttggaatatatatggtcccttacggaagggaaggaatcagaccaactagctgataacaactacaatttcttttagtcagttgtggccttatgggaatcgattcagtgatgtgtccacaaaaaaaaaatatgtttcaagattgttataggctgctattatcgaccacatataccaacgacaaaagtaagcccgttcagaagaccaatatcgttattcgaaagcatgtacgttgtcttgaagccctgcttgtagaatc

SEQ ID NO: 17262 - DNA, 635 bp, Arabidopsis thaliana
caggacaccatggagacgcctccagcagctcattcattgacatgggtttgcaatgttctccaaaaagaaggtcatccttatgtctaaactaaattaggcttgcatgttcacttttatattggattagagtttgtgtattcgaaataatttgcaagttatatattcttatgtttttctcaccatcaggtcaccatggagacggctgcagcaattcattcaggagtttgtaaagacaacactgatcctatgaaggtataacatgtatcataattttctggtatgttttaatggacagctctgtttggattgtttttaaaattatcttcttattccaggcaatggttgtgtttgtgaagcctgtatttgatacaagttccaaagctgacaaagagccccaatcatctcccacacatagtcccaatattgtgggtacaaggaacgaggtattgcgtaacatatactgacttttgttaataatgactagggaatgatttttcagttttgtaacagcttgtccctattggtctgatattatatcttcatgtacaggataataactcagaacactctaactctactgcccgggaaccagatcaatattttgagttactgattcatcccggcgcgtacagaga

SEQ ID NO: 17263 - DNA, 1033 bp, Arabidopsis thaliana
gacttatgatttagacttatgttatgttgaataatttgtatggatttttcctctatgttggatttgatgcagacttacgattaaatttctattcagactttttttctctatgttgggttctggaaattcagataatagcaaaaccaaacaagttgtgaaagattgtattacagcataactaaaccgcataaataaacaaaacttagcaattatttactgttatggtagaagaatcatatatcatagcttcaaacgtaatcctaaaaaaaaaaagttcgcagcgtgaactaattgctaacgtagaataacttattatggcacgaaattaaaatcgtcgttactttttagcaaaaaaattaaagttgtgaagaactaacttgtttcttattgattcataatgaggttacatcacatatatatacatacttgaggaggttacatgtctaatgggctaggttacaaaagcccataactacttaagtatatgaccgacctaagtatagtctccatgggccggacctacgggccggactgactgtggcttctctccatggaccgggccgacatgccgacggggccgatggaccgatggactggtgggccgactggtcgatgggccgtcacaccaatgggctgacggacctatcctccaaggacatgggccacggttatggagtccatccaacaagtggtttacaacactcccccttggatgacataaccgtatagatgccaacgggatctcagtaatgcgctaggggaatgctgcctcattaaaaccttactaggaaaacccttttcgggacaaaaccatagtgaggaaaaagagtacagcacgcattactccccctgaattggtcatctctataagtccttaagcctccgcatcccaatctgatgcgcgagcttcctcaatgtcgttgctggtaatgccttggtgaatagatcggctgaattgtcgcttgaacgtacttgcaccaccttaacttcaccatccttctgtaagtcatgcgtgaagaagaacttgggcaga

SEQ ID NO: 17264 - DNA, 1031 bp, Arabidopsis thaliana
cctgtaggatcttcagtctaagctaacccttttaaggttttcttcttgtggtcaaaagttctcttcagcttgctgagttgagaagtatagttgaatcttggtgggattccagcttctgtttcttcatcaacattcatgtcatgcacttcgcaattctgcccttctcctggtggttttcctgaagcatcgctgatgttaaatttcatcttcatgcatttttcaaggttcagattaatctttacattcctgacatctatgactgctccagctgaagcaaagaatggtctatctaggatcagaggatcctttcatttttcatctatgtccgataccacaaaatctgtaggtatctcaacatttccaatcttgacagacagattttctattagaccatgggggtgtgcaacagaaccatcagctaagagtaaaactaggttgcagaacttgtattccatgatccttagccttttagctgtagagagaggcataaggctaacagatgctcccaaatcacaaaggcacctattgaatgtcaatggtcctagagagcatgacatagtgaatgaaccgggatcatcaagcttttcttggatgactttcttcttgtatgcttcttgagtggaggcgctgctaatcatctcttgattctgatcattcttgagtttttcagtgttgaactttttccaaaatgttgagtattcagcaaaggtgtgtgctcaatagtccagatgaattgctgggtggcaggtgcagcaatttgagttgaatcccccccttcttgaatcatactgtcctcagtattgagagtctgatgacttgatggagactcatcttcttggtggatggtggtagcattagcagtggcatagtccttaagattttggactgcttgccctggaagttgctgaggatgcttcagagcagaggtggatgcaatttgactctccaaatacttgatttttgaattcagagcttcgaacttgacatttacatagttgtaagaacaatcgatcttgttgtgtaattcagtt

SEQ ID NO: 17265 - DNA, 568 bp, Arabidopsis thaliana
tctcttccatcgatggcggctaataacagatccgatcatgggtcagacgaaaacacaagactttacaatccttaccaaaactacgaagtcccaatcaacaaatctcagtacctttacaagcttcctacctcccctgagtttctcttcacggaggaggctttaaggcaacgtagatcttggggtgagaatctcactttctacaccggaacagcttacctcggtggctccgttgccggagcttctgttggagtcatcactggagtcaaaagcttcgaatctggcgacactactaagctcaaaatcaacaggatcttgaactcttctggtcaaactggtcgaacttggggtaatcggattggtatcattggattggtttacgcagggatcgagagtggtattgtggctgccacggatagagatgatgtttggaccagtgtggtggctggtcttggaaccggagctgtttgtagagcggcgagaggagtgagatctgcagctgtagctggtgctcttggtggacttgcggctggagctgttgtagctgggaagcaaattgtgaagcggtatg

SEQ ID NO: 17266 - DNA, 765 bp, Arabidopsis thaliana columbia
ttgagattgttcccatttgtgttctgaaaatcaaaagctatagaagagaaagttaagacacacaactttattttaaagaagtgagatgagatgagatgatgttgagagacctccagcaaactcattgatcttcttgtctggatttccttttcggtaacccttgaaaagctcgttgttcacatccgaagaactattccgccacaaatttaagccttggacacagtttacctctagacaaaagaaagaaatcctctgtttttaaaagaaaacattcaacattttgatattgtaaattggaatttgtttttgttagacctttagggaaagcaagaggtgattggtgaattaagattgagaaagaagagtttggtgagcattcatgttggatgttgtagatgggaagatctgagatgaaagcggagtccatatgattggtgtatgcagggaaagatgatgagccctgcatatatatattagaaatcagagactgagaaacacacaaaaacatattcatgatgtaacattgtttcatgaaacttaccaagacataataggctaaatctccatcaaatccagatgaattgctatacatatttcccattagaactagcaaaagaaaaaatttgttgaccatagaaaaagagttacatataaaaatttcacatctcaaaggagtagattgatagggtttatatactatttccgagcgactgattattcccggtgaagagaaaagttgcaggggaagtatggctcgggtatggg

SEQ ID NO: 17267 - DNA, 840 bp, Arabidopsis thaliana
atgttaacaaaaaattgtaaaatccaaaaaaaaaggtaattgaagctgataaccctcttgttcagcgagtgggttaaagtgtgaccgagatatacgagcacggcatcgttttacgtatcgtgatctgttggatctcaactcggttttcttaataatcagaatccggttagagattgaatttgggttttgttagttttgcttcttctctctgcaaaaatcctccatccgcttcctcacgaaaaaccctagcacagctccgagatcccttttgtcgccatgggagactccggcgatcctttcttgcgtaatccaaacgccgctgttcaagctcgcgctaaagttcagaacagagccaatgttcttcagcttaagctggttcgtctcttctctctaaattcgctgaattcgtgattactctctagattttagtttcgttgtctattaggtttctagctaatgaattggaatactcttaagtcgtttgatacttgcttcggttctattttcgattgcgttgtaacactcatcagctagttctaaattgaattgagattccgattttaggtcatatgatttgattatattggtcttgattcttgagcttgttttatagttttgaatcagtttgattgatatcttgttgctttaaagctgatataatggatctatctgatatgcagatgggtcagagccaccctactggcttaacaaacaatctcttgaagctttttgagccacgtccgccattggagtacaaaccaccaccagagaagagaaagtgcccgccttatacaggtatcaacttgtatatctgattatgttttctttgctttggatttg

SEQ ID NO: 17268 - DNA, 502 bp, Arabidopsis thaliana
tctacgacatgtatcgatctccattgtttcgagagagacttgagtcggattagggctttaaccggaaatcttaaaaagatctcctctagcacgtcgtttggtaatgatgatggaaccattagtactcgcttctcgtttcttcttcttcttttccttagtcttctttctctgtgtctctttctttgtaatgatgatgatgcaatcacctctcgcttctctgcgtccttcatcctatgtgttgaacaaaaatctctttcgtcgtatatatgacctaaatttaaaccatcgataatagggatctcgtaattaatccccacgagtcacgcttggaaagaaaaatcaaaagacaaaatggaactaaatcaatcatttaaatctctagatctctcagaatttggaatcaattttcaatatgtaaggttttctattctactaaatgtactaaatagaatacagaaatataacttcttttttagcaagtggcgattgtatacattatatg

SEQ ID NO: 17269 - DNA, 1244 bp, Arabidopsis thaliana columbia
tgcttcatcttcactcagtacttcgacatcataagtgaatttaggctcagtgagtttggatcgtgagaccacaagagttgtgcaaccaggaaacttaaacgaggtcaagcggtccagggcctgtgtggtccaaacatcatcaagaatcacgacgttacgcgcgccatcaaacggaaaattacagtcaggaacaggatttccagcttcacaaccagataagaaaccccatataagttccctcagctcctcaagaagcggagattgtgatacagtcagaaacaaaatccggttctcaaagtgacctgaagaaaaacaagtgtaaattcaccatgtcactcactaaacaagagactactgtttcgagtcactaacatagaatcagagtcgggacaagagaagagaagaagaagaagatgagagtaagacttacattggacttcatggtcccgttgaagttctttggcaagagtggttttaccaacaccgcccattccactgatcccaaaaacccctccttgagattcgaacatcatcttcttaaccttaacctttcccaattccaatccaaccccaaatttctccgaatcgtcgttggtctcaatctccatagcctcggctctcttcatggcctctgatatcaagccacctcccccaattttcatggaacccacttgctgaatcaccctgtcgaggctcatgtcaacccgatccaaacgcacactggtatcggcccggagatgatgaacgtcagcgaggatatgtgtaaagacctcatttttaaggaaattagagatggtcttctctagcttctccatttttctggctagggttagctgtcgatataaattccatcgcttagagctaaggactttgtcagtgagcttcttgcctttctctaaagtatcgaagagcataccgatttgagcttggcggtgagcaggaagctccacgccgctgtattgaatctccttgatcgtcggtcgaatgctatcgatcaaggtgaggagttgtttggcggtgtttttgtatctccacgccgttgtagatatcgtaaagagctgcttcaggagctccgtcgcaatttcaccggcgaaaaaatcggtgatggccattggataccaccaagtcaagtcaatggagctcgagagagagatagagagaagactaaataagcaacgaggagcaagtagtagtggaggacccacttgaaaatttcctacaattcgcagtgacactgacacatc

SEQ ID NO: 17270 - DNA, 608 bp, Arabidopsis thaliana
gctacaagttagtaacccgttagaggattcaatgctactcaaggacgagaaattgcggaggtctaatctgcagtcacatctaaacctagcattccttgacatggaagatgactctctttccatgggaagcatggagcaaggcatctccgtggaggagtatcttaaaggcaggacaagccgttcatcaagcttcaactgagccattatttttgttcactacaacaaatcacaattgcaatactcaacaatgtgagatggtgaaaaaaaagagttctcctgtgtgtgagtgagtgtaaagtgtatatttaagaaaatgtgtttcttttcattgtcatggtctcatgggtggtggatgagaggtggatttgtgtgggttttattgccctcctccctcccttggtttaggggttatagttatagcgttcaaaggtttcgtgtgttttatgcaatgttttttacttgggaacatcagagacatgtaatttgtattccttgatcctaatggatcaaagtgaattttcttgtcttgtaatgctcgaacgtgtctcactgttatcaatagaataacattatcttgttgaaatacaattttacatatattcgagagt

SEQ ID NO: 17271 - DNA, 501 bp, Arabidopsis thaliana
gcgtataagcagagccaggcatagaaaaagttagcaatttttctcagctcgagaagagaccgataagaccgatgaagtgtggaaaactcacttgattgcaagggttggtataacagcaaagaaaatcatggagaatagtattattctggacatttggatctctgcaaagaaccgagaaaagttcgaatggcatacaataaacttctctggagaaaaactaggagaaaccaacgggaagcacgaaaggtttgtggaactttaccgttcaaaaacggaacccatctaagcaaaggaatcgacttcgcaaacggctgagcccaccactccgcaccttgagagtatgaaaaaaagtatagaagattgaaaaagaattgttggtgatagagatattgttagattggtgaagcttaccaacaatggctgtgaagaaatggccacagtctataagtgcaagaccttctgtaggaccattgactaccggaagagtaagcgtattggtaa

SEQ ID NO: 17272 - DNA, 667 bp, Arabidopsis thaliana
aaagaatgataaacaattgaatgtctgtccagacctgattaatcatgagaggaagatcacgatagctgtgaatccactgggtaaacatatgattcactatggtttcactagtaggccgaacctgccacaacctcaacaagtgcaacaatcaaacccaaaaccttaggcaaagaattttcacaattctagctttgtggtaaaacataataacgccagaaaaatgcctaccacaagtttctcctcaagttcttttcctcctccaacagtaacaagagctagttcaggactaaatccctcaacgtgtgaagcttctttctcaataaacgagtatggtataaactgcacaaaagaccaaaccatcactataaatcccaatgtgacataagagcataagaaagaagatgaatttcaccaacaaacaaatttggattatgattaatctataattaaccaagaacacaagtgtttcatcagtcttatactaactctatactaaattctacttctattaacaaactaaaccagcttaaagctaattttctgaatttcagcttgaaacagtacctgtgggaagtacatgttgctatgaccagtctctttgaacttcacattcaaataatcctgcatcaacaattcacaacgaaaattgaggcgatacgaagaaaca

SEQ ID NO: 17273 - DNA, 459 bp, Arabidopsis thaliana columbia
tcatcaagaatcagtagataagagaatgatttaatcccctgactattacaattttggtgtaataaacagtctctattggtttttattctttgttttaatttctcatgacctatagagagaattaggtagtttcgaaaattggctaatcaacttttgaaaactactgtctactttgcttaaattctctacacttagtttcggataagataattgtcggactaatagttaatcccttgacaatctttgatattataaaaggtttagttaatctcttctctatataaatattcatacaccagctttcaaaaatatataatccaaacaccaaaaacaaaatggagaaattgctcgtgatctctttgctactactgatctcaacatgagttacaacttcacaatccgtgaccgatccaatagctttcctccgatgtctcgatagacaaccaacggacccaacaa

SEQ ID NO: 17274 - DNA, 512 bp, Arabidopsis thaliana
catgcattccaaagccgttgccattgtcatgactattgctaaagtctcttgcgcggttgtgtcgtgtgctaccgcgttgatgttggttcatattattcctgatcttctcagtgttaagaacagggaattgtttctcaagaagaaagctgatgagttagatagagaaatgggtcttattttaacacaagaggagactggtaggcatgttaggatgcttactcatggaattagaagaactcttgataggcatactattttaagaaccactcttgttgagcttggtaaaactctttgtcttgaggaatgtgcgttgtggatgccttctcaaagtggtttatatttgcagctttctcatactttgagtcataaaatacaagttggaagcagtgtgccgataaatctcccgattattaatgaactcttcaatagcgctcaagctatgcacatacctcattcttgtcctttggctaagattgggcctccggttgggagatatcacctcctgaggttgt

SEQ ID NO: 17275 - DNA, 1136 bp, Arabidopsis thaliana columbia
  unsure (1)..(1136): unsure at all n locations
gttagttagctaaatggattgaggagtctattagaaccaattactccattcttaagagctctgttgcgcttagatttattgagtttcgtgttatttactcttctgctcgttcagtttagtttatctgatcgctctgctttgttattctgctcgactttgttactcgacctgtttactctctgcatgttcatactcggtcgagcatctttactttcctctacttagttcattttttaagtttatgcattgagagttcttggtgtgtagtttacttcttgcttttatcactcatgttctttaatttctgcttagtatagttagtttcttgcataattacttaggttgttagataactcaaatcatctagacttggcttgacttagtacatgctgattgcatcttgattgatagcaaactcacctaattggattgacaccctaaatactacaatgacatgatagtgttagggaattgatcacctggatttaaacacctgtgaaaaatcctactatcagcatatctattgtctggattcaagatctagttaattactctagatctagcattaagcataattaaagatgcagaattctacagataacctagcaagggggcaatctactaaaccatatgaatccctaatgagaaaccctatttctaacaagcagattactcagacatattgattgaagcaaacaacatatttgatataaaagcataaacacggtaaatagaataagggaaaaaatagatcttttcactgtattaagaactggaatgagtccctgaagaacaggggatgaatagcttatctctctcacaatatggttttgcaaaaagcttgataagaacttgataatcgaaactagggtctaaaataatgttaataaaccctatataacatccaaggactaataatgcaaatagggaaatcttctggggcaaatttcttcttctgtaaatttccttttctttagcttttgctccaaaatgtctcattatctccactgttgtcccactacatagagtacctgaaaagacattaaaaagacctcgagaaataacataaagactcaaaattctatacctanaacataaatggaatcattaaagatagggatatacaaggatgatgg

SEQ ID NO: 17276 - DNA, 926 bp, Arabidopsis thaliana
ttttcagtaaactcatttgatgttttagatttagtgaaaacctcacaatgccagtcttaaaagaattatcaaatatgtattggtacaatgacccggtttaccggtttatctatttttgtcttggttaagtagattgtatttgaggatcaaaccttgtttcctttattgtcaatgaagcatatttctaatctaaggtaaagtttgttagatctaaaatggtattagagcttttcccagcttcattcatcttcttctgcaaattttcttctattctctgataatttctcttgattctcttttgtttctcaatctttgtttcattctctatcgtttgatcggagaatttctttgatcgcgtttcattccgatcattttttcattttctggttttgttactcttcgcgatggctaatccagctccgacgagctccaatccttactcaaatccattgtgtcttcatgctgctgacaattcgggtgttaaatctcgttctcgacaagctcatcggtgaatcttactatcttacaaggcgtcgttctatcatcaaagctctcaacgctaaaagcaagctcggattcatctatggaagtgtcgttaaacctccggaagatcacaatgactatggatcttagactcgctgtaacgatatggtatgtacctggattacgaactttgtttcaaaggatttaggatctggaatggtctatttttatgatgctcatctcttatggttgaaactagaaggtagatctaggcagagtaatttgtctaagatctatagtgttcaaaaccaactagatcgtctacatcaaggatcattagatctcagtgcttattacactcgtcttacggttaccttcattagatctcagtgcttatcatgggaagaattgaagaattttgaagagttaccttcctgtacttg

SEQ ID NO: 17277 - DNA, 358 bp, Arabidopsis thaliana columbia
tactgattaaaagtgttcgtcaagtgctgatccaattcagagtatttggaaaaatcgccgttagtggaaaccgattaaaatactaagctgcagccactagaggaattgtagtagtaactccccgccatggtatctccgccagctcctgtaaacggcgtcgtttcgatttccatttggtggtagcacgacgtcatgatgttcttaagatcagagttttgctccgtttgacgattcgaagtggttagatgctgatgatggggatcatgagattcttgaagatattgaggcttagtgtcttgatagtcattcgggttttctatggagggcgtctccctcgccctcatgctttgtgttgctt

SEQ ID NO: 17278 - DNA, 354 bp, Arabidopsis thaliana
gacgtcggtactcggcttcggagacgatagacggcgaggaagggataagacacgggtttcgggtcggttcaccgcatagacccgggtttcctgaaaagaaatttaattcctggtttaaggaaaccggagaatcagggattggaccggttaaattgttgaaggtgagctccacggtgacgtttcttgggaaattgactccgatctccggtggaatttcgccggagatttggttcgacgcgacctttaagtactggagactatatccgccaatatccggaggaagcgtgccattgatcagattcgacgacaggtctaagaactcatcaactctccaaccgccgggaatctcgccgg

SEQ ID NO: 17279 - DNA, 1138 bp, Arabidopsis thaliana
gatatttcgcaaccagaactttcttaaatcgaccagggaatggaagcggaggtttgtaaggtggtggcacgaagactgtatctttggtcttttgctgctgtcggttttgcaacgaaggtagtagctggaggagcttgtggtcgagtgctttgactgtcaaggatggcctcttcgattgttttctcagccaaaacatcatcttgataaaaatcctccccctctagaatcacactgtcctcagtgtttaatgtagggacatgtcgagttggcagctctcgatcatttctgatagtgatggcatgggcagtggcatactcctttggattccggattgctttccctggaagctggcatgggttgttgttaacagatggtgaagcgaggatgccttccacatatctcatcctagtgcctagtgattcaaacttactgttcagtttgacaccttgtcggtcgactttgttgtttaattcagctagctttttagcgatttccattgctcatgtgacttgtccttgaatgagctgttggagcatagtcattaggtctgaattctgaggcgcagttgcttgttgttgttgtggtgtgtgactaggtggtggctgctgttgttgatatcctccgtgaaactgctgctttgaaaaaactcttggccttgtgtaacgcccgtgtcccgagttagggagtaaccaagatcttacacacgccgaattcgaggacgaattcagtttaaggggggtagacttgtaacagaccgcgtcccgcgttcataaagaggccaggttgttttaggagaaaactagaccatggtcaagaaacggactaaaatacttagtcggaagaacgagaaagttcaagctgaaccagctaggcgagctggacaagctaggatgaactagctagctaagctaggtgcgctaaaccagctggaagactagctagctcagctaggtgagctgaccgacagctcgattgagctcagtgagctgatcgtgtactgacccagctgggtggtctggtcagctgacactcgagctggtggactggtagctcacttttgccgaggtgtctcggccaaaaggtgtaaggtcaagcgggtacaaacgaacggttgcatcgccaaaagatgcatggaaca

SEQ ID NO: 17280 - DNA, 1068 bp, Arabidopsis thaliana
cagtctttgagcatggaggatgtttagaccacatgagatgtagattctatctagcagaggagattcataagactaagcgtccttttaagtttatgaatgttgtgatgacgcattcaggataccaggcagaatttgaacagagttggaaaagatcacaaccactttttcactcgacttcagcaatgcacatattatccaagaaactaaaagcgctaaaaccgcatctgagagcgataggttaacagttaataggagctattattgttcgaaccaaagaagcttttaaaaaactctgtgagctacagcgacaatggctttcccgacatcgcaagctatcattgatgagactgctgcttatgacaaatggaggagattattggatattgaggagagattcttacaacaaaaggccaaactccattggatgaacattggagaccaaaataacaaggctttctatgcttctgccaagctaagggaaataagaaataacataagagaaattcagtgtgaggatggtacaatagctggaactcaagaaagcattaaggctgaagcagagagatactttaaagactttctctccatgaggcctacagattacgttcaatggtcaaaggaggagctggagaatatcttggattttaagtgtgatgaacatgacaaacaaatgttaacaagcgaagttttggaggaggaaataaggaaggtgctctttgcaatgcctgcaaacaaatcccctggccccgatggtttcacgtgtgaattttttaaagattcatggtctataattcacaaagatgtggtggtagcagttcagtcttttttcaagacaggttttctccctaaaggagttaactcaaccatattagctttgataccaaagaagaaggaagcaatggttatgaaagattataggcccatctcttgctgcaatgttcaatacaagttgatatcaaagattctcgcaaaccggcttaagagtattctccctaagttcatctctccaaaccaatcagcttttattaaagatagattgttaatggaaaatctcttactcgcaacaga

SEQ ID NO: 17281 - DNA, 1000 bp, Arabidopsis thaliana
cggttttgtgcccgagtttgttgaacttgagggttttgtgcccgagtttgttgagcccgatgatgttgagaccgatggtgttgagcctgagggttttgtgcccgagtttgttgaacctgagggttttgtgcccgagtttgttgagcccgatgatccgagttctgccatggttctttatgttccgcatgttccaatcggtatggtttgttttgtcaatctttgatctttttaatatatgatgtttgttggttatgaatggttgtcttttcttttgaaggtgatgttcaagttgaaagggaagaaggaaacgaagaagaaagggaggaagggaaagggaaagtgcaacgacaagaagaatgcgaagaagaaaagagacgaggatcctgaggacgaggatgaaggtgtcaaaaagaagcgtaagataaatccatcgagattccaaaagccaccttataccgcggagagaaggagagggatgagaaaaatgtcttgaagacttgtgtttttgtgggaacgatttacttatgtatttaggatggttgatcttgtttttatggtatttatggcatttaggatgatgttcaaaacaaaaggtacacgtagtttatagttaggtacaactcaattctaaaagaggtacaactaacaaatcaaaacaatgacaaatgaggtcaaaacaagtacaaatgagttcaaaacaagtacaagtgagttcaaaaaagaggtacaagtagtttctagagaggtacaactcacttccgaaagagcgagcttaaacctcgcatcttatactttaactcctcgtgtattttacacagcttcagtttcagctttctagcttcagttttagctcgtcagtcagacagcctcagcttcagctcgtcaatcagacagcttcagtttcagctcgccagcctcagtttcagctcgtcaatcagacagcttcagttttagctggtcagtcagacagcctcagtttcagctcgtcaatcagacagct

SEQ ID NO: 17282 - DNA, 1010 bp, Arabidopsis thaliana
  unsure (1)..(1010): unsure at all n locations
tgaaaatacaaggaaaaaccacaacataaacattgtttttatggccaaggcatgaggcccaaaagtacactatactaaaatacatactttgagttttacaaaaggacactgaaaaactactttggattccctagtgttcaccactccctctaattccctttaaggttacctgcaaaacaagtagagtcatgagtaatctagcattactcaatgagctcggattcctcaagaaaacgttagtctaatccccacccataatccccacatgaataacatgaataatcagagtacacagagaaggtagtaaaccacacaaacacaagcaagaaataacgtttcttaaagttttaattagggcatgaatgcactcccttcctcaacacacgtgaacacccgagttataaccacaaaggcatataaccggaacatcaccttggctacaccgtcgtgaaagcgacaccggcccttgggtagctaacccagtctctctgggtccttcgaaccccttgggtagctaacccagtctctctgggtccttctgactctaggacaaaacttgctcaccaagttagctcgcccgggtggattcggctccaagttggctaaggcgtggggtcgaagttgggcttgcatggcttgggagaaaacttggtcaccaagtcagctctgcccgaatggatttggctccacgttttaaaacttgggctctactctaggttccgcggattataaattggcagcccttcttctcatttcactcaccattctctcttcttcttctcttgcccttctttcttgctcggggtcaatgagcggggtactacatgcaccatataggttggtgccagctgagcttgcagaacttcagaaacaattggaggatctactcgaaaagggatttatttgtccaagttcatcgccatggggnctccggtattgtttgttaagaagaaagatggaagtatgtagttatgtatagactactccagctcgggatcctctagctgcaa

SEQ ID NO: 17283 - DNA, 542 bp, Arabidopsis thaliana
gcctcaatcctctcatgaatctacgaatcattgactgctctcctcttcctgctctaactgaaaacctgctaagacgactaaattcccgctcatactctctgactgtctttgtgtcctgacgaagctcctcgaagtcatcctccaaactatcccttgcttcttgaggaaaaaactttctgttgaactcttccctaaaatcttcccaggaaatcacatgttgcactagtgtgttcctcactacaccatcccaccaatgacgtgcctcctctctcagaaaatgaacagcaatgtccttttggaactccattgggcacctagcattctcaaaattattctccaacaacttcctccaatcatctgctttgacgagatcaatacctccagtaaagtactttgtgcacatggttctcatgaccttcattatctcgtaataggaaggctctgccatctgagctggtggtggtggcggtggaggtggtggcggtggaggtggtggctgttgttgctgaggtagaacattttcttgtggttgctgagctgct

SEQ ID NO: 17284 - DNA, 673 bp, Arabidopsis thaliana columbia
tgagatgtcatctgaatccccaccttcaaacctgtccttcaacttaagattttttgtttgcttgagggcaagcaagagataagtttgggggagttgataacactgtattttactcattttagacatgtatttatcttcatttagcttagtgatcactcaatatttcatatcattttgaatcatttttggcttattttgcacctttaggcatttaggatcatcttgcatacatattgcatgtttttgtgcgttttcaggtgtagaaggagcttaaaaggattctactcgaccctctactctatccaaccaggagggaagcagcggactaatctactcgaccagttcactcgatccaggcatctatagaggaggcagcaattcactcgaccagtttactcgatccatgcagctacagaggaagcaggagatcggtctactcgcccctcttactcgatcctctactcgaccccttcactcgatcaaggacgaccaactttacaagacttgttgatctatcaaagcatcttcagatcctcctcattcctcactcaaccagacatcggagcatacagataggagaggaagaagcatctactcgaccaattgatcactcggagcatagacacaaaggcgcagagtttgcagcaccctctttacttgatcccaagatcga

SEQ ID NO: 17285 - DNA, 597 bp, Arabidopsis thaliana
tccaaccgctagatcacgacgtcccatggtgttcccattgttcctctctcaaccaaattcttctatcgagatccatatcaatcccacatcgaaaactccacaaatccgactcaaaatcacttcctcactctcgcatgagactctacgacgatcatctcgtatatgtgttgtctccttctccatatttcccgatctgggtcatgtaaagatgtctcttttatatactattatatcgtatttgtaggtattacactacgaggctttggattggtacaccaccacaaatgtttgctcttatagttgattctggtagtactgttacttatgttccttgttctgattgtgaacaatgtggcaaacaccaggtaatgatggctctagatatccaaatcttgtgtcttgtctcgtgtaaagttgcaaattttgaaactttcttatggttattgatcaggacccaaaatttcagccagaaatgtctagcacttatcaacctgttaagtgtaacatggattgtaattgtgatgatgatagagaacaatgtgtttacgagagagagtatgctgaacatagtagtagtaaaggtgttctggagaagac

SEQ ID NO: 17286 - DNA, 561 bp, Arabidopsis thaliana
tatatagtcgattgatcgatccttgttactggcattgaattaaacgcatgctccatgttatcacctcggtaaccaatactaaatatttattgttctgtcgagctattattaatcatacctacgtcggatctcaatatctcatcccaatttaaacccttcggttttcgttccggttttgatttggtttacttcttaatgaacaataatcaaccgaattaatctcggtttggtttggtagagcagacataacacatgagcataaaagttcaaatacagacatagtagaagatcaaaagacttaaaagctagaaaaacctttccaaaaatggcaaagaaccgtaacttagtcttcttcttaggggtattagcgtcttttacactctccagtttcccggtaactgtttccggcgagccccctatcttattcactttcggcgactcttcctacgatgtgggcaacacgaagttcttctcgtcggagttcgatccagccaccacgtgcgcttacggcgattccatcgatgatcctccggtcgttggtctgacggcacattgtccaga

SEQ ID NO: 17287 - DNA, 1149 bp, Arabidopsis thaliana
  unsure (1)..(1149): unsure at all n locations
ctcaggagaagaggaggacatggcgacgttggtgacaacttgggtttggcaatgaggcagagtcacaagagggggcaggggaatgtgtttgggatctgaatcagatgcaaccgggttgagatcgtcttggagacgcattattccatcttccttcaaagtagctatccagccatgagatgcccctatcattaccatttccttcatcaactcgagtggcactgtcttatccaaagtggtgagatccccagtagcagtcaaaatgatgagtttgccgagatccgctccacaaggtctagcgtggaggatggaaaaaggaggagtttgcaccgaggaagtagttgagaagccactactagtgagactcagaagaagagatgatctcacggtcgcaggtttcacaaggcggctgagacgcagagacaacatgaattaatacgaaatacgatttctgttcttaatgggaagcaagaaattattattaattgagtaatttggttatcttctccatctaaaaaccctacattaatacagaggtatcaccgtgcccaccaagtctttggatatttccttttgtggggtctcttctcttctccactaaataaatcattaatttccaacttccaaatttaaggctcaaataattttcttgttcaaaatggtaactatgtattgtctcaaatcaatgcgtgtgcccgttttgcctatccgtgtcccaaaacccggcccgtaaaggtagacacgatgcgaaggcccaggcccaataaatgtgttgacgattctaaacgtcggctcctgcctgacttgtctttttagtaccctctgaaaactttggagaaatataacagattaatgtggtcaacacattagaaaacgagaagtgggcttttatgaacttgataacattcagtaaaactgggcgaccagaaaatatttccattagaaaaatggtttaaggggtaaaggtttctgttgaataccaccaaattgcttgaagaatcgtctgtaccaagattccaagacagtgatttcaataatcatgaaatcttcattaaacgtaaatgtgatacatgattaagcttaaatacataacaaactaaaccaaagatactaaccaatctaaactataactangaccactatatacactct

SEQ ID NO: 17288 - DNA, 1098 bp, Arabidopsis thaliana
caatcattcagcttagtcagaagacacaaaactataaacaagtgaaaaaactctatccaaatgaggaacagagaaaagttgtctctttttgatgaatgattccaagtagactctgctttatcaataatccaagagatcaaaccaaacaggcatcagaatccagcataatctcatacccatttcctgggatcaaatcagtttgaatgaatccaccagttaatattcctgataaaacacacataagtgcctaactccaatcaaatctagaatatcatctatccaaaaactcagacactaaacttaaatcagaagccaaaccaagagatttacaaagaaccatatcaaacatagaatcattctcatttccatcatatcatcatcatacaaacataaccctaattgcatcaaccatggaatcaaaaaccatgtctctaacgagtaaaagcatataacataagagaaacatagatgaaaagtgcagaaggaaccagaatcacaagcggcacaacagctgcataagtatgaccactagcaccacagcccaaagtcccaagcttgatctgaacaacattaatcaaagccaacatgagaaacccacatccacaaaccgatcccaaaccggatgtaaccatcccaaatctaagagccgtcttgttcacatagtaaaccacaggatcgattcgagtagagatgtgaaacgaagaagctatgttgagcctcattgcttgtttgagacctagagcgatgagacttgagaataggaatgatgcgaaagagtacacatggaaggcgacgagattctcagccatacgagctgtggggacgcaattagggtcggttacgaggctgttgtctggatcggtagggttccaagctaatccgatgaatacggcgagtgtgaagagtgagttcacgttgacgattccgtcgagagctgtgatgtgaatactcgtcgtcatttttctctccggcagatccggccaatcagagagagagcttcgttcagaaaggaaataaaaaaggaggaagagatttaaaaaaaaaaaaaatcgccgttgccggggatcgaacccgggtcacacgcgtgacaggcgggaa

SEQ ID NO: 17289 - DNA, 1152 bp, Arabidopsis thaliana
ggattcgtctctgctgacgttggtctagatgctgacaattgcaaggttctggttaacattgagcaacagagtcctgacattgcacaaggtgttcatggtcatctcaccaagaagccagaggaggttggagctggtgaccaaggtcacatgtttgggtatgctactgatgagactcctgagctcatgcctcttactcacgttctcgctactaagcttggagctaaactcactgaagttcgcaagaatggaacttgcccttggttgaggccagatggtaagactcaagtcactattgagtacatcaacgaaagcggacgcatggttcctgtacgtgtccacactgttctcatctcaacacagcatgacgagactgtgactaacgatgagatcgcagctgatcttaaggagcatgtgatcaagccagtgatcccagagaaataccttgatgagaaaaccatcttccatctcaacccatctggtcgttttgttatcggaggtcctcatggagatgcagggcttaccggccgtaagatcatcatcgatacttatggtggttggggtgcacacggaggtggtgctttctctggaaaggacccaaccaaggttgacaggagtggggcttacatcgttaggcaagcagctaagagcattgtagccagtgggctagcgaggcgggtcattgtgcaagtctcgtatgccattggtgtccctgagccattgtctgtgttcgtggacagttatggaacaggaaagataccagacaaggagattcttgagattgtgaaggagagttttgatttcaggccaggtatgatctccattaacttggatctgaagagaggaggtaatggtaggttcttgaagactgctgcctatggtcactttggaagggacgatgctgatttcacctgggaggtagtcaagccactcaagtctaacaaggtccaagcttgaaacctgtcagcctctgtttcacttctgtccagaatcagtcttgttctctgtattttaggctctttctgcctctttagtttcaactctgagatgggtttattcattttgttttcaactttgaagaaaaaagctaagcagctgggaatttatataattatttatatggtattcttgtgctaagaaagttaaattcataat

SEQ ID NO: 17290 - DNA, 546 bp, Arabidopsis thaliana
tattcaataaatccactccaacatgctttttctagcagactaacactaagcaagtggattagtgataattaatttttgaccccataagtttatgagaatccacgtggcaagaatccacttaaatcaccgagaaattcagcatctaataaaacccttttgaatttgtcgggctccaaaattctagctcaaaacggttcgacacgtgtataaacattaaccaattagataacggacacgtgcataacaacagacgtacctgatgaaaaccgcgttcttcggtgaacggaacgccgatctcgctgatgcaagacgcgattctctgatcagaaccgtaaaaatagaaataacgttggagacaatcatccatcgcggcggccaaacgcgccgctaatggacggctcagagcgaaaccaccgccgccaaacgccatatcgtacgcgtgcatcacgtcttgctcgacgctctctgagttcctccgatgtaccacatctgctcgtggtcgtactttgagagaaccttgacgagattctcggtgaagaagacggt

SEQ ID NO: 17291 - DNA, 663 bp, Arabidopsis thaliana
gtttagtccaagttaaccagaaatgccggtgtgggtcaacatccagggctgtggaatgctacataacaacttcctcagaggcagagaagtttgtgtgcgctaagcatgtggacgtaagaagaactgtgggagacatagatgtagcgagcgttgctgccctctcttgaacgggaagaagaatgatttatctggcgattgggacccacatgtctgccaaataccttgtcagaagaagctaaggtgtgggcagcattcctgtgaatctttatgtcacagtggacattgccctccttgtctcgagatgatcttcactgatcttacatgtgcttgtggaagaacttcgattcctcctccactatcatgtgggacacctgttcctagctgtcagcttccatgcccgattcctcagccttgtggccattctgatacgcatggatgccattttggagattgtcctccttgttctacccctgtggaaaagaagtgcgttggtggtcatgtggttctcagaaacataccctgtgggttgaaagacattagatgtaccaagatttgtggaaagacgaggcgttgtggcatgcatgcttgtgccagaacttgtcacccggagccttgtgacagcttcaatgaatctgaagcaggtatgcgtgttacgtggtacta

SEQ ID NO: 17292 - DNA, 573 bp, Arabidopsis thaliana
ggattaagggagaaactaacgagatctagtgtgtaaaactcctgtttctttgacggcttgattagcttccgtagtcttcactcaagtaaaacacacaaggacaccaaaacaagaaagattggaactgcaagttttttcttggtaatgagagacacatagtgtaaagagtgcttgatacctgattgtgctcagaggtaggtatggctgaatttggtagagctctgctttgttcattccgtacagctgaaagaacagaaaagaagagttaatttcagtttcaactcatgtcttactgaaaaacttcttccacgtgtgaataaagaaagaaaaaaaacacctccatcagcattcaaagacgaagcatttcctttgagcatatcagtcgctaaaacataggggctgtatttaggttccaaagaggctacactactgggacttttaagcatttcctcggttgctttagctctgactttgcgaatttcatcttgaatattccatgactgattagaaccggacttccttttcagctgcatttggtaacaatgtcagaatgaataagggtaaatttgagag

SEQ ID NO: 17293 - DNA, 548 bp, Arabidopsis thaliana
cagtcataacacctaccaatatcacattaaaaccaattccaaaagcatcaatgacaaaaccaaaacaatgaaacaaaaacagaacacaaaaacaagaatcaaccataaattaaagctctttctacaatatatccaggaaatttgaactataaggttttaaatcgaagtgtctactctagctctaaatacaagaacaagctactcaacacaacacatgaatatacagaacaaagaataagaagagagtaatgaagagtctgaccttcagagacggcgttgacttggttgagagcatcgagagcagactcaaagggatgaaacgctgtgagctgaacaacacggccaaagcgactgaggtcggagacagaagtccgaaccgcctcagtgttctgtccgatctcatctagtccgtgaacctcgaagagaccatagccggaagaagactcgtagataacatacatcgccattttttgaggagaagaaactaaaaccctaaagacctactgagcgagaagaaatatcaacgaacgaaactagggtttcagggg

SEQ ID NO: 17294 - DNA, 534 bp, Arabidopsis thaliana
ccaatattccaatggcactatacatgagtttattccaccaggtaaaaacaccagtaccttgagggctctatctagtttccgagtttactctctatctctatttgtgctaaaaaggaattttgttgtttccaacagagaggaactgaggatgcgatgaattacttatcggatgaagcatacaaaggcagagtaaagagcattctctttctcatgccgtgccattctactccctattattccactctccatcgtaacattccaatgcaatttctcgactgcactccaaggtaaaggatcacaccctgagtcacagctcttgcttctatgtgattcttaatgattcttcttcttcttctgaaacagtgcagagaagggagaacttgatgagtcggatcagttcttagtaaaccctttaggttttgcatcagagttagctagaaactggtcagagctgcctagtcatattgtattgtttgcatcagaagaaacaaaactcagagatttcatgatccaacattcctttaaagaggcaag

SEQ ID NO: 17295 - DNA, 874 bp, Arabidopsis thaliana
ttcctgcatggtatactcacaccaattatatcagtcttcttggacattatagtcaaaatgtcaacatttgctaatttgactattacccgaaatcttcgtatccatcgcccatgttcttagaaacaatgtctttaacggtttgggaatggatcttctcctcgggagagaacttacacgacagagtctccttccacgggagctgtgaggagaatctcccgacgtaactactatgcgtaaccggagctctcacgtcacttcctcagagccttctgcttctcacaagccggggccttaaagaaagagtccatatgcagataggcacgagacaagaggctctcatcgacaccatggttagtgattaggaagaagccatgtttcgttgcagcctttgagacgagtctagtagcctccgatgccaagcacgagtcgccggagaggaaaccggctaggtctatgagtgggacttggagaggttgaacatccgtagaaggtttctcgtggtcgggccatacgaactgttgaggtatgtggtgcgagtgctgattaaggagctttgcatcgaagatcgaagaatcctctttggttttgttttcactgaatatttgagggaccgttgcaatgcattccgttgccatttttttttaattatcgtagatccttttaaggcgtaaaagattttcaaaatatatataaaaaacacgttgagaggcttaaagattcagtacagtggtcggtaagtgggagaggaaaggagtggtatatataggtgcgagagggaaacttaggtgcagggaatagtacgtaagcggcatttgggaggttggtgtttctttctttttttggctgtaaatggtacatatttctagatgaattt

SEQ ID NO: 17296 - DNA, 1270 bp, Arabidopsis thaliana
tcatgaccacgaacagagcattctcggactcatcatgggagattccacagatccctctcttgaactcaacagcattctccaaacatctcccaccttccacgactctgactactcatcacccggtttcggagtcgtcgacaccggcttcggtttagaccaccactctgttccgccgtcacatgtttccggtcttctgatcaaccaaagtcaaacccactacacacagaatcctgcggctatcttctacggccaccaccaccatacacctccgccggcaaagcggctcaaccctggtcccgtggggataacagagcagctggttaaggcagcagaggtcatagagagcgacacgtgtctagctcaggggatattggcgcggctcaatcaacagctctcttctcccgtcgggaagccattagaaagagcagctttttacttcaaagaagctctcaataatctccttcacaacgtctcccaaaccctaaacccttattccctcatcttcaagatcgctgcttacaaatccttctcagagatctctcccgttcttcagttcgccaactttacctccaaccaagccctcttagagtccttccatggcttccaccgtctccacatcatcgacttcgatatcggctacggtggccaatgggcttccctcatgcaagagcttgttctccgcgacaacgccgctcctctctccctcaagatcaccgttttcgcttctccggcgaaccacgaccagctcgaacttggcttcactcaagacaacctcaagcacttcgcctctgagatcaacatctcccttgacatccaagttttgagcttagacctcctcggctccatctcgtggcctaactcgtcggagaaagaagctgtcgccgttaacatctccgccgcgtccttctcgcacctccctttggtcctccgtttcgtgaagcatctatctccgacgatcatcgtctgctccgacagaggatgcgagaggacggatctgcccttctctcaacagctcgcccactcgctgcactcacacaccgctctcttcgaatccctcgacgccgtcaacgccaacctcgacgcaatgcagaagatcgagaggtttcttatacagccggagatagagaagctggtgttggatcgtagccgtccgatagaaaggccgatgatgacgtggcaagcgatgtttctacagatgggtttctcacggtgacgcacagtaacttcacggagtctcaagccgagtgtttagtcaacggagccagtgaga

SEQ ID NO: 17297 - DNA, 535 bp, Arabidopsis thaliana
gtactctcacttgactctttcttgtgtcgaatggtgataaatttgtaggcgatcactacaacgggaacaaacaaaggaagcttgtttttgggtgatgttgctacccaagtgaagaacaacaacttcactgctgatgtcaaagtttccactgattcttctgtaagtagactttttagctttagctgtttctagtagatatatgatgttgccgattgctgctggagtattcaattgatttttttttgtgtgtgaataatttcagcttttgaccactcttacctttgatgagcctgcccctggactgaaagttattgttcaggctaagttgcccgatcacaaatctggaaaggtatataactccaccagctttcttttctttctgttccgtttttttaaaggttggtatgttggagataaccattatttgttgttttctgagcaggctgaggttcagtattccatgactatgctggtatctctacagcgttggattccagctacccgattgcaacttcccggtgtggttggaccaatg

SEQ ID NO: 17298 - DNA, 764 bp, Arabidopsis thaliana
tcaaaagctactgatacatcgttttgggatgatcgtactaaagctcaagaaactttatcgtctttaaatgatcttaaagatcgtatgcggttactctctgagttcaaaacgatggtattgttacatatctaaggtttatatgtttatgatgttgaggctttgagataatgtgttgttgcttgaggtataggttgaagatgccgaaacgattgttaaactaacagaagagatggactctactgatgttagtttacttgaagaagccatgggaatcattaaagagttgaataaatctttagataaatttgagcttactcagcttttatcaggaccttatgacaaagaaggtgctgttgtttacattacagctggagctggaggaacagatgcacaggttattattatactctcttagaggtttgtgtgtgtttgtgatgtgaattgaggttcttttaaaacaatgataactttcagtgcaggattgggctgatatgttgcttaggatgtatatgagatggggagagaagcagcggtacaagacgaaagttgttgaaatgtctaatggagaagaggcagggattaagtcagcgactcttgaaattgaagcgcgtcatgcatatggttacatttcagcggagaaaggaactcataggatcgtccgacaatcgcctttcaattcgaaaggtcttcgccaggtaaaaataaggtctatgagctcaaaaagcatatgtggttgtgtgctatggatttatattggtattgca

SEQ ID NO: 17299 - DNA, 456 bp, Arabidopsis thaliana columbia
ggtaccgagctctaaaccagaaaacttggcaacaggatcaaatcactctttgcttgggaagaaactacagtttacctcagaaaaggcacatgcacgaacaatgtgcttgtgttcaaaggagtgcaattcatctcctgtcaatgcattccatattttcctgaaatgtgtcatgaaaacaaagaaatagtgttaaatcccattaatctattctcacttaaccatttttctctaggaacatagtttccccataacttataactttaagcaaacaacccatcaccggaggatactgaaattgcaagactaaatggtaaagtaaaagacttgaaaacgcaacaagaaagaagaagaacatacgcagtgaaatcagcagaagctgaggcagcacgaatagcatttttatcaaggctgcaactccaaactgctcccttatgtccttcaaaagtcccaatccag

SEQ ID NO: 17300 - DNA, 648 bp, Arabidopsis thaliana
gtgagcttgttttaagtctctagcttgactcctcacagttatcaagaagaaaatgaactgtagagagggtcagcataatcctctctgataccatcatcatgcttagtgtcctccctggagaggtctgcagcagaatactcaattcccctttcttcaaaataggcttccttctcttctggagggtaatctgtctcttgagatcatcttgaagtgaattattttctcggaatagtgttaatcctgcctttaggttgagcttccttctgcatctgatttagcttactcctaagttcctcaatagtgtgggctagcttctctatagtttcatcttgcttatcagacctctttttaagttctttcactctttcagtctcatatccttctcctgagatcgctctatcatttccagaggttcttccatcttcagttgacccttgtggagttttgttgatgccaaactgcaacttgatatgctttccaaggttgagacttatttaaccttccctgacatctatcactgctcccactgaagctaagaatggtcttcccagtattaagggatccttatgctctacttccatatccagcagcatgaagtctggaggcacttctactccattaatcatgcatggtaggtctttcagcatg

SEQ ID NO: 17301 - DNA, 944 bp, Arabidopsis thaliana
gaatccacaaggtggtctctttggtttcttcactcaatcagacggtggagagtgcttcgctattaatcactcgatcaaacggaccataataaacctcaagaagtcactcgatcaaaacggtgatgatgcttttctcatttgatcattcaatccaacgacttagagcactcctcctcaatttactcgaatggttgagatcatctcttgactaggtttgattttactcgaacgttgacttcctcaaggtcaatgaaataaacctgaaacacttaaacaaaaacatcaaaaataacaagaaaaatataaagttatatacatggatagacatgggacttcccccccaagtgagcttgttttaagtcactaagcttgactcttacaaagcttagtcagaaaaaggttgaggagaggaacagagaagtcctcatcttcagtggttgaattttcagtgtctgaatcatacgttgcatcctttcttgacatatggtaggatgagtactcatttgatttttcttcaaaataagcttctttttgatcagcagagtagtcttcttcttctgaaccaggctcctttgaccaatcctcaatttcaaaattggggtagcctttaaccatttcttgaagttccagaatgctgctgtttaactcttctatcttgtgagttaactttccaattgtatcctcctaagctttatatccaatccagagctctaggaattcttcagcaacagaatcatgaatcaagtgttcttcttcagaagaggggtcggtgggccgtttaggcactcgtggagaataagtcggaatgggggtttcctcctcactcaacaacttgctatctaggcttctttcctctaagtgaactcctttctggtctctggtgcaaaccattctgttgtgaaattgtcgtcctccttgatagctagtgcaatttccatcttctc

SEQ ID NO: 17302 - DNA, 954 bp, Arabidopsis thaliana columbia
ctagcacgcatctaaatactaggctcatctaaggtatttccagtaatagataactatgatgggcatacctattatcctaaaatcaagttctagttagttaccctaaaactagcattaagaacaatttaagatgaagaattctaaatatattatcctaacagggttttcgatttactaattcatccaaatccctaatgagaatccctaaacccaacaagagaactactcaagcatgatcatagaagaataaaatatgattgaataagaaatcaatgatgaaattaagaagagaaaagagtttagaagaatcttctctaaagggagtctccaaagggttttgctcccaagaataaaagagataataagagttaggtctaaacaatgaccataaaaatcaatacataagccctaaaaacgtttgggccttctttggaaataagagaaagttctgggccaaatttggaaatcttcaaaacatgaataagttgcgcaattgaattaccgtcaggtattggtatcgctcgacaccaggggttgtgtcgatcgacacctacgtcaatttccgtctccgaattgcttgtgcagcttaagttgtctttgttgctccagaatgctccataatctccaaatgcatcccaaacatgtaaagacctgaaaaaagtagaaaatgcttgactccttgttattaccttataagtcgactaatgcgataaaaagaaagtatttcctctcccttgataaaaaaataataatataatacatgggagattgataggattttcatatagtgtataggggtatgaatgtttcctatgaccccattattatatattgtttaaaatgatcaattacaaaggttggaaaaatgccgaggatgtcaatccagtatgcgagttcccctttgtttactctttaaaaagaaataagtcttgggaagaggaagaataccagaaa

SEQ ID NO: 17303 - DNA, 514 bp, Arabidopsis thaliana columbia
cctccggttatttcggcggatgagattattgaccggtttaggattggtttagagtctggtaaagcgaatggtaggagagttaggttagctttgattgatcatgtgacttctatgccaagtgttgtgattcctattaaagagcttgtgaagatttgtagaagagaaggtgttgaccaagtttttgttgatgctgctcatgggataggttgtgttgatgttgatatgaaggagattggtgctgatttctatactagtaatcttcataagtggtttttcgcaccgccttctgttgctttcttgtattgtaggaaatcgagtaatggtggtgttgcggatttgcatcatcccgttgtttcgaatgagtatgggaacggtttggcggttgagagttcgtgggttggaactagagattatagtgctcagttggtggttccttcgatattggagtttgtaatcggtttgaaggcgggattgatggtattaagaagaggaatcatgagtctgttgttgagat

SEQ ID NO: 17304 - DNA, 827 bp, Arabidopsis thaliana
caaaacaaattaatagtgatgattattctttcacttacaacatttacaatattattaagattgatatgacaaaaactattactcaattgaaacagattaacagagaatcaacaaatggagctgaaagaaggcaagggctaggcatattaagcgtactgaaagttgatgtgaagtacaacgaaactcaagagaatgtcccacacgatgggaagacaatgggagaaattgtcatgaaaggaaacaacataatgaaagggtatctaaagaattccaaagctacatttgaagcgtttaaacacggatggctcaacactggagacgtaggtgtaatccatcctgatggacacatcgagatcaaagatcggtccaaagatataataatatcgggtggcgaaaatatcagcagtgttgaagtcgagaatattctttacaagcacccaagagtgtttgaggttgccgtcgtgccatgcctcaccgtgtgtgggtgaaaccccgtgtgcattcattgtgttacaaaagggcgagactaataaagaagatgatgaatataaatttgtggccagagagaaagaattgattgactattgccgtgagaatctgccacattttatgtgtccgagaaaggtggtatttttggaagaactgcccaaaaatggaaatggaaagatccttaagcctaacctaagagccatcactaaaggtttggttgctgaggatgaggccaatgttatatcgtgaagattaaactttggttgatcactttacttctcgactttgagtttatgccaaaatataattatgcatggttgtctattaactattatgta

SEQ ID NO: 17305 - DNA, 593 bp, Arabidopsis thaliana
tatccaacactcttcctgattccacacttgtgtcaatctttgattccctgtccattattgcgaaaatcgaggcagcagctacatcggctttgctggaatctggagataacgaactcgattgagatatcgccattgccgccattgtcaaagcaaagaaaacctgcattgttaaacatgacaagggatcaagaaactctcaagggaaggcatttatcatcaacatgttgtgtgttttgtttccgtaccctgaaaacagagtcgaaggttgttttgccatcatcgacaaggcgtgctccaacgtagaaactggcagcgtaagaagagaagaggacgaagaaagagaagccgaaaccaataccactgactatgccttgacgaatcccattcttcattggaccttcacatttctttgagtacatgttcatcaccttgtcttctgcacagaatgaagcaacggttctgatgcatcctaccgcgtcattcgctacttggcttgcttccccgtacattttctgccaatgatttaaagtaacgttaatcaaatgattgagagaatctagttggtatatgtatgaaaagtagtaactagttta

SEQ ID NO: 17306 - DNA, 625 bp, Arabidopsis thaliana
caaaatcctccccctctcgcaaacaagggatggagagcaaaatatcacgatacagcctcctaacgtagataacccggccaacccgtctaatcaggtccctccgagacttgccaccgacctggccgagctccgcgcaatgatcctgaacttgatcaacataagcaaaatccaagaagttgcgcatcgcaacctcgccgcaatggtgggtaaccagagaagcgactccactcgcatggtacatgaggtagagcgcgataccgcgggtaaggaaatttccccttgtgaaactgggattcctgcccagatccccatatatctaacaggtaccgtctcccggacaaatcccacaccaaagattcgtctagacttcgcctcgatataggtctcacctcttatcaaccggcaagtcgcctttttacaggcacacgtgaaaactcgcgtcgaaaacccatcaacagggaacgagacacgtgcaacgcctaccttcccaaggctaccgctcccacctttgttatcgctaggctactcgcccccgaggtacacgtgcacgagaaaccaaacaaccgcgtccagctccctcgtccccgagaactcaacacaacaacagacctctatcgctaatcct

SEQ ID NO: 17307 - DNA, 534 bp, Arabidopsis thaliana columbia
ggaactttgattattagatttcaaacctgtaacggaagtgcgtccatgtcggctctaagtccggaaacaggtttcgaacaggatccgatccaagcgacgacgccagtcttcgccacaggatacttatacttcactccaagcgagtcaagctcgtctcgaacgagttgactcgttttgaactcctgaaaccctgtctctgggttctcatgaatctttctcctaattcctctcatccactcgaagaactcaggatccttggctgaatgaagcatcccgcgagcgagtgactcgagacccgaaccagaatcgtagctcccagctgaagacagaggagggagaaagaagaaggtaacgaagatgacaaagaagctccctgagaaatccattctgatttcttttgtttgtcgatgtaaactggcaagtgtcaatgaaagaaaggacaacggtgaatacgatgatgatgaaggagaaggagttggatcaccgatccatttttaatatttatatagtacgtaatttacacacgtttttgga

SEQ ID NO: 17308 - DNA, 515 bp, Arabidopsis thaliana columbia
tccatgaacttactatgaacgtccatgaacttgcctatcatatttaaatcctgtcaaataacatgaaacttttttgcgatttcaaagttcaatcacatagatatcctcggcttggttagagccaaaaagtattgaaaccataaacatgcaaataagcagtaaaaagaatgagtatattagaagactgttcataccccctgtcattttagcaacttcgaaaaaattattttgtatgcatgtacctcaagttagatactaagcataacaacatcgataatacggataccaaacaagacctatatctaatttcagagaggaaagggaaaggaggggcaaccatggtgtatgtcttcccgcgtgagtttggccatacgcaaatatagaaacgttcgatccatccagagcggattgcacaaaaggttggacatcactgaacagtgaagctgaggaaattttactgaataagttccggattacatatttacaagagtattggaaacagttcttaaggagta

SEQ ID NO: 17309 - DNA, 1103 bp, Arabidopsis thaliana
  unsure (1)..(1103): unsure at all n locations
caacttgaatacacactcttttgttactgttctaaaatatcaacctctacacaccaattggtcgtttactagtcaattctacaatcaaattgtaaaaaataaaataaaatacaaaacaacgccaattaaacatgctttaattatttatttcaaattttaaaaaataaaaatcaatcgtcgactatagccgtctaaacattccaaataatccaaagttcgaaatattgcctgataaagaaacatttcatataataattgattgacaaatatattaaaaagaatcgatcttgttattttctgcttacttgtgatcaatcaacacgaacgaagctcatggtatcgtcgttgatccaatcatacttctcaacgaatggattagggattctcgacaattccggatatcgatcaactgaatcttcccaaacattcttatcatcaagatcctttagaacctcccaaacacaattattagactcgaatccagctcccatactcatcattagtatcttctcacctttctttagtctgttcttagcttccatgtagccaagaacataccataaaccaccagaagatgtgttcccgaacctatgaagcgccattctcgctggctcgatgtcgaattccgtgagccctaagcttttcccaactccttcgataatcgctcttcctcccgggtgaatacagaaatgttgcaaccctgtttttaggtttagacctatccctgagctcgcgggctctcttttcgcggaggttcttcgtttaagcgcgcgaactattgcatagcggatcagttccttgacaggcaagactctagggaggagaacttggaggttcttggttagggctcgagctgcggctttttttaggtatttggttaagagaaagcctggatgaccatctctgtcctccatttgtatgcagcacgagtaggcctcgtcgtctgagccaacatgagcccggaccactgtcacgagcttcatcaaagcctggttcttgaacctagctgcgttggttaacagaacagagcttcctccggcacggaagagacagtttgagagcatcattgacctatcnttaccgcagtaccagtgaggacccat

SEQ ID NO: 17310 - DNA, 772 bp, Arabidopsis thaliana
gctctccgacgatcgtactatcaaaccggtttgatcatatcccttcagaagatagtggctagatgcaagacaagtgtaaacagatccgatcattaggaggaaaggttccagaatgttcttgaagtagtattagtataagcaccatgtatcctctgtatttcaatcgagtgaaatcaataaaaggatttattcagcaaaactcttgttcttcattttttcactgtgttctggtagtttggttgtgagtagtctctcatcaagatcaatggagaagcaatatgaaaagaggataacatggacgattaagcaatatgattagcagttagtatgttgattatgaccttatagtagggcaaccctggtttgatcagaagcttcccagctgtggtttccgatcaatggttccccttaccaaacttcttgacaaaaatggtgggtttatggtgaatggagaagtcaagattgttgctgaggttggtgttcttgaagttgttggcaaatcagatgtgttagaggaaacttcattagtgatggaaagcatgtatgtcaatgggtttcaagttcttccttcacaggtaagagaaatcattcttaaatacatatcctaagagccgctcactatggttggtggatctgttttcaggtcaccaaaagttgctatctgatatgcttactttatatatacgatattttcaggtagaatttgtgaagagtctgtttgaaaagcacccagatatcgaatcaaaactccatctgaagaaccacatatgag

SEQ ID NO: 17311 - DNA, 568 bp, Arabidopsis thaliana columbia
cagtcaaagacttcaagattctaatcaatgacaagcgggtcagagtaatactgagaaagatactggagtctgcaaagagtgaccgagttttgatgctcagattctgctggacttcctttgtcatgtctctcaccaccactgcgcttgcttgccatcggtttgtgatctcggtctctgaaggttacgtcaactacttatctctgtctgctccagtcgcacttcgtacctgattacctgaacatcctacaccaacacagaaccagaatcactaatgtatattgttgtcaagacccaaagcaaagggttccttagtaagagggatagattctacagaaagactaaatattttcgtgtatagagtcgttccatatctaatcctatcagacgatcaatgcctgtcgtaacgatatatgactaatcataatatccgagacctcaaggaatcgttttgctctgcttcaagaacacttaatagagttctcactctaaaatgtcctacatttaccgaaacctcttgggcaagtccaaaacacaaaacatatttgattgaataggacaagcgtttgtg

SEQ ID NO: 17312 - DNA, 564 bp, Arabidopsis thaliana columbia
caaaaggtcattattaaatcccaaaacttgtttacctatttttatcaggaatcaattgatcaccactacctaaaaaccacaaattgcttaagtttgttaacactgattgacaagtgtcatacaagtaatcccatttgccacgtgtcatgtcctttttatgtaacctaggacttgaaaaccacaagtgcaagcaaataacctagatgacacttgttagagaacgacgtcaccaagaacctctcacactctctattccaccacttatttaccacggcaccgccttctccgtggcatcttcttcatcgtcaagccctgaaacatcgccgattcaaaccttaaacgatctcgagaaactctccgttttaggacaaggaagcggtgggacagtctacaaaacccgtcaccggagaaccaaaacgctttacgccttaaaagtcctccggccaaatctcaacaccacggtcaccgtcgaagccgacatcctcaagcgaatcgaatcgagttttatcattaaatgctatgccgtttttgttagtttatacgatctctgtttcgtgatggagc

SEQ ID NO: 17313 - DNA, 759 bp, Arabidopsis thaliana
acagatatgatcttgaaatcgaaacaataatatggctttagatcttataagttaactgttttattttttccattagcggtaatattatatgatctatatttgtagctcatccgtggttacgtgacgaaaaccccggtttgcttcttgatttctcggtctacaagttggtcaagtcctatatccgtgcctcacctttccgacgatcagcacttaaggtagtttcttgatatcctcatattattattaagtacattgttcttttctctttctacttaaatatagctgatttacttatgataatagtcgaacaatttatgctacaaacagaatgttacttgtctttttggcactcagtgaataatttcctgagaacatcttttcctatggttttctgtttcttatattgaccagtttttcatttgttaatcttttgaacaggctctctcgaaagctatacctgatgaagaacttgtgttccttaaggcacagttcatgctcctggatcctaaagacggaggcctatcccttaactgtttcacaatggtaagtatgtctttcatgatttagctatagcattttgactcggactttgatttgtgaatctagatccagtatatttatcccttcttgatctctagattccattttctgaatagaaatagtttcctgaagcaagagatagaaatattgattcaaaataaacacaaactaatatataccgtttataatcgttgagtgtactggcagctttacaagata

SEQ ID NO: 17314 - DNA, 478 bp, Arabidopsis thaliana
cactcctgctataggattctccagaaactcgataaaaccatccgcatactgatcttgcaatctcttgttcccgaatattttcttttgctgagatgcagcattgttcctgtagatctttccttcttcttccacaacaacatgtctgattgtctctgcaacagaagcactcgtgaacagcccgtctcgctcattccttggaatctccaagcctatattcatcccactgagcaacctagccactagcggctggtctaggttacatggaaacatgatcaaagggacaccaaagctaagcccttccacagctgatccccaaccacaatgagtaacaaacccaccaactgaaccatggctcagtatcttggtctgaggtaccactcggtccaaatgactccacgctctttgactctctctttgaacccatcaggtagtagcatagaagctctagtcctcttccttagcgtccaaaagaaaggta

SEQ ID NO: 17315 - DNA, 461 bp, Arabidopsis thaliana
gacagagcactatactcggcctcagtggagcatcttgccactgtatctagcttctggaagcaccaagagattatatatgagccacagaaggtacaaaaccctgctgtcgatcgtcttgttctcttgcagccagcataatcactatcactgtaagctctaactgtgcaatccgtatctgtagcaaatgaaatccccattgtcgtagttcctgtaacatagctgagaattcgcttcaacaggtgataatcggagactgttggggagtgcatcttctgacacacataattgactgcaaattggatatctggacgggtaagggttaggtattgaagctctaccagccaaacgttctaaaatatccctgatatgagaactgttcatcctggctaggcaccttgtccagctgcagacggagtggagtcggcattggtgcaccatcagccattgaagcagtgataagt

SEQ ID NO: 17316 - DNA, 766 bp, Arabidopsis thaliana
gatatcccaatagggaacgtgagctgggtttagaccgtcgtgacgcgagttaatcggaaccgtccaagttgctgactagtcatataatcaacggatgatatgaattatgtatatgatttaagtaaaccattgaaattaaaaattttatgttgtcaaacccctaaaccggtttaaacctcttctctctcagccgtcgtctccatttcttcggggaaatcatgaaccctagtaatggcgttcctcttccgcattcgaacatcggaatttatactccagaaagcgactcaattccgattgaagtcttcttcttcatctatcttcacactaaaatctctcactagcaagcagaagaagagccgagatactctctcccttctcaaatccgagaataatcctgatcgaatcctcgaaatctgccgatccacttcactctcacctgattatcacgtcgaccgtatcatcttctccgttgcggtggtgacactagcgagagagaaacacttcgtcgctgtatcgcagcttctcgacggtttcatccaaaaccaacccgatccaaaatccgagagtttcgcagtccgtgccattatcctatacggcagagcgaatatgcttgatcgatctatacaaacatttcgcaacctcgagcaatacgagatcccaaggacggtgaagtctctaaatgctcttcttttcgcttgtttaatggctaaggattacaaagaagcgaatcgtgtctacctcgaaatgccgaagatgtatggcattg

SEQ ID NO: 17317 - DNA, 503 bp, Arabidopsis thaliana columbia
tgttttacgatgttaaggttgcattttggacaccagtatgtagtctttgttggtttatcggcaatggcggtcttgtccttattgttcatctcaactttcttgctgcacttcttgcaggcaacataaaaccacccaaaatcaccttctatagtatgtatcttgcacatgaccttgcatttttgaacctgaaaatatactcaattttttcaaacaactattaggatatgatttcagtattaaaactctatacattcctattcaatatggctacctctaagaaatgaagtaagcaggaaatagattttatgggatactggtcaaagtaaccatcacttccgaatgacaattcacgtcttggattagtctcggaaatggtgagagcaagaccatcttttggcaaactgtagttaccaatcagccaataaaccccaaacttaatatccatgatttattagcaatcaaaacacctacaatatagtatttgattacatgtttttgaaatg

SEQ ID NO: 17318 - DNA, 499 bp, Arabidopsis thaliana
gcaattagtaaattaaattattacaacaagccaagtggaagacggcgtcgtttatcataaatgtcaaaccgatgacgtcttatcgggggagcatgagcattggactaaaaaattattgtcaatttgtttaaattgtattttgggccctgaaaattattataaatgaaatttagccccttaattttgtaagagtttacaacattgaaccctaaatcattatgttcccaaaatcaaaatttcactcctcgagagtagcgagaagaaggaggagatgagcaagatccgttcgtctgcgacaatgccacatcgcgaccagccgtcaccggcgtcgcctcacgtcgttacactcaactgtatagaggattgtgcgctcgagcaagactccctcgccggcgttgctggtgtcgaatacgtcccgctcagccgcatcgctgatggtaagatcgagtccgccaccgccgttctcctccattccctcgcgtatctccacgagcagctc

SEQ ID NO: 17319 - DNA, 559 bp, Arabidopsis thaliana
agtcgtgcttgtcatcgcaaattctgaacacccgctcgctagcttctaaactacctgatttggagtacatatctatcaaagaactgatgacaatcgcgttcggtctaacattggtacggatcatatagccatgaatttccttcccatgtctaagagaagcaatgctcgcagaggcacatagacagctactaaaagtaaattgctctggtttaacccccaaagcaatcatttttctaaacaagtcaagcgctcgattccctgagccttgtctaacatatccagcaattaatgcagtccaagagactggatttttctcaggcatctcacagaataacttttcagcagcttccatatctcccagtttggcatacccagagatcagagtagtccaaatatgaatatccttcactgtcatctcatcaaaacatcttttagcactctccatctgaccacatttcgcataagcatcgatgatagaacacgaaagtaccacatttgacaaaaacccagcaaccaaaacctgcccgtgagcttgccgattgagctggagctgcctaga

SEQ ID NO: 17320 - DNA, 1059 bp, Arabidopsis thaliana columbia
gacttcatcttaatagattaaaaaatgtaagcaatggttggacccaaacatgttcaatcagtagcggccaaaccttaggaagttgaggtgactttgacaattctgtgagatcaaggattgaagttatagtttttttaagttgtttcagtttctttaatttattcatgttcagagcaaaaataaaaatgatagtaactgtgggttctgaaatccacactagatatttgtaaatagaattttgagaaaggaaggctagatcttcacaagaactttgagatttatattgctaagaacgaatggacttttgtattaattataacagagcttttccaatgtgaaaggagattacaagtgtaaaagtataagtgtgaatgttaagctgaatgtatatgtcttccaagtcatccttgcttctttatataggtctacgcacgtggtggcttcgtccgagatccgcggagattctcctggatattcggcaggtcagttctgagatatcaggtccgttctgcgaatatctcccagtcagttcctaggttgttattcgcttatctcccttcatcaggtgatcgggcttgttaggcccaaatacccatttgcatatgtgggctcatcagttgcgcatgtgctcttacttggtgggcttggtgggcttattggactggcctgatattttcgcaggtggattcctggagggaaatccagctccaacagtaactttgaggcttctgtcaaacaatatgaacaataaaagtgctattttgtttttgttataaaaaattttttttgataggtccaatactcgcccagtctcgtatacatgtgggttctatgtccataatttgacttctttgtaacgatttaaatagtttatattaatatacttcaactaatatatcatataaaagattttatgtttaatatctaactaattgatgtttccgacgttaaaagttgaaatcaccttaaaaatttagagcaagcccaatggtaagggaccatgagggactcttacaaatttttgaaattatgataatctcaaagttaagaaacatgata

SEQ ID NO: 17321 - DNA, 584 bp, Arabidopsis thaliana columbia
gtcgactataccccagtatagataataatataattaataaaaaggaatgagatgatataccttagaaccacttgggtgatgttaagattgcattttggacacctgtatttagactttggttgtgtagcagcaatggcggtctcgtctttcttgttcatctcgactttcttgctgcacttcttgcaggcaacataaaaccaccccatatcaccttatattgtttatatggtgcacatgaccttgcatttctgaacctgaaatgaagtaagcaggaaaaacattttatgggatactggtcaaagtaaccatcactttcgaatgacaattcacgctttggattagtgtcggaaatggtgagagcaagaccatcgtttggcaaactatagttaccaatcagccatggaatccccaacttaatatccatgatttatttgctatcaacacccctaaaatagagttaaggattacctgtttttatagacttccaattctggatactctggactgatggcacaactgaagcatcaaaagcatttgtactatgtgtcccctaacaaataatagtacaaaatgtaaaacatgtt

SEQ ID NO: 17322 - DNA, 575 bp, Arabidopsis thaliana
ttttaagaaccgaattgtttctaggaagatgataatcagcagcagcagcaacagcctgagcgtaaaagagccagctcttgcaaggtaatttgtgttgatgcttgtaattctactgattatagattaaggatttggccctgtttataaggtaagtccctactgaaatttgtacatatttgagatattaggaaagaagagtatatgtgtactatcttttgttttgatattaccttttgttttgacaatatcatttattgaataatgcattcaacagggaaaactcaatgatggaagagaggtagcagtgaagctattgtcggtgggatccgacaagggaagggacaatttgttgcagaaattgtagcaatttctgcagtccaacatcgcaacttagtaaaactttatgggtgctgctatgaaggagagcatcgtttgcttgtatatgaataccttcctaacggaagtgttgatcaggctctatttggtacgcacagaagcatgtttatcgatccatgcttctgccaggctaaaatcctcattatgtacatgtcattggtttgaatgttgcaggggaa

SEQ ID NO: 17323 - DNA, 889 bp, Arabidopsis thaliana
cgataaaatgaatgaaaacatcatagcaaaataatgataacagaacaataacaggatgaacaacttagcaatgaaaagtgaaatactatatagattaagagaaatcctattacaaaagcgaagaacacacaaactgtctgcagaataaaacttagtctcgaaaatgtaaagtacatgttacttatagcgaaatattctgaaaccctaatactcaaaacgacacagtattgggacggattaaaaacggtactcgaccctggtggtcgagtaatgggtcgagtgatgagccaaagtcttcttctcttcctgatgctcgaatgtctggttgagtgcggaattgagaagactcttaagctggcagtcgagtagggatatcgagttgtagatgaaggtggactcgacttggtggcagagtgatgaaacgagtgaatgatgatggtggtactcgaccatggggtcgagtggtagtgatcaagtgattgacaaaaggtggcgatggtgttgctcgatcaggggctcgagtgaatggcgagggattgtgatggatgtgctcgaccaattggtcgagtggtggtgagaaacggtgatgtcagctactcgagctcgtggtcgagtggtggatagagtctcgcggtcaagtgatttgatgtagaggttgtggccgagtacttcaggaagtccaggatgacggtactcgagctcgtggtcgagtatgttgatttgatcaggtccgcttcttccaattagctcaccagcagctccaaatcacatgaaaacaacacaaatatgcaatatgcatgcataactatcctaagcatgcaaagtgatgacaaatgatgacaaatggtataaacagtggtgatatgatgctatagtgatgacaaatgga

SEQ ID NO: 17324 - DNA, 674 bp, Arabidopsis thaliana
gcatccttctaaagagtattagagcttttgtgtccagcatgttgtgtctaaaacctgagatcatcgagttccaacaagcgatatccaattcgtttatacaatcatcaaagatacattcagatatctccatcttctcgcattcggagtacactgcaataagaccactaactatgtgactgttcttcgaaatctcggtccttatcactaccccatggatctgcttccctccttccagaaatctcaatctcgcacacgaacttaatatcacactcaaagtggttttatcaggtttcaggttctgaaactgcatttgtctgaaattgcttattgcttcctcatagtgttcatagttggaataaccagaaagcatagcattccaagcgctaacacttggctggggaatgctactgaatattctccttccggtttcgacatcccctgaacgaaagcacgctccaagaacactaatgcaagtaacttcatttggttgaaaacagaatctctcattctcgttaggaattcaacagatttgtcacttcgatactcctgaccaaacccaactatcattatgttccaagagacaacattcacttcaggcatctcagcaaaaattagctctgaccattcatgtctttattctttgcatatatttcaagcaacgaattggtcagatg

SEQ ID NO: 17325 - DNA, 504 bp, Arabidopsis thaliana
gccgtttttctatgccttagatgaatgcagactcaaaaatatacacaatgcaacacaacattactgcctctcttgtttactaatcctcaggctgagatggaaatggttgcaagagggttggagaaactcatgaagcttgaagagcgacagtctctactgaaaacgtttgttggaatgtgttgcagtgaagatagtcaaagaagcgcactcatggctctgggtttggtgcactggtaattgaattgcttgctgatttttcaacttctagtgaggacaaccattcaaaacactgtcatactcaacttaacaggtgattttaaagtaattgaatagctcagaaatattcttagtctagtgtctgagtgactctagtccaaagtttgtgtgacactctttaacactataaaatcatggtgttataaatttctgtatattcaagctattttcccatgaatttgcctaaaaaaagagaagtgtcagcttatatgttcaaacgaacaaaca

SEQ ID NO: 17326 - DNA, 941 bp, Arabidopsis thaliana
ggatcccctgtatgtaacaattaaatttgaaaactgattaaaaacactaaactcataattgaaagctgaaattttcagattcaagtacacaatataagagaccacaaaagattgtcttaagttttgataaattgtcaaactgaatacagaaattagaaagtatgagatggagaggatccagtgttggggtcagctataacagcctcaggtttgacagcctcaggtccgacagccacatgtccgatcccagcagatgtagcagctgcggcattaggctcctcgggtctcagattggagttgaccgattcagttcttgtagaggatctggctcgaaacagtgtagcaaattctggatccttatcggcaaggtagtcaaaatacgcatcaaaactggtgatcttcttagcctggtttgcaataagggcttcagcaacagccagcttctacgagagcacaactggatcatctcgaggaagcaccggaccggcatgagctgaagacgcttctgcctgtaatgaaccagctccataaatcctgcctttcttcttaggagcaacctgtcagaaactcacaaccaaaccgacaataacataatcaaagcaaagtcgaaacacattgatataatgcaaaacttttagctccagacataatcatatcaggctgaaaatacaatgacattatgcaaaccaaaaacacaacataatcaggccaaaaacacaatgacattatgcaaaccaaaaacacaacataatcaggccaaaaaacacaatgacattatgcgaacttctttcacaacataatcatatcagtttacacataatgactgaatgcaaacttcattcacaacataatcatatcagtttacacacactgacattatccaagccacaaacacaagataatcatttcagtttgacataattcaagccacaacagacaaa

SEQ ID NO: 17327 - DNA, 593 bp, Arabidopsis thaliana
tgtgtttagcttaattcgaaactgttagtctattgtgtgatctgagagctttgtggaattcgatctccaagtgctataacaacctctttatttgtgagagtagtcattagggtaattagactcatatcacattttagaatttaatctaaacttttttttttcttttgttactcatgcgtttttatttcttcttcttcttgtgtttcaggagtttaaggaattcaaacacaactacaagatgctgatagtaatacctaatgctgctggagtgtaacgcgatagagctagtcaggcatacaacgaaaagggtcagaaaatagataaacagggaaacgtgagatcagaaaccgccgagggtgtcgatcgacaccaacgggaaatcagtgcagatggtcgtcggatgactcttgctgactacaacatactagatctcttctattccaatcagtctgcaatccgaccacctacatatgaaagacgcgatttcgagataaaacatgtattctttacgcttgtgagtatgcaccctttccaaggtctagcacaagaacacccgatggatcatattgagcgacttgaagactcggtttcga

SEQ ID NO: 17328 - DNA, 371 bp, Arabidopsis thaliana
tcaaagaagaagaaatcaaagaagaagagattgaagaagaagagtcgaagaagacgcgtttgggaattgggagaaagagaagaagaaaaaaaggacagggaataataaaagagtgtaatagggccaaccctattttagcccataacaatttgagtatagccctatcttagcccaaaatcttttatttaattttatcagggttagggcttatattttttttaacggactcgatataagcccatattaaaatgcgatctatagaaggcattgtggaagtgtttgatgcttttgctaaaagtttgggactaagaaataagtatggaaaaatcaacagtttatcttgtaggagtgacagacatttctctacaaga

SEQ ID NO: 17329 - DNA, 577 bp, Arabidopsis thaliana
tgccaatccgtggaatttctctatacttgagaattgttttccacatccatgaaccaaggcaagtgatatctattactgcccaaagagacccttgtttgaggagggaagttctgacccatttcacccacagcgaatccttgtgggataagataagccaaatcaatttcaagaaatagacatcattcgcttctttaagagaccgaaacccaagtcccccctcttgtttcggtttacacacagcttcccatgcgatctttgcttttgttgtttgtaaatcaccaccggaccacaagtacgcttaacacaactgatctatttctcttatgcatgctcgaggaagacgaaatgctcccaaccagaagttacatatgctccaaagacaaatatcgtgccgaccaagaacgaatcttcttctttatttgttccatgagagggcgataatctgtagaagagagaccttttatgaccaaaggaagtcccaaatatctcaccgggagtgtacaactgcaaaaggaaatcgatctgctatatcttgttgagaaatgtctgtcactcctacaagataaactgttgattt

SEQ ID NO: 17330 - DNA, 492 bp, Arabidopsis thaliana columbia
tttcttttctatattagaatttcagatatgtatcagcctttgaagcagtttggaggatatttaagttcctaatccagcatagatcaactcttgtgcagcagctatcatttcatgtagaagagaagcaatcaacttattttaaagggaaagagtctataaaagaagttttggaacgtattgccaaccaagattcccaattcatggcttggttgacattaaacaggaatgatgctattggtaaaaatggaaaacgtggtcgtgatatcttatatgcagatattccagcgtattttacttgggatggaacaaataaaatgtggaacaaaagatcaagaggattttcattgggacgtataaattatgttccaaagaaattagaagatgaatattttctaatagttctgcttaacattgtcaaaggtccacatgttttgctgatatcaagacctacaatggtgttgtctatccatcttacaagacagcctgttttgc

SEQ ID NO: 17331 - DNA, 482 bp, Arabidopsis thaliana columbia
tctagcttgctcaccaaggcgttaccagctccgacttttaggggatggtctcgcatcagcacgctaaagtttgttcagttaggtctgataatgcacatgaattaaaatttaatgagttatttgctaaagaaggaattcaagctgatcatccatgtcctgtaactcctccaaatgaatttagaatcactgccacgaacgggctactccgaatcaggtggccttgggagctcttgatggaagcttgatggaagcaagtgtagctaagaaaacaaactgtactagcatggcctgaatgccgagtctttctcacgtcgttccctgttcgcttatttttcaatgacggtaacgccgtttccactttaaagaaaggataggacgagtatcggacgagatattgactctgacctctcctacttggcgcttcggcccctgagaattttccgtacctgtctctggcccaaaaaggagtttttccaatcaat

SEQ ID NO: 17332 - DNA, 738 bp, Arabidopsis thaliana
cttcctccttctctctaagaaacaaattgaagactttaattgcctcttcaacgcgtcctcttgtagcataaccagaaaccatagtagaccatgtataagtatttctttcaggcatataggcgaacactttaagtccatcctcgaccaagcccgctttacagtacatgcccaccaacgaagtatcaacatatatatccccaaaacttgacattttgaccactagcgcgtgacctgcctcccaactgtagaactttgaagactcgactcggccttaaaaatcccagcaagggtataagcatttggcagtatatcttgcgctctcatctcacgaaacagctgcataacagtgtaggagctggagataccgccgttctgagaatagccagtgatgagactgttccaggacacaacatccttgcagattatggcgttaaagatggagtgggctttggccaattttccacattttgcataaaagttgacaaggacattggcatgttggatgcaggttgatgctcccgttctgatgatctgtccatgaactgcacgtccagccacgaggttcctttgctgtgaatgatgagtcagtttttttaataacgtggaagtatgcgggttgagttctgtttgaaaggtacttggatgcattggtatagaacattgtttgtccctgcacagaacacgctgatgatagtaaggaatgaaatattcatattattagacactaaataatagttg

SEQ ID NO: 17333 - DNA, 476 bp, Arabidopsis thaliana columbia
tgctaagaaaagatgtcaagttgcccgatgcttagaagatgtcttgttggaagcggttttgcctagttttgatacttatggtggatggtgtgataatttgtagtaacaagtacttaaacataacactagaatatgttaagatgtttgatgatgttaagttcttcttatcattacttgtgggggagagtagctttcacgacaacaatggagaggtttgaacctcctactcactgatcccctcacatagcttaaagtccgtctaaaacaacgaagcagccgttgttatgaatttccattggcactccaaaatgatggaggttgaggcaattccacttatggtctctaagctaccggatccagatgacaagcgtgattatactcagatgacatatgacgatttgggcacaaaagtgatcctacatcaaaaagacatcatccagtttgaatctgatgcacaggtaatgtacactactctt

SEQ ID NO: 17334 - DNA, 621 bp, Arabidopsis thaliana columbia
catcagtcttgatgagagatcaccaattacatacctgaatccttccacgattcgtgaactttgaaacacaatgacgttctcgtaaacaagccaagtctttttctcgatcacgcgtcatctgcaccaacaaatcagccaaagcttgacgacctctgattcttggggaacaagcaacctgaggaaaacttcttgcttctgttgtttgaacttctttactattgtcattgccgctgcttccattgtcattattagtaattgtctccgagtcgttgcttagtttccgaataatatccataactctcacaccttctctatctttctctccagattctaaaggtggaggtgcacattcaatctcttcttcttcctcctcattgttacattcttcaatcggttgaatcatttgagattctttcacggattcgagagactccgaattctctagagcgtttgatccatagaacttgttctgctatcgattagggattggttcgagcttggtggttgctgcgttgtcctcgctcccatatctgaacgagagaagaagctgcgtttcttgacgggttctcgggttgcctgaattcggatcagagcagaccctaaagaagaagacgatgatgg

SEQ ID NO: 17335 - DNA, 985 bp, Arabidopsis thaliana
aagcgacgcctttgacgaagaagacgacggatattactactgccaacgatgcggtgttcaggttgaaaatctgatccaaaccggcgtcgacgacggcgatttaatcggtgaaggtggaggtactcagggcgctctgtataaccccaaacatcgccggactgaaccacaaccaatcactccttcacagcctcgttttacagatgacacaagccgttactctcagtttaaatctcagtttgaatctgaaaacgggaataaggaattgccccgggaagtgaagagagcgcctgacagttatgtcgataaagagccaacggagcctgtggattttgcagcagagactttgagttatgagaattattacgatgaagcaagagatagatatgttaaagcttttcttatgatgatcacttatcagtgtgatgctttggttgacaagtttaatgtcactcctttgattattggtttggttggcctatctctttgcgttatgtggctctctctggcgtctaccataaagattgggccaataacgccattcgtgattccgagcatcagtcagaagatggtagaaatctattgacaatgttgtcttgtttggtgtgattctatttgttactaagtttcactctttttggtgtcttgcattgcaggtgaagtaaaagatgctaagaggctttaaaagacacaaagctgagccgcgtaacatagatggtaaaagagcagtgacgatatggtttggtatacttaaaaagactatgcctttatcgagttctttggtgatatctttccttgcttgtcaccaagcgggagcgcctgttctacccacggatattgtgagatgggcacgagaaggaaagcctccgtatttgtcttgtgttctcgagattagagagcaaatgggagagcgatcagctgcgtgtccggtgaaagtaagtataatggctaagccttttcagggtatttctgctcagatgtgggaagc

SEQ ID NO: 17336 - DNA, 474 bp, Arabidopsis thaliana columbia
  unsure (1)..(474): unsure at all n locations
nnnnnnnnnnnnnnnnnnnnnnntaaaggatgatctggtgaaattcgaaagctgacagtatagtgtggatgcaagaagatacaagcatattcgtggctttcgagtggtttgaaatgattattcgtcctttcagaggatttttgttaatcgtataacgtctattctgtacggcttgagtagttcctattaaaggtatattttttgcaggtagtgagatgcgtgcttcaacctatatgcaattagcactaaaactgggacaaacagggggtggttangtcaacgggaatcatatggtcggcccagttattgtacaagataatcanattataggacacggttattatgagtttcttggtgcgtcacatgctgagagaaatgctnttcaaaactgtagagcatctcccgttggagcgangncttatgtaacanttgaanactgctcgtacttcgggaaaacacatacctgtatagatg

SEQ ID NO: 17337 - DNA, 1357 bp, Arabidopsis thaliana
cttatccgtggggtcgattgacatttgagatgaccatgaaatcgataaaagagagagaagtcgagcagcttgcaacaacttctgttgatgtacaagggctattatacgccctacagcttgttgtgcttcaagccgcaccagctattaaagaaggtcctgtgtctgaggacactgtctgttctgagtcggacgaagagactttggaactgatacctcgacaggtggtcccgtttaagcttggaaatgcgaaagatcttgacaacaaaggacatgtgataaatttattagtagatgataatgtttttttcccgttaacattttcaccaggttatctgctaaatgttcagcgaccggtgtaattgatttgttaccacgctgtttttgcagactccggttgatccaattatacttcctgaagccgttattgatccggcccaagatatttcgtggtcagatgatgaagcagatcctcgtgtagacactatggttaagctggtcgccgaagtttcaagtttaacgatgatatgttccctgggggttgtgttccttccgaagtggtggtggcccccaaaaaacgaaaaaaatctgcaatgttgaaaggtggtcggggcagaaaatcggccaagcagggcagatttaagaaaaattcaactgggattcggaggacccaacagaactcgattgatgaagaggaatctattgttaacgttgacatgaacgcgttatctcggatgttagatgctaaattggccacgcagtacaaaaagataatgaaaggtgttactgattggtttatcgcaaacacttccatatcaactaataatgggaaagatatcccttctgagaatggggtagaagctcctgctggcaatgggaaagataaagatgttcctctgacccgtaataatccgtttcccaactcagatggagacgatgattttgaaattgtcccccctcttcgttcgcagacccgtcgttctacacgccttggcaaacaggcgaaccgcggcagacaagtccccgagggtgcgagagacgataattttgttgatgggattgccgctgccgttaactcgcaggtaacgcgttacctgaccactacctttttggtgatgtaattcgacagttgttgatatctttttacttattggtagatattaccggagtacgactgttacttctcagtgctgcccgatagcgtggtttcttccgaggttcgtcttctttcccattctttcctgtgttactattgcggacccatcttacagtagatgtatctgccgatttttacagtcctgtggtagtggtcagtcagattctactttaccagatgacgaggtttgcgaattatggtttt

SEQ ID NO: 17338 - DNA, 523 bp, Arabidopsis thaliana columbia
taacttacctctgcactcttggattcacaagatcagatattttagcaatcactcataagaacgtgagctgcaatggaatattgcggaaaaacccgggttttagtctcaattacccgtcgatagccgtgattttcaaacgtggcaagactacggagatgatcacaaggcgtgtcactaacgttgggagtcctaactcgatatactcagtgaatgtcaaggctccagaggggatcaaagttattgtcaatcctaagagacttgtgttcaaacacgtggatcagacgctgagctatagagtatggtttgtattgaagaagaaaaacagaggagggaaggtggctagctttgcacaagggcagttgacttgggtcaactctcataatctgatgcagcgagttagaagtccaatctctgtaaccttgaagactaactgagccaatgaaggaaaacgtttttcattctgtttcaagactgtgttaggtttattaggttttatgctaagaaacctcgtgaagctgattga

SEQ ID NO: 17339 - DNA, 632 bp, Arabidopsis thaliana
atccccgacaagaccagtgcacaagaacaggtctatacaaaaaaacctgttcccttacaaacttcacatctgaatcgacatccactgatccacgatcacgtttggtttgcaggttcaagaagagctcaaaaggttactagaattgtacaaaaacgaagacgttaccatcaccttaacaggccatagcttgggcgcagttatgtcgattctatccgccgcagactttctccataacgaatggcctaagatcacaccaagtctacaacacagcctatgtgtcacagtatttgctttcgggagtccccaaatcggtgaccgaagcttcaaaagactcgtagagtctctcgaacacctccacatcctaagagtaacaaacgtcccggacctcattccccgttaccccgtattcaggttcacagatataggcgaggagcttcaaatcaacacattaaaatcagagtacctaaaacgatctctaaacctgggacatttccataacctggaggcttacttacacggcgtggcagggacacaacacaaccaaggagaattaaactagagattaccgagatatagcctggtaacaaaggtttagatgtcttgaagataagtcttagtacaggacattggtg

SEQ ID NO: 17340 - DNA, 472 bp, Arabidopsis thaliana
ctagcatctacactggcttgagtaaggtgagaaacacagcaattttcattcagtcttttgtatagtatactagtaatgtttgatttgttgactattccaatcaggtatacacgcaagccaaccatactgcctgtacagttcacctttggcgcaatgtcagacatctgtataagccacaaagcctctgccagctaatgtctgaagctgtctaagcgtatgacgtcactgagctcaataggatatttctcaagatacgaaacttacacccagatgtgctgaatattgagttgaacttcagtatgtttgttcccgtctgcgtaatatctggtcctcgagcacagatggatattcaccagttatagattcagttgtatacatagccctgtattgaaggtgcgatgtagcgagttcagcatggattctctagagtgcattcaatagtgcatgcaaaaggtctggcgttaatagtgca

SEQ ID NO: 17341 - DNA, 458 bp, Arabidopsis thaliana
cctaacacacagtcaaaaagttttggacgattttaacaatgaatttacaactacacaaaagcatagcatcttacagagagatcagatacctcaccttgtaatccgacgaacataactacactaggtttggcctttttgggagcaaatgcagactttcctggatccaacatcttacagagttcactgaagatcgcctgaaagagaatcataagaacttaatcacaaaaaaaaaaaaacgtaaacctatttaatcgaaattagacatgcagaatctgcggtaaagcctaagacctgctcaatgatacgacgcttgttatggccggctgctagatcctcaaggttgacgattttcttaatattggtctgcatctccttcacaagggggaaagaaacatcggactggagcagacacgagtgatctcgttcaagcaatcattcagagccttttcatcgattat

SEQ ID NO: 17342 - DNA, 568 bp, Arabidopsis thaliana columbia
  unsure (1)..(568): unsure at all n locations
tgtacaaatacttgtacgacttcgctaaaggaagacctgaattgggcaaacaactctacttagcttgggttgcttggtgattactccaaaactctaaatcgtttgttcttgtaaatgttttcctgtaagagttatggtcttgcttgttttttaattgaagggtttgtgtgtggacggctttgttactattcctaatggcgatattcaacatggcttatatcatcaaccggttcacgaggatcgctggtgagctgtttggtatgttgatcgctgttctatttctccaacaaaccataaaggtatcaataccaaaaggctcaacaaagccacctctcacttctgatgataggtcaaaagatcttttatatgtttcaaatgatattggtagggaatggtgagtgaatttaggattccaaaaggtgaagactcaaaacttgaaaagtatcagtttgagtggctntacacaaacggacttcttggccttattttcacagtcggtcttgtctacacgctttgaagagcagaaaagcaaggtcttggccatacggaacaggtaagagtgatttat

SEQ ID NO: 17343 - DNA, 563 bp, Arabidopsis thaliana
tagaggctagaggatcccctaattcgggtatgaaagtatcttcttcaacgtcaacatcgaactccatattgtcccattgctccatgtcctcctccttaaccaccatggccgcataaggaggagaagcaggggaggaaggcaaatgggatttatccggtccttctttgtcttgggagactgtcgatgaggcagaagtagttacatctgagcatttggaggaagaggaacgagttgagccggcaagagtattgcgtagagtggggaatggatggttatgctcagagatgtaagtaattactgaaacatttggatcagtgcggctacgttcgacttgtttcctagcaaaacaacctttcgagctggcacatctatagtaactcctgagaagtaaaaagcaaagacttaattaatccttaagtaaacatcaaagatttgtgtatatatatagtgtaccttggataaggagaacttttgatgggtttttgaccatactttcgcaaacccataggtcactggaccggctgcctcgatccactacgcaaaccactctcttttccttgttg

SEQ ID NO: 17344 - DNA, 606 bp, Arabidopsis thaliana columbia
tgatcctgatcccttcagaggtgaaggaactgctgggtaaatctttcttagcttcttctgctctccaaactggtgtatggcgtcttgaatccctgcaaatgcgaccacaaactcggctgtatccgtttgattcagcagcttcttcatcaccagctccaacactttatacctgccaatcataacaactttctctcataatgctgatcaaagctttcacttcactcaacaaaactaagacatcattaaccacacacactatctggtgtcagctatttgtttctgttcattctcaacaattctcttttatttatgatggggaggaaagcaaacctgagtcgttgtgcctttgagatgactttatgtatgttcccaaacagctcctgcacagaacgcagagcttcttcatgcaaccgagtattgcagagcggggaaaaagggaggtacaagacaccggtggcctgaatttctgcatattcctcatcaataacggcctcttcgatgcgtatctcacgtaaaagctgagagagcacgcgtaaactcgactcagacagagagaaggaggggttttgagctgccagaatgcggacaaggtcaagaatggaggtg

SEQ ID NO: 17345 - DNA, 584 bp, Arabidopsis thaliana columbia
ccctcaggtaagttcgacatcataaagttttgttacttgattgcgccgaggtagcctgtaaatccatggaggactactttatgtgtacgcgtaacggcgttagtgactatagctagatatgcactctctgaacatcacctttcacatttttctttccttgtgattgtctgctttacgaatatatgctgcgtattattttacagaataaagaagagttgtcgacattatttgcaccaatacctgtgaagctaccagaatttagcttcgaggtgaattatcttttcatacccattttcttagactgagaaacaataataacatgctacttttttcagatgtattacatgcgatgagaaaatggttttgtgatctttttcatttattctaaacgtaggtaccaaaacctgccattaaggtggaaacaaattctaattcaaaaaaagctgcagaaggtgtaaagcctgttgacaagccagatgtgcagccgcagctgggcacaaagaaaactgagccagaggtacttattttaacttttaagtttgatttcaatgactgtgagtctctttaattagttgaatctggtg

SEQ ID NO: 17346 - DNA, 548 bp, Arabidopsis thaliana
cgtaacatcttcctgtgtattgtagcataagacagtgtaagtatgatttcactcttccgacgtaacccacataaacaataggataatgcaggagaaaaagaaaaattgttcaacgagatttgacatacgaaatagttatatgtatatccttctgatccattggaatagtcagccacagtgatcatgggtgcattaacacaacatccctgtaacaaaaccaaacacattagatctgcattgaatcttttcatgtgaaagtactaatcttggttattgttctgcatggattaatgaattgaggtgacgcaaaatccataccatgcactccatctctccaacagagaacaaaccatcctttgtgacctctgcacaaaaaacattaagaccaaagatcgttatgactgatcatcacctccatatgattttggttatgaaaggaagcacatagagctttaccaccgcgtttcatcccaaatggtctagcaaagctgattcgatgtctcgtgaaccacggatcatgcaaggtgttgtgcccaaactagaaggtg

SEQ ID NO: 17347 - DNA, 850 bp, Arabidopsis thaliana
tcgactctagaccttgtgttctaccgtggtcgagctgctaaaggagtcaaaaccgattggatgatgcatgaatttcgtctcccttctctctctgactctcatcactcatcatatcccaattacaataacaagaagcaacaccttaacaataacaacaacagcaaggagcttccttcaaacgtaagttatcggatttgccctaacttgctttacccgcaacaaaggttaggttaccaaacaaattagaatcgatctttttcattttgtaggatgcttgggcgatatgtagaatatttaagaagacaaatgcagtatcctcacaaagatcaatcccacaatcttgggtttatccaacgattcctgacaacaatcaacagtcacacaacaacaccgcaactctcttagcttcatcagacgttctcagccacatatcaacaagacaaaactttattccttctccagtcaacgaacccgcaagctgcacagaatcagctgcttcttacttcgcgtctcatatggtcggagtcccgtacaacacagccagaaacaacggaacaggggatgctctgtttctgagaaacaatgaaacaggggatgctctgtttttgagcaacaatgagtataactactttaacaacttgaccggagcgttgactcgcaaatctatatggacaagcaaatctttcctttttatagtagatcttcttattaattaagagagagtgaaagaaaaggaaaaaactaactatttcctttttatcaatccttaacggctaaattacacaaaatctatgcaaagatatcgaaatcaaatcttcacaagatttttgttttactgattagaagagtg

SEQ ID NO: 17348 - DNA, 618 bp, Arabidopsis thaliana
catctagtgaataacctatggtttttctatactttttcaattcaattataagcaaatttacttgttcagtatctatttcatcattcactatcactggataggtggaattgattccaagaaaaacataccttagcccttttggaagcggtttcaggtcaaccttgggtgccttgagctcagaccaatcgtcaggtggtgattcagcgtcagagatggaatcgtgatcgagtgaagcgatcgagtgatgtagctcgccttgcgatcgagtgacgtgatcgagtgggtcattcgtgcggtcgagtggtctcaactcctcaaagtcttctgagtcatcgacttccctgctcatatccatcagcttctggtatcccaaagtttccacatgtaagtctttttctctactgtctttggtcagggcgctctgtaagtggtcgtcctctgctagttcttctaaaagctcgtcagctagcaattatgtctcttctgtccagaaaactttaccctctattgtgggctttttcatcatgttggtgatgtcgaaagtcatccgaagatctttccgaggttgaggtcgatctttcctttcttgacatcgatgatggctcctgctgtagataa

SEQ ID NO: 17349 - DNA, 821 bp, Arabidopsis thaliana
ttttgacttatcaaccttttcaactttcttacttggtaggtgagtgctggattagaatgtggtattggtatggatgactacgatgattggatagaaggagacatcatcgaggcctttaacgcagttcaaaagaggcgaacgctagaagaagcatcagcttcaatgtctgctgcgattgaagaggctggagtttaattgtgatccaggttttgcttctaaagtcatcaaagaaactcaagcaaacaacaaaatcagactctcagggtaagatttttggtcacacaacagttggttggtacattgtttgtaatggtctcattttgtacatggcaaatgttcctacatttggttgattgatgtaggaagaaaaaaatgaaccaaatataacaatattatcttgaaaaaagtcctttataatgtctataaattcattactttatgtgttgtatactatttggtttcgctcaaagccttaaaaatcgattatatgtttcattgatatgtcatgtggaagctcaacaacttacccgttaaaagattgtgatttgtgagcatttgttaaattcacccaaaattcatacaaaaactcagtaaaactcaaatcattcaaaatatttagttaaatatgcctttttttttttttttaatatgccttcttaattttgacgaaaatacgcttgtaaattaaagatgagaggatggatagagattgagatgagaaaggggtaaaagtgtaagaacatagcttgagtggcaaattaacagacaacaagatgggcgcgataaagacagcaatgacttcgacttgtgtgtgcgtgcgt

SEQ ID NO: 17350 - DNA, 933 bp, Arabidopsis thaliana
ttctttaccccacgagttgggctgtgtacatctcaaaatctgaagcatgcagcaatctcgacatgggtaacctctctgggacatatggtatgacaagaattccttcagtcaacaatactgcaccaagacacagcttttcttcattttcaacagcaggttcaccttccttagtttttggaaacaatcgatcttcgagatcaccaagagtatatactccttccctcgcccaaaagtatggatcttttacatgatctttgccctttcgtcgaagttccctattaacaggttcacattgaattcatgtaagaataaaagacaatgtagagactattattacacgttttatagtaaacactttaaaaacgattgtaaatcatgtttaaccctttaaaaagcttttaaaatcccttgtaaatcattctatgtcacttacttatgctttgaaaacgattgtaaatcatgttttaccctcttgtaaggttttaaaatcccttgtaaatcattctagaccacttacagaccagttgatattcaagacccacctaatgttgatcaaccaaaaaacattggtgctggtgatgccccaagaaatcatcgccaaagacaagggatagtgccaccacaagttcagaacaacaactttgagatcaagagtggtctcatctccatgatccaaggaaacaagtttcatggtctacttatggaagaccccctagaccatcttgacagcattgataggctttgtggccttaccaagattaatggtgtcactgaagatatgtttaagctcagactatttcccttctctttgggagacaaggcacaccactgggagaagactctacccccagactccatcacctcatgggacgattgtaagaagcttttcttgccaagtttttctctaacgctcgcacgctagattgaggacga

SEQ ID NO: 17351 - DNA, 457 bp, Arabidopsis thaliana
  unsure (1)..(457): unsure at all n locations
tcagtgtgctctaaagcgtggagcgaaatcggcactggtctttctgataaatgcgttctcagctacggcgcattcccggatattgccaacgactttggcgagaaaagtctgctgatgcctggcggcgcggtgattaacggcgacttcaacaatgtgctgccagtggatttggttgatccgcagcaggtgcaggagtttgtcgaccacgcctggtatcgatatcccaacgatcaggtcgggcgtcatccgttcgatggcatcaccgacccgtggtacaaccccggcgatgtcaaaggcagcgataccaacattcagcagctgaatgaacaggaacgctactcgtggatcaaagcgccacgctggccggntaaccgantggaagtggggccgctgcgcgcacgttaatcgcttatcacaaaggcgatgctgcgaccgttgagtcggtcgatcgcatgat

SEQ ID NO: 17352 - DNA, 677 bp, Arabidopsis thaliana
gctaatccattggtgaaggatgatacttcgctggaaaccatagttcgaaggttccaggattcaatgtcagaggcaaagactcataagttctgggagactcaacctgttgggcagtttaaggatattggggatacgagtttgcctgaaggtccgattgagcctgcaactccattatctgaggttaagcaagagccgtacaaccttccttctgtttacgagtggacgacatgtgatatgaactctgatgatatgtgttcagaggtatacaaccttctcaagaacaactatgttgaggatgatgagaatatgttcaggttcaattactccaaggagtttctaaggtgggcactacgtccaccgggttattaccagagctggcatattggagttcgagccaagacttcgaagaaactcgttgctttcatcagcggcgtgccagcaagaatcagggtgcgtgatgaggttgttaaaatggcagagatcaatttcttgtgtgttccaagaagctcaggtctaagaggctcgctcctgtcatgatcaaggaggtgactagaagggttcacttggagaacatatggcaagcagcttatactgcaggagttatccttcctacaccaatcaccacctgtcaatactggcacaggtcattgaacccgaagaagctaattgatgttggg

SEQ ID NO: 17353 - DNA, 785 bp, Arabidopsis thaliana columbia
ccggatcatccctaaaactgcctaactcgacatacgaccttcctccagtaatgacctagctcgtttatcgcgatatgaactacgtgtggcttgatccctttctaagggtacgtaggcagccttttacaaggttcagctatcaagatcgttcttccggcctcaagctcgtctttcatctactatcaagatcgttcttccggccttaagctcgtctttcatctacaatcggctcgttcttccggcctcaagctcgtctttcatctacaatcggctcgttcttccggcctcaagctcgtctttcatctacaatcggctcgttcttccggcctcaagctcgtctttcatctacaatcggctcgttcttccggcctcaagctcgtctttcatctacaatcggctcgttcttccggcctcaagctcgtctttcatctacaatcggctcgttcttactctattcgcctaagtcgcgggctcgtcattaatagaaagattcttcttccttccctagagatcccattttcgtacttgtttaattcgtgcattaacacttaatataaaataatactttgcaaaaataaaaacaaatttgaaaataggggcttctatatccaaaatcatgtgcctctaatgcctgcttctaactaattcatttgttgtctttattaagcattttcaaaaaaaagttgggcttctattttttttgtggctccttacatatgtgtcataagaaatgtgaaaggatagatctgaatacaacaaccaatcactccatgtcttcttgtgga

SEQ ID NO: 17354 - DNA, 590 bp, Arabidopsis thaliana
ctaaactctaatacttagactctacaccataaatcccaagacctagaatctaacccctaaaccctcaaccctaaaccctaaaccttaaataccaaatcctaaaccctaaaccctaaaccataaaccctaaaccctaaactcttaaccctaaacccttaaacctaaatgataagtgtgtattttgcatgttttgagcatccatttgtcatcactttagcatcatatcatcactgttttataccatttctcatcatttgtcatcactttacatgtttaggatagatctgcatgcatgttgcatatttgtgttgatttcaagtgatttggagctgttgacgagctatctggaagagcaacctgatcatgtcaaaccactcgaccccgaggtcgagtagaagacatcaccacttcacctcaccactcgtccacgaggtcgagtgtcctcatctccatcacctgaccatcactcgatcacgatcactcgaccccgaggtcgagtgtcttcacctccattatcaaaccaccactcgatctcaccactctgccttgaagtcgagtatcaccatcaccaccactcgactcgtactcga

SEQ ID NO: 17355 - DNA, 115 bp, Arabidopsis thaliana columbia
aataccgcctacgtctacgcccagcagtttcagcttggcgctaaggtcagcaccttcaaaggcgttttcgctaccgagaatatggtcaacggcgacctgcgccattttgtagcca

SEQ ID NO: 17356 - DNA, 1097 bp, Arabidopsis thaliana
ctggtctactttacatcatgcttcatagttgcggtggatcaatcacgtggcaattttatactcagtacaagcgacggtattataaatttagtgaagtcgacttattcgcagataagctaatgtttcatatcaccgaggttggtccacgtcgccaagggacatacaaaagttcctgggagtttgaggattacggtgagtgttggtcggaccatcagaacctcaatgagtatgagggacagaggtgtaacacatgtatttacttttacctctcccaagaagtagcacttatttcataagtaaatttcagttctgttcttcacatttgcggacaaacttaagaatctatgcttttatttatatatgaagttattatatgtgaagttacctatcggattttttcatatgtgaagatattaaattaagtggtacttgtccactatttggcacaattatataaacaagtcctcgaccgttacctcgtctccaacattttatggaattgattttataactgcatccattctccccagtaagctttatcgctctcgaatatcaataatttatagaaacttacatttcattactcactttgtacaccgttttgctcaatacaaacattagagattcttcccaccccgccgatccaaatcttcctactcagtcatacatccatccacattccggtgccatcattgttgtaccaaatcgtggacacactgcaaaacaggttttagtttgcaactaaacaaacaaatatgtttcctttacttattccaaaaatttatcattcctcttacttatcatcgccccttttagcagaaaatgaaattccaggttatatattccggaaccaataacaactgaaatatttttacaaaaacatagcaactagttaaagatcatacatattttatattaacaactgaaatttgattacacaatttctcaaattggattagaacaacttgtcttgttatgatccaatcctttgtagcgtcagcacctgttctgctgcgtcattcctgtcttaggtttctacgtttaacatgtgaaccaacatgttacattagtttggttagtttttcaaaagcttagac

SEQ ID NO: 17357 - DNA, 570 bp, Arabidopsis thaliana
gctaattttcctcaggtataattacctcctcctctattatcgatcgatcatgttttggtttcgttggtcttaaatcttttatgtagagaaatatgatttgatacttgctatttctatccgttacgtacgtatattatggacatatttatagtgatatataataatagatgagctgatcaactttgatttgtaatctcaccatttgcatcaagttcattgttccggatttagttcaacgttaaaagtctgaggattcatttgtcttcaaatagttcaaacctcaagagatcacagacattatgaaggatttcgatgagcctggtcacctcgctcccacgggtatgttcctcgcagggctaaagtatatggtcatccaaggcgagcctaatgctgtcatccgtggcaagaaggtatgtttaggattaacgctcgattggtttgtgtttgcattctacaaaaataatctaagaaatcctaaaatatattgttttatttttttaaatatgtgaatttactttgcgcatgttaaaattacatgtatacattgcatttgaacaatcgacgtttaag

SEQ ID NO: 17358 - DNA, 493 bp, Arabidopsis thaliana
cctgaaatccttcttgttcgttattattaggaggaaattagcatagggaagaaaagacacgtggcgtgcatgtagtgaatgattaagctataacaaaggcgagacgtcagtagcaataataataaaaaatgagcggctgagaatgtgtctaatgaatccaacggcagatacttcatcctacaacattcttcttcgctccctatttatcgagacgaccaagtccccctgggagttgcattgcacacacatacatacgtagagagatccaaaatacccaacctcgcagagtaaaagcaaaaagaagaagaaatcagagagaatgtcgtggcaagcatacgttgatgagcatttgatgtgtgatgtcggcgacggccaaggtcaccaccttacctgcgccgctatcatcggccatgatggtagcgtttgggctcagagcgctaattttcgtcaggtataattacctcgtcctctattatcgatcgatcatgttttg

SEQ ID NO: 17359 - DNA, 527 bp, Arabidopsis thaliana columbia
agaattgaagttggagaaggagtagcctaacaatcaaaaatccaaaatttacaaaatgtaacctcacacaaatatctaacagaagtttcaacctttcctaattcattagagattgctattcgaattctacaatcaccaaagcaaataatcttcacttcaacatacacattttcactaactagcacaagctacaaaaaaaacacttgacaaaactatggaattaaacaaaaagattcaaacttgttttggtaacgaaaacgataactaacccgaggttgcaaaaaatgaggaactcctttcatatgaccggaaccaagttgaggagattgttgattctgaggatgtgcagctctcatgaactgattcattggatccaaattcgacacgaattggccatggtggtatccgtaaactggccctcgaggagtataccacctggactaggactaccaactggatcagcgacggaattggaattctgtctaacgggtcgggtcggaaccctcgacccgaagaaccaacgggta

SEQ ID NO: 17360 - DNA, 1083 bp, Arabidopsis thaliana
tacaatttacaagtttacaacaagaaagcttcaaaataaagcatttctgcactttaaaagatcgctaaatctgatagaggccatttggttatggaaagatatataaacattacaacataaattaacaaaataaggatatctataagaaaatccatgaaactacactatgttttggattgcgtatatattttagactaaataaaaaatagcaactagtaatatttgcgcgataaataatgtggaatgcaatacatttgaatttcttaatcatattttggttacaaaaatctagtacatatataaacacacgtaatcaaggtatataataaaaaatctatgagtaatcataccatggacaagcttacacagtacttggttccacgttgttggcgaaaacgattgtgtgctttgacctttgctgtcattcaccatcagccgtcctttcatacttcttccggcaagtctcctctcatttgattaattcatagagaagccgtccaacaaatacgtcttccgacgtataaatctctcttcttcctctcaaatcccaaaaatttcgattatttttcaccgaaatgacccgtgatgacaaattcccgatcgtatactctctgttattgatcgtcttgctcttcgtttctcctatctacggcgacggtgatgctgatgctctattgaagttcaagtcatctctcgtgaacgccagctcgctcggtggatgggactctggtgagcctccttgctccggtgataaaggaagtgactcgaaatggaaaggagtgatgtgttcaaacggctccgttttcgctctccgtctagagaacatgagcctctccggtgagcttgatgttcaagcgctcgggtccatccgcggtctcaagagtatcagctttatgcgtaaccatttcgagggaaagatccctcgtggaatcgacgggcttgtttcgttggcgcatctttaccttgcgcataaccagtttaccggtgagatagacggtgatttgttctcgggatgaagggcttctggaggttcatcttgaaggaaaccggttttcaggtgagattcaggagtcgttagggaaa

SEQ ID NO: 17361 - DNA, 815 bp, Arabidopsis thaliana
cttcttcagataaggagttgtacacagccaacattccctgatgttcacaattcattagaaacaggttttaaatttttatatttggctaaaagggaattagtctgttctctacagatatcttcctactaatttgggtagagatagtccttgaaattgttcctgtgatgcattctactgttgttcttgtaagccaagtcttcactcatcccattttcggtgtatcttctaaacagagactccacgattccgtgaacagcaccaagcaaaattccttttaacaaaaaagaagaagatatgtaagtatgggattgagtgatataaagacaggtctaaaaggggatcaaactcacctctttctccaaagatgtcactcctgtactcctgttcaagagtagtagcaaaagtaaacggagaaccaagtgctactgaccatcccaatgcaacatcggcggctctaccgtcaacatcctgccaacagaatagcagaaatagtggtgaaaaaatgaacacatgaggtataagagcttttcagtaaagatagcttttgcagtagagataaagagatagaaaacctggtggactgcaaaactggcgttgattccagcaccgttaatttcttttccttggacgtaaagcctcctcacagaaggacccattcccttagggcatacagcgaccacactgatgttctttgggaaatcgagtcccgaggactgtaaatgccctagtagaaacccgtgtgataaccaagaatgctgtttggcttcatgtgagagaatattttctcatagttatcagctgcaaaaacaggatag

SEQ ID NO: 17362 - DNA, 419 bp, Arabidopsis thaliana columbia
agcatcgtcctggacatgtttgtaaccaaaagtaatatcaatccagtgatgtattagagatgaaacatgggggctttccagagcatctcgatgcaatctaatgaactcatcggggctgcttgcccatggaggtacagccaaatcagacatactaggatgaagggagcaaaagatgcggggatcacagtaaaactcagggatgcactcgtcaggggtccaatcataaagcctttgcatgtcagagggatattcattaggctcatacaccgaccgaactgcctttcgcaggacactcagtggcagtcttcttgctttgtagctgcaaacagccagctcagaaagacattcatctgatacatgatgcggaaattcaaatgttgagtaggtaaaatctaattgtccatctccttttgccaatc

SEQ ID NO: 17363 - DNA, 742 bp, Arabidopsis thaliana
agtatccccgtcaacttaattcttcgtttatgtattcgtcttgcgaagaaactacttacttgctaagcaattttagtctctataacgcgcaaacatctctccagctgttttcccaaattgtatccccatctctttcattttctctaatgtattcgtctctttttaatcgttttagaatactctttttctcttttaaaattttaaatatctttttcacatttagcttttggttttgctttaatgtatacgaagaacattctgattgacaataggtggaaaggcacatatcttatatatatctcacttaagatcctattcaatttccgatgtgggacattgtccctaatacgccctttcgagatgatgactcttctagccattgatctcgatatgtttgggcatggatcggcgggacaaatattgggccggtccgatgtggatcgggttgagtatgtacggatcgggctctgataccatattagagtgtgggcttccaacctaaaaccaattggcaataggtgaagagactcatatcttatacatatcacttaagatcctattcaacttccgatgtgggacattgtccctaatagaatccacccaaaatatacaattttatgtatataaaatagatgatcatcaactaatataatctatgttaatacaaataaaatccatcttgtcatccaaagaaaagttaactttgctatttagattagtatgagtatacatatatagattt

SEQ ID NO: 17364 - DNA, 583 bp, Arabidopsis thaliana
atactaacccgatctaaaccgatccggttattatttctgaccaagacatttgtacttgtgagattcactaattccgatattgcgtcgtgttcaaaggatactaaacaagcatcgagaaactgaaattactaaaagtttgcaacaacgacgttcacgatcacgaaattgcaacaacaaccttcaattctttaattttttcgaagttaacaccaaatcctgaaaattaacatcctaataaacgtagaaacacaaaaaacaacaatcaaaaaccctagccgccgaatccgtagagagttcttccttgtctcttaagagcatacacaacatccatagcagtcaccgtcttcctccgagcgtgctcagtgtaagtaacggcgtcacggataacattctccaaaaagatcttgagaacgccacgtgtctcttcgtagatcagaccactaatacgtttaacaccacctctacgagccaatctccgaatcgccggtttagtgattccgtggatgttgtctctcagaaccttcctatgacgttgtggctcagctttgcccaaacctttgcctccctgtccacgacctgacat

SEQ ID NO: 17365 - DNA, 557 bp, Arabidopsis thaliana columbia
ctaaataaaaaaatgaaacttgggtattctaaactagaaacgaactgatccaataaaagcccacttaaaagcccaataacacaacaatatgagaaaacacttgcgcttgtacaaaaacactcacctctttgggtttgctcccaaatccgaagatgagagtgacagagtaacagagagtgagtaagtgtttcgtcatcatgtagtttccgaggatgctttctctgtgttacagtgaaaacaaagtgagataataatgcactatatatagatgacgaagtagtgagttcacaaattcccaaaactaataaaattttggatttggttttgataaaagcatttataaccttgcgtggtgttggcagagagcatgtgatcgatgttatcgatacgtcgttggacagatttaagaacaagattcagagatgaaactctttgtttgacgctggaaattctcgatgcgtgttgtacaatgaatggcaatggagcgttttccagtaattgatctagctctgtgtttccacacattcaaattttgttgtgtgaaaaacaaaacacta

SEQ ID NO: 17366 - DNA, 539 bp, Arabidopsis thaliana columbia
tatcacatgattgctctccatccacatccaggtcagcaaaaaacttactaaaccataagagggcctttaatgaagcattttgaatggcatcattttccttctcatagaattttctcggtgaacattctaaaactaaatcctgagactttgtaaaaatcttcacttcacatctaaacccatgccctagtcctggtgtatcttctttttgcctactcaaattctcattggcatcatcaactcctgagaccttcaacttcttgtgagatctgaatatgtcggacaacgatttcacaggtgcagtagatgaagaaaggatgggttctgctagtcggtgctggtggcagaacaggccgagaatctccctggggagtggacctctccaattagattttgtagtgaatgcaaaaggcaactgtgcagcaattacagcttgtcgggaaattttgtagattccattgggtgacataccgcaacatattctgcagcagccacaaagccaatgtcatgcatcagtgcatgataagaataagatatgcagt

SEQ ID NO: 17367 - DNA, 1186 bp, Arabidopsis thaliana
gcaggtctagaggcagaggatcaattttgttgtaggagctaagtctataccttaaaaacacctctcaaaatgaacccatatcaaatttgactgtagtttagcaatgctagcgtcgttgctaaaagcctaatcaaagcttgagagaaattaccgctgcctcatatgaatgatctcataagatggtgaactagatttgattgctttcaacaaccatttgtttagtgtctatcctaagagatgaggagacaaagaaatcaagcaaatggataattctcattagattttcttagcacaaagcttgcaaaagataattaactactacatcacattggctaataacaacgaaaaacgagaaacaaaaactaactcctgaatttacttttgactaattcaaaccatttaacacggatctcagaaacaagaagaaatccccaaacttgcataaaccctaatcccccaaatcggattaacctccgaaaccgtagagagtacgaccttgcctcttcaaagcgtagacaacatccatggcggtcaccgtcttcctcctggcgtgctcagtgtaggtaacggcgtcacggataacattctcgaggaagatcttgaggacacctctggtctcttcgtagatgagaccactgatacgcttgacaccacctctacgagcaagacgacgaatagcaggcttggtgattccttgaatgttatccctcagaaccttcctgtgcctcttcgctcctccctttcccaatccttttcctccctttcctcttcctgacatctctttacttgatacacaaagatctgtgaaaaataacagaaggaaactattcagaaaccctagatttccagatcaatcaattgaattgagaatcgaaacatttaaactcttcgaaaatgtgacaaatcgagaaaaactttgaagaaattaagctaacattaaattgacatctacgcctaagcaaggcagaaatatatgaattacctgtagatttatggaatgaaagttctcagaaatgtgattgtagaaagtatgttacttcgagtacaaagtggtgggataacttgtatcttctttctgttgtattatcgtagcttgtatcaacttccacttcttgaggctttgaggccttaatgaatgaaagttgtgttttgacaagcatcctcaacaatctcaaaacagtggtgg

SEQ ID NO: 17368 - DNA, 593 bp, Arabidopsis thaliana
ccaagtatgggtctattctctatcttcgcgtcttcagtttccctgtagccctcgtctcctcagcatctattgcttatgagatcttcagggaacacgacgtgaacatctcgtctcgtggtttccctcctaccgatgattccctttttgctggatctttcagcttcacctctgctccctatggagattactggaagttcatgaagaagctcctggtcacgaacttgcttggaccccaggcactcgagcggtcacgaggattccgtgcagatgagctagatctgttttacgagaacctgttggataaagcgatgaagaaggagagcgtggatatctgtgtggaggcgttgaagctcagtaacaacagcatctgcaagatgatcatggggaggagttgtttagaggaaaagggtgaggcagagagagttagggctttggctacccagttagatggcttgacgaagaagatcttattggcgaacatgttgcgtgcggggtttaaaaagcttgttgtctcactgtttagaaaggacatgatggatgttccagcagatttgatgagctgctcgaaagatcttgtggacatgaagataact

SEQ ID NO: 17369 - DNA, 557 bp, Arabidopsis thaliana columbia
gaggatcactatcccctgcaccctttcagaatgagcattcgagtgaacaggtgggcacttcattacattatctatgaaaacaattgcataaaattctgcgtcaaaattgttatatggttatccttctcggatttttgttacagccatggaacacagcacttgcatctaatgtacagaggtcaatgagtgcaccgtcattgcaacctcttcaaggagtcccttctggtggcctgcagtcttctgaagttaaaccttcgggaagatcagaattacctgcggtattcaatttattttagccatttggtctctcccatcactatatcttaccatgtgtgggattgtgatgacatgctaacctgtatgcaggatttattcgctgtaaactacccatcataccatgcaccagtgcctggatggcaagctggtccacctcatgctatgcactatggcatgcagcagtataataacccgtggtatggttctctgatagattctgaaccttaatgaatttgagcacaattacacacagccggttacttcttgtgaatgattactat

SEQ ID NO: 17370 - DNA, 461 bp, Arabidopsis thaliana
agtgcatatgatcatatcatcttgaagtctggtcgtatcaaggacatgaatagaacacgatgattatactactcacctgaaatttttaattttctggaaaaacgacattgcctctaattccccagtttcaataatgcttctgaagatggtgatgcaagccttctcgtggtaaatcctttgctctcctaatggattcttttgacgatgagggttttgtttttgaatacaagcgaaaagctttggtggatgttcgttcaagggaatctagttctgcagatgaatcaatcatttctctggttctattaaagataagatcaatggttttctgtgggaaacgaccatagacggtgactccactatcaattgcttgactagttttggtcattactgcttccatgttcttcaagacctcatcctcgagtgggcgctggcctgaccggatttgagaggacagatgaaga

SEQ ID NO: 17371 - DNA, 1232 bp, Arabidopsis thaliana
agtgagattccgagcttctcaagcggccacggaatatgtttgccaacaaaaaattctttgtcaagccatctaaatcagtaaccaatccccttagtctctcagcctcaccactctcctctgaaaaactcctccccatgctcatcttgcagatatgctgttgatactgagcttcgttgcttccttaccaatctcaacactctccttcttcacagctttatcaaaaagacttctgtaaagccgctctagctcatctgcacggatgcctcgtgacctctcgagtgcatgtggtcctaaaagctttgtaaccaagagcttcttcataaacctaaaatgatctccataaggggccctgacaaagacggaagatccaagcaagagggactcgtcgattggagggttctcgcgagaggagatgctcaggtcatgggccttgaagatctcatatgccactgaggccgaggagacgaggactacagggaagttgaagatacggagatataggagaggtccgtacttggatgagagtttttgtaaagacttgtaagctgaagaaaagagtacatggtggagatggccaatgatcggaagacgccggagggctcggaagcacttgtgagtccttttgtttcttgaagaagagagagtaacaaaagagtgacaagaagcagaggagtatgatataagagtttgtagaagtgatatctttttattaaaacagagtgagaacttatatacagaggagatgctagctagggtattacaatagacataaatcagaatatgtactatacataaataagtccatgattgtagtaatcgaatgatatgagaaatcaaaggtatgattggaataatcaaagatatgattctctccttaatacgctccctcaagatggagggactcttgtcactccaatcttggaacatgcagcttgaaaactggtacgtggtagtggtttcgtcaatgcgtctgctaactgatcatgggttgagacatgagagacacgtagtgcaccagcttgtataagatttcgaataaaataatcaaagatatgattctctccttaatatatgaaaaggaaccagttttggaactcaacggtcatcatcgttgttgcaattgttgctcaaagccggaaaggtagataaaacatagtgtaaataatctctgttaccacgtattctagaattgcatcacatgtggtaatcactaattcttagtcaaaggagtg

SEQ ID NO: 17372 - DNA, 695 bp, Arabidopsis thaliana
gaaacgatatagtaaacacacaataatgtattgatgttattgcaaaaacaaaagttagttagttccaatttttaattattttcccccatttaaataattaaatgccaacgaaaaatatagcatttattaatgtgcttttttgtctttagatcgatctctaagcgatattgttgtcttcaaatactaaacaccattaggcttaatgtaagttttgttgccttagattttctttttttttatcagtttagtagtttttacttattcgtatttgttaagaattgtcacatccatacttccagatgattttgatcttcattttgttttcgtgttttgtggacttaatttgggggtttatgatgagtatgtgtaggtatctttttttttttttttttttttgtcaaaacacaactttcattcattaaggcctcaagagaggaaagttgatacaagctacgataatacaacagaaagaaagatacaagttccatgagttttccaaagggatgttcacttttaaaaagtttgcaatggttgaaaaatctgttgaaactatagcggattcgaccatgaatacgagcttcgcgaaatcctcgaccaacgggtggtcatagacggctcgagcaaacaatgcatacaagcttttagaacaaactccaaagaggatgctgttggataaaaaagattgagaatactac

SEQ ID NO: 17373 - DNA, 1061 bp, Arabidopsis thaliana
tctccgatgcagattggccggtgactctgctgactatgtctcgaccaatgcgtatgtcatctatttaggggaaaccccatctcgtgtcctctaagaagcagcgtggtgtctcgcgttcatctacggagtcggagtatcgagcggtggccaacgctgcctctgaaatccgatggctttgctctctcctcacagaattacacattcgattaccacacggtccaaccattttttgtgacaacattggagccacctacatatgtgccaatccagtctttcactcacgcatgaaacacatagctctggattatcactttgttcgcggcatgattcaatcacgagctctccgagtctcacacgtttccacaaatgatcaactcgctgatgcactcaccaagtctctctctcgtccacatttcctttcagcccgttccaagattggagttcgtcaactccctccatcttgagggagcgtatagagtatattacacatgaagtcttaaaggacataattgtaattagttaatccctaatcatagggctgtgccttagtatatatatgtacattcctactctaataatattcaatacattaagcatttacatggtatcagagcttcgatatcctaaaacctacttttcttttctttttcttcttttcaaaacctagccgccaatcatgtctcaagtcaacggcctccccgccactagagacgaagctatcgttctcacccctcagacactctttaacgtcaatacgtcgaatgtcactaagctcacatcgaccaactatttgatgtggagtattcagatccatgccttgcttgatggttatgatctagcaggttatcttgataactctgttgtcatcccaccagaaacaaccaccatcaacagtgttgtctctgccaatccgtcgtttactctctggaaacgacaagacaagttgatcttcagtgctttgatcggagccatctctcctgccgtgcaatctttggtgtcacgagccactaactcgtctcagatctggtccactctcaacaacacctatgccaagccaagtt

SEQ ID NO: 17374 - DNA, 1195 bp, Arabidopsis thaliana
cgacgtttcttgcaagagagactgaacttgtattgacagttgtcattcaactaatggtatatttacttaaaactattaaaataaaaatatttttttcttttcttttgagatagtctccatcgtttttgccgatggagatgataaacaaagtatggattcattataaaagactactttgtttcatttacctctgcatttttgagcaacaatggcagcaatgatcactgttgactttcaaaatagcttcatcttcatcctcttttgtctcttctctctcatttgttactctctcttcttcaggaaaccaaaagattcacgagctggtcgtgatcttcctccgagccctccttcttttccggtaattggtcatctttattagggacaatgtcccacatcgaaagttgagtaggatcttaagtgatatatataagatatgggtctctccacctattgccaattggttttaggttggaagcccacagtctaatatggtatcagagcccgatccgcacatactcaatccgatccacatcggtccggcccaatacttggcccgccgatccatgcccaaacatatcgagatcaatggctagaagagccatcatctcgagggggcgtattagggacaatgtcccacatcgaaagttgagtaggatcttaagtgatatatataagatatgggtctctccacctattgccaattggttttaggttggaagcccacagtctaatatggtatcagagtccgatccgcacatactcaacccgatccacatcggtccggcctaatacttggtatatataagatatgggcctctccacctaaacgtatgagtttcaaggagaagcaatcgcatctgacaaaaggcagaggatgctgatatgaatacaaacgtgtcacaagagaagaagagccaatccctgattttgtagagtggtgggatgcaaagatcctcaccgatgacaccattaatgagttgtcgtgtgatccaaacatcctcatcatggacaccattactgagaaccatctgaatatgaaagtttttaattgtcatattgagcatccatttcccatagagccacctgcagaggctgcgtctccacctccccaacctcttaaaatgacaaaggaggaacggaagaaactgcgaactctaaggcgtgtggcaaaagaaatggagaaacgggagatgat

SEQ ID NO: 17375 - DNA, 1257 bp, Arabidopsis thaliana
  unsure (1)..(1257): unsure at all n locations
aaccttgtattccctacaaccgattcgatttcttctcgcaatctctcaagaatggtagggttattaatgagctccgccattgtccactgtgttgctagcgccgaggtgtcagtgcctgcaacgagaagttcctgtagtagcaaactgttattagagtattttccatatctaaagagtatcggaggttttcgggcctttgtattactaacacgcttaatacaaaggtttacgtcttaaggtttattccacgatttcacaacacatatgtttcttagtaagggcgtttaccacgaacaaggacttgatatggtttcttgtgattttatactctgcattctcatctccatagcttccaacaacaaatccatcatgtcattagctttataatgatcctcctccattttctcttcgtgttcaacaagaaacttttccagcagctcgtcgaacttgggggaaacactttttatatccttctggaacagtgagatcccaagctttttaagaggtttgtgaaagatcatacccaagaagattttcggtgacaaggccagcgactcgatcaccaagcctctgactctctcggcctcaccgttcttttcagaacaactcctccccatgatcatcaactcctccccatgatcatcttgcagatgatattgttattgagcttcgctgcttcctcaccgatctcaacactctccttcttcatcgccttgtcaagcagatttctgtaaaaccgatctagctcatctgcacggatttttcgtgaacgatcgagtgcctgcggtccaagaagctttgtggctatgagcttcctcataaatttaaagtaatctccatagggagcaaagaagaagctggaaaatccgaaccagagagactcctccactggagggtgaccgcgagaggagacgttcacatcttgggccctgaagatctcgtaagccactgaggccgaggaggtgaggactatgggaacgtggaagatgcggagaaggagaagaggtccatacttggaggagattttttgaaaagacttgtgaactaaaacagagagaagaaggtgaagatgaccaattaccggaaaagaaggagggctcggaggaagatcacgaccagctcgtgagccctttgctttcctgaagaagagagagtaacaaaggagagagaagagacaaaagaggatgaatgcgacgctgttttgaaagtcaacggtgatcattgctgccgatgttgntcatagtgaagaagagcagt

SEQ ID NO: 17376 - DNA, 584 bp, Arabidopsis thaliana
gaaagttgaaaatggatgcgataacgttgcttcaatggatgagcttaatcgcactcgtagttgcgttagtgttgagtctagggcttcatacttggagaaatgcaactctatggagccttcatctgtggaaatgggaagtggtcttgctggttctcatctgtgggaggctggtttcgggatgcggaatccgaatcatcgtcttctttatcgaaagaaacttccttttgaggaaacgggttctttacttcgtatacggtgtgaagactgctgttcagaactgtctctggctcggcctcgtgcttctcgcttggcatttcttgtttgacaagaaagtagaaaaggaaacacaaagcgatgttcttcttcttatgtctaaaatattagtgtgttttttgttgagcacggtcttatggctgatcaagacactggtggtgaaagttctagcctcttcgttccacgttagtacctactttgatcggattcaagaagctctgtttcatcattacttgatcgagacgttatctggacctcgaatgcttgagttaagcaggattgaggaagaggaagatcggacgcaagatgag

SEQ ID NO: 17377 - DNA, 523 bp, Arabidopsis thaliana
atcccctattaaatttaaatgtacaactgtccacacttgctttgaattctttaggtgtgttgaactttttagcaacttcatgtgttgggaggggataagggggaagtttctgtcaaacaaatcaagagagagcaataaagatcatgttcctcaaaagacaatatattagtggtaaatattctgtaacatatatttacctctgatggttgtgcagcccataaaaaaaccctgtttctaagctgagggagcccataagatccagcagccatcatgcccaaccgcgtctggtaattcatcgcaacaaagctagctacagcatgacgtgccaggaaaccctttgaaaacctaagaaggtctacaacattttccatcagcacatagtttggcttgaggaagtcaatgatgtctaaaaacaccaaaagttgctggttcttctgatcttcaagcggtgcttcattgtttctataccggttataccactgaatcccttggcaagggggccaccgcacactgtgtagacagt

SEQ ID NO: 17378 - DNA, 616 bp, Arabidopsis thaliana
gttaaacgatttaatattaaaatttctaacttaattaagtataaatgattaataatatatttttatctgttaataactcactctattcattttcattgagttttgaggtaaacaaattcgaactccataacaccaacttagtattaccagtagtactaatatgaccacaaattcgacagaaacagacatgatattacttgttataaccagtattacaaaaaaacaatagaaacacacatagtattacagaaggggaaatacagtattacatagtaagtccataccatcaaaacaacaaatcactgcagaaacaaagtaaaaaactcagataggcgtattcccaaataataaccattgacacgattgctttggacgccttttgttttgcgtcctttgtcattttggccgcttttccccggttgatggaaaccttagcatttttttccttcatttcttcggttttttagacagcggaactatcttcaacgcctttacttcatctggtacttccgactgtgacctatccggaacaagataaatacctatcgcatcaagcattggtattaacgagtatttccttgcatttttaacacattgttcaaagattccatacaat

SEQ ID NO: 17379 - DNA, 856 bp, Arabidopsis thaliana
gagaaatccagcttcactactttttgtcaaagcagtttgaaggtgatctttgtcagtaagctcctctagcagttcattagctagttgacccatttcttcaactaagaaggtttgtctttctattgttggcttcttcatagtgttcctgatttcaaacttcattttgaaatcctccccgagattaagattaattttaccttgcttaacatctatgactactccagctgaagccaagaatggtcttcctaagatctgaggatcattagattcttcatccatctcaagcacaacaaaatcaatagggacctctactccattaatcattacaggcacatcctctaacaggccaaaaggtctccttgaagtcctatcagcaagaatcaaggttaggtcacaaggcttgtactgaacgaatccgagcttccttgccatagagagtggcattatgctgactgaggctcctatatcacatagacaattgctgaaagtcaattgcctaatggagcatggtagggtaaaagatcctggatcttccaacttttcttgaataatcttctgctgagtgatggcactgcactcatgacttaatagcaccattcctaggacttctttgatcttttctgtaatcaggtctttcacgtacttgtgctcgtcaggcatatcctttatgtgtttttccaggaggactctgtattttgcaaccaaaactttcttaaaacgaccagagaatggatggggaggtttgtaaggcggtggcacgaagactgtgtctttggtctttgcagcttcggatttttcaacaaagcgagtaggtgggggagcttgtggttgagtgggttgactggtgagtttgagc

SEQ ID NO: 17380 - DNA, 627 bp, Arabidopsis thaliana
cccctagatgtattttacgatgaaatgaagatttggtgcaaaactaatgatttagggatatatacttccgatggagaactgaaatattataagtctgttattgcacgtcatcgtgaggaaggaggtatcagcgttataggttttgaaacagccgaagagcgactactgcagctgctaaaaaggaagaagatgaaaatgaagaagcatcggcgaaggtgaaagaagcaaatgaagaagaatcgactaatgcataagacggcccaacccaaaataccatcaagactaagtcacatttgactaagtatctcgtttttccttttaataaagctttgcaaataacattgtggatttgtgtttttctctttgaggacagaaaccatgtttcctttctattgctttgtgcttccaagtttgtaggagttgatactccaatattatacattgtgaacaaaacaaaaaaaatgaataagtatgtgtttgctttttgaaagcgttgttcttgtgttcgtattgcatcacttttggttttaatccaaaatttattattaaattacgtacatttgattctttgtttttttttgtctcaatatatagttttgatacgtgttaccaaataaattgcttatc

SEQ ID NO: 17381 - DNA, 803 bp, Arabidopsis thaliana
atatagagagctctgcttcaggtgggttattagtggctgtcaagaacaagatttatgctcaggtaattttgtatatttccagttcagagtgtctttagttagtacttagtctttgtgtggtgtgtgattatgtgatgatgttagcagcatacttgtgtgatgatgttagcaacatacttgtgtgattatttcattagtacttaatctcgtggcagtccactcattatattgtgtggtttgtatcaggttgctccaaggaagaaaggaaggttgtatggggttagttctctacataatgaagcatcctcagccactgttagtccacagcctcacaatgatctgattgttctatcggagaagcttgctgctgctgaagctcgtcttcaacttcaggctgacaagattaatagtttcgttgcctattttggtatatatttgttaatctcaacttttgttttaagacttgggtttgctaatctctaacttttgtaatctcaacacttatgtttttgaatcatttagcagttaatgtttttgaatgtctactcatttcatatatgtttttatatgtttactagaaaatcaaattaaaatccctagaaaaataaatcagcataaaattcgtaaataaaaacaacaataaagacttgcgacagacttgcgaatgttgcaagggcagtgctactcttatgttttgcgagggattgtggtccccgcaaattttgcgacgtcataggttccccacaaaatttacgtgtgaattgcaagatattaaatttgccagccgcgttttgctaggaatg

SEQ ID NO: 17382 - DNA, 953 bp, Arabidopsis thaliana
cctcctctttttcgatctttaacatctcacctaaccctagttcttctatggaatgaaactctcgatcccctccaccgagtagagtctccacgtcagctgtgaactgagctagttccatgtcggttgggaacaaaccattcagacaactctcagcgttgtcgtcatcttcttcgtcactactcttgaaacttaagggcatcattggaaactcattctgtttctccagggattggttaaagcattgctcctcaaccatcgagttcatcaccggcacctcaaatatgagctgctcttccacctcgtaactctccgcttgatcctccgtgctcatctccggcacaagatcatgaaaaaccatcgtgtggctcttcttgcctccacgtggggtccgagctttacgtgtaaatccctgatgccacgtggcttggtgaggcggcgaggcatggcgatactttccggcgctagagtttcaagcgaactctctcgtgcctacgagcaagagggtttgccgagtggaccgaaccgtcacaagcatggcaaagaaaggcatcatcagctgcgcaataccaacgtgcccgcctcttcacgcagctatcacatgccctcgccgtcttccctccaaccgcactagccaaacttttcatcatattgaacttatcaccatcaacaagaagaaatcttactttgagtaaaaccaagttgccaagtctcagttgcaaaaagaatgttttatcgaactatgggttctctctacaaaggtttcagttttcgagaagtggttataaaaagagagactacattttcattttatgaggcattgaagggttaagtgtagaggcgttgttggctagtacatgtcccacacgatgtgagcttttttcttcttgtataatttaaagtgaaaatttgatgcacctttttggttgcttataccgcatgagggcctatgagag

SEQ ID NO: 17383 - DNA, 867 bp, Arabidopsis thaliana
ataagaaatggctcctccacgtcgacggctcctccaaccgacaaggatccagagtaggaatacaaatcacctcccccaccggggaagtcatcgaacaatcgttccgatttggattcaacgcatcaaacaacgagtctgagtatgaagccctcattgctggcattaagggtagctcaaggaatggggatccgcgaaatacacgcccatagcaactcccaactcgtcacaagccagttccacgggaaatacaaagctaaagacgagcgcatggaagcgtacctcgaactggtcaaaaccttgacccaacagttcgaatcgtttgaattaacaaggatatccagaggagaaaacacctctacagacgccatgacagctctcgcttctacttcagatcctttcgtcaaaagaattatcccggtcgaagaaatagaacacgcgagcatcgacctaacggtcaaacatgctgggatggaaacctcgacaacttgcaacttcacgcgagtaacccgaagcaccaccgccgcagctagagctctcgctgcagctgcggaggcaagtgcaacggaggaggagccagagctcgaaacccccgaacaacctgccccgtacgaacctgaattgtacaacgactggagaatcccaatcattgactacattgaacgagggatcacacctctcgacaagtaggaggccaaaaaactcaaagcccagagtgcaaggtactgcatcatggaagggagacatatgaattgcagcgtcgcatgtccctatatggtgtgcaacaaacaaaagaactcatgaaaagcatgcacgaaggacaatgtggtagccattgcagtggacgtaccttgcccttagaataaaaag

SEQ ID NO: 17384 - DNA, 612 bp, Arabidopsis thaliana columbia
agtatagaggatgtaggaaattggaggtgcacagtggtttgtatgcattgtgtgttgagaaaatgaaggacctgaaggacgggatgatcaatgtgaaaggaggagcggcagtagaagcaaaacgcagcgttttgacaggagagacagaacatgttgcactcatttcgcggtgtctcgcgatgtcgagggcaaatgctgaagaagtttgttcttaagagaccttcgagccatttcggctcctccattaatctctctcctgttttgtttttcttagacaataattacaatatatacaaaaagggaagagcgagacaaaaccttatgaacaatgtaataaattacgaagaacatgctcttgccatttgcattacctttatgaagatgatcagtagagggagagagaaagggtattagatgattgatttttgagacaagaggaggaaaaatcagattttaagggtaagagagaaaggaagatataaattttattttattgttgataaatgaagattttatgtttttttctcttatttaggattggtagatatcttttcaattcttctcttaattattaaatatttattgttaatagtttattgggggaggaaaggg

SEQ ID NO: 17385 - DNA, 508 bp, Arabidopsis thaliana columbia
cccgtgttttacagttaagctattgagaagaatatcggttcctggaggtggaccttcgatgtaaataactacccgcaatgcagaaccgttgaggaggaacttccctttcaaatgtatccactctttgtctgtcgcttgcacacttttaaggaaacaaaaagaaaactacttcagcagttaaccatgattcatgaataggagaatgtgatacattaaatactaacgtggaaatgccaatgtattgatcacgttgatttggattttggacccatagagtagcttgtacagtagctgttgtcacattgtttccataaatacgaacaaccgcggttacatcatatacacgttttctctgaactttcccggtgatctcttgctgaataccgttccagttctgcgtgcattctgtagccgaagcgaaaaccttcccggattctggtactatctttccatcagccattgagtcatgcaacacaatcttgcagcttctcccaggccagttatttag

SEQ ID NO: 17386 - DNA, 835 bp, Arabidopsis thaliana
ctaaagcaggcaataaaccgaatgccaccgtaatggtcgatgttgatcgtcagggctttgttgatttactggctgatcgtctgaaattttacgcttaacacacgtcattgattaagatcaccacgcgttacctgggtggtcttaatctgtttatctctttttctttcaagatataaatgcaatggataatgcagaactcgccattggtatcgatctcggtactaccaatagtttaattgccgtctggaaagacggtgccgcgcaattaattccaaataagttcggtgaatatttaacaccatccataattagcatggatgaaaataatcatattttagtcggaaaaccggctgtatcacggcgtacttcgcatccggataaaacggcagcgttatttaaacgtgcaatgggcagtaataccaactggcggttaggcagcgacacatttaacgcgccagaactgtcctctttggtattacgctcattaaaagaagatgccgaagaatttctgcaacgtccgattaaagatgtggtgatctccgttccggcttatttcagcgatgaacaacgcaagcatacccgtttagcagcggagttagccgggttaaatgcggtaccttaattaatgaacccacagcagctgcgatggcgtatggcctgcatacccaacaaaatacccgttcgctggtgtttgatctcggtggcggcacgtttgacgttacggtgcttgagtacgccacgccggtgattgaagttcacgctccggtggcgacaactttcttggtggcgaagattttaccatatgctggtcgatgaggttttaaaacgcgcggat

SEQ ID NO: 17387 - DNA, 543 bp, Arabidopsis thaliana columbia
caaattcccagagagatcaatcgcctccaacgaacctgaaccacagagctccctaggaatcgaaccacttaacaagttgctagctagactgagatgtttcaacattggacaatcctcaatctcatgagggatttcacctgaaaaccgattgttagctaacagaagtgagtccagtaccttccatttccccatccatgaaggcaatgaacccgaaagctgattcctttcagcagaaaacgtcaacagaggaatctctgaaagctccaatggcaaaggtccagagagagaattgaaagacagcatcagtgacttgaggcttttacaattaccaagctctggtgggatcaatccaataagctctgcggagacaagatttagtatactcagattatgcaactctccaaacgatttgggaatggaacacttgagtggattataagaaaggtcgagctttgctaagtgtttcagtttcgaaatctcctttgggtaacggtccattgaagaagcaagaaggtgcagcaaagttcttcagcaacgagatgt

SEQ ID NO: 17388 - DNA, 716 bp, Arabidopsis thaliana
accgaaccttaaattgaaataagaagcttagatgatagaaaaatatgagaagtcgattgaacagctgaaagaaagtattaccgtcatgtttgatgaaatattcactgcataggaaattgggtctattttggcttgataatgaaactctgcctcaaaaatagctgagagcttcaacaaaaataaaagatgtatcaagctctttaaatacactgaatcaataggaatactaacgcaagattataagcgcaacagtaaaacctaatattacaaatacctcgtcaaaaatccactgggaaacaccagactgttgtaaaagcttaatttgtctgaacaacaaccctaaaatatctttcatatgctctgtataacaagcaagaaacaaatcaaaccaaaatccagaaaataacattgcactgactaaacatcaagcacaccaagaccactcattcaacataagaatattaaaacaaacaagaaagaatatagaaacccaccatggcaagcatcagtaagattaatcgaaacattgaagaaagaatactctacagtccagtctggttcgccagcatacagtcccgttgcccaacctgtgcaagtattagcaataattcagctactattagatgtaaaactactaggtaaactctgccaaaacatttattagtttggcccaaagaaaacgtcccaagattttcacgcaagcagcaacttctttg

SEQ ID NO: 17389 - DNA, 503 bp, Arabidopsis thaliana columbia
gaatatgtcatctttacctcttttttccattatcgagcttgcagattgtcatttctaacctgaaagcaagcatgtgcctaaaatactcctccatctaatccagtgttaacaaatgttttttgtcgactggatgtaggtttttgttgcgcttcttaggacatgccagccagagaataagatgctagttaagcaagccctggatattctaatgccagctttacctaaaaggcttccacttggagattcaagaatgccgatttggattagatacaccgaaaaaattttggtggaggagggtcactcaattccaaatttgatccacatcttccaactcattgtccggcactcagatcttttttacagctgtagagcacagtttgttcctcagatggtgaattctttaagtcgtctaggtttgccatataacactacagcagaaaataggcggcttgcaattgaacttgctggattagttgtcagctgggagagacaaagacagaatg

SEQ ID NO: 17390 - DNA, 535 bp, Arabidopsis thaliana columbia
aaaaaagcatactttatcagcttcaggatctcctggatcggaagcagacggttcttccctgtccgattcttcctcctcctcctcctccggtgattcactctgttcgccaccgttttcatcgccgggaagttctagaagctcaagagctctctggcaatccgcgagcagattctgtaacgtctttcgctttacacgaatactatccaaatcgatgcggtttcctttggtttcggcatcatgagtcgagcaagagacttcgatttccatggaatcggaaagttttaggctgaaatttgtgaaagagaagaagatgaatttgatggttctcctccacaattgcgacctacaatatttgtttgttttatttccaccggaaaaaggggaaaaggagagtcgtgactcgtaagacaacaagcaactaaatttgctgaaattagattctattcaatctttgggacaaatattgctttatatatatcttaaagaattttaattgattttaaatatttttattattttgtatataatttttaga

SEQ ID NO: 17391 - DNA, 1079 bp, Arabidopsis thaliana
tctgtttttgcttcttgaattctcagaaacagagacaaattctaaaaaagaaacaatctttagacaaaagaagagaaatttagtcatgggttagtctgcaaaattcaattacgtcttcttcttcttcttcttcttcatctttgatttgttggcgtgtttagggtttgggatttggaggagaggcaaaatgttgaattaaataaatcgaacgactctggattcctcggcggttaacgaccgcgtcgccgccgccgtcataatccaaccaccaccaccatcaacgaccttgaatttccacaatatgcttcatcaatggcaccagataacgaccatttcttagattctccgtcgccgcctcttctagagatgagacaccaccaatcagcgacggagaacggtggtggttgcggcgagattgtggaggtacaaggaggtcacattgttcggtcaacaggaagaaaagacagacatagtaaagtatgtacagcgaaaggaccacgtgaccggcgcgtgagactctcagctccgacggcgattcaattctacgatgttcaagatagacttggttttgatcgaccaagtaaagctgttgattggcttattactaaagctaaatccgccattgatgatcttgctcagcttcctccttggaaccccgccgatactcttcgtcaacacgccgccgctgctgctaacgctaaacccagaaaaaccaaaactttaatttctccgccaccgccacaaccggaagaaacagagcatcatcgaatcggagaagaagaagataacgaatcgagttttcttccggcgtcaatggattctgattcgatagctgacactataaagtcgttttttccggtagcttcaacgcaacagagctatcatcatcagccaccgtcacgaggcaatacacagaaccaagatcttcttcgtctctcgcttcaatctttccaaaatggtccaccttttcctaatcaaacagaacctgctctgttctccggccagagcaataatcagttagcgtttgactcatcgacggcaagctgggaacagagtcatcagtcaccggaatttggaaa

SEQ ID NO: 17392 - DNA, 442 bp, Arabidopsis thaliana columbia
gagctcgaattctacatagtatagaatacaaggatgtcgtttcttgcaacgtaacagcttacagttatgctctgtgattcctcgtatcacaacttttctcgtagactgtctttgcggatcataatagataacataatatggtggatcaggcaaagaaatcggtgccaaaataagctccccagcatcagtgacgttattccgtagcttcttcttcttctgtaaaacaagccttggcactgtcatacacaagactttgtaaaccccatcaatgggatcatagcccaacaagtgtttcaggacaaaactccgggcttcgatttcgggcaatgtgatggatcttctggtgctggaattgtatacacaagttgagaagcataagcagtagttccatagcaaatcgaacccgtgaacaaggaacaattgtttgtgtatccagatgcag

SEQ ID NO: 17393 - DNA, 936 bp, Arabidopsis thaliana
caccctggtaagattcttttaacacataagaacagcaacaacattatcaaaagaccagcttacttgagatcctcacatctttttcttgttgttggtgtgattgtgaagatgagttttgcatcatgggagccaccacacggaccgtacaaatcctttagatacccatgggcactgtatgtgaaagtaggtggtgcattgaggcattgtgctatcatggtcatggcgttacatggctgcattctctcagagatccaggtactttccaatctttaagtcagaaacattctataatcttcagatcttaagagagatttgagacaagagtatgcaaagtaattgcaggctgcagaggatagaagacgagaatttcgtaatgagcttcaaagagtgggaatcgaaggagcaaaagtactaagatacattggggaaagcctgaagaagatggagaagctaaaccctatagaagacatactctacgagattcaccaagcagcagaagaactacagagcaaaatcgacaagaaatcataccttctcgtgaacgccaagaattgggaaatcgggaaccggcctagggttagggatttgactgatgaacaaaaaatctcgaatctcgactctgatctaagtcggatcttggctcataaatctcagagtgaagccactcttcgtccaccgaagaattgggatgatgttacaactgcagctaacttgagttcggcgacgatgcttccttacctgcaatcaaggacgatgatacataaacagccgtcgtggcctagccggatctctattacgccgggaagtatgttacagccaccactgggagagccgggaaaaatgtacgagagcgcgagtaatctttctctagctacgttcgcttcgctactgatcgaattcgtcgcgaggcttgagaactcgtgaatgcgtacgatg

SEQ ID NO: 17394 - DNA, 609 bp, Arabidopsis thaliana columbia
cgacacgctaattcttcttcggttggaacaatgatacccactccaggattacaacacagtggtgggaatccaaatttgatgattacttcctcaggtgatgctacaatggctggaagtaataacatcacaactagtgctatgaacactggaaacctgctaaattctggtggcatgcttggaggttctttcactacaacttatataaaatatgggcataaaattttctgcgcatattttttctgaacacctttacttctctttgcaggtaacctgtctaatggataccaacattcatcgagtaactttggtcttgggtctggagggaacatgtcatccatgagctcccagagaaataccggccagatgatgcctacccctggatttgtcaacagtagtactaataacaacagcaataatggccagtcttacttgagtgttgaagcttccaacaatagtggtggattctctactgctcccatgatggtacctcagactcagcaacagcaactgaggcaggatattggtgccaaaatagtcgtatgctgcaaaaccatggaagtcaaatgggtgttggcttagacctggaatgcaacaaaaattgtctaatgt

SEQ ID NO: 17395 - DNA, 511 bp, Arabidopsis thaliana columbia
tggcgaggatctcgtgtgacttgagatttcttctcatcccggcagctttcatgttcatctacatccaggtcaatctatatccgatgatctcgctttttgaagttgaaactgaaattgattccatcgctgcaacctaaatctgtctgtaattatcctctcttctcttctctagatgaggcttttccagacgcaatcacagtatgcagatcgcctcagttccgctgtgagtttctacttttaccactgccttttgtctttagaccattgctactagttccttttgaaatcccattttttggctctttacaagcccatgaactactttcaagaagaagacactatctgcactattacaccatatcattgcctttggtatttcgattttttcctggtgtgtgatgaagatctatacacagcctttcatttgtttcccagatcgaatctgagaccattgcactagtcaaatgcgaggctcatagatgaagttagcacacacagtcgcggattgttg

SEQ ID NO: 17396 - DNA, 1183 bp, Arabidopsis thaliana
tatcagtacaaaaaaaaaaaaaactgaaaagaagaaaacatcgctagagagaggggtcgaacctctgaccttgtggttaacagccacacgctctaaccaactgagctactccagcttattgataacaataatatataactaactatattcagttagtttgaaataaagacacaagacaagatcatgcaaaagatcttgtcatcttgggttttccataaaagaatcaaacgaaaatccatgagtagatagataatacagcaagacaacaaagaacagtataccaccaaccattgaatattttagaaattaatctataacatgacatgttaataattaaaagcgacatcaaaatatatttaaaatatataaagaaaacaatgggtttgaagataagtgattggaaggtaggagaccattgcttttgatcagagtgtttgatcatattcttctgtctactagagtgtgggcttccaacctaaaaccaattggcaataggtggagagacccatatcttatatataccacttaagatcctacttaacttccgatgtgggacattgtccctaatacgccccctcgagatgatggctcttctagccattgatctcgatatgtttgggcatggatcggcgggccaagtattgggccggaccgatgtggatcgggttgagtatgtgcggatcgggctctgataccatattagagtgtgggcttccaacctaaaaccaattggcaataggtggagaggccgctatcttatatataccacttaagatcctacttaacttccgatgtggaacattgtccctaatagtgtccttctccattcactgttgtaatactattaaagttataagtttacccacttccaaatttcaatcacattcataagaactgcaaaacgagcgatttttttttttttttggatttaagttcttataagttttccattgtgaaaaagttagctagttatgttaatattatacatgtagcaatatagcacaaagtcattactttcaatctacatagttggaccaaattgaatcaactttataacattggctgcattaatgatttttttcctaaaaaatacaagtcatgatataattcttaaggtttctcacatctaagatgtatctgtctaacaatattaagttgtttctttttgataaaaattactaga

SEQ ID NO: 17397 - DNA, 1245 bp, Arabidopsis thaliana
ccaaggcgtacctttgttactgcggcaaggaagaggatctccggcgataatccatggatcttgcctcattcttgcggcgaggtctgcgagaggccgttgagcaacaattgtggtcactgttgcttactcttgtgtcaccctggaccttgtgcttcttgtcccaagctcgtgaaagctaaatgcttctgcggcggtgttgaagatgttcgtcgatgtggacacaagcaattctcttgcggagatgtctgtgagagagtcctggattgtaatatccataactgtagggagatttgtcatgatggcgagtgtccaccttgcagggagcgcgcggtttacaagtgctcttgtggtaaagtgaaggaggagaaggattgctgcgagagagtctttaggtgtgaggcttcttgcgagaatatgcttaattgcgggaaacatgtatgcgagagaggatgccacgcgggagaatgtggattgtgtccatatcaggggaagaggagttgtccctgtggcaagagattctaccaaggcttgtcttgtgatgttgtggcgcctttatgtggtggcacttgtgataaagttcttggttgtggctaccataggtgtccagagaggtgccacgcggtccgtgccttgagacttgcaggattgtagttccaagtcttgcaggtgcggagtaacgaaaaaacaggtgaaagagagcctttttgatacttcatgatgctttattatagtcaaaatcaaatgttgatggaaagattttgggaacttaatttagagtaggttccttgccatcaagagttggcgtgtgagaggaaatgccagagagtgagagattgtgcacgtcatgcttgtagacgccgatgttgtgatggtgaatgtccaccatgctcagaggtatgatgtgtctcttggtccagtttagtgcaattgttcacgcttggcttctaatttgtttgtttgaatttttcagatttgtggaaaaaagctccgttgcaggaatcataaatgccagtctccttgtcaccagtatgttctgtagtagcttgctttggactttctttgtccgtttggtttcagatttgggacgatatgactaataaaattgtgtactgcaagatatcaactcatgcacgtggaatgacattatttgttgcgtgttcattgcagaggtccatgtgctccttgtcaataatggtacaatatcttgtgcttgtggtgagaccattttgaggtgagaataggatt

SEQ ID NO: 17398 - DNA, 1303 bp, Arabidopsis thaliana
tgcagaataaaattatctacataggaaagatttataattaattaaagataaatgtttcttataagaaaaagaaaacttgtaatagtagagaagaaaacgaatagtaaatttgtttagtagagaataaagctaatatgataaattaatgtattttaggttgtaattgtttgtttctaatttttgatagacactatcatagaatatttttcttttgtcaactagatcataacatcatgctaaataaaactcccatgtgggagatcgatcttttttctttttggaggtcgatctcttgtaggctagataacaacatatggcatattggcatgccactactacacaccccaacggcccaacccacaaaatacagctctagagaccctagtctcacccttagaacttggtggcatgtatcatccgttcaaaatttcaagatttttaggttttggactcttttaacttataaatgataatattattagggacaatgtcccacatcggaagttgagtacgattttaagtgatatatataagatataggtcttttcacctattgccaattggttttaggttggaagcccacactctaatatggtatcagagcccgatccgcacatactcaacccgatccacatcggtccggcccaatacttggcccgccgatctatgcccaaacatatcgagatcaatggctagaagagccatcatctcgaggaggcgtattagggacaatgtcccacatcggaagttgagtaggattttaaatggtatatataagatatgggcctctctacctattgccaattggttttaggttggaagcgctcactctaataaatattacctgcataaactttatatagaactgtcaaacaatataaaaaactatccagagacaagtctggccatgctagacacgttttttccatacgtgacataaaccaaccaagagccgtcacgccgtaattatcaatgtcacgtcttatccactaaataagtaaatacacaacgatcgattagtaatttctataactgaagcaacctcatcgaatcacataattttttgatatcaaactagttctatctaatcaggttaaatagccttttaaaaattcaaatttctacaaattagtgacatgaaaattttgatattatataaatactgtcgtattaagtgggtaatgagttaaaaacaaaataacatcgaataaaaccataataatacgtgtagaccattagtaattagttacactaaagattataaaaagggataagccgtaataatattatggtaaataaatca

SEQ ID NO: 17399 - DNA, 592 bp, Arabidopsis thaliana columbia
gattggtcaattcatgacattgaagaagaagagaaggaaaatgttacgggaatccatagtgagaaactggctcttacacttgggtttctaagaactgctcctgggaccacgataaggatcattaagaaccttagaatctgcggagattgtcattctttaatgaaatatgttagtaagatcagccaaagagatattctactgagagatgcaagacagtttcatcatttcaaagatggaagatgttcatgtggtgattattggtgatatagttgatcccttcaggttagtcaacaacaatgactcaaaccaaaaaggaaaaatgcgatgttctgtaacatcccagcctgagctgcttgaagtttttgtttattcatggcgctttccggtacaaatcttgtcatgttcttgtacacaagagtagggattaggacaagctcatgatttctgagaccaggccacacaccacagctatatcaggccgaagtgattcgggttccccacaggcctagaagtgaaagagaaggggctcaagtgggttacttgtgtttttgagatggataattccattcttgtttatagagaatatgagaag

SEQ ID NO: 17400 - DNA, 947 bp, Arabidopsis thaliana
cctaccagcaatgaaaagatcctgaaatagcaaacatttctaagtaaaaaaaaaaccattagtgttcgcttaggaacccacataaaataaaaaaaacacttaccacaaacattgacttgatatggtttcttgtgatcttatactcagcgttttcgtctcgataagcttccaacaacacatccatcatatcagtaccttgatgatgctcctccattttctcttcgtgttccacaagaatcttctctagtagctcatcgaacttgcgggaaacactcattatctcctttttgaaaagtgagatcccgagcttcttaagcggtttgtgaaagatggtcgccaagaaaattttctttgtcaaagccattgattcagtcaccaagcctctgattctctccgcctcaccggtctcctcagaacaactcctccccatgatcatcttgcagatggtgttgttattgagcttcgctgcttcctcaacaatctcaacactctccttcttcatcgccttgtcgagcagagttttataaaacctatcaagctcatcttcacggaatcttcgtgaccgctcgagtgcctgcggtccaagaatcttggtaaccatgagcttcctcatgaatttccagtaatctccatagggggcgctaatgaagctatacgaccccaaaaagagagactcttcaatcggaggcgaatgccgaaatgatacattcacgtcttggtccctgaagatttcgtaggccactgaggctgaggaggcgaggactataggtacgtggaagatgcggagatggagaagaggcccatactttgatgagagtctctgaaaagacttgtgggttaaagtagacagaagaattaggtgaagatgaccgatgattggaagagaaggagggctcggaggaaggtcacggccatctcgtgaatctttaggtatcatgaagaagaga

SEQ ID NO: 17401 - DNA, 1655 bp, Arabidopsis thaliana
tcatctcacaacttctttggaacgtccttaccatgagaggcaatggcgggtgcaatcttagcccttctttgactacagattgtaaataaggtagctttggtagatccttttcttgaatcaaccttgtttctcctacaaccgaatcaatttcttctctcaatctcttaagaacgttacggttgttgatgagctcggccattgtccactgtattgtttgcgccgaggtatcagtgcctccaagtaaaagctcctgcaagtttcaaacgtttcttagtcagactttgtttttccccattcttaatgaatccacacttaatgagaagaaattttgattaccacgaacaacgacttgatatggttcctagtgatcttatgctctgctttttcgtcttcataagcttccaacaacacgtccatcaagtatgtaccctgatgttcattcggtttcttttcacgttccacaataatcctctccagcagctcatcaaagctgttcgaaacatacattatctcttttttgaacagagagattctgagcttctcaagcggccagcgcaatatgtttaccaacaaaaccttcttcgtcaagccatctaactcggtaaccaaacctctaactctctcagcctcaccactctcttctgaaaaactcctccccatgctcatcctgcatatgctgttgatacttagcttcgttgcttccttaccaatctcaacactctccttcttcatcgccttatcgagcaagcttctgtaaaaccgctctagctcatctgcacggatgcttcttgaccgctcgagtgcctgtggtcccagcagctttgtaaccaagagcttcttcatgaacttccaataatctccatagggggcgccgacgaacacagaagaaccgaccaagagggactcattgattggaggattgtcgcgagacgagatgttcaagtcatgagccttgaagatctcgtaagccacagaggccgaggagacgaggactacagggaagttgaagatgctgagatgtaggagaggtccatacttggatgagagttgctgcaaagatttgtgtgctagagaagagaggagatgatgaagatggcctatgatcggaagagatggagggctctgaagcaaatcacggccaacatgtgagtcctttagtttcttgaacaagagagagtaacagaggagtgagaagaagcagaggagtatgaaactgaaacagtgttgagagtcaacggtcaacattgctgcaattgttgctcaaagtgtaaaaggtaagataaaacagagtattaacacatctcagagtatactgtataacgtatgtgaagtatgactaccattgtttctttaagtgaagaggcagatgaaacataatcaacagtccattaatagaaagtataactaccatcaccatgctttgttttattgctttataaaatgcttctcttttgaagaatttgagatagtggacaactagaactttgtttattaataataatatagagatctcaataatatacgctcagatcaataagtttgacactggtgatcaaactgataattaaatagtcgaaggtgacaaaaagatgactcattgtgtgttgtgaggaatagacaagttcgagattgatgacgcaatgacagtctttttg

SEQ ID NO: 17402 - DNA, 806 bp, Arabidopsis thaliana
ctagaggatgctgtccaacaagcattgcgccattactccaatcgcggttcctacagagacataagctagattggatccaggacagcctctccttccagttgagaaaggcatgtatttcaggacttcctctcttatctcgtcctcttgccctgatcttgaagatgctataaacctctcaggtttaaactcctcaggatcttcccaaagcttaggatctctcattatagcataaacattaacaacaagcaatgtcttttccggtatgtagaaccctttgagttcacacctttcttggaacgttcttaagaacacagcccctggcggatgcaaccttagcccttctttgactaccgcttgcaagtaagggaggtttggtagatcggtttcttgaactaaccttgtgttccctacaaccgattctatttcttctctcaatctctcaagaatgttagggttgttaataagctccgccattgtccactctattgtttgcgccgaggtgtcagtgccggcaatgacaagatcctgtagtagcaaactgttattagagtatttccatattttctatatctaagagtggcctaggtttattccatcatttcacagcgcatatgtttattccatgacatacgaatcacacctagaagggaagaacatttaccacgaacaaggacttgatatggtttcttgtgattttatactctgcattttcgtctccataagcttccaacaaaaaatccatcatgtcattagcttgattgtgtccgcctttttctcttcgtgttcaaaaagaatcttctccagca

SEQ ID NO: 17403 - DNA, 501 bp, Arabidopsis thaliana columbia
  unsure (1)..(501): unsure at all n locations
nnnnnnnnnnnnnnnnnnnnnnctaaagtcaacctggtcgcggctgaacaagctggattcgcctttgctacggcaagttaccaggtcttctacgaagtggccttcttcatccaagttggagttcgcctgggcgataacgtagttgccttcttcgatagcagacaggtagtgaatttcgtcagttacaacaccgtcggtcactttacgatacggagtctcaaggaagccgtattcgttagtctgtgcgtacacggacagagagttgatcagaccgatgttcggaccttcaggggtttcgattggacatacgcgaccgtagtgagtcgggtgtacgtctcgaacttcgaagcctgcacgttcacgggtcagaccgcctgggccgagtgcggagatacgacgtttgtgcgtaatctcagacagcgggttgttctggtcataaactgagacagctggctggaaccgaagaactctttcactgctgcggaaatcggcttggcgttg

SEQ ID NO: 17404 - DNA, 540 bp, Arabidopsis thaliana
gtggaagagacagagaaaccaatcgaagaaacagaggaagctcaagttgaaactccggaggttgtggagatcaagaaagatgaagaagctccggttgaaactccggtggttgtggaggatgagagcaaaacagaggaagttgtagaggcgaagaaagaggaagaagtagaagaaaagaagacagaggaagctccagtggttgtggaggaagagaagaagccagaggatgaggaggagaaacccgccgtggaagcctccgtgacagctccagtggagaaggctgatgagtaaatgtgaagaaaaaaactgtcttttgaaagacaaaagaagaagaaaatgttagcaagtaatttatttgctactttaagtactttgtgtcttgttatgtttttgagtctatgactcttcttgcttttggttttgtaatcttcttaagtactattttcaatggttacgcttcttaataagatatcgattattttatatatagttcgtctgatcgaagattatgaccagactagatacaattcacatgaagag

SEQ ID NO: 17405 - DNA, 962 bp, Arabidopsis thaliana
tttgatagctagtgcagtttccatcttctctggatcaataccatttgaaaacttattaactcttttttcaaacatccatgttgatctttcagcttcatcacccttgaagataatttctctatgactctactttggcagttaaatttttttcttatctcatacgagtcatcttttgtaggatcttcagtttgagctaacccttatattgctctcttcttgtggtcaaaagttctcttccgcttgctgagttgagaagtatagttaactcttggtgaggttccagcttctgtttcttcatcaacatccatgtcctgaatcccaaaattctaacctcctgttgttgatttccctgaagcttttctgatgtcaaacttcatcttgatgcctttttcaaggttcagattaatttttccattcctgacatctatgactgctccagcagaagctaagaatggtttgcctaggatcaggggatccttgccttcttcatctacgtccaataccacaaaatctgtaggtatatcaacatttccaatcttgacaggcaaattttctattagaccatgaggatgtgcaacagaaccatcagctaagagtaaagctaagttgtagaacttgtattccatgatcccttgccttttgcacgtagagagaggcataaggctaacaaatgctcccaaatcacaaaggcacttattgaatgtcaatgatcctagagagcatggcagagtgaatgaaccgggatcatcaagcttttcttggatgactttcttcttgtaagtttcttgggtggtggcactgctaatcatctcttgattctgacctttcttgagtttttcaattttgaatttttttccagaatggtgagtattcagcaaaggtgtgtgctctataatccagatgaattgctaggtggcaggtgcagcaatttgagttgaatcccccccttcttgaatcatgtt

SEQ ID NO: 17406 - DNA, 1172 bp, Arabidopsis thaliana
cacatcccaaaacccatctatggaatctcaatgtattacttcattaaaaaaatacaataaagacgattacattttattatactttttgaacacacgatatacatcaatggaatgatattcggaggtaactagtatttttattaaagagaggatagatcaatttttatttttatttatggaaccccagtaatttagtatgatcaagttccttcatacatcatcccaaattaggaaacgcctaatcgtatttccccgattctgctggattagacgccggaacctgctgggttagacgccggagccggtggcgtcaatcctggaatttttggtaggtccctccctgtacgtttcctacatacaatcacatacttctgattactaaattaaattcgttgatttgtgtttgtataaactaaagattatgaatcgaacatgaaccaggtttaaaccaaacatgataaagtttagtaaggttatacattctcaaaatcaataactattaactataccatatataaccgaatgttcatcccttgaaatgtatattatatgtctaatcatgcatataaataagttcccatgtagatgcatatgcctaaaactacatttcaataaaagtaaaccaaattgcaataatttacttgtagagccacgaaaggatggtgaaagccgtggcaccaaaggaaccggaggctgtgaaacctgaagctagcaatgtagtggctatagtcgctggcacgagaacgggactgaaaatgacaaaaagtggtgtgcttatgatacatgcgaccactgagccgccgagggttataccggcgaatgtcaaaagagctagtgcaaccccggcggagaagaccgcctgaataatctcaaacatctttgggatgatcaagttaaacggctgggatttggtctgatcgaatggtttatgatttagtggtgggaagaagtggggttttatcaagaactagtggaagtctacgtgaacgctacgctacacattcatgctccatgcaaaacgatctgaatgaaaatggagatatgtgttacgtcacgtcattgtctctctttggttttctgtggattgtccggtttttggcctttccttgtttaatatgtgtatgacttgatttcgaccctaaattctgttttaaagaagaaatcagattgag

SEQ ID NO: 17407 - DNA, 458 bp, Arabidopsis thaliana
gaatatgtgcaattcactgactgttgaatctataatggaagaaatatcagttcattacatgcttctgtgagatgtcttgtaccatggcgtatttctctaagatgaaatataatggaagaaatatcaattcaattgtgagtgtctatcccctgttatatcattttgatacgccaatttgtgtgttgatgacagcgccaatcctcaacagccagagcttctcgttggaatgatcctaaacctcattttcgctgaagctcgtgctgaatacggtctcatcggcgggatcatttcgacctcccgagctgaccagtccagagccgtgtgagaccacagtgctgttcttgaagtccgcaagattccttctgccccagttcgacggactcatgacagtgccgggatcttcatacattgtctgtcaggttattagagggacacagtggtagcggtccatgaggcat

SEQ ID NO: 17408 - DNA, 519 bp, Arabidopsis thaliana
tagtaacgtccgccagtgtgctctaaaggcgtgtcatagcagctgaccgtgtggccttggaatgctatacatcctccttagtcctcttccacttaaaagacgcagattcactcaccattcttcgaccggtaccagcggatatcgccaggctttcctccgcgacgaggcacgaccccataccactggtcctcttccggatcccaggcccagtggttctctcccttcttcagccgctccgggtcacatttcaacggagtcataggaagtacgacccacttatcactgatgccgcagtcgtgaatgatgccgcaaaagggcgccttgtaccagctctcttctgtcttgacgccgttggcgtcgatggtgtacacgacgatgtcgcaagagccgtcattgccgtttccccagcctgtggagataagtcagactcacttcaacatatgagaacagaagtttgacgatatacctcgtaaccgtagcacaccatctcgccggtcttggggtcaaacttcggatgcg

SEQ ID NO: 17409 - DNA, 1083 bp, Arabidopsis thaliana
acttaatcggaggatctcttgccttttccctcaagatcgaatatcctcctcttgatcaattcgtttactcactccagaagatctcagccatccatctcatctaccagacctaagaagatatatgaagatcacgccacaagtcaaaggagcgtcacttttaatgcccaacggctagaagacatcaatggtgacaagatcatggttctctctaatttatttgtttcctttctaaattttagacctttgctgcatttttctatttaagctttttgtttctctactttgtattcacgctttgattaataagaaaattcagtttgttttgcttcaatactttgtcttgaatcaaatcattgtttttgggagttctaagtagtttgtggaatcaaaccacttaggtttcgtgtagagtctctgatcctcgcgaggaatagcccttaaatcatattctctagccctcggtgttgtcgattcaacatcaattcggttacttcatcatcattaccacttccgcatagttttagtctttgaatcagtgagtcttgtcttggtggaatccggggttgcatcacgtcaggtattggtttcgttcgacacctacgcggtttttcgtctccggattttttcagctgcataaattctctctttttctccagaatcctccattatctccaaatgaatcccaaacatgtaaagacctgaaaagtactagaaaagactctaaaaataacaaattgactctaaaacctatacctatatcatagctaaaagcagtaaaaatagggttatatcagtatgcaacagggccgactctttccagaatcctcaatggacccatgtacctcgaagtcaactttgtgttcaaggatgccctatcctttcccttatacgttgatagtaggatttttgtcaattaatccctaaaacactatcttgtcgttgtagtattttaggatgtcaatccaattcggtgtgatgcaaacagatgagatatgatcagaaagctctaagtcaagccaagcagatagttggttggttctaacagtcctagtatgcaataacagaaatgaagtgaaattaaaa

SEQ ID NO: 17410 - DNA, 1420 bp, Arabidopsis thaliana
tccaatcattacgagaacatcgataagaattccatctggaattcgggtagaacgatctgccaacacaagagtgataaaggtaggctcaagattggaatacccaagatgcatagctattgaacgaggcatcaggttcacagtagaaacgagatcgcataaagctcttaggaaggaatcgtggttgatggtgacactcagtacaaaggttcctggatctggtagctttcttggaattcgttcctgaatgatatcgctgccttcctctgaaatcatcataataatgcattctttcgtcaaatccttagtgaccattgtcttaacataccttcttattgtgggagaaagatgaatagcttcaactagaggcatctcaacaatcagcttatcaatcatagccttgcatctgacatcatctaaggcttgccttgactttttaggactcttggggaaaggaattcgccgatttgctgacttggtttcagttggaatttgcacattatctgaacgatctgggtgtcgatcgataggggttgggtgacgatcgacaccatcaggaataatttcctcctcctccgcgaagttgtagattccactcgacaaaggcaaaacaaagtcgtcaagaataattggtgtcgatcgacaccctggtgtatcgatcgacattgagtctttttctgcaattggaaaagatgaagtctgagctgaacattcgcgctgaagtattgggttgagcagctttccgctgcgtagtgtgagtgcattgatagaggctgatgtaggtgaaagctcggatatatgagagcgtagattgtcaatcttgctatttagatctgtgtagagagaatcatatttgctatcaaacttatcctcgagagcttcgtttggcccgtaagaatctgcgcaagcatggagtcgagtctgctatctaatgagggtggagggggggggggcttggataggatcgatagaggctgatgtaggtgaaagctcggatatatgagagcgtagaatgattgaaaacagaaaaatactaaaattcaatagcaagtgaatgaagcaggtaagtaaacagaaaaatcaaatggatgagaaattcctaaggatggggtaatcgaatagtgtggtctccctaatcaattcagttggttaacaaatctcaattaagctatccctagacaacaggtgcaacaacagattaattcactcccgtgatagaaaccctcaagcatagctagacactgacctaattcccattagcgatctctaactaagcaggcaataagaaccgactgttaaagccaataactgctctaaacggtcaatcccttgggatagagacgattatcactagaattaatagatccaacgttctattaaacgccttctgggcgctggaacgtctgggatcggattccagttg

SEQ ID NO: 17411 - DNA, 1007 bp, Arabidopsis thaliana columbia
cacaaactttgtggttctgatttgtttgttgaactaaacaaacgtctcaaacggaaagcgattgagtgagagaagtgttgttgttgagattgagagagcaaacattgacattctttttgtcgcattccggcatgaagaatcacctgaaccggaaaaatagaattatttgaactgtaatcgaaccgaaatgtatttataaaccgtttgaaatctatgaaaccgaaccgaaataaactaaaaactgaaattagactaaaaatatgggaaatttgcaaatatgaccaacaaaagaattataattgcaaaactaacacttcaaccaatatgtattgaactttatgtaatattgacaaacttaacccgtgcgtgagcacacgctctagagtattgtgggaaattagatgatgggaagatgcgagatgcagctaaacagtacgctatcgaaactttcaatgcattgtctccaacagaacgtggtgtttgatttgtagatgtgtaatttatgttgaacaaacatggagtttcttttgtaatcagagaccaattgtattgaaattcaactaataactgtgatgtttgaatatttatgtttgaagtgaaatgtttcagtctattagcctagtgtgttgggttatattacagtgatgcaataacagatatgctgaactcctacaactacaaactcctataactccaaagtattcaactaataaatgaaatgtcaagttcttgcatatccttataacttaacgagtaatatcaacatatatactgaaaacatgacatcaaaagaaaacaattttagttgaatactttggatatcgacacgagctttttttatttgaatcttgcatatggttcggaatagtacagtaagtagtaaatagaataggataccatgcaaaactatttatgccgaagctgccatccacgatgtccgtttggctatataatcataacatttataaacgtgatgcttgcaggtagaagctcgcgattgactgaaa

SEQ ID NO: 17412 - DNA, 1122 bp, Arabidopsis thaliana
tcatctcgctagactgtcactcgacctgagtaaccgtcactccttccagctgagcttgagcttcgggtgagctgacccagctgattcccttatgatcctagcttagcctgcatgatttcccctttgtccgagcttatggccagctccttctcacttgtctgagactccaccttcttctctcggaccaagtcctagccaacgatcctattgaagatcgcgggcgatacaagtttggacagaggtacgcaacatcaacaacctgatttgctcctgtcagatcctaaagctacctagctcacaaacacagcaacaacagtgtactctctttgttcactcaccaatgaaacccacaagacaagttcttctttagttttctaatcttccacttttcacaagtaaagtggctaaccctaataagagaccaacacttctcttatatcttgtcttggaaaaggaggatgcttcactttatccaacaggtccaagagtaactcctcatcattttctagatactaggcccacgtcctatacctgacgacttcgtctcctttgtctaaagtgatacatcttttcttcactccaaccaacacgccacgctggcaaaagcaactgctacttccccgcttcctctgttctgctctgtgttgcttcagacatgcctgttgaactttagacactctgtttcttcaggttgctcctgatgctacacatctttatgtcaggaaaactgctggttatcatagtagaactcaggtaatgcctaagtccttgttttgattgcttagccggatcatattgtccatgataagatcattggttttgaattggttgcttagccggagtaataagccttttgatcattctactccagtttatgcatatgattatggcctcttgtgattttgtgctgctgaaactttaccttatcaaagtttgcgattttgattgcaggaataactgcggcgtcgaggatagcagcggagttggggatccactaacacatcgaggtgttgcaactagtgtaaggcttctcattggtcattcaaggaagggagggacataccctctgtttgttgtagagaatgcagctgacccggatacaacacttgtcgttaatatggg

SEQ ID NO: 17413 - DNA, 677 bp, Arabidopsis thaliana
atttcagtcgaagaagtcccatgattatccttgtaaataatttttagtttcttgttatttttgatttgttgtgtttgtggttctcagaaaaaaaaaaaagggagtaacgtgaagtcagagtacggcttcatgtcgatcatcccactcaagtccccatggtcgaacgctgtttcgacatccagttgctccagttcaagatttttttgagccactattgaaagtaggattcggattgaaacgtgtttcactaccggtgcaaagatctcaagatagtccacgccttctctttgagcatacctttggcgacaagtcttgccttgaaccttggttcttcaactccaggaataccttgcctatacttgtatatccatctgctcacaatgattctttgtttctcaggtcttgtgactataatccaagtatcattcttcagttgagactcaatttcttcattcatagcaagtttccacttgtcctagttttcatctctgacagcttctttgtaatctgccggttctattgcatcaccatcttctgttgtgtatagagtttctgcaaaatagtcctcatcatcaaatcttcttggtgctctgattactcttctttctctatctcgcaccagatgagaactaagaggagattaatgtacatcagtctcttcaatatcatcagtttca

SEQ ID NO: 17414 - DNA, 770 bp, Arabidopsis thaliana
cagtgtgatctaaaggataatgttctacttgctgaagaagaaagtgaacatctgctctctataataaacgaggaaccttgggattatgctgaagcaaaagaaacacgagagtggagagcgtgtgaggacgaaatcacatcaattgagaagaacaagacatgggatttagtggaacttcctcaaggagctaagccaattgggctcaaatgggtgtttaagctaaagaagaacgcagacaggagcataaacaagtataaggcaagactcgtggctaaaggttacgtacaacgacatggcgatagactttgacgaagtcttttcccttgtagcacgaatcaaaacagtccgcttcatcattgcccttgctgcttcaaacggatgggaggtgcatcatctcgatgtcaaaacatcattcttacacggtgaattaaaagagacagtatttgtttcacagccagaaagattcacagagaaagggagtgaaggcaaagtatacaaattgaataaagcactctatggattaagacaggcgcctagagcatggaacaacaaatttaacaagatacttagggaattaaagttcatcaagtgttctaaagaaccatcgctctatcgtaaacaagagaaagttgatcttcttttagtagcagtgtatgtggatgatttgcttgtttcaggttatagcttaaagctcattaatgatttcaagaagggaatgtcatctaagtttgagatgagtgatctcgggttactcgacatactatcttgga

SEQ ID NO: 17415 - DNA, 524 bp, Arabidopsis thaliana columbia
tggatcagcttcagggtttagagtactgtattgactcaaaccctccatggggtacttagccttgaaaccattctctgtactttattggttgacttttcactttccggaatcctgatgatgatcttattgcaggagaagctatagctttaggtttcgagcattacattctggctttaggaactgcagtgatgataccttcaattcttgttcctatgatgggtggagatgatgtgagcattatttcttacattcttcactgtttcttaatccaacgaatctctgttgtgaattttgcttgtctgactgagattaatgttcctcccaaaaacaattgagtagggtgataaagtgagagttgttcagacactactgttccttcaaggtgttaacactcttcttcaaacattatttggaactcgtcttccaactgtcattggaggctcatatgcattcatggttccaatcatttcaatcatccatgactcttctttgacccgtatcgaagaccacaattggtatgtttg

SEQ ID NO: 17416 - DNA, 845 bp, Arabidopsis thaliana
cttaacgacaaataacaatcactactatgttctaaatggcttccaacaacgagtaaccgcagatatgaatgcagacctaacaaagaagattaccgaagaggaggttaaagaagcagtcttttctataggcggaactaaagccccggggtctgatggattcactggtgcattttatcaccattactgggatgacatcaaacaatctatcatggctgaggtacatgacttttttgagaatggcatttttgataaatccatgaaccacacaaacttgtgccttataccgaaaccagcaagttctcgtcttctgagtgactacagaccgattgccttatgcaacgtgagctacacaattatttctaagattctggtggcccgtctgaagaagcacctttcaagtattatctctgaggaacaggcagcttttattccagggcgtgtaatcacggacaatgtcattattgctcatgaggttatccacgctcttaaagtgaagaaaagatgctcaaattcgtatatggccatcaagacagacatcacaaaggcatatgatcgtctcgaatgggatttcctacaagccgcaatgttcaaattcggatttgacgttcgttggattgaatggattatgacttgtgtcagaactccaaccttttcggttaatatcaatggtgctccttatggattcattcagccggaacgaggcatacgccaaggcgatcccctctccccttacctctttatattatgtgctgaggtactaagtcatatgatgaaaaaggcagaaactcaaggtctcatcaaaggaatcaagataagtaataaaagtcatcaagtaagtcactact

SEQ ID NO: 17417 - DNA, 442 bp, Arabidopsis thaliana columbia
cagagagatctctcgatgaaaaagttcgactgggaccatcctcttcacttgcagccaatgagtccaaccacagtgaaacaagtgagtgtgacttgggacgcatatgaagctacaaaagacgcacacgcggtttgcgttttgactgagtgggacgagtttaagtcgttagattaccagaagatcttcgacaacatgcagaaaccggcttttatcttcgacggaagaaacattatgaatgttaacaagttaagagagattggtttcattgtttactccattggtaagccacttgacccatggctcaaggacatgcctgcctttgtctaatcacaaggcaaaacctggttgattcttgtgtcttacattcattgtttgtgcttttttgctttcgctttcatataaattttagtctcaagattcgatttgtgaagtcttgaagagt

SEQ ID NO: 17418 - DNA, 701 bp, Arabidopsis thaliana
ggtccaacaccatatccaccatgcaaattcttctctcagcagctctatctctgagtgaacagcttctctgctgataaacaacaaggagcaacaatgaaaatactagcttactagggttctaataacactaaactatgccttcgaaatactcttaacagatttaagtttctcactgaatttccccatacacagagctttagaaaaatgtctcctgctagatattgtgcagaagttcaagcagcaggatgtttacatccttcacaaacattctgaaacataaaatacaagaatccagccatgaaggtgaggtccgagtacctcttcaatcatgttgacttcatctcgtggcttcactgtgagtttgcagtcagtttttggtttcaccttcttagcttcgcgttttgtctcttgctagatatttggcaaaaattcaagaagcagggtgttaatatccttcacaaacagtttgaaacaaaaaatagaagaattcagccatgaagatggatttgcagtacctcttcaaacatgtcgacttcacaaggcttcaccgtaagtttgcagtcagcttttggttttacttcttagctttgcgttttgtcttctgctagatatttgacagaatctcaagaggtgtttacaccttcacaaacattttcaaacataaaatacaagaattcagccatgaaggtggatttggagta

SEQ ID NO: 17419 - DNA, 542 bp, Arabidopsis thaliana columbia
taactcatgcctttctttgtttattttccagtataatttggacgctagcttttcacatcaccatgcaatgcaatcttttgcagttagtcatgccaagattgggttggaggtggttacttgcattctcttcggtaccttcttcgttacttcttctgttctataggtggacatctgagtctcctcggtacttaattctacaaggccggaaagccgaagctcttgccatattagagaagattgcgaggatgaacaaaacccaactacctccgggtgttctcagttcagagttggagaccgagctggaagagaataaaaacattccaacagaaaatactcatcttctcaaggctggagaaagtggagaagcggttgctgtgtctaagattgtactaaaagctgataaggaaccaggtttctcattactagctcttctatctccaacgctaatgaagcggactttgctactatgggttgtgttctttggaaatgcgtttgcttactatggcgttgtccttctcacaccgagctgaacaattcccata

SEQ ID NO: 17420 - DNA, 1612 bp, Arabidopsis thaliana
tttgcaagaattggccatgtttgggcctggatcggtgttggcgatggaaatccagcagaaagcaactgaaaaacaaagacaaaaacattagcacaccatatatgtgaagaacctacgccactgataaagttcattataaaactgacctctctaaggatttcaggtgggagaccactagattcaaatgtgatgtatggtgctggaatgttctcgccctgcgcaacaaacgattaattattaaaggccgtaaacagattagaatacatgagaaagtgcaaggtttaacactattctaaaatgctattacttattccagttgaagttcgtccaatcccacattctcagtagagttttatggacaaacattcactgaaacaacaattgcaaaatattacagcacattatagctttaaaacattaaactgacaagttaagcaaaggaattcaagaaatatgaacttacagttgttgtgacttcatgttgttttcggtatatttcaacgggagagagatggggaacatcaggagatgtgacaaaatgaggccgcaccaaggatttatttggaaaagctggaccagcgtgtccatatgttccatgccctgtttgccccatggcgggatcagcatttgttggtggaccaccacttatccttatatcctgcatagcattttattaaatacttatttttcgtaagaaataacagtgaggcagaaatatttaacaagacagataggagaagagatcatctgcagctaaccttaggcattgctgcaggatgaagtggttgggcacccctaaccggcacttccattctcatgttaacgtacgagtcattaccaggcctagattgtagattattctcataagtattatttgattgaaaggggaaacgtgagacttctggtgcaacattgtctggtccatttgatttggcgccctaggtccaagttgctggtgaattaggttcgcccctggctgttgaaactgtgtgactgcagcatttgcttgaggtccattgcatttctgagccatagccaagtttgcattcgtcttttgtgatgctgcattggcttcaaagtgggtattttgagatggtgaacgttcagaatttggtaaatggggttgagaaaacccagttttcttacccccatggaactcatccccctccctcttcggagccaatgagttgtactcttgctggctcggaaactgctgaccatggggaccaccctgaggtgtctgatgtgaattttgaagtccttgcgtttgcatgtgaggccgaaaacccatgtaatgttgttgtgaatgagcatactgatggctcagctgctgaggcatttgtgaatgctgattctgcatcccttgctgctgctgctgcgtcgttggctgataagtctgtacagaaggatgcccatgtgggtgcggcaccatcgattggctctgttgttggggaaactgttgacctgattgttgaggcatttgctgggccggatgctgctgcatcatttggggtcttacatgttgggatggaaattgctgtggctgttgttggaaaccatgctgctgagacacatgaccaactggttttgcttgttcatgctgagcttggtg

SEQ ID NO: 17421 - DNA, 647 bp, Arabidopsis thaliana
gaaactacccttccccctatttccatggcccttctctcagttttcccgcgagaaatcctctccttcttccataatcatcaaaaacaaaatgcaaaaacccaaaaaaacaaaaaatcacacgacgcaaccacctagcctctctgtccatcaatctcaatctctctctgtgttaatgcggaatccgatttaacaccggaatccgccatggaagatgaataaaatccggtctctccgctgcctcctcccggagaccataacctccgcctccaccgccgcctcaaatcgaggatctgacggtagccaattcagcgtcctatggcggcatcagatcctggacccggacagcaacatcgtcacctattggaaccacgtctttctcattacctcaatcctcgctctcttcctcgatcctttctatttctacgtcccttacgtcggtggtccggcgtgtctctccatcgacatcagcctcgccgctactgtcactttcttccgtacagtcgccgatatcttccacctcttgcacattttcatgaaattcagaactgcgttcgtcgcgaggagttctcgtgtttttggtcgcggtgagcttgttatggattctagagagattgctatgagatacttgaagacagatttctcattga

SEQ ID NO: 17422 - DNA, 550 bp, Arabidopsis thaliana columbia
  unsure (1)..(550): unsure at all n locations
nnnnnnnnnnnnnnnnnnnnnnnnnnnnnatccgcacgctgatcacgcgcagatccagggcaataactcatagagggcgagcgcgcacataccgtgacgtgccatccagtccatttcgccgtggtattgtttgtccagccatgcttgcagtttgggctcggactcgctgagatcggtatcggtaatacctacctgctgaaacccagttccagcccccactgtttaattttttgcgctaactgattgagatcgaggggctctgacatgacggaccatacaatgaagaaaaaccccgtaagtataccacacaccgtctggtacgccgacgatatccgccgcggagaacgcgaggcggcagatgtgctggggctcacactctatgagctgatgcttcgcgctggcgaggccgcattccaggtgtgtcgttcggcgtatcctgacgcccgccactggctggtgctgtgcggtcatggtaataacggcggcgatggctacgtggtcgcgcgactggccaaagcggtcggcattgaggcacgttgttgcccaggag

SEQ ID NO: 17423 - DNA, 512 bp, Arabidopsis thaliana columbia
aatttccctaaagatacatgtagtataaaccataatttccattaataaatgtaaaaccaccacaaattcatatggcagcgccgccgccgatcccccgtttccaggcggtaaattctgagacatagaaacgtcaattatcgccgagtcaccagccacgtcatcgtttggatccgatgatgtgttatattccgattctacccttgtggatcccgaatattccattgttgtcccttcctcttccgaagcgtggcatctaacttccacccaaccatctgactcccaaattactcctccggtcgtcgccaaattacaaattattgccttcgccgcgtcttcgaattctgatctccctacttcctcttcttcttcttctaagtcaaaccccgagttgacccagtcaagtacgcaacgcggagatgactcagtcggagatgagttgtgacactgagagagaaatggatgctgcaaaagctgatcgcaactccacctctgattcgggtctcgcttcagac

SEQ ID NO: 17424 - DNA, 855 bp, Arabidopsis thaliana columbia
tcatcgaacgatgattgatgactatggaacgaaactcttcttgacaagatagaaacgaatcaagaagcttcccaacccattcgagagacagtagatcttcacaactagacgcattgagatcgataaacctctcagcaacttttctctgaaacgaaacaagctctgcttccatctgagtcaactcgggggtaaccgtcgttgactcaaccgagttcaccgccgtgtctcgccgtaaattcagaaaagacctcccgaatgatctttgatattccgttgctggcatcctcaaaatgaaaacacacagatgaaatatgtgatcgatcaaattcgagagaaaattctcattcaccggaaataaaaatcgttcctttttttctgaatttgggagcagagagagtgatgatgatgatgaaaattaaaaaccctaatgagaaagagattgtctttatattgatagaattgagagagaattttgaccgcgtctatttttttttagtatgtaatttgtgataaatatggaaaaaggatttggactaaagttttatttttttcattccaacgaaaaagatctcttttgtctattttgattttgtttatttttaatttcatgcgttgttactcgtccgaaacacgcagcttacacgtaaattaataatataccaagtaggagaaataaaataaacataggaagatgaataaatctcagccgttggattaagaagtgattcgcgcagacatatatggctgtgagaagagacatgacagcacgtggaagatgtaagaacggaggccacgtggcgagacgtgagatggggaggagtgacggagaaggtgtcaatataacacagctcagtc

SEQ ID NO: 17425 - DNA, 515 bp, Arabidopsis thaliana columbia
tgagacagccggaagcaatggtggcagtgatttttgaggtttttgtagaccaagaagactgtagtttcactaccatcacgaaaatccacaatagtttcctttgtgaggggttggagtccatccacaaggactctgagtttggctgcagaagaggttatttccatgtctaagatttcacctagttcctctccaatggtctttagcatttcaggttgccaaaagtgtttgggaagtccttgaagctctatccagaaggggatcttacaagggaatgactcagagataataggttcccaacgctgcaaaataaccatccactggtcataatggtaaggtctgttatccaagactttcagtagatcctcttcatagtcgaacttgaactggaaacagccttttcccaagtctgagcctaaggctttgcatcttagattacatctgtttgataaaaagggaaacatagaccagaggcgttggacggaggggttagttagtcttccataagagtgagggag

SEQ ID NO: 17426 - DNA, 570 bp, Arabidopsis thaliana columbia
ggtgttgagatgatcaggagagacctattaatgggccaatggacgccatatcttgaacgtgcagttagcttgaaaccttgctatgagggtggcatcaatggtggtgaggtagatgttccatcttgttttcatttatctctgaacttgtaagattctgaaatatattacggctttacctggaaccatacgtcatgtgttctaacttttctttttgcacactggtgtaatgatagattgcagctcacatcttacaggagacagccattggaagacactgcgcatctgataaggtaaatcccatatctaaatagtaaaatcttattgtttgacatgaatcatcgagatagtgtgtcatcaaaagtatcttgtgtagtgtgtgtgggatcatctgatatcttatcagcagaattcttcttcacagaaaatttttcagttgggtcttatgtttgttacagttaagtggtgcaagaagattacgtgatgcaattatcctggggtatcagctacagagagtccctggaagagacattgctattccggagtggtattcaagggctgacaatgaactag

SEQ ID NO: 17427 - DNA, 444 bp, Arabidopsis thaliana columbia
gtcgtcgaggctgatgtttgggtctattgcgtttttgaaggcattttcgtctttgctggctgctacccgacggaaccatgtgactagatggacgctgtcttcgggttgcgtctcgtctagggctttacgaccagtgattagctccataagtatgaccccaaggctgaaaatgtctaccttggtcgtcactcttcccgtcactgccaaaatcagagtatagaacaattgccaaacgatcaaaggatgaaactataacatttaggaaaatgcaataagatcaaagcatgaaaatttaagtgcaaaacggccaaagtatgaaactttgacactgggcaagtgcaaatcaattgaaaggcagagactttaaaatttgggtaagtaaaacctgcgtattctggggcaaggtatccgaaagtccgagctactcgagtctcaatggagtat

SEQ ID NO: 17428 - DNA, 528 bp, Arabidopsis thaliana
tgtcgccactcagctagttcctttgaagcaagttcctctgctgacatggaacacaatcgctctgctgcaatttctccatacataactttttccctgagtttaggattactcttgtctttcaaattgaacaagagagaccttcctttctctttatatttcttatttacaccaccaaataacttaaagagttctgtctctatttcaaatgccaaaacttgtggatccagtaacaatttttccaggctcccatcattagccattgcaccaatcatttcattttgacaattgacagtaaactcaatgtccgactcgagagcccaagagaggtcattcccttgcaaaagatcatcttttgaaaacacattgtcactatatgacacattgtcttgcacaaacggttttacagcctcaggtacttgggcatcacttgtcttggcgatagacaaaatctccggtaacactgtctgaacagagataccgcaacaggactaggatcctgagggtcacattcagtacttcattagatac

SEQ ID NO: 17429 - DNA, 610 bp, Arabidopsis thaliana columbia
ggaaaatgagggtagcaaccttgcccattctaactagagaggtgtgacttttataccaggttttgtggcgtctccaattcttgtgtgaagcgcaatatagagggagccactgaaaatgttaccgccccgcgaactgaaagtgtgagaactacaggacaatctaaaagtagttcaaattttcaaaagagtacagtgccgtcaaaccagggaaagaatttccagcactcaagctctaatgttggccatcaggctaagagtgaatctattgctgctccagctaaaaatcagtctgcgaaatcctctttggataaagaaaaagcttttcatgtgcccgctaataaaaagaatggacagggcgagaagagcgtgactggaactggtggtttgttgaaaaatatgtggggccgtgtgcctgtgaaaacagaagatgattctccaacagtagatgtgaaaaatcatattactaatcattcgggtatgtttctaatctatccacttggtactacaatggcttgggttacttggtgctgtttgactagtttgtcactataaatgtatgtattggtcagacccaaaaccttctcagatgtgcaaaagggagcacgatgat

SEQ ID NO: 17430 - DNA, 606 bp, Arabidopsis thaliana columbia
  unsure (1)..(606): unsure at all n locations
ttgacgactacataaacagtcgccacttgtagtcgtaataaccgtggaattttcttgtagtcaggcttcattacatcatgtgtttgcctcttaacattctgaaatcattaacacgctactaatttcttctttcaaaagtttcctcgctctattttcttcgtcagcatttgttttacttgctagaaaaagaatctatttttttctaagtgtttgttgtatcgtttgttttatgttctcctatcaatgggaaactgattttaacaaaccaaagacggttcaaaaagactaatacaactttctcaaaaatttgcaagctacttgagaaaacaaaggaagtaaaatcccatgaaattttgactttattaatttaaggttttatgataatagagatgaaacaacgaaactagacggtggttcaatttttcttccaagaaccatactaccacagtaatgtcaattacgaggaaaaatagccctcgttatctcaaggggaccattcgggtgattgacgacgaaaaccttgaccttagtagagctagaaagcttaagtttgctgtntttgatagtggtgaatgcgcgacactgagggattcgtcatatggaatt

SEQ ID NO: 17431 - DNA, 602 bp, Arabidopsis thaliana columbia
taatatttataactctcttgatacacaatctcatctcgtataatcttttaataatgtaaaccaatttttctggaaaaaaaatatatcatacatgatacatctcaacatcatttatttattactcgaaaaacactatcgatgcatgtttggacaactaatcccaacaaacacataattgtactactcaataatagaagtagggttttaaatacacgaattctcattttacttcattaaatcatatcaacacatttgtttgaactgcaatataataatgaaaaggttgaaaaatttatttttgataagcctggaaaacagtgtaaatagtctggataacggacaagaccaaaagaacaagagcagcaagagcagagacaaaagaccaaggagagttaaagtaagtgaatttgaaagtagcccattccacgtgccaactactcttgtaatactcattcacttcttcaaacaagtctttgagataacactgtgttatgtcgaacgccacatctctgcctaaactgttcacgaatttcgccagctctgtatctgtccgaaatagtttctatgatgttttggcgcatagatctcaacgccttgtaagt

SEQ ID NO: 17432 - DNA, 501 bp, Arabidopsis thaliana
actttcacattctccggcaactcaatccgccgcaaaaactcacttccaccaccggaaaaagcttctctctccgccacgtgccacaccaaattctccttcttctcttcctttattccttctcctcttatactcaaaacattcccttcttcaatctgtactttgatgtcttctttgttgtaaccaggaacgttgatcttgaagatatgagagttgtttgattccatccaatcaatcagagccgttgatcttgaccattcttggaatcttctaaatggatacaagaatattcctctgtctgccatattcttctatctttcttctttagctaagcttgttttctagagatgtgtatatatgtttgagtggaaagtattttatacagattacagaagtcgagacagttcttcgttatcttgtttcttcttcattttctctgactccagaactttggagaacccagggggttgttatatgctacggtgcagtgtatattgatatgat

SEQ ID NO: 17433 - DNA, 577 bp, Arabidopsis thaliana
tggtcaatacattaaggaaagatggaatagtctttcttatagtatatacggagatcctgatagacttccaatcggagttgttgtcgcacctgtggaaacctctgatctgtatccgctggctagtttctctggtcttatctcttccaccattctcactacctcaatcatgtttggtctcttctctggtaatctcgctgtgcaaaccataccaacctgaagcatctccaccatctcttcctctacttgggtacacctcaaaagctcctcatcaaacacctctcctgtccattcttctctaaccaccgagttcacccacctcaccaggtttgccacttctgattttcctgttagtacctcgaatatcaatatcccgaaactatacacatcagacggttgagtcccttttcttgtgtctgttatctctggtgcacgatagccaactgcatgccgcggtaatgaatgcatcagtgtagccattcctgttccagatatgcagccatatcctttcccgttgaggaaaatgtttgaggattttatgttccgtggactagtttactccgctttgtgagtggatatg

SEQ ID NO: 17434 - DNA, 1144 bp, Arabidopsis thaliana columbia
acttctttccatggtcatacaataattaacaaaatgtatgtgtactatcttcaatatacacaaattactatgataactggcatccaaacttcgtagtattaaataagcatcagggcatcaatatctaatgtcttttctgaataaaatattgaaaacgtacgtaggagtaccactggagagagtttatatgagtaaatgtgcctctccgtaagaaacaagttgcattactaataaatctatgacaattatctgtcacatccaatgacaagtcgcatatctcacccgtctcagagttcttcaagattctcacaaggactcgtctcatgaacaaatgacatgcctctcaccaacctaccatttagcatttaaacacacatcttccattttagataacccgagcccatgagcaaaacaaacaatttcgacctacctgtgggcatgggtgcgacggcccgaagttttttttttccttctgaatatggaccaactgaaaaaaccgaaattcctttgatcctcctgtgtatatgagttctctttggaagatcactttgacccatttggagacctcagcgtagtgcaacttgtgcaggagttttacttaattccaaattgagtgcaactaacggtgagaaaaaataaaataatcgtaaatttcttaattactcggaaaaccttgaacctaatctttgatcattaaaaaatagaacagtggcttaaaaaagaagtcaactagcctatgtcaactaaactgctctaccacattgtagtagtttctgacgactgagttaaagttattattcgtaggagcgcaagtgaacaaatgtttatatttttgtaaccacaagtgaacaaaagtttatatttttgtaaccacaagtgaacaaaagttattattgatctgaaatggtctaacgacaatttctattttgtaaccactagacactagtaatcaaaatgttcttacttatcttccaaacaatgctcgggaatggtctataaagttctctaaatcctaacctttctcaagaaaacaacaataaaacaaccaagatgtcttcatcgaggccagaacagctagtagtccaacattttcccatatccatccattaacgaaggttgacggatatggtgagttccatgcgat

SEQ ID NO: 17435 - DNA, 726 bp, Arabidopsis thaliana
  unsure (1)..(726): unsure at all n locations
tttacgtcaaagtctctgcaaaggcaatcaaggaagtgtgagaaggaagagaaagcagagaaattgaaggtgaagaaggctatcgagaagggtaatatggatggtgctcggatctacgctgagaacgccattcgtaagcgtacgnngccgatgaactatctccgtctcgcttctcgccttgacgctgttgttgctcgtcttgatactcaggctaagatgaccaccatcaccaaatccatgaccaatatcgtcaaatcccttgagtcttctcttgccacaggtatttcatcgtctgtgaattatacgaattatcttcgataggttggatatgtatgatcaccatggtttatgttgtattagttaagagttaagagatttgtccaaaaaaaaaaaagttaaaagagttaagagaggtaatgtaaacttgaaggatgattctgattatagatcaggaaggttttgtttatatggaaatatatgaaaggtttcatctttagttcatttgagcacaaatgtaatttgatttcttggggctgtttacaatattggttcttatctgttttctgtatccttcaccagggaatctacagaagatgtcagagacaatggattcattcgagaagcagtttgtgaacatggaggtccaagctgagttcatggagaatgctatggctggttcaacttcattgtccactccagaaggcgaagtcaacagccttatgcagc

SEQ ID NO: 17436 - DNA, 1137 bp, Arabidopsis thaliana
ctattttctaaattttaacttttaattattaaaacagagaatcatgagataggagaaaaacaaaatcaactgtaaaatgcaaacctaacttacataatcttttgaatgaaattttattaagacgcaaaacattactagtatttcgcattgtaatagtcatttttctgcaagttgaccaaacaagagtcatacttctgatgcaagatacgaacaaagacttcaattataacaaaacattctcatacatctcatctctaattctatatttgttttctcgtagttattatcttccaaactttaatattcttgtcaatgagggtactagatgaaaatgacgacattctatggtcatttgattcccgtgaacctcatgtgaccttgttaacgtacgtgcacgcacacacaaaccctcgcactgattgacattctcccaatctttctttataaaacacacagacaactccataatattaataacccatatatacttagcttgctggtttccttggcaataatttatataattctacaagtttaatcgcctaatcggatttagtaaatgtctctcttacaggtctgaaacttcttccacttcatctatttaatgttattttgcttcttcaatcctgtttcctcacataattttgcctcataatgttttcaggatttttggcagtttcttcgaccattatcatctggtttgacaggtattgtcacttcaaatctcaaagcaattacttcatttcgctcttaaacacacttaaatgcaaattttgagattttcttagcaaagttaactcaatttatttttgcatgtaacaaaacagagtcgttcacaactagctgtgactcgggcgactcagacccgtgccgagatgacgcagctgctcttaccctcaagttcgcagctatggcgtcgatccttatctccggagctgccggagtctcgattcctctagttggaaccctacttccgttaaacggtggcttaatgaggggagccaaagcgttcgcagcaggagttatcctcgcaacagggttcgttcacatgctctcgggcggatccaaagctttgtccgacccatgtctgccggagtttccatggaaaatgttcccttttccagaattcttcgccat

SEQ ID NO: 17437 - DNA, 570 bp, Arabidopsis thaliana columbia
aattatatatgtgaaaacgcaatcaaatgaacactcatacgataccttcatggtgcgtagggcactagcgttgatgttatggaaaaaggaagtgtacttcaaatgcctggactccagcccacagctgtagcaattcagttgctcaaaaatatccattccaaacaaagaatgggcaatacatgtgcggttggcacagtcccatgaaccagtacagttgctgtctgaggaatccacatcagacacgcttgaactttgagcaaatgagcgatgaaggcagtcaaagatcacagccagtacttctgaagcatcgttcatctgagcctgtccaccatatgacgcccaggattaggctaattaatgaaatgaaggtttacattgtattaggataaacatttaaaaccagtaatcaaattcttttacctcttggaagaaactactatctggatacaaattacttaaagcaatcctgagagatgaaggtgccacaggttcattttgttttcacttgaagcagcctcacagcggtaaagatttcatcaaagagcagcaacacaaggatctccacgtgat

SEQ ID NO: 17438 - DNA, 661 bp, Arabidopsis thaliana
tatttgcagcatcaactaagttcctatacataaatgtgtaacaaaaacacgcattaaagatcattttaaaaccagaaccttcaatgagatatactgtagccaacaaaacttaccctccattgtccaagatatgaaggtcaatgcgaacagaccaaaccatctttccagctagaacgcagagtgactctgtatctactgcacggctttctctgcaatcaacacaaagaccaacttaccattactccaaccagaacagccagcaatactcttgcagcatcaacaaagtttgtccaaaaaaacatttaccttagaccacgatcgataatgcgtcccaactccactgcagattcgccaggacgaccaggctcaaaagacggatcagccattggagaaaattccgtgaagatcgagagagacccttcattaggtctgtctttgtaaggttgtaccaactgagcagtcacgaaacccattacatgagtctgaccaagttgaacttccgagctaccatattctctgttaattcaaacgagattaaaagctgtctttggttacaaacactaaaagaaaagcatgctagtattcgttctaacagaggtaatagactgaacaaagttatctacattcaaattttatcacaaaactcgacaaagagggaagc

SEQ ID NO: 17439 - DNA, 494 bp, Arabidopsis thaliana columbia
gtgtttcatcggttgacaactcgggttgagaaccctacctattagactgagcttattcctttcacacgataaaaattccggcaggtccggcatttcaaaaggctcgtctttctcttccagcgacatctccatcaaggccctatccattgcagacgacattgcgacgacagcaaaccaaaacaaggagaaccaacttcggagaccggaaaaccagaacgaaaccacaagaactcagtagaaacagcttgaaaatcgaacttgagagggttgaacagtgaaaaacggctgaggggaaagagaatttccagactgaagctctattctaaacctagtgaaagacactaagagagaaagagggttttaagcccaaaagagagatttcttgtccatagtgaatatagttaccaaataatataatgatacactataatatgacaaatcacaatttatatctttatgttgttcgatttgtgactacatattcgtgtttgaaa

SEQ ID NO: 17440 - DNA, 808 bp, Arabidopsis thaliana columbia
aaatttaagaatattatttatctatggaaataacaattccgtgtcatttataacaataaattatttaattcagttagttttttttctaataataagttcttagcatcactttctattgatctatattttgtatcatttttaaaaatgatgttaataaaaataagggaatacaccggttatcttagttgatgtaaatacatatttttgtatccattttctgaagtgatgcaaactaatacaaatttgtatcaatttgattaaactgacactaaacaaactaattaacaaatcacttattagaattgatgttgaattatttattttgtgtcatttgcttataagtaatttaaactagtatcatttatacttctgattctaattaattgatgtaatccatcacttttttttgtagtgacattagctgggtgcagccgaaaagattttttttttttggtaaaaaccgaaaagattctttgctacaagctttgatgtagttgagttgtggtatgtttttgattcttgcacaagtctattttgtccagttcatttgtggctttctcaagaatctctggatgattcatcatcggcgctatcgtccactccacgttattcatcgtattgtcagtggttgcaatatttgaagttggattgttttatgagatattaatgttataaatattatattttggaatactttttgaaatgtatttggttcacttttagggatgaatttttttattcacccgttttttactaattagaatatgcactttaaagaaaacaaattcatttaattgtaaatatgata

SEQ ID NO: 17441 - DNA, 572 bp, Arabidopsis thaliana columbia
tgattactccggaagaaaaatccaggtggttgaggtacagcgagggcgatcgagctagtagtaagcatttggacgatcgctgacatggttggacgattttcagtatcttcttggacacataataaggcaatatggatgcatctaattatttcgtttctttgataactatctcgaaaggaagaatccacgaggtctagtggtgacccgtcactccatagcctccaagtctattgaacaatttaagacttatatgttatgaatgtttagtagagcaaaaaagtgtaagtgtttattatactcacatatgtaaccaagtttccaaaactagcatccatctgatagaggctgctatttttcctcccgcttataatctcaagaactaagacaccgaagctatagacatcagatttcattgaaaattggccatacatcgcatactcgggagacatgtaaccactggcacgatacataaatgtttgagttaatagagaatttttatatttcatagatggcaagaccagaacttactaggttccaactactcttctcgtatgggcttctgtttggtctat

SEQ ID NO: 17442 - DNA, 500 bp, Arabidopsis thaliana columbia
cgcgtctttcttgagagaaaatccgctttgtaggttaccaatcacgtcttttggcgcaacactagatggaatcctaagtcgaatgtccatggcctgccacatgacggcttgccttggaattaacaagttagagcgtgaggagtttctagcacatctccagataagtgacatgatagcttcaacacgtgtaggcacagggacgctttcgctagcggccttgtgtttcagctcagcaatcttagaaggttcgaagacgaatcttttgagtacgtatttacttgtgatgttagaatcggaatccgttgatgggaactgttcatacatatgagaaggaggaggaggataaatagtcgtttcagcgaactcgatagtactgtttgacttccgtttggccgtggtggtacccagtcttttacaaaggtaccaatgaggctatatcacagattttgtgagagacagagacagaaacctgcactcctgatccagcccgaagaaagtga

SEQ ID NO: 17443 - DNA, 582 bp, Arabidopsis thaliana
tgatttcttctttttgttgttgtagtcagaagaatgatattatctcacaaggtggtaacagaggaagaactctgaagctgcctcttgacaagatttgtgtagattccattaaggctgagaagctcatcatgagtgcctttctcagccacctcaccatctgatataaccgccacacagtctgcagtcttgaccgtcgataacctatgagctatcaccaacaccgttcttcccgccattaacgagtccatcgcatcctgcaaacagattcagaaaattaggataggagtaagattttttctatgtttttgagtcatatgagttttgattccaaagttatgttttattacctgaacaagatattcgctttcagcgtcgagtgcactcgtggcttcatcaaggagcaaaacactcgggtttgtaagaagcgccctcgcgattgcaatcctttgcttctgtcctcctgagagccgtaatccacgttctcctacaacagtgttgtacttatccggaaacgcttcaatgaactcgtgtgcattagcaattttctgacaatgtttcattttgattcaatcagaatggttg

SEQ ID NO: 17444 - DNA, 616 bp, Arabidopsis thaliana columbia
cggggtaaaactgagaaatatgaacttgatgaaacttgtaatccttgatgagttcaactgtctgagaaaaatcttcatcggtttcacctggaattgggaaagtgagaaacatatcttcaacacagcccaattatatgaacaataattatcctcaagtctttgttgaccatgtaactatccacatccaactaatacatgcgactaaagtgattttgcatggcggtatgatgttttttatgtctcaacacttaaatgaagaggaatatgttaattcgaagaaaataaaagaccaataatacagacttccatgtttatccagcactaaccaggaaaaccgcatattatatcagtagcaatttgcattcctggcacaagctctgttaaggtgtctaccacagtcctgaactcacttgctgtatattccctgttcatggcctgcaaaatatattcaggtaagactagaaaagaatttggcagtcgtaaacaactctggactcatgactcaccgtcaacacagaatcgctaccagattgcacagggacatgaagaaaggtgtagacacatgggtgacgtacactgccgctattctttcaaatgctctaaataaagggaggat

SEQ ID NO: 17445 - DNA, 606 bp, Arabidopsis thaliana columbia
gaagcggaagtggtactcacagtttctctgacattgatcttcacccagtctgcagggggtccaacatctataacctcggcagttgacctatcaagccaaaaccatattatcaatcttttgctctgattataataaacgaaatgataagacaagttacaaaattctctgtattcatttaatctcctgcgctatttctgaaatggcagttcttacaactaccacccagaaaacagtgcttgtgatctaccaaacattgacaatgcagggtttttcgatggataagattgtatggaattgcacatggtaaagcaatcttgcataagcaacacaaaaatacaggagatgattatctttcgtaactgtttttctgattcgtgtgaaaaaacaaggtccatgccggttgttgttttttgtttctgcacacctgaaaagaacatttatacacggtggcattaggtaatcattctgtaggtagtggagaacaatagccatcgcttaggaatattaccaatgtttttgaggttctgttgctttggggttgaatcaagccttctcctgaaaatatatgtacaacagaatcatgttgaagcgtagtttgtgcatggt

SEQ ID NO: 17446 - DNA, 674 bp, Arabidopsis thaliana columbia
gaaaacgggtacgtaccagagttagaagagatgctgcttgatctagttgatgatgatgaaagagaggctattgtgcatcagcatagcgagaaattggctattacatacgggttaatcaagactaaaccaggaaccattattcgtataatgaagaatctccgagtatgcaaagattgtcacaaagtaacgaagctcatctctaagatatacaagagggatattgtaatgagagataggacaaggttccatcatttcagagatgggaaatgcagttgtggggactactggtaaaatttgggagaggaaataaaacttttattgcttaagaaaatggatccactggacattataagtttaaagtacaatgttttcaactgatgctgagaagttgtgttgcagtccaagactgtcccggctctagcttgacatccccaagctgagaattaaaaatgacaaggaagagttataaacttttgagtctataagttttgtaaagaggaaagacttaagtgtaaactgatatacctttgcatttccacgcacacaaagtctctgtaacaagcctccatctgagtatgcgggttcccaagaccgcatccgaccaactgcattttcaaaaacaagtagtctcatgaggcacagacgaaacatagccctgtagaaaccatataagt

SEQ ID NO: 17447 - DNA, 541 bp, Arabidopsis thaliana columbia
aaaaaatacaaaaatatatatcgaggatggaatgaaataatttaattaaaaagagcacaaaaatgataatttatgatttcattaagcacatatactatatttcattcagtcaacttttgcttttaagattatagtattccgtaatgtcaccaatcgaagtaaaataaatatttatttcttagcaaaactaaagggagaaggtactttcttgtaaagcaagaaacctaaatcgcatttttgtaaattcttaaaacacaggttggtttagagatagcacacccgtacacaaagtacaaagtgacgaagtttatatacgcgacatccgatatccacgtgcctgagtcattcttattgttcccaatttcacgtgagggatggtcaaaggaatcaaattggatgggttaagtggcggtaacagacgaccaaggcacggcacttcttggtcggagagatacagtggtttcttggagaggctcagtgcaaccacttgaatgggtcgaagattcgagtttggtttagtcacgccataaaatctcggtga

SEQ ID NO: 17448 - DNA, 700 bp, Arabidopsis thaliana
tattcaacatttattactaagagctaaaagactttagttttgaccctccaagtcatacagataaagcctatttagatctttttcatattataatcatatggttttgaccaaaaaaagaaaaacttatggtaagatcattcatgagaggaaaaaagaattgcaaaacgatgaaattttttgtactagtgcttcttctggtgctgcaattcttctccaacaaagcactttctcagagtgaagaaggagagtttggttttaatggttacttgtacgacaactctggaattgcaattactaactccaaaggcttgatgaagctcacaaattcgtctgaattctcatatggtcacgttttctacaactctccagttagattcaagaactcaccaaacggtaccgtttcgtctttctccactacctttgttttcgctatagtctctaatgttaatgcacttgatggccatggacttgcatttgtcatctctcccaccaaaggcttgccctatagttcatcctcacaatatctagggctctttaatttgacaaacaatggagatccctctaatcatattgtagcagttgagtttgatacatttcaaaatcaagaatttgatgacatggataataaccatgttggtattgcatcaatagcttgagctcagagaaagcttctacagcaggttattacgaagacgatgat

SEQ ID NO: 17449 - DNA, 574 bp, Arabidopsis thaliana
cacgttaaaagatgatcaaggaatgcatttgttcacatttgatgagattagggctcaatgcaaggttagtgatgttcacacatagaattgttacacacaaaatataattttgttttctgaaaattgatagacttttcaattttatattactatcgattccttctaaattcatctcgagatcctagcatggtttaaattaatctcttacgcatatattatcttgtatgtaggaaatcaatcttgcaacaattgacaatacgatgaataacgtggagtggacgatcgcggagatgttaaatcacccagagattcttgagaaagccacaaatgaactggacataatagttggtaaagacagacttgtgcaagaatcagacatatcacaactcaactacatcaaagcatgtagcaaagaatcttttcggcttccccagctaatgtgttcatgtccccatcatgttgcaagagaagatactaccctcgcgggttattttgtcccaaaggtaaaaaagtcactgatatagggttgatgagttcgaagtagctcaaatattatagatattgaaaaaaaagt

SEQ ID NO: 17450 - DNA, 520 bp, Arabidopsis thaliana
gtcatgatcattctccggttatgttgttcccattgttgctgttgttgaagttgtctaatgatcagaatccgacgcatctccgacaatcttagccggagtatctcttgttctgtcacgagccggttattgtcggaattcactcgttgaagctggtgtaaaactaaccggagtcggttcccgagctcacggttttctaaatccaaccggtttacttgctctcgtaagttatcaatgtgactttgtttacgcattcttgaccgtttcgctgattcccggtttgactccatcctcttcctcttccgctcgtcggtcatctccggttggatcatttttttccggttatggttattctctcccgaaccgaaatttgtgatggctgtcaattgttttgtgtcgtccgagtccggttcatctgcttgagagcacggtagatcgtttgatatgtcggcgtcgtcacaacgaggattaattttgacgaaaccggcacaagattcgtcagaaccggttttcatgtcatgag

SEQ ID NO: 17451 - DNA, 514 bp, Arabidopsis thaliana
tgttgtcttgtctcgttctagcggtttcgatatagccaacactgaaaatgttgtaacttgcagtagcatagattctgctctagacttattagctgcacctccgtttagtctgtccattgagaaagtgtttgtaataggaggtggcgacatattgaggtgtgtgttctatagtcaagactctcccttttttcgtgattttaattctctttgatcgtgttatgtttgttgtattgtagggaagctttgaataaaccgagctgtgaagccatccacataactgagattgatacaagtatcgactgtgatacatttattcccacggttgacacttctgcatatcagccttggtgttcgtcgtttccaatatgtgaaaatggtcttcgattttccttcacgactcatgttcgtgtaaagagttcttctgccggtgaagcctctgatgagagtgatgggtcaaaggttcttcaagttgattggaagaagttttcttctgttcttcctaaaatgatttttg

SEQ ID NO: 17452 - DNA, 646 bp, Arabidopsis thaliana columbia
gtaacggtcgccagtgtgctctaaagaccatctaaaagaaatagtttctactttagtcggtaacaaaattaacgttggccattctcaaaaaatatataagcattttaaggatctcgaaggtaaaattgaagaaaggcttcaaaatcgccaggctgaatatcaaaatgaaattaatcaaccatctgcgccaggtgttaattttgatgatatttaaaattatttttccagttttttgatttttcaacagctgaaatatgggaaatagtcagtgacgaacatcagtatttttacataattacgtctaggtcattgtcggtttatctccttttacttgtggtaattgagggataacaacaaaaaaggtgagttttgcgactcaccttttttatttgtttcttattcagaatcaatatcttttaaatcatcctgaatcgcttgtgcgttcggattttcctgcggtttgagttcgccgccattagcgatgaaatcatgacgctggaagtacgcttcgcgcaccataatataaggatcggacgactgacgcagcagaccatcggaatccagcagctgagcgcgggtttcgatccttcaagcgtccatttcccacagacatcggccaggtcagccaggaaagaaccgggtaaaa

SEQ ID NO: 17453 - DNA, 513 bp, Arabidopsis thaliana
ttctagtgtttgagcctctgatgggtttggtgctgttttccccacaccttttgtgctgcaaccatcaaataacaaatcaaggtacagtacaaaaatagtaaatcataattcattgcggtttgagataaggaacttgtgtgaaatatgaatgagattatcttcataccttagctttcccgggggtagattatccgcgttataatctgaatacagaaggtcattcatgtctcccaaagcaacctagagaagtttttatcgttaggaaacataaggatagttatgttgaatggctatagaggtcctgtagttatacagtagttttgttgttttctatatgaatagagacaagaagcgagtatacctcgcagaggagcagaacgccatcattagcgccagtgttggcatagcaatagttcgcactcttggagaacatatccgcaaagtaaaccccttttccaaacatgtaaccagttacaggcgcttcaggaggagctattcgcagacctgcttggt

SEQ ID NO: 17454 - DNA, 599 bp, Arabidopsis thaliana columbia
taacattgacgccaaaatataacaatgaactggcatggtgatgacatggactttggtcaaacattgatgcagtttggatggtccccaaacattgtcgccttcatctcagagcttggctcgaaccgcaaggtgggcttcgtcacactcataactcataactcctgtcgttttttctctacaatccgtgagagaaaatcgcgatccgaagtgtacttctttcctctctttgacatcgttaataatattttttccaatcaaaccgccaatatctacttcggaaacattagctgaaatcttaagaagctgaggattgaagtatttgagattgtagtatctgatcatatacaagattcaattagttttgaaaatacgaacgaattaaggaatttaaaacgggtttaaaaaatagtaggaaatagattcattacttttgtggggatgaggtagcaagagtgacattcttgtaaagcaaggaagcttcaaggtctccttgaagacatatatacttaccaggaagatcatcagggatccttatcgacaaatcccattttgcattaagacgagtcattgtaatattttgcaccgtgagatccattgaa

SEQ ID NO: 17455 - DNA, 471 bp, Arabidopsis thaliana
ctctagaggatgaacgaacataccacaagtcacagcagcctaacataataagataataaacttgttccaagagtcttgatccctacgtaccttttggaaaacagggtattcggccttaaagcgttcgcaggcaaattcatgagcctcttgacttgtgtcgggctcctggtatagaaactggttgcaagggaatgctaagatctctagatctgaaaacgagagagcatgaaatggtataaccaacaaaggagatgagcgtgcaactgcataacaaaaaaggccgtaatacagtcaatgaccttggtccttgtatttccggtaaagttcggtgcgctgtgtatagtttgtttcggtgaaacgcttgtttgcgcacaaagctaaggattagaggtgaataagacaatagcagacgaacaaaagatgacgaccatttggaagcaacactgacgatgatgaggacgttccttgggt

SEQ ID NO: 17456 - DNA, 479 bp, Arabidopsis thaliana
gcgagtctcttttgtctgctactccagaaattcttcacatcgttatcagttcttcccggtagatacgtagcgattctcgcccatttgttaccaaactcagattgtaactcaatcacagtcctctcttcgtcagccgagaacttgcatccactataaacaaacacaaaaaaccctaaatttgaagcaaacaaaaccaaaattgaatttgcagagagagagcaacaaagagaaggagaaaaatgtatactttttgagattgggacggagtttattgacccaacgaagacgacaggatttgccggtgcgttgaagaagacctttggatcgaatggagctccaatcacgaggaccgtatctcttgacatggttgatgagtacttcgtcttcttcggctttccatggacctttctttatctcttccttcttcgcttccattttcctcatcgctaatcgatctctctctcgattttgtgtttttg

SEQ ID NO: 17457 - DNA, 582 bp, Arabidopsis thaliana
tagaggatctccagaagatatatgatgagattatggatgttgtgttacatgacagaggcggagtgttttttgtttacggttttggaggcaccggaaaaacttttctatggaaattattatctgctgccgttagatcaaaaggagacatatcattaaacgtcgcatctagcggtattgctgctctacgtttagatggcggcagaacagcacactctaggtttgatattcctataaaccccaatgaatcctctacatgtaacatttcacgtggttcagatcttggtgagttggtcaaagaggcaaaactaattatttgggatgaagctcctatgatgagtaagcattgctttgagtctttggatagaactttaaaagatattgtgaataatccaggggacaagcctttgggtggtaaggttatagtttttggaggtgatttcagacaagtgttaccggtgataaatggtgctggtagagaagagattgtttttgctgcactaaattcttcttatatctgggagcctccaaagtcttggagctaacaaagaacatgagacttcttgcagacattagtgagcatga

SEQ ID NO: 17458 - DNA, 352 bp, Arabidopsis thaliana
  unsure (1)..(352): unsure at all n locations
nnnnnnnnnnnnnnnnnnnnnctaaagcctgtatgttcgacccgactacccagttctactatgacgtacgtattgaagataaaccactggcgaacggctgcgcgggcaaaccgattgttgagcgcggtaaagggccggaacgtggtcgccgctgtttaacggtgcggcaacgaggccaatgccgacgcggtggtgaaggtgatgctcgatcctaaagagttcaacacctttgtcccgctgggaacggcggcgttaaccaatccggcttttggcgctgatatctactggcgtgggcgcgtatgggtggatcagttctggtttggtctgaaagggatggagcgttacggttatc

SEQ ID NO: 17459 - DNA, 503 bp, Arabidopsis thaliana columbia
cgggagccagctcaccatcggcgtgggcgttgtctcctggaagactttcgactatgaagacgcctctgtccagctcagctccgacgacttcaatgtgcatgacgccgcctgagtcacccgtaagcaaggccaagataagaagcggtggcgctggagctgtggcaggagttttgaagtacttcatggcgcagaagaaagtatctccggtacaagaggaggattatcaccggtttaggatttttcaaaacagattacttcaatggaggtttgttaacgcaagaactgaagccactatggcaaaccttaagatcaacgttgaggtacaagaactatatgaaaaatatttaaatttgtatcttataaatatctattaatttgtttctgtgaatggtttcaggatcagttgttttgggtttggcttaggatatacaaaatgaggaactacgtcgtagaaaatttgactgaaattcaaaggctccgtcaagatatcaaagtacgtgaag

SEQ ID NO: 17460 - DNA, 478 bp, Arabidopsis thaliana columbia
ggtccttccttctctaacgattttcttccttatgaatatcaaaacctgactgaaataagtgccaaattaaattttagcaacccttctttctctttccttaagaacaagtaaccaactttcttgtaaaaaacttcaactgcaattctacaatttaagccttgagacacgatattgtatgagtttgcaactttcgaatatccacttcaccaagagaaaaaaacaatttggataaaatcataattgacacccaaaacaatgtagtcagttgataagtttccccggagaaattgagatatttttgaacaaagattcatattttttactcggggaaacaaaagagagtggtaagaatgcacaatgcctaaccttcttcacctacaaaatgtttgggagctgcgagtccagtctctgctgcaactcttttaccttctgcaaaagctctgttttctgctccttatagctcctaagtagatgctcg

SEQ ID NO: 17461 - DNA, 646 bp, Arabidopsis thaliana columbia
tgatctctcgtttaacactcccagagacaaacttgaagaagctgtggcaatctccgcagattctaaggttcttggtgattctgattgggacactgagtggtaaagataacaatccaaatgctagagccagtttctcactgtggtgcgagacttctgctgctttttcttcttcctccagatcgtaaagcgagagtttcaggtcgggtttgtaccctgcagcttccatttcgttccttagcttggccagcgttgtttgaatttctttgttcagtatgtgggatctgtccttggcttgaaaggcatggacttggttcttcactgtgatccaactgtatccggctcctttcttgatccctacgcctttcagctcctctcttacggtgttggcttccgcccacctatcattgattagttataatatagttagatcataagtaactgaagacaaaataaatggttggtctccctgcttcatgtttaacacaagtttcatctatttaaaactcgattcagataatgctcagatactcctagttttgtagtctttcttctaaacatttgggtggctcttgtgtacaaagcatcgtgtggcttcttttgaattgattagaatatgattctacactacaagatgaataaaattgaa

SEQ ID NO: 17462 - DNA, 1798 bp, Arabidopsis thaliana
gtgtccattgtccatattgatcttcatgcaactacagaatcacagatttgtaggtgatgacgaattcatgaatgataataatatgcgatcattaagatggttttaatttgataaattcaattctggttcagatctaaacaggcaactctgaaccgattaataatttctgaaccaaactaaatccaagtcaaaactccaatctcaccttttgttgtttcagtgttccactacatctcaaaaaagccataactaaactatactttgttggattgtaatattgggccgtggatcaactggaccagttaagtccaacatgtttatggattattcacttttcgttggttctagcagtaagagaacaaatcccagatcaaaacgattcttctgcaagtttttccagaaactacattaatccaaaaagaggcaccaaaacattacaagttacagccactacttctaaacttaacccgaatagcttagaccgatcagacccagcctaagcagaacatggaaaccgcggaacaagcaacattacgctacacctacacgcctacactacataaacagaaactactacaactaaaaatacaacaacagagccagaaatgaagaacagagagagccttactgaagttgttctttttctgttccctacccgactgattttactcaatcaacctcaattactttttgacgttttggtttggttgttgctttagctttactctgcttcacattcttcctcctttttgtaccattcatcagccagtcatcatcgtcgtcgtcctcactaggatcagaaccaatgtatgaatcatcatcttcttcttcgtcgtcataatagtatacctttggagatggttttttgggtgctgatttgggtaaatcactcactgggattttagtatgtaaaccagtgactgggattttagtcaccacttctgagaatcctattggatagaaaccccaacagcaatagtaactatcttcttcggcaactggcggtggagaaggaactttcactgcctggtaagctctcctgcagctcttagtttggcatttaagcacgctttcctcgtaaatgatgggatactcgtaaagcacgtagcagtatggacaagtagtccagaaactcgaaacctccggctcagaatcggttcttgcagccccgctcttgggagtctgttctggaggtggggtttggttaaaaacgtgagttggctgagccactggcgcaggggcaggtggagaaggaatagtcgaggcttctggaactgcagagggagtagtagaaacaggaggtgactggaatgattgagttgaattgaagactggaggcagtggagagagagaactagaggctgcaggtggctgagagggacaggttgattgaaatgtcggtggtggctgagacactggcaacggcttagaggttgtaggtggctgagataccggcattggcttagaggtattgggtggctgagacacaaatggcttagaggtcgttggtggctgagagatagggaatgacttagaggccgctggtggctgagatgctggaaaaggcctagcagtcgatgatggttgagacatcgagaatggctgagaatttggtcttggttgggacaccgggaacgggttagaagcgggttgtggctgagacacgggaaatggcttagagtttgatgatggctgagacaccgggaatgggttagagttttgtaatgactgagagaccggcaatggctttgacctttgtgatgactgaggaactagcaaaggcttagacttttgtgat

SEQ ID NO: 17463 - DNA, 871 bp, Arabidopsis thaliana
cctgtggtgagatgacgagctatggatcgctttaaaaatcaacctgtccacttaggatggcattgaagggggtatacgctgactctgtaatcgaaaaaacaaacatgaatgaatcagaagatccctgtcttttgttttgacaagatagggagggagtcagatatcattaccagcccaaaaaggtggaacaccacacaggaggatatacaacatgacaccaatgctccaaatatcagcctctggtccatacttcctcctcaacacctctggtgcaatgtaataagcacttcccacaatgtctttgaacacctctcctggtttgtagaacacggataacccgaagtcggtggctttcagaggagaattctcatccttgctaagcaacaaaaagttctcaggcttcaagtccctgtggataacccccatggaatggcaagtatggataatctgcacaatcgtccgtagtaacgaggctgcagctctctccgaataatgtccctttgcgataatcctgtcgaacaactcacctcccgcgcaaagctccataaccaaatgcacagaatgcttatcctcatacgctcctttaagctccacaatgtttggctgaccggtcaagtgatgcataatctgcacctcccttctcacatcctcaatgtcttctttgttcacgagcttccttttagcaatggtcttgcaagcgaattgcagccccgtggccttttgcgtgcagagatgagtcccccaaactgtccacgacctagctccttacccaatgtatatgagctctttacatcttccattggtcgccctaagacaggtcgtattggtccttgtttggttgcaggaggaggagatgctggcgggtgtttag

SEQ ID NO: 17464 - DNA, 272 bp, Arabidopsis thaliana
gtcgcttctcactgtcttgatttttacattgaattgtcgctctgtcaatgcaaagaaatttctcaagtgactaggtgcttcactcttatcagtcagtaagtacagccatacccctcttgaataagcatcaccgatggttagcgactaacgagcacccgcatgtgacggtgttcgataaggacgccacatatcacaatgcattagctcaaaatttctcgaagttttattgatactcaacggaaatgaatatctagtgtgcttaacgcgatgac

SEQ ID NO: 17465 - DNA, 497 bp, Arabidopsis thaliana
  unsure (1)..(497): unsure at all n locations
nnnnnnnnnnnnnnnnnnnnnnctaaagaggcttccagcactttcgcgcccaggccgggtaattgatcttctacgctggtggcgttggggtccatgttgatgaagacgaatccggcatattcttccagacgcaccggaaccagttgcgctttgtcgctagcgaaattggcgacgttttcgcagttacgtgcatgggccaggttgccatcgagtttgaatgcccatgcgtgatacgggcaggtaatcacattttttgcttttccttcaccgctcaacaactgatgaccacggtgcggacacacgttatagaacgcgcgcaaaaccttatcacgaccgcgtaccagcacgatgctttcgccaatgatctcacgcgtcacataatcattggcattcgccagttcgcttgctgtgagcgacgcaaatccagcttttggcgaagacgttctctgtttcgtgttcaaacgcgttctgatcggtattaaaacgggcaggaatgg

SEQ ID NO: 17466 - DNA, 817 bp, Arabidopsis thaliana
atgaccatttgttgtgttcctgaaattgaaactgacactggataaataacaggggacggagacaattccgctcaatgcaaggtcacacacgtgtctattgtcaggtgtgtacataggcaacgtgaaagtgttagtgagggcacagtttggaatggacagctcaaaggacattgcaatgaagctgacagttagagctgaagacgtttctgtcgccgaggccattcacgagattgttgccagcggctaaaacctcttgcgtttcttcagtatcagagaatgtcatctattcctgctgctaaacctcaaaaatacatcaactattataaatagcatagtattactttctttcttttttccttgcattattactgtcaaatacactatggaggttttctttttattttatgacggtgctttttgatttctcatttctgaattttattattacccgttttctcgccaagttgggaatctacagatcatcttgctcggatttgaaaaccactaccgtaccgtacaacaggctaggctttctccataagttagaaactcaaaaatagtagcgttttatcgtctgcgttcaatatgaagagatgatagtaaagtaaagactggtgggtacacaattgattacagaattcacattgagtagcgtgttgaaggagtttagtcccaatgaagaaataaataaatcaaagcacactacaaaaagggaagtttaattcttctaaccactccactatttcaaaccaaacaccgtccacaaaccgaacattacttcccgctacagaatatattaacgacaactggagacgtg

SEQ ID NO: 17467 - DNA, 438 bp, Arabidopsis thaliana columbia
tacatatgtgacactaaaggtgcatttgtgcagcctgctctttatgaagcctttgggttgactgttgttgaggctatgacctgtgggttaccgactttcgctacttgtaatggcggtcctgctgagatcattgtgcatggaaaatctggtttccacattgatccatatcatggtgacaaggcagctgagagtcttgctgatttcttcaccaagtgtaagcatgacccatctcactgggatcagatctcattgggaggacttgagaggatccaggagaagtaagtatcagactataagtgtgttcttctgttttatagtttgaatgtttttaacaatcttgtcgtggggttttgtagatatacttggcaaatatactcacagaggctcttgacattgactggtgtctacggcttttggaaacatgtctcgaaccttgga

SEQ ID NO: 17468 - DNA, 597 bp, Arabidopsis thaliana columbia
caaggcttgtaatcgctacacctggcaaaacgacgagaccaccccggctaatcgcaccagcactcgttggaacccaagcagaattgacatgtttaggagaacagaacccaacaaaccaggtgggggcgtttgatccgcaaaatcacaaccatcgagctgaaactgctggagccgatcaaatcgaagcttccgacgatgaggaatcggaagaaaacatccgatgggcagaagagtacgctagggagcaagagatgaaagccatcagactctccctggccaaggtagaaaccaagatgaaactcgtacggtcacagatgcacaacacggtttcctcggctccgaacatcgaccacatccgggaagaatcacagaacacgccctttactcgtaaaatctctaacgcgataatctcagagccatgaaagatgaagatcgagtatttcaacgggtcatctgacctaaaggggcatctcaaatctttcataatagttgtagctcgggccaaattcagaccggaggaaagagatgctggcctttgtcatctatttgtcgagcacctgaaggggtcgaccttggattggttctcgaacttgaagg

SEQ ID NO: 17469 - DNA, 614 bp, Arabidopsis thaliana columbia
ggtcttaaactaaagatccccggttgggttctaagacatttctgatacataaaaacagaagtatgaagcaaggtcttctgactcttttcctatcttttgcagattatgttataggcctcataaacaaccgtcattatatacctgcagcccgacttgtatctttgttcgaccttaaagacttctcagcccaaaatctcttaatgaaagcggtcatcgatttaaaacgctctgcgctggaaaaagtaagaactggttcatgtgattaatcttggtcatttatgctcactcatgtgtatatgtttttgattcatcttttaggctgataacaaagatgttggaagattgaaagccatcgttgaacttgcagcagattataagcttgacattgatatttcagcggaccttattgccaaactcatgtttcataaagaaaacccaacaccacctgagcttcattgctctgttgaagcccaagcccatcagcaaatggtgggtcttcaggttcaagggtgggacttcaggttcctaaacgagagactatagccttcgtgaaccgcatcacaaatggtaggtctaatgtcagataccattatatgttacgctctagtaggacc

SEQ ID NO: 17470 - DNA, 655 bp, Arabidopsis thaliana columbia
aacggagggctgtttgtatctacgacgaagatgatgatgaagatccaaaaaccccattacatggaaaaccagccattgttccccaagcagcatctgttttgactgatggtcctaaaagggctaatgtgtgtcacagtacttctacaaaagctaagatatctgctggatctacagagagtactgaagtaagaaagttccctctgcgtaaacattgtgaggatgcatcacgtgtattaccaagcaatgcggagaattctactaatagcttacctgtggtaaaacccattaatgaattgccgccaaaggatgtcaaacagatcttgcaatctccgaagatgtcccctcagctggttttaactaacaagcacgttgcaggacagcataaagttgtaaaatcatcggtgaaagtttctggtgttgtgatggcaaagaagcctcaaagtgattcttgtaaggaggcggttgcgggatctgacaaaataagctcttctcagtctcagccagcaaatcagagacacaaatcagcttcagttggagagaggctaacagtggtttcaaaagctgcatcacgtttgaatgactctggttcaagagacatgtctgaggacttgtctgctgctatgtatgtcacatctatctgtcactttttgtgtgt

SEQ ID NO: 17471 - DNA, 563 bp, Arabidopsis thaliana columbia
cttgcttcaccaaaaactccatcacatctctgctaaatcctcctccttctacctctgcctccacatacctccctgcaaatgcaattgtgtgtgatctttcctcaaatccttggtgggaatcatttaaaaatccaattgtggtgagaaataatttaccatagggagtatcttcaagaaccacaaacttggggttcttctgggtgctcattattgcttctttcagtttctgcgttgaacaaataatcagaaacgatgctaaattgatgaagataggaggaaatatacctcaatgggatcctgtgtatcggtttctgggatcgtcaatggaaaagagaaggaagatgaggttggattcgtcgatacacatcctgggttcgtggaagggcaaggcctaattttgctacaaaaaaaagagagtaataaagattagctttgtttagagagcagaaatcagagtgagaagaggaacaaacccattgagaagaccggtctggacgaacttggattgggtgaaaggagtggtgagtggctgagaagaggagagagaaggaatggctaaggca

SEQ ID NO: 17472 - DNA, 421 bp, Arabidopsis thaliana columbia
ttttttttgatgtaatgaagctgagctacttggatttaatggctacattcctgcgtacaatactgtgagtggtcggcaaatactctccggagttaactacgcttccgcagctgctggaatccgagaagaaaccggtcgacaattggtaactgaaacattaaaaccttttttcttaactctctttattcaaaaaaatattattaaagttccaacgttaattttttttttttttttttccggaaaatgaagggacaaaggataagctttagtggacaagttaggaactaccagaccacagtatcgcaagttgtgcaccttctaggagacgagactcgtgcagctgattacctcaagagatgtatttactctgttggtttaggaagcaacgactatctcaacaactacttcatgcctacgtttt

SEQ ID NO: 17473 - DNA, 571 bp, Arabidopsis thaliana
tcctctgtgtctcttcttcgaactctccattcgtctaacctagcagtcgtcgattgcagatagttcttcaaaaagcagagaaatcacttagactccattaaaaactatggagagagctaattttcatttgaattttacctgaacatttccaatgagatgagagaagaaaacaagacccgcgacacaaatgaaacaactgaatatagtctcactgctcagtgtactcgctgcaagactctgtccataggaactacacaaaaccaaatcaagaaaaaaagatcagttaacaagtcgccaaaagcagcggttttatttgttttaagacagatgaatatcaaccaacctgaggttacggagaccccaccaaaggcagtagaagtatttatcaaagaaaggagaggaagtgacatcattagtgaacgcatcaccgaacataccaaactgaaaatgttggtcatcgtcattgcgtgcatcacaatttgacagaacccgagtgatccgcatccaagcttgtctacctggatcatgcaacgatccacagtctagaaacaagagactacaagaaggtgaa

SEQ ID NO: 17474 - DNA, 557 bp, Arabidopsis thaliana
catacgccgtatcgaagaaggccggtcaccagacctccgccgagtcctggggaaccggacgtgccgtgtctcgtatccctcgtgttcccggtggtggtactcaccgtgctggtcaagctgcgttcggtaacatgtgtcgtggtggtcgtatgttcgctccaaccaagatctggcgccgctggcaccgtcgtgtcaatgtcaacatgaagcgtcacgcaatcgtctcagctatcgctgcaactgctgttcctgcgcttgtgatggctcgtggtcacaagatcgagaatgttcctgagatgcctcttgttgtgagtgactccgccgaagctgtggagaagacctcagctgcgatcaaggttttgaaacagatcggtgcttatgatgatgctgagaaggcaaagaacagcattggaatccgtcctggtaaaggtaaaatgaggaaccgtcgttacatttctaggaaaggtcctctggtggtttatggaactgaaggatctaagatagttaaggcgtttagaaaccttcctggtgttgagctttgtcatgtggagaggctt

SEQ ID NO: 17475 - DNA, 515 bp, Arabidopsis thaliana columbia
gaagttagggtaacttcagaacaatacacataatttgaacataagaattagattactagcaaagcacgtacatatatccttctatcatgccctgctattattagacgagagcagtccgaactgaaaatcatggaatgtgcaaatggaagttcaggaagtcgccttctactaacactccatggacactttgtaaattcatttttcttcaactcgaacagactggggccaatttggtcagagtaagcaaaatgtgatccggtgttagaaattgcactgcatatgatctttcgggcatctctacttttaacacgaaccaatgactttgttgaggcacgaccactagaatcactgcttatattaagtcgaagaatatctaaagtactaataccctgaaccagtagaagagaagtcttattgaacatcgaattatgtaccatttgcatgggtattctctgaggcgcaggacatatatcatgtggggagaacttagtaaatccgtgaattgaatatgcaaa

SEQ ID NO: 17476 - DNA, 552 bp, Arabidopsis thaliana
cagtcaattagaacaattgcaatataagttaagtcaaatgaaatgcaaccacagatcaaaatgtaatcagtaactaaacaaagacaatccaaaaacggttgataagagaacaagtcaagtattgagattaccttggtaacggttttcctcttcttggcgagcttctccttcttagccttaactctctgtgcttcagctaacagtgacatcctcttcgcggtcttagcataaggattcaacttcaacatcacattgagattcttcaatggattcttcttaagaacagccctcttcgcatccttcttgatcggattcacaacactctgaatctcatctgaattgataatcctggcaagatcagcattcaccatctttgcacgaggaagcacataccccttcttcttctctgatggcttctcaaacgaaccatagatagactcaagcttctcaaaggcagacttggtccagatcacaaaccgaccaaggtgaccaccaggagcaagcttcaacaaattaagcctctccacatgacaaagctcaacaccaggaagg

SEQ ID NO: 17477 - DNA, 487 bp, Arabidopsis thaliana columbia
gtcctgttgtgaaccgccactattcatactgttgtcagcgttgcgacgtcccgtgattggcccttgcatcaacttgacgtaaaaaacgcctctctacatggcgatcttgtaactttttacatgcatcaaccatcagggtttgtcgatgcatctaaacttgaccatgcttgtcttctccagcgctctctctacaatcttaagcaagctcctcgtgcatggtttaacaggttcgcaacatacactaaaaccattgatttcaaacaaaactcctcccatgcatcattattcattctatgccacgggtcagatattgcctatctcctcttatacattgacgatattgcgctcactgccactaccacatctcttcttcaacgtgtcatctctcacctcagcttcaaatttgaaatgaccgacattggacagcttcatcacttccttggtatctcagttcagcgtgatgtcacgggctgttcttcataacaaa

SEQ ID NO: 17478 - DNA, 599 bp, Arabidopsis thaliana
cataagccagatattcagctgttgtgagggcaattcgaggagtgatgattctctcaatggttgggtcattggcctgttggaataaaggaaggttaaatctgtttaaagctaagaaacatctaaatacttgaaaaaactccatgatatggcaatcagctatagaagtcaaatttaccaggttcaggaaaagagtaactctctccattgatccattttcttcaaaatctcgcttgaagaactgagctgtctccatgttcacacccatagctgcaaacacaattgcaaaattgtcctctccatgatcctggaaaaacacaagaatgagaaagaatccttgatattatgagacagccaacgttgaagaggaatgtctacaaacaagaaattcaattttgacaacaactgagttataagcctagaacatctaataatgaagacctttatgtaaccacacatccatcaacacacttgtagaaacagttacaactcaaataagagctttggtatagagaaataagagatatatttgtacaagttacaaaggattcctcaagtagataacagtctttccaaacgcttgactagccagcctgacgaca

SEQ ID NO: 17479 - DNA, 554 bp, Arabidopsis thaliana columbia
tgctgaggttgctcactatccagccaaagtcgagtagattttgcccgtattgtatcttcacaaggtaacttctgtagggtattagtatgctcttgagacctgaaagcattcgagatagatggtttcaagatacatcagtacatcaccaaatggaaacggccattatcaaatattactacctgaataataaggtaaattatgaaataatcccacattgatataaaagcataaggagattgtagttacctgtaatgcacattgttttgtaaaagtgagcaacttgagcatctcccctagtaactacacgcttgtttgattccaaacactcaagaaacgccatgtcagctttaagcaactctgcctggtcatgagtatcataaccaatatcatggcaataacagcaatgatctaaccaatcaataggtctctgatcccaaaccatcgaacctccatctttcccactagaccagttaggccacaataatgccatatctcgggaaaagctgtgacagaaacgccctcgtccatgtatgcacggaaccttagacacataa

SEQ ID NO: 17480 - DNA, 571 bp, Arabidopsis thaliana columbia
tgatcaagggtttggtgttcattgttgatctgaatctgtatagggcttagttttatcttcctgattttttttttttttttgcatttgacctcggatctgttgatcattagtttaagaatgtgttcaaattatactgattagcttaattttgttggagatgatcatgacattaaaagtctttgatttttttgcaggttgttgttttgttatgcataattgagagatggtggtcaaaaggaagttaaattgtggtggctctaatggttttgatttccccaatattcccaaggctcctcgttcaagcagggtaagagatcatggtcttcattttttttgtttttgtttttgtatgcttttgtaatacgtctctgatgacttttgtttcccttttgtagaggaaggtctcaggtaagagatctgatgatgaaagtgagatctgtgcaattgatttgctagcttctcttgctggaaagttgttggaagaaagtgaaagttcccaacgtctacctatgcatctgaagctgataatcttgatcatttgggtggactgattaagcaagaacttgaagat

SEQ ID NO: 17481 - DNA, 565 bp, Arabidopsis thaliana
  unsure (1)..(565): unsure at all n locations
nnnnnnnnnnnnnnnnnnnnnnctaaaggtggtttgcctcttcgaccgttccgacgggcggggagcatgctgattttttaagttggctgggaaagtggaccacggcagataaacaacccgtttgctggtcagtgacccaacgctggcaaactgtcgcgctggggatgccacgactctgttcagcgcacgtctggcgggggcaatgctcgaggaaatcttctctgtaaatttggcgtaaataatcagttacatcaatgagtcctaaacgaaatccatgtgtgaagttgatcacaaatttaaacactggtagggtaaaaaggtcattaactgcccaattcaggcgtcaactggtttgattgtacattccttaaccggagggtgtaagcaaacccgctacgcttgttacagagattgcatcctgcaattcccgctccccttttgcggccgtcgcgcatgatttttctggcgtttgcggaaatgggcaactctgcgaggaaagctatgctgaaaaggaaaaaagttaaaccgattaccttcgtgatgtcaccattattgatgacggtaa

SEQ ID NO: 17482 - DNA, 430 bp, Arabidopsis thaliana
gtctcactaatgacaatgagtgtcagagggagacacaacacctatcagcaacacttgatgcgaggttgagaatctatgcatcactttgaagagttcattctccgactttctttcggaacaactcaaaagccttgtttagtgtcaagcattggacatggatagggtctcactctcatgcggccacaaacatccaaaaagcaagtgttgaaggctatctgcattagttttctgtggtgggaacatgaactccgatctccgctagatcaactttggtccaaatgtcatttagaaatagaacaaatcttattgtcctcagaagattgtaaatcaggagtatttctgtatttcctcgctagagcggcactcctctaccgatccagataatcctaatttggcagcaatgtcgtagataatactatgcaagtttgag

SEQ ID NO: 17483 - DNA, 569 bp, Arabidopsis thaliana
tgccgttacttatagctcaagtaacgtttttcacctgtggtggattttagcctcgggattagactttgccattgcatttgtgatggttttggagctatgcagtttctcggctcgtgggcagctacagcgaaaaccggaaaattgattgcagatcctgagccggtttgggatagagagactttcaaaccaagaaaccctccaatggtgaaatacccacatcatgagtatcttccaattgaagaaagatcgaatttgacgaactccttgtgggatacaaagccattgcagaaatgttacaggataagcaaagagtttcagtgtcgtgttaaaagcattgctcaagctgatcttacaatcggttatctactctataatatccttttgggcttcaattttcttattgcctaaccaatgccttcttgagattgaaagaatgtgcagcgcctttctttggtctggtaagcatgagtctgctcgtggggctaaggtgagctgggattctgtatgcacgccaaaagaatatggaggcttggggttgagaagactgcaactgtggaataaagtgttgg

SEQ ID NO: 17484 - DNA, 383 bp, Arabidopsis thaliana
cttcctgcatcatgcggcggatgactcattcccaagcgatctcggtacggtgattttcacctttgcactggcatttttatgctggcatcgcctgtggtccggctcactattaatggtgctggcgtcgcattggtggtcgcacttttatcttggcgtccactggccgctggatatgtgccgtggattgctggcaggtatgattcgctgccttagtgcccagattatctggcaagcgatggggcatgaactctatcaacgtctgcaatcgtggtatcgcgtctgttttgcattaccgatccgcaaaggctgggtgcgtgactgatctctgctaaaaagtgtagtattgagcggctcgcttcaataactattcagagggattatgg

SEQ ID NO: 17485 - DNA, 324 bp, Arabidopsis thaliana columbia
gagcgatcaggtctagcagaagagacttgtctccctccagctattcattacatccctccaactccaaccatggaatccgcaagaaacgaggccccaatggttctcatcaccgacatggcagatctcttcaagaatacaggtcttataccttcagacatcgacatcctcattgttaattgctctctgttctcaccaacgccgtctctctccgctatgattaccgacaagtactagcttaggggcaacatcataagctacaacctttccgggctggcatgcagcgctagtcttatctcagttgatgtagcacgtgatgtgttacaa

SEQ ID NO: 17486 - DNA, 558 bp, Arabidopsis thaliana
tcgtaaaccaatatcctagtagcaattcacattgatcttttagtattagtaactcacaaatttggttcctaagttggaatttttttcaccaacctgtgtgtgccttcaatgcagtaaccaagaagccgaaccaagttcttgtgccgcacatgaccgatagcatcaacctcgactcgaaactctttctcagcttgtcccctataaaatctatcaatcaaccaaaactcaaaccataaaaaggtatgaaaatctttttacaatccgatactcacaactggttaagaatctttttaactgcaacaggagttccattcattaactctcctctgtagacaacaccgtaaccgccttcacctataacattctctttagagaatctgttagttgctgtttcaagatctctcaaagtaaaccagtgtccccaaccaaggtgagattcaggcaaaccagacaatggagatggagttgcaatattatacaatgatgaagaagcagaaacttcttcagcagagtcagaatgtttatctatgatctctaaatgatgaaacgacctgaccg

SEQ ID NO: 17487 - DNA, 1212 bp, Arabidopsis thaliana
tcatcaaaatagttattatattattcttagtcaaattcataacctatattccctattttccggtcagtcatatgcttttgctaataaacttaaatatagatagatctgataaattcttttcggaaccaattattttcttcccttaatttattagttgttaccctttaaatgatcttaattctaaaaaacagaccaacaactttattagctacccttaaatgatctttagttttcaacaaactcatcaacaattttataaattcttaaacccaacatcatccacccaaacacaattattaaaaaaacaatctatatgtttataaacatataataaaataaaataaaaagacacaaaaagaacgttgaaaaaagaaagaaaaagacacaaaagaacgtttgaggaaaccaataaaaagaaaaatgggcctgagagactgaagaacaacccttttatcacgtatcgtgtctccagctgtatatatatttcccacacacactctttttcaaaaccccaccgacgatggcatttccgttattattctaacggtcacacgtcccttacgtgtccaccacttttttttattattattttaatcccatcactctttctctctctctccctatcttcttcttcttcttcttcttattccccacactctcttcttctctacttcaccatcattcacacacactcatggcttcttcttcttcttcttcttcctccatcacaatcatcaccaccttcctcttccttctcctccacacaaccgccaaaaaaacctacatcatccgcgtcaatcactccgataaaccggaatcattcctcactcaccacgattggtacacatctcaactcaattcagaatcatctcttctctacacttacacaacctccttccatggcttctccgcttacctcgactccaccgaagccgattctctcctctcctcctcaaactcaatcctcgatatcttcgaagatcctctctacacacttcacactacgcgtactcctgagtttctcggtctcaattccgaattcggtgttcacgatctcggttcttcttctaacggcgttatcatcggagttttagatactggcgtttggcctgaatctagaagcttcgatgatactgatatgcctgagattccttctaaatggaaaggagaatgtgaatctggttccgatttcgattccaagttgtgtacaag

SEQ ID NO: 17488 - DNA, 603 bp, Arabidopsis thaliana columbia
cctttgcgcctttctcaccgccatttgcatcttcacgtatttgtcttctggtattgataacaagatatctttcaacctcgggatgtctttctccgcaacaatgaccgagaacgcactccaatcaagaacctcgaagaaaggtggcacaaagttgtcggagatgatcacagggacacactcatagaaaatcgattcaaccaccctcgggctgttgacttcgtaccctttaggacaaatgcagtacttgctgcttttcatctgctcgatgtaattcatcttgctcgccacaccaaatggcattcgcccgaagattttcatgtccgggtctttgtctttccaatgctgtagcagaatctgacgtaagtaaccgtgcatgcttccagcatagaaagccagggtccgcctctgagacggcggttttcccccaaatcacgaagcggatttttggcggctctgacatatgtttcagggagtgagatgtctcttccaatcttaaagcctgcggttacgtctgcattgcataaagctttaatgcaatgctccatgtggtgcctagtctcatatggtgcctgttagtgaagctaaattcacatagaaaattgt

SEQ ID NO: 17489 - DNA, 321 bp, Arabidopsis thaliana columbia
tgttaggtaaccttgccatcatattatgccatcttatcatatctaatctctagttttgatactttatatccttattttgcgcaggtctgtatgcaacattcatacattagaagcctgatccagatatcgaacctcctctaacgaccccaataccttttgtgtggctccgataatcatgatgaggcaagtacctttgtcttgtcatattctcgttctacacaagtataaataactctagaatttccttttcacctgagataaagagtctggctataactttagtatggactgtatagactgcattgtgtagcacaacagtgc

SEQ ID NO: 17490 - DNA, 808 bp, Arabidopsis thaliana
ccgttcttgacataaacaggatgaatctgaatggccagttatcgctccattgccatcgtacgggaaaggaagagacggaaccggaaccgggagattcaacagtctcatctccggtacaaacctaaccgacgtggttatcactggtaagttccaacgcaatatatcacaccatgatatgcttgatcatatattccgattcttattttgattgttttcttgattataggtaacaacggaacgatcaacggacagggacagtattggtgggacaaattcaagaagaagcagttcaaaataacaagaccgtacttgatcgagatcttgttctccaaaaacattcaaatctcgaacatcacattgatcgattcgccgtcgtggaatattcatcctgtctattgtaatagcgtcattgtcaaatccgtcaccgttcttgctcccgtcactgttcccaacaccgacggtatcaatccaggtaatgtttatcctacgtggcaaccttattatcctacctggcatttctaaaatctgacttggcacaatgtcatcctctgtttttgtttgggtttccaacggctctgtttcttgttttttcagattcttgcacaaacacattgatcgaagactgttacatagtctccggagacgactgcatcgccgtcaaaagcggttgggaccaatacggaatcaaattcggaatgccgacgcagcaactctcgatccgacggctgacatgcatctcccaaagagtgcaggagtagcttaggaagtgaaatgtccggagaatcaaagacgttagaatcgaagatgt

SEQ ID NO: 17491 - DNA, 466 bp, Arabidopsis thaliana columbia
tattaagttgattaattagttgaatatgtccgcttcaattttttatgtcaaagattaaatttaacgcggtgaaactatttgaccaaaactcaaagtaaaaaaacaagaattacctcacgcgctttaatctccccacttccaagttcccggcggccgtcaacaccacctctaccgccgccaagctcgccagacctctccatatagatacctaaaatcttctcagctatggccgaagcatcattattattctcttccataagcttcgtgatctgagaacgaggcaacctcaacctcacactcgtatgtccaggcccaagctcaggcccaaacccatctccaccgtcagatcttccgattgtgacgtcagaaaccgatctccgagacaacatcaacatatctaaccgctcctttgcgccaacgtggataccagacatcactctccggtacggtagcttattttctgtat

SEQ ID NO: 17492 - DNA, 528 bp, Arabidopsis thaliana columbia
gtttcctatcaagcagccgtattaagagctgctggtgaagggaattggcttcaccaatttctattagtaaccttaatccggatttctccattcccttacattctttataactactgttctgtagcaactcgtgttaagtatggtccttacatcacgggctctctcttaggcatggtgcctgaggtttttgtcgcaatctacacgtaagtcagctttctatctcttcttttcaattccaaaacattttgttaggtccaatactgtttacatcaatgctcattgcacctactcagcagaaaacatcccataataagaatacttagtaaatcctcacattacactattccactactgtagaacagttttagcttgtgtctagcttttattttagcttctagaagcctaagtaaaaagcccttttcacggatgagtcaaatgtctcgtttctgtgttgcagagggatacttgtaaggacattagcagaagcatcttctgcagaagaccagggtctctcggtaacacaggtga

SEQ ID NO: 17493 - DNA, 574 bp, Arabidopsis thaliana columbia
gactctaggctgatccccctaacctagtacaagtctgttgcttttaagctgaatctattcctcatttgaaaaacaaaatcacaaacaaactctctctggttgattcagcctcttgctttatgatctcatattctttcctcacttagttagaatccgaaaaactgaaaaatatgtaacactgttagtatatatgaatgaaaacaaaagtgttggaagttaaataaccgatgtgtgtgaatgttttgttcttaccagcttcttcttcttcttctttttctcgatgtatgccaaaatctccttctggctcacaagtgcttcttccaaagcctaaaccaaaaataaatccaaactcaatcatcgatttctagttaaagaaccagatttggttattgtccggaacatttctggtagtttaaattttgcctaaccttcttggtctcagtcaactcttgctcaagcacttgaacgcgattaacgcggcctgaagtactcttcttctcagattcgcatgagcaggttcaagcaaggacatgacttacttccagtcagcatacgttcacatcacatatatcag

SEQ ID NO: 17494 - DNA, 401 bp, Arabidopsis thaliana columbia
tttatcaaaatggcttcttgcatccaagaacttcatttcactcacctccatatcccagtcaccatcaaccagcaatttcttgtacatccatcaagtccaacacctgcaaatcaatctcctcaccatagtctctatctatcaaacctagatgatataatcggagcacgagttttcactccctccgtttatttctatccatcaaccaataatcgagaatcttttgtactgaaacggcttcaagatgctcttagtgaggttttagttccgtattatccactctctggtaggttaagagaagtggaaaatgggaaactggaagttttctttggagaagagctaggtgtgttaatggtgtcggcaaattcatcaatggatttagctgatcttggagatcttacagt

SEQ ID NO: 17495 - DNA, 627 bp, Arabidopsis thaliana
  unsure (1)..(627): unsure at all n locations
nnnnnnnnnnnnnnnnnnnnnnctaaagcctctctgttaaccagaaaattaccgggcgtaactctgaaaaagacgttcgccatatcgaaattgacttaggtgactcgggcatgcgttaccagccgggtgacgcgctgggcgtctggtatcagaacgatccggcactggtgaaagaacttgtcgaactgctgtggctgaaaggcgatgaacctgtcaccgtcgagggcaaaacgttgcctctgaacgaagcgctacagtggcacttcgaactgaccgtcaacaccgccaacattgttgagaattacgccacgcttacccgcagtgaaacactgctgccgctggtgggcgataaagcgaagttacagcattacgccgcgacgacgccgattgttgacatggtgcgtttctcccggcacagcttgatgccgaagcgctaattaatctgctgcgcccgctgacgccgcgtctgtattccatcgcctcctcgcaggcggaagtcgagaacgaagtacacgtcaccgttggtgtggtgcgttacgacgtggaaggccgcgccgtgccggtggtgctccagcttctcgctgacgcgtggaagagaggcgagtcgcgtatttacgacatacgata

SEQ ID NO: 17496 - DNA, 535 bp, Arabidopsis thaliana columbia
tgagacaatattcgggttgccggttcgtgaccgtactaagtgcgtcaggggaagcgcataagaagctcagaccccgaagcaaagaataagaagaaaaagaggaaggaagctgagattgctcagaaggtagccgagcctatattcgaggataagaccgcctcgactaatcttattggggcttgcgcctgggttttgcagtcccccttgacgctttgctggagtccgagttgtatgccaatgaggcatcgaactttttaagggtatgttcaaaatttttatctccgagcaagagtttctacaaggtccttatgtctttgttatatttcttcaggccatcagctcgatgaacagcatggtgcaatcttacgattcctcagcgcggtctaaactcagcgccgtcgctaatcaccgtcgctaagtcccggtgattagccgcagcagagcttgctcgggctgatgatgactcacggcggccgtggcgctgcaagagaacgagaaagccgagcggaaccgtttcactcataaggagaacgat

SEQ ID NO: 17497 - DNA, 995 bp, Arabidopsis thaliana
tttttagttgttgtgggcgatgaagaggaagagaagtgagtgggtggtgtttaactgtttataagtaacttgttttgtatatatcgtgattttgaatatgttcttgtttatgttatgtactcaaactatttagaatcaacaagtttacaaaatttggtacactgcaaaaagaaattacattgttgaagttaaagacctcagaaaaaagggtgacaaagagaagaaacttacatgaacgagataaatcagtttcgaggcaaaatctttggacactaaatagttcaaagttaaatgaagatgatacattcatttatcaaaagaaggtagtggacgttttagttaaagatagagggagttgtctttcttgcggcggaatcactatgaactttgattggttttcgattcctttcacccgttgatccgctctgttctgttgcggccggcttcttcgcagtgctactgtccaagtcgttgtgtactgtgctttgcgtttgattaggtaccttggctgaactcttaggctctgagtcgctgcgaattttgattggcatttgactcttttccccggttaaaccactctgttctgaagaaacgctgtgtcctgttgctgtagtcgcgattggtttttggttcgagttatcggcacttctagctgcaatcggcttttggttcaggctttgactgtcagtgttgcggtccaagtccttgtttactgtggtatggtcttgattggtttctttggctgagatcttgtggtctgagtcatttctaacagcggttggcacttgatttgcttcctcggatgagctggaaccgttgttgttagctgacttgctctccaagaaacgtacaactacacatgtaatattgtctgcacttcctcttttaattgcttctcccacaagtttcttggtggactcttccggatcttcaacttcttttactactgcaactgcttcctgaaagaccatcagagagatctcaatcattgagtg

SEQ ID NO: 17498 - DNA, 540 bp, Arabidopsis thaliana
cttggcgacgaatacccaaagcttgtaaacatcttcaaagtttgtcaagaagctaagagaagcagtaacaacctcaaatcttataaacccatttttcccggcttcattctgcaagtgcaaagcactatcttctttagtccgagctctatggtttcttggtttttcatccactatacgtatgtgactcaatataccaatgccgagagatacaccttctctatcaccgagtctctgaacaatttctggactaacaaagcctttgcttttatctctcacattgaatgcaaccgcggcacctctttcgtatttgatcttcggcccataaatctgcacaaggttcatgtgtctgcctcctgattcaggcacttgtagttgcagtaacgatatcacaagccagttaatcagaaacctgagtcttgttgtggttttattaagacctaacatattcacatgatcaatatgtctgcaaacaatctcggtttcggtgtctctcctatcccattcatcatccgcaccctcatcatctccattttcaacatc

SEQ ID NO: 17499 - DNA, 372 bp, Arabidopsis thaliana columbia
aagaagaattgagagataacagagagatagtttcttcttcatccaaaagaatccaatcttttcctcaaaagatagtttctggatcgaacgacaatggagattttctactacttggtgtttggggttttgggtctcgtcgtcgcggcgttggagcttagcaagaacaacaaggatcgaatcaacacttcttcagctttcaattctttcaagaacaattatctccttgtctattcgctcatgatgggtacaatggccttcccttctctcttcatctttccctttgtttgtctagttatgtctgtcaaaacttatttatatcctgtttcgatccgatctggttgttgggaagatgttgttaattagtgggtttgg

SEQ ID NO: 17500 - DNA, 535 bp, Arabidopsis thaliana
tgacaatggaaactaacaaactgcttacatagttcccaagagatattgaagccatacatagcgcgcttgcaaagctctttagcccggttggtgcttggctgttgaagaactcgagttgaccaacgtacatgaacacttctgatgcacctatcaacatgtactgaggtacttgccaaaaaatgctcaaagtgctggagcttgagatcgaagtagcactttccggttccttatttttcagtctgtgtatctctacgattcctgcggaaatcatcgccattatcgcaatcacaagcccaatccccatcctctgaagctcagtgagacctttgttgcgttctgttttgttaagtcttgcaaagagtggatcaagaaaccgcctgtatgcgaagatgaagaaggcgacactgagaatgtcgaaactagacatgcttgaagctggaatccggaagtttttgatgtttgtcttcatcgctgctccttgcacaacgaacagtgaagccatttgggtgaaaacacagagtagaggatggtgcag

SEQ ID NO: 17501 - DNA, 465 bp, Arabidopsis thaliana columbia
gttataagaaaacgaataagctaagcaataaaccggattatagaatgatcaatgtaatcacaaagtttatatagagataattgtaaccactatcaaaagccatgtctaataataattaagaaacctattttatctccacccatatataactggtttcacccagatctacgaattacgattgcaaaaaaaccctaataatctacagcaataatagttcgattgccagcatggaatcactctcccaaagaatcaacagtgagagaagaaagagaatgggtacttacagtttatggattttggagtaatcgcgactaagaatactgtaaccagtagacatccgagtatcggcggcgataacacagtaatccgatccagcgatggccacacatgttctgaaaaacacacaacgattaaattcacagtaagtgaatcgtaacacaatcgcccagatagcaaatcagaata

SEQ ID NO: 17502 - DNA, 913 bp, Arabidopsis thaliana
ttacaagcaaaagtaagaaaacatcttcaaataattttttgatttcttcaatcctttttctaagtttcattagatactaatacttttctaatatcacgaggacttacatggcctcaagtcacctgtggtgttgtgcaagaaggagaagcaaagtctgtctatgtattatgagatagctacttctatggctaggatatatgttgtacaagaccggcttttcttctacttcttgcacaacctgaggttattgaggctatacaagtcttcttctataatgttatttattaggtatggagttgatttgaactgtaagcaacaacctttgattaaaggacgtggtgtttcgtattgcaagaaccttctttctcctcggtttgaacagtcaggttataagaaattcttttcactttaacaatttaatgatataaccgataaattaacgcttctttgttttttcttgcaattcaaaggtgaatctgagacagtccttgataagacatattacgtgtttcttccacctgaactatgcgttgtgcatccgctttcgggttcacttatccgaggtgctcagaggttaccctctataatgagaagagttgagagcatgttactcgctgttcaactcaaaaatttgattagttatcctattcccacatcaaaggtatatatatatatattacgcttagtgtcttttttttttttgttgaaactatctaatcatatttggtatatatatgtagattcttgaagccttgactgccgcctcgtgccaggaaacgttctgctacgagagagctgagcttttaggagatgcgtatctaaaatgggttgttagtcgttttctgtttctcaagtatcctcaaaagcacgagggtcagcttacaaggatgaggcaacaaatggttagtaatat

SEQ ID NO: 17503 - DNA, 628 bp, Arabidopsis thaliana
tgaagatattgttgcatctcgagaaccatgttgacggttctaaagacgagaagggttcggacattttacggtggttagatgaacaaccacctaaatcggtagtgttcctctgctttggaagcataggaggctttaacgaggaacaagcaagagaaatggccattgcacttgagagaagtggtcaccgcttcttgtggtctcttcgccgtgcatctcgagatatagataaggaacttcccggagaattcaagaatcttgaagaaattctcccggaaggattctttgatcggacaaaggataaaggaaaggtgatcggatgggctccacaagtagccgtgctggctaagccagcaatcggaggttttgttactcattgcgggtggaactcgatactcgagagtctttggttcggtgtcctatagcgccatggccgttatacgctgagcagaagtttaatgctttcgtgatggtggaggagcttggtttggcagtgaagataagaaagtattggcgaggcgatcagttggtgggacggcgacggtcatagtgacggcagaggagatagagagaggaatcagatgtttgatggagcagatagtgacgtgaggaatagagtgaaggagatgag

SEQ ID NO: 17504 - DNA, 484 bp, Arabidopsis thaliana columbia
gaggatccctaaatggtgtcaagaattacgctgtaaagatggtaatcatagcaatttatatagtaattaatgggatggaataaagaagttttgatgggtttcttaattctcctccttcttcatcgtattacatgatgaaatatgtaaaattgcagagtacaagatttatgggtacccttactcaaccaacacaaggcgtgtcctcgccgttcttcatgagaaaggtctctcttacgatcccatcaccgtcaacttgatagccggtgaccagaagaagccgagttttctcgctatcaatgtacttttcacatctaagtatctaactctgcttcatgattaatggttaggtcttaactagggtttccattttattggtctcttcttattgatgcagccatttggtcaagtcccagttttcctagacgggggtcttaagttgactggtgagtttaaactacattttcaactagttggtgatctaatt

SEQ ID NO: 17505 - DNA, 654 bp, Arabidopsis thaliana
cctctgcctacggtgtacacagttggaccggttatgaatcttaaaatcaacggtccaaattcatctgacgataagcaatcggagatcctacggtggctagacgagcagccacgtaaatccgttgttttcctctgtttcggaagcatgggaggtttccgtgagggccaagctaaagaaatcgcaatcgcgcttgagcgaagtggtcaccgctttgtctggtctcttcgtcgtgctcaaccaaaaggatcgataggacctcccgaagaatttacgaatcttgaggaaattctcccggaaggattcttggaacggacggcagagataggaaagattgtaggttgggctccacaaagcgccattctagcaaatcctgcgatcggagggttcgtgtcgcattgtggatggaactcgacgctagagagtctatggttcggagttccgatggctacgtggccgctttacgcagagcaacaagttaacgcgttcgagatggttgaggagctagggctagcggtggaggtccgaaatagtttccgaggagatttcatggcggcggatgatgagttgatgacggcagaggagatagagagagggatcaggtgtttgatggacaggatagtgacgtgagagtagagtgaagagatgagcgagaga

SEQ ID NO: 17506 - DNA, 1033 bp, Arabidopsis thaliana
  unsure (1)..(1033): unsure at all n locations
acaaaatctcaatgaattaaacgtcgttacctttaattgtatgatagtgcagtatatagctgacaattaaaagaaaaaaatactaacgtaacgtactaacgttgaagtctgaagatcaagattgtatggcctgtgacaaaagttaaactaacatcagtagatgtccaagtaccacatgtcatgtatgctaaagacgaatcttatctcttcaccgaaacatcttcaaccttcaataggagaaaccaattctcaattgctacaaaaatataaatattttgaaaaatgaaactggagctggtgttcataccatcacctggtgacggacatctccggccattagtggaggtagctaagcttcatgttgaccgtgacgaccatctctccatcaccatcatcatcatccctcagatgcatggatttagtagcagtaactcttcttcttacatcgcttctctctcctctgattctgaagaacgtcttagctacaacgttctctccgtccctgataaaccagactccgatgacaccaaaccacattttttcgactacattgataacttcaagccgcaggtcaaagccacggtggaaaaacttactgacccgggtccaccagattcgccgtcgcgtcttgctggattcgtggtggatatgttttgcatgatgatgattgatgtcgctaatgagtttggtgttcccagttacatgttttacacatccaacgcaacgtttcttggattgcaagttcatgttgaatacctttacgacgttaagaactatgacgttagtgacctcaaggactcggacactactgagctggaagttccttgtttgactcgtcctttaccggttaagtgtttccctcggttctattaaccaaggagtggttaccggttatgtttagacaaaccagaagattccgagaaactaaaggtattttggtaaatacattcgctgagcttgagcctcaagctatgaagttttctccggcgtagatagtcacntgcctacggtgtacacagttggaccggttatg

SEQ ID NO: 17507 - DNA, 376 bp, Arabidopsis thaliana columbia
ttcttctttacaaaagtaataaagaaggctagcttctcttttaatggaagtacaagaggacccatagttgcgatatttatcttaagagtccttgcagccaccataggtagattctttgtcaaggtaactccaattataccatcttcatccgcttctggggtcgcacattcgaacgacctatcatctgatccggtatggatccgtacggtgtgaacaagctcgtatttggcgcggttacggtctctagatctgtttgaaagcagaaccgcagcaccaccaacgcggaacaaacagtttgtgactagcattgatttgtttttccctagtataagttctgagtgatggtctctgtgcttactacaatagcagaagtgtg

SEQ ID NO: 17508 - DNA, 377 bp, Arabidopsis thaliana columbia
cgaattgatcaggataacctcatagccctcttctcttaaggctttacaagcttgagtaccagagtaatcaaactcacaagcttgtccaatgacaatcggaccagcgccgagaatcataatcttcttcagatcggttctcttgccgacgatctccggagaaaaaggcttggtagtggtgtcggcgagctctgagacgggtttgagaacatgcgtgagggagcttttccgattgagacatggggggaaagtggagaaggaagaagaagacgaggcttgttttggttttgatctgtaatagatggcagagcgagagaagaaagtggaataggagagcttggaaggagagaaacgaggattggatttggaagaagcgacaa

SEQ ID NO: 17509 - DNA, 954 bp, Arabidopsis thaliana
tgccaatcaaccttttccccaacaggatttaagtggatccacgttgcagcagaggagaaaccaacagaagcctcacttcccccaaccttccacatgaacagatcatcttcagcatccacttgaaggttcaccacactagaaagagggagacagttctttaacagctgaataattgggttcctgctcctagacccatttatccaccaaaccccatctcttaaagcatctgcaactgaagcattcctaggtaaaccagaaactctaggtcccaagtcacctgttaaatgaataagcggtcccaaattagtccaattctcactccaaaaattacaagtgatccccgaaccgactttgcaaaccacaaactcccgagccattggacgaagcttgcaaatactcttccaaatccagctccccgagttaatattcaccatatcccagaagttctactccccgagttaatattcaccagctccccgagtatatcaatattcattttgttgataatgtatggtactaatatcatatcttatcattaacatacaaaatatttacataacgattatatttaccgcataacatagtttatatcatagatcagattcaccatatatatatcaatatgtctagattcttaaacaaaacatcaaataaaataaaaatagagggagtggattataaagttggatgaagatgacggttaatttctttttttgaagcagcggctgcaagcaactccggccgtatgagatcttcccatcctttaccaggacctgtagccgcggttagaccgctttcccaaccgatgtgcgatacatgttttacgttcgttggaactccctactccattcctgatgtttcgacttcttccttctcttcatctttgtcagctataacatttttggaagaaaagatagtaccaacttataaatgttaaagagtgaggacacatgt

SEQ ID NO: 17510 - DNA, 1293 bp, Arabidopsis thaliana
ggtagcggtgcttggtttaaatggcctactttgaagctttgttcgactgatttgaagaaacggttgtcttataagaagaggaagaagaaggattccgcggttgggttgtttgtgtttcctgctcagtctcgtgttacgggtactaagtattcttaccagtggatggctttagctcagcagaaccattggcatgtgttgcttgatgctggttctttaggtcccaaagatatggattcgcttggtttgtcattgttccggcctgagtttatcattacctcgttctaccgtgtatttggtcatgacccgacaggatttggttgcctgttgattaaaaaatcagttatgggaagccttcagagtcaatcagggaaaactggatcaggtatagtgaagatcacgcctgaatatccgttatatctcagtgattcagtagatggtcttgacggattggttggttttgaagatcacaatgacgataaaaccaaagaagctcatcgtccaggaactcagatgccagctttctcaggtgcatacacttcagcacaagtgagggatgtgtttgaaacagagctcctagaagataacatatcttctgatagagatggaactactagcaccacaatttttgaagaaacagaaagtgtttcggttggagaactcatgaaaagtccggtttttagtgaagatgagtcatccgacaattcgttttggattgatttgggtcaaagtcctcttggttctgatcagcataataagattgcatctccactgccaccaatttggttaaccaacaagagaaaacagaaacaacgacagtcgcctaaaccaataccgaagagttacagcagtccattgtatgatggtaacgacgtcctctcgtttgatgctgccgttatgtcagttacagagcacgggacaaactcgactccatcgcggaataggaggagctctagtaaccatctccatgttcaagagatacaggaagaaaactgtggtcatagctttgcaaatggcttgaaatcttccaacatttcatcagaaatcaaagagagtgctattagacgagaaacagaaggagaattcaggttattgggaggaagagatggtggtagaagcaggttgttgggtgtagaggatgaacatccgagcaaaggaagacgggtttcatttaacatggaacgtgttagtcatagcatagtagagcctggtgaagcttctctagctagcgtttatgatgaagattacattacacgagtgatgttgaaaatggagatgatgagggtgcggatgatg

SEQ ID NO: 17511 - DNA, 862 bp, Arabidopsis thaliana
caaaataatatacgattaaattgaatttaaaaaaatctttcttaagcatttaatactctacactctagtgtatatcacccaagttgatcatgtgtcacttggtccctgcattcgcattcgtataacacgtgtgtagaaaaaaaaaattcgttgataaatacataatcaacgaaaccatgctcgtctttactcacagtaactcgcaacaatgtcttccacaaaactcatttccatcactttcttcttatctctcctcctacgattctcctccgcccaaacagtcgtgaaagctacctactggtttgcggagagtgaatctccgttggcccaaattgactcatctctcttcactcaccttttttgcgctttcgccgatatcaacactctaacctatcaagtcattgtctcctccagaaacaaacccaaattctcaacatttacacaaaccgtccgacggagaaaccctaccgtgaaaacccttttgtctatcggcggtgatttcacatataatttcgcgtttgcgtctatggcaagtaaccccacctctagaaaactgttcattagttcttctattaagctcgctagatcgtgcggattccacggtctcgatctaaattggaagtatccgagcattacgacggagatggacaatttcgggaagctacttcgagaatggcgattggcggttgaagcagaggctagaagcagcggtaaaccgcgtttgcttttgacggctgcggtattctactcctacagttattattcggtcttacacccagttaatgccgttgccgatagcttagattgggttaatcttgttgcctacgatttttatgaatcgggttcgtctagagtaacttgc

SEQ ID NO: 17512 - DNA, 522 bp, Arabidopsis thaliana columbia
aaattctggtaaaacctagcctagtagatataggcgtcatcaaaagccgaatgaccaacatattttgctgatgtatccacctgaaaatataaacgttcaagagattgatgtgccttatagatcgaacattaggtcacaaatagggtcttatagagtaatagagagttaagaggtcataccgagctcacaatcttttcctgaggcgcaccggaatcatttactggagtaaatttgccagcggttgctcccaagtcgtcatccttcttggctggcacgtaccatacgttaacagtatgtgggcttaaaaggaatgaacgcacatagtgctcgtagagataagcagcaccgttcatgcccggtaagaccaaccaactagttagggctagctttgcgtatggatataatgggatcctgatcataccataaatctcgaaacttcagtctatataattgaatcaatgaaccaccgttacatacagctcagtttatctcctgaagtcagtctaggaatgttaaacataa

SEQ ID NO: 17513 - DNA, 602 bp, Arabidopsis thaliana columbia
tccagctacatcgtggaagatcgaccgatctggtctgatcccgttgactcgcgcaccttcctcgactctgttgatgagctacttgcgattgccggagacttgagatccatggccggagataaatccgtcgccgtctgtcaatcccgtgccgatgagctgattcaacaggtgatgtttaggcttcaagaagagtttggatttgtaatggaccgagcccctgactcgtttgactcggacgatgagttccccggcgaagaagacaacgacacaagcgacggggtaattaattcatctgtaaatttattactaaattagttttggaattagaattagaaaattcggtttactatcggttatattgtggttaagtgattcacaattgaataggtaatcgttgctcgtccaatcactgattacaaaatcgtgatcgaggcgttacaatctagcgttattggcgatctaaacgcgatcgctgtgcgcatggtcgctggtggatttgcaaaagagtgttcaagagtgtacagcagtcgacgaagagagtttctagaggagagtttgtcgaggttacactcagaggactaagtatggaggaagtcaagaga

SEQ ID NO: 17514 - DNA, 844 bp, Arabidopsis thaliana
tactgttgaatatttatccaaacaaaacatctaagagctatgattttttaaagttaagccaaaatcatataacaaattcgtttcaattcatttatctgaaactggacattataagttcttgaaaattatgtataaaacccacatataaaaagggaaaagaatttaaaaaacaaacaaaaaaatagtgaatataaacggtcatttttttccttgttctctgtcttggttttgtgtgtgtctagctgatctgttctccgatcaaatccaaccctacaaccaagaaagacagtccctgaaacaacaaaaagtagaagtgaagaccgtgcgccgatagaaagctccttgcagctgcggttagcagcaagaacgcaagcccgagctctttcttgaacaccatgttcgtcttcttcttgttcttcggcctcattagccctccaaggctcttcttcacggtttcttgccctacaagatttgtctcttgctccttaagtttgctcagaagctccaaacctgactccgagtttctcctatgcaacttctcttccttttcagcaaacgctagcaaatcggactccgatgatctcccggttttcttcgtcacaacccactcgtaagccgatccaaactgaaacagcccggagatcatggcgttgaacttggttattgacattgtgttttcgaaaagaaggtaagggactaagaaagggaaagatttaggtgacgggagaatgttgagaagcgaaatgaagataggaacatagcagatgatcccaacggaagctcggcttcgggtatgacattgtcaatggaagtataatgcgaaagagtgtgaatgagtaaatgg

SEQ ID NO: 17515 - DNA, 631 bp, Arabidopsis thaliana columbia
gccagtgtgctttaaaggaacaacctgtccattatatatcaaataaaagcggtcagtgctctggtaaaaggtaaaacagatgagtcttaccaggcgataaatactggcattgatcttgaaatgtcctggctaaattatgtgttgcttggcaaggtttatgaaatgaaggggatgaaccgggaagcagctgatgcatatctcaccgcctttaatttacgcccaggggcaaacaccctttactggattgaaaatggtatattccagacttctgttccttatgttgtaccttatctcgacaaatttcttgcttcagaataagtaactccgggttgatttatgctcggaaatatttgttgttgagtttttgtatgttcctgttggtataatatgttgcggcaatttatttgccgcataatttttattacataaatttaaccagagaatgtcacgcaatccattgtaaacattaaatgtttatcttttcatgatatcaacttgcgatcctgatgtgttaataaaaaacctcaagttctcacttacagaaacttttgtgttattcacctaatctttaggattaaccttttatcgtgagtaatcttatcgccagtttggtctggtcaggaaatagtta

SEQ ID NO: 17516 - DNA, 661 bp, Arabidopsis thaliana columbia
tcaaaaaaacaaaacataaaaatattttttaaaaacaatgaaatacgcagatatatcacattttagtcaccctcaacacaacctcaaattcgactacacggagaaacccttcaaatgtgatggatgcaatgaagttggtatcggctctcgctatcgctgctccggtgataatcatggaagctgtgattttgatctccatgcgcactgtgccctgccctcagcgtccataacacatccgttctacaaaaagtgtacgtttcagtttgtggcgcggcaccagggaacgaaagacggtactgcaatgcgtgcgagaaggatgtatcggggtttttgtaccattgcaaggcttgtgggtttgatcttcacccgtgttgcgctatgcttcctatggttttggacgatggagagaccaatctctttctttatcgtaaagttagttcgtcttgtcatcgatgtggaaaaaaaggccgtagctggagttacaggtctctcttcttgattctcttcttgttctttcattattatgatccaaagattagcatgtaagaaaaataaaaattgtttcgtcttttttttataattattagcatgttttatttgaaaacatatatagttcgctatattagaaatatagtatgctatatgttagaaaatactaaga

SEQ ID NO: 17517 - DNA, 738 bp, Arabidopsis thaliana
acaaacatgctagagagtatgattaatcatccaacgcctacaagagctgaagtctctgacattgcaattgcagtacgtgaaggcgcagatgctatcatgctttctggtgaaaccgcacatggaaagttcgtatttctaattaaagccttaccttttgacgtcaatataacttaccatgtcatgtgatcttgaatgttctttggttttaattctcggatgtcaggtttccgctgaaagctgttaacgtaatgcatactgtggcgttgagaaccgaggcaagtctacctgtcagaacctcggcatcccgtaccactgcttacaaggtactcacacattcctcatatcagaaatattatatatgatatgttaggcaaatgtgaatgtgttaataatgatatttttgttacagggtcacatgggccaaatgtttgcttttcatgcttctataatggcaaatacactgagctcaccgctaattgtatttacgagaaccggatccatggcagtgcttctaagccactaccgcccatctgcaacaattttcgccttcacaaaccagtaagtgtttgttcatctgtcaatcaggaaatgtcctatgtatgcaacttttaatcgatgaaatgggttttgatcgatcttttggtttatttcctttaggagaagaataatgcaaaggcttgctctttatcaaggtgtcatgcctatatatatggagttctcggatgatgcagaagatac

SEQ ID NO: 17518 - DNA, 608 bp, Arabidopsis thaliana columbia
gctaatgttattgggtactcattaaacctatctacttttgttatatctactacaggaactatgccttattgttacacaatgaatcaagatatctaactagatattttttatttgtcattgtagaaagggaaataatggttcatcaacaaaaggcaagaaaaatctgaacaagcaactcattgacgctattataaagatgctcaaccaagtgaacccatatgtagagaagttcagatctgctagagagaggattgattctactaatgatgaaccatttcatatgagaattgtttctgatcgtaaaggtactgatgggaggttatataatatgcctacagcaggcgaggttgcagctctgatccctggggattttgttagccaaatgcctgtccgtgatatcattctagaaaaaaaatctactggtcgcctcaagaggataagtcagattcatatatcctatttggcactacaatacccattaattttttgctatggtgaagatggttacctcctggaattgagaagtgttataagtcgggttcaccaagaaaaaaaagtgtactagtatgagacagtggtatgcatcagaatttcagagagggagatga

SEQ ID NO: 17519 - DNA, 565 bp, Arabidopsis thaliana columbia
ggccgagcttggaacacccttctcccagtagagttccaagacccgcttgtccttcctgaattcggccttcttgagcggcagttgatcgcaatggacacgcttctcaaagccccattccggaatcaagacgtcaaaagccgactcgtagacgcacaagacgatgccttcggaatcaagtcgccattcgcttcctgccgcttcttgtccatggtccgacacgattcaatatgaatgctctgctcctgtgcattctgcgccgactccttcttcgtgttgcacgactcaaccgtcttcaccagattctccatctcgtccgtaaactcaatcttgccctctgaaagcaccgcctccagctgtcggtgaaccagaatatcggcgtacgggcgtgtcggcgacgtgaaatgcgtatacagtggcaggttcaggccatagtgaggccacagcgagctggccgtcttgccggcaataaaatacttggcccgctgcatcgacttgagaaccagcgtctccattcccttgcgcaaatcagcgtcgtccaccttgaacaagctgctctggagggagc

SEQ ID NO: 17520 - DNA, 384 bp, Arabidopsis thaliana columbia
aatccctttttatgtagtacctgaagtttccttctcatgattctccatttagattgaattttctctatctctgggtgtgatcggtctcccgctaaaaactcgtgtgtggtcccttccaagctaattgtactacatcctggaacttttgctactccttgttctttcatcaatcttcttgtttcagcttgctttgtcccaactttttatccatggcatgaatatttgccttatgaacatagtcttccggcatgatatggatctattgcaattaggatttctccaatttcctctcccaattcgatgtttctgtgaatctacaggctttgagcaacgcaccccatatcacagcatttggcttcaatggcatctcctgaatgaaacgtt

SEQ ID NO: 17521 - DNA, 766 bp, Arabidopsis thaliana
gctattagattctgttcctgacgatactggaaaagaagaccttctgctgcatctgaaaatgttatctttgcaaaaggtttggacattatattgcttttgtttctgtctgggaaagaaattcagatttggaaatatcttttgtttaatgttgtttgataaacctttttaggttgccgctgaaaatgggtacaatagattagtgttgggatcatgcacgtcgagaattgcttcccatgttcttacggctactgtcaaggtgtgttgcttagtgccctgacttgactcgtgtttcctctggcttagttattctatagattgcatcttagagtgagaacttcatgccagaaagcaatcaatggctaccttaaagaatgtagatattttggacttaaccaattacatctctaaaaattgaagttttggtgtaaagattttatttcagtacacaatgttttgtgtactttatttggacattccctttagactatgttctatcagaattgtgagttgaattgctttttcttgaaacagggacgaggttattcactatcagcagatattcagcatgttgatgctagatggaaggttcccattgtacttccacttcgagattgtgttcgactggaaataactagactctgccttttggatgggttcgtttattggctgcctagtctacattgtattgttatagtgaaccttattcttgcataatccaactattgagtgacgtcacatattctgggcagggcagacttaagactgt

SEQ ID NO: 17522 - DNA, 660 bp, Arabidopsis thaliana
catcatgagattgtcaaacgagcactgatcatggcaatggaaaggcgaaaagctcaagtcaggctgctagatctgttgaaagaaacgattgaggttggtctcataaactccactcaggtgacaaaagggtttagcagaatcattgattcaatcgaagatttgtctcttgacataccagacgcacgccgtattttacagtctttcatctctaaagcggcttctgaaggatggttatgtgcttcttctctgaaatcactctctgctgatgcaggagaaaagttacttgaaaactccagcgccaatgtttttaaagacaaggcgaagtcgatcatccgagagtatttcctttcaggtgacacttcagaggtcgtacattgtctagacaccgaattgaatgcatcttcgagtcagctacgcgcaatctttgtcaaatatctgataactctagcaatggacaggaagaaaagagagaaggagatggcttgtgtgctcgtctctactcttggtttcctcccaaagatgtcagaagcgcattctcgatgctcatagaatctgcagacgacactgctttggacaacccagtggttgttgaagacttgccatgttcttagcaagagctgtggttgacgaggtgttagcccacgggatttggaagaagtg

SEQ ID NO: 17523 - DNA, 502 bp, Arabidopsis thaliana columbia
ataaaagaatatagaacgataagtgaatatgcactcccacgtatctgactagtatagagacctgaaacagtcagatagcatcttgtatgcttgctctgtctgttctttgctcctacggcttggcaaaagcgttggtgctctcgatagatcagcatagagcactgtaaatatcagatagttacttccatcagccatgacaaacaagagtacatttacacagccaaatcattaatcaactcaccacactcagccaattcgccatctctaccagctcgaccagcttctcggtagtaagcttccaagctctgtaaaatttcattatttcagtattagagagctcaacaaatttgaatagcacgtaattctaggagatgtgaaatgttaaatatagaaatcttataagagcttcgagagacctgcagccaaccataatgtatgattttccgaacatttttcttgtcaattcccattccaaacgcaattgtggcacaacaacttgcag

SEQ ID NO: 17524 - DNA, 848 bp, Arabidopsis thaliana
gtctaaaataataagtagagtttacttgacacaggatgacccaaaagacaaaacaaaacacaacacaagcattttacattccttatgcaaatgccttaaaagccttgatattcgcacatataaattctcagttcctacctcaaagtcaacgatagttggttcacgacttccgaggccacttgaccaaaattgagctatagctagttccatcgtttgaccactaaccacagggaacacaaagcttttagcagacggagatgcgaaagttggtgcgctctcccacttgataggccttcgcaatgggcaaacctgcaaattgagtaaagattagaaccagcagcataaaagtaatgaattatccttaagcgtgccctacctgaagtgtatcaatgtaaaatcgtcgtgtagtatcaaaccccgaagttcgcattgtagcctcagcccatgttgctccatgtggtacctcgatatatcttcgttcaatgtggcctacagttggaattattgaagaataaaagatcaaagatgtatataagcctgccgtttcagaggacttgtttgctttataaagcacacataacaaagtccacaaaacctgagatgaaagacatttgctgaaatgaaataactggaggttgatttgccacagtcttgggaattattattgttactgggattctgaaaaggggaccacgctctggtgctttgcaatcaatcccataaacttcaaagtaatgcacaccatccccaagatttgtgggatccacaacaacgctgaaaagagatgatataaccttactacagagacaacatgacacgaaaaagcaaacagaacataagcagaaaaa

SEQ ID NO: 17525 - DNA, 526 bp, Arabidopsis thaliana columbia
ttttcccccgttataaaggcacaaagcaaatacaaaattgaactcaagaacgaacctttccctaacagcagaaccagacaaaaccccaccataagcacggttcacggtcctcctgtttcttgataaacgtgacctcttgtactcagttggcctcaagtgaggaatctaaacaaccaaagagatataaattagatgctgaaggaaaatggctgaaacaactccatcaactttaagattactgtaaaccaaactatgaacaatttacaagatgtttgaagatttatgccaccaagtataaaagtgattccttacatacaaaaggagaaaacttgaaaagacaaggcggcactaaatttagcttatgataaagttatgtactggtgtggattaatcttaaccagcacaagaccgtcaataagcacaagaagaaatcaatacaatacagaatctataactaatacaatttaccatcaagatggcaaaacaaacaaatctaaacctagtgaaaagtttccaagatgattta

SEQ ID NO: 17526 - DNA, 552 bp, Arabidopsis thaliana columbia
acttcaggggattgctcgtgaaacccacgaactccatctttcatcttctcaagaagttcgagcgaaactccatggttgatcacctggaagaaaccccacttctctgctgcttctttaatcttttcaatcgcgttcttgtgcttaagctcgtcctcgaaaactcgtcctccaagatcgatcgttgggatcgtcttgagatgtagcaagtccgaggaaactggttcagggtttgcaagtttgacagatgaatgatgaaagatgcgtggaatctgtgagattccggagtcgacgagtcctttcacacccgttttggtctcatcaaaagctttaagctcactggcacgatcgaatgaaggagcaatattcttcgtctccatagttttagcttctcgaataacagagcaagaatgaaacatttttcgcaagttcaaagatgggaccagttgctacagcaaaaccattgaaaagcgataaggtttatagacaaaaacaaccgcttgtgacagtgacgggaccagacaagtgttagaaattaataagaaagaaaaaaaa

SEQ ID NO: 17527 - DNA, 755 bp, Arabidopsis thaliana columbia
ttcgtaaaacagcttacaattctgttacgaagatcttcctcgcgacttcacagctagccactactcttttagacgagttctcggattttctttccataactggggaccaaatcgtttcttctagaaccaggtacaaatgataagctctttttgtattcttatttcataccaccaagccactaagtatactgctgcctgtttagtgtttagttagctctgatgttatctcctaatatttcttgactttttgtaacagtttgattcatttgacattttgaaaggtttggacctaaatgccaacaccgacttattcatttaggaactaacttggcacctctgtagtgacgcagataatcccgcggatcatcaagctcctttcgtcccctctgtagaggtgttagtgaaggctttgattgtcatttcatcggcagcagttgctggacctccaagctcatggattgttcgtgccatattttgctcgcatcatcccagcatagttggtactggaaaaagagatgctgtttggaaggtaatcttgacattagtcattcgacatggttaattctacttactcatatctcttttctttgcacttttaaaaagtgatttacaccacctgatatacacagagattgcaaaagtgtctcaaaacttgtggttttgatgttgctacttttttgtctaccaatggggaaagtgtttgcaaggtaatctcatgactgtcaatgacttctatgtgccgaaacttgtggttt

SEQ ID NO: 17528 - DNA, 1020 bp, Arabidopsis thaliana
caagtttgggaaagtctttgcacctacatatcggaaataaataaaagacaccaagttgaaaagggtttctctagctagcatttgacaaaccggtcctaagtatcatgaaagaagtaaaagtttttctcttaccattgattaagtttaatatagcagcagcactcgtgttcagagttggctgtaggagaggaccgatcaccatagccgggttaatagtaacaatgtctaagcctttctctttagcgagtttccaagctgcatcttccgccaaagtcttggatagaacataccacatctgagccaagtaacaaagcataacattttagtttgaagagaacattacagcacaataagacgactagttgctagtagatgacaacaaaataatcgaaatgaatcatggctcaatattcaaaacacaccttggaggcctcgcaaagctcaggatcagagaaccaagtttcatcgacggtaacatcaggtgtgcgtggttttccattgtaaccaacggcagccatggaggaggttacaacaaccctcttaaccgaagaggctttggcgcacgaattcaaaacgttaagcgtccccttgaccgcaggatcaataagttcagcctggagatgtggatacatagttaagatcaaatcaatccacaaaataaaaagcaattttttgagggaataaaaaaccaaacctgtgggtctttggcatcattaaaaaatggagaagcagtgtggaaaactccatggcaaccatcaatagcagagtcgaaagaaccttgttccaaaaggtctgctttgaacaagtgaagtctttcctttgcaccttctagtgaaactaagtgttgtgtctttttcggatcacctgtgtacaagcagagacaagaacatcaaaggatcattgtttgtgtgtttagattgttcttaagatcaaaattggtatccaattccaaagtatcagtttttaagatgtagccttcgattcactaatagaatcaggatccaagcacacagagtttac

SEQ ID NO: 17529 - DNA, 517 bp, Arabidopsis thaliana columbia
ttcccgcatacttgtttgacgttctggaacagagcttgatgcgttggcagtaccaccgccaaaatatgaaaacgggtttgcataagacagtactcttctaacataagcaaagtaaccgccactattagggtctgtgttgttgttagactccgagtaagatgttcctctttgatagacggttgctctttttcgcggaactactacaagtgcttgtctatcgaacaatctcaactcggatagagacttatccagatctgcagagattaagagtaatggagttatgtatctactacactagtccaaactgaccagaaaaaaaaaaaaaaaaaacctaaatggcagaaaacatcatcttcgatcaagatgaagctggttttaaggtaaaatgttctttaccaaataaaaataaaaatctattggatgcattgtagattttacgtaccttggtcagtatacaccttacgtgggtaaggaaccgcaagatcataagcacccagtccgattgtttgattactgt

SEQ ID NO: 17530 - DNA, 720 bp, Arabidopsis thaliana
ctctagtacgaatctgatactctactaatatccacaacaatcgacatagctacactaggcatccaagcttctgctgcctccactattaacaccggcgaagttccggtgaaacggaaaagaagagagaagatcggagattgaactgaatcgttattaacagaattaagtgtttgttacaacgttcatcaacaaaataaactaaggtttagtttatatatacacaagataaatgatattaaaccagtatctagataaccggagttaaccagattaaaccaatcaccaatacacccccctcaaatcttatcttccttgctgttgaagagggagataaagatttgataatgacatgcgtttgagtaaactatggaaaggacctgggtgaagtggcttggttagaatgtctgcaagctggtttcctgttggaacatgtagagtcttcagttttccagccttgatttggtctcttacagtgtgacagtcgatttcaatatgcttggtacgctcatgaaagactggattcgtcgccaagtgtagtgcagatttgttgtcgcaaaagagtttagccggacaagtcatagtcacatgcaagtctttgagcagctgttgcaaccagataatctcacaagtggcttgtgctaagcttctatattcagattctgtactactccgactaaccacagattgcttcttactcttccatgtaatcaaagatgtacc

SEQ ID NO: 17531 - DNA, 676 bp, Arabidopsis thaliana
cacaaactctgagtaccataagacaaagataaccgaaatctaccagattgaaagcaccgaagtttctaaaaccgggttaggaagaaggcctgaggcaagaaccagaagctcgaaggaccaaagctccaaactgtttcaaacagaatttgattaaaatgcagatactggaacctgaacaatgcagcattttatgtttgatgacttaccagaccatgaccgctgaaggaaaagcaattttagagaaatcataaagttcttgaaaagcctctttcgaaaacccggtccaactatgcgagcaagaaggcgaaaacttgacataacacgagaggagaatgacgttgaaccagtaagagaccgaaatagcaagagcagctcctctgtatcctaaaccagtcttcaacacaaacaaccaacagagaagcaaatgaagacatgtagtgataccagagcagacaaagacagggaacacattgttctgcgcttgcaagaacctgttgatacattgaagcagtccgtaggcgaagaggctcgggatcatgtatttagcgtaggagccagcaacacttgcaatggacttgtcttgatggaccaatacgagaatctgttctgtgttacccaaatgattgagagaggaacagagagtataagaagtacaaacattgctctctgcatttga

SEQ ID NO: 17532 - DNA, 451 bp, Arabidopsis thaliana columbia
ttcttcaacaactatgacaatgggaatagagagggtactcaaggaaaagtttggagatgcattgaaagatattcgacaagtttttgatgaagaagtaaaacagataaccgtggaggtgagtgaggcttctttttaagaaattcgcgttgatatcttcttctgtgtttgcctttgactggttttgggttgcaaacttgcaggcagtgaatgctcatctagatatactgaggccagctatcaagaactatggcggaagtgttgaagttttatcggttgaaggcgaggactgcgttgtaaaatatgttggaccggagtcgattggaatgggaatacaggcagcgattaaagaaaagtttaaggacatatctaatgtaacctttacaagctagaaagcatgaagaaagccactatattatgtaaaaacattattgctctttgtttgagctaatgt

SEQ ID NO: 17533 - DNA, 792 bp, Arabidopsis thaliana
tgaatatacactggtttgttatctttattgtgtgtttttaatatacaaataccacacatgtgttatcgcttctgatggaatcattttcaatctggcagagtaattccaagtttgcattgtctatagaaccaacaaacgaagtgctccagtcttatgcagcctacgttgcagaactccgtgacaagaaattaccaacggtaatctttctttcatttcagtaacttcactgtcattgatgtttcttctgtcgctattgataatatatatccaaagtaattgaaattatgacttctggactcggattctagattttcttgattaatttcgtgtctgggaaatctcagattccaacgacgatgaagatggagaaagcttgtaacccgtttctccgcactgagaacacagatatccgtcgagctttaggtattccagagacagcagatgaagcagaagctctgggtattataagaagagcaaaggacaatttcaaagcttagctaaaatataataagaatggttcctctgtacagtgatgatgcgatcctggtttaatctgtaataaggtgttttgagttttgaccgtgacgttacgtctcctagtagttttcatggtcatactcgacatgattttcttcttccttttgatcaaacggtcctaagtacccaagtctctactttgatgaaccctcgaattttgttattatttgtctttggatcttttgaagggagtagctttgaaatcaaagtcacaagagttttctctgaagttaccgaattacatcttttgaagtt

SEQ ID NO: 17534 - DNA, 271 bp, Arabidopsis thaliana columbia
caatggacatttttacggtatgatacattcttttgctaactcactcctaagaaaacagctgtttcatcatgttctgtttgaatgaaataggatctgcctttgggacaagagaaaacagagagttttcatttagctcccaagtcaaactacgaggtggagctaacaaaaatcgtactactgagtgtagcagatggattgccggttagttcttaggatgacgtaaactgcatgtctgtgtgattgctgatgcagactgataaaaatagtgtcc

SEQ ID NO: 17535 - DNA, 1312 bp, Arabidopsis thaliana
tgtgtatatataaactaaactttagtttattttgttgatgaacgttgtaacaaacacttaattctgttaataaagattcagtttaatctccgatcttttctcttcttttccgttttaccggaacttcgccggtgttaatatggtatcagagcatatcatttgagcttccgcatatcatcggagatgagtctttcattgaatcatctttctcttatgagagtctttcgattcctacgatcgtttgttgcaatttgcaatttcttcgtcagctatctaattttggttctgattcttcttctttccttcgattgaccttttgtggtgacgaatctcactttcttttcatttcgtctcactttctttgatttttctttaacaatttgttaagaatgggttctatgaacaatccgttgaattcttcaagtcttcgtccacctccagctagtgttcctgaacaatcgcgatatcaagctgatcaatatgagaatccgcatcatttgcatacgagtgaccacgcaggtttggttctagtctcagaacgccttaatacagcttcagatttccattcttggcgaagatctatttggatggcattgaatgttaggaataagcttggattcatagatggaacgattgtgaaaccaccattagatcatcgtgattatggtgcttggtctcgttgtaatgatactgtgtctacttggttgatgaactctgtgtcaaagaaaataggccagagtctccttttcattccaactgctgaaggaatttggaagaatatgttgtctaggtttaagcaggatgatgctcctagagtgtatgatatagaacagagacttagcaagattgagcaaggttctatggatattagtgcttactatactgaattgcagacactttgggaagaacataagaattatgtggatcttccagtgtgcacttgtggtcgttgtgagtgtgatgctgcagttaaatgggaaagattacagcagcgaagtcatgttactaagttcttgatgggtttgaatgagagttatgaacaaactcgtaggcatattttgatgctaaaaccgatacgtacaattgaagaagctttcaatattgttactcaagatgagagacagaaagccatacgtcctactcctaaagttgataatgtggcgtttcagactgtttcttataacagtggtgatccttatatggagaatatggaaaatggattcattgcggcttataatacagcaagaccagctcaaattacctctgtgtactaactgtggaaaggttggtcatctgtgcagaagtgttcaaa

SEQ ID NO: 17536 - DNA, 743 bp, Arabidopsis thaliana
gaccattcgcattcgcattggctaatagaaagaagaagacaaaaacatagattcaaagagcatatacgtataaaactcattacctatgaattccatattgatgatcctcttcatcatcttcatcttcgtcttcatacatagacttcataaatggctcatgagcatcacgagtcatcttagcatcaccaccagcggattctagattgttacctgtaacaccggcgaccgctcccataacggttgttgcggcggctgctgtgactgcagcttgtcttttagtggcagagtattgttgaatgactaataccgaagcatgcattgtgaaattcgacgaagctaatgtgtcccctattgtgcctagctcaggactactgctccaatcgtttaaaccggcagtcaccggagaatctgagttatatcctcttcccacaacgtaaagatcataagaattgttgtcttccatttctctgatcgtagctatcgtgtcttgaccatcgttgaccactttcgctatatatttaacggagaacattcattgtcttgaaattaaattcgtagatgcattcatcgtcgacttgttgctccctctcgtacaccgctgcaactgtcccggatgagattagagcttcgcgtcctgggacgaatctgacctacagtgagtgtaatcacgtgttgtccgagcattcgccaagcggagtgatacgcctcgcggtcgtcttggacaccgacgaagagcatggcga

SEQ ID NO: 17537 - DNA, 448 bp, Arabidopsis thaliana columbia
atgttaacgtctgtttaggacgtcgatgaacacatcatcactatcgcgcattttctgcatccaccctgtgagaactttgagctgctcgtatttatcgttcataatcgtgatgtgtaaaatcgtttctccatttacattcacatctttaatgctttcaggacatgctaggagaaaatctgtaagaaggtctacgtcacctttcttggccacaagatgcaatggtgtcatacctgtcgtcataataaccatataaaaagtctctagcttatcaagtaacttaaaataataggtttcaaataaattcggttaaagattttgaaccttatattacaaaaaaaaaaaatgatttttgaagaagctatacctcctctaccacgaatacgaacaagactgggatcaaccttgactagctctagtgctaactcaacctggtcgttttcgaagcgag

SEQ ID NO: 17538 - DNA, 620 bp, Arabidopsis thaliana columbia
agaggatccccaatttcccaatggtataaccataaaatctagcttgaaaattagaactatggaattccacttgaacttatccactttccctcggacttcaagttgattaccatcagccacagagactgtagaacagactgcatgactcatcttaactcccaacaactctgctgttttagggtacatgaaattatgtgtagatcatgtatcgagcaacagaaagatcagacgttttccatgagtgccacgcactttcagagtggtataatctgcaaccccggaaactgcacttactgaagcttgtggcctattgttctcctcctgaacgaccaattcatgttcagtgcttgtatccatgtcagattcctccacttatgcttctacttcaatcatataaatatgagttttcttgtgtctgagatagtggtctagtgtgtactgttcatcacactgcttacctaggcctctagccctgcgacgactcatctcttcttgagattagaatttcattgctggcattttcttctcaaagggtgtcacttgttatgtgttgaaattagtcccttcttcaccagaggtttatgataaggccaccaagtgattggttaggtggagggtga

SEQ ID NO: 17539 - DNA, 987 bp, Arabidopsis thaliana
cgggattatgcaagaacctacttcaagaatacgctcaaaagatgaattacgcgattccattgtatcagtgccagaaggtcgaaactcttgggagagttacacaattcacatgtactgtagagattggaggcataaagtacacaggagctgcaacaagaactaaaaaagatgctgagattagcgctgggagaactgctcttttagcgatccagtcagacactaaaaacaaccttgccaactacaacactcagcttactgtacttccttgtgagaagaagacaatacaggcagctatcccgcttaaagaaaccgtcaagactcttaaagccaggaaggctcagttcaagaagaaagctcagaaaggaaaacgcacagtagctaaaaatcctgaagatattatcatccctcctcaacctactgatcattgtcaaaacgatcagtcagagaaaattgagacaacgccaaatctggaaccttcttcatgcatgaacgggttaaaggaggcagcatttgggagtgtggagacagagaaaattgagacaacgccaaatctggaacctccttcatgcatgaacgggttaaaggaggcagcatttgggagtgtggagacagagaaaattgagacaacgccaaatctggaacctccttcatgcatgaacgggttaaaggaggcagcatttgggagtgtggagacagagaaaattgagacaacgccaaatctggaaccttcttcatgcatgaacgggttaaaggaggcagcatttgggagtgtggagacagagaaaattgagacaacgccaaatctggaacctccttcatgcatgaacgggttaaaggaggcagcatttgggagtgtggagacagagaaaattgagacaacgccaaatctggaatcttcttcatgcatgagcgggttacaggaggcagcatttgggagtgtggagacagaagcaaccacgcataacagtgtcaagatggagtcttgtg

SEQ ID NO: 17540 - DNA, 525 bp, Arabidopsis thaliana columbia
gatctacagttaccgttgtgggaacatggcctcgattcttgaggtcgacgactgcaggaaccacaccttcatccaggtctttccccaaatcccacatgtcttgtctgctaatgaaactagtgtagaagaatgaccaaagctaacttgagtatataaaatgtgagtgcagtttgaaccagcaccgaggagaggaagaccagacgtcacccgaaggactccagactatttcctgtgatcactggacacagactcatctcaatcagcagctgcaggcacccacaagtgaaaagtcacagttggctaactctagattctggtcctatgcattgtgttcaggttgctctgtttaaaattcaacttagtgcccaccaccggaatatagtgtgaattatagccgaagaaggcttcttatctccctctataaccaggaaaagaaaaaagatacccattatgaacattgttttgttgatgttattagcttcttcttcttctccattctgcatcagaatgtggtttcatgtgaga

SEQ ID NO: 17541 - DNA, 517 bp, Arabidopsis thaliana columbia
ctcaaaacctgctccttggagaatttcgcaacgatagaacttccgaggaaactgtaaaacgcatcccaatcaattttgggattgaatcctgtcttagctctgtaatcaactaatccctgagaaatttcgaatctggttttgagaaaatcagaatgcaaaaccaaatcaaagtgtaacggagaagatgaatagaatacctttaagatagagagctcatcttcctcgttccagatccggacgatcaacggcggacccaaattcttcttcttcttcttctttttcttcttcatagtctcttcgcctgcttctgctgcgaaggaagcagcagcacgctttgaggaaggattccgtggagattctcgatgggagagggtatcgtcggagttatcaccaccaccacaggaagagaaatcgatctgcttcggagtcaccatggtaattgctttacacttgctgattctagaggcatgcagagatacctaaatcaggaaatcatatctacaaaattgatcagtga

SEQ ID NO: 17542 - DNA, 786 bp, Arabidopsis thaliana
tccctcaatgcgtttcaagcttgtgttcgagcttcgaaacagttcgaagagcttaacgcattctacgatctttccaaatcgatcggtataggaagaacatcggagtatcctagcattcaaaagatctctttagagcttcttgagacattgcaagagtttttaaaagatcaatcgtcgtttccagcgagctcagggttgtatccgtcaccgaatagttttcttcctccgcctccatcgtccaaagattcagcggtttcaagctcgcttgattttggggattccacgattgatacgtcggagaggtattcagattacgggtcgtttcgtagtacttcgttggaggatttgatgagcaggactgaagcagggactagtagtcctccaatgtcttgtcattctgagccatacggaggaggacgagatgatcctaatgggaataattttgatacggtttcgactaaatcgcttcccaataatccctctgtttctgcttccaatctcatattagacctattgtcattggatgacgtaagtaacacggcagaagcagaagatgttgaagacaagaagaagcaagacgattcaaaggcagagactttcgatccttgggaggcgttgatgttgagagatgatccgaagaagaagatagaaacgattgaggaggaaccttcaaccgctgaggaccatcagagagattcagggaattggttgcttgcgttagaagaaactgctacgcaggtgtctgggtaataactcgatggcgatagtaccgttcgggttagatga

SEQ ID NO: 17543 - DNA, 577 bp, Arabidopsis thaliana columbia
ttaggattcttgcgagatcctatggttttctctctctcgcctctcagtattggactttggatgtctgaatgatctaaatcaacatcatcaggatattgaagagagctgattagcttccgtggagtgctgaagatgttgaaatcttcagcattgatgcgacgtgaacgctgtctctgtgtatcagaaaagtcagaaatgtttaacataaatgaaactaacaaacatacaacaaagatggattgatgttcacctgaggactaggagtggtgtttctcaaactttccattagaaacccttcaaattcatctccattttcacaagtatcatacggtacaagaggtgaatcagagacagtggtgcttcctttagttacacgggagaaaagaccatcctttaaagagatatcaaccactcctccattctcatcacgtctccaaagtttgcggttcacactcctccgatcaaattcagagttacaagaagtatgagaaataggcgaggactcaaccggagaatcatcccgctaaaagagcctagagtctgtgattcaggtgataaggagtaatcaggaacaatg

SEQ ID NO: 17544 - DNA, 669 bp, Arabidopsis thaliana columbia
  unsure (1)..(669): unsure at all n locations
gatttaatacgagattctgttgatttagaggaattagaaagtagaagagtgaggagagacacattcctgcttcctagcccttgaacgagcagcagattctctgttcttgatcatacgcttataccttctgtctcctctagtatcatcagaatcttggcctcttttcttaccaagacaaccaaactttgcagattcctcaaaggagcgagggttagaagcaagaagattttctgtggtatcaagaaactcgaatccaacaccggagtttaagctgaggacagtggcaggaggcggaagaggcagagagccatagagagcagtgacaatggtggaagaggaaggtggtggtggtggtggtggtggttgattcagaggcatgttgaggaaatcttgaaagatggagttattagggttttggttctttaacattggttcatgaccaatgtttagttgccgatggtagtgaagtgaccaaggttgatttctttccatacttcttccatggtgacttgagatttgttatggcctagggaggatgatgttgataatgatgatgatgaagaggaaattgaaaaggcactatggttgttgatcttattatgctttgctgatgacaacattggagaccagaccagaatagcatagaatcgtttgtntnttggttttggg

SEQ ID NO: 17545 - DNA, 440 bp, Arabidopsis thaliana columbia
ttgtcagcctgaataagcaggaaaaacatcatccagcagatgagcaaaacaaagaaaaggtatcaacaaacctgagtagctagatcaccaatagccaatcgagaaagaacaacttttgctccactctcaacacatttgtctagtttgtcataaatgatattccattctgcatcaactattgactggtactgtgatggatctgacagcctgtgaacaatgggtggagccaagtcaaataaggccaaaagatgtttaattgaagggaaaaaataaacataaaaatccagaatgctgacctaatttcagcgttttccttctcagatttcaactccaattcgatgttaagcaagagaattttggggttaagaaattctttggctgtggtcaaaaccagcatacgagaatgtttttttgaaagctacaccacaacgaggaaagag

SEQ ID NO: 17546 - DNA, 922 bp, Arabidopsis thaliana
gaacaagctctgaaagaagtggagacattattgctagatcgcagctaaaagctctatagctttgttgttgtaggattaacagcagattttgtagaattgttaaagccatggctattgtagttggcttttgctgtgatatatgtatgtaaaagagacaagtgtctcttgaaaagaatgatttcctttttttcaaatgggattttgatgtaacttttccttttccggtctgttttggcatatgaatgaatatttgatgtaagcttcttttgtatagttttgtatctttacatcattttgagagcaaatgaaagtttatgatatgagagcatcatagattcatagtagcaaatacaattggttcagttgttgcttgcaaatttttactgcagtaaatatggattgttttgttttcaaaggttttaaaatgacttaatacattaatttccaaaggttttgttttaaggtattttttttttttttctaattgtatagaaggaaatacaataattaatattcctagtcaaattgtataattttcataccattttctgacaatttcaatttcggacaacaatttaatgatgttctaatttaacgtgggtcccaactaacttaaaacgtgtacgtggcttacgacgtcgtttacaagtttatacgtcgaactatcaacatcattctacctttctttctctctttctctcaaaatccaaaatgttgtaatttgcaattcttcagtttccgtttctctcctgagaaatttattgacttcaaaaaccctaaaaagacttgtgattgttcgtttctctaactcgaatgttgatcgtacgacggtgagtgatcgtagtacaatgacgaagaaatcacagccgcagattccgcctccattgtcccgtcgcggcggcgatcgtgtggctgggatgga

SEQ ID NO: 17547 - DNA, 839 bp, Arabidopsis thaliana
cccttcttcttatctgatataacagtcagaagactccctaaacctaaaccaaatctgtcttcaagtgctcaacaaaccaggcccacgagtcattgtcctcaactcttactattgcccaagcaataggataaatcctattgtcagcgtccctgccaactgctgctagaatctcacccttcagttcccacttcaaaaaagccccatctaaaccaacaataggcctacaacattccttccaagttcttctcatattctcaaaacatatgtaaaatttatcaaattgctgttaccgcaatcctgaggaatcgtgacaatctctgtgtggatgtccttattagacctttgcaactctgcctcataatcccatagttttgcaaactgttctctctgtgtttgtatcaccatatcaaatgccaatcttcttgctttttgacaaatccacttagaaacagagatcgtgtaacgcatcataatctcatctttaatgtcagtccatctcaaagtcggcctccttcttgcttcatctctgaatagtctagcaattacaccttgcttcaacatcctagctttaccacttatagcatgttcatgctcatcaacatatgttttgactacacccacttatttagccgcttatcaactgaacagtaaatcttccatttgcaattctcatgcctacatatagccatcaactgtgtttgagcccacttacacaacttcacatcgtagtttgccttgagaacatacctcagtagatgatctttgaactcctctccactgtgaaaatctgcttaatccataagtaaggtggcttatcttttgagtatttagctcttgat

SEQ ID NO: 17548 - DNA, 533 bp, Arabidopsis thaliana
  unsure (1)..(533): unsure at all n locations
ctcaggagctctggaagaagcataagtcactttcacagcattcacaccgcttccaccagttaccaattgtacagccagcctcccaagcttctcagcaagtacaacatacggcttcagctccctcaatacctgaaaacagatagcaactgaacagtgtcagagaatttgcaggacaaatcattatcactacttgcaatatcaccaagaactagaagaatgaaacttgatcctgaattaaggactctatagtgaagtctgaaattacctctagtggaaccattggtgcattgaccgcggtagagncaagttctcctctcaaagctccaataacagcttctgcgacttcgatagacactccttcctaggcgtcaagtaaaggtttcaggagagcagaacaaaatgcactaaaggcaaaacgaatatacagtatgtaatacctgagcctccatagtactagcaccaagatgaggtgtggcagtgacactctcatgtaacaccaacttattatctttaacaggtggctctactgtaaa

SEQ ID NO: 17549 - DNA, 536 bp, Arabidopsis thaliana
ctccttcagtttttcaacaaaccaagcccaagcttcattatcttctactcttactattgcccaagcaataggataaatcctattgtctgcatccctaccaactgctgcaagaatctcacccttcaattcccatttcagaaaagcaccatctaatcctataatcggccgacaacaactcttccatgtagttctaagcttctcaaaacagatatagaacttgtcaaattgttgcttaccatcagctctaggaattgtcacaatctctgtgtgtgtgtgcttgttagacctctgaagctcaccttcataatcccacaacttcgcaaattgctgtctctgtgtttcaataaccatgtcaaacgccatccttcttgctttcctgcatatccacttagacactgaaatcgtatacctcatcattatctcatccttaatgtcaacctaagtcaaggttggctccttcttgcttcatctctgaataatctggcaatcacaccttgtttcagcatcgtcgcttttccactgatcgcatgcttatg

SEQ ID NO: 17550 - DNA, 475 bp, Arabidopsis thaliana columbia
aattgaattgagaatcattcttctgacatcaatttgggttttccggaagagtgccgcaccgaaaaccctaccaccttagcccattgtttcagcttctgcttcatcgtcttccgatcatcacctttttaaagttgctcctcaaaaccggagaacattcagacaaagcaaaaaaaacaataaactaattccaaaactagaagccacatatacctttgtcgacgatggtcgtgatgttgttggagttgctgacttcatgatccgacgcgaatgaagacgtccgagacaaatggttgctgtattgtctatgaaccgcgcagtacagatcaagagcggggattgtatgggagagccttggattcaaatcaggagattctgtttcaaacccaaaaccaagctcgaaacagcctttaagctcctcgatatcatcattcgtgacactcttgctgcgaggaaggagatcagtgggcgtttcttt

SEQ ID NO: 17551 - DNA, 592 bp, Arabidopsis thaliana columbia
cgtgacagagcagtgacgatggaggacgagcaagacgcgcatcatcgccggcagatctgcgacaactgcgatcgcccaaatgcgatttgtctctgccacgtcttaccagcggatctaattccgacgaatacagaaatcatcatcctccaccatccacacgagtcacgccacaagctcaacaccactcctctccttaccaaatccttactaaacgtcaccagaatccccgcccgccgtctcctccgccgtcacatctccaccgccggaggaaccgcactcccagcaccgccaacaatctacctcttcccttcttctccttcctctcccgccgtcactatatccgaattcaaatccctaaacctcttaaaccatcgtgagatctcaaatcccccgccgctgagactaatcgtattcgacgcgacgtggaaacacgcgaaggagatggtcaaagctagcgaggtggtgttaagagaagcaggagcggttagagtgtgtttggatacggaaatagacgcatcagtgagtggaggaacatctacgattcagagcttgtgctaaggaaggaacattcggaggatgtgaactacggcgg

SEQ ID NO: 17552 - DNA, 1010 bp, Arabidopsis thaliana
actaatgaagtcaaaaggatttattccaaaattttgagcagcaaagtaaagtgctcttaataagttttaagaaaaaccaacaaaaagaatcttaagaagagtataaagcttaatgcttttctcaacagaaaacaaaagaaactaggccaaaaacgctctactactataagatagaaccaaaaacagctttcttctactcttcatcattaaagaccgtcttcgtccctgcaagaccatacaaacacacaagttttaaaacaacactaattctacaatgcacaacaacaaaaaaggggaagaggagaggagaagaagaagaaacaaacctttggatgattccattacacttggtttgctgggtcctcttccacgcgtactgaaacggccacgaggtgctcctctatctgagtgacgtccacgtggtgctctatccgagaaacgtcctccacgaggtgctctatctgagtgacggccacgaggtgctcctctagcaggtgctctgtttgaggaacggccctcatcactatctcttggtctagactcttccacatgtatgttccctcctccaatttcacttccgctcagttgcaacgcctcatcgaatccactcgtcaaatctatgtaagcaaagcccctggaagcaccagtctcacgatctgttggaacatgaacccttgtcacctctccacacttgctaaaatgacttctcaactctttcttgatctgatcatgatcacaaaagtggtttgcatcagagttttacacaaatagcttttgtaacatgttaatattggtttaagaaaagtctaggacaagaattttacttcatcttcgccaagagaagaactgaatcctctaacgtaaatcgttcgactttggcttccttctcctttgcgaccaggattgctgcatatagtccaacaaaccagatattagcctataaacaaaaacatacataatcccatcatgctcatatggcaaagtaagaaacgtacctgtttcgtggagta

SEQ ID NO: 17553 - DNA, 714 bp, Arabidopsis thaliana
aatcctttgccttaaacaatcatctgcaaatcagcttgtgtacttcactactaagattgtacttatataaggttctttagttacttggtgtaaagaggatcatcaatgtgtgtgaaccttttaagttgctgttttggtgatgatgatgatgatgacaggtatgataatccggtatgctcagagcaaataactgcgacaacccaagctcaggcgcagagggaaacggttacatcccggggtggatgctctgagagtcatgtgctgtgttaaagctcaccaacaaaagatcttttatatatataaaagtatagacacaagactttggatttgtagacataagtggctatatataatggtcctgaggatcttcaagacatttgtatcttttgggaatccttgcttatattaagaattcaaatgtgtggaacttgttttaacactgaaccatgacactggtttattatcatgtaatgagaaacatttgggttacaatgtgatctctccttgacccaaatacccaatgtaaactatatgccaaaatacaagcatcacatatatattcataaattcataaaaggttaaaagtaatcatacaaaatgatgtaaaaagtttcatgccttgaacaaaacactgcgccaaaggaaatcctaagaaacatgtcagattcctgtgtgcatctgttctgctgctgctgttgtttcactcaagagggt

SEQ ID NO: 17554 - DNA, 801 bp, Arabidopsis thaliana
ggtcgactctacattcactagccaagtcaaaacaatgaatatcacccaattcattaccatcaaacccaaacaaaacccaaattctcccttccacaaccacaagccctggtgctcctctgcctttacaagcttccccagccgccggatactcaacccatttctgatcaacaacatcgtacgcatgaagcgtattcacacgtcctttagcagtaacaccaccaaacacataaactttccgatcatcaccagccattgaatgatagctacgaccaggaagcccttcctcaacaggagccaacaatttccactcattggtctcagtatcatacgaatgaagaccgttgtatctccgtttatcgtcacggccaccgtagacatagatcgttgaaccgatcgttaccatcgagacaccaaaacaggggaaaggagcctctccggtcgcaggagctatcgaccattcttgagtctcaagatcgaaaacgtaaagatcgttatcaatatggatcgttggcttaagctcaccaccaaaacagtaaactttgttcccaacgacggtcatggcatgtgagcttctagccccaggaccagctcctttttgacccacctgattaacataatcacattacatttctaagatcaaagaaaccaaataaaagaatcttaatatgtattatagagattgaaagattgaatctttacctttaaccatttgttctcaccggacacatttttttcgttactcaccagaaagatttttttttagaggatgaaagaaaaaagttttgtggctattgttgttga

SEQ ID NO: 17555 - DNA, 461 bp, Arabidopsis thaliana
tccagagaggaatccccggttctggtcctcctcctcctcaaactcaaccaacgtttcacggatcacaaggatttcatcatttcaccaattccatctctccttttgggtcaaacccagacccaaatccaaaccctggacgtgtctctactggattcgtgtctcctccctttaaccgctgactcattctccggctgaatcgtcagcggcggcggcgggactcttggttgctcctccttcaggtgacacgtctgtgaagcggaagagaggacggcctagaaaatatggacaagatgctgcttctgcttcgttggcattgtctccttctatctccaacgtttcgccgaactctaacaaacgtggccgtggaagacctcctagctccggcaagaagcaacggctatcgtccattggtaacatcctaatctctaacttatgagtttgattttccgacaaggacattg

SEQ ID NO: 17556 - DNA, 650 bp, Arabidopsis thaliana columbia
  unsure (1)..(650): unsure at all n locations
nnnnnnnnnnnnnnnnnnnnctaaagtactcgtaatgtatcgctggtagatatggagatcgttatgaaaacctcaaagactgtggcaaaactattatttgttgtcggggcgctggtttatctggttgggctatggatctcatgcccattgttaagtggaaaaggctattttcttggcgtgttaatgacagcaacttttggcaactatgcatatcttcgcgcagaaaaactcgggcaactggatgatttttttacccatatctgccagttagttgcgttaatcactatcggtctcttgtttatcggtgttttaaacgcacctatcaatacttatgaaatggtgatctatcccatcgccttttttgtctgcttgtttggtcaaatgcgtttgtttcgctcggcatgagcaacataaagctcttacatattcaggaatgaaaggaatactgtgatggacaacaaaatatcaacctattcaccggcctttagtattgtgtcatggatagctctcgttggtggtatcgttacctatctgttagggctatggaatgcagagatgcagttaaatgaaaaaggatattattttgccgtactggtattaggnactgtttctgcggcgtcttatcaaaagaccggtcgggacaagtatga

SEQ ID NO: 17557 - DNA, 629 bp, Arabidopsis thaliana columbia
tccaaagtctaaaagaagatcagtgagactaattacaattttaccaatccaacatttgtcgccatcatcatcaaaatcacacgaacgtagaagcttttgaggtacgttgatcggtacctagagtgattaccattatagtcacatcgtcatgatatctccttctcctaccagccggaacattcgtcaattcttccaaggtaaagcctacatcaaagtgttttcttttgtcatatagtagatcatgaagtctgcacacattttgtgaagtaaacattaacaaaaaagcatcttaccagcacgagcagcagctttagctacaagacgttcaagcagaaactttgctggatcaccagaaggattactagaaacgaaggaatggacgagcccaatcgcttcctcgttgctgaagaaatcaaacaaaccatcgcttgcaactataacaaagtgatctgattccgttatcttgtgaactctcatcgatggttccactgaaacataaggcgggctcaaaaggttacgaacgcggaggatcccatgagtgcatcatttagttctcctgcaagttaatagagaagagctacttgatactttttctttcaagtataaaactcataacttaaaagaataat

SEQ ID NO: 17558 - DNA, 413 bp, Arabidopsis thaliana columbia
tgtcgttctcaaagaggtctgtcactaaactatcacgtcgacccagtgtaaatttatcatccacgctctcgtggattacgtggaggaagaaatatcatttcttgtttgaaataaaaaaagaataaaaaaaattaggacagaacagaagagacacgcaaacatatccattagggtcacaacggttcttacagcttctattaccagaaaggaaagaaagccgaaatttgtttcaagataaagtaatttaagttggagcttgtttcttggtcgtacagtgtcaggtgaatagagaagaagaagatggaaaacacagacgagcttgtctccattgagctaccagctccagcttcatggaagaaactggtatttcttccttctttgtcccttctactgtttcttgaaatttctgctgt

SEQ ID NO: 17559 - DNA, 877 bp, Arabidopsis thaliana
tgtgatgtgagtgaggccgattttgtgtacacttgtaccacgtcctctcagctcttactgcttttgtcttgttctacgtcactttttcccaccacgatcttttcgtttccttttttccatatttggatttattaaaaataacaaagcaagttgggtcctataaaatttggtagattcttcttcttctgttcatttcacaacaagatgactcactgagcttattaccaattttgccacttaatcactaaaccgatccgtagaccggatttgatattccagagactctcttggccgaccaaaatatgtgtcatttattcaaactcattatgttacacttgttttaaagataggatcacaagaaacgcttaaaactcgcccttcttgagattgacaaaatgttttttaacagtttgtcaccggtaaaaagaaaggagagcctccgattttcttactccccaatacattcttctacagaagtttccatctcgactcatctttcttgctctgtttctccatcttctccttaaggtttctgcatagagggactcgacattgatcagaacctgcgcaaacacgtgaatgcagttcaaggagttgccacattctcttgcaatgcacgcaacctcctggaactcttagcttacagcctgcgaaatgccggatcagtgattctaatcccttgcaagcttcatagttacacgttgcatggttcggtttgaaatctttatcgtgtggccctattgttttacatccatctctgcatatatgaacaagtgcttccattgcttcgtatagctgcgaatatatcctctgatcattgcgttttctcatcctctcgttccgcgtctgcgtttatgttcaagatttagaatttagg

SEQ ID NO: 17560 - DNA, 592 bp, Arabidopsis thaliana columbia
catcccaataaaacacttacactagagaggaaataataaggccaaaacatacacacgcaagcaagaaattaactttgaaaccatgtattattacggacttgattgcctcttcatcaagattgaaggcttggttcaaagaggacctggaaaagttccactctccctctgctcgttccacttgtcaacctgcgatgtaagatacgcggcagaaattgtcagatggatcaaactataccagtgtgatttgtgtgtaccactctttgatataataatctaaggtccaaacaaaaggaaccaacccattctccaggacagagggcacggtaatacttggcaaacctttcacagtcattagactcctctccctttgcagttgtacacctgcagaatcatctttgatgtcaacaagagattaaaataatgattttctcaaggatgagctagcaatgaggtacctgtgaaactcgatgtaccgagtgaagcagtgcctagtttgatttgttgtaggaaaccggaaatcagcaggagcagttttcaattcaatctaatgcaaatacaaacacaagtgtgaaagaaactgtataaggttttg

SEQ ID NO: 17561 - DNA, 578 bp, Arabidopsis thaliana columbia
ggcgctttataatcttctcttgtagatagaacatactttgcagactgtgagttggattcattaccaagtctagttctttcactatcaattacccaagctttctcattcttaatatcctctttactttttctataagcatcctttagctcaatcttcccccaggttttgagccactcaggtttcttacaaaacagtcccattactgatataccttgagaaaacgctgtcgaagagccttcataagatagacaagtatctgtattcacaaaagactgcattcgcttatcaaatgtaaccatctgatcgacaagatggaaccacgatgaaataccttcagatttcatgtgcttctccttgtacatatctataagcccaggaaaaacttttttctctaagaaaccagatagcatttggaccatcgctgaaacccaagcttctttagcactacagcttactaacatagccctatcaatcaaaggctgtaagaaatcgtcaaccccatcagcaaagtctcttgtaactttatagacaagttcaaaaataaactcaggttgctcagcccattttagaaaatgata

SEQ ID NO: 17562 - DNA, 496 bp, Arabidopsis thaliana columbia
caatgcttggatagaaggctaacctcaaactcttgatatctaagctttgggaagtgggagtgaccattgtgaagaccacatgaatttgtccaaggtcaaacatcccgttggggcctcgcttggtcgattatgccaatagctaggaagattatagctacctcctgtagtcaaaaagagcgttctttctttgtatgcttgaggtattctatctataactttcgtcatccgttacttatatatgttctgtaactatatatcagtctcgggctttacaaaagccttacatgctccacggtggatttgtgtgttcatagtgcattaaacggcagtacagtgtcgtagatgtgctgcaatcagttgaagaattcttcaagagctgtggcgcctcgtgcaagttaaactcttctacatgttctgttgacgtaagtgcactacctgtattggcttgtcgttgccatcgcaatcttgtttctacagtatctcaagctcaatggag

SEQ ID NO: 17563 - DNA, 705 bp, Arabidopsis thaliana
taccttctgcataaagaatgttagaacttattatcattaccatggtggttgcgttgttggatctgttgtggacgaggagtataaagtgaatggtgttaagcgtttaagagttgttgatggttcaacgtttgaagaatcaccaggaacaaaccctatggctactggtttaatgctgggaagatatcaaggaatcaaaatactcaaagaacgagaagagcaagaagatacatttcttagccctcaaggtagcccacaaccacagccataacacattgaaatctttgtttctgttgtagtttgcttcaatgagaaagaatcaagttgctgattaatacttacaacttaagcaaccaattttattgaattcgaaattgatttcagtaaacgaaaacgaaactatacaaaacattctagcaaacctaaacctaaacctagccccatgttgcatcttgagggttcgagtcacttttaacttcttcttcctccgtcttcttagtttcttctgtcgccggcgttaatggagaaaccaatccaaatcccaatcttcttctcttcttcaacttcttcaacaggcatctcatacctacacataggacacgtggcgtgcctccctaaccactcctccacacactttgagtgaaacttatgtttacaaggcatctccgccgccacgtcacctttagaccactcatccaaacaaatcgc

SEQ ID NO: 17564 - DNA, 688 bp, Arabidopsis thaliana columbia
tacgaagctatcatagaaaaatttgcatattgacaccacaattaattacaacattgcacgtaataattaacgtataacatatattttttctataatatgtacttctacgatgtaacgaaaatttacatgtgtatgtgtgcttctgcattcatacgtaaatgtgtgataggtaataaataatattagagtgacgttaccgccgagagggcggtggtgtagcaggagcggcaccttgaccagtaggagtcgccacggcattggtacattaatgtaacgaaattggaacccttaccacggaaaaccaaatcgaaaccactgcgaaaatcgccggctgatgaggcacggatgattatattgaggtttttctcgtatacacttccaggctgatacttcccttcacttacaatgcatttgtgttgcagatacgcattggtcatgttcaaggaagaaacgctgcgtataaggagcagttttatggccaccacggcagagatatggaccaagacaaggcgttttggtacagacgatggtggaaagtacattgcttcggatttgtaattttgtttcgtccaaaagattgtttcttatagatgaaccgtcgagactaagaggaattaggatgttgagtggagatacaaaaaaattgtttttatagcttagtttttggttacttatagtaaggtttcaa

SEQ ID NO: 17565 - DNA, 1016 bp, Arabidopsis thaliana
ttttttttttttttaattttttttttttcatcaaacagctttgattcaacatctaaataatgcagcaaaagaaccttgccggtgattagcagaataattgggccaaggccatctagcagagcaaaatcaactagacgaaatgcataccaatctggccgacgtcgaataaaaaaacgtttaacgatccaacggttatgaacaaacagaaaggaaggtgtacgataaaactccgtaagaccaaccgtagaagattcgtccccaattgtcagtcggtgaaattaaagaggcatcttaaccaaagaagtctctcttacgagttttctcttcggctttccactttttcctctgttcgtgtcattcttctcgtagatctcgagagagagccttaaggtaaagagaaacttaaaaaaaatcgatcctttaagttaaagtttgtatctttcgattgttttgttccgacccttgtaaaatttgttctcaggaaattaaaaaaggttggattttgatcgatgggttcttcgtcaggacaacccgaatttgattacttgtttaaggttttattgatcggagattctggtgttggaaagagctctcttttgttgagtttcacatctaatacctttgatgatctttctccaacgattggtgagttttagattaattgatcaagctttaaagtaccgatcttagcttttgtgttatgctttttgatcttggatctgttttgtctaggtgtggattttaaggttaagtatctgacaattggagaaaagaaactcaagcttgcgatttgggatacaggtgagagatcaatactcttgttgttgttgtttggaatttatgtaaatgtcacacatcttgtggtttcaatttagatgtttaggggaatcattgaacaatatagagtttgagaatgtccccacaatgatgtgtgacaatctttctttatgttgcgtcttagtcagtcattgttgcctaagctctaatgtgactggtgaagaagaagagtcttggat

SEQ ID NO: 17566 - DNA, 814 bp, Arabidopsis thaliana
gctctttctggccacagtctatatataaactgttagttttggcgagaggtgtttatttttatgagaatgagatcaatgaaattatgttttacgttaaaactcaaaaggattggtggtaattaatccatcattatatccatggatgagttttgaagttccgttttttggttattaaaagcaattcaaaccaaagatagactaaacatgtcattgtttgtggttttaaaaaactacatgtaataattattcacatcaaacaaccataattgtcatgattatgtttatagatcagctgagatcatgacagtaagtaatagcggtatacacactgagagataagaggacacacaccacaacatttaatagaggttccacaaacaaggttggtccaagaccactacaggccttcaccaccgtgagcttggcctagatttgcttccgccgtacaaacgaaagacaccgaaagccgaaatgcaagagatcaaaaccattccaatgcaagcaaacaaagcgctcgcaattccttcacccacttggttacaaaacttcccatacatattacaaattttcatccattgaagctctggctcacccaactttgcaaaggccgcagactgcgccgcggctgcaacccccgccacacacaagtatgctactgcctgctcataacatacataacaaggtcatgaacaatgtcactactcacttatacaacaacctatgtgaactagaagaatacagagaccgagtcaatttctttgctttcagttagcaggaccataagagattatcaacattcttgatcaattattga

SEQ ID NO: 17567 - DNA, 605 bp, Arabidopsis thaliana columbia
  unsure (1)..(605): unsure at all n locations
cttccttacggtattgattaaataagattgttgtttaattttatcccctggatatgtcatttaccaaaagcaaaaaccttgtccacaactagcatatattttcaaaagcatctctgaagtttcctactttcctattgcggttattcatttgaaatagggaaatttgcttgatacttcggtgcgttaagatatgaaattaaacaacgtcactcaagtttttgaatgagcgtttgctaggagtatcatttcttgtttacatataatcatctaaagatctacgttttggtgaaccaaggcacagtttactaacgcagttttggttgaatgcaggaccggccatcgaccaaggttcatgcagcccctggaggcggctcatctctggattacctcttcggtggtggcggaacaactagcagcttcttctaattcacaactcttggtcttgtgggaaaatatgctctcatcttttttaacttggtcgtctcttaaatctgctttatctcatggtgggttacgcccatgctaattaataataaagttatgtaatcgataatagtccatttaaaccacttagctcatttagttaagactttgagangtaagag

SEQ ID NO: 17568 - DNA, 489 bp, Arabidopsis thaliana columbia
agctattcccgttattgctatcgtgaagaaaagccttttgttcgaaacaccgttcccatctcttcgtcttctcccgtttccatctccttctgctgctctcgggatccttctgtacaatccatgtcatgacatgagtttagccaaataaaaaaggattaagatctgaatcagagagttttcaaaataaaacaatgaagataagaaaatgtacctggatgattcaacagtgccagggcatttggtttcatggttatatctttctctcaatctaacatagctgttgcattgataacagagttctgtcctgttgccacatacttcctaatattcggaaaatcgagcggatcagaaaatcctttagttggagagaaaaggaagtgtgcaagtcagagtgaatacctgatgctcggcaagatcaaccgcaggcaatggaaactcacagaactcgcatgttacaatcctcttggggcaaatttctcctttatgact

SEQ ID NO: 17569 - DNA, 821 bp, Arabidopsis thaliana
ggaaactccctcaaacgagttgaagcgagtactgattgtcgtgttctaataaggggtagaggcagcattaaagatccgattaaggtaatcacatttttcatttgttcagtctaataataccttaactccaattgtatcttcattaatatagcgttattgtttgcaggaggatatgatgagaggtaaacctggttatgagcacctcaatgaaccactccacatcttagtcgaggcagaattacccattgaaatagtggacgcacgtctcatgcaagcccgtgaaatactcgacgatctacttactcccgtggtttgttcttagctcttaaaagatcttaaaccagagatacatgtagtatttgtttgtcaatataaccgtacttgttttgtgtactgttttaggaggaaacccatgatttctacaagaaacaacagctacgggaattggcccttctcaacggcagtcttcgagaagaaggatctccaatgtctggttccatctcaccttacaatagcctcggcatgaagagagctaagacaaggggctaaaaacacgtctaaatttcatatttttgcttgcctctctcacctttccaagaaggtatatatccaccgtaacagcttccttcaaacaagaaggatttggagattctgtctccatcccattcctcctcttcctcgggctaccggtactgtctctaatccctggaataaaaaaacaaaaagaacagcgtcgtatatgaatctgtgtcttgtcttatttatcatgtcccggagagagttcagacgacagaactaggggcaatacaaagggatggtga

SEQ ID NO: 17570 - DNA, 613 bp, Arabidopsis thaliana columbia
caaagctccacagtggcatgatcatacctctctgctaatgcacgataagctctatagaattcttccacaagtttcatcagctctggacgtttcttgtaatacatctctgcccttcttgcaaaagaatctgcatcttcttcgatgagtttaatcattgccttcactttggaatccatatctacatcaagaaaataaccgtaagcaataatacaaaggaacaaaacacttaacactttagaacatagagagaaagaggcacctgaaaggttctgctgaatccatttagagtttttgggaatgtgactatcccaccaccaggagtataaccgcctggactctgagtgcaagacagtagccatcacaccggctgctagaagcacaaagagtggtctagacttcacccaagggtggtcaagtccaagataaggattccaggccagaatcaatctctactaactcaaactgaagacatctttgttctctatgtgtcaggcttttcactacaaaactgaaacaatgtcacacaataagcaattaaattgattaggcttaaagcaaaattttatactcaagttaagtggaatcattagagcaatacaaatatcaggattta

SEQ ID NO: 17571 - DNA, 438 bp, Arabidopsis thaliana columbia
catacttaaaatattcaataatctcaattatatccgtattattcctccaaggaactcatggagacgacggaggttggcaaggtggtcacgccacgttttacggcggcgaagatgcttccggcaccatgggtacgtatgaccaatcccaatatctaaaaatgcataagttagctaaattgtctctttatccacgtgtaagttagctaacaagtggcatgcacaaatcaggcggacttgtggctatggaaatttgtatggccaaggttacgggacgaacacggcggctttaagtacggctctattcaacaacggactcacgtgtggcgcgtgctatgagatgaagtgtaacgatgtaccgaggtggtgtctcgggtcaaccatcaccgtcacagctacaaacttttgcccacctaaccctggcctctccaacgataatgg

SEQ ID NO: 17572 - DNA, 752 bp, Arabidopsis thaliana
ctttcatggtggctcgtgatgcgattggtgtcacttcgctctacattggttggggactagacggatctgtgtggatatcttcagagatgaaaggcctaaacgatgactgtgagcatttcgaaacgtttcctccaggtcatttttattcaagcaaattaggagggtttaagcaatggtataatcctccttggttcaatgaatctgttccttcaacgccttatgagcctcttgcgataagacgcgcctttgaaaacgtaagaaaacatctcttctttttaattgtatgtggtgtgtgagagggtaatctgaaatatgtttgtttttctctctaggctgtgattaagcggttgatgactgatgttccatttggagttttgctctctggtggtcttgattcttcccttgttgcctccatcactgcacgtcacttggccggtactaaggcggctaagcaatggggtcctcagctccattccttttgcgttggtcttgaggtgagatatagaacagagttcctctgtttccaaagcagagttggatgattttttttgataggagagttggatgatttaaaagtgttttttctaattcgaaattcaaacttagcatcatttatggttgttctgttagggctcaccggacttgaaggcagggaaagaggtggcggaatatttggggacggtgcaccacgagttccacttctcggtgcaggacgggattgatgcgatagaggatgtgatttaccatgttga

SEQ ID NO: 17573 - DNA, 1081 bp, Arabidopsis thaliana
agtcaaaattaataactcagttattatacactagctattgtgagtgactatattttctcatctcaagtttttatttgacaggaggttgcattcaaagtggattacaaggtggaagctattgctggaagagaatttggctctgttttccttggcaacgagaatcttgctaagcttgttgttaaaactggttgggcaaaggtgataagcgttttctttcactcgagatggtgttgtctgaattatggtggtgataccttagctttatgacatgacaggttagggagccaggtcagcagaatcaggacaaggttagtccttacattaaagagttgctacagcttgaagagctggccaagcaggaaggatatggtcgttggagcaaggttggtcttatcttccttacttattctccaaattctttactgccttaattgatttgatgatggatttacccgactccaggttcctggtgctgctgaggcatctatcagaaatcttcctccttctgccattggggattctgctggctttgatgccatgggccttttagctgcaaacaagggcaagcctatggaaggtattgtagagcaagtgcgtgatggaagtactattcgggtttatcttcttccagagttccagtttgtgcaagtatttgttgcgggagtccaggtatctaaacttgtttctcagttcttgctgcatgcaaggttaacgttttaacctatcactttgaaacacattcagcaatatttctctttcaatgtaggctccatcaatgggaaggcgaaccacaaatggaagtgttgttgagacagttccagatgagccgaatggagatgtgtctgctgagtcacgaggtccgctaacgacagctcagaggcttgctgactctgcagcatcgtctgtcgaggtttcctctgatccatttgcaactgaagccaagtactttaccgaacaccgtgttcttagtagagatgtaaggattgttctcatcagcttctctcctgtttatctgtattgtgcattagtgtgatctcagttttgagcgtggagaatgaaggttcgcattgtgcttgaaggc

SEQ ID NO: 17574 - DNA, 1189 bp, Arabidopsis thaliana
caacgttagagaaaaagaagagatggagattactttgtcgccgttgttgtcaccgtcgccggcaagtgaagtcgctgcgagagtatcgtctttgctcgtttatccgatcaaatcatgtcgaggaatttctctgtctcacgcagctctcactcccaccggtatcaacaaaaactagtttcgagaaaaatttctcattttttggtttcgaattcgatttttccttcttgggtttcatattagagctgtttcttcatctgggtttaagtcttcttacgatattttcgattagcccgttgtttaagggttcatcatcattcagtgagactccttgttggtgggtctaagttgtctttagtgtgactctgagtctctgaaagttattaagtggaaagattgatttttgtgctgtcctcaatgattctctaaaagtgtataagacttggaatgtgaatgattaagtgtgaagtaatccaaaacagtttaatgaagttgtcattgtgagagctgatgtgattattttggtgtgatttgtttggggagaattagaaaagctaagttttttttggggtttggttgcttaggatttcgatgggatcgaaactggttgattgtgaattctaaaggaagaggattgactcagagagtggaaccaaagctttctttgattgaagtagaaatgcctaagcatgcgtttggagaggactgggagcctgagaagagctctaacatgggtcagattgtttttatgtcttcttattcagctggctttttgttttaatgaagttggtctttttctcatcttttggctgtgtttgcagtggttagagctcctggtatggatgcccttaaggtctccctagctaaacccgacaaaatagcagacggtgtctcagtttgggagtggtctggctccgcactagatgaaggagaagaagcatctcagtggtttacaaactttgttgggaagccttgtcgacttgttcgttttaattcaggtctcataaacttttttcctgtcttaatcagttaagcttgactcctttgaaagattttggcggtgcatatttcatcacaagtcacatgttatattgcagcctatgagactaggcctgtggatccaaattatgctccaggtcacattgcgatgttctcggatatgtaccattcttgcttatatcacaggtcagag

SEQ ID NO: 17575 - DNA, 586 bp, Arabidopsis thaliana columbia
  unsure (1)..(586): unsure at all n locations
aaactattattcccaaccctttgattgaaaacaaatcttaaccaataacacaaatatcaacaggtaactgttaaaggaacagaaactgaagcagaagcagcgaaaattgcacgctctgtggcttcctcttccctggtcaaagtatgagatcctagatgtatacatgaataatcaaagggagctttcttgtttctaaataataatactaaacgtctgttgttgctggtgtgacaggcagctgtttatgggagagatccaaactggggacgcatagctgcagctgctggctatgcgngggtttcttttcagatggataagctgaagatatccctcggcgagttctcactcatggagagtggtcaacctcttccgtttgacaggtttatcttacaactgatatgtctttcattgggaaaatgaagttcgatcatgttcttatacatgtgtatatacgcagggatggagcaagtaactacctcaagaaaaccggtgaggtcacggaacagttacaatcgatatatccgtagtaagagatcatttggctagcattattaaatcaccatgtattgtgacctgagtgtggttt

SEQ ID NO: 17576 - DNA, 475 bp, Arabidopsis thaliana columbia
gaattttctgaatcaaataatataataaaatcatcctcacgcagaaataaatataactctgattaaaaactgattgattgcaagttttatagacattgttttacccagtcgaatatacacttcttagcaaagtaatagtataggtgcatataaggaccataaatttcatttagtagttgaccttcatgaacatttgaaaaccttaaaattctacaattacaagaaaatagtttacaatgagatcgttacaacacctatgatttcataacccggagtactagtattacaacactctccatctaaactcttacgtacgtcttaatagatttagatgatccactttactcgatctccctaagtttcattgtgaacaaaacagaccccaaaagagtgacttggtcctcaatcatcaacttatttctttgaccttgacatcactctctttgctgatcacaatccccatcaatctgcaagg

SEQ ID NO: 17577 - DNA, 690 bp, Arabidopsis thaliana
ttgtttgaagggcgagtgctgtgtatggcttagctgctccataaccagctatcacatcgaacgaggtacaactatctgcatctgctggtaatattgcttatatcttctatccacctttaccaaaatcaagaaatatctcattttcttaaatattcaacatatcctatatataccaaatgtaacaacattatggctgcaatttatttaaatgtatgcttttttgcatttaaaatattataacaaaaggcctataaaaggtaaccatcacatgatcaaattaagaagattaggtctcaagttattacctcatccaacattgacaagagttttgtcaacttgctctgcatttcttgtctctccgactgagagatgtccgcaggaggattcgtgctcgagtcttgagtgctctgattcggttcttgagggttctcattgtttttatctccctctgcctgaaactgctttagagctttctttacattaacagcctcatctagaagctgttgagccgccttaagatactttgagttgggaattgttctcacaacatccaagttctgattcccgcccggaaaactctgtgttgcatactcattgcctctcggcgccatattttgatggcttatctgatgaattcctggaagaatctgtgaaccaaggctaagggacagtccctgaccggtctgaaga

SEQ ID NO: 17578 - DNA, 1036 bp, Arabidopsis thaliana
tgtccctatctggatgctatggggattcgctccggtgactccggcagccgtagaaacttacgatcccgatgtggatcatgatgatgagagtaacggtttggatggatttagggttagatcgaagaggtctgggaagtttagcggtggttactctgattcacctcgagaagtaggagatggatatggggttagatctagggcaaggagtaacatgaaaatgtatggtggtttcaagtctgagtttgattcagatcacgattcaggaagtggatttggattgaaaaggaaatacaatgggaatccaaaggttagtgctgatttcgatgctgattctgatgatgagattgtgttagtccccaaggcaactaggcttaggactcatggcaagccttcctctggtgattttagccatggcagtggtggtgggtttccgttgaagtcgtttggtgatcggaattttgcttctcatgggtttaaacctaagaatttcagtaagcctgaacccaatttctctcaggatctggattatgatgatgagtttgatgatgatagagcagagagggaaggattcaacccgaggattcaaagttctaggagctcttcgcgggtgaatggctacagcaggaaggatgggagctatcctcgaaacactggtgcttccaatggctatggatcgtcttctaggttcaagcatgagcaaatgaatgcagcagcagaagttgagtctgacccgatcgatgaagttgtttcttctgttaagatgttgacagaaatgtttgtgagggtggagaattcgaagatggagatgatgagagagatggagaagtcgagaatggagatggagctgaagcattgccagatgatgcttgagtcacagcagcagatcataggcgcgtttgctgaagcgttgacgacgaaaaagagcacaaatgcaaggaggccggtttcgtagtagcaaagtcgcttattaaagaggaatgaaacggttcataatatggattttcatatggtataatgacaaatagctttcgagtgt

SEQ ID NO: 17579 - DNA, 557 bp, Arabidopsis thaliana
aaacacatcaacacaatgcaacacagttattatgatattatagcctcacaatccaactgagaagatattaattgacctgaaaaacaaagagagaataactagttatatttccatgaaagtacataatcaaatttgttttgcataaaaaatgaagacattctcattcctttaatctttatgaaattgtttctcagatgattggactagggaaagaatatatcacctcgttgttttctggttcttgtggccagttatatcgaataagagggacgtgttgcattttatagtaatcttctcctcctttggataccttcttctgaaatactttttcatttgtgcggatagccaattcctttaatgaactgataaatcgcagcccatctggaatctcctttaatttcttacagtctacaatatgcagagtatgaagaaggggcatggagccttcttctactatccactcttccaaggcatctagtccccatatttcaagcctgtgcaatggaggaaacccaccgccggtgcaaaccattctcctcccaacataggcgttgtac

SEQ ID NO: 17580 - DNA, 644 bp, Arabidopsis thaliana
cattaataatacacacatgattaaaagataaaatattacagttaattaaacatttagaatatttaaaggaaaaaacgtttgcaatatttaaattaactgagggttttgagggtttgaaccggtctgaaaatggtgattattttggcgattttaaaacggttacttttctggcctcttgtcacgttctcgacgacagttcaaaagggttttcccggcggagtgggtctaatcttcaccactttctcccgtgcggttatctccacgattgaatccttgattcatcgtgatgcctcttcagcagttatgttgcgacatctatttaacgatggatttgcaaacaggatttacaacacacatctcttcctcatttctgcaaatttctacccacaccgcttttacaaaccactctctaaaatgggtgacaactccgacgagcagtccaagatcttaatttgggagtcgatgaaattccttttgccttgcctgaagcagttgtgaatcaagcactcgctgaaaaccaattcattctctttggccgccctgtcatgcctcggcgacaaaacctctagtcaattgttgcatcaatgccacgaatttggggccaagctagcctagtccatggtcgcatcattgaaggtcgtgaa

SEQ ID NO: 17581 - DNA, 848 bp, Arabidopsis thaliana
cgtcatctaattagattaatttaggtgatatcatataatgcttcgcgtgagggtttctgagattctgatcgacgaaaactaatctctctcctttttcttctcatctccttactagagatctctgtcttcgataatttgtttcaatcactgagaaaatggcggccgtaggagtagattcgaggcgtcctgagacagcgatggaggaaacctgtaacgtgaaaggagcggcggcgaaacaaggggaagggcttaagcagtactatctccagcacatccatgagctccagcgccagcttcgacagaagactaataacctcaatcgccttgaagctcaaaggaatgaactcaattctcgaggtctcttcttccttctcttaccctaattctctgcaaaattggatcttttttatcatctccttgtgtttcgtaatctcagattctgtgctagggctttcgatttcgttccaattggagctgagtgatttcaaatgtcaaaattgttgtggtgatttagtgtttccgatctggaagtgattagtcttgattttagcaacattaacttgtttagatttctagattctgtcttcttgttggttcttttgcaaagtatgtggcttttttcaggaaagcctagttatttcttcactatcttcattgaggaatatatacttttggaaggagcccatatagtcctttccactataccatgattttagttacacatttaaagttatagaacagcttctgttgtcatcatgatcaccatcctatttatgcatgaaggttttcttactagtctttataatttgtagttagttctaaatgtcaaacctcgttaacactaaaat

SEQ ID NO: 17582 - DNA, 580 bp, Arabidopsis thaliana
tagtcttcagtttcataatagattagatgtatgtcccatataaattgtaataatgtattataaacggagatagtggtaaatttcacaagaaagcacccaagtaaacacaaacaacatttccctctacaaacaaatttctctccacttaaaaaaagaacacttagaacaaatgaagcatcatagcaaccatgaatccaaatcctaaaacaagtgttttcgcggcagaggaggagtcagccggaggagagtctgcgccacaatgatcggccgttgtaccggtagtactagaagggaaggtcccgacggttttggtggatgttgtgctgctagagctacctggtgagcctgggaataacggcagagaagtccccgctgcagtagccggagatagtgccggagaaagtggaggaatgagaggcagagaggaggaaggaagtggagtagaagaagatggagagagaactgggacagggttaagaggtaaaagaggttgaataggtagaacagaagaaggtgaaggcgcgtttagagatgggacggtgtttggaagcggtgcggttggtgctacggttgcggttgg

SEQ ID NO: 17583 - DNA, 754 bp, Arabidopsis thaliana
gctacctaaaacatagactctggtcggctcctaacggtttttctctccaaccttgacttggatttgcggttacattccgcagcttcccttctgtaggtcctccaccaaatatcgaaatcctcccaatccctttggaaagtgaggtcagcaatgttccaccatgacctgacttctccatcatcccctgtttcatcaaaatctgctccttctccaactcagtcagcctcactctcacccttgaaatctccagcttcagctctctattctccctcctcagtgaggcataagtgtctctcggagacacagctcggctcgggttctcgctactatgtttctgagaagacagcaatagcccttcccctgactctccggacattacattcttcatacgcagctgttctgagtagaggactcggaccaccatctgcatcggcagccgatcgttctgagccacatggttgcatgcttcttgtgaaagtttctgagtgtctatgaatttgcagagactcttacattcttgttcgttcagcgacggatgcccctaaccagagacacaaagaacattgacactctatcaatacaaaatgttgcaaaaacagagacacagcctccatattaagggatagaagaacaactttacctttagaaacatatcaatggctctgtatagcccatcatccatgacacgtgcgtaatcaggcaatatctctatcaaagccatgaacttgtgaagactcagacacgggtctggtgc

SEQ ID NO: 17584 - DNA, 562 bp, Arabidopsis thaliana
cagtcaatactcataaatcaaaggaacataagaaacagaaggtagttttattataatgcatatgtgaaaagctacaaaccacaaagaacacgaatctagaacttcaagtccgaaccttttaatttctcctcgatgatcatgtcgattttgttctccatttcgggagttagatgattcttccagtcaccaacttctcctttgcggaaatagcttttgtagtcatagttcatccatgtttttccggttttgttaacctccaaaccgctcagattaccaagagagcatagttccaagagtttgctaatcgaaccactatcttcttcttccttagtgaaaggaaaccccaaaaactcggcaagcctcttgacctggacacacggctctgttttcatttcctcgtacctcatgaaaaggacatgcttggggttttcaagctgcctctccaatagcttagagcatggtcccaaaacggaccatagaagctaactccgccacagaatgactcgaacattgactcaagagtgcttctagatacttcattgttgctatacttggacctgaa

SEQ ID NO: 17585 - DNA, 1286 bp, Arabidopsis thaliana
cagatatgactgtcaactaaaaggctgctttctttttcttttgggttcacatccagatggtctttctgtttcttattctacaaccgaaaactgaagcgcgttgcgggttttcgtttctcctgcacgaggttagatgattgtcatcctaccaagttgtctttctctctcactgtcttcttcttaaaaagtacttccaactcgaaaaatgttttgttgcagtaacctggcaaatgatgcatttctcactgacagtcctccatatgaagaggatgaagagatctttgccgacatggatatgtgatctctgtatcgttatgctgagtcacatattctgtggaaacctgtatctatgtgactatgtgtgatctctagtctctaggcttgtatgagtccgagtcgaagtccaaggttaagctcttcgctttcctttatctgtgtagttgacgtgactactaataatactctgtactatgtcatgtgcaaatacttatcaggcattgtcgtaatctaatgtacctaaattcaactgaagagaaaaaaagttgagattttgtgtttatgtacgtagtcagttaccattcaccagtggtcgccgcaagagcagactcctgcatgaaaatgatggaaccggttcatatctcttataaccagatctcgctgtacgatacttgaaatcactttcatagcactgtggcaatctgaacatatccgtagattcttcatgatcagtatgcgatttcttgatgatggcattcgaacaagcccatacgccaaagccaacctctcgctatgaacccacaatctcttatccttttcttcatcatccatatcgagcaggaccgcattccgatcaggaacgtaaccagctcgagttgctttcatgttaagccattccaacattccatttatgagcttcatatccggatgatctgataaccccacactgaagtaatgcacatcaccttgatgttctatccaacttaaaccaggttccttcttgacacccatttccttcatgcttttcctaatggaagctacgtttgcccattgttttgcacctgcgtacatgtttgataccagaacatatgtcgcctcgtcctttggattgatctttagtatttcctctgccgatctccttgcaaactcttcattgttctgattcatagaggcactaagcattgccctccagatcataacgctaggctcatatggaatcccttcaatcagcttcattgctttgtcaagctgccctgatcttccaaaagcctgaccatacacgtataatg

SEQ ID NO: 17586 - DNA, 689 bp, Arabidopsis thaliana
  unsure (1)..(689): unsure at all n locations
tttcagagtcgtatgtctctgtaggaagctacaaggtcagagcgagcgtctcgtccactctgcagaaaatcctggacaagcatggagacatagcgtccggttccaaacttcagtcactgcgcacaaaatcttactcgcttgagactctagccgcggtggttcttgaactccaatcgacgcccctgaagaaattgaagcaggcacgcgtgttggaaatgctatcggttgttatagacgcagagtctgttaaaatcagagctggttggctcagggagatcctgaacgagattcttgaagcggcccaccactatgatggacacgagacaacggtggtggagaaggaagggcgtgaacgggatatgctgcttgaaagagaagaaatgaagaagatacaggaggaggtgagattgaaggagaaggaggcaaaggactttcgtaaaggagtcatggaaatggcagggcgtttgggagaactgaagatgaagcgagcgcgtttggagaaacgcttggcgtttctgagctccaaggtggaaaagtttgagggggaatctttgttagagaacgtcttttgatcaaccttatgcttttgttttggttttctagctagcagagatggggttttatggttgcaacanaacatgatgtgctanagacttagaagcatgaaattctgaaatagtgaatgatta

SEQ ID NO: 17587 - DNA, 556 bp, Arabidopsis thaliana
gaaaaattgtagaaaaacggaagaatctagcatctgcgagatctatcaacaactatgaagacagtgttccatgacgattacaatcctcattcaattccgggatgcattccgaagaacacatctagaatcagtgagatttgatattactcaacaggaaaaaaatcagacggaaatggaagaaaaaagcgacgtaccggccagcgacgtagagccaagcaagacaagagaagaaggccaagataagagagggcttggaggtgttctgagacttggaaaacctacctcgccggtctgatttccctgagaccgtcgttggtaagctctccatctctatccacggcgagagggagagagatcggaggcacgaattctcagattcaaaattgagaaagtgaagaaggataagcaaatctaagaagtaacagatgatgataatgaagctttggatttgtttccttgttcgaattataactttttttgttgctggactgggaagcgtttcctttgtggtcgtcggttattccgcatgattccgatttcaggtgaccagaatagt

SEQ ID NO: 17588 - DNA, 947 bp, Arabidopsis thaliana
ttctttttgtttctcgctctaatgattaagggtggcaatattacgcatcactggccgctgcatcaggtcagttaggatggcaaatagggacagctgacttatcatctggtgctgactgcagtagaaagtatgaaaatttgggtttatcttttgtactctttcacaatccaattatgtgatttgccttggaaaacctaatagtgtttttatatctgtacagatttgtgtcgaacaagtggtttggtgctattatatttagtggagttgtacttggaagaagttttcaataaagactctctctctgtcaacgaatgaggatgaagctgtagtgtgaggacctatatatgaagaattgaagtagacttttgagacacactgtaagtgaaacagaggacatggtcttgctacaaagtgggtctccttcaggattgaaatgatcaaggagccattgccagaaaagctgaaacttaactcttttagattagtgactagttactactggttcttgtaaaagaagctattgttgttgtttgggatccatgtcttttcttccaggaggtagtttggctgtatgtatacaatgatcatgaccttctggtcaaacaagaggctttacttttggcttttatagttgacatacgcaatatcattgattttgtaacctaaaggatgttaataacttttcctttttcaatctcaaattgcaaaagattaacattgaattagccgtgtgattgattggagaagtggaaacaactaatatgcagaagatttccacatccactaatttatcttccaatgggacaaatacttttgtttatacgcggttcaactacgtaccaataaaaacacgccacgtggtcatcgtgtctgatctcagacattaaaaagccataagaatcggagatacaatctttctctctcgattgactttattgactgagaga

SEQ ID NO: 17589 - DNA, 663 bp, Arabidopsis thaliana columbia
acatgaaaatgttttttcagaccattgccttgatttctgttcgagaaggtgttgtccagttaggagctgttcacaaggtttcccctctctctctctctttctctatacgttacatattttgcattaatatttatgtattaaatttttgtattgattaaaggtgatagaggatttaagctatgttgtgatgctaagaaaaaagctgagctatatagagagcatccctggagtacttcttcctcacccttcttcttctggttaccctttcatcaacgcttctccttctgacacgtggcatttcccgggagtcgctcctccgcatcagcagcctgagcaccagttttatcattctgaccacaaccaccgctttttgataggccaccacaaccagccacaagctgtaggaggggctgcaccgcctctaccgctttcgatgaagataacaccgtcaatgagcagcctcgaggcgcttctctcgaagctcccgtcggttgtacctccggcgacacaaccagggtactacccgtttcaccacagtgctaaagaggaaatgagtcaagaagaacaaaacgatgcgtttagggttgaacgtaatgatttggtgggtgagggtagtaataatcataatcataataataattacaatagtaataatgatattta

SEQ ID NO: 17590 - DNA, 1227 bp, Arabidopsis thaliana
tctctcctgccttggattcccgtctcaatgtatcccaccactcctttgtctatcagattctccatgacatagcccaatgctcataatcaccatcgaattttggatgatcaccgactccttttcactcatggtgtttctcttttgtaccaagctcgtgacaagctctgataccactgttgttttatcaaatctcactttaaggaaaaacaaagatttgcaagaacagatactcaaaaactcttacttgcattgaattcagattagtcaataaatagactttacaaagaaagcaactgaagctacgaaactctcgcaactaaactaatgtcacgattctttctcctacaaaggtggagacttattcaaaactagaaaaaccaataaagttgcagaaccaacacaaagatgcaggcccaaatccaaaccgattgggctttattcttcaatccctcccttaaaccgaaaacacacttttcggtttattcttctcttcttcttactcccattcttccccgaagctcttcaaacacttcacgtttcacagccttagtcatgatgtctgcaacttggtctgtagtagtacaatagtcaagtctaatagttccttccttcaccaactctctgagaaaatgatacctcacatgaatgtgcttacttcttccatgtagtacaggattctttgacaactttatggtggagctgttatcacagaacacaagtgtgcctccttctttgtctgcagccaatctcctccaaaacgtttctgagccataccgcttgacacgcaccataagaagctgacacaaactctgcttccgttgttgataatgtcacaattggttgcttcttagatgcccaagctatagctcctccacctaacatgaacacataaccagaggtgctctttctgtcatcgacgtcaccggcataatcactatcaacgaagccaaccaactctgtagcaccagcacgttcatattgaatcccgagatcgaacgtaccttgaacgtacctcaagattctcttcacagccaacaagtgttgctcatttggactttccatgtacctactgactagatttacagagaaaatcgagtctggtcgagtggtggttaggtaccttaagctcccaatgagttgcttaaactcagttggatcaactagcatcaccagctccagcttttgttaacttctgtccgagcacaattggattcttgactgaattac

SEQ ID NO: 17591 - DNA, 1189 bp, Arabidopsis thaliana columbia
atcacatgatgcatccaccaacaaaaggcattcattccatccacaaatcatccaattaagttatctcagctgcacttttccagtacaacttaataagtaacactgttttgtgacacaatagaagctaattcatagactaaaagcccagctacgtcttggtatccaaattttgatattagggggagtaattaaataccaacttcatgaacccatgaaattgaatctcaaagagcaatacaattacaataattcacccaagagagacaaataaaagatcggtaacaaattaggactgcagtatgacatctaagctgctattttattcaaacaaataacacaatcatacctcatcatttaaggaagcaaaaatggcagtcaaactatcagcctgtgctagataatcatcgaaacattggttgccaaataaagcaacgaatatagatttgcgaacagttacatcagcatctgcaacggctgtcctgagaagcttttccacaatctgcagaacccaaacatcatttctcagcaagcagaaaattggaaccgccactggtattgcaattataaatgccatcacgaagcatgtttaacatacttaagttcagatttggaaaataataaaaagaaaccttttgtaatgagaaacagtgaaattaaaagacataataagaaaaaaatgtaatgggctttcagtatgatataaaacctcttccacaaggcgcctgcgtctcccccctgctcgtgttgacctgctcgagccaaattgtgtgatgccagaaagagaatttgcaattagtctgcaacaacacaaagcagcatcttttcttgtggctgcatcctcatcatccaaataaacaacaactgactcccgagcaaattcaagaagatcatgtccctgccagaaatcagaagctcaaagacagaaatttcatattctttagaaaatgttatccgcaaagagcgccaaccttgaaattgaaacgagcaagagtctgcagggctagttgaacttgagctgaacaactagggtcagaagactgtggtgccatgcccactgtactacctcggacaatggtaacaggaggctttgcttgagaataatgggattttgaaagaaccaacgaaatgcaatctagaagcggatcttgtactgttggcagcaaagaaggaatgctgagatacaaagaat

SEQ ID NO: 17592 - DNA, 1148 bp, Arabidopsis thaliana
cataagaagttacaaatgaagaacaaactttatggcgtaagagatcaagcggccactggagtttagagggcttcgagtatcttatcgtctaactcaaacttaatctctatcttgtctctgccaatcttcacatactcttcgaatctctccttgagatcttcaggcagattcgttttactctcccaccctaataagtccttagcggctcttggctctgcgtagaaatgctgcgaccatacaaagacaagtttgtaaagctactaatgaatgaagtaggagaagagcttctacagggtttcgtttaccatgtttctgaatagaaaagccttcttggcgtcaaccccaatggctttagggtcataatgaacgatctcaacagttttgccagcagcggcagactagagcttggccataccgtcaagagtaacggctctgtcgctaacgcagttgaagatgttgccggaagcagcctctgggttggcaacggcagaagtaagcatggaagacaagtccctcacgtgggatatgttggttagctgcaatcctgatcctgggattggcactgctctgtccctcacaatccctgggaacacatttcaaccattacgtgtttttgtctttgtattgaaatctttgggtgtgtgagagacttacggtcgaagaaccattcttcgcagtctttgttgttgccagagccgatcatgtactgcggtcgaaaggaggcccagttcccgaatgtttcggctaagtacttctccaccaccacgtgaccagcgtcggctttaactgcgtcctgcaacattggagaagaaggagacataagtagtgagaatttagagatcagtattaagaatttataccccttcaacgtgaggaggttgttcggtggacttgtagatcccggcgctacttatgaacaagaattgcttgacgccggagcttttagcccaatccaccactggcctatgtccgaaaaatccaaaaggatataagatcatcatcaattctcatccatggagattctaaaagaaagaaaccatggctctctaagttaaataagcagacctaacagtatccaaatccttgccattgttgtcaaggacaacgtcaaatgtttccctccgaccacattggcaacattggccggg

SEQ ID NO: 17593 - DNA, 2002 bp, Arabidopsis thaliana
ccaatcaacggacaaatctccattcacataacatcttaaagaatttcttttgcagggttttggaataaatattgccaatatcgataaaacacaggcttacccacttatacacgcacgatcagccaagaagattgatgctaatgaggaagctgctaggtaatagttgcctcgtaaaattatagagtaactttgctatacctatactaacaagacaacacaactgcaaaccttcaggaactgcgcacctgatacactagaccaaaccattgttaagggaaagattgttgtgtgtgacagtgatcttgataaccaggtgatccagtggaaaagcgacgaggttaagagacttggaggtatcggtatggtacttgttgatgacgagtcaatggatctgtcttttattgatccctcctttctagtgacaataataaaaccagaggacggcatacaaatcatgtcctacataaattcaacaaggtttaagatgtctcatttcacaagacattgctttcaaacagaactaataataatatttttacccaaaaaaaaaaaaaaaacagaactaatatatcataatccatattgtagagaaccaattgcaacaatcatgcctacaagatcacgaacaggacacatgttagctccatccataccatccttctcatcaagaggtccttacttgcttaccagaagcatcctcaaggtataagccctaatattcatcataaacatgatctcaacagtattcacagaaacttcaaaaacaaaatattgataaacctgttacagcctgatattgcagcaccaggggtcaacatactagcatcgtggttagtcggtgacagaaatgcagcaccagaaggcaagccaccgccactcttcaacattgaatcagggacttcaatgtcatgtccccatgtctccgggattgctgctcgtctcaaatccagatacccttcatggagtcctgcagcaatcagatctgccatcatgacaacaggtgagaaatcaaaatcaagtagataccagttacggatgattgatcagctagagttaacccaagtcaactgtatctgcagccgtgcaaatgaccaacacaggttcccatataactacagaaacaggagaaaaggccacaccttatgactttggtgctgggcaggttactatatttggaccttcatcaccaggactgatttatgaaaccaatcacatggactacctaaacttcctcggctactatggatttacatctgatcagatcaaaaagatatcaaaccgcataccacaaggttttgcttgtcctgaacaaagcaacaggggagacatatctaacatcaactacccatcaatctcgatttctaacttcaatggaaaagaaagcagaagggtaagcagaacagtgacaaatgtagcatcacgcctcattggagatgaagatacagtctacactgtgagtatcgatgcaccagaaggattactagtcagagttataccaagaaggctacacttcaggaagataggagataaactcagctaccaagtgatcttttcatctactacaacaatactcaaggacgatgcgtttggatctataacatggtctaacggaatgtacaatgtgagaagtccattcgttgtaaccagcaaagacgacaacgatagcgaacgttaacgataatctaaagagaacacattcatgtataaagagcaaaaagattaagcaagaccaacactttctctcaaatatttctcataaaaaccaatagatgttgttagtagaacaaagcattaggttttcatcgacaaggacaactccaatcgaagagaaaaagaaagagaaaaaaaacaatccgaaatcttgaaagctaaacacatctaaatagaaagactagagattcctacacccttcagatccgatccaatcactcgaacgcccacttgttctcattgcgaacctcggctcttcctcaggtgtgtaatcgtcttgatgttgaagtgt

SEQ ID NO: 17594 - DNA, 456 bp, Arabidopsis thaliana
tagcctccccatccatgcccataaagttccagaagccactaaatgcaaaaaccctaaagcactgagaaagcttgtacctttgttgaatcatggcaatggccgttcctgttagtgctcgtcctcagtctcccggtatgattcctctatcacctcgttcagattttcactgattcgagtttcatttctctgatttttttggtttttctctctgaaagcagaaggtttttacgcaatcaacaaccagtttcagacgaatgggccaaaagggttctctgagatcaagattctagcgaacgaagacatgttcttgaggatggatttgcctggagttcctgatgaaggcggcttgagtgtttatcataaccggtcgcaggaaactgtggttgttttcgccaaagcacccaaggttcacacacacgactccaccgaacgtcgttaccaaacgatgactggaat

SEQ ID NO: 17595 - DNA, 550 bp, Arabidopsis thaliana
ttttgcccagacctaatggaaatgctacaaatggaaatatctaatcttctcacctgacgtggcatgtttacttttgacctttgacgaaatgtatgaaagagaatctgacggtccatattattagctgatattgaaaccaaaatcacagccgtccaatattatctgctttcacacttaaagattatttaagaagttatacttaattgttttgttgcatagtatttgtacacgttattagtatatcttctggttatattcttagataattttttttgtaattttacctaatgcaaatcaatagagaccttgagaaattggtaacaatttagagactaatactagacacacgtaaagattgtctttttgaaacatatccaaagttgataaaaacttaatcccaaaatgacgacataatatctctaaaggagaagtccacaagatgtcacgaatttaataattatggaatcaaacgggagggatgatcagacgaatgacaccgttcttagcaatgatcttgatcttacggatgggaatgtcgaaaggagtggag

SEQ ID NO: 17596 - DNA, 597 bp, Arabidopsis thaliana
gtatcggccgccagtgtgctctaaagtatgatcaacgtaataccggcatctatctgaccgggctgcaacaagtcggcgattttacctttgaaggcgcacacgcagtgacgataactcacagtttggtcgtcatggaacctggcaaaccagcgccggttgggaattcatcgaaggttatcgcttcattgcttcctacgggacatcttataaggcaccaaatctggggcaactgtatggcttctacggaaatccgaatctggacccggagaaaagcaaacagtgggaaggcgcgtttgaaggcttaaccgctggggtgaactggcgtatttccggatatcgtaacgatgtcagtgacttgatcgattatgatgatcacaccctgaaatattacaacgaagggaaagcgcggattaagggcgtcgaggcgaccgccaattttgataccggaccactgacgcatactgtgagttatgattatgtcgatgcgcgcaatgcgattaccgacacgccgttgttacgccgtgctaaacagcaggtgaaataccagctcgactggcagttgtatgacttcgactggggtattcttatcagtattta

SEQ ID NO: 17597 - DNA, 586 bp, Arabidopsis thaliana
tgcccataaagttcccgaagccactaaatgctaaaacttgctacaaatgcaaaaacccttaagcactgagaaagcttgaatctttgttggcaatggccgttcctcttcctgctcgtcctcaatctcccggtatgattcctctctcatctcgttcaaattttcactgatttgcgtttcatttctctgatttgtttggtttatctctgttttgatatgttggagaaagcagaaggtttttacgcaatcaacaaccagtttcagacgaatgggccaaaagggttctctgagctcaagattctagcgaacggagacatgttcgtgaggatggatttgcctggagttcctgatgaaggcggcatgagtgtttatcataaccggtcggaggaatctgtagttgtttacgccaaagcacccaagattcacacacacgactccaccgaacgtcgttacctaacgatgactggaattggctgcagctgctgtgcgatctcaagcatgaccactcacatgtccgacggtgtttttagacttaccctctccaagactcgcatcgatccaaatcgctcttcttgcatcggtcagtatc

SEQ ID NO: 17598 - DNA, 814 bp, Arabidopsis thaliana
gaacactacctaatgttggagaacgaagatatgtacgttcggattgattttcccggcgttccaagagatggtgtgagggtttttcttgaccagtcgaagaaagctgtttgtatcttcgccgacgcaccaaaggaacacaaatacgactactctgaacggaactacggtacctccaccggactcgtctgcaaatgctgtgaaatctccggattcacttccttcatgtctgatggtgttcttaggcttctcctcaccaagtccaacatcactccacaacgctcctcctgcatctgtaattacctttattattcagtcacttcaatttatggaaccttttttggtaataaaaacttttgatgaatttgtgtttttctacagcgtttcttgctggcccagatttcagagaaggtactttattcgatctgtcgttttcaccaaactttctattttgatatatcgtctctcaacatttattacaaagtcttcatttttctttgggtaaaaaaaaagtcttgattttgccttcattaacgtttggaaaatcttgtcttttctaattatggtcatagatctgcgtggcaacggtcctcacaaatttccccatggcacggatcctaatggtacactcatatttcccttctccaagcttatgctatacatagcaagagtattagataggaatcaaacactatatatagtagtatatagtagtgagattggttagtccaaatgggaatagttgttgttgttgttgtgttttatgtggagcagatccgaaattaacgggtcggatattgatgcacacccatgtgtg

SEQ ID NO: 17599 - DNA, 1036 bp, Arabidopsis thaliana
tttttggtattatgttacgtcggggattacagatattggacgttttgttattattgcaaaaaccggcaaataaacttcaacaagtgtttggctacaccggatatttgatcttctctacttgtatactattagagtattagtcagaacagaaccggtcaagatgaagcaaatggtctacagaccggtaagtctttttcgaagaaaggagcagacccaagaatcggattggattcaaagaaatttgctggtttaagttcaaagctagccgcaacggttggcataactggataatcttcttgacaaggtacgtgatggaaccctagtgtgtaccacagtactatgtccttgttttcgatcgaacggtccctgtttcaccacaaaacaaagatatcagagaaatgtttcaaaccataaacggtatgtctcaattggtatagttcataaattagtttcgtaccggtctgaccaaacttgtagtgtgtcatcaccttggctctggtaaattagaactctccggcatattgttctgaccggttatatggagtcacccatatctaaaccgataaaaccaattgcatcagttaaatgaacatttggacacattaagtcctaaaccgagattatagctaatcagaatcttatatataaaaacatagcctaaaattaaatacctgattattagtgaatgcacctcgaatttgaggaggatcatcgtgatcaagcaaactcgctgcattaccacccggtacgatcctgtaaccagccgggtttcctacccgagattttcggttcgggttcacaatgtggaattcatatgggtcatagaggctcaacttgatctgagcatctttctcagtcttggctataaaattctggacccttcaagtaactcttccttggcgattttcctgttggaactctctgcttctctagatgaaccttaaccaaagaattattcatcggtccatcaatatccatgtctagatgaaacgttatgaaatgatcatgaacgactccaatcacattctcagagatc

SEQ ID NO: 17600 - DNA, 500 bp, Arabidopsis thaliana
cagtttactgtggtaaaaaagataagtatcaaacatcaaaactaccaagaaattaccaatttgtgtcggtgaactcatatagacaaacctatgtggtaatcaaactattagttaaaaaaaaattgaacatattaagaagattacagaataatacatgtaatcctccacttgtcagttctataaaatattaattaaaaaggaaattcaaattgaagtaactaagaacagtttttttagcagttaagctgaatttcaaaaagccataatcttcgctctgaatctcatcagccccggtctccttctctagctatatatatacgtgtgtgataaagtcgtaccctcaagccaacacaataacaagaatggcttctcctttcttctttgtgttccttctctctgcgctttcactggagaatacctatgcaagtcccaattacagagaagcactctcaaagtcattactctttttccaaggtcagcggtctggtcgcctcctagtg

SEQ ID NO: 17601 - DNA, 805 bp, Arabidopsis thaliana
gtagaaatttatgacaaatcaaatcaaatgtgtaccggtgtagacggcggttacgtagataagtttctccgatggaccagacatagcggcgagaggagtcgcgtaaccaggaccaccgtacttgcaacatcctttgcttccgccgttgcttaccgttaccggagctacaacttccgtttccgtcgccatctctctatctctctctatgtgaagtcaaatattgaattgtgtgtatatggtagtcgttaagctacacgtctctctctttaaagtatatcgcaaacacacagtgacaagcttttggctatttgcgagtgaacttgattagtccttgtaattaaattaatgaatcacattactgaaaattatagtaagttaattgagatgtatttcgaattaaaatacgtctccatgcacaaaatagataacataaacaattaaccagatcttgtccattaacaaaataacaagaagaagataacaaatctggtccatgtgtccacgtacactgtatctgacgtgtttttgagttgatgatccataattcgacccggttttgatcggttcaattcggttactcgaaagatagagacacacaacataaatagaaagttttattatcacggaataagccacaaaggagtaagaacaactttaattgtcttgatcacgaatctagccacaaatccagcttacactcttagggagccaaaatcagatccagatatcggaagtgcagtctccgccgggatatctcatctcgtgagctagtgcaggaccgtctggttcatcaccaaagtccaca

SEQ ID NO: 17602 - DNA, 855 bp, Arabidopsis thaliana
ctttgcttttgaaagattctgtatcgcgatttctcctagctcaggattcttataagttctagaggaactaagaagagacctccatatcactacatctggctctatcggcattgattcgatcaactcgtacgcttcggttactcttcctgctcggcctagcagatcaaccatagcaccatagtgctctaactttggctgtatagaaaagcggcgactcattagaccaaagtactctttcccttcttcaagcaaaccgcaatggctacacgttgttaaaagcccgaggaatgttatagaatctggtgaaacatgttccgcttccatctctgaaaacactctgattgcttctgtggctagcccatgagtagcaaaacccgtgatcatcgcgttccaaatcgacacatcgttccgtttaacactatagaaaacctccctcgaagttcctatatctccacactttgcatacacatcaacaagtgcagaagacaatattgcattaagctcaatcccactatcaatcatcagagagtgcacccacttcgcatggtgcagatctccaagacgggcacaagcagctaaagaggaagcaaaactgaacttattcggtttaatatcagtaaaactaagcatattcttaagagctttcagagcttcttcatactggacatttctaacataaccaccaatcatcaagttccaggtgatcacattctgatcactcgcattacgaagtaccttcttggccaaaccagactctccaattttcataagactctcaatgattaggtttatgttacagacaccaggagacaaagagaggaacaaagaagaagccgtcgagcaagatatgaacgg

SEQ ID NO: 17603 - DNA, 656 bp, Arabidopsis thaliana
atatcgagtcttcacaactatttgtcttcttctttgtctctttctctcagccaacttcttcactcattatggtaaaatcatctctgtctctttctttctttctctctatccaactctatctctaaaagcatttgatattgattatgattttcttatatagtagtagatgcaagaaaaagcgtgggatttgagagagagccaaagaaggtgatgatgatcaaagcattaaagcacacatcattgttacagaaaatgatgacacagctcaatcttgctcagcctttagactactcttcatcctccaacactcaaccttatggcgttagacaactctcactctacctccttatgtttcacttcccccactttcagttcccggaaatgcccctcctttttgcattaatcccccaaatactcctccttcctcctcttatcctggtcttagcccacctcccggcccaatcacattacctaacccacccgactcctcctctaacccgaactccaaccccaacccacccgaatcatcctcataccggaacccaccggttccacctccaattcaaaactcaaacccaaacccacccgttaccgtccctaatccacccgaatcatcctctaacccaaacccacctgattcatcctctaatccaaac

SEQ ID NO: 17604 - DNA, 911 bp, Arabidopsis thaliana
aggagttcctaatgttggagaacgaagatatgtacgttcggattgagcttgccctctgttgctggggaggccattaaaggatgggttcctcgctgcgcagagtcctttgagaagttagacaaagttagttcatcttctctgttttctctcaactaaacagtcatgatctgtgatcctccaaaaatcttgaaataacaatttatgttgtgtgtattgttaaagattggacaggggacttacagcagcgtgtacaaagctagagaccttgaaacggggaagattgtggcgatgaagaaagttcggtttgtgaacatggatccagagagtgttcggtttatggccagggagattctcattcttcgtaagcttgatcaccccaatgttatgaagctagaaggtctagttacctctagactctcaggtagcctctaccttgtctttgagtacatggaacacgatctcgcaggtctagctgcaactcctggaatcaaattctctgaacctcaggtattacatattctgttttcctatgcacttgaaagattggagaattcaagttttataaagagtcctacttcgttttcagatcaagtgctatatgcagcaattgttccgtgggcttgaacattgccacagacgaggaattcttcaccgtgatattaaaggctcaaatctcttaatcaataatgaaggtgtcttgaagattggtgatttcggattggcgaatttttaccgaggtgatggagatctgcagctgaccagtcgtgttgtgaccttatggtacagagcacctgagctgttgctcggtgccactgagtatggaccagccattgacctgtggagcgccggctgcattctcactgagctcttcgccggaaaacctattatgccaggacgcacagaagtaatga

SEQ ID NO: 17605 - DNA, 617 bp, Arabidopsis thaliana
ttatagtaagctttttacacatctaaatttaattaaggtaacacagtgattgtgagattcttatttattgtgtctctctcgtttttaggatttgagattcttgctttcccttgcaatcaatttggaggtcaagaacccggttcaaaccctgagatcaagcaatttgcttgcacccggttcaaagcagagttccctatattcgacaaggtatatagaaaaaaagaactctcgtttttttgagtttagggagatatcttttaattagttttgataagttatgttcttcaggttgatgtgaatggaccaagcacagctccaatctacaagttcttgaaatccaatgctggtggtttccttggtgatatcatcaaatggaactttgagaaattcttggttgataaaaagggcaaagttgtcgagagataccctcccacaacttctcctttccaaatcgaggtaccaaattcaaaactctaattcaatctggataactggatccatggtgcatgtcgtgaacaaaccaccagttgaacttttctaatgtaaatagagaatctacaattttacgttttacattcgtacatatgtaaatatggatttaaattgatacaaataag

SEQ ID NO: 17606 - DNA, 897 bp, Arabidopsis thaliana
gatttgtaggaaaatatgttcctgcttcctcttacttagcataggatagatcatagagtctcaatatgtttcagaaggttttttgtttgatgtcatattgagaacaatgcctatatactactctccatttgtattaacacttgagtatctgtaaccaacgaagctcagatgtgatcgatattatttttttaacagtataaaaccacttaacacttatttagtttgttgacctcgtggcttcatattgactacagaatgaaataggtaaactataaagtctacactatttatggctgaaatttatttgaatacatatccaccacttgtcttgttcttgaaacacacggtcgtggccatgtctgttctgcttccgatgtatcctctccaatccttggccagaagcaagagattgtttccgattcgaaccagatcaaaaccggtttgtttagcactgaccaatgctcaaacaaacggtggtgaccaagaggagaaagtagtgattgttggcgccgggattggcggacttgccactgccgtttcacttcacaggtaagtatgaattacaaaaattggttctttgaattttcttgaaactcaagagccactaaaccggaggctttggttgactggttaggcttggaatccggtcggtggtgttggagcaggcagagtcgcttcgtactggtggaacatcactgacgctattcaagaatgggtggcgcgttcttgacgccatttccgtcgggcctcaactccgaacgcagtttcttgaaatcgaagggtagagtttctttctgcccatatcaaaaagtgagaaaattggttcttggttttagctgagtgtgttggtatgatcagctgagcaggatggtagtgaagaaggaagatggaagagag

SEQ ID NO: 17607 - DNA, 388 bp, Arabidopsis thaliana columbia
aattgtgcaatcaatctagaaactaggagctacgaagaaaaaccaatgaaaaaggaaatgatcgatgttagtacctcaagagcgtgcttgtaacggcgagttctcctaagctctttggagatctctcggagttcattgatagtcatttgattcccttctccaatccatttctcgagaacagtagtcgcgctacgtttcggaagtctcaatctgaaaatcctgctcttcagatcgtctttctcctccgattcctcgacaagggagtttccgattgctgcgtcacatatgtacgacttggagaatcgtgacgattcggcgtttcgaatgaaattgcttccgagaacaccattattcgtcaatcgactgaattcataagaagcagtgtgaa

SEQ ID NO: 17608 - DNA, 500 bp, Arabidopsis thaliana
gatgggatgactgctcttttctttctacggttttgggaagtaataaatggcgatcttaccaacatggtgaagaatttttttagcttcggtatttttgatgggaagctgaatgaaaccaatatttgtcttatccctataggcgaaagaccgagagaaatgtctggcttttgtcctattagcttatgcaatgtaagttataaggttatttcaaaaatcttgagcttgcgcctcaagaggtttcttccggacttaatctccgagacacaatctgccttcgttgcaggaagattaattaaatataatattttgatagctcaggagaacttccatgcacttcgatccaacccggcaaatcggaagaagtttatggcactaaaaacggatatgagcaaggcttaagacataatagaatgggggttcctccgagctttgatgaaaaagatgggtttcaaccatcgatgggtaaattggataatgcaatgcattacctcagttacata

SEQ ID NO: 17609 - DNA, 598 bp, Arabidopsis thaliana
gtaacggccgccagtgtgctctaaagagcctggctctggggactagcagcggacacaaaatcataaacatcgccaattgtatgagtagtattgaaccgggaggtaagacgtgttccgtcgccgagtcgaatttgcaaagtgacaacaggctgggattcatccacatttggcttgggaggtccagagctggattgaggcgctggggctggttcggagggtgcaggtgctcgaatcccgggcgtcgggctacccagtcgctgtcccttgcccgcaaaaggctggtacttaggcttcggcctgacatatttttcgtcatgttgtttgatctcaacatccacatcctggccatgctgcgcgttcataatcgacagcggacgctggccctgtcgaatgctattcagaatctcggcattctgaggatcgtcggagcgatatagttcaccatcgtcaacggaaaaaccatccgcccagaaatggagcgtccgccgcacacgtcgaggaatctgaggctgagcaggcccactcggagtatcaatcactctgcttggtgtgtctcacacctaatgtgcgggcggggcagtgaagtagttcgtcttgg

SEQ ID NO: 17610 - DNA, 838 bp, Arabidopsis thaliana
tcaaaacgtttcatctgcttttggggatcgttcattttctgatgaacaggtcaacagagtaccgggatatgggaacaatatgggatcattgcaccataatagttccttactttctggaattatcgatgctgggcggtcaactcagaatgaaactcaagccttcagtaatatgtttggtatgaacaaagacgcgaatgacatcaatacttggaacaatgtgccgcctaaaaatgagggaatgggaaggatgatgtcatatgatgcccaagacagaatgggcaagcaagcagtattagactccctgattcaagaggagcttcctgttggtacgcctggtcaacagtcctctttcaatatctctggtatgttatctttcagagtaattgcatcttctaagattttttgttatttctctaatttcatggtttggaaggttgatttttactttgttattatgaaggcttatcctgatattctcttgctgcagaccgatacagtgacaacttggttggagaagatagaaggaaggataggtaattttgtatttttgatgtttagcaaatagcaattagcaccagtatattagataagtaaagcaccctgaactcctcccatacattcctgtggattaaatattaaagcgattgtttgtaggttggtagttccatcacatgggcagaattcagttttgttaaaaaggcctccctcatctcattcttcttcgtcgcatgaaggattactcgagcgtatgtctgacacagctagcagggcagcagcaagttcctatagtggaattgaaggtatatctatctcaaggaatgttgtctgctagagtcga

SEQ ID NO: 17611 - DNA, 1890 bp, Arabidopsis thaliana
gttctcaacactatccgctgtatgatgtcctctccactttcatccttaccattcagagcagagaactatttgtagaatagagcctccccaaattgaaaccttcttgctttttcgtggactacgaccaaatttaggggtaatccatgactcagctcctttctcttcttccttaccatcttcagagattggtatgattggtatattctctgtcacacattctgcacgtcacagaggctgcagtctgagaattagacaagacctgacccgtctctgtttcttcaacatgaattgggtctggatttggcgtgtctcgagagcaggtttttaaggcagagagacaagagtcacggaggtgaccccatttatcacaacaactacatcttggtggtaaccaagggtaggagtattttatcactgcagctagttctccctcctcctcgccggtaaacacaaactccttaggtaactctttcgttaggtccgcttccaccagcaactgagcttcatcgaaactcgaacaagattcagtcttggggtgcaatcgaattggcttacccactgcactagccaaaaactcaagacctttatcagtgaatagtgatggaggaacatccgttaaagtgatccagagctgaattgacttcatagctggctgagtttcttccgcaaaaggagaccactttgacaccaccattggcaaatccatgatattccacatgcctctgtttaaagctcttcgtcgcatggcttcgtttcggatacgaaactttatcgtcgagtcattgacggcataaacatcaatcagatttgacttgtcccccaatctccaaattttattaacgatcatgtgaattttcccaacgtgtggggcctttgcattgagaaagtgaccaattagaaaatcttcccatagtggtttagcaccgagaaagacctcttttggtactaccaccgtcgcttgaccatcaacttcttccgatacgaacttttgttgagtgaaggtgtgttttcgagcagcgtttacccacgatttcttcgcaggcggatgtgacatcctttgagtcgtctctaaagcactctgactgagtgcaggaaactggtctgaatctgagacaagtaaaaccctatatgtgctttggtttgaaacgatgagatcaccgtcctgtctctccaaagagaccggagaagatacaggagacccctctcgcaacggaacctctccggagaggcctggaggagccgccgccggcagcatgcttgtgagaaacgtaagaaaaccctagaacgcttcttttttcgcccctgccacgtcagctgtccttccgacctagtaaagacaccccttttttaacactggatttcacgaccacaaggttaagagccttgcgctctaccaactgagctagatgggctttgtggtgcttgtaatgggtttgtctttcttgcggaagaagaatcgggtcaaccattctcatccttcctctacatcaaaaccctaatttctatattacatctctaacctcattcatatttgatatataacaccattcatttccttgatctctcactcatcaccctcacccaccaccaccatcaaaccctagttttgtttttcccccaatttcgtttccttgatcgtggatcattcttgctcagatctctgttagcgtctttgaatggtagaaacaactccgatcaccagagaatatatgctttcccattgcacaaccgcaagggcgagctttttccttcgtcgtctctccgccgcatcttctttcaaatttggcttctccaaagaaggctggtactaccgttgcatcggcgtcgacccttgaactcctcaacacggtttgtttttttaataaacctttctgattttgaaatttgata

SEQ ID NO: 17612 - DNA, 1053 bp, Arabidopsis thaliana
tcgcccataatgcgattgctagtgactttgaaactaagaagagctggatcgatctgcctccctttctaacctttcatctttccgccacaaactttgcttccttctgtcacaccatttgactctgccgccaccttcttcatgctattactcttcttcaacatctcactgaacgatgtcgcctctgacgttgaccctttgtttcccgctgctcctgattcccgtctcacaccgcctgataatatatttgcttacagacttgagtcacattttccatcgataatggccaaaaatacaaaacgatccttgagacagatatatagcttcaattccactatacgaacttgctgctgtcctgctagctgtgtcagagatacgctctatcaatccttcatgcgatgatgaagaatgggatgagggaggcctttttaacaatactgaattctgtccatgtgatggaactaccaacctacaaacaaccacgcaaaatttaatcggcaggaatatagaggtatgcgagttcaaggtgttttgtatatctaatctactggtgcttaacgtagcagaatacaaacttacctatccttccttctatcttctccaaccaagttgtcactgtattggtctgcagcaagacaatatcaggataagccttcatagtaacaaagcaaaaatcaaccttccaaaccatgaattcccggaaaaagcaaaatcttaaaagatgcaattactctgaaagatacataccagagatatttaaagaagactgttggccaggcgtaacaacaggaagctccccatgaaccagtgagtctaatactgcttgcttgcccattctatcttgggcttcaaatgacatcatccttcccattccctcatttttaggcggcacattgttccaagttttgatgtcattcgcgtctttgttcatagcatacatattactgaaggcttgagtttcattctgagttgaccgccaccatcaataattccagaaagcaaggaattattacggtgcaatgatccatattgttcctactccggatgatctgttga

SEQ ID NO: 17613 - DNA, 636 bp, Arabidopsis thaliana
catcgatggaaccaatactatgtgaatcatggggctgcattattttacagggtttcaggtgtgccattcgttgggaggaggcacaggttcaggaatgggaacactattgatatcgaagatccgagaggagtatccagacagaatgatgctcactttctctgttttcccatctcctaaagtctctgacacagtcgttgagccttacaatgcaactctctctgtccatcagcttgtagagaacgctgatgaatgcatggtcctcgacaatgaagctctctacgatatctgcttccgtaccctcaaactcagcactcctagctgtaagtacacccaattcttatcctccattaacccaaaatgtatttaaaactaattctgatacattgcatgatgatgtagttggagacttgaaccatttgatctccgcaacaatgagcggtgtgacttgctccttaaggttccccggacaactaaactctgacctcaggaaactcgcggtgaacctaatcccattccctcgtctccatttcttcatggtgggttttgcgccctcacttcccgtggctcgcaacaatacatctcactcaccgttcctgagctgactcaacaaatgtgggactcaaaaacatgatgtgt

SEQ ID NO: 17614 - DNA, 796 bp, Arabidopsis thaliana
gctttgaaagtttcgacatctaaaagacttagttccaaaatcatgcaggccatcggtgtgattctacaaaatggttatggtttgacagagacctcacctgttgtctgtgcacggacacttagctgcaatgtaagttattctgccttctgttttctaaacgagttgtgaacacacaacgctttgaagtttctttttgagtgtttgcaaatgctatcatctctgatttatttgcatgaaagctaacatctgaaattaccttaccaaagttcacagacaaagcagttacattttgtagaagtattgaacagaacttcactagctagtctcttttcccactgagacaactttgtttttgtttccttgggaaattacaagtccgaactgtctttattatgatccatcatttgtcttcttcggcgacttattacaggatatcgtttcgtcttttgttttctactaaaggttcttggctcagctgggcatccaatgcatggtacagaattcaaaattgtagatcctgagactaataatgtactccctcctggttcaaagggcattatcaaagtcagaggtccacaggttatgaagggttattataaggtaaatagcatattcttcttcttcatttcctgttttcctcacatttaagtttgttgactcatcaagccttactattttgcatgtatgtaattgtgtaagagtttttgcattgatgattaaatcgggttactcatctttctgttggtgtgtgctcagaatcatcgactacaaagcaagttctaaatgagagtggatg

SEQ ID NO: 17615 - DNA, 1352 bp, Arabidopsis thaliana
gatcacggcgggcaacgtgtgctgctatcattatcatcaacgtctccagacaacacttgttatgtggtcgaccaagatttgagcctcacaggaatgggaggcttcttcttgaatcttgtccgtggcttgttgtgtttctcagttagagaaaaggcatgtatctataaccccaccactagacagcgcttgaccttacccgcaataaaatccgacatcatagctctaaaagatgaaaggaaggatatccggtattatatcgggcacgatcctgttaatgatcagtacaaactagtctgcacgattgggatatcctctgcatttttcacaaatctaaagtcagagcattgggtctttgttctagaagctggaggttcgtggagataggttcgtacgctggagagttaccatcctcatgctccttccacagtaggacagtttatcaatggatcggtagtatattatatggcttggcttgatatggacacttgtgctgttgtgagtttcgacattacgtctgaagagttgactaccatcatagtaactctagaggccggggatgtgctctgcctgcaggtaggatgaaggcgggtcttatacagtatcatggggaaatagctgttttcgatcacacccatctcaaagaaaagtttctggtggatttatgggtattgaaagacgctgggatgaagaagtggtcgaagaagaggctggttttacagccttgtcaaaagcatttagtccatgatgacattgaactggtcgtaaaaggtacaactcaagatggcaaggttatcttggcaccggtaaacatgtgttctcaattatatattttgtgttacgatatgggaagcaatgacctaagaaaggttgaaatcaaaggagtaccagacatttggtttgataaggagtgctatttcgacttgaagtactctctggatgagagtgaggacgtcatctacttggaaacttgaccattgactttgtttttctagctgtttaaacaactgagttaaaaataaatttgaactttgtcagagagttaatttaatttttaaaatttgcaaaggaatgtttctcagaacgagcttaaattagtctctttacttaaatgttttgctacaagcagtcacataacatctcaagaacaatagaatctttctgtgaaagcttgtgatcaaaataggttgtttggtgttgtgaagagagattagtcccttgaactcgtgatcgtttattttatcaatcatgaacacaaaagagaaggagtatatttttggacagatgcacatgcaagaccttttaatacatccaaaatcaaacaatgttaacatcttatgttcactaatatatat

SEQ ID NO: 17616 - DNA, 1004 bp, Arabidopsis thaliana
ctttccttgactcacttgcttttacaaactttacactctctctgatattctccaacagaccactcgctaattctaacccggcttgcacaatcagattcaatatatgtgcacaacacctcacattcaaaaaatttcctccacacaatagcccattaccactctgaagtcgatgcttaagaatagtttgcatactagtgttcgcagaagcattatccagcctgatagttaatatctttttctccaaaccccattctttcaagcaatcataaactttcttagctatttcctcaccattgtttggaggcttaagatcacaaaaagctaatatcttattgtttagcctccatgattcatcaatataatgtgaagttacacaaatatatcctgtcactgtacttcgagacgaccataaatctgctgttaaacacacccgaccgttgtgtttagcgaaaacatctatcaacttagctttctctatctcaaatctcttaaacacatcgagtgcagctgtttgtatacatataggttgacaatccgggtttaaaaatttatctctagccctcaccttttcatattcaacatatcgaaaaggcatatcatgatatattattatctcagaagtcatctctcgatcaactttatgatcattcttaggtctagtttcaggctgaggcctttcggggcaaagtgttagatggcggttcattgttgatgttccatatgacttttctactaccaacttaataccacaatggtgacatctagccctttcttttccatcttcctctattcctacggatgtaaattcgtcccaacacaaagctctctgttttttacgtacccgtttagctcgttgacatggttgagtgacactttctgtttggttctgcccttgagtttcaacttcagcattcatctccatcttcgtgcgttcgttttcagcttctagaagagcaattctttccagtgattgctgatccatctacataacaaattttaattac

SEQ ID NO: 17617 - DNA, 530 bp, Arabidopsis thaliana
aaaaaaaaaaaaaggaaatcaaacgtcttgccgtcttggtcaagtttccaagtagatgaagctctcactcttatccatagaattcaagtcgaaatagcattctttatcaaaccaagagtctggtactcctttgatttcaacctttctcaagtcattgctttgcaagttgtaatacagaatgtagaatcgagaatgcatctccaccggtgccaagatcaccttgccgtcttgagttgtaccttttacgatcaattcaatgtcttcgactaaatgcctttgacaaggctgcagaaccagagtctttttcgaccattcactcttcccagtgtcttccaaaacccataaatccgcggaaccctcgtctttaaggtttgtatgatagaaaattgctatcttcccaccatactctataagatccgccatcatcgtaactgcaggcacaacctcgtcaaggtggatctccctaggtactgggatgatagtcaactgttcagacctaatgtcgaaactcacaaccacacaattataat

SEQ ID NO: 17618 - DNA, 823 bp, Arabidopsis thaliana
aaaatcctcaaggtatgctttgtagagggattcctcataatctctatgttcatgtcatcgagatcctacaaataatgcaatatgaatgtgatattacacccataacagaaactagaaaagaaattgcataatattaatttgaaacaaaaactagaataaaaatccatgagctttgtacctctgatgttaggcattcagaaaagtatggagccagaggagtgtccacaagcaccaacctatagagttcccgcatgttctgagcaacagctagtgtagcaatactggaaaaagtgagagagcatgagaaaagcataaaagtgggaaaacgagaaaagggttatgaaacagctaagggatgaggaggtataatagaagatgcaaaagctcgatgcgggctacctgtcaaacatgcctaaagggtgacatttctcaatcaactcttgaacatctctctcatgcagggttccagtaacaatgagcacgacattgtcaatcatgtggccatatctgcattacaatatcaaaaaaacaaacccaatgcgtcatatatttgacagactgtatactaaacgacacccagggaagaaaaaaagaagctaacaatctcagcacaatatctgctctgttctagtttgatctcggtaaaggtggaaacttcaggaaagtaacaaatcttacactaggatggatagcaaccttaactctagaaactaataacaagggctacaaagaaaaaaactataacagcatccaccattgatctagactcatgattttagtaatggggagagcaagaaataagtatctcacacattacctgatg

SEQ ID NO: 17619 - DNA, 583 bp, Arabidopsis thaliana
agatgcacaacagtagtaatacttcttgaagctaagaatttcaccaaacctaacataatctcaaactaaaagtaatttacagcttgcaatctagtttttctttttgccacaggagtatcagaatgaaggaacaatcccatatcctgtgttgtacattagcatcgtgttgaacccttgctcctcggcttcgatttctctctttgcgaaccggccattgacccgcggtcttatctctgcatatgccttcctcgaagcataccttattgtcttctcaaatttccttgtcttcctcttctctctgtatctcaggaccctggcttctctgtccattggactgagttgtgttactgttatcatctggcttgcagggtcaggttgttgctctactgtccctttgggcgttcttgggtgtgaagctgttgtgacacatgctgttgactccggcacaacaccagtttccatggatgaaatgtatgcctaatgacaggaacaaagacattctcaatcccccctggtaagacgactaaagagagtcgatgcaaaaggacgcatatatggtttttattatagaattctggtgaaa

SEQ ID NO: 17620 - DNA, 709 bp, Arabidopsis thaliana columbia
gactccttagattggtcaaactggtagggatggggaagtcatgtagatgcgctggagaggtaccgttgtttataatcacgaacaccctaagcattcccatcttagcaatgaaaggaggcaatacatagttgtctgaagagaagtttactatcagaacttctgccttggggaaatccatgtcaaaccagtccatctcagtcatttctcctgtaaagaaatccatattaataccttatgattctagtgacgaaccgaattaattcattagaagatcgttgcataacaaattcttgcctgtgtgaatggaaaccactcgtgcattgtatggctcatcattgctcctctcccattcgctgggaagcatggtctctctttttggcatcaataagcggtctcttctacttacttttccacgattggtaagatgaagtgctacatctcttaaaacatcgtgctgcgtcacgaatatatcatagtagctagtgcccatagcgacaaacctgcaacattatccacggtaaattagttaagaatggttaaaattataaaagtggctacaagagatgagaacataaagagttctataaccgtacgttggatctttcacgagagtaagaagattcctatttgctagatcaacaagaacatcaaaggcggctgcgtcctcaagatcatgtatcttgaccaacatgttgatgagaacatcaac

SEQ ID NO: 17621 - DNA, 739 bp, Arabidopsis thaliana
gctctcacatcttcgataccaacctgcactcatgccaccataaaccccatcaatattctactaaaacaattgtttatcaagattgattacacacttatagaagtaaatattttaacgaaatcgaaccactataaccgaacagaatgcaaaaaaaaaaagaatgactacacctaatcacatagattgtgaaataagattctaacctctttggcgactgctcttgctgttctccagttatcacctgtaaccattatgggtcgaacacccattctaaggagaccttccacaaccaaagcggcttctcgctttagaggatccgcgattcccatcacaccaactaatttcccattataggctacaatgactcccgtctttccgctttcttcaagatcttccacaaatttctcgacatggtctgggatgtttatggcattttctgacataagtttacggtttcccacctgatcaaagaggataaaacaaaactttctttcagttggcgagaacaggaccaaaagcaagaagttgataatatattatggaataaaaccccaaccagaatcatcttctcattgactaagcactgaatcccttttccgggaagagcagagaaatccgaggtatcaagtaaccatccagagttttgcaaatctttgttatttgtttcgccatcttcagtggattcatcaaagaagtggaaatgccgagcgtacgcaactatagcttttgccaatgggtg

SEQ ID NO: 17622 - DNA, 567 bp, Arabidopsis thaliana
ctctaacgcttcacatgatacgtagcatcaagatgcttaagttaacgcttaactacagaatctatccaccacgtgacactgacacaaaactgttcattctcaatcctccggacacactttacctgagcttgtacaagcatgaatccttagaggaatctaaagacctatcagcaaaactcactaaggcattgtaatctggaaattcattggaatctaaattcaacgaagccagagtttctccacctcttggacaaaacactacttttgacatcatcttttgtcggaagctgcagtaatttgcttatcctattatcttctcttccattaaatcgattcgtaaaattaaactgaagatcacaccgagacaagctcaattactcaattagttggcttatctgcataaattatgtacatctagcattcatttcaatgtctattgtatattaaagatcttaataaagcaggttttcaaactcaaattgtagactcatacaaatatagaagaagccaagactttttttaaaacttgaaaaaatagcattcatacatacttagaaaacatacaaa

SEQ ID NO: 17623 - DNA, 663 bp, Arabidopsis thaliana
atttctgtttctggtgtgggttgagaaagacaacatctcggatggaaaagaaatctataaggtttcaaaggtgcttctgaaagatggactactagagaaacagttactagaggattctgctgaacatgtgaaccatgcatccattgtgtctggtgataaggtatttcacacaacatatcaaattacattcttcattacaatcataaagttcataagagttttggcaatttctaactctatatattgcaggttccacttatgctggagaatggtaatggatcgccagactctacgactccatcttcaaagcgtgtttacgctagagaaacgagtggctctgaaggttcttcaagttcaaagaaggtgtgtgttgtaccattagacttggaaaagtctttatctgagaatgctgaacatggagttgccttgaatctgcaggtggctgattcaaaagaagttactgttccaactgaagtcaaaacatcaaaggttcctgttgaaacagagaatgaccaagcacttgtcccagctactgtcgtggtgaaacaagaaatcaagaaagagatggctaggaacatggctactgtaagggccaaagtggagaagaacaagtgatctacttatctatttgttttaataagtgatgcttctctgactatgttt

SEQ ID NO: 17624 - DNA, 783 bp, Arabidopsis thaliana
ctgcttcagagttacacatcacaggaactattgcccttatagaccaaggctacctaattatggaagggaaagagctgtcttccatgatgaaaggcttagatcgtctatgaattctcagtctcaaatgacggagcttcatttccagcacctgtgctccctccaccaagaattgttacccctccactgaatcatggagagtctcttgcagcccatccgaatgttcctgctccaagagaaggccttaatcatcagggtcgagggacttactatcaagggctctgtcaaggtcaacaggtctcaactgattctaatatcacgccttcagttggaacagcactctcaacgggttctcgtcgggtttttgaagttggtcaatcttcaagaggggtggaaacaagggaaacaaggaagaggcaagaagagaaaggaactcatgatgaacaagacaaagcgcacatgaagggagggattctgaaccctccaaagaaaagataaacactctatgaattctgtcattttttttatttaggactgcattgatttcaacagatgcagatccatgctttggaataatctgcctcagtagtatggccttcataacactttttgggtcaagacatactctatagctgcagttgttatgttttaacgtttacttgtaactttctggtatgcaacatggctaaccttgttggtttctgatgccatggttgcatgtttacctgtttatgtgtatgtctcaaagctgtaaatggcagagcattataacactttttgtaccgt

SEQ ID NO: 17625 - DNA, 1055 bp, Arabidopsis thaliana
gaggatccctgcttggggtgaagtctgacttgtactcatttggtgtggtgcttctgcaaatcatcacagcgatgccagcaatgggtttaagccatagagtagagaaagcaattgagaagaagaaactccgagaagttttggatccaaaaatatcagactggcctgaagaagagataatggtgctagctcaattggctttgcagtgctgcgagctgcggaaaaaggacagacctgatcttgcttccgttctgttgcctgcactgagcaagctaagagagtttgcaacagaggatcatgaagtacataactctgatagaacatttcatgtgtcacgtgctcacaatttggttcctctttccccaatatcttcctgtcaggttggtttcttagatactgcaataacacatttctaatcttcacctggaaaaggaataaaattaataaagttcattgattcctgagtcctctctttcaatcatgtagacagaggatgatgcttgggaaaatcctattgacagaaagattggaacttcgacgtaaatcaaagtgaagcgacattggctatctctgagatccgcgataaacttgttcagtttaagcatccgatgccatcccatacccaccacaagaaggtgatttacatgatcacaaacaagccaatgcaaaggaagttgttgtcagtctctcatgaattgtactccaccccaaagttgaatgttgaacttccattgtatcggagttcctatcttgtttatcaaacactttatttttggtctcatgaaaagaaacacatttattatagaagatttgtatccttcttgcaaaatcaactcatctagtcacttttgctatagagaatgccatctgtagcacataaaaaacttttctacgaaactacaaaccgaaatttgagagtatagtcttctttgaataaaaaatggtttgacagcattagctgcaaagaagatgcaaacagtcgcacacaaaaaaaaagttcttcttaaaaccagaattaagggaatcctgtcggagctgaccagcaatgttagctgaca

SEQ ID NO: 17626 - DNA, 435 bp, Arabidopsis thaliana
ttgaacggattcacctttttcaaaactctgcagcaggttttatcataagactcagcccaccggtttggtttaaactcatcccaatcttccccccatagctcttccattctccccataccatatggaaaatacgttacccggtctccggcacgcaccaacgtaccgtctggtaaccggtcatcggttaaggcgtgtttggagtcccacggcaccggaggatacaatcgcatcacttcacacaaacacgctttcaacaaactcagtttcttcaatgattcgtaatcaaaaccccccgttatctcctccttgaccgatcggatttcactaaccagatcgtgctcggtttcctcgtgaccggtgatcaaccaaaacagccgtgtggctaccgccgacgtggtgtccctcccgccattatgatacttattaccatatctc

SEQ ID NO: 17627 - DNA, 923 bp, Arabidopsis thaliana
tagaggatccccttctctagggttcaagactattcccacaagtgcttatcactacaatggtgttcgtgagtacgacgctcacagcatctacgggttctctgaggccatagcgacccacaaggccttgcttgctgtccaaggcaaacgtccatttatattgtcacggtccacttttgttggttcaggtcaatatgctgctcactggactggagataaccaaggaacatggcagagcttgcaagtatctatctcaacgatgttgaattttggaatttttggagttcctatggttggttcagatatatgtggattctttcctccaacaccagaagaactctgcaaccgttggattgaagttggtgcgttttaccccttttcaagagatcacgctgattactacgctccaagaaaagagctttaccaatggggaacagtagcagagtcagctcgtaacgctcttgggatgagatacaaactccttccttttctctacactctcaactacgaagcccatatgagtggtgcaccaatcgctagaccgctcttcttctctttccctgagttcactgaatgctacggtttgagcaaacagttcttgctcggaagcagcttaatgatatcgccggttcttgaacaaggtaaaacccaagttgaagcactgttcccaccaggttcttggtaccacatgtttgacatgactcaggtcgttgtttcaaagaacgggaggcttttcaccctccccgctccgtttaacgttgtgaacgtgcatctttaccagaacgcgatactacccatgcaacaaggtgggtagatttctaaagaagcaagaacgacgccgtttagtctagtcgtcgctttcccggcgggagcatcagagggatacgcctccgggaaactctttcttgatgatgatgagcttccgg

SEQ ID NO: 17628 - DNA, 725 bp, Arabidopsis thaliana
cgaagcgtagaagtcaacgtacgtggactgtccatttcctagcttcatttccggaagctcgtcttcgtctagatagagtttcccggtggcgtaaccttcagaagctcctgcagggaaagcaatgacgaggctaaacggtgttgttcttgcgtccttggaaatcaacccgccttgttgcgttggtaagatagtgttttggtaaagatgaacgttcacaaagttcaaaggagctgggagagttacacgtttcccgttcttggacactactgcttgagtcatgtcgaacatgtggtaccaagaacctggtgggaacaatgcttctacttcggttttgccttgctcgagaaccggagatatcatgaagctgcttccaagcaagaactgtctgctgttgccgtaacattcggtgtattcagggaatgagaagaagagcggtctagcgatgggtgcaccagtcatatgcgcttcgtagttaagagtgtagaggaaaggaaggatcttgtatctcataccaagagcgttacgagctgagtctgcaactgtgtcccattggtaaagctcttgtcttggtgagtagtaattggcgtgatctcttgaaaacgggtaaaacgcgcctacttcgatccaacggttgcagagttcttctgttggttgtgggtagaaccacaaatgtctgaacaaccatgggaactccaaatatacggaagttcaacatagttgagata

SEQ ID NO: 17629 - DNA, 571 bp, Arabidopsis thaliana
ttgaagttgaatatcgagcaaacagcaacgagctgcaaggagtaataccgcagcaacaacatcatcaggaacaagaagcaatgcagacacaaggagatccactgaatcgaatacctgttcaatctgaagcttcaaaccattcagatagtggtaagtagcaacacccctttccaacactacaaatttcttttgtcatctcttatcttacttcgtctctcttttcacttatgtgttagcacactaacaatggctcaaaaccagcatggtctccaaaaggcaacatgaatgacatggtctctgaaagagggagcgatatcagagagaggagcttagtgatttgctctagattagcttttttgtctttttgttaaatgtcgttggacgtgaaacacaagtctcgttgttctctatttagaaaccctaatttgtcgctcaaatgataaggtcccaaattgaggaccaatttgtcttgcttttatattgctcgtatacttaaacggctaaaagcatagtgagtcttttaaaaatgagaacagaggtgttttttttttggtatacgttctatatagat

SEQ ID NO: 17630 - DNA, 967 bp, Arabidopsis thaliana
gccatagatttcccggtagtgaccatggtggaatttataaggacaatgttgatgcgttggttttgcgagagacgacaaactgcagctaaaacaaagacaagatgtacgccaaaaatcgaggatttgctaatagatcatcttaaattagccacagattgtgcggtcatagcagcagacgaatggatctatcaagtaaacgacagttttggcatgatttttactgttgaccttgagaaaaagacatgtacttgcagagtatttgatgtgctaatggtcccgtgttgtcacgctttagcagcggtgggtgtaaggaacgtggacatatactccttgatcggagactatgccttcgtgacagagtggcgtaaactatagcgtgaacatattctacccccgccaaaggaaaaggacacagaggtcccgaacgatattagtctagtggttgtatatccaccaaatacaagaagaccagttgggagaccaaggaccgttcagataccatcgaggggggagccggtaaataactaaactcttagcatagttttaagtcctccgaatctatcataaccaaacgtgtcatctacttgtagggcaaaggatggaaaaagaagaagacaagacaatgcagcacatgtgggaaggatggccacaacagaggctgggggaaaaagtgcatcgagcgcgtgttaacgtttttttgtagtttttgatgtttcgaaaagacgttttttggtccatataagtatttggttttggtctccagattttaatacagatcgggggtgtctttcgggaaggggatgtaattcagtcgaacgattgcattttgtaatgttaacttatgatgttgactaccaactagtttattgtaattgctacatatagaacaataattattatattagacagtggaagagtaaaaacgcagaaagatgcattaaaagtgctggaacaaagtaaacgtgaa

SEQ ID NO: 17631 - DNA, 938 bp, Arabidopsis thaliana
ccttttgctaaccgctttatatctttcgccaatgagtagtatgttgcggtcgtgaactgtaaatttgctagtggatccaggacatgagcatcataccttaagcagattaaagcaatgaagcagaagtgtttgtaagaatacgatgatatattcagttcacaaatagatgacaaacgttataaactcactcacccagcagaaacaagaataatatctggcttgaaccgttgagcacatggaacaatgatttcttcaaaaacggttctcattgcaatatcacctgaacctccaggcaaaggtaaatttagagtggtaccttcaccttttcctttacctatgtcactgattttccctgttccagggtagcttccgtcctgcatttttcagaaaataaataacttttgttgatttctgaaatctaatcctaactatgcgttattcaatcaatgatcttaacactttagttgaacattcatgtgttatttagtcaatgattttgaaatacaaggtatggatcatttgtcaatgaactaattagaaacatgtcacgcaaaaatgttagaggcttacctgatgagttgacaaaaagaatatatcagggtcctcagtaaatgcatcatttgtgccattcccgtggtgaacatcgaagtcaattatgaagatgcgcttcagaccatgtgtgcgttgggcatgacgagctgcgattgccacattaccaaaaacacagaaccccatcggaccttttggcacggcgtggtgcccaggaggtcttatcaatgcaaaaccaatgggtggatctacgctgtttctggatgctgcgatctgaaacaaataatcatataagaaatctacaaccattcccaacataatgaaactgaagcagtaaaagcagactaacatggtgagacgagacatcaccactgaatcaactaaagcca

SEQ ID NO: 17632 - DNA, 602 bp, Arabidopsis thaliana
gtaccgggctagtaaccaccgccagcgcgcgtgtgctctaaaggcaaactgcttaccggccctggcggtctggcggggcatatcgggcatacgcttgccgatccacacggcccagtctgcggctgtggacgcacaggttgcgtggaagcgattgcttctggtcgcggcattgcagcggcagcgcagggtgggagttggctggcgcggatgcgaaaactattttcacgcgcgccgggcagggtgacgagcaggcgcacgagctgattcaccgctccgcacgtacgcttgcaaggctgatcgctgatattaaagccacaactgattgccagtgcgtggtggtcggtggcagcgttggtctggcagaagggtatctggcgctggtggaaacgtatctggcgcaggagccagcggcatttcatgttgatttactggcggcgcattaccgccatgatgcaggtttacttggggctgcgctgttggcccagggagaaaaattatgatgatgggtgaagtacagtcattaccgtctgctgggttacaccctgcgttacaggacgcgttaacgctggcattagctgccagaccgcaagaaaaagcgccgg

SEQ ID NO: 17633 - DNA, 469 bp, Arabidopsis thaliana
ggtcccatacctgcaattgctttgtgtacgttatttggtagaagatgctcaaaatcaaatgaaggaggcgttgcataatgatatgacaatcatggcttttcattcattgaaacttcacctctcccattttaacgtagttgcggagattagatgcatagccatccggaaatttgacatccatcataatccactctaagaaagcttccttggaagcttcatctaatcgaaattgaggggttggtgctttcctatttggcatgacatgaagctttctttgagaacatatatcaggcaagtctagtctagacttcaagttatcttttgtctttccttgaacattaagtaggctctgcatgatgttatcaaaaaagttctttttggtatgcatgacatctagaaaatgcctcaacaaaaggtccttccaatatggcaataacaagaaaatactcttcttgtgccaattatgaag

SEQ ID NO: 17634 - DNA, 1347 bp, Arabidopsis thaliana
gattagagttccatgacgccaccaggccattcacactttccaaaaacataacctgtttttatcttctctaacatataagacaccttcttgtccctgacttcatcatcccactcatacaacctgtcatcccccatttcgataaaagactccacagttacctgcaatacaatcgaaattcttgacgaaagttggaagctacaaaatggtgaaaacaatgaaagtagaatcatacatctggagcttgttcaactgcatgaacatcagccaggagacgggattgacgaggaatccaggcgttatcccagtctaatataactgtatcgtccaatgggtctgtaagagcgagtgccagagccggaatattcctataggctaagagttgtaaggcaagagggaagccacgcaaccgaaaagacctttgttgtaggtgaccacggaatgctgcaaggtcagtttcaagattagacccaaccgtcctcggaggaattagggatttgatggttttgtgaaatgactcccggccccagggaaatttaagaaaagagtcaacgtcctccaacatttgaacatacttgtatgtaggacgagcgttttgtagggatgcaattaggacaccgtcgattataaggaggagagcaatccggagttgaatgtcaccagaactcttgggcaagcagagagtaatatcacataaactggagaaccttgtttcccaatcttttggagccaataatcatcagcctcctttgggatctttggctcgtaatcaggatcgtaatcttcagagaaatccccacaggggagaccagttacagaagcgaactcagcaagagagaaacgcaatgggtgaccaccaaaaactgtccacatttcatgcttttttttgtaactaactgccgacaaactagggcatggatgagtttgcaggacagagaacaccgttgaacgggaaaagaaaacagaggaccaaagggagaatcaagtattcgtttgaactcgttcgtcccttccatatgtttcttaattaaacatataaagtcaaactttgaatatacattaagtctagcgtctgggtaacggtcggttccgtacaaacgcggtggcaaatcgttatcccaaaaatctggatcaagaaacgcagcccttcctgtacaatttagaaactttttcagtttaaagaagatgaaaacgacggcgaatagttccaaaacgaatctaggttaaaaatctttacctattaatgtagggggtgggggactatgtttggatctcagtaatttcgttcatttttggacagaaatggagggggacacggtggatttgagagaaataccgataagaggggag

SEQ ID NO: 17635 - DNA, 928 bp, Arabidopsis thaliana
ttgacctttgagctttagtatagaatgtaggaaatattctaacattggacttttaaagttggagttggtgcaacagaattataatattttctcattagaaaacaaacacttttctattttatggttactagtaaccgcaaagaaaagaacaattaattagcagacaaaaaaaggagaaccacttgattatgtggtcgtaagaagaattacaatgtgttcaaccccaaatgcaaaccaatcttggcatcataatatgaatttctttctttggtggaaacttttgatataaaaaagggtagaagtaagtaaaataagtttgacaaatattaatttgaagtcaagaagaatgaggaaatgagagagcatcccaaatgagatccatatccaaagaaggcatcctactcaattgtacaccatctccttccatcacttccttatggcttttctgtttcttcatcatcacgtcttctcctgactccatcttcatgtgatgattcttttgctccggtgttcccacttttggaggaggaggagaaggagagttacttacttgggaagatgagatctgttgaatcttggactccaaaagtgaggcgatcatgcatcgcaaagaaccggacttgagctggtgtttaagatcaggaaagttgaggtgtgcgaattcgccacgaaggatataagctgctgtatcgtaagccattgctgcttgctcagcggtttcaaaagtgccgagccaaacacgggttctgttccttggaagcctaatctctgcgacccatttgccccagtgtctttgtctcactcctctatacagttttgttggggtcgtcgtctgaacaacctttcttgtttttgacttcatgggttgagtcttggtggtacttagccaatagttccaaaacctttcgagggatagttggttagagtt

SEQ ID NO: 17636 - DNA, 506 bp, Arabidopsis thaliana
caaaagaagggtcagacgacaaagtttcaaaatacggacttagccaacgacacgtgcctttgggagcctaagctcctactgacggtcggcaatcgaacaggtcaaaaacatctccagccttatttgcttgaagttctggataaggcttagacctaccatgagctaatgcaggcctacgattcaaaatagggaaatgaatcagcctacagtcacagaatcaccaaacatggagaaataactgaatagccaccaaaacagacaaactcacctgtgcataaattccaaaacatcggccaccggggacaacacttgctcacatgacttgtaatctttagcaaaagacaaagcttcctctagatcactgtggttgattcccgtcattttgtaacatgacctcaaagtagtaccaagtaagctctgccacatcaattctgggccactgcaagtgtctactgaaaagaaattcgcttgtataagatgttacacggcaaagatagggtaagctg

SEQ ID NO: 17637 - DNA, 1435 bp, Arabidopsis thaliana
tgtccaatgactgaaacctcttattatataaagttgaaaccaactttattattctctcaacagcaaactactccttcaaaatgtgaactgtacaaaaaagaagttttcaacttacataaaataaggttcaaattggaaatgttccggccaatcacaaattcacaacattatatgttctcatcaaaaaaaacatcccaaaataaaaaatgcaaagtcaacattataatttataaaaaaaaaaatcctacaaatccaaaaacatcctctgtactcatttcttttcttattttcttctttaaaaaaaaaaaacaaagagcaaattcatcaccaaagatccacgtcatgactgcattttctcgacacaatcctcgacggcgccgtcaatttatccaccgttacatcacagtcaacattaacaatcatagtccacgtcttaacagaaccaaacttaatcttcaccggagctttaatcttcaacttaaacggcaccgttttcttactcacctcattacgcatctccttcctcataccactagtcaactgtattttagaaccacttaaaaccaacttaacgaccgttacattcttcgccggctgataaaacaccggcataacaccgttacttatatcaacgtcgttgtaatacacatcaacagagctttctttctcgtagtaaaccccgattttaccgttaccgttacgtgatctaacggtaacgttaaaactcggcgaaatcggagatgttgaattcagattgataccggaaacagagaatccttcgatggagtatttaggagcttcgggacggtagattaggtagagaaccgcgaaggatattccggcgaggacgattaagatgaaaaccgcggcgaggaatgagcagaagcagcatctacagttactgcggttggtttttttacgagagagttgttcaaagcggtgtgcgttttccggcggtggtatacggtagatttgatcttttgggacttggattacgtatgttgatggtggtggtgctggttttttggggaattcgccggagctgaagttgccggagaattgtccgctttgtggtggtgaatcggcgggatagactcgttcagccattggagatagactagagtcactgagacaaaggaagtgatttgagtttgagagttgagaaatgagaaacggagaagcaaatatatgcagagaagtgtttaaatgtgaattaatgagaaaaatatatgaacgcatgaaaataaataaggtggcgaaaacgcgtagagaaaaaaaacaaattgattgcacgcgctgcttatgcagggcccacacgaaatccactggttttttttttcaaatgcttaaagttggtaataaaatcaagacgtgattagtgttgaatttgtctaaagccaagaataagaagttttatatgaactaatgaagagag

SEQ ID NO: 17638 - DNA, 467 bp, Arabidopsis thaliana
cacaacgaagagttaacataaacacaacaagatttgaaactcaggattgtctaggaattgttcaagccttgtataccatcaaaaacagagattacagagaggcaaaagccaaactctttctttggactgaattgagatcaattcaggtaactaaaaatctgaggcaatatcgaatctaagaaagatgaattattcgctgcagagtaataactagacggagaaattccgaattacctcgatgtcgccgagaaggagacccatgatctcttcggtctcggtggataatgcgtgagtgaggcaagtcaaccagacatcctcggacatattaacgcatgtaagagacataacttcttcggaagagataaactttaaacctttatgcagacgttatttgcttcttcgagaattcgatttgattttgcctctttttagatttatccgacgaaactggagaacgaagaagaaac

SEQ ID NO: 17639 - DNA, 1028 bp, Arabidopsis thaliana
tgcaggaaatcccttctgagttggaccgctcactacgttttccaactgatcggagagtctcctagctgcacaaatagcctgtgactgagcaacgtgttatcgggcagttgtcccagtctgcattacaccagccagtgacttgaaaattcccatcggctcgcaacaagataccttgtcctggatcagattttaaataccgtacgagtcgtaaagttgcgagccaatgatccaatcgtggattctgcataaattgagcaagaacatgaaccgagaacgcgagatcaggacgtgtaactcccaagtaaataagacgtcctaacaaacgacgatatggtttcggatcatgtaatagaacagactcggagagtgctagcttgtgatttgcttccaaaggaaagtgtgctggctttgctcctagttgatctgtttcagtaatgatgtctagtgcatattttctctgacaaagatatatgccagatgcatttctagccacctctattcccagaaaatatttaagttctcctagatctttcatatggaagcatgaagagagataggctttaaatgattctgtagctttcaggctacttccagcgataactaaatcgtcaacataaaccagaatatttagacgagtagtaccttgtgcataagtgaataatgagtagtcactgcgtaattgctgaaacccatactcaagaagagctgaagagagctttgcaaaccagcatcgaggtgcctgcttaaggccatacagagatttgcgcaatcggcaaactttattcttatcaacagactcaaaaccaggaggcaacttcatatatacctcttcttctaaatcaccatgtaagaaggcattgtggacgtccatttgatgtataaccacccttttttaacagcaatgtcaagaaacaatctcactgttccatctttaccacaggagagaaagtctctcataatcttctcctcaatctgtttattcccattggaccaatctggctttatactctctattgtacatctgattt

SEQ ID NO: 17640 - DNA, 659 bp, Arabidopsis thaliana
gacgttaaaacggggatgaagataccttgggacgtacgctattcattaagtctatttattttcttatcatcaattctttttctttccaacggccaagattatggaatgccgggcgaggatggaggaggaggagctgagccaccgccggagatggcacattgtaacggtattttcatgagctacaactttggtagccgtgaaagagagtacccgcacgtgaagaatgtaaccgcccaatcatgggcgtttaaatcgactgcgatgattgtaaacgcgggtagggaagagcttaagggatggcaaatgttcatagggttccgtcacaaagaactgatcgtttccgcgactggtgcgactcctatggacggagattatcctctagacgcgagcaatggaaccacgttcgttggatcgccaaacatggatttaaaaacctctattgaaacagccggtgatttcactcagatatctgcgaatatcgagatcacaggaactctttttggggttcaaaagcggtcagccatgccaagaactattaagctcacaacgatggttgggaatgtccgccgctaaaagaaaaggttagatcaatactcaaatcgtttcaaacgcaactaatttatatttgttacatcaaaatatatttatagggaattatg

SEQ ID NO: 17641 - DNA, 550 bp, Arabidopsis thaliana
caaatattacataatcaaaagccaagctctgagatcatatatgtctgtataaaaaattattattgtgtcgatcaaacgtcattatcttttacttaaaaaaaaaagagtttttatttcttaatctcgatattgatctaaacgatttaattgtttatttatttaaatgataatatcttaatatcaaaacacatatatcttatcagtaattatccacatttattctcagataaaacaggatcgagtcagaagaaaaattcgttcaaaaagattcagttgttaaatcttagtttatccaaaaccctcacactcatctataaaagaaaccccatctcctctcttaggcatttgagttttatttacgatcctcaataccacatagtcagaaatattaaaagaagctaagagatcaacaacaatggctgttggttcgatgaatgtcgaagaaggcactaaagcttttcctgcgacgtgtacaggtcaagtctttctttgctgtgtcattgctgctgttggtggtctcatgtttggatacgacatcggaatctcaggt

SEQ ID NO: 17642 - DNA, 991 bp, Arabidopsis thaliana
ccgccagtgttcttaaacttgcacaaacatttctgcaatctaaacctcaatcaaaacaaacaaacaaaaaaccatgatgcagcgagtattcacctttggaaaaggaagaagcgaaggcaacaagggcatgaagtccttggtatgttaccaataccatcatcatgatcatatcaattcattaataatttagtgtttgctattttcaagaaccatttatcaaaaatgttaattgttgttgtgtatgaagttgggagggaaaggagccaacctggcggagatggctagcataggcttgtcggtgccgccggggctaaccatatcgacggaggcttgtcagcagtatcagatcgccggcaaaaagcttccagaaggtttatgggaagagatcttagaaggtcttagcttcatcgaacgtgacattggagcttccctcgctgatccctccaagccactcctcctctctgttcgctccggcgccgccgtaagttaattataactttttttcttgactatttttattttaaggattttttctaatgttaaatttctgtttttttttctttctatgttttctttaatcttttgaagattttttgacgcagattttgacttgttagatttcttttattgaagttgagatccaaatatttttttggttattttgccatttggccgtttttggaagagtttaaaatgtactagatagaaaatgaataagttttgtggctattgaaagacctaatgattttggtattcaaactataacgtagaaaatgaagatctttcgtttatctattttcaaaacagaactacattgacttgtctttgatcgatattttgcattgtagatctcaatgcctggtatgatggacactgtacttaaccttggcttgaacgaccaagtcgtcgttggtctggccgcaaaaagcggagagcgttttgcttacgattcgttccggggttttcttgatatgtttggtgatgttgtaag

SEQ ID NO: 17643 - DNA, 641 bp, Arabidopsis thaliana
tactattggcatgtgttttggatggggttacaaatctacacaagtggaagtaatatgaacacaaatctgaaaaaagaccatacatctactgttttggatatttggtttggggaggagttacttttggagatggtttggtttgttttgtgtagctctgaggaattgttatgagtctttattccagctgccattgctggagctaccgctgctgttttgtttgttccggcaacagttgtgtttgtctcttcgatatcataacctgcgttaagagatattcacagatcataagttaggaaacagagggttttagtgatatataacacacgtaagaggaaacttacagtcaaactttttccaagctaagacgagtttctccctgtcgaatactacacgatacccggtcatgtagttttctgtttcattaagagtaaacaatgtcattatttagcggatgttccatgattgataggaagaaaaactgatcttacgcccaataatgttgagttcagagcttttgacaatggccaggcaatatacaagttcgccctgaggaaatgcagagattctaatagtatcagcacacagataacagatttggttgaagaagagacggagcaatagagaaagaagtagacagagag

SEQ ID NO: 17644 - DNA, 789 bp, Arabidopsis thaliana
  unsure (1)..(789): unsure at all n locations
gtatggtcatgaatttgtgggatgaagtgtgagatacatattaatcgtaatcttgatgattttcttaagagaatatgtgattcgaatgattcttactaaatgggggaaattgttgatttagagatgaagaataagggtttagtactgttgaatgtcacagtgcaaatcatcatccctgttaactactagtgaagtagtgatgtttaataatgtaccaaaaacccttgtaaattttaaagcccacgaacctgctttctaattctaaaaaaaggcgggtgtaattcgggcaaggtccgtttgtacaacgacgtagttatctatttctcccccaaaattcacaaacacaaccctaatttctcatatcgcgccatcggaactgtgctaaattacacgttccgacacataattaatgtaggattctttcttctgctttcctcagtttcgtccgaaagaggcaaaattcaaatcgaattctcgaagaagctcatctgcattaagtttgaaagatctcttcggaagaagtaataatgtctctgacatgcgtaaatatgtcggaggatgtctggttgacttgcctcactcacgcattatccaccgagaccgaagaaatcatgggtctccttctcggcgacatcgaggttcacactatttcttcatcttctcttcgtctacgctttacttttactctgcagcgaatgtttcatcttacttggattcgatattactctaatttaattgaattcagtccaaannagttggcttttgcgctctgtttttgatgatatttta

SEQ ID NO: 17645 - DNA, 606 bp, Arabidopsis thaliana columbia
gatacagtagaaccgaactctaaatcaggaaacgcaatcttgtgactctctggtcttccgaggaaacctgtccctatgttttcaggcggagtgctcgggcctgacacagtctctctgcggttccaacttctcaccctgacgttctggcttacactcgtttcaccattagcatcctcaccacagcctaaaacgttttcaggttctgctctcttgtctttcttgttattatagactgtgactgattcctcagtctcaatgcattgaacttctctgcaatattcttctgatagatcttccgaacgcctaggcaagtcttcatccagatcatcatcgtcagagtgagaatgaacataagctcttgatattgacagcggtgtagacattccatctgatataaaactccttctgtctgaatcgaccacgcctgatgtctccgatactgaaccatcctcccacttgtctgtgtggttgccgaatgtggagtccaggcttcattgaggaaaacagaagcaaccttttagtaaattgcatagaaatctaggcagaaagtgataattgggaaacgtgatgacaattaattactgctgccaaaggagattgtgggag

SEQ ID NO: 17646 - DNA, 652 bp, Arabidopsis thaliana
tttgttcttctttggaaccgattcttcgccgagtggttagcttaataagaattgtttacatgtcttttggtgctttgtgttgtttctttggcttactgatttgttttgtgagcattgtcaaacaggtaagtgaagaggtggagcgggcattggcaaagcttggccctgcaagacttagtgaaaggtaacatatgactgttttaaaaagagataaaattaatggttggagtatttgtggttttcttctaatgcttgagttcacaggtcgtctccaaaacgaattgaaggtatcggtggaaggaatttgcagctacaattcaggtctagattgtctgttcctttgtttactggagggaagatagaaggggagcaaggtgctgcaatccatgttgtactgttggatatgacaactggacatgttttgacagtaggacctgaagcttctgcaaagcttgatgttgttgtgcttgatggtgattttaacactgaagatgatgatggttggagtggagaagagtttgagggtcatttggtgaaagaacgtcaagggaagaggcctctcttgactggtgatgtgcaggtcacgttgaaagaaggtgtgggacattaggggacttatctttacggacaactcaagttggattagatgcag

SEQ ID NO: 17647 - DNA, 907 bp, Arabidopsis thaliana
ctgatcatgtctctgaaatgtttgactgctctcatggtcacaagattaaaaagcgcaaacagttgcaggtactttccctcttccttttcttatcttagcagattcagctgataacttagatcttggtttgcaaaaaaacaaacataataattcgttgaaaagttatgatgaatgagtctagtagaaactagcttcgatggttactaggaaagtttgagtgttacttagtagatctcgtatattatagttccataaatagactgccattagcaagtttattattgtggttttggctggctaatttgtgttacctttcttacttcagatcttttttaatatctctgtgtttttttatctgaagaagtatatccaaattgttacatgatataagtgggattttatttgaagcagtttttgttttgagttaatgttccttcctaacgccgaccgaatagattcttttaatctgaaatataagttgatacagccatctgttagattttacaccgggatttgtattcttctcgctgtcaggaatactatataaaatcattaatttccggggaaaccaaccacgttaatttttctcactagtcatgatgatatggttaaagtctttcaattgtggacatttactattcttcttagatatttttaaagtaggctaattttgtcgttttgtgtcgactgcttgatgaggatagacggtggagattaaagtgaaaatggactgcgaaggttgcgagcggaaagtgcggcgttctgtcgaaggcatgaagggtgtgtcttctgtgacgttggagcccaaagcccataaagtcactgtagtcggctacgtcgatcccaacaaggtggtggctcgaatgtctcacaggaccggcaagaaagtcgagctctggccatatgt

SEQ ID NO: 17648 - DNA, 734 bp, Arabidopsis thaliana
tcaaaacggaatcttgtcggattcggcgattttgaacatggatgagaagtctttgttcacgatgctaacaatggttaatggaattgggtcatggtctgttcatatgttcatgataaattctcttcatcgacctgatgttttgccggttaatgatctcggtgttaggaaaggagtgcagttgctgtatggcttagatgacctgcctcggccatcgcagatggagcagcattgtgctaagtggagaccgtacagatcagtgggttcgtggtacatgtggcggctcattgaagctaagagcacatcaacgagtgctgctgttgcaccggagtgtcattacctccattggaagatattcaacaagaacatcagcagcaacagcttatggaccctcttaatggtgtgttcagtatcgggtaagtaaagtttgtttcttttggaaacttttgaaagtttttctctgtacttggagtgtgcttagcttaagtagatagattattgaaaactgttacttgctgcaaatacaaactaatatgtttggtttggatcactaagattaaatatctgagctttggccaactatttgtggaatgcgcttatggttgataaagtattttaggcctccaagattaggtgtaatgtttagttggtgacattcatgtatataggagactaataatgagcttacatttcatgtttgcaaaaagtagttcttgaaacatctagtgagtagtgag

SEQ ID NO: 17649 - DNA, 799 bp, Arabidopsis thaliana
aacagatcagagagctttgttgggtcatatgtacctttcttctcaagattttccaacacttctttcattacatcaacattcttacgtggggcaacacctttgtcataaaagtcaagtctttcctctacttgttcccttagtttctcaccgaaagctgtagtgctgttatctgcataacacaaccaccatgattttgtagttaataacaacgcatcatctcccaaacacctctctcttattcaggacattctctagattattacctgagaaacaatcaatccgggaagcaatggaacacttgtttgcaaggaaacgagcaatacggcccttgtttttagcagatgcacgcccgatgaatgatgaatggaatattagaccatatttgggtgtgtttccacgtgttttcagtgccctgaaattaacaccaaagttagttactgcagtgtaattaaacttgtaaagactaacaaagcttgaaatgcacctgaaaagtgccttctcagcaccgagaatctggagggttgaagatgggcacttggcaagatttgtcagacttcctgcatgtgaaatcaacctagccccaaccatctctccgatcaaggccgccaaatttggagcaatgtcactcattttagtaacaagataatcatagagcttcttcctgtaatctgcaaggtccataactctctgagcaaaggtctggacattgatcagatcaaccggtgataaatcctggccttcaaatagagagacaacaatgtcttagacatgagaacaatagatatatgtaagatcatga

SEQ ID NO: 17650 - DNA, 1332 bp, Arabidopsis thaliana
ggtaatactgcaacaaatacagctccagagtatgatgtcaccaagcaggagaatatgttggagtccgaaagcaatcaaaactcgtttgaccaggttccaagtaatattattgggattgttcctccagctcctgggaaccagcatccacaatttgagacttctgaccctcaagcacgtgatgcccttcgtcttcccagttttatggtatgcccttaattacattaagttgtcaagttttcgaatggttgatctacttaaaccattaattatacttagcttatactcttcattgatcagtaacattttgctcattatataatttttaggcattgtcacctctaatatgtcttcgtaatgaactatacttttgttgtttgaagggccaacaaccttttgatacggcgagctactatgctcagttctaccgctcaggtcctgacagtgatggccgtgtttctcccttcgtttccccaggggttgcctccaaatttaatgggattacagtattgcctccgcattcatctcaaaccatgcaagaggttagtgtagtttttgggggttaaccttttattttattttataattcacaccttcacgattttgatctaatttaagatggttttgagactttttcgtttaattcaatcttccaacagtagcatcatcaatcaaatagtcaaattttcatgtcagctacttggatctaagtctcattttttcttcttgataaaattgaagtaaacctatggtttctaattggactgcatatttatatgttcagaagccctataacacgtttgaaagataaaaatatagctgttattattacttttctggtctgaaatgcttgaacatgttgatttgtagggtggaaataacttggtcctgtctactgctagtccaccaccactggtaactcaagctgctggactaatgcagagctctatacctgtcacgcagcagcctgttcctgttttccgccctccggcgttacatatgtcgcattatccaccaaactacgtgccatatggatacttctccccattctatttacctccccctacaatgcaccaatacttaagcaatggtgcatatgctcagcaacctcaggcaagcggtgtatatcctccacctcctggaactgcaacaggaggcaaatacacactccctcattacaagcctgggactaatacaggaaacatgactcatgtcggtattactggtgggtatggccaacatatgggtctttccagcaggatataatccacctctgctgcatcggccgggaattcgacttccaatgaggatctaactcattgcagttgaaagaaa

SEQ ID NO: 17651 - DNA, 578 bp, Arabidopsis thaliana
gagatgccctgaaataccacagcagttcatgtcacaagcagcactaaaaggaaactggtgaacattaaaaatatagtgccagatattgcacctgaaaagagccttctcggctccaagaatctggagggtggaagatgggcatttagcaaggttagtcagacttccagcatgtgaaatcaaacgggcaccgaccatttctccaatcaaagcagccaaattaggggcaatgtcgctcatcttagtgacaagataatcatagagcttcttcctgtagtcagcaaggtccataactttctgagcaaaggtctgtacgttgattaagtcaagcggtgataaatccgagcctgccaatagggaagagagtaaatgtctcaggacataagttaacagaaacacacattaactcaaagctaccaaaaaagtcagctcaaaatttttacccatggatgcttttccagcttcgatgacctcctttgccttatcttcatcccctaagacttcagtaagcatggggatgtgatcttcagtcaactttgacttgtcatcaatcatctttgaaacacgggcgtaaagatagt

SEQ ID NO: 17652 - DNA, 791 bp, Arabidopsis thaliana
tctagaatcggtgttgtggtttaccgtttcaccacgaaatagccaaatcagaatggtcggattgtttcgtgttagcaatcgcgttgtcaggattcatttcctaaataaagtttgcaaaaatgtttgtcatgtctattcaattcaggtgttattaaatgatgaaccaatccatgcaaattaaatataagcattgaagactataaggccttacaaactatttggactcttttataaatgatcaaaaactataggtgataaagcaaataagtttttaaaaggggttgcgaccataaatagcttggggcctatttttgtgaatcgtacaattactaggactattttgtaaatacttaaaaactattggaacaaaagtatcagagtagaacttgtgacacacagtcacacagactttgactgaccagtgaagactacaatgtggcgccggagcttcagtacattaccgaagaagaaatgggacgcggtggtgatcggaggtggccacaacggattaacagccgcagcttacctagcacgcggaggtctctccgtcgctgttctcgagcgccgtcatgtcatcggtggcgcggcagtgacggaggagatcgttcctggattcaaattctcacgctgcagttaccttcagggcttacttcgtccttgtatcattaggtgtgtttgattaccttcttccgattttgttctgatcgttcctggattgtttgataactttgatttctggattccaagagaattggagttaggtagacatggacttaagcttttgaagagaa

SEQ ID NO: 17653 - DNA, 813 bp, Arabidopsis thaliana
aggagttctagttccttgtcggtaaagctcttcaagaacccttaactgatctggtgtcggattccactgtgagctcaccattaccggtggatgttgaggttctgagtttagcatcatcagctccctcttgttctgctccgccgtcatcgtcaccactgctgtgaaaatcgtaaccaaagcaagaaaatgagcattagaaacaagggaaagagagactggaaagtttcaccaaaaattgacgagagagagagaaagagatacccatattaaagcggtggtcggagttggtgtttacggcggcggtgtggcaagaagtgagacgtgggatgagaggacgaagctttcttcctccgttgaaggaatctgcgcctccttcgttgtaacccatcgtccacattttggtgtgtacttaatttatatgtatgtttatagaggagaagggagagagacagcgatatagcaagtaaaaatattagggctttgtttgttttatcgaaactgaggagatgtgaatgatatggttgaaggagtaatagacaaatggtagaaagtagttttggctattttggcttatgggtttggagaagagtgataaagttgagagatatctttgtatgtgaatgtgagaatgggagcatgcaaatggggtggttttgtaagcacatatgtgtgtgtgtgtatatgtagacaatttaacacatccttttatttatttctaaatacagaatattaacattctacatatgaatagaaaagtttattttattttatttccttttattccattcactttaaaaattctcaaccgtcctg

SEQ ID NO: 17654 - DNA, 854 bp, Arabidopsis thaliana columbia
tagccggataggaatataagctatagtctatataaagcactccaatggttaagaatatataattcaattttaataaaacatcgcagcaatcgtgatcacgacgattccgaccaagcctgttcccgcgagtttgcttgcggcatccttgtcagatttgggtgctcctagaaatgacgaatcaagtatttttagtaaaacttgtgtcaaattgagaaatctttttacaatctcaaccttcgattttaattttttaaaaatgcttaacattttcctcatactttacgataaattttatcaaacttaacaaaacatattagaattgttccttacctggaacaggtgctgccgtcttcggcaaaggagcctgggctacaaaatacaaaaggacaacaaaaatcacattatcaaatatgaactgacctggttacaaaatatatctacaatgtgtatgtttctttgctaaataaaactagcagcaacaataatgtggtggcaaagctgcaaataaatgatgtattctttttatctatgatataaacatatatatgagacttgttttaaaagagataaatggcatttaaggcgacaacaacaacaatatttggctatctaatgttttaatgcatgtattctacaaaagttataaccaaaatgttaccggcagtttcggaacacaagttgggatcagtggtgagtccacaagttttggagaaaagagcattgaagtcggtgacattgaaagggatcaacaacattggacttttgatgaaaccgcaaagacaagatagctgagttgcaacgccgtctctacggctgtgcagcattcctgcgacggaggtctcgctgagtaattg

SEQ ID NO: 17655 - DNA, 589 bp, Arabidopsis thaliana
ctcattttcattctagaaatagtttttttcgctgctgctatctaaatatatcttttcactttgtgccaattgcaggttcttcgtcctggagttctgtatttccttcgtgatccagcagatcctaattacaatccattccgagatttgattgatgatccagtgcacaagcatgctcggagggtactgttatcagttgcagtgtatggaagtttgattgtgatgctggtatttttaccagtcaaacttgcgatccggatggctccttcaatctttccacttgacatatcgtaagaaatattgactaacctcttgtttttggagattttgtgtttgattaggtctttcctaacttgggcatatatgcagtgtatccgacccattcactgagatcccgccgacatgcttctgtttcaaatatgcattccatttatcatcgagcatttcagacttcggaccacaattaagtcccttctacgctgctggttcactggggttggttgggcgcttggtttaacagacttcctcttgccaagaccagaagacaacattggtcaggacaatggaaatggtgaccaggaaggctagacag

SEQ ID NO: 17656 - DNA, 528 bp, Arabidopsis thaliana columbia
tcaaattcagacatatatagcctaaagtttcacacttgtcagttggtactgcctagacaagagataactctgtgtgttttgtttgtaggtgggctatgtttggtttcgcagttggtatgctcacagagtatgcaacaggatcagaccttgttgatcaagttaagatccttctctcaaatttcggcattctagacttggaataataagagtgttgttgttatatatagacagatccttttctctcttctcttcgattcctcttcttgttgtttcttcttcttcttcctgtatatgtatctatataatacagggccatttgtgtattcaatcacttttatcttcaaatggtataaatacgatcttgtatcattgattctagaattgcatacaaaagatgttttgaggattaaatggaaagtgtattctcgttttcaaaagtataataatctcagagctttgttaaggaatctgtgcaatctccagaaggattttgtggagagattgaggctttgagaagaaagggcaatg

SEQ ID NO: 17657 - DNA, 967 bp, Arabidopsis thaliana columbia
atatttccgaagattgaaaaacttgaaggatcttcattgacattacaaaaaggggtacaagctgtagaatgcgagatggaaactctggccattgagactcggacatgtgaatctgttgtttccggattcgaaaaggagttgcttaggttagagaatgatcttcaaggttgcaagatggaattgcgtggcttgaagaacattcttgtgtgtgtattgttgatgactcttgtttatatgttcctgttgtagtctttgtaattgtgtttcgtttctatttataggcctattgtattaagttggttacccgttgttgtatgtattaaatgttaaatggtcgttgtaattgtcataagtgaagcaagatttaggttggcttgtgttataaaataatacacaaatgattacagaatccaacaaagtactacaatgtaactatcacattaatccagtaatggtggaatttaaatacaaagagtaactgatttaagaagaaggtctggggctggttgacgagctttgtactggtaatactcaagcagaatgttcttctggagacaaggaatttaatctacagctccacaaaatttgttgtactggcgtcgtagctctgtcatgaaacttgaaggtaggaaatgaaaatgaagtggcttatttttatccagacacatctgaaagaacctcactaaaagatctggtccctgtagtgttggaaaaaaactgttagctcatagaaaagtatacaaaatatgactaaacaacaagaagtgagccaatatttttatcgacaaggttagacagatttcatgtagaacttactgattcatctagcagtgtctgtgcctcgaaaatggttagaaattcagtattctccattacagtgccatcagccagaacataagacctacatggaaacatatacagattccattaggactgatccaatacacatattttactgcacatatag

SEQ ID NO: 17658 - DNA, 643 bp, Arabidopsis thaliana
caccactcctaccatccaacggctccgatttcatccgtttggcctgcaacaccacactctacccggacctttgcttctccactctctcctcttttgccaactccatccaaaatgactcaaaccgcctcgcgcgcgtagccatctccctcactctccacaacactctccaccttctctcttacctccaaaacgcttataaccgcgaccacccaacccccgtccttagagactgcttcgagaatcttaaagatgccgttgacggtatgagaggctccatgaaacagatgaaggagcttgtctccgcgtctggctcgatcgagtcatttaggttccagatgagtaatgtcaagacttggcttagtgcagctcttactgatgagtatacttgtacggacgggttcaaagacgtccacgaagacgactctatcaaagatgacgtctgctctcgagtcgatgacgtcaagaagcttactagcaatgcgctggctttagttaaccgctatgccgacgagtcaataataaattaataatatctcagtcatcgatccttcgagtcttttgttttttttcgaaactatgaacttttatacttaaaaaagtattagtaaactaaaagtactactcgttgttgcatgtaatactg

SEQ ID NO: 17659 - DNA, 1090 bp, Arabidopsis thaliana
  unsure (1)..(1090): unsure at all n locations
cttctccaatcttacttctttttcccaaatctaactcttgatttgttttttgtgcaagatgccgtcggataatacttatgtacggtttagacaacatcagcgtgacctgttgcatgtcaattcttctgttagtggtgggaatatctcagaggttccaggttcaggttccaccaatccaccatcgcctccaacgccaacgactcagccttatgtcaatcattctgatgctcaagttgaccgtctcaacaatctgacactggaagagctcctcgatagtcctggtcgtgctggcttgacaagataagacccaaagcgtcctacgggaactctctggtaaggttaaattcatagtctctagatttaggtcttgtaaggttgttggttctgccttagaactttggttctcccttagaagtctctggatttaggttggttctgccttaaaagtttggtcctgccttagaagtctctggaattaggttggttatgccttagaagtttgtttctgccttagaagtctctggaattagcttggttgtacttagcattgtagtttcttagaagtataaagacatagagatccttatgtgttttgttgttgttgttgtaggtttgacgatgtcctcgtcatagagatccttatgtgaaagagatttcaaagagattttttagaagaggtttcaaagagatttcttagaagtacaaacatttccagagacttctaaagacatagagatccttatgtgaaaaagatttcaaagagcctcatgccaattggtcacagacatcaaaggctacaatcgatcgatggtatgaaacgtttgcggtaagttatgtgctcttttgatgtttatgcttgttttgttgtttggtttcatagtttgatgtttgctttgtctgttttgtagcaagtatataactgggaccgttcaattaacaaaagagtaagggttgagtttgaagcaaagctaaagtctaggatgtctgatcaagtgtcacgatggaagggaaattggaaggagaagggtgatgaagcgaagccanaatggattgatcatgatgtgtggaagggctagtcagttttggcaag

SEQ ID NO: 17660 - DNA, 1054 bp, Arabidopsis thaliana columbia
  unsure (1)..(1054): unsure at all n locations
tatatatgaagctttcgccagtgcagcaccctcattactcgatccccaagatcgagcattcgcccaaaccgcctcaagtctcttgtcctctagtgaatctagggtttcaacattttactataaatagatcactttgggatttgtccaaaggattcttttatcctttagtttttctttgtgtttatgaatcttcaaaacttaatcactcttaatctatttttttttgcatttagttgtttaagtaaagttgtttagcttgtttagatctacattttaatatgatttcagtaatttctgggtttgtgtacttgagaatgttgcttgagtagtgattatggttcttgaggatggattagatgatggtaatctctaggttagtcaggtggttaagattaggttagaacccttctggattcgcttggccactatgcgattttcggtggctaatgttgagattcgatcatagacgtctagcgtccaaaagacgttcaaatggatgtctgatctacgaattccagagatttgtagactcgactatgacatttgcttgtctgcttattggctttggtagattgtttcttaaaccctgctctactatgtttcatcaatgatagttgagattaggaagtggtagagttatggaggtctctgtcacgacagtggattgacccggtttttgaatctatcgtcatgagtatctacctttcacctattagccatctgatgaaccttagagttgtccttatcaatgaatctatccttaggacttctattagatttatttgtatcccctgttgattgcacttttattttacatgttatttgtatcccctatttgtatcccctgttgattgcattntagttctgcctgttggttctactcgatccaatgatcgagtagggctctaagttctcatttttacttctttgaatcctgacctaggattgttactagaaacccatcatcattataatctggcttgacttagttacttctgtacacgtcttgattgctagcaataacagtggactggattgacaccccctatagatg

SEQ ID NO: 17661 - DNA, 333 bp, Arabidopsis thaliana
gtaacggtgtgctctaaagcatgaagcaggatttggtgaaattccaaagccgacagtatagtctggatgatagaagataaaagtatatttgtgctttttgcgtgctctgaaatgattacttgtcatcacagatcataatcgcatatcgcatcagttgtatgccttgagtagtcccctattcaaggtatatgttttggaggtagtgagatgagcgattcaaaatatatgaaattagcaataaaactggcacaaaaaggggctggttacgtcaaccccaatcctatggtcggcgcagttattgtaaaagataatcacatcatcggacaaggttat

SEQ ID NO: 17662 - DNA, 1025 bp, Arabidopsis thaliana
tcatagctcacagtgatatgttgggcttgagttctgttctaagagaagctgagacgccgatggggaaagatagagattcagagaaatctgatgaagaagagaaagaagaatgtgaaaaggtggaagcttttgaagagaaaaagaggaaaactagaagcaccatcgttttgagtgtttcagatagggttttggaagcctcggataggctctacatgtctaaagctctcccaaaccagatatatctgaagcagaagctctatagattcaagatgtctgagaatctgtctatggaaggtaatatcgatgaatttcttcatatagtagcagatttagagaacttaaatgttttagtctctgatgaggatcaaaccatattgttgttgatgtcacttcctaagtcgtttgatcagttgaaggatactttgcaatatagctctggtaagactgtattgacacttgatgaagttactgctgccatttattctaaagagttagagtttgggtcagttaagaaaagtattaaaggtcaagcggagggtctgtatgtcaaggataaggcaaacaatagaggaaggagtgaacataaggaaaaggggaaaggaaagaggtctaagtctaagtctaagtctaaatgaggatgttggatctgtggagaagatggccatctcaagtctacatgtcccaacaagaacaagcctcagttcaagaatcagggaaacaacaaaggaaatcctcaggaggataaggaaatcttgttgaagcctcagtaaaattttgttgaagctgcaggaatgtttgtgtcagaagctttatcctccactgacattcatttggaagatgagtggataatggatacaggttgcagctaccacatgacccataagagggaatggcttgaagattttgatgaagaagcaggatgttcagttcgaatgggaaacaagactatctcacgagtcacaggagttggtacagtcaggattgcgaatgacaatggtctcactgtaacattacagaatgtgaga

SEQ ID NO: 17663 - DNA, 515 bp, Arabidopsis thaliana
ctattccaaatcctcctctcccaagtatattcttctcatcgaaattatatgtagcatccctcaaaacttgtattgagatcacaatatttccagcttctcctagatgagcgtcattaccactgaatccactttcactaacaccagtacacagattctcaattgtaatcttgaacgcatcttggtcactagattgttgttgaggatgcatcttatgatattgcatctttttcttgaccaaaaagaaaatagcaacccctataagaagcaaagctaacaaaataccaataacagaaccaacaattttcccagcattactagatgctttctttccagcattgccattaggacagtcctcaaaattcccagtcgtgttaacaatagttgtgttaaaacgaggtacttcaccacacaaccgattcttcgaaacatccagtgttttcaagttactcaacttagcgagctcttgtggaatagtaccattaagattattctgagagagattaatacacgaagag

SEQ ID NO: 17664 - DNA, 628 bp, Arabidopsis thaliana columbia
tgtccgctagtccgtgcgccgcgtccgaaaagctttaaagactttttaccgaccctacaaatcaccacaagatctttttccatgctttgtcactcgcatggttccgacaatgacttctgggaatatcatccatcctgaaactactccagcccaagcatgtttaactgtggagttctcttaggacgtttgaccgaaaagataagtgcacacgtaggtggtcaaatcatttcttttaaacctctctgcatgcaccaccatattcctgaaatcggggtgttacaattcacctccactaacagatcgcaacgtcctcgttgcacaccaagaccgtaacccccaatggtgcgaaccttcttgactccacactcatttgggtttggctctgataccacttgtaacaccccgactggccctaccagtgggcctcatgtcttctctctattaacaacttgtaacaccccgaccggccctaccagtgggcctcatgacagattcaaaactcaagaggcatagatttaaaaatcaactcacaatgacaattcacgctagtgtattctagctatgtatgaatacttcgcaaatagggtttgttggatcgggttgaagaagaaatgttttgagataagca

SEQ ID NO: 17665 - DNA, 1070 bp, Arabidopsis thaliana
taactcaaaacctaaacaatctataagtcttaatctctctaaaactcataacttatgccacaacttagcatctccttattaataaaactttaacattatcctaatcattagataactcctaataacattagataactccaaatatatattctagataactcctagaatatttaaagcttaatttccttttctcttcattagtaacttgctcttcaagttacttctccttcaagcttaatccaacattctcccctttaagcttgaagtcttcttgtaccacatcttgaactccaacaagatctctcatctccttgaacttgatccttccaagtgccttagttaaaatatccgccttttgtttctctcccggaacatgttccagttgtattagttcattctcaacgcattctcgaatgaaatgatacctgttgtgaatatgtttcgaacgtccgtggaacaccggatttttggagagtgctatcgctgatttgttgttgattagaatcatcactctctcgcatgtacttcctttgatctcctcaataagttcttgaagccatatcgcttgtttcgccgcttcagttcccgccataaactcagcttcgcatgatgataaggctacgacattttgcttctgtgagcaccacgatattggacttccaccaaagtagaatacatgacctgtggtgcttttgccatcatcctcatccacgttgtggctgctatcgttgtagccgattagcttcgtatttatttgatcttaactccgaaactctagaccgagtgttgtggttcctcgcaagtatcgtaagcattgtttcattgctgctccatgtgactcctttggactttgcatataccttctcaatacacctacacaaaaagataagtccagtcttgtgtgaagtagatatcgaagacatccaacattcctcctgtcacttgtagcatcaatgtctttctctttcggggctttagacaagttcaaaccagcttccattggcgtgtgaaccaagttacattcagccattcccgcttcttctagtatctttagtgcgtaccgtcgggga

SEQ ID NO: 17666 - DNA, 907 bp, Arabidopsis thaliana
tgaatgaaaaaaacaattgaaatttgaagatgcgttatggaacaacaacaaaatttgttgactccacgaagagaagtaaggattagactcgctctaagaagtagcttaattgatctcagatgaatcaattagtggcttaattgatctcagatccattctctctctttactaagagttgatgaaacctatgaaaaaactttccttttcattctttttttttttggttaatggattgtatgggtcatgtcgaatttttttgtcttcttttatgtcgtcgattcaagcgcgtcttctttgtagtttctgcatttgtttatttcatttttttgcattttctatttttttaaccccttgttactgttatgcgcttaatcattataaaaacatgtcttattgacttgaacttttggctacaagaagatatatagtggaaactccttgaccttttaaaccttttacatgaagtatgggattcgttttttagttgttgattgttaattgtctatgggaggttccagtactaagagtactataggtagtgtcgttcgtcatgtatcacaggattagcttgttcaacgtatgtcgtacatatatgtacgttgtagacaggctctgaattttttttttttttttttttttttggctcaccaacaactttatattatccaacgttcgattacacggattctaaaaccccaatgtgtttgatccagtctggcataactgattacaaaatgggttcataattcactaaagaaggagattcccttgcaattctatcggccactctgtttccttcacgccatatgaattgaaacctgacttcatcaaattgatggaggagatcctaatgtcttggatccttgaagctaggcttggatggtctatataatccttgatcaaagac

SEQ ID NO: 17667 - DNA, 480 bp, Arabidopsis thaliana
gtagctaatttcaatttttgtttttggtacgttggtcgcagtctacctcaaacaaggtcatcacgattgatagctacgaggatgtgccagcgaatgatgagatttccttacaaaaggcggttgctcaccagcccgtgagtgttggcgttgacaaaaaatcccaagaatttatgctctatcgatcggtatctatcataccttataaaattcatttttttgttgcatccaagtatatacaattaataaactcatatggtctatgtttacatgattgatgtcattaagtgtatatataatggaccatgcggaacaaatcttgaccatgcacttgttatcgtcgggtacggtagtgagaacggtcaggactattggatcgtgagaaactcatggggaacgacttggggagatgctggctacattaagattgctcgtaactttgaagatccaaaagggtctctgtggaattgcgatgcttgcttc

SEQ ID NO: 17668 - DNA, 596 bp, Arabidopsis thaliana columbia
tctagcccaagaaaaaaaaaatggtttatggttaaatttaacaatttgctaacgtttgtgagtatatacatatttcgctacaatccaaacatctcttatgaaagagagaattttcttagagaaatcatacgtacacagtgattcagtgtaagtacagatttcatcacaaaaatataattacaattcacacacaaaagaaaacatgggtattgaaattgtcaaggaatcaaatcggttacctgaagaagaggatgagagcgatgagaagggagacagtgaggacaaacactgagacaacagagtaagcaaaaaacgttcttttcacttttacggcgagtttcgtggattcccagcttgagaagaaagtctccgccattaaaccttcaagccatgcaggtttcgttgccatcatcatcatcatctcttcttcttcttcaccttctctaaccatttctgtggatttttatggtaattaaagagtcactcaatttattgaagaagaagaaccctaagagagattttgattgggagcttaaattttggagagtgtgtgtgtgtgtgtgaagaagaagagtgtgtacatgtttatatataat

SEQ ID NO: 17669 - DNA, 856 bp, Arabidopsis thaliana columbia
gtttctttgtaaattgatttctgcaaataaaacaaaagaaaaaagcaccattagaaaagttgccaaacaccataagaaactcaatcaatcattccaagaacagtaactatcaagtcagcatacgaaaatgtcgtggctattgaaagagaagccacttctacagtaagatagaagaaacttttgaaataggttcccaaaaagttggagaaacttacaaagctggttttgagcttctcaacaaattcactgttcttgaatccactcaatatttctaacgagcttcgtttctcaaactctttaaatctactcttcaaagacctaatcggttcccaatcaccgaaataagcttctccatctctctcagcctccgcgaaaaactccgtaaacctaaccctatcactattacgccgtctcctcaatctactcatctccaaaactccctgacgctcatccaattccatctcagacacaatcgccttcttaatcgccgatagatccattccaagcttcgctctcgcaggtccccatctctccataaccttgcgactaatctccggcgccgaataaaccctacgaaactccgaaatcttcggctgaagcttcttcatgataccaatttcatttgagaaagacgacgccgatggtgaaccaacgggaaacgcagacctcgccgagttattgaggaaattctcgatctctctatcgaacgttgatgctagattcttaacagagttagctctgtctcgcatcagctgcaaatccgcatctgctgaatcccatactctctccatcctttcgacaaaaacgataacgcgtttgttgaggatacagtcatgaaagagacgaagaagaagat

SEQ ID NO: 17670 - DNA, 542 bp, Arabidopsis thaliana
caactgaatccagcttctttacttacgtttttcttcctcattgctttcctgatctctgcagctttatcccactcttctttctctgcatagatgttatacatctgaacgtaagaacctgacagttccggtttcatttccattgcaagctcagccacttttgctcccattttcacattcccgtgcagcctacaagacccgagcatgctctgaagcatcgactctcctggtcctccaggaacctcactcataagctcttctgcttctttcaatctcccagctcggccaagcatatcaaccatacatgagtaatgctcatgagacggctcaagattgtagacttcgatcatcatgttgaaaatctcatagcccttgtctaccattccttttctattacaagctgttaacacagagagaaaagtgactaggtctggtgctacgttttctttaatcatcttgtggaacaaagtcatcacggtttcaaaatcaccgtggcttgaataggctgatattatcgatgtccaaacaaattggttcttttgaga

SEQ ID NO: 17671 - DNA, 638 bp, Arabidopsis thaliana columbia
ctacgaatgatgatgttcgtaaatggaaaatccctagcttccctttggcgaactcggtttacgatagaccatccatgtcggttgttgaggataatggccattctcccatgaaaggaagcaattctcaaggtccagtttcatggcaaaatggagctagttccaaaagtgttgaagtgtccgaggttagaccgacgaaaatcagaagaaagatgatagatctttgccttccagctgatgagtacattgatgacaatgaagaagttgttgagttaaaggatcacagggtctgcagtacatcgagtcagcttcctaatggagatgtgaagactgaatctcgcatagatggtgtgagaattggctatgggtctagtagaagcaatggtttggctgacttaaatgaaccagttgatgctcaagaagcaaacgaatttgcttatggccactcccgtgacttgcgtaatggggagttcaaggccatattcgtgactacggaaaatctctaaactcaggtagtgtaagggagcatattcctgttaccctctgcagccagatttgaacggcaaaccaaaagtttggtcacaccaaccctaagaactggtaagatgatctattaacttgtgaatgcgattcttggattt

SEQ ID NO: 17672 - DNA, 712 bp, Arabidopsis thaliana
aaagatagaagtacataaataccaaagagttgcaaaatgacattttgtatgtttaaagaaagagataagccttgatacagccaataacacacaattcatataaaaaccttttgcacaagagacgtatttttgtccattaggatctctgcaacaactcctctgaatatccattcctgcaccattcataaatggtcactctaaaaccttcccatggcattaaccaagaccaaatgttttctataagataagataagatcagatgcaacatactttcaacaaatttatcctacaatcttagaaaccagaatccactatataagcacactcaagaaaagtttcttttacctgcacaaaaggcccgagatgtgcttccttcgacgacaacacatttgactccaggatcatattcccattcatcaagcaagcttttgtacttcaaatccatttctgtaaaaaaaaaatcttcaataattgaacttgggttgtgaaaaagcttaattctttatgaaaacggactatatgcgaaagcgttgagagctttaggtcgatcaagagtaatgagagcaacgcctatttggataaacatttcctttcacgaactcgtcgcttccactggccattactgagaattcctgcgatgagatcagagagctttgagaagggaatagaaaagatggagaggtctagagaaaagatgcgacagaagcagaga

SEQ ID NO: 17673 - DNA, 801 bp, Arabidopsis thaliana
  unsure (1)..(801): unsure at all n locations
gtaacttccgccagtgtgctgtaaagtggagaactttattctccacttgagtaccgcataagaaattagatatagaaaacataagaaatagaaaatgacaaaaacacaagaaaaatctatcattctcagttctctttggctagtttttactcaacagagtgatcactaacttccttttcgtccttgttcttcatcattagctgagataatctttctgcaacacttaacctagtgccaggtgacacaccgttcttcccgatgatagattccagaaccgcctccgccaacaatttgttctcgatcacagcgatcccggtttcagggatactatcatctttcgaaaacgcaacctacaaaacagtatagttcacaacaaacacatgtcaacaaagtattcaaacctacacgttacaactactatcgttccaaacttccaaacgccaacttttacaatagtacttacatttaaaaaacctaaaacagtaccttcgcaagtggtttaaatgcgaaacantgtcaagtatctcattccaatttgatatttgcactaacgattaacaaaattcaagcaaagtataaatcaagcaaaaattaccgtaagagagccggtaggggagagagcgaagaggatcgatgaaccgggagggaatgtttcttccttgaagatctccaagaacttctccacagctttagcttcacagtccgtataaagccctaattgtttccatatagccacacaattctccgtcactttctccgaatattgttgtccgttaacggcagtttcattgtcaccttgat

SEQ ID NO: 17674 - DNA, 763 bp, Arabidopsis thaliana
cgtagatgaagcagcagcagcagctacttctcctgccaacagagactctcattcctctggatcatctgagaagaaaccaaatcctggcacctccgggataagtagctccaatggaggaagaagtggtggctcgagagctgagcaagagagaagaaaagggattccatggactgaagaagagcatcggtttcttcttcttctccttcatctccatcatctatccattgatattatttagacttaaaagagtgaaaaaagatttggaagattctttacctttattgaatactctgttttgtttggaaggttgtttcttttgggtttggacaagtttgggaaaggagattggagaagcatttcaaggaactttgtgatctcaagaactccaacacaagttgcaagtcatgctcaaaaatacttcatcaggcttaactcgatgaaccgagatagaaggcggtctagcattcacgacatcaccactgtgaacaatcaagctcctgcggttacaggaggaggacaacaaccgcaagtggttaaacatagaccagctcagccacaaccacagccacaaccgcaaccacaacaacatcatcccccaacaatggctggattagggatgtatggtggtgcgccagtgggacaaccgatcatcgcaccacctgatcatatgggttcagctgttggaacacctgtgatgcttccacctccaatgggaactcatcatcatcaccatcaccatcatcttggagttgcccttatgctg

SEQ ID NO: 17675 - DNA, 1128 bp, Arabidopsis thaliana
ctcttgctatatcaaaatgttgcaagacaagtttcatgtcaaatccaccaaaagcttaccgagttgcgtcaatcacgttgattcttggtgtaactgttagctcaatccctgtaatttggtgcaactggaatcgaatatgcaatatgtctccacattatacacccacttctgatgtgcttgaggaagaacctgaatctttcctatgtttgttgaaccataaagagaacttatgaaacatcgcatcaatcagtggtaacaggagatacttcctctcttttctaaatacactgaggatgacttgctgagactgagagttgacagtactagcggccgctcgatcacaaatggcacctcgtctatttctcaaaccctacatcaactagaaaggtagcgggtttatgccatcgactagtaaaataaccaaactctttgttgaattcagtctcacgcaattcctgaatttatcaacatctctctccttgtcaatcttcacatgaagtctcatgttttgagtcaaatgccatatacaacttgcatgaagcgccttcaggtacacagtcctaacggtcttctttatgctttgatgcctgtcacttatagacattaatccaagaacatcataatttacagattttttagcttttttaaaaaccaaatccaactaacattcttcttgttatcaattactccaaatgcacgaggataatggtgatgcttaggattttgagttgttgcaataaccaacatcccaccatatacagttttaagatgagttgcatccacaactatcactttccacattaccctaaaaccttcgatgatagtgcctaaagtgatgaaaagatatttgaagttctactcttccaactcaacatttgttatcgtccctcgatttaccttctttaacaagtacagataaaaacacatcgtgtagcttctttctggagtggctcgcacatcactaacatgtagcattttccctcttaaggcagtggagtatcaacaatgcacaccaagtcttcctcttacaatcgacatgatttttttttgagttggggtctctaaaatacctggatagtcacatacaaaacaaatgctattaatcgtggtatgcctcactatatacta

SEQ ID NO: 17676 - DNA, 1391 bp, Arabidopsis thaliana
accctacgccccacttgttcatcgcccgactctcttatgttgtgttgtgatgagcaaagcgtgccagaagttaaccaaacattaaagaataaaaaaagattggctataacttgcgggtatatgttgagggattaaaaaggcggaagaaatccgcctcatattgctgacaaagtgcgctttgtccatgccggatgcgcgcgaacgccttatccggcctacaaaagtttgcaaattcaataaattgcagaattcatgtaggcctgataagcgaagcgcatcaggcatttttgcttctgtcatcggtttcagggtaaaggaatctgcctttttccgaaatcattaatacagttttttcgcgcagtccagccagtcacctttgaacggacgcttcatgttttcgatagcgtcgatgatgtcgtggtgaaccagctgttcgttctggatacctacacaacgaccgccgtaacctgccagcagcagatcgatagcgtaagcgcccatacgggaagccagaatacggtcgtaaggcaccggagaaccaccgcgctggatgtggcccagcacagttgcgcgggtttcacgaccggtttctttctcgatgaaatgcgccagttcgtcaacatcacacatatgttcggtaatcgccacgatcgcgtgttttttacctttcgcgatacccgctttgatttcgtttaccaggtcttcacggctgaattcaacttccggaaccacaacgaattcacagccaccggcaatggccgcagccaacgtcagatctccacaataacggcccatcacttccaccacggaaatacgctggtgagaagaagaggtgtcacgcagacggtcgatcgcttctacaacggtgctcagcgcagtgaagaaaccgatagtgtagtcagtgcctttgatgtcgttgtcgatagtgcccggcagaccgatgcacgggaagcccatttcggtcagacgcattgcacccatgtaggaaccgtcaccgccgataaccaccagcgcgtcgataccacgttttttcaggttttcgatagccacggcgcggatgttctcgtcgcggaattccgggaaacgcgcagaaccgaggaacgtaccgccacggttgatcatgtcagacacgctgtaacggtctagctgtaccatacggtcttcatacagacccagatagccgtcataaatacccattacttccagaccttctgtcagcgcagaacgaacaaccccgcgaattgcggcgttcatgcctggcgcatcaccgccgcttgtcaacacaccgattttcttaatcatgactacctctgaactttggaatgcaaaatgaaatctgttgccggaagtcttcttgcacatcgaagtgatccaacgaatgtgcaaatagt

SEQ ID NO: 17677 - DNA, 731 bp, Arabidopsis thaliana
cacccaagtaatcctccaatgtcataccgtcatcttccaatacatctccccccgtgaaaacaacgataaggtaatcaacaatcttactaccgaaaagaacctgcaaggtactaagtaccatctcttcctcttgactaattcgagtccttacagataaaactaagagcacagcgtgtagccctccatccgctagagttaggcatttaactatttctttaccgataaattcagcagataccgacaaatcaaatagacctgtcaccaaccccagtccacattagttacatactgatgacatataaaaaagtcaagatgtgcaatgataaaacagaaaaactatcataaaaatcctcaactattgaaagcgttaatgtaaatcctcaactctcgaccaaacgaaataaatatcaaacttatgtcaacaaaagttgggtatttatttggaaaatcaacataagtttgatatatattttatttcgtcgagaattgagaaattaaatcaacattttcaataagttgaggattttaatgacctttttcccatggcacaacgtaccaggagtgtcaatcacattgagtatagggccttctggtgtcactgctttaactgcatggcattccatcgtaacacctgatgattttgttttcgacttaaacacctttgatctgacgatgctgttccccgtggcgcttttgccgttccctgtacgcccaactaaaactatgttttc

SEQ ID NO: 17678 - DNA, 756 bp, Arabidopsis thaliana
ccacctctacaatggggtccgaaaaaaaagaatcggtcccctttgctttcagacatattttataaagaacaaaagagaacgtgggacacatattttagataccaaacacaagaaccaaaagagtaaccaattcttgcaactctaattagctgtgttaatagtgatgatgaagagagtctcttttcgctaatgatactactagtactaagtactaactaacaacacacaagaatctagtgctacaagtactgatgaacaaactaaaacataataagtagctattaagttaaacgtaaagtttgagaattttctatacctgaaacgtcaatgcgaatgtcgatacaagtcgtaaggcgtccataatgcgtctaagggacaaggccgtttggaatcgagtcttatccagggcttgccactaccagaccaatgcagcaaactcacaggaccaggatgcaaatcacgacagctacctctaacattgtcaccaccaagtccatgctggttccaccggtgagagatgggagccacgtgaccggagaaaactagaagaaacggtggaagcgagcctagttcgtaaatcctctctcttctctgaatctccatccatttctcgatacgtttcgtgtaaccacctcttctccatttcttaagatctatcaccatcacacctgtgttgaagtaacatggcttcctccctctaaaggtaccggagaatctctcctccgaccagaatcctccggtgaagtatttcgtgaa

SEQ ID NO: 17679 - DNA, 582 bp, Arabidopsis thaliana columbia
tatctactatattcttaccaacaatgtaacgtataagctgcaatttattcagtaaatatgtgagaagaaataccactaaaagaattatgagaagaaacaccactaataaatagaatatgtgccatcttttagtaatgtaatcctaacatagagtacatgggaagtcaaattttgtaactaaaaatttaaaggagagagcgtcacagaaaactactcacaggagcatcaaaagagacggatgcagcaatatgtaagacagtgttgccactttcatcggtttgctgtagaagaatttggctgttaattcccaaactctctgccataaaaacaaaggcatccatatttttgtttcgagcagcgagatgaaagactgtctctttcgacggcgtgattgagctgaaagacaatggaaccttgtccaagaactcctccaggatcacaaccgagcctctgaggaccgcaagatgcagaggtgataaccattggggttaagtgcttcttctaatccttgatcgagccctacaatatagttgcagttcaaagtctccgttacacacgcatgatgcagtagcgttgattgtg

SEQ ID NO: 17680 - DNA, 713 bp, Arabidopsis thaliana
acattcaaaaccttctacatagtaccaactccaacaactaggatttttttgagtgaaccctaatttcatcagttctgagctaaggacacaattttcaaacaatcaccacaaagtatcgcaattttccagtacgaaaggatccaaatcgagagctatgaactacaaatcgaatcaaaaacatataatcaagctcaagatcgaaatataaagataagagaggaagaaacgtttgacagacctgcatacaggtctcatcccagtcatggccgaaacgaatgacgacgagacgctcttcctcggccagaatcgactgatcaacagcccaaccggagtgcagatgtggaagaagatacgacattctctctctctctctctctctcgacgattttccgatctgtttcgattcaaccttttttctctcttgccctaattttatattctcttcccaattttgttgacggtgacggcgcgtcgattccacgcgtgaaccgcataaagcgtttgggctaagcccttgataatacttactttccggcccaataaaagataaatcgacgagattgcgaaacagacggtgattaaggtagtagaacaccataatctggtatgagtcattcgtagaggaataaagctctaaaatctaattatcctatccaatatcctctcatagaggtgagagctaagatttcccatcaactccatttgaagcgaaa

SEQ ID NO: 17681 - DNA, 1123 bp, Arabidopsis thaliana
gcatgcctgtctctagtaacgtgcgccagtgctgaagagctggttggagaaggcacttgaggaaacaaattcttctgatgatgaagaagaagtagaagaagaagaaaatgacagtattgaagcaatctcatctatggatagtgcagattatggaaagcattcaaacactaagcttgtcatcggaggggttctacataacatagaggattcctctatagatgatgagattgtccgtgtgtcggcaaatataatggatactgaaagagattcctttatattgcatgttcctgggagaagtaagagggatatcgatacaaggaaaaatagagtgtccaaagaacaagtaacagctcttgcagctcaaggactttcagatctgttgccaccagaggttgccgaggcgttctggggagagaaagcttctttgaaggtatattacttgaatttacaccgctttttataaagttaacctctagaatcagatctaggagtttgttattatttaaaacctcttttacgttgtcgtgttaatgtttttagatataaaggttgtttgattattgttctaggtatcgaaacatgtgcatgagattgtcaagcttgctataaaccaggcacaaaaaggaaaccatctctccgagtatacagcatttaatagaatcataactcctgaaagcaacttagacccttttgatggtaagcatgttgtgcattagtgttattctctttcttttgatttggactcagaatgtttttgtacaactcaacttgaaatatgttctgaattctaagtgcaggtctatatgtgggtgcattcgggccttatggcaccgagatagtgcaacttaagcgtaagtatggtcggtgggatgatgcagaaggaagtaactcctcagatatagagttctttgaatatgttgaggctgtaaagttgacaggggatccaaatgtgccggctgcgcaggttattatcttttttttaattgtattcaaatcatgacatttttgtatgaggtgaacaatctaagatagggtccaaattgttggtaggtgacattctgtgcaaggattgggaatgggagcgcatgacgaatcatggattgtttccagaggaattgggagt

SEQ ID NO: 17682 - DNA, 857 bp, Arabidopsis thaliana
gactctagagcctgggcttgcttgcgtgggctgccattagttcttcgagccgcaacagctcaatccgttcctctaggtctgcaacatgatacttcagtgcctgtcagagacaaagagaccaatattgatcagaacagaaaattatctacacaagttacatgtaaaattattatcatcattacttctcttctttgaagctcaatggatcgagcaaaagccttttttctcgtcaataagtttgaaggcctaagccgaaatggcatctgataattctttccgcgatagagtataatcgcatagcctttcatggttttatcaacggataccaatactcctccactctcagcctccaaagagatggcgatatgtttgacttgtggaagagatttgcctctaactatcacttttacaagctcccgatgtttccagtgtaaatgcatgttctctatggtaccatcatacacctctcgtcttcctgtataacgttttaagaacaggaaaacaaattcttattacacatcgttttggctttaagcgtgacacatgagtgagaacagtctttgtgcttacctaagagaagaaacggatccatactcaaaccaattttgcggtaaagaagtctctcttcttctgtgattatttctgaatcagttgggagttccgatgggtcaagatccttctgcactttagctaaatctctctcagctcttctcaacttttgctttccctgaaacaaaagagatcatcaaattttaggcacagaaaattgtgcaatcagataccaaaagaaaaaaagggtgatctcacataaagaagccttagctcgagatctctaatcaatgcagctcttttgatgg

SEQ ID NO: 17683 - DNA, 1052 bp, Arabidopsis thaliana
cgaaatgtatgggctcaaattccagttgatcagaaagcaataggcattaagaacaactaatccagtagggatctatcaatcaatactcaatcacctagcatactgagaattctacactactctaacccatcctccgaaacctattcactactcagacatcataacagaaagcataaacgttgaataagttgaaaacatgataacaacagtgtaacagcaggatgataacaaaatgaacaacagtaaatgaaatcaagatcaaaagctgaatactgaatattgaatagataaagagaaatccggattacaaaaggtctagaacacaaggtctgcggaataaaactagataaaaaacttgtctgcgaaaatgtgaagtacatgctacttataaccaaatattctgaaaccctaatacttaaaactacgaagtattgggacggattaagaactgtactcgacccatgtggtcgagtaggaggctcgagtgaatagctggagtcttcttttcttccttgtgctcgagtgtctggttgagtgcggattgaagaaggctctgaagcttgtcatcgaatatgcagtcgagtggtggtgatgtgatactcgacttccaggtagagtaatgagatcgagtagtggtctggcaatgaaggtgaagacactcgaccttgtggtcgaatgatgtgatcgagtgatggtcaggtgatgggatgaagacactcgacctcggggtcgagtgatgtggtgaagtagtgatgtcctctactcgacctgggggtcgagtgatctgttgagatcttgaagctactactcgacctcggggtcgagtggtttgacatgaccaggtccgcttcttccagatagctcgtcaacatctccaaatcacctgaaatcaacgcaaatatgcaacatgcatgcaaatctatcctaaacatgtaaagtgatgacaaatgatgagaaatggtataaaacagtgatgatatgatgctaaagtgatgacaaatggatgctcaaaacatgcaaaaaacacacttatcagctgtcaagaatttaag

SEQ ID NO: 17684 - DNA, 967 bp, Arabidopsis thaliana
ggatatggaagtagagcataaggatcccttaatactgggaagacccttgttagcttcagtaggagcagtgatagatgtcagggaagggaaaataagtctcaaccttggaaagcatatcaagttgcagtttggcatcaacaaaactccacaagggtcaacagaagatggaagaacctctggaaatgatagagtgatctcaagagaaggatatgagactgaaagagtgaaagaacttaaaaagaagtctgataagcaagataaaactatagagaagctagcccacactgttgaggaacttagaagtaagctaaatcagttgtagaaggaagctcaacctaaagacgggattgacactgtcccgagaaaaaagttcacttcaatatggtctaaagagacagattaccctccagaagagaaagaagcatattttgaagagaggggaattgagtattctgatgcagacctctccagggagaacgctgagtatgatgatgatatcagagaggattatgcagaccctctctatagttcattttcttcttgataagtgtgaggagtcaagctagagacttaaaacaagctcacttgggaggaaatcccatgattatccttgtaaataatttttactttcttgttatttttgatttgttttattgtgtttgtggttctcaggaaaaaaaaaaaaaaaaaaaaaggagtaacgtgaaggtagagtaaaaattcaaaacttttactctactgatggcctagagatcgagtacattggtcgagtatgggcgatgttttaaaacctgaaaaaaaatttaaatcatcattttactcgaccaacaggagctacagagcttccagggagtttatcaagtttacagaagattgcgggatttcctggagtttcctagtgacagagaaaagcaagaagcattgtgggaccgccgctgacgccatgtcctccatgcacagccaaggg

SEQ ID NO: 17685 - DNA, 886 bp, Arabidopsis thaliana columbia
taaattctatttttatttttattattatccacaaattttatttgagtaaatcctattaaacttattttcctaaatttaagcaatactcgtttgattgttattttatttaatttaataaaagcttaagttgttgtaattttttttttctttgaatatctatttaacttgaattttacttaactattttgttctctcacttccactctctcaattattttgcaattcttcttacttctctctacaatttctgaaaacatgtaagatttttttttatatgtttatgttagattttggggtatggaatgtatctcttagcttaggtggttctgacgaggtgtgtcctgttgtattttgaacatgaaaattttgtacatgttacgttggttatttatagatgtgcgaaaacatattgcgagggatttgcgaggaacttgcgaggaacagcgctattttgctacgaatttgcgagagaagttcaactaccaaccaagcaggaagattatttaaaacgtgttgacctaacctgccaaggactcgcaactccgacgcaaaatttgctacagaaagtttgtacgccgcaagtttaccgcagtttgcgagactcttatcgtacagcaaatccctcgcaatttgcgatgactttgggatgaaatcttcagtcgttgcaattttcttgcaattgccaggcaatattgcgtggaaattttccctcgcaaattttgcgactgattaacgacgtattgatttcccgcgtaaagtgctcgcaagtctatagcaatttgcgagggattacgccatctcaaatttccctcgcagatcgcctgttttcttgtagattgagagagattcaaagagatagaaggagcgggagagtgggtgagagaga

SEQ ID NO: 17686 - DNA, 577 bp, Arabidopsis thaliana
gccgtgtctctatttgacaggtatgtcacttagtttgaatcgatttctgtagttcttagtttgcatatatcgatttgagtattcacttgaacttgaggattcacttagatttgagtattgatttgagtttctaatagaactgaacttgagtattcacttgaatttgaggattcacttagatttgagtattgatttgagtttctaatagaactgaacttgagtattcacttgaacttgaggattcacttagatttgagtattgatttgagtttctaatagaactgctctgctgaacaattgtacaagattggtcgcattccacttggacctaatgttgcggctgtgattgtgaagacagtggaagacaccacaacttctttgtggaggcctacaccatctgtttacacacttggtgaagctttggggaacaagattgcttggccttttgataagatcatcttggacagtgaagtagcttccccttctgagaatcagactgcaggatcttcggtaattttcttcccatgtcacttgtcaaatatctagtaagatcactcactgctcacttattatttat

SEQ ID NO: 17687 - DNA, 541 bp, Arabidopsis thaliana
ctgctagcttatgtggatggccgtgatgagcctgatgagaggaaactctaaccagcagtttacgcaggtatttcttcttaacacctaatcaagaatcgtgagtttggctttttggtttgggtttcatatgttctttgcaacccttacgtcattgattttgattagtgctcttctcaagtacttcttcattgtacataacttttaagtcgactatacctgaattaagaaacttatcatctttaatcaacatttatccaggatttatttgtgccatcctctgggaaacgaaaacgtgatgattcttctggacattatcaaaatggtggatctatacctcaacaggatggtgcaggcgatgctatccctgaggtgtgtgtgtagaactccacatttgcatttgcatttggaatagctcacatcagaaaaacaaaatcatgaaagtatttgtaacacctatattctttcaacaatgatgtatttagtatctcgttgatacacctgattggagcacaattctgcaggcaaactttgagtgtgatgc

SEQ ID NO: 17688 - DNA, 548 bp, Arabidopsis thaliana
tcccccgtaactgttgcaaagaagatttgaacccaaaccaaaaagccaaactcacgattcttggttagatgttaaatagaagtacctgcgtaaactgctgattagagtttcctctctcaggctcatcacggccatccacataagctagcagcaggtcagacatttattatccaaacaacaaactgagacatagtgtactgataaaactagtacttaccaacattgacatcaagtctaggattagtccacggagaaggcggtggctgcaataaagtagataatctcagtttctgtaaaccaccgagataagcagtttcactacacagctgaataagcatagctcaccatataaggactaggtcttgctttaacatcaatgttgactccattctcagttccaggagtgggataatcacttgagccggtagggatgttatacatggatgagttatcagcagtaccgggaagcggcgttggaaggggagtctgcaatggtgtctgctcaaaaacaataaggatttagaggaaaacatctcaagaggaaaaga

SEQ ID NO: 17689 - DNA, 865 bp, Arabidopsis thaliana
tcgctttcgattgataacagtatatcgacaaagtcctctttatgattacctgcctctaaatgttcttgcaccactttgtccataagatcgctaaacccttgacttacttcctttattctagcattgaaaccgttgatcctgtctatccatgccaaagccgggacatagtccccgattgggaactcgcctaaaagctccatgatctgcctcactcgcttcttgagatcccttgcggtttcgtcctcactatgttttcttcccaaggcaattctactcgtaacatcgcttgggagagtaacaaagagttcgctcagattttctgacgaagaagaagaacttgctttctccagcttcttgatcatttcatttagctcttcttctcttatcttctcaaaggacgcaaccattttgttcgtgagcagattgagaatgcatacactcttcatccaagaccagagaaaaaaaacattattagttgattaaaggatatacaaaagtattagaattagttagttcatgtgtgggtgcaagtttccgacgataattttataaaaagataataaatatacatataagttagagaagaactaaagagtgctagtaatgaaataccttcatctgtctccaatattctccatagggaccaaacaccacatcacgccccccattcataagcccatgaacggcttttgatctcgggcggttggcaaacttaagatcgtgtgttttcaatacctcttgagctgcttccccggaggatactacgagtatggggacacggccaaaatgaaggagcatgagtggtccgtaccgaaggcttagggaatggagggaacggtgagggtggaggctaagctggtggagg

SEQ ID NO: 17690 - DNA, 1145 bp, Arabidopsis thaliana
gatgatcccctgagattatgtatgatgcatcagattacgccgtatgagctgtgctaggccagagaatagacaagaatcttcacgtcatatattatgccagtcggacgttggatgaagctcaaggaaaatatgtgatatgtcatggtttttactgacaccacacctttgtcaatggacactcttattgctgccaagggaattctcgtttaccaccaagtctttgagaattcctgaagtcttctttatttgcaaaagtagtccctgcacgttttaagtgacaaatatacctaattgtttggtcattgggagacctaagttttgttttaaagattgttacacattttgagagaagaatcaaatccctttagagaggattctgaactcctttacatctattcttaattcatcaatgcaaactattcagattatgatttgtgtttctattatcatgtctaagtaatcaccttggtgggtttagggagtctcaatagggattgagatggattagtagatcggaaaccccttatgattattcttagacttcttcatcttgtttattcttattgctagttttagattgatcacctagaacttgatattagataataggtatgcccgccataggtacttgttatttgaactatcacagatgagcctaggcatttaagaaagaaaaggtaggctcatagaagggctctggtttagacactaggtgaactaatcaagcttattaacaatgcatgctttagcataggatttctcgccttcttcagttatcttagctctaagtatagagagttttgcggaacaccaccggttactttagaatcatagtttgagttcgagaacagtgcgataacaatccttatattagctagatctacactttatctatctcccgagataattccttagacctgacgctttaatcacttaaatctacacttcgtttacttgcttatttgtcttttacattcaattactttgtctagcttatttaataacaccataagtctattgtttgaacatcgagagatcagtggaattcgacccttaagtgctaacgacgatctcttatttgagggagtaagcttaaggcaatttgagctatgtcatcagacttggagatattgctttgtctaagt

SEQ ID NO: 17691 - DNA, 766 bp, Arabidopsis thaliana
ggcgcttaagatgactcagaattaaactctactagttatattagagatatgtttttacccaaaacacagcaaggctaccttaagccccgaactcaacagacaccagacggtccaaagaaacctacaaataaccaatctgctactagtcctccgtcggtaaacttttagttagttatgactgagttatcttcatattatacggctgagttataaattttagttagttatggctgagttatctgaatattatacggctgagttataaattttagttagttatggttgagttatttgaatattatacggctgagttataaattttagttagttatagctgagttatcttcatattacacggctgagttataaatgttagttagatatggctgagttatcttcatattatatggctgagtttagttagttatggctgagttatcttcatattatacggctgagttataatttttagttagttatgactgagttatatttatacataggtatgagttttcgttatttaacgcctgagttttcgttacgtttatgcagtcgaaacaagctgtaatggtagagaatgatgctgatattgctgaggttggggtaagtaggaatcttgaaggagaatttgctaaggcctccatcgtgtctgataatgatttcattgagacttctcctctcaaccgccgtttacgctctacgacggcagtggggaaaataccaaagcgacgcaccaccagagcagaaaaagtagaaacattaaatg

SEQ ID NO: 17692 - DNA, 988 bp, Arabidopsis thaliana
cccagcagacagttttcacttcaaacaccacatgcactaataatactagacagatccgcgtccaacgcattattgcacatatatataattatctatgttttatgtaagaaaaactataccatgtccttttccaaaattaattatctttcacatcaccaaccatgcatacggctgagtacagtacaatacgaattcgttatatttacttcaacatacgtacacttttaactgttcattaattatccataaatcctctataaatttgatcaaaaaaaataaaaatgtttattaagcactttggacagtacccccatgtggtcataagtcgtaacagagcaatccatacgctttatacggtcaaaaaacaaagaacggtatccgttaaaacggacgggcttgatcgtcgttatccaacggtgattgtttgtttgtccttatttaacggttacctttaacgtcgtttccttcaggaatcttagccagagaagagaacctaatcccaccgacacacgtctatgaaaaaagtctaacaatatatatgtagtatttatcatcaaccatgtgcacatgttctgatttgattttgattttgttttttttctttctttcaaataatttatttcaaattccatagcgagatccagttgagaaaaaatgaaattaaagtcgaatcttactaaaccggatatgattttacaggagtgtgagaaaccataccgagaggaggaaactaggttactttacttgcggaacaggaaaccctatcgacgattgttggcgatgtgaccccaattggcacaagaaccgtaaacgcctagcggattgcggtatcggatttggaagaaacgcgatcggtggtcgtgatggacgattctacgtagtcactgacccaagagacgacaatccggttaaccctagaccggggactttacgtcacgccgtgatccaagacctgccactatggatcgtttcaaacgtgacatggtga

SEQ ID NO: 17693 - DNA, 576 bp, Arabidopsis thaliana
tcagaaaagtgaaagaaattggccaagcaaatttcattcgctggagttttatattaccagcatcagaaatggctcatcaaggtttgcttttggaggctgaacatgtcttactacggcatcaagcaaatctgccatattcttcgcatctacaggagggtctttggtataggtagaagatgcccacccttcttttgcagaggcataaagcaccggaaaatctagttgttcctctaagtaatggagaaagaagaaatgttgatttagtaatgatttgaaaattaattagaatacatatattaaactttgatatattaatcacctgtagcaccacaatttgcaaaaagatcaaacaccaaactctccacttcatcacacctctcttccgtgactgtaaataaacgaagcaagaaaaaaaaggatgagaaactaaacaaattaaacaagaccaacaagttttactaagaaagggagtgaatgcaatgcatacctgaaggtcgatctaccttgtttaagagaaggattgggcgtagtccatcttcaaggctttggcaagaacaaacttagtctgtgcaagag

SEQ ID NO: 17694 - DNA, 486 bp, Arabidopsis thaliana
  unsure (1)..(486): unsure at all n locations
nnnnnnnnnnnnnnnnnnnnnnctaaagaggagtggtaacaatgaagcgaccgcatctgacagtcagaatgcggcttcgtaagcgcggttacttaccaatacagaagctggagaaaatccgccctagcaggtcgtctgaagtaaattccccggtgatttcgcttaagttctgctgtgccagacgcaactcttccgccagcagttcacctgcccaggctcccaacagttgcgctttgccctgttgtagatgttccgctgcctgttccagcgcctgtaggtggcgacgacgcgccaggaagccgccttccatgttggtgtcaaagcccatgctctgtttgagatggttacgcagcacgtccacgccttcaccagtccttgccgagagacgaattaacgcgtgaccgttcacttcactcattcccagcgtttcgccggtgatatcggctttattgcgcaccacggtgatcggcagtttcgctggcagac

SEQ ID NO: 17695 - DNA, 607 bp, Arabidopsis thaliana
atgtaacaaagatatatgtacgaggtggtcttgaaggtattcagttcatcaagtttgagtatgtcaaggctgggaaaaaggttattggaccaatccatggtgcttctggtcgtggtttcacagagacggtaagaattgtgtttgggaaatatacaaaatttatattcttttattcgatttttttggggttataatctcataattttattacttcttatattgtttttacacagtttgagatcaacaatttggaaaaagaatatttgttatctattgagggttactacaacgcatctaccggtgtgatacaatgtcttcagttcataactaacaagaagacttatgatccaatcggatacaatgagggtgctaggtttacacttagcgctacgaggagcaagattattgggtttcatggatttgctgacaagtatctcaactctcttggagcatattttatcaagattccttcaatccaatcagcaatcgaaggtgctaaaaccacaggaaaaggttttgatgatggtggtgactacgacggcataagaaaagtgtacgttacaactgatggctctgcaattaggcatgtaaggttcgactatgacaa

SEQ ID NO: 17696 - DNA, 590 bp, Arabidopsis thaliana
actaaaattctttctcattttctaatcattttatacatacatacaactataaaattttgacttttcatatagtttgtaataggtaggatccaaatgatgactacatcaatattgacaacgacaaacacaatcatcaaaatccctttaaagtgcaacgcaacacaaacatgtccttcaacttatccaagcagattggaaccaatgatctcttccttggaaacttgtcctgactacttcagatggatccaacaagacctaaaagtatgggaagagacagggatcacaagggaaacactagagagagcaaaaccaaaggctcatttcaggctagtgataaagtcagggagattgtacgttcatcagtacgacaaggcttatgagtcaagagatgtgctcacaatctgggggatacttcaacttttaagaatgtatcctggtcaagtccctgatcttgagcttctcttcttctgtcatgatatccagctatttggaaacgagactttaggcaaccggaaccaaatgccacgtggcctcctccgcgttgtttcagtactgtggtcaccgtgaagctacggatcgttttcctgatt

SEQ ID NO: 17697 - DNA, 625 bp, Arabidopsis thaliana
ggaactttgtgttttttttatgataggttgcagaagatgcagatacctcttctagccctgtgttggaaagcaagattgacgaagctgaagaacattcttgttcatccttggttactgaccaagtctttgatcctataaagcaagccctcgagaacaaatcttcatctgctataagccgtgagagtattggaggttccacactgagaccattgcatttagagacccgggagaaggcaaatactacagacgaagatggagatatattgaaggatcaccagcaaaacgatagcttgcaagacattgtaactgtttcggaaccttttaccacagagtctctcttagaaatgtgtgatgaaccggacaaaggcagagatatcccatgtggtgagagaagcaaaaaatcacatcctgaagctgtggtgaagactgtagttaaagacgagctgatcataagcttgcttaccgaggcaagaaaaaaggcagagagcaagaatcctgggtcagtccttataaagaagagacagagacagtctaatagcagtgacaataaaggcgcgaacacaagttttatcagaaacatcaagcagaaagtacaaggtggagctggtgagattaatattgatca

SEQ ID NO: 17698 - DNA, 634 bp, Arabidopsis thaliana
tctaggatgatccccgtaattctttaccgcttctaagtgtaatagcatgagcgtactcctctgaatttgacattgattttctggaaggtcctgtaaatttgggtgctgcggtcgacccagtttggccttctatgtatctaatcttagatgtcagtgcttcaaccttgatattgatatcattgtaactgcagtcaaccttgttgtgaatttctgccatccttttggacaaatccattgctcctgttgcttgcccttgtagaatctgctgtaacatgttcttcaagtctgaatctggagttgttgaagctggttgttgttgctgctgacaaagggcttgggttgattctgctgctgtgaagggtaaacttggtcctgcgggtttgcaacgtttgtacttctgtaagacagattgggatggttctgcttgaagttgttgaaacctttgttgtaacctccttggttctgcacataactgacctcttctgactgcatagtctccccatcctgaacttggaacgtctcatcatcacccagaaaatgaatgtgcttctgttgcacaagcagtagcttgtccagtttgtcattcatggctttcatttccctgcggtgcttctcatcagaatcagagctggtg

SEQ ID NO: 17699 - DNA, 527 bp, Arabidopsis thaliana
ccaagcggttgaatgtgcttgcacgttggcctgtaaaagagcttgacgtttatgatacttgtcttctgagctccttacctgaggtttccaaatctggaactaagagaccccaagaatccgtttcgcttttcaagtgccttgaagcattcttgacggaggagcctcttggtcctgatgacatgtggtgagttgagggtcaaaccatttctcatatctattctcagctttataatacatgagaacttatattttgacaatcgtgctcatagtaatgtgatttgtttcgttgtcttgaaacttttggggctttttgtgcgtctgacttgctctttactaattcttcggattactctgatccttggtagctgacatgagtcaaaactgtattaggtattgtcctgggtgcaaagaacaccggcaagccattaaaaagttagatctctggaggttgccagagatcctggttatcatctgaagaggttttcgtatagcgggtttatgaagaacaagctggaggcatatgtgga

SEQ ID NO: 17700 - DNA, 872 bp, Arabidopsis thaliana columbia
ggaaaacattatttgtcgacacggtcttccgtatgagatcgtaacagacaacgggaaacagtttgtctcgctcatcacaaaacaaattcctcaccaagtggaacatacgtcttagtaactcgacgccgaggtaccctcaaggaaatttacaagccgaggcaacgaataaaaccatcatagctggaatcagaaaacgacttggcccgaagaaaggaaatagggcgaatgaactggagggggtgctctggtcatactgaactactcctcgaagacctacggggctatctccattctccttggcttatggagtcgaagcaatgactccaagtgaggcaggaactccaaccttgcgcatatgtatgatgacggacgattccagactcaataactggctattacacgatcacaacgacttttcgaggaacctcgagatcaagctctagtttggatccagaactatcagaacgcagcggtgaagtactacaactagaatgtccaagaacaccgtttcaatataggtgacctcatcctccgagaaattgatatatccctatttttactgattttatctatgttttaggtttaggattttaagtctttatgttatttctcgagtctttttagtgtattttcatgtattctatgcagtgggacagcgatagagatgaggagacattttggagcaaaagctaaggaaaaggaagctaaggacgattttggattcctgattcagagagagtgtcgatcgatgcccagcaaagtccatgacgctttcaagtttacagaagtagaaatttgcccaagaagacttctttatttgcattattagtctttggacgttttatagggtttatatatttttttagaggtca

SEQ ID NO: 17701 - DNA, 1076 bp, Arabidopsis thaliana
gatccttcttgagtttttctattttgaacttttttcagaatggtgagtattcagcaaaggtgtgtgctctatagtccagatgaattgttgggtggcaggtgcagcaatttgagttgaatcccccccttcttgaatcatactgtcctcagtattgggagtctgatgacttggtggagactcatcttcttggtggatggtgatagcatttgcagtagcatagtccttagggttctgaactactttccctggaagttgttgaggatgcttcagagcagaggttgatgcaaattgactctccacatacttgattttggaattcaaagcttcaaatttgacatttagatcgttgtaagaacaatcgatcttgttgtgtaattcagctatcttcttgtcacaagccatagcgccagtagcttgtccttgaatgatttgttgaatgaggttcttaatttcaggattttgagctgcttgggcttgttgtggttgttgagtgaaccctggaagtggattctgctgttggtagcctccattaaactgttgtttagggacataaccttggttgtactgaacaaatggcttagactgattctgttgtggtggatacacttgatcttgggggttagctacattagtgcttttgtaggagaggttttggttgggcttgtagttgttgtagcccttgttgaaccctccttggttgaatgtagcacagctcttcagtttgatcattccccctttcttgcatttggaagtgctcttcatcagtgaagtagtgtatctgcttctgctgagccaacaccagcttgtctagcttttcattcagagtcttgatatctttgctctgtttgtcctcagttcctccagttcctctcactgagcgatcatagtcttcattgtagcacccatcagattgttccagattttcgactaactcccaaccttctgctacatccttgttcaagaagtttccattggaggcagtgtcgagaagcattctgatctttggtaaagctcctctgtagagtgtgctcaataatgaagccttcttaaaaccgtgatgggggactaagtggtgt

SEQ ID NO: 17702 - DNA, 874 bp, Arabidopsis thaliana
tttgttaattttccgctttgtttactttcgaaacttgttagtcttttgctttttgttttttcttactctgttttgcattgtttgcttgataatgcatggttactaagatttagaatactcaaaatcatcttgttagcttagattaagcaattgtgtgtattcttggtgagttgattgattgcaaattgttgttcgataaacaattgaataaaatgctacatcaatcacttggcttagcacataattcgtatccttaagtatacgccaactttgcttagcaagtagagctatattgaactgctgcagatccctaaaactcagacctccgtgaattttcaattcggttaatttattccaagcaatccaatgtatctcctgcttctcttttgaacttgcccaccgaaagcgtctaatctaccttgtaactttattaataattcttttttcgaaggaggaaagaagacatacaataagtggggagagccatcactatagacttaatgagaactgctttcctaacaggagataagaatttaatgtaccaactctcgtgcttattcctccatatgacttcagggaggccaagatatttgccaaaacctcatatttttttcaatgcatgtgagagaggcaatactgtgcttagtctcagcgctaaaattcttaccaaagagtatggcagatttttggaagttgacatgatggtctgaggctgcaacataggtgctaagtatatgaaggtgtgtgcattcttcctcacttgcctgacagaagagaagcgaatcatcagcaaataacatgtgtgaaatgggagggcacctcgacttgcttaaaaccatgaatttgttgtgagtcatcgcatgagttaataaat

SEQ ID NO: 17703 - DNA, 584 bp, Arabidopsis thaliana
  unsure (1)..(584): unsure at all n locations
tctnnnnnnnnnnnnnnnnnnnnnnnctaaagcggaatccgctggttgatgatggcatcgatagccagtgcggttttacctgtctgacggtcaccgatgatcaattcacgctgaccacgaccgattgggatcatggagtcaacggctttataaccggtctgtaccggctgatctacggactgacgttcgataacgcccggagcgattgcttctacagcagagaagccgtcgtgatccagcggacctttaccgtcgattggtgcacccagagtgttaaccacacggcccagcaggccacggccaaccggaacttccaggatacggccagtacacttaactttcatgccttcggagaggtcagcgtacggacccataacaaccgcacctacagagtcgcgctcgaggttcagtgcgatacggtaacggttacccggcacggagatcatttcaccctgcatacaatcggccaggcgtgaatgcggatacaccgtcacttacagaaacaatagtaccttcgttgtgagcttactcactacattgaactgagcaatgcgctgcttgatcagttcgctgatttcggtgga

SEQ ID NO: 17704 - DNA, 552 bp, Arabidopsis thaliana columbia
tacaaattcattctccaccacaccttttgaaattgctttcctcatctccaaacactaaaagttacctcccatctctcttcatcttccaccaccgacactccaatctctctccttcaccacaaaacgccatctctctctcatccaaagatactcgaccttgacgtccaaagatactcgaccactgctacgcctccgcaatcgagttcaccgtctcattcaccattaagtagaataagtttagccgccgaaacctcaagaatcactcgatttcatccagtagactcgaccgcctcaccacttttagcaagttcaccatctccgttattcggtttcaaccactgtactcgacctctgcaccgtcgtcgagctctccgtcgagtaactgcagtctaactctatctgcaagtccgttcatcacctcgaagccgacgaaacctcaagaacacactcgaccatcaattcaaggtttcaggtctgttaattccggttcactgaagagatactcgatcctcggtgctttcgtcgagaaaaaccactcgatctcacaaggtt

SEQ ID NO: 17705 - DNA, 593 bp, Arabidopsis thaliana
tgttgggtagttgaattgagtcactgaactcccacatccggggaagagaaagttactgtttttcccggcgaagccaagaaaaagttactgtttattccgacgaaatttgaacctccggcgagatagcaactttagctatggctgggaataaagcaaacgaagaagtcccgaggaagcagcatggtccagggaaggagaagcgggtattaagagtttccccgcagagaaaacgctctgcgacaaaggcaacggaggaactgggttagaatctctaatttaccgtttgttttctttgggtgtatcagaattgtaaagcttgtttgattaaagggttagaactagtcggaatttagcatatctttaggatgaaaaattgagaagtagaattggaaatctctgtttccgccaaaaatatgattttgagttataatctggaaaatgtctgtgtacgtacactacttcggtttgcttaacaatatatcacgtttaattgcaggtagtccaagtgttgctccgattgaagatcttacagttgaagagttaccaccgaagactctttgctatagaccggtacccttccgagacaaagatga

SEQ ID NO: 17706 - DNA, 1033 bp, Arabidopsis thaliana
tagtaacgagatggctagacaaggaaaactccctcctctcattggacgtgatgatgaagttaaccgttgcatccaaatactatgcaggatgacaaaaagcaatcctgttatcattggtgaaccgggtgttgggaaaactgctattgtagaagggtaattagtcgtgtaattatatctctcaaacttatgattgtactaaaaaattatttttaaacattttcagcttggcccagcgaattgtaaaaggagatgtccctgaacttctcttgaaccataaggttaatgcagttttctttttgccttagtctatttaaagggccaaagcaagattgtaaattgttcattttgtaatgtattggttatatctctcgacagaggtgtactgctttgtttgtaccgaggttgtaacaataaataactaaggggttggggagaatggagtagcttttttattaacgacgaacggaaaagatggtaatttaacagaacggaaaaccgtaagtacagaacggagaaccgaaagtacaagtcggaaaaccagaaaatacagaacggaaaacgagaaagtaagagacaacaaagctaggcaattattctcccttaaattctcttggtaataactcttggtccgggcccagttccttttttagtttctcttccttagcgtagtcagcgtcgtagtgctgtcgaggctcgtgatgctcctcctttggtttttcctttgcgatcggtgctttcgccgagccgctttatcttcctctatttcgatgaaccggtttgcacgacgcagtgcgtccgctagagttgttgactagttaagcagaagatcttctctaaatcgtgactcgtgccagagcgcattgcgagagccgcgattgcagcatcatcaggggtagctgtgctagtgacgatttctttgaatcttccgatgaaacttcggagtgattccttagcggtttgggccattgtcacaagtcgacattagaggcacctttctccatgaaaactccgtagttttcagaaacttatggtg

SEQ ID NO: 17707 - DNA, 1014 bp, Arabidopsis thaliana
  unsure (1)..(1014): unsure at all n locations
cgcaacagagaccctcaagttaaactactcccagacttaatcaccattgacgagagctaacctaacaagcattacgaatcaacaagttaaagcaaaaacgctctctacaaccaatacctttgtacaaagccacaaatctctggaattaatggtttagacatttcatcgaacaccttttgggcgcggaaatgtttgggctcaaattctagttgatcaaaaagcaataggcattaagaacaactaatccaaaagagatctataaatcaaactcaaccacttagcatactaagaattctaaactactctaacccatcctcagaaacctattcactactcagacatcatagcaaaaagcataaacgttgaatggaatgaaagcatgataacaacaaagtaatagcaggatgattgagtgcagaatagagaagactctgaagctggctgtcgagtatgaaatcgagtgctagagatcgtggtactcggcttggtggtagagtgatcgagtgaaagtgatggagttactcgaccaggtggtcatgtggtgtgatcgagtgatggtcaggtggtggaggtgatgatacttgaccagggggtcgagtgatgtgatcgagtggttgtcgtgggggtactcgatcatggggtcgagtggtgacgtaaagtgatgaggtattctactcgactagggggtcgagtggtctgttgaggtcgtgaagcatctactcgaccagggggtcgagtggtttgatatgatcaagtccgcttcttccaattagctcgtcaacaactccaaatcacctgaaagcaacacaaatatgcaacatgcatgcaaaactatcctaaacatgcaaagtgatgacaaatgatgagaaatggtataaaacagtggtgatatgatgcaatagtgatacaaatggatcgcaaaacatgtaaaatgcacacttatcaanccccaaacttagtctttgcttgcctcaagaaacaattaagacaagctggaggtgaggtttgaagcga

SEQ ID NO: 17708 - DNA, 1035 bp, Arabidopsis thaliana columbia
tcgagtatgagggtatcgtcaatttgaggatcacactttttaagtgtaagtggtatgacccaaagatcgggagaggcactcgacgaagccatagtggcgttgtagacattctatctacgaggaaatacaataaatacgagtcatttattcttggtacgtaattattcttaagtccaaaatacgtttcttttttaattattaataatctatctttgatatatgtatacaggatctcaagcagatcaagtttgttatattccgtatccatatacgaagaaaccaaagaacatttggctcaatgttctaaaagtcaatccgaggggaaacatttctggagaatatgaaaacaatgatccaactcttttgcaaacaagaaaatgatgatgatgttttgctcactacaattgaagatcttgttcttgaaactccggtagccaacttaaacccaataatccttgattacgatgtcggggatgctgaaccagaagacgaattccgatgtaatttatcgtcctcggacgaagatgaagtagaagatgaagatgtataactgtgttaatatatgtataattatttgaataaatattagaatgaattttgtttcataaaatcattgaacttttttatgatatacaaatatttcttcacatctataattatatcaatttaaaagtgactattatgcgactaatgagcgactaagataagttttattgggcttctacacgttgaaatccaaacccattaaaatcggcgacaaaacgacgactattatgcgacaactgtttgatatgttgggctttaaaatttcggggcccaaacccattagtataggcgtctatattgcgactaaataccgacaagttttgatttgttgggctttgaaattttgaaacccaaacccagtataattggcgacaaaattacgactattcaacgatacttgtttgattagttgggcttcaaaattttgaggcccaaacccaaattagtatgcgactattatgcgactattatgcgacctcttttgtgttg

SEQ ID NO: 17709 - DNA, 540 bp, Arabidopsis thaliana columbia
gaattacatgacaagcaaactaatttccgctctattacttccacatgaaagaagaaaacacagtaatactagtccaagttttgagaagtgacggataaacaaaactagctctcctagcaatgctcgtaccgaaagtgacgacagcaaatgatcccaagggcaagacggaagacgcaatctgctgcactttagcattaggaaaaccactagccgcttgtgactccttataaaccctactacgcttcgagcctccatctgagttatacgccgctttgatcgccggaagtctcggacttcggtgatgaatcaccacaggagaaacaaacaatcggttcctagaaacggagctacccaacaattcgtaccggaacccactcttccattggcccaacccagaagaagccttcaaaattcacagagaaagaaaccgaatttagaagctacaagaattgggaaaaaaaaacaaaggatgaacagtagaattaccttggggagagagtggagattgagggagctggtggaagaagaagccattaagga

SEQ ID NO: 17710 - DNA, 1062 bp, Arabidopsis thaliana
ctgggatttatagatgtctccgataactttgctagattctagatattcacgagtctgtctctggtcgtgtccatataattcttgtctggatgtatatttcaggaggtcttgctatagtcacttggctcaaataaagcatatattgcctgaagcgattgagattaagagagtattgatacatgatgaaactacttgctgtatgaaaccggaccttcatgttacgctcaatgccgatgctgttgaatacaacgacaagtcgaaatcggaaagtaagaaaatcgctcttcggaaagtgtttcgggctagacttgcggattttgttaaagctcaccctcaggtataatgccctatctattttagtgattttggaagttgcattgtgattttattcaagtactaatggtgttattctctgttttagggtgatgaagttccagaggaaccgcttcctgagcccttcaatagaaggaaaccagttgaaaactcaaatgttgaagtcaagcgtgttagttctctcatggaagagatggcttctattccagcatctaaattgttttcatctcccatcacatcaacgccagtcaaaacaacttcaagtctggctaaaccaacttcgtctcagattaacattgctccaactccaaccaaaccaacttcaactcctgctaaacagactttgtctgagattaatatattgccaactccagtcaaaccagtgtcaactctggctaagtttccttcaacaccggcgattattgactcaacaccagtcattactgcaactccacctgaatttgcttcaactcctgcccggctgatgagtacttctctggcagctcgtccgctgaaaagaagcaacggtcatacaaatccagatgatatttctgctgacccaccgactaagctcgtgaggcgttccttgtctctgaactttgattcttatcctgaggatgagagaactatggatttcacagatgatatacccattgatcaagtaccagaagaagatgtatccagcgatgatgaaatactcagcatacttcctgataaacttcgacatgc

SEQ ID NO: 17711 - DNA, 529 bp, Arabidopsis thaliana
  unsure (1)..(529): unsure at all n locations
tnnnnnnnnnnnnnnnnnnnnnnnctaaagtgataaagacaacggctttaccgtgctggacgcctgccaggtgaacgatcgcagcgtggatgacgttatcgcccaagtgaaacagattgtgggtgatatgccggtttacctgacttttgatatcgactgcctggatcctgcttttgcaccaggcaccggtacgccagtgattggcggcctgacctccgatcgcgctattaaactggtacgcggcctgaaagatctcaacattgttgggatggacgtagtggaagtggctccggcatacgatcagtcggaaatcactgctctggcagcggcaacgctggcgctggaaatgctgtatattcaggcggcgaaaaagggcgagtaagcaccagatgcgatgcgcacgggtaaaacgtgccattaatgtcggatgcggcgtgaacgccttatccgacctacgttcggcacccgctagccggataagatgcgcccgatcgcatccggcaatgcgcacaaggtaacaaatgtgcca

SEQ ID NO: 17712 - DNA, 2249 bp, Arabidopsis thaliana
tgcggggcttattgcgtccctcataggcggttggtcagcagatctgagcactgcaccagattccagaggagaaaaacatgcaactatcatgcataccaagtctgttttgtttgctcaacagggttatgttactattctggtcaatcgattgaaacccatgtcagtctcacctctgttttccatggcgattgttgaagtctttgaggctatggtttgtgatccacacggagagactacccaatacactgtttttgtagaattgttacgacagatagctgccctacgacgtcgtttatttgcactctttgcacatcctgcagagagtgttagggaaaccattgctgttatcatgcgtacaatagctgaagaagatgcaattgctgcagagtcaatgcgtgatgctgctttgcgcgatggtgctttgttgagacatttattgaatgcattttcccttcctgccagtgagcggcgcgaggtaagtaggcagcttgtggcactctgggcagattcttaccaaccagctttggatctactgtctcgagttctgcctcctgggcttgttgcatatttgcatacacgtcccgatgatgttgtcgatgatacagatcaagaaggttcttcaacaaataggcggcagaaaagattacttcagcagagaagaggtcgcatagctaagggaatgggtgctcaagatattcctcttccccctggtaataatgttgaggctggcgatgcagcaaaacatatgagtgcaaatgctagtgtacccgataactttcaaaggcgggcagcagattcttcctctgaagcttccaatcctcaggcttctgcttttccaggtgttgacagtactattgcaggggtttcacaaaatggctatccagcatttgcttcagtcaccacaaatgcaaatgggcatgagcaacctgagactaatgcatccgatgtggttggttctgacccaaacttgtatggcatccagaattcagtgcttccagcacctgctcaagttattgtagaaagtacagctgtaggatccggaaagctacttctaaattggcgtgagttttggcgagcctttggccttgatcataatcgtgcagatctcatctggaatgagcgtacaaggcaagaattaatagaagctttgaaggctgaagtccacaacctagatgtcgagaaagagcgcacagaagatatttcccctggtgatgtcgaggccacaactggccaggagattatcccacgtatatcttggaactattctgaattctctgtcagttatcgtagcttatcaaaagaagtttgtgtgggccagtattacctacgcttattgcttgaaagtggcaacgctggcaaggcacaagatttccctctccgtgatccagttgcttttttcagggcactctatcatcgtttccagtgtgatgctgatatggggcttactattgatggtgctgttccagatgaattgggttcatcaggcgactggtgtgatatgagtaggcttgatggttttggtggagggggaggagcttctgttagggagctttgtgcaagagcaatggcgattgtctatgagcaacactacaacacaataggtccttttgaaggcactgcacatattacagcactgattgataggacgaatgatagagctttgaggcatcgcctactacttctcctaaaggtatcatttactattcaaaatattgctttcttgttctttttattctagttattcttgttcctccacttattctcagtaaattttgatgtatgcattacgtcgtcacatacaaaatcattttggagatattcttttcatgcttggttgcttactttttcctggtacatgcaggccctagttaaggtcttgttaaacgtcgaaggttgtgttgtggttggtggttgtgtcctagctgtagatctgctgactgttgttcatgaaaactcggagaggactcctattccattacagtccaatttaattgctgctactgcatttatggaaccacctaaggaatggatgtacatagacaaaggtggtgcagaagtgggacctgtagagaaggacgtcatcagaagtttatggtccaaaaaggatattgactggacgacaaagtgtcgggctttaggaatgtcagactggaagaaattgcgtgatatccgtgaacttagatgggcagtagctgttcgagttccagtcctcacacctagtcaggttaagctttatggtttattttatg

SEQ ID NO: 17713 - DNA, 572 bp, Arabidopsis thaliana
  unsure (1)..(572): unsure at all n locations
nnnnnnnnnnnnnnnnnnnnnnctaaagggaaaaatccttccagcatcaggatcggtcctttccagccgcgctcacgtaacgttattgcctcttccaggttaagcaatgcaaagccatcggtggccccgatcgcgctccagatacgctcaataccatgcccgtaagcgttcgcttttaccaccgaccagacgcgcgcgtgcgtcgcggcctggcggacaatggacagattctgttttaatgcctgcagatcgaggctggcctgtatcggacgggtcatctcgtttccttagctgtgtgcgccatgtaaatggcccggacgtgatggcgtaaatccacggctgtagcgcgctacgcttagatcctcatatgggatcgctggcgtgcgaccagagagcagatcgcttaacaactgaccggaaccgcaagccatcgtccagccgagcgtgccgtgaccggtattcagccacagatttttaaagcgtgtaccccgacaaccggcgtgcgtctggcgtcatcgggcgcagccagtccagaaagtcgcctgctcgacatgaccgcagcgtggatagag

SEQ ID NO: 17714 - DNA, 530 bp, Arabidopsis thaliana
tcaaaacgttccatctcaaattgtagacaaggcggagaagtttattgtggaggcggcgacaaaggagcgaagttggtgttgtttcccgaggcgttcatcggcggttatcctcgaggttttaggtttggtttagcggtgggagttcataacgaagaagggcgtgatgagtttcgtaactaccatgcttctgctattaaagtccctggtaaatgctattctgttgacttttttctcttattgtttttttggacaactttaatctttgataaacgtcaaaacaattgtgcttgattatctgaatatccatgtacaccacctgatctcggatcccaatctctgatccaatcatatcgggtctgaaaaattgagtatccaaatcagttttgtgtaaactaggtttggacactgatccgtagtcatatgccctatatctgatctttgcaacaattcactatgtatatgcgttattaccaaaccgaaagatacccgtttaaaactatctctacatatttagtatttacataattaca

SEQ ID NO: 17715 - DNA, 451 bp, Arabidopsis thaliana
cgactctacccgctgattctgcaaacagtaagcaatgtcgtgtgaagaactggaaattgtctggaacaatattaaagccgaagccagaacgctggcggactgtgagccaatgctggccagtttttaccacgcgacgctactcaagcacgaaaaccttggcagtgcactgagctacatgctggcgaacaagctgtcatcgccaattatgcctgctattgctatccgtgaagtggtggaagaagcctacgccgctgacccggaaatgatcgcctctgcggcctgtgatattcaggcggtgcgtacccgcgacccggcagtcgataaatactcaaccccgttgttatacctgaagggttttcatgccttgcaggcctatcgcatcggtcactggttgtggaatcaggggcgtcgcgcactggcaatctttctgcaaaaccaggtttctgtgacg

SEQ ID NO: 17716 - DNA, 531 bp, Arabidopsis thaliana
cttgtttgagattaacgaggtttaagataatagaacaactcttcttcctttacatttactccagctcatagtctattacttataggccttatattctttgtctaaaatcctactgtgtgttcaggcatttgcatctcagtttgtttattgtcggaacaagctcgggctagacgcggaaaagatcaatgtcaatggaggagccatagccattggacatcccttgggcgctacaggtatgcttcctctttgttcacatatcattaatttccttcctcatctaacaactacacattctcaggagccagatgcgttgcgacgctgctgcatgagatgaaacgacgtggtaaagactgtcgttttggcgtagtgtcaatgtgtataggtatgtaatatgttcactctcactcgtccttttgactcccactctctcgtacacactaacactctcactgtgactgggaaacgcacaggttcgggaatgggagcaccgctgtgtttgagagaggaggcggtgtggatgagctctgtgat

SEQ ID NO: 17717 - DNA, 635 bp, Arabidopsis thaliana columbia
agataaatactactccctttagcacatagccacatatattcaagtgcccattttgagcaaagtggattaacaagtgacaaattttcgacgaaccatatctatctgaaaagcaatgtacattgtaaaatacaatgtgacagagaaatgtaccttatatttaacggaaactgcatagcatgcaaaggcacgaattccctcctctgatttcaagaatgtcgcgaacaagttgtctagctgtggattccacctgcggactacttgtgcactcaaaatcgttgcataattccccaaaatcaatcttgtcaacaagcttgtctacttctgatttatcaatggatacttcagtcctcgtggaatcattcataactgaagcaagtaaagaaagacaggatagttgcatagtaagataagagtagagtgggagatatacaatcaatagggctccagaaaatcagaaggtatcattcaactcaaaacacctatgagatagaattgtaccacaattttgaacttaagggttaaaacatggaatcgtaatggaaactttttgtaacaagatcacataaaacgaagattccagaataatccaaagatcagagaagtggtgacaggtgaaatagagaagagtagtaatg

SEQ ID NO: 17718 - DNA, 525 bp, Arabidopsis thaliana
cctgaacttgtaggacgtaaaacagaggttcttgagcataccttagatggagaattgtagaactaggttggaagcgattcaaatcgctttttgtggtaccacgatgacgatcttgaatcgctaggccgcgtttgagactccttagccgcaacattgactgtgcaacaaggaatagtgaaagaaattgtgattttaacactgaaactggatcgtttgttaaaatgtttggggcgtttgctagttatacctggaggcgaccacgttgaggaaacctagaaactgcgttgcgtccaagaagtgattccaattcgcggtgacgttcgcgttccagatgcacaagcagatcggagtaagcttgccttcctcgaattcgcggagagcaagtaaccacctgaaaactgcttttctccagcgtcggcgttttaacgatcggcatatcgactgcaccgccattattgctggcggttagcttctgttcgttactcaatctccggataatatcagaaaccgaattgagagtccaga

SEQ ID NO: 17719 - DNA, 564 bp, Arabidopsis thaliana
ttcctgtaatatcctgtcagtcccagaaaacccctcagctgcttaatattaacaggaacatgccaattggccatagcttcagtttttgttgtctcagttgccacaccattggcacagataatgtgccctaaatactccacctgtggaactccaaaagagcacttctttctagttagcaaacatttgattctcgtctaacaacttcagaaccaaactcaaatgatgagcatgctcttcaactgttcgactatacaccagaatatcgtcaaagcaaaccaaaacaaaacgtcttaagtaaggagaaaatatcttgttcatttgtgactgaaatgtggctggtgcatttgtcaagccaaaaggcatgaccaaaaattcatagtgaccttccaaagtatgaaatgctgtcttcgctataacatcttcccgtatttgatgataacctgcttgcaaatcaatcttagagaaaattactgcaccatgtaactcatccaatagttgatctatgacagggatagggaacttgtcaagaatagtagccctgttaagagccctgtaatcacacaa

SEQ ID NO: 17720 - DNA, 586 bp, Arabidopsis thaliana
actcaatctccggataatatcagaaaccgaattgagagtcccagattcaatctccaccgtctgatcaggactcttggattcgttctctgattcagattctccgtcgatggatggagctaaaaggtgtatttcttgaacgctcgcttctgagctgatctctattgattggctatggatagccgagtttccgccgttggatcgatttagcctcgcctcccatatctgcacaagagaagaagctcctccaagattgtcggaaaagttgtttccttttctagtccgtggtttctccggcgatccaggacggcttttattgttctttttccgcttgtttccgatcaaagaatcaactctgttctccgagctctcgtcggagatggccggagagcagttttcacttgagctttcagattcttcttgaaaacaacatcgtcattgtgccgttggttgcgatctctaagaacagatccaaaactaggtcgtaacgaggccattttccttaagctaattgacctatttgtcaacgatcacaaacacaaagacccaatctttgatttggatcttaattcttatgaaatgaaataga

SEQ ID NO: 17721 - DNA, 847 bp, Arabidopsis thaliana
tgattcgatcgtggcccgttcgatgactcatccgcagcagtggtgggatgtccttctcatcttccactaccaatcagacaaatcttcttttttcatcttcactcatcctctaaacactaaccaagaattagtatcaatccctggattaacggtcgactgttatggctacattcgtggtttgattttatgttgttcagatagttctatttctgtcgctatatacaaccctactacgaggcagtctcttctcttaccaaagatctaaatgctcatagatgatttattcaatcacgttttcgtctttgggtacgatcctgtcaagaataaatacaaagtaatgtgcttgatgattactaaatcggaggagtttgagaatgcttgttttgttttcacattgagagatcccaagaagcaatggaggaacgtcaaatgcggtatccaacatcactatccgtggctacccgcagtttgcatcaacggggctatctattaccgagccactgaagatcatggttctacatttttcttggtgagttttgatgttaggtccgagaaatttgatcatgtgaatgctccgaaagagctgattgatagcaaggattcgactctgataaattaccaaggaaagctaggattcgtaagttatgagaggagcgtgggaatatgggttatggaggatcataataaacaaggatggtccaaggttgtagatagctccattggaagtggtgagattgttttcatcaataagatggttatctgtcatgacacggtatatgtagtcttttttttacctaagcgaaaagatcgtatgagacacattggaatcgaaggtactagtgcggag

SEQ ID NO: 17722 - DNA, 1236 bp, Arabidopsis thaliana
tgccaatcttctccttagacataagaattaactttttccaccactgttttattcctgatcggttcataaatacaacttatcggttcgatcctaagaagagatacaaacaaagcattgattgaaaaattaaatgattggagaaagaacataaatcatccaaagagttcagattctgcaataagaagtcttaacctttaaaccgaagaaacaaaagggtttcttcccaaagtcttcgtcttcgttttgcaatcaaatccgcaaccacactgtggcgactcgtaaaactcatcgatctcgaagttcgccgatgtgatcccaacggagaactcgagttcgtctccgttcctaataacctcaacgatgttgagccacaagaagagaactttcaccttcacgccggtaagcttcgtgatcttgttctccgatatgtatccagagattgtcgatttgtaatccaattggtaagagccttgaagagcgaaactgcacgatttgttgaaatacgcgtggaattgaccagtagatttatctaaatcatatgacaccactcgtttaggaagaatcccgacgggaaagttgtagctttggaggagagtgtacgccgtcggtatatcgtcatcgttagcggcggcgattaatggcgaaggaatgcaaaataaaaagaagaagaagattgaaatcggaagcagagtcatgattcgtccgatgtaacccaaatttgaatctttaggagtcgtagctaaatcactaatttaggttttaggtttattatcccgtttggatttcgttttccgtcactttctcggcgataaaataagagttttctgggagagacgtgagagacttttgtatagctggcacatctgatcagatcaagcgaccataaacacgacatcgttttaaccgaacaactcgacacgtgtcatcagtaagcccatgaggtgtctttttgtcattttgtttcaaaacaaacaaaattcttcacatgggctaattttgggcttaaaccaacagtagtgtttatttttatatattcataaatcataacagcttcgaggccgtgtttattttatatattataatcataacagctttaaggcccatgggctttaagaggaagagataggcctataacaattaaacccacaaccacactttgggctgtccacgaaatacttgctcgagaactcctccgaagcagcaccaacgaagaactcgacgtcgtcgccgtcacga

SEQ ID NO: 17723 - DNA, 806 bp, Arabidopsis thaliana
caaaagttaccactgcgattgcgagtttttcaatcattgtatacctggtctctggatctgtcatggacttgcttatgtagtaaatcggtttttgttctccgcggtcctcccagatcaagactctgctaactacatgatttgacaccgaaacgtacaaatagagcttttcatttgcttcgggtttggacaatacgggtggcgtggttaggtacgccttaagctgtccgaatatttcctcacacttctcatcccaaagaaaccctttgttttcctttaaaatttgataaaaggataaggatttatcctttgatcttgaaatgaaacggttcaaggctgcaatccggccggttaatcgatgtacttctttgaagtttcttggagacgacatgttgagaaaagcattaatttgatttggattggcttcaattcctctttttgtcacaatataaccaaggaattccccggatgggactccaaacgtgcagttcgccgggttagcttcatttggtattgattaagaatctcaaagcattcttctaagtgcttgacgtggtcttctttctattataacaatagatacccttatccgtgataaatgacatcttctcttgatcttcgggattcataattacttgattataaccagaaaaagagtccatgaaaattagtaagtcatttccagcggttgattcacaagacggtctatatgtggaagcgggaaactgtccttcgggtaagctttgttaaggtctgtgaaatcgatgcataccctgtcctttccattcttctttttgacacgacggtgt

SEQ ID NO: 17724 - DNA, 558 bp, Arabidopsis thaliana
aactcctgcaacagcttttaccactgtgacgcttcgctctgtccctacattttgatgcgcaacgctctggaatcttcactttgcaacaggtctctaccttgacggctctgtgtgagctctcacaatgctcatccttcttcacttccaagcctgataccaccaagctagcaggcttctcatgacaggtttgtgtcacttcttctttgtccacacaacaacccgtggaacaattcgtgctctctgtctcttcctctgaaaccagagtgatttctccggtttgtatttcctcgccgcagcaaccagacttgcaatgttcttctttctttatctccagacgacattgctccttcacttcaccttctgtgtttccacaacaaaccagcttggcatcacaacagaaaccagtttccatgtccaaaccttccttctccaccaacacagaatgcttcttctcatcgaagctttgtttcactgttccctcggtcacacaacatcccgaggagcaatcttgatcatctgtctcttcctccgaagcaagagttattccccggtttgttt

SEQ ID NO: 17725 - DNA, 768 bp, Arabidopsis thaliana
cttaatgggaagatcgacaatctgagctctcacttgaagaagctggatgtacaagtagctcaaactacacaatccatcaagagacaagagggctttcttcatggtaatcttgatgctaacccatggaatagcaccttgtgaggtgcaaatcctaatgcagcccgagtctgtttatactcctcctatcccttatccgaggaagtgtcgttctaagcaggagattcatgctgctaagtgcacagccataatggtgaagatcctccattctcttcctaaggatgcatctgagacatcttctgccccactcaacaagtatgtcaagcaacttgttgacattggtattagctcagatgaagccttattgctgatacgggacataagtgcaataatgctgcctaaggtcaggaaagagaaggcacagagagtggacattgctgagtacatctgcaccatcactcctgctcagaccactaagaagcttccagatccaagtagcttcattcttgattgctctatctccacaggcaggttaagccgctctttgtgtgatctgggatcaattatcaacctcatgcctaagtctgttgctgagagactaggcatgactaactacgggccgactcgcatcactctcctcttcgcggatcgttcaaatcgaatccctgaaggaatccttgaagatgttcctattaaggttggtactcttttaccttgctgattttgtggtctcgactatgagaaggacccaaggatctcttatcttggaag

SEQ ID NO: 17726 - DNA, 975 bp, Arabidopsis thaliana columbia
ggctcatcgaataatagatacaactacatatacttatggtgtgtatatctattgtctggattcaagatctacttaattactttcgatcaagcattaagattaatcaaatatgaagaattctacagataacctagcaaaaggggacgatctactaaaccatatgaatccctaatgagaaattctattcctaacaagcaaactactcagacatattgattgaaacaagcaacataaatgaatgagaaagcataaacacagtaaataagatgatagaatgaaaggatctcttcactgtattgagaactgaattaatctctaaagaacaagggatgaataacttatgtctctctgaaaatagggatgaaaagaacttgataaaaggaacttaggtctaaacaatgacctctaaaaatatttataaatcctataaaacgtccagggactaataatgcaaatagggaagtcttttggggcaaatttccacttttgtaaacttgaaagcgtattggacttttctgggccgaaactggtgtcgatctctgaatctgaaatctgaaatcatccttagctccctttccttagcttttgctccaaaatgtctcctcatctccattgttgtcccactgcatagaatacctgaaaagactctaaaaagactcgagaaataacaaaaagactcaaaatcctaaacctaaaacatagataaaatcaataaaaacagggttatatcaactcccccagacttagcttttgcttgccctcaagcaaatcacaaaaacagaacccgtggaagaggttttgaaaacaaaggaacttccaacattctctagcctattgtcatgatcatccaaactaagtccaaatgcttaacaagtttaatcaaatcctaaccaacatgtacttctctgcaagcttacacaactttctaaattccatacctaagttcacaactatatccacagggtttcacgttgg

SEQ ID NO: 17727 - DNA, 1135 bp, Arabidopsis thaliana
aaatactttttaaaaaagttgcgtctaaaacatgcctctacggtgtatttgtctcttatatatatatatatcataaaacgaatacaaaaaaataactaaaatatttatgccaaaagatggaatcgtttcatcctctttcactgttgaaatcgtctattagaggatggtgtattcgtgggagagttgtgaggacattcttagtttcgctggttccatcttcaaaggttatgggtttgattctcgccgacgaacatgtaagtattgactgttttgtaatgataattctaggtttgcatgttttagaattttgattagtatgtttgatccgtagggtatgactattgaagctactgttgggtataagatgtcggatcactataaagattttattaatgaaggagaatgggtaacgataacaaattttggagttgttgagaactcgggttctgtcagggcaacaactcatagcttcaaaattggattttctgttgacactgtcgtcaaattaacaagtccggtacacgctattcctcactatcgtctagcatccttctcttcgattattgatgatgaaatcgataaatctgttttagtcagtgagatctttatgaatttgtttgttccttattttatatcattcatcttagggttcattggttttgtcattttcaatatcaattatatatatttgactctgatttattttaattaatttatgtaattttttggagatttggtgggagcgatctatgatgttggagaattgattaacacaagacctaagcaaaacaacgtcgatgatttgacgctaacattcaacataagtgacaatgagtaagtttccttctttgatagtttaattcgaattacctaaattatactattctaataatatttttgatcttatgtttagaaaccgtgttctgaaatgtctagctactaagaaggaagctcataattatcgtcgatacagatggtggagttattgtcgttgttcttggttggtggaagattgaccgttattttgatggtccaaagaacgtacgtgtttgcaccgcaggcccgatatcaaccgtctttccggatcctgatattcccgagtctaacgagatccatgagatgtaagttttgatct

SEQ ID NO: 17728 - DNA, 1213 bp, Arabidopsis thaliana columbia
aaaatcactcgaccgcaactggatgatgctagaagcaggatgtggtcgagtaacaggtcgagtaacagacagaaaatgaaacaactatactcgactggacagtctgttgccagacactgggtgtggtcgagtaagttggtcgagtaattgcaaaaactaagaaacaagcaatgagaacgattaagcgataacgataaaacagagaaatcaaatagacaagaaattcctaaggatggggcaatcaaatggggtggtatcctaacctattcagatggttaacaagcacaatcaagctatccctagataacaggttcaacaacatatcaattcactcccgtgatagaaatcctcaagcaaagctagccgagactaattctcattaatagaatctaactatgcaggcaatatgaaccgactaataaaatcaataaacgctctaaacggccaatcccttgggatagagacgcatatctccggaactagtggatcaagcattccatcgaacaccttctaggtgcgggaatgcttgggatcgaattccagttgatcagaaagaaataagcagtaaacgcaactagtcctaaagggattcaatcaattctaaaacttaaccattctacagactacggattccacaactactctatcccatccctaagaattctaagtcactactcagacaccatgctcaaagacataaacgcaggtaaacgataatattgcataagtaaagagataaagagtagagaaacaagatgactaatgaaatcaaacgcggaatctcaataacttggaaaaatcgcgaactacaggttgcaaaagcaaaagcggcgtacgagagtaaaactgaaaataaaactgaagcaaaaacgcaatgtcgactagatgtctcaggacactaaaacatctatttataccaaacgaaataaaatgatagtagacgggccaataacctaatcgcccggcccatagagtgataatgggccgagatgggcttcgtgatccgatggaggtccaggccgcttccaaacactttgtcttctcctcttttcttccttgtgctcagcatgtctggttgagtgcggatttgattagactgtgaagacgtgatcgagtgtccggtcgagtgatggtgatggtggtgaatgatgatctcgaccagggggcgagtaacgtggtagagtgaatggtcgaatgtagtcaggtggtgtgg

SEQ ID NO: 17729 - DNA, 459 bp, Arabidopsis thaliana
cgtaggcaaatgacatgctgtgttcttcttcccaagcccgggtcttggcaactaatgtgtcaaccatggctttatacataacaaaagatccaatctttataagatgtgaatacatgagagaagtttgcaagtatatgatatatcttagttattctacacataccaggaatcttgctaaccagaatccgagctttctcagctctcttgagattcaagtgtgcacctctgcttgcgctgtacctgttctgatcctgctctcagaaaacaaaaccatgaaaaagctcaagatccaatttaaagttaatgtcttatgatgtatcatagtgagtgactgagagaaattatgcattacccgattgtagtcttctagccagctctcttcctcacaagctgacatccatttctcgactcggtccaatatatcttttctactaaatgcttcttccttagcctttgata

SEQ ID NO: 17730 - DNA, 1073 bp, Arabidopsis thaliana
tagaagcatcttcctttataactaaattcagttacttttttttttgttactaattttttttttctgtgtgtagatgatttgcgctgcgattgcggcgttaaacgaaccggatggttcgagcaagatggcaatttcgagatacatcgagagatgttacaccggtttaacttctgctcatgctgctttgttgactcaccatctcaagactttgaagaccagtggtgttctttctatggttaagaaatcttacaaaattgctggttcttctactcctcctgctagtgtagctgttgctgctgctgccgccgctcaaggtctcgatgttcccagatctgagattctccattcaagtaacaacgatcccatggcttctggctctgcttctcagcctctgaaacgaggtcgtggtcgtcctcctaagcctaaacctgaatctcaaccacaaccactacagcaacttccaccgaccaatcaagtccaggctaacggacagccaatctgggaacagcagcaagttcaatcacctgttccggttccgactccggttacagagtcggcgaagagaggacctggtcgtccaaggaagaacggttctgctgctcctgctactgcaccaatcgttcaagcttcggttatggctggaattatgaaacgtagaggtagaccaccgggtcgtcgagctgctgggagacagaggaagcccaaatccgtttcttctactgcctctgtgtatccttatgttgctaatggtgctagacgcagaggaaggcctaggagagttgttgaccctagcagtattgttagtgttgctccagtaggtggtgaaaatgtggcagcggttgcgccagggatgaagcgtggacgtggacgaccacctaagattggtggtgttatcagtaggcttattatgaagcctaagagaggacgaggacgtcctgtaggtagaccagaaaggtaaattttccatccccaattctgtattcgtgatctcgattttgcaatatctgacgtttactgtgcatgattgtcactgctcgccgtcaatttagattgataaagtttgatacttgtgt

SEQ ID NO: 17731 - DNA, 478 bp, Arabidopsis thaliana
ctgagtttttcctgagtacttcttaaacatttacatcaagtaaaatcatatccaagataacattaaatttgacaagagtaatcaaactatgatccaacttggaagtgtctaaagacaaaagactgaatcttgataacgtgggctgaaaacaaatcggttcttcgtttgtattatctctcctcaagcgctgcccactagcatgtttgtagactttgtggtcgcaatcgctggtcctcgtgtcaaagcttttatgcttaacggactgtttcccttctgtggacaccaaatttcataaacgaatcagtcaagtaaacaaacaaaagcaaagtctttaagccataagagagaacaagaaactaaccattctacaagtattggcctttaaatcgcagacagggtatgactgggggcagcagctagaaccatcatcgcaacaagtggctgactcatacggacaacatccccagctatagcattt

SEQ ID NO: 17732 - DNA, 1965 bp, Arabidopsis thaliana
ctctgtcaatcacatgaacaaacctaagctaaattcagatataagcctccttaccaaacacaaacataaataaaaaaactccagctttgtaacaagtaacaacatataataatcaaagtcaaacacatcatgagaattactaagaaccggtcctttcaaatctaaacaagtaaaaaatcaaacaagctgaaataaatcagaaaaactcacaatttaaaacttcaaaggtaataccttttcgagttgattaatgagagacatgagaatcgaattggtggtcttagttctctcgctctgcggaatcttcaatcctcgttccattgcatatagccgacctaatcaatcacaaaattccatgaatacacacaatcgcaggaggcgatcatctaggttagatatagataagaaaacgaaactcacagtaataagcaacaagtggttcatgcttctgcagctcatcggcacgttgcaggtaaggcagaagagccctggctggttcgtttgggttcgacatagattctctcttctctcgagctccgtagctttttctccgattgatttgttaagacaaaacagctcaagaaattttcctgtatttaacgcgcttctgattgcaaactagaaacgacgtcgcagaaaggacctctaaaatcccaaaccttcttggaaactttttaaacttttaaatcatgcccaaaagatctttcagtatattacaattttgcccaaatattatttcgtaattccaattagaaccttgactttcattcactaaaccggtcacttcacattagtcatgctaacaagtaccaaacaaatttgagtgaatgaatacagaaacagaaacatctaagtaacattctactctcattgtctttgtttctaagtgtttgtttcttaaacagcactattagcaactaacaaaagtgtaagtaagcattataactctctttcttttgatattgtcacggtgaagccatcactgggtcagcacgagagactggagatgcagcatcatcttttgtgttggctacaatgttcgaaggtgaagctatcttgttcagactgtctctcttggacttgcttccgttctggtttgagttcatagacaaacgcctcataggagtttcgttgagccctcctccattgactcgtgttcccaccggtttcttggcactaacgggtcttgcagggcttggtttagacccaaaggcggattcttgatctgtgtgtggctgttcttgctgcttcttctgttcctgttaatgaaaaggcaagattattttaaaagaagttagtttcaacaatcggtttaacacaggatgaaacaacttactttcagcctccgcttctcatcttctcgttcttgcctaagcatagtgtattcatctagcatggcgagtaaaggaactccatcgtactcaaaggacatactgttctcctcttcccatgcccgggttttagcaatcaacgtgtcaaccatagcttgcacaaacaaagtatgatatattcttcagtctcagtttaattctatgtgtagtaataactaagagagacttttggaagttcttaccagtaatcttgctgaccagaatccgagctttctcagctctcttgagattcaaatgcgcacctcggcttgcactatacctgttctgatcctgtttttccagaacaaaaacccaaaagaatcatcaattgaactctatgcttaataagtaatgtgtttattaacatagccaatgttagcatactcgattgtaatcttcgagccagctctcttcctcacaagctgacatccatttctctacacggtctaaaatttcttttctactaaaggcttcctccttggcctttgcgatctggctatccatgtcagccagtaactcagtaggttcagtattcccagcatcaatcaacgacatgatcctctcacgaacaacctctggttttatttctatgtga

SEQ ID NO: 17733 - DNA, 539 bp, Arabidopsis thaliana
gggggcgagacactctgcagattcaaaggagcagaccctcttcactaatggctcactggcaatgttgctcattactctctatccacggttgccttctggaccaaatgacaaccgttgtcacctccaggcaagtttaaatctcttatttattctttgcatcgctcttttttgtctaatatgtcaattctatagaagcaagagttgcttttctatagaaaatgctacccaacaccaatcactttgtcgattgtgatatcaaagacatgctaagcttggaagttggtttcaaacttttgttgtgctatttatgcttttgcaagaatacatctgacaaggtgaattttccttttttttaggcattcaggcatttatatgtccttgcaacagaggctcgctggctgcagaccattgatgttgattctggtctgcctgtctatgcccctctagaagtcacagtaaaagagacaaaactttattcagaaacaaaattttgcgagatacaccgtgcattctgccagagcgtgctattgtaagaaaag

SEQ ID NO: 17734 - DNA, 504 bp, Arabidopsis thaliana
gagagattgttgtctctacttatcttgcaggagtgactatcgatcgacacccacactagtgtcgatcgacacctgatacttcatagagcccatttgtttacacattactttcgaaggcgagattgcaatctgctaagcagcacaagtcccttgtcactccatccaagtcctgaactccgccaagtcaatctattgactctaaagaagcgcgtagtgggcggcaatcacccactggtaggattgttcttttctttttcttttatttttgaatttttgatttttttccagttctttgcgaatttgaatgccaccgaggaaagtaacgtttaagtctagggagacgtttattaactatgcttttatttttttttcttattatttttttgtttttatgttattgagtcattttcttttgggtgagttagctcaataaccaaattttgtaatgttattaaataagtacactataatcggcaaaatgtagtgagtacgcaactggagttt

SEQ ID NO: 17735 - DNA, 493 bp, Arabidopsis thaliana
ctgtaattcttccttatctatgtggcagtggaagatgaggatgatccaaccacaaagaacagcaacaacacagatgattttgctatagagcctcgtgaagggattatatttgaatccgaggatgcagctaagatgttctatgatgattactctagacgattagggtttgtaatgcgtgtaatgtcttgccgaagatccgagaaagacggaagaattcttgcccggagattcggttgtaacaaagaaggtcattgtgttagtattcgtggtaagtttggatcagttaggaaacctagaccgagtacaagagaaggttgcaaagctatgattcatgttaagtatgaccggtctggcaaatgggtcattccaaattcgtcaaagaacataaccatccactcgttgtttccctcgcgaggctcgccatacctggtgagtcttaacttacttacttatgccctgtgcagtgtacattacgtatttgagcacaaatgta

SEQ ID NO: 17736 - DNA, 458 bp, Arabidopsis thaliana columbia
ttgtagaagtaatttacatcatgcttctctttgctttctgcatgatgaaaaaaagttagtaaatgctaaataacagccaataaccgaaagtgcgacctgtaacttacgaggatgaagtgatcttgcagcctgaccaagatttgcagatccagaagcagctgtccaatcattgaagaagctacaatctgcagacatgagatatctagcagctgcttctttaggttgaacgatagctacacaatcaaagcttaagactccacatgtaacacaagagaaaagcctttgatccgaaagcgcaacagctgcatcattcttcctcctttcagcatcagacagagtttcttgagtgtccttctccgtgcttgctaggtgatttctgctcctttcacataaagatgtaaatttttctttcactgaaactgtatcctttaaaccgttactgagatcaccacaacact

SEQ ID NO: 17737 - DNA, 467 bp, Arabidopsis thaliana columbia
tgagactgatttagctaagccctcttagcttatacaaaatttactaactgtaagagagatttagtgtctgtatattggaaaatgcataacattcagtggcttcttttgatcctgcacaaacaaaaatccaaagtaaaacaacgtttctcagtctcgaaattcggttttatattttggtctaacacaacaaagaaccattctcaccttcctaaccgagagagctcaggttcagccaacaacatatcctgcagcggttttgcatccatgtacctttcactacttctgcagataataaatgttatttgaatcagacatttcatgaaacaagacgattttgtttagggatgaggataaaatagagagaagtctactcgcagatgttatcgatcttgagttgcttatgatgaagagcgaaatcatgaccgacataagtcacaaccaaactaccagcatcagggtgaggcaag

SEQ ID NO: 17738 - DNA, 676 bp, Arabidopsis thaliana
tgtcgaccaaaattgagatctgtcttgcaaaagccgatataatcacatgggcctccctcgaacacggcaaagggccagcggttttgccaaagcctaatgtctcatcaggttttctaccttttccttcttcagtgtcatctgatgagcttaaacaacagtctcttgtaatgtaaatcttatgttgtatgtatgatgatgcagaggtttcacagaggccagcttatccatcttctaagaaagttaaggactgggacaagctggaagctgaagtgaagaagcaggtccgtctcttaccatgtacttaaaacctcgaccaaacggttttgttttttctcttcttttgtttgattgtggttgacttgcaggaaaaagatgagaagctggaaggagacgcagctttgaacaaattcttccgggagatataccagaatgcggatgaggatatgaggcgagcgatgagcaaatcatttgtgagtatctcttttcatggagtactgtaaaagttttgtccttttgatcgactcatttatggttttcgggttttgaacaatgagcaggtggaatcgaatgggacagtgctgtcaacaaactggcaagaggttgggactaagacaatcgagagtaccgtccgggatgcatggagctcagaatgggagactgactgatatgatatgat

SEQ ID NO: 17739 - DNA, 984 bp, Arabidopsis thaliana
ccagatggaaggtatgtttatcataaaatgctttaaagtgtatgattttttgccttcagccaactattaactatgactctgttttcgttttttcaggggacgaatcatgcgtctccatggtcggctgctggatttgctactcgaatggttggtgggacttcaaagttgataaaactaggccaagaaagtgtattaactgcggaaaaattgacactttcaaatcccttgaagaagttatccggcgaagattctcgatggttgttaacgacgtgtttgttgagatgtcatactcggctgatgacgttttggtgaggctcaatggtcaggaaacagctccgacggaaatccaagatgattggtcttttataatgttcaagtctcttctaaggtctgacagttctgtgaatctttttgtcacctttaagagagtggtagacaataagcttgagttcctagatccccttgaaattgttgttccgccttacaacagaggcttcccactgatacaaggtgataacactgtgaaggagttgcaaccctttatttttggtgttcctgataaaacgagcgtacaccatgaaaatgggtttgacgtacaccaggaacttgaacattctgttcgagaaccaaatccagtttcagacatcagtagcccaactggagatgtccgagacctggtcatttgggatggtactgttgataactcactaatagctcacattgaagaaattgaagctcagttaaaagatgaaaatccacaaaaagacgttgttgatgatagtgaaagcaatgatgattttaatgagttcagtgaaaatgtcgttgtggaatctatcaatctggatcagaagaggatgaagatgatgatgtctggactgagaaagttttagacgagaatgtggcgttggatgatgatttcacagatccccctctaaggaaggtacaaaactatagttaccttcttcgtgaaatggatgattttgt

SEQ ID NO: 17740 - DNA, 544 bp, Arabidopsis thaliana columbia
tttgcttgagggcaagcaaaagctaagtctggggagttgatatatctcgattttcactgcttttagttgtgatataggtatggtgtttacagtctttttgttatttctagagtgttctatagacttattctggtctttaaatatttgggatacatttggagattatggatcattttagagcaaaacagacaacttatgctgtagaagcaatctgcacaccaaaaccgcgtagatgtcgatcgacaccacccctggtgtggagcgacaccaatatctaacgggaattcaatctcgccacttactgaagttttgaagatttccaaattcgccgtagaatgtttccttattttcaaagaagttcttgcatgtttttaggaacttatatatagatttttaagttcattgtttagacctaaccctgaataacttttgataacttttctttaccctttattttactttgttcttgagagccaaaaccctgtggagctccttctagagaagatctttctaaactctattctcttattgtttcttatattga

SEQ ID NO: 17741 - DNA, 1037 bp, Arabidopsis thaliana
cgtaaatttcgtttcatcaataccttctgcttaatattaataatattgattatgaaatattattaactaatgtaaaaaaacgcaactatataatacgtaactgttttcggaaacaaaagagtttacgtcatcaaacagaaaatctttaactcaatttttcttttggccccgatgttttttatactagccatttcctaggaacgacatttccactattgcgtactgttttgtttttcttttgacttcaacgtatatttgcatgtgccaatagaatttatatataaataacatttcatatgatacaaaaaaaaagaagataatatctactcgatcgtttctatggtctaaattggtttgtttataataggaacaatttgtatcaccgaaccacagtggcctcatgtttggtgcaaggagtttacgcaaaggaaagagacagggaaaacaaccgaaatggttccgagtcattagccacaccttggtggaagagtttcaacttcactttagatgaaagtgaaatcctatatgacgcatttgacggctccatatacggtgctgtcttccaaaacatgatcaattatgagaatacccgaactcgatagtagtaccctccgcgttacgtgattgcgttacggggaactgtcccaagtgatgtgagtgattggatacataacagccgtattgtactcgagaaactccatggcgggggtaagcatatgcatgtcattagaaaaatctattctttggtggccaaacacggaaacacagctgtctggatcgctggacactctttaggagctggcctggcactactcgcgggaaaggacatggccatgtctggactccctgttgaggcttacatcttcaacccacctatctccttgattcctctagagcagtgcggttacaatcacgaacttaattttgtgtatcgactcaccaggatctcttcaaagctgcatagccaaagtcgtagaccttgatgaggtatatataaacttttctttttgccaatggaattaaaatgacatatcttt

SEQ ID NO: 17742 - DNA, 634 bp, Arabidopsis thaliana
taaagagaagagatgtgtttggtccaatattgaggacaccatctaatataaagccagtaggacacaagtgggtctttgtgaggaagagaaatgagaaaaacgaaatcgtgaggcataaggcacggcttgtggcacaaggattctcacaaagaccgggagtagattatgaagagacatactcccctgtggtggatgcaacggcttttagatatctaataagtctggcaataagagagaaccttgacttgcggttaatggatgttgtaaccgcatatttatatggtccactggataataaaatatttatgagattaccagagggtattgagctcaaaggaaaagataagaatgggtctcgagaccaatactgcatatggctgaacaaatcgctttatggactgaaacaaagtgagcgcatgttgtacaataggttaagtgagtacttagtcaaagaggactatagaaatgaccccatcagtccatgcatcttcatcaagaagtttgctagcaaaggatttgtgataatagcagtatatgtggatgatttgaacatcctgggaacctctggggaaatcgccaaacagtcgaatatctaaagaaagaattcgaaatgaaagacctaggcaagacaaag

SEQ ID NO: 17743 - DNA, 861 bp, Arabidopsis thaliana
gctccgcccttcacttcgccggaagcttcaccgcctcaccgtcgcctccttaccactcgaccgcaactcgacctctccgtgcttcatcttcatcttcatttactcgacttcgccggagcttctcgccgttccagcttcgcatactctctcaccgtctctcgtttcactcgaccacttcacactttgcctcaacatcttcgccggagtttctcgccattgtccgtgcttctgtcatctccgttcactcgaccaccggaccggcttcaccatctctcaactatccaccattcactcgacctcgccattcactgcgcctccattcgtctctttactcgactgctcctcaaaccgccaccgtcttctctaaattcgccgtttactcgaccacactgttacgtctctcattcgtgtacagtcgaccgctatacccgaagccacaatatcactgtactcgaccgtttcactcgaccgcgtacttgactggtttagtgtgtgtgtttatttgaactaacatattgatatttggttttgagttacattctttttcagggaatcaatatgagtaactacagtggcgaatcctccatggatgcggattacaacgtcgatgaagctgaatcttggtcaactagaccagagagagagcaacaggcttatgagagcttcagagccgagacccaacgctcagtagctcgacgcaatgaaaggagagctgagattgctagaggaaagatagcgatgaccagcagatatgagttgatcgacgaagatattgacgtcgagtatgagcctgagtcatggcacagagaaacaaaactgttgaataagcatgatgaagttacagtggaggagtcatcagac

SEQ ID NO: 17744 - DNA, 790 bp, Arabidopsis thaliana
tatctataatgtgtagattgtaaatctcataataacatttggtttctcatatctcggtcaaaccacgaaatcttcaggcataactcagccgtgacgtattggtattccaccgccaaactgaaaatttgaatatttgagggtttagttattcgaatcaattcgaactcgtttgaattattttgaatattaactattggcgtgttcgtgtgattatggatccagtcattattggcggttccccataaaaatagtttttgtaatctcgataatgatataataaagaatattaatatgtctataacccagccgcaaagctcttataactcagccacttctaaatttattcaccaatacacgacgccgtcgtttgattagtgctttttagcatacacgactatatagatttagtgctttagtgccctactaattgaagacaagatgatggcacagagatctcttttccacggcgactctagtgttgatgagaaaacggtttcagaaggaaatgaggtatttatctcgaccatctgaatagtacaaatcgttagctatctaatgtggtgtatatcatggttgtgttaatgtaggagctcgatcgtatggaaataaggataagaatgaggtacgacgaaaacaggaggcgcgataagggtgttccgatcgagtgtgattgcaatgctaaaattgccttaacgttagttaatctacgataagtccgccttaacgttagaataactcagccatcacacacgaatatctcaaagaaacatcaatttaatctacgataagt

SEQ ID NO: 17745 - DNA, 525 bp, Arabidopsis thaliana columbia
gaagtctttgatttgactcgagatgacgacgacgttgataatgttatgagtttctctgttatggtgccttcgttacaaagatttatctattgtggaggatctggtgctgagcttgtgatgaatacgccttctttgaagtacttaaagctttcaggttgtggttacgagtgtatgattgggaatttgcctgagattgtggaagcacatgttgaggttgcatgttccactgatgatatccttacatctcttgcatcagtcaaacgcctcttgctatgtttacccacagaggtaagaattatgtttgtgattaaatcaaacttgaagtctttacgcttatttgttttttttttgtactgcagcctgagttacctactggtaccatcttccaccagcttgaacacttggagttttgttcttgttgcacagaatgggatatacttatgtttatgctcaaacattccccgaaacttcgatctctcaagcttaacgaggtaagtgtgccttttgaaactatgaaaactttgc

SEQ ID NO: 17746 - DNA, 333 bp, Arabidopsis thaliana columbia
gatatgtgctctaaagctatccgacacagtgttaaatcctcgcttttttccttccccgaactgaaataaattagcgacacagcttgtggctgatttatcatcaatatatatgtattttttcccgatttcccttttgaggttgatgtgcagttaacgagtttcactgattacggattacgtgcgctgatctacatggcgtcattgccagaagggcggatgaccagtatctctgaagtgactgacgtctacggcgtctcccgtaatcatatggtcatcataatcaatcaacttagtcgtgccggctacgtgactgctgttcgtggaaaaaatcgc

SEQ ID NO: 17747 - DNA, 603 bp, Arabidopsis thaliana columbia
gaataagctttgacccctcccccaaccggtgggttttgtttttcctgaggtcggctcaccagcatttgaggtggttgcaacgtcgataagccattgttagtgcaagatgacggaaactgatgaccttgagagagagtaggcagctgttgcaactgctggctttgcaattgatggtgtggtaactgagactgcggcgaaagaaattgctgctgctgttgctgttgtaatctctgtaacagctgaaactgtatatgcggctgttccaagagactctgctggaatatctgttgggcctgtgcctggtgagctttctgctgcaaaagtgtttgctgattctgcccgttgagaccaggaggctgctgctgttctacttgtcgtgaaaactgtgtctcttgcggcggtgcggacatcagattggatgaagacttgctggtttcaattacactactctggctagtgctagcacctaaatggtgatgtgcttgttgaagttgcttagactgttgttgttgctgttgaaagctttgattaagggagctggacggaggcgtgatgacactgcttgccattgatcccgaaactagttgtggttcaaatgatgtg

SEQ ID NO: 17748 - DNA, 514 bp, Arabidopsis thaliana columbia
tgattatgttttggctgaaggagacgtagacagaattctttgggaggagagttcgcaaacgggagagctcaggtgaccgaacaagggaccttagggttttggagactcgacagaggtttaggtaatagcttcttgggacacgttgcaagcagtccaaaacgatttcgtcgggcaatgaagtaaacgatggcaaggacggatcgttatcttctagcggtggcttaactgatttggaggaagattgtttcttaaacttcttcgaagaaggagacatatcgttttggcttcagattttattattaggagaaccaaacatattaacataagaatactaagagtttttatttatataggattataatttagagtattgacttggatttagataaaatgatacttttttttgtattgactttttttgtccttttctcagcaatttaaaatttcttttttttccatttcacttttttaggaaaaatatcttaaatacgaaggaataaaaaatatatatata

SEQ ID NO: 17749 - DNA, 401 bp, Arabidopsis thaliana columbia
agctttcaggattcatctccaacatgcctttcttctcgtggtgaacggtgccggtatcataggccgtcgttgtagaacctaaagaagaagtcttgttggagtcgtgatgacccggcagcttctctttaatcttctccgttattcccttcttcttcctcctccttccacctagtccatcatcctccttcatgcatgcagatcgtcagaaaaattataaagctatatgtatttgcagcactttccagatttgatttagtaattctgagtatatggtataccttgcatataattcaaattactgacaagtacttatcatttgtacgcacgaaatggtttataagaaatatgtagagttaaatctaacatatggtctcgtgatcttatctagttaggtgaagtca

SEQ ID NO: 17750 - DNA, 585 bp, Arabidopsis thaliana
atatcttataaatgaagaaagttttggatttacattttgattaccaaaatactacttaaaactttaccaaaaaaagatttaaaaaaacaaggagataaagaaataattcaaaagggagagcacaatcagataagccaaagccttataaggtttctgaacttcttccggtgccgcctcgcattgatggtgtcaatgatctcatctcacggtcaatggtcttaaacacccaagcagcagggattgattgctggttgtgaatgaagttgtttctctgcttccaaatagcatagattaccgcttgagcgacaagtttcctgagcgttgaaggagaggtgctatttctcctttgggtctaggtgatcagatcattccaactttggaaaactctcgaaggcagcctgagcctttgaagaacggaggtccatagaataacattgtactcacaagacaacaacatatgatctctagtttcagctgaaacttggcagagacaacaaacaggagaaaccaacataccccaagaaaccattcttgatctagttggcagcctatccagatgtgaacccacatgttaaaacatttttg

SEQ ID NO: 17751 - DNA, 1232 bp, Arabidopsis thaliana
caacaagaaaacccactccagattcctgttcaaccaaaacttactctacttctcacattatcattgggcagattcatcgtagcaggaatgatctgccaaaaagtgctgtcattatactgtgtatttatatactgcctcagattattatatattggtagattgcaaatagttgttgccgcgagcccatgcctttggatgtttgtcttcatcggccatccaatttcatctgaataaaaaaacaagagtgaaagctgcgacggcagcggaatctctgtttcgccggccatcgggaagagacgcttttatatttgggctttaaaagaaaatggcccaaacatgccaacctatattgcgtttactatgttacaacttgagcccataatatcaattacatcaagcccttcttgctccatggatctttaatgggtccaatctcactttctaacattacaacaagttcttttgctgcttgcttgtcttgagattgtatataactgtgaaccatgttttgttctgtgctcgtccatgcttgccctttggcaaattaggaatcggaggcaaaacaaaaaaaaaactattcttaagtgacaattttgagagtgtggtcgatatacagtgataactcctaagcttagaatacaaaaacttatctgatcatacacactatatgattcgattaatacaaaagatttttgattatcaaagtaacctcatcatcattcatggatctgctgccttggcgaaacgtcccctgattcttgtcctgctttctgcacgaaccttgcgtgattcatacctgatgtgtttctcgtacctgtttcatcaacacatgattcaaatcccaatcctattggtggtgtctcactttttaaattagcttgtttaccttcgagacttcttcttttctttgtagcgagagagagcagagttcctctcaagactgttgatctcatgtgtcatcgaccttgtactagtgataaccggaaccatcacagtctcttcctcacatcggtttaagcagccggaaacgggaaccatcaccgatgactctcggtctacattctcaggtttctcatctgactccgacaagttctttagcagagagcaatatggaaagtcctcatgatcttgctgatcgaaccatttcagtccactctccttcatattgacaagagagatttataagctggaaaatcatttgacaagcacaagaaaacacaaccaatagcagt

SEQ ID NO: 17752 - DNA, 669 bp, Arabidopsis thaliana
agcctcatatcgtaagcccagcatttcgattcccactctgtgaaaatcttcttaatcccatctaagtcgcctagtttactcatcgcttgtaacatgactagatagctcaagttgttgacctcaggacgagccttcttcagcgattcccaaaccctataaacctcaggacctttcgagattccagcgtacaaactcatgagaaaatggtgggaatcacggttgttaggattcattttctcctccatagatttcagtgcagaatccgccttctcgtaaagaccagctttagtgtagattgcagccagattagagaaagtattccaagtggttttagcttcactgtctttccccatctcatctataatcttctctaatccatctaagtcattcaaacttccacagctctgcatccatatagagtaagtgacaccacaaggagatatacccctctgtttcatcgcatcaaccaacacaggtaccttctccggttgactcaaccgcatgtacatagacatcatgttattaaacggtaacgaattgttaacaaagttaagctcatccattatctcaaaatgagcctttgctttctcttcctcaagtgcaacacagtaacagttcatgagcgcccataagtcgactgatgattctttgcagaaggatctaagttgt

SEQ ID NO: 17753 - DNA, 577 bp, Arabidopsis thaliana
caccaacacatcttctattgagaagattctttttcaatgtctggtatagggaagttttactagcttgttccatactcaagtaattcccacctgaatggctgaaagacatatagcacttccgggcaactcttgaacaaaagagcgacacaaacgcaaaccgctgctatcgctaccatcgaaagcattgctggcctgtagcaacagacttgtggtgcgttgtgacaaacacacgtttgtgatcacagagcttacattggtttatctgtgttatctccaagcttgaagaatccattggactcctcttttcttgtttgtgctcaatgttgaaagactcaggaatgttgaccaccacgtgttctttggcgattggtttcgactgagtttcgttgaccagatgaatatacgagaagtgacctcgtaaacgtgcatagtcttctggtgtgaatccggtattgtccgggaattttccaggcttgaataccagtctgaccaaacaagaagattttttatcagcaaaaacagattttgagtttatataagtcaaagagggaaacaaattcaaatttccattccagga

SEQ ID NO: 17754 - DNA, 606 bp, Arabidopsis thaliana columbia
gtaacggccgccagtgtgcattacgaagcaaacgctaatcgctatcccgagaatcgcgggttcagagatatagatgccgtttttcttttgctctttgaatgaaactaccgccggagaggggcattttcgaagactaagttgttgccggaaaaagccgagttcccgaatcttttcagagaatttgggattgatccggtgagattgttgttggaaaagttaagtctgcgtagaccggggagattaagatccggaatctcaccggagaatgagtttttagctaggttaagcgagacgagtccggtaagattagcaaatcccgcgggaatactaccgttaaaccggttactgtacagatcaagaacagtgagattcgtccacgtggcgtaatcggatggtaatgggccagagaatctgttgttcccgagactaattgctttgagtttcttaagctgcaagaaatcaattgggaacggccctcgtaggccgttggatcgaagactgaggatctgaagctccgatagacggctgatagtccaggtgggatactcctagaagacttgctcgggcaagtgaagggcagtgacacgtgtgcgtctatgcgcatgt

SEQ ID NO: 17755 - DNA, 531 bp, Arabidopsis thaliana columbia
agaagagaaggtgatatcttcttctctcaggcggcgcggtcttcgcggttgacgtcatcgagaatgacgacgagagaggcgatgaaggcataatcgacgtttggataaacagtcaccgagaagttgtcttttcccaagaatacgctctgcaccgtgtgcttcctgtgcatctgtccatcattcaccataccattttccttttctattagtaaaccgttttatttctcaaatcttcccaatttcatcaaacatacaatatatgggctaagataaatgtatcttttgatctaaaccgaaatcaaaaactacctaaacctgtccatcaaaaccggattctaaagcagtagaccaaaaccagattaaaacattgctaattaatgtgtactgtgtagagacatgtgagatgcattgataaatgagatggatgggccttaatgaaggaaagagagttagagatagtatacttgggcaacaatggcgtcagattcgccggcgtaaacaacacaagaacgctcgagccaactcctttga

SEQ ID NO: 17756 - DNA, 2341 bp, Arabidopsis thaliana
tccccttaatacaatttatctttataatcgtttttttatatattttattatcggatgactcagtaagtctcggtaaaaacataccgaaatgctaccgaatatactactttcgatctaaatagaattgtaccgtcacactatctgatcttcatagtcgtttcctcgtccgccttggatgtccactcacatctcgttggaattaacgacagaagaagaaaaagcatagctcaagtgtaacaagaaaatatgtgtttattgtttggtttttccatcttcgttactgacttattgtattggttttacattcaaaaaaaaaaaaaaaaaatggttatttttgtgtaacacttcctctctctatatacaatgttgtcttttggattaatccccacaccatataaggtttctcgtgggttgtctaattcggttgagtttggttgatcagactgcacccgtttctcattctatcttatggcgatatatacgattatggtcatatgacgtaatttggatattataaatagatgcatgatgtgacatatattgctgatgctagtacgattatcaagtatgaattacaaatattctagctaatataacttatcaatagttgtattgatatggttattaatattgttaaaatttcaactaaatgaaaaataaaaagacgtaggttagattaattatgttttattggtgagaaacaaatacgtgcttagtgaaatggacgttgacttttgtcggcaatattcatatttcaaccatttttctcccaacaagacaatgagagtttctagaggttgtgagtggccaagttatttgccgttaaatcaaccatccgacaaagctccggatacaaactcttcctaatggttgcatacacctcaccattccatttcttagcggccaaactttctccaaggctcactgtagcctccaccacaccttccgcactatcatgcgccgctgagtccacgatcccgagagccaccgcttcttctcctttgagcttcttcccgctcagtaacagctcccttctcgcgatacctgacccaaccttagccacgaccaacgccgagaagtagtccggcaccggtagcccgatgtccacctcgctcatatatagaaccccacggtctttcctcatgaaaacgtagtcgtggctcagcgcaaacatcagccccgaggctgccgcgtggccgttcaaggcggcgatcgtcggcattggaagatcgaggagggcggctaacaccggtttaaaggatttgaccatttggtgcatccgttttatagcaccgtgtccagcggattgagcccacgcgaggtcaaagccattggagaagaactttccgtgaccggtagtgatgaggacggatccttttgtggattgagactttgcttgttcaagaagcgagagaacagaggcgatcgtgtcggggtggaatctgtgctcgtcttcgccggttagggttaggagaaagagatcgccgcgcttctctaacgtacacatggtgcgtacgttaaggacttactgatttaggatggtacaagaataaggaaagagttagtagaaaactgtgatatagaagtgagtgttgagtaattaatagaagggaacccaactgtatatttattagacgtgctttgccaccgaagtctttaaattgggtaatcttcccaaccattttggtgtcaatgttattaaatgcagacgagacaaatgtgtatgaatgaatgtgtgactgtcttgctgaaaatgataattgtaactgtttgtccttggacgtaattaccattttgttctttcgcagctattggctaaatcaattttggtttccttgtctccacttgattaatattaacaacctttttttagtgcttacacacttacaactgttcgtatgattttttagatatcttgtcatggcttttgaatctatgaactttatttttgaagcatgattgattgagatctctgctttagcattactcatggacacattccataagagaccgacatgagtagttaaattagttcactaactctttaagttgtgcaaacaacattagttaggttaatattagtccgccaactctttaatttattaaatacacaagctacatagaaaagaacagtgtctttagatccatacttgaccagccggtctaaccgataaaactgttaactagacatataacaatcattattttacaagatcctataattcaaatacatattcaaatatttatttaatatgcaaagatttttattttataccgaataaatactaagatttatcttgtttattgacttttatttttaaaaaattttataccggggatc

SEQ ID NO: 17757 - DNA, 822 bp, Arabidopsis thaliana
cactttggtgtgggttcgcatctcaaacctgcctgtcaattactaccatgagacaattttgaccgcgatagtagagggcttagggaaaccgattaaggtgaatttaactattctgaggaaggagagagcacattttgcgcgggtctgtgttaaggtcaacctgaagcaacctttgaaaggcacagtggtggtgaatggggaatgctactatgcttcttatgagggtttgaatgttatctgctctttgtgtggagtttttgggcatttggctggagcttgtcctaagaggagtccgggtccggtggtgcaggtcaccagtactgagagtggtgctagtccaagtggtggggaccaacccagtgatgggtttacggaggtacgtatactgtccaggcgggggccagtccaaggaaagggaatgacgtttccagcagggggatcggcggagaagagatcaggaaagagtgtggaaagagagaagaggaacaagggatgctggtgccagatagctcaggggaagaaaataaagagaatgagggggatggggctgcgttaaccagcgttgtgaggttaggtgggcctgatgggaagttagtggaaggaaaaggaaggcttggggtaataacagataggagagctggtcactataaaccaatgaaaggagggggacggaaaggtaaagggggaaggaatacgatcgctaccagaggtttggtgtttggaacgatcagaggagagcaaacagaagtgtcacctaggaagaggctgcgggtggagcatgagaatgtaggcagacctggaggtgcgttttctaatgggagt

SEQ ID NO: 17758 - DNA, 540 bp, Arabidopsis thaliana
aaccatgaaatactattatctgttttccttttgtttggtccgaaaattatgtggacttaagttgtaaaataatttcagttcactcgagataaactgcgatgaatttgttcaaaacggaacaaactttatgaaaatccaaacaaactttattgaaatccaacaacataagctaaaaaaataccaaatatccaaacagaaaaccaaataattgctaacataataaatcgtctaaagaaagatacaaatcctcgacaactaagaagaaacttaggccctaatgttgctggaaactatttcctccaccggaaagaagtgtctgttatgcaacataatagagtcagcggcgacaggctcgttgtcttggttcctatgccatgtgtactgcgcgtgagtcctattcataatctctaaaaccgcatggccaaaactcgcctctctatatgctgagtaactcggttgtggatcacgaaactacatcacccagacacacaaatggttagtttcacatcaccaaacaacaaaatattatttaaaagttgt

SEQ ID NO: 17759 - DNA, 461 bp, Arabidopsis thaliana
gactgcaagtttctattaggttaattactgatgggtttgtgttataaatgaattttgttaggtgaaatcaaaccgaagaatgttgcaggacatggaagacataaccggaaagttcttggagacattggtaatcttgtcactggtcgtgatgttgcggcaggaaaggtagttttaaacatctctgatcattgtctgttttcatccagtattgcaactcataaagtatgtatatcgtcaggatgtggcgaacaaggctaggcaaccacagcagcagacaaaatctgaggttattgtcattagccctgatgaccacgagaaatgcaatccacattttagcagaacgactcatatgataggaaccaagacttttaccgcaaccttaagagctcgaagcaaggtaagagatctcgaatctttcgataagactatcaatgcttatgatgagataaccatgtttgatg

SEQ ID NO: 17760 - DNA, 597 bp, Arabidopsis thaliana
tatcacaatactgagatccgtacactttctctagacgttgaccacaagtggttcctgctgcgtcaggaagcagccgagtgatctgtgaaaacataagagaacagttttagacatctttgcatacacacacaagaagaatcactataagcttacgattaggattctcggagtgatgttgagtccttgttgtttgatgcgttggagcatctctgtttcgagagcacgaacttgatcaagaatgtaaacaaccttcaagaatatatatacgagattaaagatcgatcaaggaatgaagaaagaagaagaaatcttcaaaatgtttcattactgacctgaccacctgtgtcagggtaaccaagaacattgtcctgagcaaagtatccatgaggagagaggatcacaacgttgaaaaccattgggattcttccaaggaaattctcaagagtacaagggtcaggtgcctcgagaaggtcaagaagaagacggatcatgttaagaacacgctctcgcggtgtctcccagcctctctcaagaccaatctcctggaacttgtgctcaaactctgagtagagtgttcaggcttcaggccattagata

SEQ ID NO: 17761 - DNA, 1078 bp, Arabidopsis thaliana
ctctctacacaatgaattccaaaattgaaagacctgaatccccctcttttgacgacgccggctctagtaatgacctctgcatccggccgaatgacatcgccggtccccactatcaatccacatgcactctccaatctcttaatcgattgggagagctctaacggattccagccgaagtaatgagggatttccagatgtcggagcctaccgaatcaccggaggagcaccgacctgggttcttttgcgtgtacgagatttacttcaaagggtgtggcttgacttttcctctccccgaagccctcgtgcgttacctatcggccctcgaaatcgccttaccccagctaacccccaacctcctccggactattctaggaattatcattattgcggctgaggccggatacgtcatcggggttcccaaactgaacgaacttctcagtgtgaggagtgcttcgaagaaagtcgggtacttctcgacttatctgaacgccaatagaaatctcatctcgcaccttccgaataaagacgagaattggcatcacccgtggttcctagttaaaaagagccctgcctcgatcgggaacctcgcggacttgctccccacgcagtggaccacttagcgcggtagttattagttcatgcatatgagcttcatttacttcttgccttatctgaccagtttctattttccacttcgcagcttttattgcacctacccttcctactgctgagttcggcgaattcttcaagatcgtcatcgaaggggaaaccctatggaactccttcactcttgaccggttcatagaagccaaccacaagcttaggatgagcccccctggacatctcctccagctgccactgccccctcctttacctaaagggacttctgctcgaaccatcgcagctcgtcgcaagacgatgtccaagtcgattgtggaggcttgcgaggtgaacatatcattcctccaatccacagtcgacaagaaggaatacagcagaaccctgttagtcgacgatcgcagtgccgaaggggcaaggtctgccggtgcttacagaccttgtaacggagaaatctttg

SEQ ID NO: 17762 - DNA, 627 bp, Arabidopsis thaliana
ttctccgtccgcttccaaacgctatcagcatacgaacatcatctttttctccttctccaccgttgaacctctcagggttaaacctctccggttcggtccaaagatctggatctctatgtatcgcccacgcgttcaccattaccattgtgtcacgtggcacatcgtatcctccgatcttgatgtcttctgctgttgatcttggcacaagaaccggcgctgctggatgtagccggagtgtctcggatactacgttttggaggtaaggaaggtttgctatgtctgattcttcgatcaaacggtcttgtccgattatctcgtcgatctctaattttactttgtccaaaacttttgggtggttcaacaaactcgccatcgcccactctattgtcaaagcggaggtctctgatgaggcaaccattataccctgtttcatgtatcataagtgagaaaacagaggattttaaaacgtgattcatgctagtctcacatacacgtacaaatttcattaaatatcatagatttgtttacatgctccaaaacgaataccttaaaactatactaaaacattgtatctgaaatttgaaataatagtggaaataacttatcttttcacccaaataaaccaga

SEQ ID NO: 17763 - DNA, 635 bp, Arabidopsis thaliana
ttcatagtactttgactataaaacaaggagagtttggattacttgaaagtgatagtgaggggtatgagaagatacttgattctcacaagccttctaatgaagatggaaccttccttgagttgaaagaagttagtcatgaggttaatgttgttgagattgaagaggtgacaaacaaggagggagctagcaatggtaagtctagcatagatggagattggagtgaactcaaggctccaaaggtggaactaaaacctcttcccaaggggctaaggtacgcatttcttggaacaaactctacttatccggttataattaatgacgaacttagtgatttagaggtctccaccctaatagaggaattgaaaaagtatagaaaagctattggttattctcttagtgatattaaaggaatttcggaaactctttgtgtgcataggattcatcttgagaatgagtcaatgacttccgtcgaacatcaaaggcggttaaatcctaccttagaaatgtagtacgggaagagatctcaaactcttggatgcgggaataattacccgatctcggatagcacatgggttcaccggttcatgtggtccaaagaagggtggagcacggttgtaagaatgatatgatgagtg

SEQ ID NO: 17764 - DNA, 549 bp, Arabidopsis thaliana
cactctgcaacacaccttgaggaaagcagaagagtatctagcagacttaagtccgaaacactgtatgaagagtttgaggccaagtttgaggagattggtcttgagaggggatggggagacaatgcagagcgtgtccttgacatgatacgtcttcttttggaccttcttgaggcgcctgatccttgcactcttgagacttttcttggaagagtaccaatggtgttcaacgttgtgatcctctctccacatggttactttgctcaggacaatgttcttggttaccctgacactggtggacaggtcaggaccattatcttcttctttttctagtagagataaacttcttgttctgtctttatcgatgagctcaatattttgtgagctttgcaggttgtttacattcttgatcaagttcgtgctctggagatagagatgcttcaacgtattaagcaacaaggactcaacattaaaccaaggattctcattgtaagtttttagtaattttgctttaaccatggattcttgtggatgtctgatctcactgtgtgt

SEQ ID NO: 17765 - DNA, 965 bp, Arabidopsis thaliana
ctggagttcctagccggcgaacagataatccgcttcgtgttgatagttggcttccatgggaaagagcacgtgcttggtacgtgatggaggactgattcaccgggaatgtggactaaagatggttgagttatcgtcgataaggaagccatagctccaaggtttacacaccaaacacacaaatatttcgaattttaattgataacggataccaaaattgtatcaaccatagaaatctaagcggataaataaataatgcaggtccactataataagacacagctatatagtattagttatgattctttatcaacaaggtcgttgtagtatagtggtaagtattcccgcctgtcacgcgggtgacccgggttcgatccccggcaacggcgattttttatcttttggtgttagatttagaaacgatgtcgttttcagcttacttcaacgttcttacagcatctttgagcattaatagtagtaagtaacccagttagacaaaatgtttgtgacacaacacaatcgaagtttgcaattatatgaacagcataaacttactgcacatgcttcgatatctacagagtcatcaatctcatggctttttgtctctaatatttaaaagaattgagtcttgaaagaaagtatcagcaaaaagctaaataaaagatagtcaaagcaaggacttgaatcatcagtcttttttcttatttgcttagaccagagtctcgccagatttccaaaccacatcgttaagtgaggttgagagcttcttgtagaactgtaaagaaagtagatgaacagagatataagaatcggtcctcaagtgaacatattagtcgaaaacttgaaaaatgattaccttatggaattctagtgtatcccctttcgttttccggacttcgatcatatgaagagacggtgatacttgaaatatctacaaaacattataagatacggtccagctactagag

SEQ ID NO: 17766 - DNA, 1235 bp, Arabidopsis thaliana
atccccgaggcttttgacatgagtggcatgactgaacgccaaattcgccaagctcgctgtactcaaagatcaagtttgatccaaggtggaagttcaagccgctcagccatgcaaagagaagaagtagctcggggaaagagggtcgttgaggctgaagaagaacaccatgaagaggcagcctttgaagatgcggtttctgaggaagagggtgagatcatcggggatgatacaccagcccctgttgggagaagaaaccggccaaggaggaagagagagccaaccccaagcgagtactatcaatacttgaagaagttgaagtttgagggaactagataccctcataaggaaacgatgcaagagcttggtatttgtggtgatgtagaatacttgatggaattggccaatcttgcaacgttcatgagctgccaatgtgggggatttaaagaggagagctgccaactccttgcaaccctcaaggttcacttctgtgttgatgattcggagaaagaagagagaggaggtcttggttacataactttaaaggttagggatgtcgagtatactctttatattcgccatcttgataccattttcgggtttccaagtggagaagttatccgccaagactatgatcaagatgagctaaaaattcctttggaaaacgatcgcctgtctgaagccctacgcgtcaccaagagcaagagttcttcaattcgaaatcccgtgactatatacctccaccaatgcatcgccaacactctctttccaaaaaatgccaccagatttgtcggtgaataggagctatgcataatagaccaatctttggtcttcattctgagagagacaaaagataggaggaagatggcaggcgatagagcagacacttcgttgagtgttgttcttttggatcacctattgagctacagagagtatgctgcaattatccatcgcttgggaattcgcagaagtctttgtgttggtggtctcttaacgccaatattgggagctgtcgggatggaattcggaacccctgacgtgttccccaagttcattgacctcgactatctcaaggggaaggattttcttgagaaaaaaactccggcagatcgctatctcttcaagttcaaccatccggagcttggaccttctctgttacccctaccatgcgagaaccaaactttggtgaagacaaggcgcaacatcaaggtcgatccgacttagctgatgggagagtc

SEQ ID NO: 17767 - DNA, 929 bp, Arabidopsis thaliana
gagctcgaattcgtaatctttcttcatcttcttattctctgcagtttcaaaagctttgtgattgtgtttgaaatggcaaacgcagaacgtgtaataacgcgagtccacagccagcgagagcgtttggatgcaactcttgttgctcagaaaaatgaagtatttgctttgctctcaaggtattacaacacaacaacactttaaactaactaacttgtcttgtaagattacctacaaataaaacctaaatactctgtttctttctccttttttagggttgaagccagaggtacaggcattctacaacaccaccagatcattgctgaatttgaggcaatgcctttagagacacagaagaagcttaaaggtggagctttcttcgaatttctccgatcagctcaagaggcaattgtgttaccaccatttgttgctttagctgtgagaccaagacctggagtttgggaatacgtaagagttaacctccatgatcttgtcgttgaggagcttcaagcttctgaatatcttcaattcaaggaagagctcgtcgatggaatgtacgtttttcacctctttatatcttgtctctctctctcttgttgcccttttactcaactaatgtcatgactatatcgcagtaagaatggaaacttcactcttgaacttgactttgaaccattcaacgcggcattccctcgtcctacgctcaacaagtacattggagatggcgttgagttcctcaaccgccatctctcggctaagctcttccatgacaaggagagcttgcatccgctgctcaagttcctccgcctccattcccacgagggaaaggtttgatcacaagccactctcctctccatttgttgtctcaataacaaaagtctaacatcgctttgtctttgcatctgtgtagactctgatgcttaacaatagga

SEQ ID NO: 17768 - DNA, 758 bp, Arabidopsis thaliana
cgtttggttcaggatgcgagacttagggtttcagaggattacttgcgttctatggtggattacgttgatgtaaagaggccaaagaggttatgagtttggatgggaagctaacgataacgcaatggacccggtttgacatgtatgagactgcggattttggatggggtaaaccggtttatgcagggccaattgacttgaggcctacgccacaggtttgcgtgttgttgccacaaggaggagttgagtctggcaatgaccaaagcatggtggtttgcctttgcttgcctcctactgctgttcatacctttactcggcttctatctttaaatgatcataaataagtcaatgatgcgacacaacattcacattaatgtcaatcatatgatttagtatcgactttaaattaccacttcatgtttattccagataagagttaatattatccccaatcaaaaacataagccacataacaaatcaccagagaacgaattcggattcatcataatcacttaaaacaacaggagataccaaaaaaaaacattggtgtagttttagaccaaagagttgatctccacatggatcaaactgtacaaagattagggctcactagtagggtttaaaacaacatggaaaccccaaattcgaaaattttcattttcttttccgttcaaggtttcaaccacgccccaacgacacccatatttaccaaactcccatctatcataatgtacatagtatttggcctatttgcgtagcca

SEQ ID NO: 17769 - DNA, 734 bp, Arabidopsis thaliana
ctctacatgtaagtctctaatcatgaacgtgttattatgtttttcaattatcaatttttagggtttgattattagcaatttgttcttccattacatagatctgataatgacatatctggatttgttggaaaaagttgtatatgtaataatttgtttgaaactgcagaatcgttgaatttctatgtgtttatgatgctctagttatgtttgcattacatagtatatgattatctaacttttggttatatggttttgttaaaacagaaaaagcgtgaatgagattatgatggaatcgaaagctggtaataagaagtcaagcagcaatagttccttatgttacgaagcaccccttggttacagcattgaagacgttcgtcctttcggtggaatcaagaaattcaaatcttctgtctactccaactgcgctaagaggccttcctgagtactagccagttccctccatagcttttcaattacaacaatctccttttctcaaagctctggttccccaaatcctctcgtcttttgtttgccctcacaacaacaacaacaacgcagagatggccatgtctgctattggcttcgaaggttacgagaagcggcttgaagttactttctttgagcctggtctctttcttgacactcaaggaaaagggctacgtgctttatgtaagtctcagatcgatgagattcttcagccagctgagtgcactatcgtctcatcgctctcgaac

SEQ ID NO: 17770 - DNA, 924 bp, Arabidopsis thaliana columbia
atctcccatccgatggctctcgatagcccttaccttcctctcgatgcgggcaattcgggccttgagcgtttgcctcttgaggcccaaccgttgcctctcatcgcataagcggcggtgtttgttgacgacctagaacaaagttctttagtttgagtgggagtctttccgataagaaagagggtaaaagacttaccttgtctataaaatcgtacgcctctttcttgtcattcgaaggaaagtgaaagcaagcatgaggaaagagaacgccggcgggctcaaagtcatcgccggacagaaacaatggacttctggggtcgagatggcatacggtggaggctctttcgttttccattcttgaagtgtttaccaaataaatttctgagatcatattttgaggcactaatgacagtttatgctcttatttatagagggttagggtttttactcgaaaccactaaattaataattgtggcgtgtctgaatgggttaaaccgtttttgggaatcgaggaaaaggcaattattgccttagaggcttgaagcttttcctattttccaaggaagaaaatggcaaccatcgcatttaagacaaacggttcattaaataaaagaaaaacaattaaggctcaagcacagtaaatcgaactgaccaaacccgagttggggagttcgcggaattaaaacgagttcaaactcacgttttcagagataggcctgatcaacctataaatctcgtaacttgacccaaatggttaaacaaagaagctatttaaaagatggactttgcaaatccatacttaaatctagtaaaaaccctcttgggatcattgtcttaaaaaaggtttaaaagtctcctcaggcaaaatacttgttaagaaattaaagcctacttagccgattaaaatagttcagaaataaacttcga

SEQ ID NO: 17771 - DNA, 1225 bp, Arabidopsis thaliana columbia
ttcttgatctatgcgttgaagaaacgaagtaaggactttaatggttttgatctgacattgtagagacagaatgtaaccagctgtctcttcgaagagcgcgtccacaccaagcgccgctcctccggggataatcctctgcaacgcctcaatcttttccttgacctcatcttcttcttcttctgcttcttctcggtcttcacgtacgcttgcgttagtctctgacaatctccgtttggttctgcgctcgaaaccagcggcgcgtgatttcacggtggctgagcatgacggtgacagagagcgtctcgtggcgtcgggagtggctagagtttcttccattgaaagaaagagagagatgaatgatgagtctgagagaataatgaacaagtaaggaatgtggatatgtgtaactgtgtgtgttatatatatatatatgagtgatgatggatttagtagacaaaaatgttgaaatgtggtcggttcaacctgattttattttggtttgttgcgagtttagagacaatactctatcggtttgatttggtttgctatgctttatgttacattgtttgcttacattagtgaaaggttcggttatgaacgaattttggtttggtttgtctataaaaaacgatgtaaaaattgaaacgatataaaataaattctacatttagaaattgggaaatggttaaatgagcggtattgccatcaaagctgggtccagttgtgcgttatttttaattttattatcctcgtgtttcggattgtggagatttatttaattatctcttactttggttgcttccacagatttggatctttagaagaagagctttcacgcgccatgtcgactggtttagactttagtggactcatcactcacttaagtggatcaacctcgcatctagattggatttttttgtttgtttgataaatgagatttggcacgttaaatttgtttgtttaagagctagacgtttgacatagtaattaactaattatacaacaatgctttattattgtattaggatatgcgttgttaatacaagccggattacttttagcaagtgtctcatttatttatcaagccggattacttgctaaaatattattcgaactttaatttaaactctaaatggtttgtgatctggtttagccataaatgtaatagctgctatacgttgttttgcatagttaccagtcttattttctacaacaagaataaaga

SEQ ID NO: 17772 - DNA, 741 bp, Arabidopsis thaliana
ccgcatcaaccaaaccgtacagcagttggtatcggtttagttgatgcggttcagttttgaaaacgacaaaaaaaaacgaaacaaaaaaaccgaagaagaagaaaaagagaagagagaaacagaaagatttgagagagaattaaaaagctgttcgaaattcagtatccactccttcatatttcgacatcacttcgaattgttgggtagttgaattgaaccactaaactccaaaatccggcgaagagaaagttgtagttttttctggcgaagtaaggaacctccggcgagatagcaactttcgctatggctgggaataaagcaaacgacgaagtcccgacgaagcagcatacccaagatagtggtccagagaaggagaagcgggtattaagagtttccccgcggagaaaacgctcttcgacaaaggcaacggaggaactgggttagtatctctaatttaccgtttgttgtctttgagtgtatcagaatcgtaaagcttgtttgattaaagggttagaactagtcagaatttagcatatctttaggatggaattttgagttataatctggataatttttgtgtacgtacactaattcatattgcttaactgtatatcacttttaattgcaagcagtccaagtgttgctccgactgaagatcttatagttgaagagttaccaccaagactctttgctctatactggtacccttccaagacgaagatgaacgcgtactctaaaccg

SEQ ID NO: 17773 - DNA, 888 bp, Arabidopsis thaliana columbia
atttaattttcataattatttcgtgcgtgctaaaattgcgaaatcaactgtcacaagattgaaacagagtctagtattttgtaaaattgtttctggaatatttgggaacgttttgataatgtttagcatccgaacaagtgaaactgtcgtaattagggttctaaggcatctgaagggtcatttcgtgtttgtttcaaaagaacaagttactggtgttgttttgttgtctctattgtagaaagaatggttgaatctaaggaggaagagactagcaacgaaacaacaaacttttggtagaagcctttgagaaaatgatggacaccaaacttaatgcttttcgccaagagtttcatgagaaactagagttggggcagactcgtcctggagaacaaaggagagttaataagccgcttgagcaaagagatgaacctacaggtcagtactatgggcataggagcacttcatctcacaaagtcaaaggagacaccatagacatgctagagaaggtagagatcttttgcaagacaatcttggaggttttaagcttaaaattccaccattccatggaaagaatgatccagatgcttatttggaatgggaaaagaagattgaattggttttcaaccttcaacactacaccgagatcaatagggtaagagttgttgctactgaattatatgactatgctttgagttggtgggatcagctagttacgtcaccgagacgtaatcaagaacttccattgtaatcttggtctcaaatcaaagctattatgaggaagagcttagtccctagtcactaccattcgtgagctgcatctcaagttgagcaatcttacacaagggaaccgtatctgtcgaagagtactaccaggaaatggagactttg

SEQ ID NO: 17774 - DNA, 506 bp, Arabidopsis thaliana columbia
  unsure (1)..(506): unsure at all n locations
nnnnnnnnnnnnnnnnnnnnnnnnnnnnctaaagcacctggaatagcagatcgcccagttcaccgcgaagatcgtcaagatcttcacgggcgatggcgtccagcacttcgtaggtttcttcaagggtgtaaggcgcaatggtggcaaatgtctgctctttatcccacgggcagccgttttccggatcgcgcaggcgctgcataatagtgagcaaacggtcgatttgattcattgaattgtcctgaaaattgcgggtctgtcaggtggaaacctgtgaccagaatagaagtgagttagtaacactacccaatcagtacgttaattttggctttaatgagttgtaattcctctggggcaactgttcctttcttcgttgctcctcttgcccgccgagcgagtactttttacctgatcagctaacgctacgccatcacgttcctgaccggataaaacaacttcgaacggatatccttttgattgcgttgtacaaggaacacacagacaca

SEQ ID NO: 17775 - DNA, 431 bp, Arabidopsis thaliana columbia
tgatttttcctcaaaatcatatttttttatcagattctataattcttttctttttcctgattgattattctcttttgttattctacaataggatccgtcggtgatacaaatctttgaattattgcggagaaagcaacacaaatcacaggtccacacttagacccattataaagggtgacatattgaacgaaagaaataaaggagagagacgagtaaattaaaaggaataagggactaacccgataaatttgaggactttgccactctcgtctttaatgggagcaatcgtgagaagattccaaaaagaggtcccatctttcttgtaattcaatatacgcccacaataattgttaccagcagctaatgtctctcttatctttgctaactcatctgcatctgtacctgatccttgtaaaaatcggctacaataa

SEQ ID NO: 17776 - DNA, 548 bp, Arabidopsis thaliana columbia
ccttcaggaagtgaatgagaatacacactttagttatgtgctataacttatatctaggtgaagatgtataagatctgtctgcaagagaaacataaattgagctcacactaagacttggacagcaaaacacaaagccgatcttcagtgtaatctattgtacctcattcttcacaatacgtttaggagatgaatgagaatcagcgacaaactgatagctcatagattggacccttaaaaaggcgggcttgtttgtctggttgacctgagaaataacatgtatcacaaaatgaataaaaggaatctgaaatatacgtgtgcaccttttatttattggggtttttgaagtttaagatgaaaaacatttcacaactgaaaacttaccccaagaagatgatgaaatggaccagttagtgcgccacgattaccaacggtgttgtactttctgtagaagaatggtaaagtatcagattcaaatcaatacaccaagactcaagatgcagcttgtttttggcagtcaaaagcgagacttggagagcagaaagaaatga

SEQ ID NO: 17777 - DNA, 556 bp, Arabidopsis thaliana columbia
tttttttcccacttttcttccatcacttcctctacgtgctcacaatgaacaacaatcattcctatgatgatcgcagttttcacattccacttcatccttctaacacaagcaaccctaatccaaatctccagtttgctttatcttcaagctacgatcacagtcctaagaagaaacgcaccaaaaccgttgcttcatcctctagttcttcaccaaaatccgcgtcaaaaccaaaatacaccaaaaaaccagacccaaatgcccccaaaatcacacgtccatgtactgaatgtggcagaaagttttggtcttggaaggctctctttggtcacatgagatgtcaccctgagcgtcaatggcgtggcattaatcctcctcctaactaccgtgtgcccaccgcggcttcttcaaaacagttaaaccagatattaccaaattgggtctcatttatgtccgaggaagaccatgaagtcgcttcttgtctcttaatgctgtctaatggtacccatcatcatcgagtattgaacggttcgagtgtggaggatgtagacagtgtttg

SEQ ID NO: 17778 - DNA, 1195 bp, Arabidopsis thaliana
ctacaagaagccaagtaacatgtgcattagatacacgaggtaagtgtagcataaaagagaagttagaaatttacccacctgaacaccagtggagaagaaatccagatacgagagcacagccataagagcaccagctcgcaaacaggcagttgggtgctcctgagatatctttttgagagcttgcagagactgttttaaaacacatacataaatacgaatcaaatttcaagtgtgatccctgaagaatttttaaaaaagcagctggagcatcgaggattcaagtattggtatgatagccaacctgttccgccaagtccatgtattctatggttagcaatctggccaccaagcatgaaactgccccgtaatgtacaacagcagcacaagaagacggcaagacatcacatagatgggtaagagccctggcagcaagaagcataatgtcgggattgctttcatggttaagtagaccgacaagaactgggacgaaggaatcaacagagaaggtgctaagcgagtcttcggtcccaatggataacatctcacaaagctgggttaaagcctcgacctgttttccctcttctccttcagcgcgcaacgcagagagaatcttcttcatccttccattcaagtgggaggaagaagcagagccgataccggaagaaggaagcaagtcatccaatccagcaccgagcttcctgagcaagccttgtaaagcactgctcgcagagctcatgttaggatgcatgaaaccgccgttgccatcctcactgtcattgtcgtcatcctcgtcagcgctcctagcagcggcggcggcacgatccatgttgagttgttctctggctcggtctctttctctttcacgctccctaatcctaacgtcatgttccttctccttacctttgtcagaattatcgttgttgtttcccctgttaccacgtccgcctcggcgaaatccagaagagtcggtggaggtgtccatgggagcagcggcggcggcagagcgagaagaacgagagcgggtggtggtggaggaagaaggaggagtgggggcaagtgaggaagaagaagaagaagagagacgagcgcgtttgctgcaggtggtgggaccagaggcagagggaggacgaggaggagaagaagaagaagaagatggggcagctgaggtcgcctccgccgcttgcggtccgagttt

SEQ ID NO: 17779 - DNA, 633 bp, Arabidopsis thaliana columbia
gtcagatggggtgaactctagattctcggtagaaataacttagatgatgtgcttgtttggtaattggtagaagtatgtagcaccatctcgtcccataaattcgtacacatcgcctgacttgagaaaatgagtatgtatcaagtgatggtggtccaataactcttgtaccttcttaattgtggtcttgctcaagtctagatcacagcctagaaaaagaggagtgagtgcaataccaatagagaggctttgcgaggctgaggtaggagcagtaatcttcatcttcatgaatgcatcgcatagaatcgcagcgacattagcattaggttctggaagatgcttgatgctatagaagagcatcggtaattcagtcctagtcagatggtgccagagctttgaagtacatagaatggctaataagcttcactacacagcggataactgggttccagatgtgagttatctttgttgaatgtgacttgtatgatcctctagcaatcttaccccaaaaggcattggcaaccgctgaagacaactttgcaaaagcgatagactctcccttggtgaacccatacatatcacagacttcaaacaatgatttggtgtagtgtttcatgtttacgaaaaatgtgagag

SEQ ID NO: 17780 - DNA, 539 bp, Arabidopsis thaliana
ccggcaacgcgtcaaacaggtttcaagcttagtgtacctgaaaacccaaaacagaacaaaccatgatctagtcaaatataaaatcttcctttctagtaagaccatctcctcttgtctagtaatcttatataccagccctggttgggtagtgtccggtggcagaacggagggcgtcctaaagctatccgattgcgcttacagtgaacatggttggtaggtttctgccaaaccgcaagatcctctctctgcaccaatttcctccaacacaagctcctagccaccctctcgatctgagactgctccgagttgagatcgtctctagttctttcccaacccttccagtgtctctgccagttaatcggcggtcccgacaaaatccaatacccccccgggtctcagtaccctatccacttctatgagatacgtcccgtctgctcacaccaaacagtagtcaaaacacacatacataacaaaacagctgcaaaaaaagagagtgtgactagagggtgagtgtgacttactgtattggcccaagaatg

SEQ ID NO: 17781 - DNA, 528 bp, Arabidopsis thaliana columbia
tccaagagttccagtttctccagtcatgtcttttggattctgagcttcaactctagcaaccccaaaatcagcaatctttagattcctctgataatccaaaagcatattctctgttttcacatcgcgatgaacaatcctctctgaatgcaaataacttaacctacatagatgaaatcaccatcatcatgattgtatcataagtttctttcttggagattaaagaatgagttttgtaaattaccctcgggagagatcgagagcgagttgaaccacgactttaaaagcgagtttctttcgcctgtttcggaacaaatactgcttaagagttcctccagggatatactccacaacgacacaacaagctcgttgaggcaacgagttctccgtctcagctgatgaaggtatcttcaaattcgctgttcccattgatgctccacaaactggttttaccatagagtccattcttacatacacacacacaaagatagccactaaagaggtattattattaccttgtgcattaggatg

SEQ ID NO: 17782 - DNA, 963 bp, Arabidopsis thaliana
aatcgtccacactatcaagctgtcagttctgatatcctggcatgctaaaggtacccaccatctacgagtccttcatctttacttgtttgaattcatacattagtgtttgcagccttgcttcttcaactcgatcaactccgagatttctagatttgattgagtcccaaatccctttagaagaaacttgttcacctatttgtaagattagaatcttcgagatggattggaacaacaaagaaattgcgatatcgttttgtggagtctgctaaaccgcgttcaactatgcccatgccccacaacttattaacccgtagtaagaccttcatcctcatggcacaaactgtatagtttggcaaggttagcatagggcattagatggctgtctggacaagatccttctgttgtggtggttagtcgatgtcgtccatggctcgattacgtctctgctgtgttcttcaagattccatacttgactccttcaagttgatcgaaaccgctctgataccaaacaaagaagattcgaacaaacttatataaagaattactctcgtttttgatctttagaaactctctcaaaactaaacaagctctatcacttctcttatggttacaacttaaccaaaagatgtatttatagaagacacaactttgctaatcctattacaattaggtttagataactcttaaaactaatatatttccttaagccttatcttatactttaaccgacttattaaagctattgtaggccttaagttaacttgaaagattactcaacatgaattatatgtgacagagtcaaggtttcactgaaatagtacaatgcatgatgtctaccactattaagggttcatggaataaacaaaatggaaagattattttgaaactatttattcataaaacttatacaaacaatggtagaatagacatatatattccaaaccatcttattagcctcactcc

SEQ ID NO: 17783 - DNA, 1100 bp, Arabidopsis thaliana
tgagccagaacggaaacgtatcttcaattctgttgtttataacgcttagaaactttagcgatgagcagtttacaaaagaccttggaagcttccctgttaatcggttatggctaacatcgagtgtccgtaaagaggcaccatcacagagcgcgtcagggatacttccttccaggttgttgttccggagatacacaagttccaaattacgcaaacatggaggaatgggaccagtgaagttgttgtaggatagatcaatagcagcgagagagcttcggttgcagattgaaagaggtatctcacttgtgaaactattactagccacaccgaagcctttgatagagagtggtagatcaggaagtgctccttcaaaattgtttgaatccaaatataatagcagcactgatgaatttactaaaatctccgccgaaccttggaaacctgtgaaataattatttccaagagttactgactgtagaagaggtaggctccataaccactcagggatcttccctttcattctgttgttggatatgtctatatacaccaactccttgagggtctttaagatgttggggaactcgttgatgtcacagtgcctcaaggtcaacatttccagggtcaacgggatgtatgaatctgaacttaaactggccgaagatatactgtttccagaaagatccagagaccgcaaagatttgagggaggagaagagttttaagtctattgggtagcttgtgtttaggaaagaaaggtcaagatgcttgaggttgatgagctttgagataggctctaggatttgtccttcaaaatggttagacccgagatacatgatttcgagcctagatgaggtagaggagtttgaaacttcaacagaaccagcaagattgttttcacgtagagcaagatgtgctaagaaaggcagagtgaggagagaagaagggatgactccaaagaacttattatatgaaaggtctaattcgtagaggttggttagattctgtacaagtgggaaactactagtgagcttgttttggcaaggtacacttagttaccgggtcagtactattgtggaagacttgacagaaaaccattagaggaag

SEQ ID NO: 17784 - DNA, 349 bp, Arabidopsis thaliana
ccccaaaaggtagctcaatcccatcgcttacaatcaccgggacacataaactagcaatggcatcaaataatctgcaagcagaagaagtatcaccagctagatgtagacaaaacttagacgtatgcattccttgtttaaccgcacgcatattctctcttgactgtgttccgcgtttgatcacaacatcctcttctttctcaagcagcttgaaaagcaaatctcggactttgcctccctatcaaacacacacacacaaacaacaaagcacatatattgttaataaacccttttccaaattcaagatcacgaacaatggagaccaataaatcttacatctttgcgatatcga

SEQ ID NO: 17785 - DNA, 507 bp, Arabidopsis thaliana columbia
ggtcctcctgctaaaggaccaacattagaaaaccagaagacgattggtctttgggctttaaagctaccttcagctgatgcagtagttgttcgtagaactctcacaactctaacagagaaaccacatgggcttcctgggattaatgaaagtcctgagcagatacaaaagagagaagcattctggtcatcgatcaagcctgctcattttggtgtaaagataacgtccaaatctctctttgggatattccgatatgttacacttggagtgtcacttggtttactttccaagttctccttcggaagatggcttcttttgaaattcccttcagttttcagccttggttggttccagaagaaaggtccaagtgaagaagaggtagaaagcgctacgtttaagatgtggttcataggtcgtgggtacagcgaagagagtctagcttcacaaggagaaacaaagcctgacttggaaatcattacaagaatttcaggacctgagattggatatata

SEQ ID NO: 17786 - DNA, 571 bp, Arabidopsis thaliana
ctgattgttgaaaaaagtgaggctttgattctgtttcctacctcaattctagatctcagctcccaatctcataattgaccatcaaagtttagttttttgtttttgggaatttgtttatggatatttgggattgatagcggatcctggatgaccatgtatgctgatcgcaatgtatagtgtgctttagttagatatcggaatttctatcttctgatccgatgatcttgtcaatggattggatgtgttacatttctagccaaggagaggttttcgtttctgtggaaacaactgtttgattacgttcatgtgcttttgacagttagaaggtatcccaatgatggtacaaggtgtttattctgatgatcctcaagctcagctagaagcgactacccaatttagaaagttgttatctataggtaggtatacatttgttcctttcagaagcaattttctgttctggggttgtatgtgtgtaatagacttctgatggttgcttgaacacggtttgataacagagcgtagcctccaattgatgaagtgacaaagctggggttatcatcgatttgtggag

SEQ ID NO: 17787 - DNA, 589 bp, Arabidopsis thaliana
aaatcttgaattgtgttatacgcggtaatggagatggggtaatgctctgtctcaagaggtcttttctgctatgatttaccttctgacatttcatttataagttttattttccgtttggcagattctagttccggttccacagtatccactttactcagctaccatatcactgttaggtggtactcttgttccttactatcttgatgagtctgaaaactggggacttgatgttgctaaccttcgacaatccgttgctcaggctcgttctcaagggataacagtaagcactctttttccttcttctcttgcaataatcggtgatgtctttcttgctccagttacaaattgtcttgaatgcatgtacaggtaagggcaatggtgatcattaaccctgggaacccaactggccagtgtctaagcgacgtaacgataagagagatattgaagttctgttataacgagaaactggttcttctgggagacgaggtttatcagcagaacatatacgaggatgagcgtccctttatcagctccaagaaggttagcttctatatttggtttcatgtgtctaccttgtgcatgatttgtg

SEQ ID NO: 17788 - DNA, 582 bp, Arabidopsis thaliana
  unsure (1)..(582): unsure at all n locations
nnnnnnnnnnnnnnnnnnnnnnctaaaggaacgcaactaataataaaactttaacatcctcgtgaggacatcattatgtctggagacatcctacaaacaccggacgcaccaaagccacagggcgcgctggataattattttaaaattaccgctcgtggcagtaccgttcgtcaggaagtactggctggcttaacgacctttctggccatggtttattccgttatcgtcgttccgggaatgctgggcaaagcaggttttcctcccgcagctgtgtttgttgccacctgtctggtcgcgggcttcggctcgttgctgatgggattatgggctaatttgccaatggcgattggttgcgcgatttccttgacggcgtttaccgcattcagtctggtactcgggcaacaaattagcgttcctgtcgcactgggcgcggtatttgtgatgggcgtcatcttcaccgccatttccgtaaccggtgtgcgtacctggatcttacgtaatttgccgatgggtatcgtcacggtacaggtatcggtatcgggctgtttctgctgctgattgctgctaacggtgtgggtatgg

SEQ ID NO: 17789 - DNA, 540 bp, Arabidopsis thaliana
tcaaatccaaatatcatatgatggtgaggaggttgtggtgtgtagcggtgatcaaaaagtaaatgattaacttgtgggtgcaatggaaccttgaaactctgaacaggtggcagtggtggtcgtgggtttcccagctacacctctactgctggctagggcacgtatttgcatctccgcatctcattcaagagaagatcttataagagccctcaaggtaaaatattgcattctacccacttgtgtttttttcttattacaaataagcgctattccacagaagtcccaaagcacaaaactgctaaaatagatctatatgcttcgatagagctcggtttcaatgcaagacaagttttgaatcaatgtgtgtggttttgtgttggacaggttataagcaaagtaggtgaccttagcggaatcaaatatttcccggcagagcgtaagaaaatagaacagtcgaaaaacgacatcaaggtggattgaagaattaccaatgaaatagagatgcaccaggaaaacgctagcaaatgctgtgttatgtgt

SEQ ID NO: 17790 - DNA, 1036 bp, Arabidopsis thaliana
tagaggatgactcccatcgtatattcatcactaccggcttattcacttgatgagttcttatcggcttttttgccgtttgcttcttcatgtttactgtttttgtttcgggtgcgatttctctcatggcttgctttgttggatctgccgcttcgtcgttgtcctaaactcaagaaggtttatggtttcgattatgcctttgtttggtgattatagcttcttttgctatgctgatgttgattgccttttcgtcgttgttccatggtatccagagcttcaatatgctagacaatcagttatggactcttcaatttaatcaatttctctttacccgaatttgctggaagttctagcgtttggttaaaattggttgattgatgattgtcgcttttacccaggtgagcaaacaaaattttattgttaagataagatttcctgcaattatggagttgggctcttgtgcgatggaggttggtggaataacatgtgtccatagttaatttgcattaagtacttgaatttgcattaattggactgcacttaaatacttgaatttgcgttaagagcttgattggttttcccgctaaaacccgcttagcggttgttagtggtcgattgcggttattagcgcttgttagccgttggtaccaatcataaaaaccgctccatgccgctttgaaccgttcgagatcgcttgatttcaaaagctccttcccgcaagcatttgcggctgcgggcggttgcatttgatttaaaaaatggaaaattctaaaaaagaaaaataattaagttaaaagatatattatcaagtcttaaatatattcacatttatttcatctaactttaaattttcaatattaataattattttgttttcaacataaaatttacttgaataattatttatggtttttgatcatttcttatgtttaaaaatttatactttttcataattatagtttttggtgtttttagtttttgttttaaaatcatatatattaacaaatttggtaatggtttaccgctattgtctcgctga

SEQ ID NO: 17791 - DNA, 755 bp, Arabidopsis thaliana
attgtctggagcatctttgaaagagatttcaaggacactcatgctaattggacacagacacccttaccagtgattgatcgctggtatgaaacctttgctgtaagtgcaactaaattgtcatgttttgttgtgtaaagctttttagttgctgtaagtccaactaattttttatgtgtcttttctctgttctgtagcaagtgtataactgggaccgtgcaataaacaagagagttaggattgagtttgaagctaagttgaaggataggatgtctgatcaagtttctcggtggaagggaaagtggagagaaaagggagatgcggcgatccctcgttggtttgatccattagtgtgggttgttcttgttagtttttggcgagatcctaagtcagaactgaagagtatcgatagtaggaatgcaagatatcatgatcctgatggcctcgggattcataaacaccggtctggcgagacatcttacaaagcccgtgccaaaaaacgtgtaagttattttacacccttacttagtcaacttttttacacaaacaactaacctgatttgttctgttttagtgtgagatgaccggtgaaactactcaagattttcttttgctcttagatgagacacatagaaaatttgatggtagttcaatgataaaaaaatccgaggagatctacaatgaagtgtcatctaggattcaagaggaggagttcagctgtgttccgcaacacgacggagagcgcacgttcagggggt

SEQ ID NO: 17792 - DNA, 1072 bp, Arabidopsis thaliana columbia
tccctagtctgtatattggctttggtagattgttgcttaaactctgctctactatgtttcatcaacgagagttgagattaggaagtggtagagttatgggggtctctgtcatgagagtggattgacatagtttttgaatctatcgtctaaggtacctgcctttcgcctgttagccacctgatgaaccctagagttccccttatcaatgaatccatccttaggacttctattcttcttagatttatttgtattcaccccctgattgcacttttatttacctgttatttgtatcctctgttgattccattttagttcttaatattgttacatgttggttctactcgacccaatgatcgagtagggctcttaagttctcatttttacctgtttgaatcctgacctaggattgttactagaaacccacaatcattataatgtggcttgacctagttgttatcttgattgctagtagtaacagtggactggattgacaccccctatagctgcatcgacatgttagtgtttaaggggaattgaactgaacctcacttcagcatataagtaggcctcctacttatcatctacactgagaagttcaccatggaagtgaaaccagtgcatgtgctaccgactgacagccctaccttggatgcggctttggagaacctcattgcatccctcacaacgatgcagctgcgtcttgcaggtaagcctctttctctcaccttacactctgttatctgttgagaatggtcttttatgtgagtgtgcactaaagtagggggagtacttgatgttacgtactctgttccggatgatatgggaggtgagaatgtggaggaagaggacgatgatgatgagttagatgacaatgcttagatgcttagtccttgtcggtctttaaatgtgtatcttgatagggggagtttgtcactcattgttttgtggttgtggaactccctgttctttttctttatcggtttttctgtgtgtttaatgttggactaatgtatggaaccaagaactcagatgtgtttcaggttttaatggttatgcccttggcagtagttgt

SEQ ID NO: 17793 - DNA, 796 bp, Arabidopsis thaliana
gaccaattaaccaacaaacatttagggtgtgttcttctatttacactctacaaaagaagtcaaaactttaataaaaagaagtgattccaaaactgatggaataaaggaagaaggaatcacttatcctggcagcagcagagttttcacccacttcaagttcatgtctctgcttcattctggtaagttcatcttgcagctcattgaccttcttcattaaaagaacttgcttctcttccatgtcagtcatgcacttgctcttgacttggaggcaagctagttctgttttactcatgcctctacccattgctctcagcctacccggattgtctggtcctaaaagttgagagaggtgatcttcttctggatttgctgacgttggtggaccatcatttccaaccagctcagccgcctttctctacataatatgaaattgtgttatctactaatattgataactgaaaccatgatcagtcttgcagtgattacttacaatcttttcagtagcattagtgttcaccagcgtaccatcctttttggtacgagactttacccagacctttagccttgtcacttttgatggatctccactttcaagtttctgtgtcaaaaaaaaaatatcattcaaatatatgagaatgcattcttaccagaagagacaacttacatgtcaatttacttagcatgtcttctgctaatctcaccattcctttacgacttgtagtatgaggtactcgatcctcctcctttctttgtattcccactcacaacctaccaattatacatgttaataattgac

SEQ ID NO: 17794 - DNA, 1182 bp, Arabidopsis thaliana columbia
taatctctatgattgatagctagataaacaatgtcaaatttcaggttgtagtcgagattgcagaattaaaggttttgatccaagaattgaaggacgatgaaatgtggagcaaaatggaattgaagatatggaaatcgatgaccaaattgtgcttggtgtgcctttgtataacagtcattgcaattatgatcataatgttctataagaccaaaaaccataagcttgttcttggttactagtgttttgtgtttgtaataaaatgtttttatggtactgaaatgtttgtttggcaatgataatcagtcctagtgttttgtcttagtgttgtgattgtaatgaaatgctactagatgcttgtttaacaatgagaatcaccaaaatgaaactcattcatacattataaaacttgtgtcacaaagacaagtcgaaaccacaaaatgaaatcgatactaagcttatgtcataaagacaaatccattatgtcaaccaccaaaaataaacttatgagaaagcttaagttcaaacaacaacaaaaagaaacttgtgactaatcttgtcttgaacactcaaaccatgatgcaaatccaccaataccgtgtggttgagcatgtggctcagtttgtgcttgtgcttgtggttctgtttgggattgtacttgtgatgctccacctgtctcccttggtctttctgatgttccgcctgttgcccttggtccttgtgatcgaatatgagattgtgatccttgatgaggttgtgatccgtgtatttgctcttgcgattcgagcacttgagatcgtgatccttaatgagattgtgaactttgatgaggttgtgatcttagcacttgtgattcctcctaagttaaatatgacagtctgaacagttgcatgattaagtgagttgtaaaacatataaaaaaaaacaagaatacaaacctgatttattcgtggatgacctcttggtctctttggtggaatcagaatagtggcatttttgcagctttgcttgtttgcccttgttgaaggcagttagagcatgtcatgattctcttttgcagtggcatcttgttcttatttgaagaagaagaagtctcatttcttccttttctcctaacataattactcggtcttccaacatttccttttgtccatggtggtggcaaacagggagctattggtttta

SEQ ID NO: 17795 - DNA, 941 bp, Arabidopsis thaliana columbia
attgaaatagactttgagtttaagggacaatctccattaagtggacacatccactacaagttctcgggcaccccgagttcgggttgagctggttcaggatctgcggcaactgtcttattctcacccgattcgccagtagtaggctgctcgctaggaaccccggagtctgaaccatcatcgtcctcaatgaccactttctccgagttcgcggatggaggaagttctggcgggatggctaccgcttcgggaatcgtcaccggcacgatgggtgcttcgggttccatgggatcactggggcctgagacaattatttcggattagaaaaagtacaagaataatttgctatggttaggtttcaaaagctttgaaatgtaccggcctaatctaaaccagattggtccaagggaggcgattcggtgtagaattcctcaaactgttgagggttgaacgacgaggaaggaaggacagctaaacgacttcgcttctcctccaggacggtcttcaactcgttcctctcttgtttctcggagaagtcgtcttcatgggtttggtccaaaaggaggagattgctctcgtactccttgatgtctgattccaactccgtcctaaccttctcggtttgaatgaagatgattgccccttggatcaattccatcccgcgacctttcacttcttttctggcctttgatgccgacctcgctaatttagcatcccgatagttagccactgcttggtacttgagctgcaattcggacagttgattggacaagtcgtatgcactggattcggattctgaaagtgtgtcccgagcagttgagagttcttcttggatcttgtcatacctctggtattggtcctgcaattcaccgttggatttcatgagttcggaggagagattgtctagttgatcctccagtttcctcatcgcgtcattgaaatcc

SEQ ID NO: 17796 - DNA, 509 bp, Arabidopsis thaliana
tagtaacgtccgccagtgtgctctaaagtcatctgttcgttgctgagaggcaacggtttgccatctggcaaggttttgtaattcaccacgaccgcgactgacagacgttgcacatcgcccacgttcattttggtatgacgaatggtgcgatcgacttcgtagttactggtttcattccgctgtgtgctacgcggcccactattgctggtggtgctcgcctgctgctggcggttattttgatttgccggacgggtgctgattggcgcgttattcgcaggtgccggttgattcgacaacgcccccggtacgccgcccggataaccggaaccgctttgctcgctctcattaagctggcgtgaacgaagcgccgcatgagattcgatcaccgttaggcgatactgttcttccgtttgttctttactggcgaagtcagctgcgccgtaacctgggcgtgaatattaccgttaccaacaataggcgacaggatcgcttcaatacgccgctgaata

SEQ ID NO: 17797 - DNA, 559 bp, Arabidopsis thaliana columbia
gttttactctttggctgttgttgactatcttcaatctaattggtggctgattttgtttgacttctttaggacttttggtgtctttcgaggtcattagaacaattgtgtctgcttggttggtggtctatctacaactgttagcttttacaagtttgaatgctattgttttggctttcagattttgatgttatggatttctgtgttactactcctctgcaacttgaaactaatcaagtaattgtcaatgcagaaaatgggcgagtctaaggggtgcgggaatgttggacgaatgatttcgaagaataagtctgcgaattcttataacctctctcttcagttgtctcctgttgtttctttctgggattgtattgtccgcaccatgaggtattcctatataccagagtgggtgtagttcttgagttcctctacaacatcatcgagtttagtgcagttttttagttagaaatttatagtcaagcaataatggatcacacggtgtgcaagcaagttcagccagtcgttaggaaagcgaagaagaagcatggtacagatgaatttg

SEQ ID NO: 17798 - DNA, 523 bp, Arabidopsis thaliana columbia
tgcgaattcaaagttaggtccttcaacgattgcatcaacggggcaagcttcttggcagaaaccacagtagatgcattttgtcatgtcgatatcgtacctgtacgatacagctcaaatcatcatgaaagggtaataaagaaagcagatggttgataaatgagaactaaagggatgatgacctagtggttctgcggcttccatcttccctctcttctgcctctattgtgattgcttgagctggacatacctgatgaaaaggacaagtatccctcacaagaattacaatccgtggtgaacttttatacacactaaatagatcattgtcagctaatatgaccatttcatcagaactctagagactaaacagtaaatattactcatactcaaatagctttcctaattactaagatgaatttgatagactcagagtaccatatcagaacaaagagaacgttaaattagatgaaggattcatatcgatctcaagactcacagcttcacagagtttgcaggcaatgcagcg

SEQ ID NO: 17799 - DNA, 545 bp, Arabidopsis thaliana columbia
cctgatggtgatgtctccgtcagtccttgaagcatcttatccattcctttgggtccaagagaggatcgaaggatccgagccacggctttaccagcggcgatattggctttctgagcatcgattcctctaagacgagtcttttgatcttgctctctcagtataatgaacggacgcccgaactcatcgaacgccagcgccattttcgagcttctctcgatccgatcgaactatagatcttgggttttttttgtttcctagtgcactggagaggaaaaaaaaaagttgaaatggggaaaaaagcgagaagaagaatgtctggaagatttgagagcttaaagtggtcgagtgtaaaaccctaactcgctgttgatggcagaatcgtaaatcggaattgattcatgggcctaacaagacgtttgggcttatgggtttaaagccatctgatataagatgaatagaatgttcatggcaatactatcataatttggttctttaataagacactcgttaatacgacgatttgaagttgacgaatggttcatatc

SEQ ID NO: 17800 - DNA, 397 bp, Arabidopsis thaliana columbia
tgttggtgctcgctaatatacattagtctggagtacggtttgtgcgagggattgtgaaagatgtgcagtctcagaagttaatacttgacgatgtcacagaggttccctacggactcttattagaggtccactggtgttggtccttctcctttcgttaggtctcttggtcttccaaaagatcctactggaaggtaagtgcgaccactccattacaccctttttaattaaaaaaaatattaaacatcaactcaactttggcgatgtttatctctataggattggcatatgacgaatggatgcgtgtaccttcagtgcaagacgtgtttgccattggtgactgcagcggatatctggagaccaccggaaaaccgactcatcctgctctagctcaggtaga

SEQ ID NO: 17801 - DNA, 808 bp, Arabidopsis thaliana
catcctccagacgaataactctaccaaattttgttacctttgacaacgatttgataagccgaaactgtttcctcccaaaccctaacgattatggtccttctctttctctctctttttctccttttaaaacgaaaagtggctaattaaagccctaatttcgagtttccttcttttctaggcacactctagggtttccattaacccaactgattaaaccggacgatttaaaaataaaccttaaccgattttccggttcacgggcgttacaaatataattgaaagtcaacataaaattgaagatttaaaatcacaattgaaagctcaagagttcatgctttaaaccatcgaaaatagaaactgatgatttaaataacatttttcctaaaagaacaatataaaatatagatcaattgtggacgatactatatttataatgcaaatctgactttttatcggcgcaatcgtggacgaatgtgcatgtgcataccggcgcaatcgtgcataccggcgcaatcgtgaggggaccgaattcatccgaccagtattgcgacaaaagaacagaataatctcatgcagagcctacaagttatatcaatgccgcctttattggactcgtcgctgctctgatcagttcttcccaacaaacctacgtttagatttttttttatatcatatcattgtatcatataaaatttaataaatattttcacgttagactttagtatttcacttctttctatttagtaaagtatatattagaccgtaaatatctaagaaactatagtagctagctaaattacgaaatata

SEQ ID NO: 17802 - DNA, 516 bp, Arabidopsis thaliana columbia
cgagccagctgtgttttccggtgggagctttttcccttctctgaggcttttagtcgtatttcgttggcacctccgcctcaatccccagcatttcccacgcttccggcagtaaccaatacagcgaccaagaaaggtgagtcttccaatagcaaaactatacttacttgtatactacatctaaaaaaggcttaaaattttgcaaacagaggatgaactatgtatctttcatttcaatcatctcctgcccgttattcggacttttgcaggtagcataacaatctcgataggaattgtctgggcaatcattattcctactgtcattgttgtcttcttggtactgcttgcgctaggatttgttgtttataggaggaggaaatcataccaaggtgagttgttctgtgttttaccatcatttttctcataatttgcggatcttgatatttttaggggatattgaaaagaaatggttcaaatgcacaatccaaaggctgtctctttgcagacaggagtgatact

SEQ ID NO: 17803 - DNA, 1072 bp, Arabidopsis thaliana
tacccacggtttttaaactgtgcttgatcataccaaaaaaagtaaaacggttctgatgtagttgtggaaagagttgtaatatgttactgcaatgtctgcaggaagaaatagagagttcatacaaaaccaagattgctaagactaaggattcattcagctggtgaccttagtaaggtttataacctgcttatttcagtcttagttttgatttcagtttggttcagtttgtaatgtacaagtttctctaagctttataatctatcagtagagtctctctatcttgttgtggtgtttcctaagaaaattatagcctttgagcgagtgattgaatatatttatatggtaatgaatcacaccgagtcaccgatattagttttgtaattaaagatcgttaagatagcggatgttgaaaggggtaccacagtttggtcaccatcaagaagtgctttggcaacaatgagatttgcagcttcggttgggtgatacgcgtcccagaagacaaacttggacctgtcctcacaagctgcttggcttgagttctggttaggtcccttaaagcatgcaaacggtggaaagtagccgccacaacacggcttgtctgcgttcttcaagccttccaaaaagttcaaaattaaacgtttcagtagatttttatcaatgaatccgtcgctactagaatcagtaaaaaaaaaaaaaaactaattcttaccaaatagttgatagttcaaaactagtttcaagaataggtcgtaagagttggcgtagacaaatgtagtgttgtaatcttcggatcttaactcattgttcaatgtcttaagagagtgtataagcttcatgttataacctcggactacttggttgacttgttcggagcattttccggctggtattaaattcaacgctcgagcaaagggtatgcaaccgagtggccctactccaaccaccacgaacttcctacctcctagctgatgcaatcgctgtaaacacgcaattgacaccgatttagattgtgtttacgtttacgttctgcttattgtaagcttgcttgtaaaaaatttgcaaaaacatttta

SEQ ID NO: 17804 - DNA, 489 bp, Arabidopsis thaliana
tgataggatcacttgtttaagtgggtggaggatgctgtgtatgaggaggttgaagatgtattgccaaacctaggaatcatggcaaatgagattgttaaagctagatccgaggttaatgagattgttaatgagttgagtgcttctattcaagaattgaaagaagatgcaatgtgtagcaaaatggaaatccggaagttgaaagtgttggtgaaagtctctttggtgtgtgtttgtttaatgacaattgtcattgcttaccaaatgtttggtaaagcaacagaaacaagctttgttctaggtcattagtgtaaggattgtattagtttgtcttggattttgtcttggtgtatgttcttgtcggatttatgttcttgttggattaagttcttgttggattaagttcttgttggattgtatgtttggtaatgaatgatggattttatctatgtttttgttggattctatgtttggaaatgaatgatggattgt

SEQ ID NO: 17805 - DNA, 564 bp, Arabidopsis thaliana
attgccattgataaagctactgggagattactaagcttggaagatcgttttcgaggtctcgtgattatgatgctatggggcgcagaccaagtttgtgcagtgccctgaaggtgagttgcagaagaggaaagaggttgtacattgtgtcactcttcacgagattgatgttatcaacagcaggtacttttaacattccctgaattgtaaacattggtaatcatgatttggtatctgcaataccaatgtaggttgcaaaattgaagttttagtgattaggtgattgggaatttagttgatttggctcactaatttcagatgagatgtctcaaatttgagattaattcattgctttatatgctcttgaaattctcaagctcattttctttagcagtgtgtagtcagagcactctttataactataactaactcatctgtttgtggtatcgttagaaccaattttggttgcggaatttaatgtttgaaacatgattggtagaacaaaaaaaagtaactttgtgtacttcttctttgtttgcttgcaggacacaagggtttcttgccctt

SEQ ID NO: 17806 - DNA, 510 bp, Arabidopsis thaliana
agctgcagtcttctaagatagatacattctcttcaatctatctccaattggtaaataccacatcttactaaatggtattcttgttcttccatcacttttctaataccttggttttccgcagaacttgcaatgctctaacttctcatcatctttccaaaagagcatacaattgtctatacatacatcaaatgtatggtacggcaatcctagcttttgcatcaaagtctctatctcgtagtaggaaccggtcgccttattaccctcaggtaaatactttgtaaacgtttccgcccatccgtccatgcaattttctgacaaattgtggtcgactttatggttcatgaaccgatctgccaacgataattgcgaatgtaccttcttgacaaacatcgtaaagcggcgtgtttgcagcaactaacatatcataatatcgtttcgcttcttgggtaggtcttcatgaactcggtatatggtacagaaccatgaaacgcatgattaccatcccaacat

SEQ ID NO: 17807 - DNA, 859 bp, Arabidopsis thaliana
atccttccgtaacgaatggtttacaggaagaaatcttctatgacaatcaaaccaacatgacttcctaccatctggtaaccaaaatgcttttgtatcctccataccaattggacacgatattcttccatgtgtagtccatcctgacaacatgccatatgctggaaaatcgctaatagtccacataagaactgctttaaggttgaagttttgctctaaggacacatcatatgcctcaactccattcatccataaatcttgtaactcctcgataagtggttggaggaaaacatctagactagctcgtggatgatttggtcccgaattcaaaatcgttagaaacaaatactcactattcatgcacatatcaggaggcaagttgtatgaagtcaaaattactggccacaacgaattatttttggacataccaaaaggattgaaactgtcagtacataacccaagatacacatttcgcggttctgatgcaaatgcgggctgcaattgctggaaattcttccactcagccgcatctgatggatgacacattaatccctcctctaattcatgctcagcatgccatctcatcgaagctgcagtcttctcaaattgatacattctcttcaatctatccccaattggtaaataccacatcttactaaatggtattcttgttcttccatcactttccttataccttggttttccgcagaacttgcaatgctccaacttctcatcatctttccaaaagagcatacaattgtctatacatacatcaaatgtatggtacgacaatcctagctttcgcatcaaagtctctgtctcgtagtaggaaccggtcgtcttattaccctcaggtaaatac

SEQ ID NO: 17808 - DNA, 533 bp, Arabidopsis thaliana
taatttccaatatttgttataattctcaccgttcacgtgtcccctcgacatcgcatatataacaaaactgcccttgattccggcaaagagaaagagagaatatgatgatgctaaggcaaacgtcgagaaaggcttacctagggttacaggcgtctcctctagggttaggtcgtcgattataccacgagaatgtaatcgaccactttgacaaccctagaaacgttggctccttcaacaggaatgaccctaacgttggcacgggattggtaggagctcctgcctgcggagacctcatgagcctccagattaaggtcgatgattcaggtcagatcattgatactcgattcaagacctttggctgtggctccgctatcgcctcatcttccgttggtatgccttcgaatcagggttttcaattttgatcgattcgttaagaggctcatgatcagagtcaggtagatgtagacaggttataatttgtatatttgtttggttcagcttctgaatggatcaagggcaaaaccttagacgaa

SEQ ID NO: 17809 - DNA, 624 bp, Arabidopsis thaliana
tggattctgtgcttaaggtttattggtctgaatctgaatttgcagttatggttatgacccatttggtcttggaaagaagcctgagaactttgctaagtaagtagattcttttatcctaaaccttttgtgtttgctttgagctatatctatcgaatttgtcattaagattggttctttaatgaatgtggttgtagataccaagcttttgaattgatccatgcgagatgggctatgttaggagcagctggtttcatcattcctgaagctttaaacaaatatggcgctaactgtggccctgaagctgtctggtttaaggttcttgcctacgtctaatctttatttacattcagacttagattctttagcaaagcaagaatgtgttgatgtgatgagatggttctttttggaatactgattgcagactggtgctttgcttcttgatggaaacacattgaactactttggcaagaacatccctatcaaccttgttctcgccgtagttgctgaggttgtctcctcggtggaccgagtactacagaatcccaacggattggtacatatctctagtctctacattactattatcatgggaaaatgctaacttgaaatgcaatatttggtagg

SEQ ID NO: 17810 - DNA, 545 bp, Arabidopsis thaliana
aacgggaaggttctgaagcactagccaagccgtggtgggaatttttccacttcactttactcgaaaccttgatcgacgatgacagctccatctatggtgccattttcgaatacgaactataccacctctaccaaaatacccctcatgtgaaagttccacgctatgtaattgctttccgcggcacagttttaaagggaaaaacttggaagtctgatttgaaacttgacctcaaacgcatcttcaacaccctccatcaaggtggcaggtctatgtacgccataaatgtaatccgccgtatggtggacaaacacaaccattcagctatctggcttgctggacactctttgggagccgccctagtgttgctggctggaaagaccatgaaaatttctggattcctcctctgagagttacatattcaacccacccatctcgtctattcctctagagcagttacttgggggccaaactcttagaggtgtggttcaattcaccaaggctgtcgtcatggctaccgtagctaaggtcttaccgagctacaggta

SEQ ID NO: 17811 - DNA, 625 bp, Arabidopsis thaliana
ccaaaaattcttttagttttggagcagttccaagtcaaagtacgagtggttccaacgagtctgatctccctgtatatatacttaactttacaagaatatatggattgtgatgtcctgtgaaagtattgaagataactgaatatgaaggaacaattgaagagctagaggaaatgagacatttcatagagaaactgtcatgtcttgtgcttgtcaaagttcgtgcctgtgcaataaacgacaaggagaagtatcgaatcaccggagatctgctaatggttcgtagatcatcgaagtgcaatatccagatcaagttttatgagaaaactagtaaaggcatgaaaaaacattgttccctcctagtttaatagtatagtaagttggaacattattcagtttgtacgcatatttgcttattgttctgctaaactactctcgctacatataaaatgtttggtcgcatacataaccattttctgcaatttccattggacaaaaaagatgataattatttctcgatactgttaacaaactactcatgatcccccaaaaaagagaaacattgcagataaatggggatgcaaatgtgcaaaagacaagatgccatgtgatgaaagatgttgtgttt

SEQ ID NO: 17812 - DNA, 461 bp, Arabidopsis thaliana
ccagtgtgctgtaaagggaatgattttatcgcgggtctggttctgctggcggtgctggtgtttgatggacgcctgcgttgtgcgctggaacgtaatctacggcggcaaaaatatgcccgctttatgacgccaccgccatccgttaaacccgcttcgtcaggtaaaaaacgggaggccgcataatgcgtattcgcacgggttgggagactggctcttggcgcactgctcgttattgagattgtcgcatttggtgcaattaacccgcgaatgttagatctcaatatgttgctgttcagcaccagtgactttatctgcattggcattgtcgccctaccgctaacgatggtgattgtcagtggcgggatcgatatttcgtttggttcgaccatcggcctctgcgccattgcattgggcgaactgtttcaaagtggtgtgccgatgccgctggcgatactcctgac

SEQ ID NO: 17813 - DNA, 866 bp, Arabidopsis thaliana
cgttgagaatcacaatcatgttggagtgtaagtagccagcattgttcattgcttcataagcttgtccagctgtcatagcaccatcgcctataaccgaaaccacgctgttgttcatccccttcaaatccctccctacagccatccctgattcacaatttccgcatgcatgttaggaaagtgatttttcttgttttcttgtgacacaagaaaataacaagtatgacctaagcctgcagatagtgtggtcgaactgtgcccggtgccaaaagagtcatgctcactctctcttcgcttggtgtagccggagaggccattggtctgccttattgtcttcatctttcctcttcttcccgttagaatcttgtgaggataagacttgtcaaaaagacaaaaacaaaacaagttaaaaacacttgtacatgtagctaaaggaaaacttatgcttgcaatgagataaccaacctgatgaccaacatcccaaaggatcttatcatgaggagtattgaagatgtaatgaagggccacggtgagctcaacaacaccaagattcgaacccaagtgtcctccagttttcgaaacattaaaaataacatcagatctcaactcgtccgaaagaactttgagttcctacatagcagaacactttttcatcatcacatccttgatttgacacaaaacaaggttcaagacttggattaggatttatactttgatggagagatttttcatgtgcattggatggttgattgtgtccaataaaggagttggtggtctgtttgaataatattcacctttctctgaaaatgttgttgctcttacttttgactgaaccaaaaaaagatgttatgttattttcaattaattca

SEQ ID NO: 17814 - DNA, 490 bp, Arabidopsis thaliana
gtagccgctttctggttcattggttcatggatgatcccattcatggctcatatatcaggtttccacaaagaatccctaacatttagaggccaagctttgttcagtctgataaccgatgtaacagaaggcctagccgggattgctatcctccaccgttgcctctccatgttccgtccacttgcaagtgattggttccgctttacccttaaaggaaactggcaactagatgttatcataggctgtttcatgttccctttcgttaaccggctctcccaattaaacctaaacctcttgccactcccaccaactcaagtccagtctcactctcaagtgtcgagcagtctataatggctagagaccctgtggcaatggcactgtatgcagttgtagtatccatttgtgcaccggtttgggaagagatagtgttcagagggttcttgttaccgtctctaactaggtacatgccagtttggtgtgcgattcttgtgag

SEQ ID NO: 17815 - DNA, 600 bp, Arabidopsis thaliana
ggtatcaaatttatctagttttcactgttctttactaaatttttattttgtctcttatctactttagagtttagaagttccatattaaaaattttagttatgaaacaatataaccaaaaaattgccaagattgttcttgaatcttacttgtgcattgtaaatagagtctgttagcaaactttgaccattgagtattttgtgctttgtgtctagattcttgaatcttattctatggttattggacttcataaatccattttgttctttagtagttggtacccaaatattgatttttcaatagtttcagaaaacagaccaacatggaagatcggtgcttgatcaagaacgatatcactgaagtaataatctctaatttcttatatatgtatcactttgcttttttatgatacaaagaacatgtctaaaatctttttctatgtatgtgcagttgattggtaacacaccaatggtgtatctgaacaatgttgtcgatggttgtgtggctggtatcgctgcgactatgacgatgatggagccttgttctagcgtcaaagacagaatcgcgtatagtatgatcaagatgcagaagcaaaggattga

SEQ ID NO: 17816 - DNA, 846 bp, Arabidopsis thaliana
ctggcatgaactgtatggccgtcgctctcgatccactaaccgaccggttttcgcagtttagccgatcttcacagagatgtagactccaatctttaaccaaccttgacttcaactttctcggattcaacactaaacaaaccaatctctctgcttcctcacactccttgaacaaccgaagcgtttctactccatgcttctccatatccggtagtaatctagatggctctgctactccgcacattgagattctcggtggtcaaagagtccccactgtacgttcccttgtagctgaagtaaccatagctatcgtttctggagctcagcctctgcttttaccaagtggtttaggaggtgcatatctcttgcaaaccgaaaaaggtaacaacattgcggttgcaaaaccagtcgatgaagagcctttagctttcaacaatcctaaaggatctggcggtttaacactcgggcaaccaggcatgaaacggtctatccgcgttggtgaaagcggaatccgtgaattggctgcttaccttttagaccaccaaggcttttccagtgttccaccaaccgcattggtcagaatctctcatgttccgttccatgacagaggtagtgatcacgccgcctataaagttgcctctttgcaacgatttgtgggtcatgattttgatgcaggagagcttggaccaggaagcttcacggttgtatcggtccataggattggtatacttgatgtgagagtcttgaaccttgacagacacgccggaaacatgttggtgaagaagatacatgaccaagatgagactacttgttctaacggagttggagctgcagagcttgtgcctatag

SEQ ID NO: 17817 - DNA, 880 bp, Arabidopsis thaliana
ggtcaaattaatagtggatgtgtgattttgttagtcatgatgtgccacacgggaagagacaattcatggaaaaactagaaaacatagacgaagaaggtccatcgacggtggcacgtgaagtgagacggcgttaccaccggagacgccaacggagatgatggagttcttggggagatcatggagcatttccgccgtcgaactcacgagagcttttttcaacaattccactgccgacactaactcttttcttctatctactatcgttaacaccaacaaagaagacagagaagatgaagaagattctacttccatggcttcttctcgtgaccttgtaagtctactctcttcctattttctgaacactatttgtttagttatgaaaaattctactagatggcaacatgcactagtataaaacttgagtatataaacctactatgatactaaatgaacatcttttaaaatgtacgacgtgaagaatgagtttatctaagcttttttctattatttgcttatagcaatttaacgaaatttctacctacttaattaaaattgtaaattgctatttattctgcatattttcccttctgttttatcacacggccgctcaagtttatttttaatttgtttttgggtaaaagtaactaaactttgcgcatgaaaacttttatgtgaggtttatgtattattttttttggtttgttgctgacttgttgttgagtgttattaaagaactaaatcgattttacctaaagcgtaacttttgttataggttttattacttaaatattaatttacactttcattttcaatgctacaagaaaaagaacagaaaatttacaattctgattccatttttcagctgctgccacatgtggga

SEQ ID NO: 17818 - DNA, 1001 bp, Arabidopsis thaliana
ataacacaccattgttgaaaaatggagatctaaattgacattatatatgaaagacaataaataagatacaacgttttatataaacaatatggattatatacaatagttaaaaaatccttagatgtctgttaaacacagcgttttggtgagttaactcgtatggtataagtttaaagcattccagtaactatattggtatcaaaatctacattcatattaattcaaataattttttacgtttaccaaaataaatccatataaacatgcgattgatcttgggcaagagaggtgttaaaatagtatcttggtatgactattagttgaaatttgactaatgcattcaagaatgtatatttattgtaagaaatgctcaggtatcttatttgataaagaatgctcacgtaccttaataaatacgtgtgcatagagtttgtgtgtatatatagatggttatgatcagggaagaagaacacaacacaactcacctcaaacagacaatttaattccaaaagataaaaacaatcaaaagatgaatgccacaaagtttgttgtgcttctcgtgattggcattttgtgtgccattgtcaccgcaaggcaggtcgaagaagtgtccaaagagaccaaattaggcacctctcttccaaaatctactaacaaaggcattggagctcagctttctgctgctggtcttacttacagcggcagcagtgtctctagctctgctagtgcttttaacaatcccaaaggtccaggggccagtgcatccgaaagtggctacacaagtaccatcggacaagtcattgccaagggtcgcaaggcaagagtttcttctgcaagtgcttctgccgctacaggtgaggctgcagctgcagtgactcgcaaagctgctgctgcacgtgcaaagggtaaggtagttccgcatcaagggtgaagggttcctctgagaagaagaagaaggaccacgaaaggaaaaaaggattgagcgtgaggtcatgtcaggg

SEQ ID NO: 17819 - DNA, 1459 bp, Arabidopsis thaliana
ttctttgctcgtgcacgatatgcaacataaacgggataaaaaatgtttaatggcattggaccaccactcgcaattttcgaaccaaaacaccacgagcatagtctcaccctcttgttaaggttagtcacctttacttgtaatgcttgtggtgtggtagatgaccgcaatccttacgtatgtcttgaatgcaatttgatggtccacaaagagtgtgttcagaatctaccgcgagtcataagcataaatcgtcatgaccatcgcatatctcatacttttcaccttggtcaaggagaaggagattgggagtgtggagtttgtcggaagacgatcaattgggtctatggaggttataaatgctctcgttgtcctagttatgccgttcattcaagatgtgcaacaagatacgaagtgtgggatggtttagagctcgaagatgtgcccgaagaagaagaagaaatcgaagatccattcaaggtaattaatgaaaagggagatatcattcattttagtcatgaagagcatgttctcagattggacgagatttatgtaacggatgatgctaacatgcgttgtcggtgttgcgttcttgctatcaacggtgacccatgctacagatgccgttgaatgtgatttcatccttcacaaagcgtgtgcgaatcttcctcgaaaaatgcgacatttattgcataagcataaactcactctttcatcgacaggtaaccgttttttgagatgtaaagcttgtgacataaaaactaatggtttcatttacgagtgtcttcatgaaggttgcaaaagtattagttttacgtacgatgttcggtgtagttctgtatcggaaccgtttcaccatgatctgcatcaacatcccttatattttacgttggagaaaaccaataaatgtcacgcttgtaaaagaaaaatagattggaatcccttgaattgtacggtttgtgatgattactctttatgcacgaggtgcgctgctttaccaagaaaggtaaaacacagatgtgatgatcattatctgtcactatgtcaaggtgtgggaagtgcaagtggtgacttgtggtgtgatatttgtgagacaaagacagacccgagtgtattttactatacttgtgatgattgtgggctaagtctccatattgattgtgtacttggggattgctattataccaaagtcggatgcccaggtcctaggatggaagtacatcctaacaatggtgctactcgacctatctgcaccaagtgtgaattacgttgcaagttcccttcttcataaagggtacagaagaagatcttggtatttggtattgttcaaaagatctctgcccaaaggagtttaattttgcagtttcaccttatagattcgctctcgacatcggacttcgggactgggacttgagagtcttttaacatatcgtattacgaactattttcaaattttattgtattg

SEQ ID NO: 17820 - DNA, 958 bp, Arabidopsis thaliana columbia
tttcatggagtcattaatatgtagtattaaagtcaatcacatatatatgtgttagagaacacaatattggattgacccgttatgaggactctacaagattgttatatgagtgtcataagagtttctcatcacaactatagagtatagtcctttgacctgagttcgtcatgatttcttactcatggattagttcgctttgactctttcaaacgtcagccataaaaggtgattatatagacagtgattgggcgcgttatgaattgtttaaggaacagggatggaacaagatggaatttgtccctcccatataacgggagataaatatctttgggcctatcgaagatttgatactgaaaaatgcgtggccgcgctcaaacaaggtgaatgtcagtcgtttgttttatcagtataaattggagttcgataaacatggtctagctgaataaggatgacaatttcttgccttatgctgagatcgagatatagagacaaagggattatgggaatagatgattccagtacaagtgggagattgttgggaatgtcctgaaatcagttgtactttattctagttaaagttgtaatgtcgaggtttgacatttgtataatattacgtggttataatattttgcaagagaccgcttataatctatgagtcagaactcattgctaatattatacaaacctacagggtcatacacttaagcaaattggatcaattaaaagagttattgggcttttgccattattaaccctaattggttagggttaaacgtttggctgtatatatgatatattagcaacttttgtgagatacacttttgatcacaagaaccctaaaataaagagacaacgagttgatctaagttttgagtttagatctcaatggaactagcattccagatctgatctagtttgtgtgcgtgtggataccggtagaggcacaacacttggggtg

SEQ ID NO: 17821 - DNA, 449 bp, Arabidopsis thaliana columbia
ggatatacgaagaccatttcttcttgacgatggaggcatagaggataacaagacctggcatactctgtagaccaaccagagtcgctgccgtgagctgccacgcgttgtctcctttgttgagccattcaggaacctccggcaagcttggatcgtaagctccggccattttgttattctatctttcccggagttgatgaaatctttgttgggtttgtgatgtttatagtcaatggtacgaattttttttgtgtaggtgtgaaagcctttaattataataatgtgtgtagaatagacaagacacaagttgggtttggtgttttgtttgcacattttgatggagagaagtcttcgaggtttgatagatatgtttctcattcttcaattctagtcttgatatttcaatgaagcttcttaaattctatgtgtaaattactaggagaaagaatatg

SEQ ID NO: 17822 - DNA, 900 bp, Arabidopsis thaliana
tcagtatactatgtgattcattcatggacagtacgacataaaggacctctgtacttagccatatttaaacctttgtccattttaatagcagtggttatgggggccatttttctcaatgattctctctatctcggatggtattaatgaatcaatagtcttcataaacatatctataaacaaaaacatctactcaccttcgattttgtccttcgttttgcagtttgatcggaggaattttgataacattaggcttttacgctgtgatgtggggcaaagcaaacgaagagaaggatcagttatcattttcagaaaaagagaaaacgcctcttctattaaaccgcaaaaacgaccaagtttaaaaagaaaaagaatatagacaataaaactactaatagttaacaaatactgttattaataccatatttataaaattgtcttatgtctctatgaacctaggagttggaaaaaaatgtgtgtatttagatttttttttcaaaatactccaacatttataaatacgagttaacatttttccttgactcctttggaacatatgaaaagcttaaattgatattctttgaagcaatgataggtaactgcaccaagtatatatcccggtatagtcacacatcccaagtttagtgaactacacgaattatgtgtattgtatgctaatgtataccaattagtaacatatgatcaacaccatcatattccttttacaccgtttgtcaaatccatttttaaaaccacttttggtgaattacgccgtagaaaaacaagtctaacacattgtaacattttgaagtggtaataaaatttctgattcaaggtttcaatatctataattattgaagtggttcaatatccattattggatgatcatattttggcacaact

SEQ ID NO: 17823 - DNA, 448 bp, Arabidopsis thaliana columbia
catccatagtcctacatctttaaggagcttgtttcctgaagcatcttgttgttcaatgctctctgcaacaagatcctgtcctgctccttcagcaatcactataaccatgtggccattttctctgagacgttttgcaatgaactcatagagccctcctttgccttcaaggtaaaagggtgactcgggaatcagacagcagtcaacatctcggctagccagagtagcatacattgcaatgaaccctgcagtgtagaagctgtaagattagataaaagcgtagggagtaacatcataaagaagatacttctgtggtctaatatttgtatgcattactgctctcctagattcctctgtgaacttaccactgtaccgacccattagcctgacaattccaatgccgttttccacactggtcgcttcaacatgcgctgcattaatagcacgttga

SEQ ID NO: 17824 - DNA, 579 bp, Arabidopsis thaliana columbia
ccttacgaagaagcatcttcatctcagcttggagaagttgttctattccacgggttgccacacttaagggatgagcaccatgctagctttggcttcgatcatcaaattgaagaagcgtctcattctcagattgaagaagtttttcaagtttcgttcaatgagaccaacactgtcaggttaaaacctgcgagcaagctcactgtcggggctttgaataggaaaacatacaagaaagctagtggtgttgtatgtgagaatgacgtgtgcactatttgtttggaagagtttgacgatggaagaagtattgtgactttaccgtgtgggcacgagtttgacgaggagtgtgttttagagtggtttgtgagaagtcatgtatgtccattgtgtcgtctcgagttgccatgtgaaagataagggtgaagaagacgaaaaggtcaccaaattttgtttaaagctttacgatttccaaaatcatagtttagttttctgcaaactcttgtctattgttcttgctcttgattcagtttatagtattggactctcattcaagaattataatcaggttgatactaaattttt

SEQ ID NO: 17825 - DNA, 498 bp, Arabidopsis thaliana
gccaagagtaaacatattgtttcaagactttgcttgcctctatcaacgtaatcgccgaggaagagatagttcgctgaaggaggatagcctccgtattcgaatagcctcagaagatcttggtactgtccatggatatcacctgaattagagatcaaaacggaaaccattagtacctcataaaacaaagcatcagcagatttagaaacaatttgcagaaactttaacataaatccatcaaaatcaaaactttttagatcacccagatgctaaaatcttcaaacacacgtttcgacattaagaaaaaaagaggaaccctaatcaacacaaatttgcccccaattacaaatctcatctttttaaccccaatcgtgcaatacgactcaaacccaaatcatcaaaaccaaaaagccacaatattttttcatcatcaccacaaagagagggagagaaagagaaagagaccgcagatgcgaatgggggcatgaagctcgagaagat

SEQ ID NO: 17826 - DNA, 326 bp, Arabidopsis thaliana columbia
cgcagtttgcaacaagacattaaaaagagggaaacacagactaaattaaaaactagtcaataagccttgccaattaactactctttgggaaagagacgaagcttgcactgcaaatagtcattcgtctttgctagctcgacaatctcttcagcttcgtcttgcttggaccctttcaccaatgcatcaactacctcctgcaggacagcctcatcgactagcagacgcttagcaaatatttccttgcagagctcataagcagactctaaatcgcccgccttacatattgcaggaagcaatgagttaaagacaaatttcaacgggcgaca

SEQ ID NO: 17827 - DNA, 539 bp, Arabidopsis thaliana
tgctctaaagcatgattagttgaccaaagatcttcagaacttgctccatcaaagactggtgtcgcaatgtgaataccaagagtacgagctgccataccaaggtgaagctccataacctgaccgatattcatacgtgatggcaccccaagtgggttcaacatgatgtcgactggagttccgtctggaaggtaaggcatgtcttctacaggaacgatacgagagacaacccctttgtttccgtgacgtccggccattttatctccgaccttaatcttacgtttttgagcgatgtaaacacgaaccaacatgttaacacctgattgcaactcatctccatttacacgtgtaaagatcttaacatcacgaacgacaccatcggcaccgtgtggtacacgaagagaagtatcacgcacttcacgagacttgtctccaaagatagcgtgcaagagacgttcttcagctgaaagatctttctcacccttaggtgttactttacctacaagaatatcaccttctttacctcagcaccaatacggata

SEQ ID NO: 17828 - DNA, 487 bp, Arabidopsis thaliana columbia
ccagcgtttttatcggttcctccgttgccaccagcattagcaccagggttagttccggctttaccactgctaggttttgagccaccaacgtttttttcggtttctccgttgccaccagcactagcaccagggttacgttccagcactaccactgctaggttttgagccaccagcatttttttcggtttctccgttgccaacagcactagcaccagggttagttccggcactaccactactaggttttgagccaccagcgtttttttcggtttctctggtgccatcagcaccagggtttagttccggcactaccaatgctaccagaatcacttccgatgccactagcaccgggcttagctccggtgctaccacgaggatgagcaggggcacaatgagcgtcgatggagttgagagcatggctgctacttccaagtaaacctgacaatctggttatctttgggtgcggcatcagataagtagctactgg

SEQ ID NO: 17829 - DNA, 414 bp, Arabidopsis thaliana columbia
gtaggatagtttatcctgttgaatacgtaaggtttctcacacaaaggtcttgatccaggaaactgaagattatgatggcatgaactaggaagggttacaagaggagttcgagggaaacaaggatgcaacacgtgcctttatgcgtgtcaagcaaaaacttgatggctacgagggtggtgagatgagaagcatacatggccaggtaaagtttttgacatattaattaaagagtataacatttaaagcttgcattgttcttgccttcttggtgttactgagtgtatttgctcaacacttaattgttttgtaggcacagcaactaatacaagacgcaattgacacagatcgtttgtcccataatgtccctggctggggagcttggatgtaccaaccttctatatgcttccaattttt

SEQ ID NO: 17830 - DNA, 627 bp, Arabidopsis thaliana columbia
cctctatactctctagcttcgcagataaattaggaaaagtcattttcaaaagattttaaagctcttacttttgaatgactagggagaggatctgatacgcgacagcggattccatttgcaattgtacggccatgtgctttaacagaagagcctgccggagctgatctcattttcgaacaaggagacaacattacggtattttcaatttcgcttctccttgaaatccaacaactctttaagttaactaacctaaccaactttacctttatataggggaaggtatcaagagacgaatagcgcgtatatgcatcgctgctttagaaagcccgtatgctcttaacaagaccttcgaggtttttaaagaatcatcaatttttcgatttttccgggttgctattcaaaaagttaaatttctgaattgggctgttttgtgtgttgtttgtttgtttcaggttaaaagtacggttccgtttagcgagcctttcacggtagatcctgagaatcctccaccggagaaagactacaatgagtatttcaagactctgaaagatggaatcaccggtaaagaagctttagaacagagcactgttgcagtttaaccaggttttactacttttgtactgtgtg

SEQ ID NO: 17831 - DNA, 536 bp, Arabidopsis thaliana columbia
ctaaaaattttcattacaggggaagagaaacaggaaactattttgggttccggcaattgcgcctcttatttcagtcattatctctaccttctttgtcttcatttttcgtgctgataaacaaggagtccaaattgtaagctcacacattcatgtcataaacatacgttttaaacctgattgatgaataatattttgatagattatactatagttaccaacaatatttttatgatataaactatgaaggtgaaacatatagatcaaggaatcaatccgatttccgttcataagattttcttctccggaaaatatttcaccgaagcaatccgaatcggaggcattgcgggtatggtcgccttaacggtaagtcacatatgcataaaatttaagtaagatctccttaatatatgtgtagtctcattcgcgacattatggcaacataatttccttctccaggaggctgtagcgattgcaagaacatttgcggcaatgaaagactatcaaattgatggaaacaaagagatgattgccctagg

SEQ ID NO: 17832 - DNA, 934 bp, Arabidopsis thaliana
tagatatactccagaggaagaaactgagctgaatccttgttttaacagataatgactccgaaagcccgcgcagacattcatatgaatctcccagctcttcagaagttggactcaatgctaattgtgagcggattatctcttttgttaatcttgtcttttcttattcttctatttcctgatctgattaaagttgcattacaactccacaggagacactggattctatggtgaacacagagttttggtattctgagattggtagtagagctgaagggaagaacaagagtacaagtgagagcaaacgatggtggcttccatcgccacaagtgcctaaacctggactctctaactcaggaaggaagaaattgcttgacaaaggaaaagttgtttatcaagtcttcaaagctacaaaagccataaacgaaaacattcttcttgaaatgccagttcccattgttatcaaggaagcaatacctaaagtaagcttgcactctttattatcccttgtgatagtcataattatacaactacctctaaaatcttgttttgtaacagtctggaaagaacagcctcggtgatgaactgtacaagatgttggctgtggaatctgcaacagtagatgaaatctttatatcgctcaatctgggaaccgaacatgcagcactcgagacagttaacaagttagaatctgctatgtttgcttggaaagaaaggattacagaacaaggcagcaatggtaaatcccctgtaagagcatcgtggtcattcgctaaagatccgttgtctgaaattggtcgcaatgagtcactcttgaaccgagcagaagcgcttagaactcagatcaaatccaaacaccctaatctccctcactcgtttcttgatgctacaaagatccaatatgacaaggtataaataaacaaaactaactacatct

SEQ ID NO: 17833 - DNA, 527 bp, Arabidopsis thaliana columbia
cccggatttgaaggttgtaggaagcaagttaaaagacatattggaggttagactctctcctatacacaatgatttcacactttaatctataaatctcaaaagagtttctttggtggaactctcaggtccagactagttctctgaagatgaggaaagttgtgatcagcctatgtaacatcattgcaagccgaggagctcgtttatctgctgcggggatctatggaatcctcaagaaaataggaagagacgcaacaaaagatggagaagctcagaaatctgtgatagcgatggacggtgggctattcgagcattacactcagttcagtgagtcgatgaagagttcattgaaagagttgcttggagatgaagtttcagagagtgttgaagtgatactgtcgaatgatggttcaggtgttggagctgcattacttgctgcttctcactctcagtatctcgaacttgaagatgactctgaaacaagttaattttaaaagccttttttttgtgttaaccttcttctttgtttt

SEQ ID NO: 17834 - DNA, 606 bp, Arabidopsis thaliana columbia
gaactataacgcaaatttgaaagaactaatggaggtctctcatggaaatgaggcaggaaaaagaggtttgcacgcgtaccattgatttattaccattagttctgtaatagtacatggagccatgactatcaaggacaaaaaactttcttttccaatcagttctcaaacttgacgaacgctttaatagatacccctgtttaattacctgcatcagtacaaaggaactctgtaaaacaataagaattcagcctgttctgaaaactaagtgtaaaatgattacaaaacgagtctctatatgttgcataatcgcattggcgcacaagatgctaggagtaattttgtaggggctatcaggaaattgacataatctaaaatgtatcaacagatgtacaacaatgagtggcttaaaataattgtgttgcaggtagtaaaaaacagtaataagccagatttaagagctacggaaccaaaaggtaaaacgtgaattgctcgcaattcttgcaagaatgaaatcagaaacgcttacttccttgtctgctgttaaacttgtttcggtatttttgtaagggatatcccaccaacacggttcccgttagcaccagacga

SEQ ID NO: 17835 - DNA, 597 bp, Arabidopsis thaliana columbia
gattgttacaaagtgttctcaccatttccacctcagttgcatttatgaatggatggagagaagtgaaaactgccctgtttgtggaaaggtaaacacttttcatgttcttccaagccagttttcggcttctcatttactagtgtttcagagtcagactcagacaccatcacgcgtaaatagacgagtgatccagagatcaatagaatgaaagatgtacaacaaccctagaagcacatgcgtaaaatctttacttgtcttgtctatgacaaatatggctaatcattcttcctgaaactcagaacatttgaattatttctcattcatgttgactaaagaatatttttttctctgctgtgaattcgtctcatttgcaggtgatggagtccacgaaacaccgtaacttgttgccattgatcctgtcttgtactgcctagaccggacctggggagattgacaaggcagcagagagatgtgaatatattttttaacaatatatgatattgtatatgatggggacatgaggaaacgtctctctgcacgtttggcttatggagttctgaggaaccctcttgagagaaacacagcagagcagacaga

SEQ ID NO: 17836 - DNA, 434 bp, Arabidopsis thaliana
cagtgtgctctaaagatacagactgggtaggaaatcgacaatcaaatatggtgaagaccagatacgttcctgaccctcaagtgagacgtcatgacgctggttactgtcggaaaaatcagtgaaagcccaggagacaccgtacttacgccgctcattttgataccagcgaacataagcctgagcactgttgcctgtaacaccatttttcattgcccgtaatggaacgcggtgagagatgcgttccagttgcgaaccaatacgccagttatcattaagatcataccagccagacatgcgcgcgccgggtttatgctcatgattgaaaacgcgttcagcgactctgcctcgatccagagattacgtgaccgccactcaacacccgcaagccagtcgcgaacaatcgcttttccttcgctaaattgtccatcggcata

SEQ ID NO: 17837 - DNA, 555 bp, Arabidopsis thaliana
ccacaactcaaaacaatgtaaaagatgcgaatagtccaaaccccctcagattgaagataagagacaataggaagtagagagacggagccataaacaaacaaacaaacaaacaaaaaagtattacacctgacaaaagaagttgtgctgtgattaatctttggaccccagataattatctttgttactaagaactcgctccaaagacacggattctctgctgaaccggagctctgcaacaaggacaggtcgctttgccactgcccatgaagctatcgctgcagctcgcacagaccacttggtgagcacaagggagaaacacaaccgaaacctcatctttcatgcagatcagacattcccggtcatagtttgcttccttctcatatgatccatcaagcctattcagctcttcaagcagcttagacattgtttctcccttcgacttgtctgatttcacgtttgtgtgagaggtgttattggattggaggcttgagtcagttgaagaggctttgttgagccgagacagctcttgttccagtctttggagatcatctttgt

SEQ ID NO: 17838 - DNA, 669 bp, Arabidopsis thaliana
  unsure (1)..(669): unsure at all n locations
gaattcttttgttaccgattctagactttgggatctggaaagatgaaccaatgactttgttcgtgcctctaatttggctattagtggttttctgactttgtatctgtttgatttctctgatttccttcacctattgactaccttgtttttgcagaattggcctcagataacagcattcccttgtctccgcagtggctttacacgaaatcaagcgagtacaagatggtaatacttaatctagaaagatgatatacgtttcttgtcttcttctattcacctcattgtatcagatgatgctatgcctgttcttcacatgtagaaagtgtcaagtcctttatttatctgtaaattgtttactcttagttcttcatctgatgttcttgctatgttgtaggatgttcgatctcctactcctgttcccatgggaaatccaagtgacccaaatccgaaggatgcatggcgcttggatgcacctgaagacaaaaaggactggaagaaaattgtgcatgagaatgaaactagtcgcagatggcgtgaagaggaaagagaaactggtttactcggtgctaggaaagttgatcgacgaaaaacagagcgtcgtattgacagtgcncaagcagagaactggtgacattaaaaatgctgctgcttctgataggtggaatgatg

SEQ ID NO: 17839 - DNA, 603 bp, Arabidopsis thaliana columbia
tgcagagttggtagaaatgtagccgctgggatgacaggtggattggcatatatccttgacgaagacaacactctcctccctaaggttaaacatcacaaattatcttgaagatattttctttattgtttgtgaaacattgaaatgaatcgcattgaacaacagatgaacaaagagatagtgaagatccaaagagtgacttcaccagtgggacaaacacagcttaaaagcctgatccaggctcatgtggtaactacctaattccctctttcctttctcttatcgggtcctattcgtctaaaatcatctcacggagtcgttttattatcataggagaaaacgggaagcagcaaaggggcaatgattgtggaagagtgggataagtatctagcaatgttctggcaacttgtacctccgagtgaagaagacacacctgaggctaactcagaccacatcctgaaaacaaccacaggagatgaagaacaggtttcaagcacattagcagagaagtaaaacctacacatttgatcgtggttcctctttgtacagtcaaagtcgtggtggaggagataagtaagtctctcagttgctgagaacataacaatt

SEQ ID NO: 17840 - DNA, 519 bp, Arabidopsis thaliana columbia
aaggtcaatccttttagaagaggattgcagcatatgttgctgctagtccttcccttgatggtctgccaaagagagaacatgctaagtgtaaacaaaggtggggaaaagtcaataaaagtgtcaccaagtttgtggcttgttataagacaacaacaactcataaaactagtggtcagtcagaggatgatgttatgaagctagcttacgagatctacttcaatgataccaagaagaatttcactttagatcatgcttggagagaattaaggtatgaccagaaatggtgtgaagctacaagtcgtaaaggagatgaaaatgctaaaagaaggaagtgtggggatggtaatgcaagttcccatccaatccatgttgaagatgattcaatcatgagtcgtcctcctggtgtgaaggcagccaaagctaaaggaaggaagtcagccattgtaaaagaaggaaagaagccagccacagttaaagatgattcaggccagtctgtggaacattttcagaatttgtggg

SEQ ID NO: 17841 - DNA, 391 bp, Arabidopsis thaliana
  unsure (1)..(391): unsure at all n locations
nnnnnnnnnnnnnnnnnnnnnnntaaagagcatcatcgcatcgcaatactcctgataacgctgttcatcgcgggtgtcatctttggaaccgagatacagaattttgtgcctgactcgcttctccagcatggtacacaccatgtcaaaagcggcctgccgattatcaaaaccgacctccatatccagccgttctccctgtacatccatcaattccacgaccggaatggtggctgaacgcagaaatttcaccgtcctgatggtgtgatatttttccgaaagtataatcccgtcaatgttataagagagcaggttaatcaccgactcttcttcggaatcgcgatcgtaattgtaattaagcaataagggtctgataattatgctcagaggtgac

SEQ ID NO: 17842 - DNA, 566 bp, Arabidopsis thaliana columbia
atgggatattacagatttacctcatgggaaaaaggctatcagtagtaagtgggtttacaagttgaaatacaattcagatggaacacttgaacgtcacaaagctcgccttgttgttatgggtaatcatcaaaaagaaggagtagacttcaaagaaacgtttgctcctggtggctaaattgactacagttagaaccattttggctgtcgctgctgcaaaagattgggaggtccaccagatggatgttcataatgcatttttacatggcgatcttgaggaagaagtttacatgcgactacctccaggtttcaaatgttccgacccttctaaagtgtgtcgccttcgcaagtccttgtatggtctcaaacaggctccccgttgttggttttctaagttgtcgaccgcacttcgtaacattggtttcactcagagttatgaagactactccctattttctctgaaaaatggcgacacgattattcatgtcctagtctatgttgacgacctcattgttgctggtaataatcttgatgccattgatcgattcaaatcacagctgcacaaatgt

SEQ ID NO: 17843 - DNA, 738 bp, Arabidopsis thaliana
accaccacaggaaatcccagatctggaaatcgaagatctcatcgaagagaactctatgaatgtgattgtaagatgcctcaacccgatggcccacaaggttggaggtctggttaaagctcttccacctctctggggtatggaagaccgagtgcgtgggagagggattggagacgaccaagtgcgtgggagagggattggagacgaccgagttcaagggatctgtaccatgtgttatatcgcagaccttggtttgtaaatgggtggatagtcacagtggatcaatggaaaccaaacccaagaccggatttcttgcaaaagattcttttctgggtgcgcattaaaggtatccccatccactggctcaaaagacaaacggtggatagcattattgggcctctaagcaaaattgatgctgtagaattacacgccaaaaactcttagtctctggagtatgtccgagcaagaatctggattaatgcggatgaacccttacagttcgtgaagacagcaacttttaggacaggggaagtcgcgcgcattgaacttgtgtatgagaagttgttaaaggtgagcttcctctacaaaaggctcacccatgaccaatcggtttgctcctaccaagtgattgagggctcagtggcagccagaggaaagacagtgaaagggaaggagcagccaaaccaaaagggcaaaggcaaagggaagttgtttgatgaaggagccccatcggatcagcca

SEQ ID NO: 17844 - DNA, 1100 bp, Arabidopsis thaliana
cattccctagtcattatgaacaatagtgaatatatgttaagcaatacctcgtttcttgtacccacactattggaactatgtgtgagagatgattggggctctttgtcagctttggaacttgtatcaaatataggcttccaaacacaaccattgcctggaataagaagataattttaaaagcaatccaaacagtgttgtccaataaaacatatcagaaaattatgatacttgttattaatgtataccttcataggatcagagttgacttcacaaactcctgaatgaattgctgcagccatatccacggtgacctgaatgtttagggttcacaaagagatggtgagaaaaacataagaatatattacttgcaagttataacgaatccacaaactcctatccaatataaaagtgaacatgcaagcctaatttagtttagacataaggatgaccttcttttcagagaacattgcaaaccctaacaatgaatgagatgttggaggcgtatccatggtgtcctaaaagttgaagtacacaaaaagatggtgagaaacataagataatattatctgctaatgttaagggatccacaaacatcctgtcaaatataaaagtgaacatggtatcataatttagttcaaacctaatgttgaccttatttttagataactttaccatgtggaacattttttctataaatgtttgttgcataatgcctgagagatgcagcaaacctctacaatctccaataaatgaatgaatgtaaatcattagctgaaactagttagaaatttatacccccgtagcatcattgccaatctttacttcgggttgtgcctccgacactgaatgccatgctgcaagtatctccacaataacctgaatgttgaagtacacatgtagctggtttgaataaatataagaaatattgcctacaaattaagaagtatcaacagaatcatgttcaataacacaagaaccacaacccataaaatgatacttgttgttactgcataccttataggatcaccgtcgatgttgacttctcgttgagtctctagcaatgaatgagatgctgcagccgtctccatgttgtcctgaat

SEQ ID NO: 17845 - DNA, 531 bp, Arabidopsis thaliana
tggctgggtccatcctctgctgaatccccaagagtgtctgcagtgaagctggatgctctcctctgttgacttgagaaccttaaaaagccaaagaaaacaaagagcaaactcagaatcaactagtccctacattagccgatattaatacctggctccctagagcagccgactcaagtccaaacaagatcttgatctgaggcccaaaatgagtgaaagtcatatgttcagttatgttatacctggtggtggcataccgtagttgggctggcgatgggcaaagggaaagccttgtgacgggtttaactcaggaatgagacccggcatctggttgtttaaatgaggagagtgatggggttgtggaccactaccggggaatccttgcattagatgatgatgttgcaggttgtcttgcatatgcatcttctgcatcatatgtggaggaagacgatcaaactcgggatgtccactagttggtgtatgatggaaaggtggacggtgaatcatgtttggtggaaccggtgatttggtgga

SEQ ID NO: 17846 - DNA, 1183 bp, Arabidopsis thaliana
tgaacaatataagtgtgtacaactgttaccatgtcttcggcaagtctaagcattcccctgcgactactagtatttggaatctgattgcgccttctttccttgtagctatcacttacaacctaacaaatgaatgttaatttctattgtatatagataaatttacaaattccaaatgcataccttaaactcttggctagttttgagcttcacaaacttacgccaatcaaaaggagaaatgtttttaggtcgcatgttcatcctctcttggttagtcttagcttctctaatgtttgtaacttgccttgatttccaggacctccacaaacatcctatctgcctaagcactataaccttttggtactcttcatctagttcaaaccttgcctgccataaaaaacaaaacagtcaagtactcaccaatatctaataaacttgtaaattttacacaaagcttacctgaacagacttccagagaactgtcctgagttcttcaccaatcttagtccaacgttcaattgtgactgaaacgtgttctcttaccaattgcccctacatatgatgccagcttaactgagtctttaccaataggctctcccatgttagtgaactctactcttactctgacatttggatctttggcaatatccttcagcctagttggtcctcgatgtcgtttacgctttggctcaacacaatcatcaccctcagataaaacaagctctccgtgaggctcttcctcattgaccttatccagatctccatcaaccacctgatctggatttgctacttgatctggttccaaatgatcttcatcattcacctaatctccatcaaccacctgatctggatctggtacttgttctgcatctgatacttgatcttcagctggttttgcatgttcctcatcattgacttgtggttcaattgttccaatatactcgacctcatcattggcattctttgcattgacctttttttgttacttttacctcgctttttcttctgttgtcccatcttaaatcacctgagaaaaatgaaagagtaaagggttaagtacactggatgcaaataagacattgaacacactatgggaaacagacatcaaacatagagaatgcaacaaggaatgaaaatgaagcaaaaaaaaaactacatttcacaaacatatattccttcacaatca

SEQ ID NO: 17847 - DNA, 571 bp, Arabidopsis thaliana columbia
atccccgttgttggatcggtgttggagaccggtttatgtgttgttggctcgccgtgaccgggtttatgtgttgttggctccgtgtgaccgggtttgtttttgttgtggtttggctccggatcagagctctccggtttcttgtcggagaatttcttctttacttgatcggtgaagaaatccatgtttctttgtttcaaaggaaaagttttttcttgttcttgaatttggtaaacgtacaataacaacttatccggaggatgatatttattgaatttcttgaaattaggtttttgttctttttctttgtccactagtttttggtcttctttttctttatccactagttaatgggatatttatagtcacgattcttacgccttagatctacttttcgactttagtgagtgaattttattctcttcctacgtaaaaaagatgcttgattacatttgaccatttcgcaaaagtcgaccctcataaccggtcttgataaattctttctgattatctttgattcttgatcatagagttacttttattggtggatgggacttttaagtttgggtatttg

SEQ ID NO: 17848 - DNA, 602 bp, Arabidopsis thaliana
agtcacttgttcatatttaaagatgtcatcatgactcagaagtagatatatatgattcaactatatggacataaaagtatatgtaaatacatcttaatataagtaaagcaccaaatccatataaacactttccagtaaaataattgtatccacaatttgacacatctgttataaacatattaaaatgataagactattattttacatgaagctttcactcaccggaatttttagcatcaattaacaagagtgagtctatttcataggattggaatacttgcattatggatgccggccatcgatggtgcatagagatgtcaaaagtacaaatatattgttggatgatcagttcatggccaaaattgcggattttgggctttcaaggtcgtttaaagttggagacgaatctgagatttcgacggttgttgctggtactcctggttatcttgatcccgagtaagtactattagttcactcccttgatatatacaacatataaataatgcatgcattcatcttctttgccagaatgtatacatatgtcacaccccactcctatatcgtcagatattatagccacgtcggttggctgagatgagtga

SEQ ID NO: 17849 - DNA, 1290 bp, Arabidopsis thaliana
  unsure (1)..(1290): unsure at all n locations
tatgaataggaatacgaggcttaagctaagaaagtgttcaattcatagagaattggatttcgcatgtaaacggcctaaattgtatttataaatctctaataaataaaaaacaactcttgtgatatatcacatttttctttttcttttcatgtagaaaggagttgaaagaaaagtaggaacaaatatgctctttctctgacactccctttttggagaaggatctacacaggccagagatactaacaggctctcacacgtgcaaccgtgatacacgtgcgtctcactttctctgaattgtacaagttcaagtaacgaagcaaatctcaatcgaatccaaagacaaggacctccacgtgggattcttgaggaaatcttcaaaacgactgaataaccaaaataaataatgatctgtagagtacacatattattaccccttaaatttgtacttaaaatttatcgactttcttaattacatgaaatgatctatagaatttcatataatcgtgtatatcattctttgtataataggtacaataacacaaattcataaatttatatgcaaatataaggatcatccatcggcagtgaaatcaaaagggctccaacttccaaacaagagattggtggaatcattggattcgtcagcgaaatgaaccaccggttcgtgtacagcctgaaccggagtcacgccaacgtctacatggttatgaccaatcaacaaagcatcagaccaaacaccattagtgtctaaagagagaagctcttcaccaggaaatggaggcaagccattataaccacattcctccacaatgtgttccaccggattaatataatgatcatgatgaccatcattgatgtccatactccatgaagggtccatggaagtgccggtcggattatctaccaaaaaatccgtagtggctaagtcgcaattttcttgtagtatagattcgtcaggctttggattcaagaaattggcgtaaacaagagcaagatcgatgcttggtgaaccaccaccggggttgccagaattagcggttaggctagttttagtattgttaccagaagatgatttggggcggcgggattttcgacagccaccgcctacaggaacattgcggagggaacacctttggtccaatatctgcggcacgctttgcagaagtagcgaggctgagtgaggctatagttgttgtagtaacagaactttgtgttagaggatcacatcttggacaactcggcgtgatctccgcgtntgcgtttgcgtttggccgccatatanacgatgat

SEQ ID NO: 17850 - DNA, 565 bp, Arabidopsis thaliana
aggattgccctcaattacattaccaaacatggccatggttgctggagttctgtccctaaactcgcaggtaaaactctctcttctccgaaaaaggcctaaaattgtgtttttgttccttaagtcatttacagaaccagagttgtatgattctataggtctcgagagatgtggaaagagctgtagactcagatggatcaattacttaagacctgatttaaagagaggagctttctcttcagaggaacagaatctcattgtcgagcttcatgctgttcttggaaacaggtaacaatcacaattacaattattctctgtttctgaaacagagtattttctgaaatcccctgttatcttgtatcagatggtcgcaaattgctgcgaggcttcccgggagaaccgacaacgagataaagaacttgtggaattcgtgcattaagaagaagctgatgaagaaaggcattgaccctattacacataaacccctctccgaggttggtaaagaaacaaacagaagcgacaataacaattccacaagttttcctcagaaactaatcaagacttgttt

SEQ ID NO: 17851 - DNA, 902 bp, Arabidopsis thaliana columbia
tgaatttagatggaattttgagttggtttatgggtcaagcatggtggtgaatctcgttatgcttatgtgtatcgctttaatagatatattttgagtttgtttatgggtcaacctattatgatctctttgaaatctcaccaacttataaatcgtctatagttttgtgatacgaaaaatcaccattcgacctcagttatcataacactaacttggatctcttcaagtcaactatttcctaaattccacctaacccttctaaatctttaattgaatactacttctttagatgtgtcatccatgttatgacatatacctgtattagtaaccgttggcaaagacatgtgcattaatctagaattcagaatttctaaacttgaatttacgagacaatcattggagctagatgcattcactttctgctctagtgatgtggcatctactacttgtcttttagagcaagttgcatcaaaatgtcccttcttatgacatctataacatgttggttcatgtgatttcaaagaatcataggactgacctttctttagttcagcatgcggttgagtatataattcaattaccggtatgaggctcgggttttcttttgcacatgtaccaatctcattcttcttagcgggatcttgattcgcattttgatttgaactaacacgtagatttgtagagttctctcagcttggttcctttggatggtaagtgtgttgactaggttggggaagaatgtgtggtgcgtatctctccctcataaaaaacttaagtacttatctacgttgagtcccattatagataatctctctcacgtcttgcaaactcagaagattcaggtcaaaatactcatatcattttttagaaataacatgagttttgtttggtaggttcaggtgggg

SEQ ID NO: 17852 - DNA, 303 bp, Arabidopsis thaliana
gtcacaaggtggacgccatacttccccttcacatatcaagcaagatggatctatgtcacctgttaggggtcgaggtaaatcttctccttcatctcgacatcagaaagcgcgctctcctgttcggcgcagatcaccaacacctgtcaaccggcgaagtcgaagatcttcatctgcttcacgatcacctgatagacgcaggagacggtctccatcttcgagcagatctccttctaggtcgcgatcacctcctgttcttcatagatctccttctccacgtggaagaaaacatcagagagagagaag

SEQ ID NO: 17853 - DNA, 1152 bp, Arabidopsis thaliana
tacacggtacagacataacaacaaaatacttaacaaaattccaaagtacttaaaaatgaagacataatacatgaagcaataatacagacagcacaagtacacggtacagacataacaacacaacacaaaatacacatttaattatgagtcggactcctcgggctgcaaccacgcgttgatattaatcccaggctgaaacttgttattagtcttctttcgacgacgttcccctgttgatgaaaaccgggtttcttgatttctctccggtttaattgtggtatccgaccgtaagactatcaattaacttatctcatcaggaataatccaaactgatgaatgcgggactggataaatgattctgtggtatgccaatatccacgtattcatatggtaaaaatgcgaagttaggtcttccatttcgagaccatctgatatccattcggtccccacaaagttttgggcagcggcaatcgcatgtacatacgggtacttgtcaacatcaaaacgtcggcaagaacaagttttccttagcaagtcaacagaataagacataccaccttcgccaatgacgttgtattgacgttcgaagctgttaagctcggtcaccggcatcgttttcgcaattgggcataaggagtgtatttcgttctccacaaccggcacaagaccccttgtttcagaatatttaacagactttttcctatgtttgttaaaccattctgaaattttctcaattatcgcatcaagcaaaggtaaaaggaagtatttccttgcactttcaaacgtactgttcaatgattcacacgcattgctcgtgtctatgttatacctatccccttcaaaatagcacctagcccaattttccacaggagcccatcgatccaaatacataccgacattaggaaatcttctcctaaatcgagcatactctctcgtgaactcaaactgagtataaacatgtgcgcatgcaatgaagttagccgccgcttcttccttctcagttttcactcgtactttaacattttgagacaaatgccaaacacaatagccatgtctcgcgtttggaaacacttgcataattgatttgatgatgcctgatgtctatcactcacaaaaaccaaatctggttcatctggtataactgttttcagc

SEQ ID NO: 17854 - DNA, 858 bp, Arabidopsis thaliana
ggtgtacgacttgccaacaggcatcagcaactttatagaatcaacaagggcttcaaatgcttaccgaccccatggatatcttcatggattcgttgtcaaaaactcttttgacactctcaaatggtatcctagagttaggatgcaagccataaagtcgaatggctagaagagtcaataacccaaaccatctacgcttctcagtaggccatgctctgcacactactaagcctcgcctaagttcatctaacttaggaccttcaccggttggcacagtcaattccataagaacgttatgtaatccgcttcaggttcaaacggttctgtaggcaatggatctgtgtttagccccgtgatatgaccaaattcattaaggccaaacctgataggttgaccacccactagacaccaaatctccttcttcagtattccccttctagggtaaagtcttggagggtaattccttgcttggtcttcagacatctgataaaccataaaccagccgtaagcataaataaactcagccacaacataaaataaactcagccacatcacagaaactcagccaaaacataaaccaaactcagcgagagcataagagaaacttaaccaaaatataaaacagaaactcagccacagatgtaaggttaaaccataactcagagaaaacataaaacaaactcaaccacaacatgtaacaaactcagagacagatgcattgataaatcataaatcagtcaacaaacaaacagtaaatcagccatcgaatcaaacagatctaacaaatctgccaccatatgccaatcaacgacggcgaaaagaagtcgaaataagtactactctcgcccaagcactctagag

SEQ ID NO: 17855 - DNA, 1012 bp, Arabidopsis thaliana
tccattgagctgctagatggttgattctcttttgacttctccacatcctaaaataagaatcacataactctcaaaactaagccttttgattccagccaaagaaataatctattcaaccaaataacctgagatgacatagaatccagtgacagtaaaagaccttcaagatccctttgcaacctactagaatctaacaaatccatagaagaaaactcatattataaaaataacagtagcaaactctatatgatctaaaactaaatcagtagaagaaaactaatgaagaacctagggcatgagactgagaaagacgttcaatttcttcagaaactttggcactttcagcctccacagactgaagctcatttctcaagtactccaagtaagcatctgtcagatttccatcacttaatttcaccattatttgactttcatacttcatcttaatctcacaggaaacaacagagcaaacctgaatcttcttttttttttttttgaataaaatttaaaatttattcgaaaaaaaactgatttacatcgagtgcaacgtttgtgcctataaattttagatacaagagtcaaagaataaggtcagaaagaatatgtagagagccacactatctagaaccgaaccaacatgtcatacaaccattatattttttgtcttcttggctttgaatggaagagatcctatttcagacttgcttatcaaggaaacgaaccatttgagctgccagtgcggcacttctcaatgtcgtctgccatttctttccttccaaagagagtggaaagttagctgaaaagtgtatcttgtcaagaacagaacctcgtgccccaacgacttgtttgttaagagctttagaatagcttcccagcggttggtgaaatgttgagaaagaagcttccgtgtgagtgtagaccatacctctactgagtaagggcatgtgaagaacaagtggtcgcgcgtttccacgaggtggtgacagagcacacacgaagagtcagactccac

SEQ ID NO: 17856 - DNA, 676 bp, Arabidopsis thaliana columbia
gtcaaaaatgtgtggtggtccttcaggaagaagtccaatctgaaacattttgggccgtttctagaagaactgattggatcagctgatagaattttattaaacaaaaaaagactatttgtatattgatttcatttttagttcccgagaagagtagaacaaatgctaaaatgtatcatgcggcccaataaccaacaaaactagttgaaagatggatcaatggtttttacatgaagaaagcccaaaccatacactaataatctaatattctattaaaaggacttgctgttattcggcccaatagccaacaaaactaattgaaagatggatcaggggctatggaatacctcagaataaaaagtgttattcattgcagaggaccccttaagcgggcatggttgggtccttgttcgacaagactcaatcctccatcttgggctcaagagtgctcgtcgaagcttatcaccgctccatgcaaaatttgactccttgttatgggcaatggaatgcatgatctccattggcgatacttctagtacttttgcttcagattgctcagacctgatttctatcctaaacaaccaagacgattggccgacattcgtagcggaattggcttcttaccgatctttagtttgttttttcccttctttcaatattagatttcttcctcgtactt

SEQ ID NO: 17857 - DNA, 504 bp, Arabidopsis thaliana columbia
tcaaatttagaagcaagtctagtgtatgaatgatgctctacattgtaaagtgacctttttatgtcacgaactacgatactaatactgcaatatgtaatggtttcagactatcgaaaagccggtggacgcatccttcatgagctacgtaagtgtcactatgatgcttcgagtattagtgtagtaccaggagaatacattgctgtgaatcgctttaatccgttctcagttccctttataacctcagtcgctcttttattttgcaatctcattcaccattgttctagttagcccgcaagcgatcttcagagatcgagtccgtggaggcggtaacctctagacagtcatcttgtatagagtccgatacggatcgcgattttcatcacggtgaaatactaattaatgagatttagacacctgaatgttatctgtgatacttggagaccagctggtgagccaattccaacaaacaaacgtgctaaagctgctgagatcttcagtagcaag

SEQ ID NO: 17858 - DNA, 553 bp, Arabidopsis thaliana columbia
  unsure (1)..(553): unsure at all n locations
ctnnnnnnnnnnnnnnnnnnnnnnnctaaagcgcaccgaattatcgccagtcctggcggttagcgggagtgtggcggcgggcgattaacctgatgacggaaagcggcgaactgttaacgttgcatcgtcagggtagtggtttcggccccggaggatgggtgcttcgccgtggcaattcgatgcgttatgcggtggattatgcggcaatgaacgaccacaggttgtggctcaagggattcgcctcgggcgntttcacggttaaacagccacagcgttattgtttgctgcgtattacgccgcctgcgcatcctcaaccacttgcagctgcatggatgcaacgcgcggaggaaaccgggcttttcgggccactggcgttggcggcaagcgatccgctgcctgctgagttacgccagtttcgtcactgttttcaggccgcgctcaatggcgttaagaccgactggcggcactggctgggtaaaggcccggattacgccgagtcatgatgacacgctgacggaatgctgctggcggcctggtattatggcgctttaga

SEQ ID NO: 17859 - DNA, 613 bp, Arabidopsis thaliana columbia
ccatctcccgaggcagctaattcactcatcgacaacttttattctctaaccgaccatgaaaggaccatgaaggccgttgatccggagtcatacgtccagaccgttatcgaaaagattgagaagaaacgagccgatactcggaaggttatcacggagtttgagatggacgaactcatgttccaagtccaaaatggtcgtgaacttgctgatctctccccaaccgaggctgataaactaataccatatgcggataagaaacttatgtggttgagtaaacggatgggttctacgggggtcgacgccctgagggcttcgaatgttgcgtctgggtcaggtggaaatgggttaaacatgatggaaactggaagaagtttctattatgttgataaatgggtcttcgttgatccacaagtccaaaacccttgtgatgttgagactcatttacccacaatggtcagtggcttagacctaaacatggaaccatctgatgaagacttggggacctataaaggagagagcagcatggccggtggtgctgaagacgatgcagaatgaagctgcagtcaaagttgacatgacaacttgtcttgaagtttcttgaaataattaatgt

SEQ ID NO: 17860 - DNA, 562 bp, Arabidopsis thaliana columbia
cgtacaatatatatataccaagtgcattaatacacttgtgtgtgtatatgtaatattgttccaagtagtgctttgacacctaataagacgatcaaatctttttggagctctaattgaggtagatatgggaggagcggactgggggccggtggcggttgcggtggtgctgttcgtagtgttatcgccggggcttctgtttcagttgccggcgaggaggagagtgttggagtgcggcaacatgaccacaagcgggatctcaatattggttcatgccattctcttctttgctattatcacgattttggtcatcgccattcaaattcacattcacatctaacatctttattttaatcaccggcttatgtttgtagtataaacctagcttggtataatattgttatctattcatctctcatgtgcttgtttgtcttttcatttttaagataaaagtgtacaagttagcttgtgaaactttgctgaagaaaatcagaaatagagtaagagtagtatagaatacttgagaataaataaatgtttggtgtgcccgttacacttcttgatg

SEQ ID NO: 17861 - DNA, 779 bp, Arabidopsis thaliana
cttatattatcaagattatcccctccaaaatcaagtaattcaaacttgaaattattttctaacatagaagattttttttcttaaatagcacacgcttttacttctataaatacaagcaaatgttatcttttctttctcttttttcacactcatgatcacatctatatataaacttgctatatatagcacacatcctcatctatatatatacactcccattttaacctgaactaataacaagaaagaaacatattacacgagaaaattagagaaacaaccaagtaaataaaataattaggtaaccaaacatgccaaacctcatcctcatcctcgccgctcaaatcctcctctttaccaccgttgcctccgttggagattttgctaaagaaatgaacccgaaaaggttccacaagaaggagaaactcacccatctccgagtctattggcacgacatcttaagcggtcaaaaccctagctactgccatcatgattcagaaggcggtttcaaactcctcaacctccttcggatcaatcacaatgacggacaacgcactaacatctgatgtgcccgttaactcgactgtggtaggccagtcccaaggtttttacgctggagcggcccaacgtgagctaggcttcttgatggcgatgaatttcgctttcaaaacagggaagtacaatgggactacgatcacaattcttggccggaacacggtgttctcgaaggttaaggaaatgacggtggtcggaggaagtggaatcttccggttacctagagg

SEQ ID NO: 17862 - DNA, 663 bp, Arabidopsis thaliana
acctttctccgtagcagagaactgtggagattggtggaggaaggaattccggcaattgtcgttggaacaacaccggtcagtgaagcgcaaagaagcgagtggaagaggctaagctaaaagacttgaaggtcaagaattttttgtttcaggctatcgatagagagattctggaaacaattcttgacaagagcacctctaaggcgatctgggaatcgatgaagaaaaagtatcaaggttctacgaaggtgaagagggcacagctacaagcattaagaaaggagtttgaattgctggccatgaaagaaggagagaagatcgatacttttctgggaagaactttgacggtggtgaacaagatgaaaaccaatggtgaggtgatggaacaaagcacaattgtaagcaaaatactcagatccttgactccaaaatttaactacgtggtttgttcgattgaggaatcaaacgatctgagtacattgagtattgatgagctccatgggagtctacttgttcacgagcagaggctgaatgggcatgtacaagaagagcaggcgttaaaggtgactcacgaggaaagaccaagtcaaggaaggggtcgtggagtgttccgaggaagtcgtggtagaggaagaggaagaggaagaagtggtactaatcgtgcca

SEQ ID NO: 17863 - DNA, 821 bp, Arabidopsis thaliana
acaatactagttatttacatatagtttagtcagcattaattccttacactaaaacgatttttaacatgactccattgctctccctctgatcaaccctcctcctccgccgctgctacaaacactttaatatatattgccaccgtcctaccatatatatatagtccacttaagatctttccactcatttataacccaaatttgttctgtttcataaatatgtgtcttccatttcgacccgtctcgaaaacatattattcgtcttcttcttcgactatcgtgacgcgtatggtaaactgcatactactttttgtattcattttgttggtctacctcctcatctcggcctcaagacttcaatctaaaaactctattcatgcatacttctcatcttctgatcaagatcaatctcagagcccgacaaaaatcgagcacatcgtctttgggataggctcaagcgcgatctcgtggcgtgcacgtagagaatacgttaagctttggtgggatgctcagaaaatgagaggctgcgtctttgttgagcgtcccttgccgtcttctcaaaaccacacagattcatatctccttcctccggtttgtgtttcccaagatacttcccggttcaggtaatttagttcaatttgtttattgttttttagtcagaaaaaagtttcaacttctgtttcatcataaattaaaaataagtatagtttgcgatttattagtttaacgtctattaaagatttaaagtataggatatataaatttaaaatattgaattgtgacatttttttgtaattttatatatgaaaacaatttaaagacag

SEQ ID NO: 17864 - DNA, 537 bp, Arabidopsis thaliana columbia
gacacatcagaaatgggaacaaccaccaatgggatggattaaatgcaactatgatggctctttcaattaccgcacacaacaaacaaactcaggatggctaatcagagacgacaaaggattctataaaggagcagcacaagcagttggaggaacaatgaataatgctttggaaagtgaactccaagctttggtcatggccatgcagcatacttggagtcaagggtaccgtaaagtcatctttgaaggtgatagcaaacaggtggaagaactactgaacagaaaacaaatgcattttggagcttttaattggatacgtgaagcttggtcatggagcaaacgttttgaagaagttattttcagttggacgccgagaacgaacaaccaaccggctgatatgcttgcaaaatctcatctgccacaagacacttcctttatttatcattactttgtaccaaattttatcacaaacgccctacactgtaatcactattaatcatatcaattggaagaaattgttaaaaaaaaaaaccctgggga

SEQ ID NO: 17865 - DNA, 360 bp, Arabidopsis thaliana columbia
aaccagaataaaacgattcaggaccaaacaacaacaacgatgatttcgttatcaaacacaataaaaattgaaaatcgattcattagagagagagatatttcgagagcttacgggttcttcggaaatgatacagagttcgccatcggagacacctcgacgggtgaattcgagagctgcgtaaccagcatcaacacctcctccgagaattacatacacgaaagctcttcccatggtttcttctacttctacttcctatttatacgttctcgagaaaatcttaaacatgatttttaattttccgagaaaattatgattttttgaggcacagaagaaaatagaaaatgctgttatcggatcgtt

SEQ ID NO: 17866 - DNA, 628 bp, Arabidopsis thaliana columbia
ctctcaagcttgaggaaaaacattggctcagggttcgacaccagagtctggagtgatccatggattccaaccatactagagtgcccaatgacaagtaagttgacatcaatagattctaacctatacgttatcgctgatagacccaatcattgaggcatgaaagcaggaaaaacttcaagaattgatagctacataagaaataccccacattcttagactacatctgagtcatgcctttttgagagactcgtacatctgggtccatacaaatctggcaattacactgtcagatccggcttcaaggcaacaaaagcttgcctttgaggagattttgcctccgttttagtaacccaatgttaaggcactacatgaacattcatggacgatccaatcctttagaaaaattaaacactttctttggcaaactgccacgagatgtctagctacctgccaacaactttttgatagccacttaggaacaaataaggtgcgcctcactgtgaatgtgtgatgagccataaccatgtgctttttgatagcccttaggacaaataaggtctccttgcacctcgatttcacaatttagattactcttctggagacgaaagactcggcggacgaagaaagg

SEQ ID NO: 17867 - DNA, 153 bp, Arabidopsis thaliana
gggtgagcctccacgtatcgagtccatcttgaacattccagctccaaatgtgtagcctattggtacaaatagcatcccatggtgcacaagctgtgtgattgctgtgcatctgcaacagaacacacacgagatggacatcagcaagtgtttctg

SEQ ID NO: 17868 - DNA, 532 bp, Arabidopsis thaliana columbia
cgtttctaatacgagggtgaaatttgtttcttaaagtaaaaaaatggaaacttgttaaatgttttagaaatatgacaaagaaaaaggaaaaaaaaaaaaaaaaaagagtggagatacgaacttttatataagaagaagagaaagttgcagcacttgtctgaatattattatttaagataaaaccgacttttgcagtgaaaatctcttctttgaatcaagcggcggagacggcggcggtgaagaagaagaattagagagagagatatggttgatacgagacgtagctcttctgcttccaagcgtttttgtgctgcaacaagttcatcctcacgtcctaccaaacgatccaaggttaagatcgacacctacgttcgtggctctgcttcaattctcatctctgcttgattctggatttcgattttagggagaaaggagtttgatcaattctcttcctcctggatttgaatctgggttttatgaattttggaatttcgtgttgattttgagtttggttgtgtttaggcggcggcgg

SEQ ID NO: 17869 - DNA, 578 bp, Arabidopsis thaliana
gaaagcaagtagaggtaatcaatctcctccccaaattcccagaaaggattgatttttattgtacaactgttagattgtgatgggttctcgatctaattgaataactcggaatcaataatggccacaaaaaaggactcctttttgttccttcaactttcgtttttagctcttcgttttttctggatttgaattcacaatttgagcttgatgcttgtggatgtgtcgttgttattgttagatagtgtttgatcctgatgagaggcttaataagataggtgatgatgttgacaaagaagctcctttgtccaggcttaagctcttctcaccttgcaaggttcttaaagacacttccttttatctatactttcttgtttttttactctaagaatcattggcatgtcttttactgtgtagatcaatgttttcttgaggatcaccggaaagcgagaagatgggtttcatgatttagcctctttgtttgatgtaagttttctcctcacaagtttaaagcttttgcgatatttctcattgtctcttgatgcctttagtatttgctatgtgtatttgatataggtgat

SEQ ID NO: 17870 - DNA, 439 bp, Arabidopsis thaliana columbia
tgaccatgcaatactttttcaagccaatattgtagaagatatgaaatctctcacctgggcattgagagatgtttgcagggacatgacaagcggaagggaggctcattgcacggttggcatcaactttgaaccccaaaccaggatcatccctgtctttgactagagtacatagacatttcctggtctgccctttgtctatttttaccttgagtgtgctgcaacatgttgagtctggtgctttagctttgtcagtgacaaaaggaagacaagagtagagatcagacatcgcatcctgacatccctttatatcctgactcgattctgatctcacacctaggaacattactgctactgttatgcatagagccaacatttgtggattttgattgtacgccatgcatctagccatcagttaatgcagcagagtaagaacttaatg

SEQ ID NO: 17871 - DNA, 838 bp, Arabidopsis thaliana
cgccgtagtggagtttccagtaacaatcaagtcatcaacgtagaccaaaacgtataaagacacaccatcacggttgaatgaaaacaaagagtaatcggaatatgattgttgaaaaccataatttttaagtgctgttgcaaattttgcaaaccaacatcgtggagcttgtttcaagccatacaatgactttcgaagacgacacactttacctttgtgttgggcaaagtatcctggcggtaacttcatgtagacctcttcttcgagatcaccatgtaagaacgcattatgaacatccatttggtgcacctcccaattccgagcagccacaatcgataaaaatatacgaaccgaagtcattttcgcaaccggagcaaatgtctcatcaaaatcaatgccctctttctgtcggtttcctaaagcaactaaccgagtcttgtaccgttccactgtcctagcgatgcttaaccttgaagacccacttggaaccaatcgcaacttttcctagtggtaaatcttcaatatcccatgtgtgattcaagacaagagcatcaatctcttctttcgtggcatcacgccattttgggtctgcaaaagcttctgcataagttgccggttcatgagctaatgtaatagctgtaagaaaagctttgtgagctgatgaaaaacgagcatcagtgaggacatcactaatcggatacggagtcgatgatgaaccacatagaaacgtcgtttcgtaatcggcaaggtaagcaggttgacgtcgttcacgagtaggttttggatccgttggtagtggagtagtagaagcagaatctggtagaaccaaatcatcattagg

SEQ ID NO: 17872 - DNA, 388 bp, Arabidopsis thaliana
cgtttgctcaaaatctctccttctatttatgtacaatatctttctttctctactttcagttacattcaacatgcatgtgacactgctggtgttctcttcagagtcttggagcttctttcggaagatgtacaacttccttctgaggtatataattttacacatagctagttaatagattaccaatatatgtatatggtgatgtttgtttggaagtcgcaagaggtctgcgattgcgattgcgattgaaagttgttcgtttgatagcaactgcgattgaaagttgttcgtgatcgatttgcgactgagttttttgtttgcatgaaaaatgagctatgtgactttttaaatggcgattagtcttgcgattgctatatcaacaacgagcatg

SEQ ID NO: 17873 - DNA, 886 bp, Arabidopsis thaliana
caccttctttgacttcctctttcttgattgctattcacacttggcaataccctcttcattagtttaagcccgtgacacattcacttcactcttagcaactgtcccttgaagataataaagccctcgatgatactttcatgatatcaccttcttcttatccttgtagaagtgaaccatgaaatcacttccctcgtacttgcaacctgatttttctagcaacccataagaaatcagattcctacccacatcgggcatttattttacatccttaagtatcacaaccgaaccatctcgattctgaatcttgattttcccacttcctttaatttctccatgagtgttgttagccattagcactctaccaccattgaatttcttgaagtcaaacaagacacatctatcagatgtactatggaatgtacaatcagagttcagaacccattctttgcatgtgctttgagtgctcacagttaacaccaaaggttgcggaggcttagttgcaatattagccaaatatgcaggtttctttgagggcattcccttttctagtgatcttcctttctacagaaaaaaaaacatgtgttgttacttggccttgattggaatttcccatttccatttgaacttcctgtccatggccttttatttcccttattgtttgatttgcccttaagatcacccaataatacttctgaatctggttttgacacgttcaacaatcccttttctttcaactcaatttctttagagtatgctgaacttatgactgcgtttagtgtcaaggtatccttcccactcccatacttgagtgtatcaactagtgaatcatattgtggtggtaaccagccatgagttgtagagcctggtcttcatcactaatgttgat

SEQ ID NO: 17874 - DNA, 606 bp, Arabidopsis thaliana
ggattgtgtgacacggtgataggcatgtattggattgaggagttgcaacgttgaagtatcgactagagtgttcggggaaccttgtcgtggcgtcgtcaagagcttagctgttgaagcttcttgttcatgaggagtgcccggttcctaaacctctgctgatttgatattattttaagcatgtaattgttggaaataaagcaaaatgaaatggaaattagtagtatagttttatggtctatccaaataaatttggctggaattaaagttactaaactatgtatgtgtgtggtaagcactttggaaaagaaaagaaaaagttcattgaagaatcaccactgatacaaaagcaagatacatctttaagcatatctactcaaaaattctaactctctgtaacgtccacgtttctgcaatatgctacgcactacacaaccttgggaacataatatcaatccagaacacatgtaaactatcttatatggacagtgtttccacaataggagcaaatagatcgagacatacggttactgttgtgtagacatctaccttgttacaaaggtgatcacgttgaacgggctcatgtgtagtccctagcgtcattaatgt

SEQ ID NO: 17875 - DNA, 829 bp, Arabidopsis thaliana
agttaggtggtttaagagatccagtcttcatcagaatgctacgttgcttctaatgccaggccattagtacgtacttatcaaataactgacccaaataataatcagcgcttttaataaaacgtgttaatcatcaactaaatggggccaatacttccttcggacctaaaactggtaaagagtctagatcactatcaagagaggtttggttataaacaaaaattaaagcaaaacatgtgttcatatagaaattatgcgtacgctacaatcaatggcattacaatgaaccaacctggtattcagattttaccaaatgacaatggacagaaaaaatatacaattttgaacagatcagatgcaaaagttgttctacagacagaaaaagggtaagacttgatgcatcttgttgaggagtttgggaagatgatgatgatgatgatcggtaggagtaggtggatctgagttcttgtctttcttttttctcctaagctggaaaaactgctgcattgtctgagcgcattctgattcaagaactccgcgccggattgtcatcttaggatggaatggatgaactggaggtggtggcttttctgaagcctctgatccatttccttcgcctccagggaacagcctgaaaaacatcatttgtttcaggattttgactctacaatgttccagaacatttttcagtttctgaagttatcggtacctgatccagcttccatctgctccgagaagcttattgggagcaccccatacaagagtgttgacccttgcttgaagtattcgtcccgcacacattgggcacggttctagtgttacatagagcgtt

SEQ ID NO: 17876 - DNA, 577 bp, Arabidopsis thaliana
gaagcggagaagaaaatatatcactagctgctattcctgctcctctacgtgaacatgggggtggagagcgggataaagcttccaaccaatctctttcttcaactgagaaggatggaagagcagcacgattactgctagacactcccaactctgcagcggccaaagattcttgtaaagggaaactcctatttaaggcaatcatggcagcttgtgtgcagagagcttgtatatcagcaccagcaaaaccggcagtttctttagcaatccacttgagcaagtatccagacaccggcttaggccatttcctagtgtggagtgagatgattgcagccctatcgtcgactgatggtagtggaaaatagatctccctatcaaacctcccaggcctccttaatgctgggtcaatagcatcagggtagttggttgacctatgaccaccactgagccacgtgactttaagccatctagtaaagccagtaatgtggatcaacggagctatgagtttgatcttgctgccttgaccgctttggagcgagaccatctatttcatcaaaaaatatgatggatggttggcatt

SEQ ID NO: 17877 - DNA, 604 bp, Arabidopsis thaliana
cgtgtgtaccctaaagaaaagcgtgaacatcaagaaaaacatggtgtctatatcaaaggagaagaagaaagagcaccagcgggttttcactccatcagtgattgaaccatcgtttgggattggtcggatcatatattgtctgtatgagcattgtttcagcacaaggccaagcaaagcaggggatgagcagttgaacttgttccgtttccctcctcttgtagctcccatcaagtgcacggttttcccgcttgttcagaaccaacaattcgaggaagtagccaaagttatttccaaggaactcgcctctgtcggtatctcccataagattgacatcactggtacgtaaaaacaagttgagaattgaagttttttgaaatattgaaatggatcaaatcaagtaaagatttgttgtgtttgtgtgtgaacaggtacatcgatagggaagagatatgcgagaaccgatgagcttggagtgccatttgcaataacagtggactcggatacatcagtgacaatcagagaaagagacagcaaagatcaagtccgagtcaccttgaaggaggcagcttccgttgtgagctcagtctcagaggggaaaatgacg

SEQ ID NO: 17878 - DNA, 416 bp, Arabidopsis thaliana columbia
ccaaacatgattttcataagattatttactttggtatatgatatgcagaacttgggaattctctgttgctctgtatatgatttacctctggccaaactctctgtttctcactgcgatgtacggtgttgtagaatccggttccgccactcttttcggtcccattgtaggccaaatgattgatggaatgagctatgttaaagttcttagactctggcttgtaactcaaaacctctccttcattgttgctggtggtgcagtcgttgctttgctggtagtacctgatcttaagtctcagaatttccctgttttcgcaacattggtcgtgttgacgaatctttctggcgccattggagtactctctactcttgcaggcacagttttgatcgaacgagactggtaaattaatgtcctcagat

SEQ ID NO: 17879 - DNA, 1159 bp, Arabidopsis thaliana
taatacatgaacaagtaaccaaagagataaactatgtttttgtcattttctagtctaattcatcatcatcatcatgacattgaataattcaatatgcctcaattcctttgtagattatttccttccatggagtagtatcatcattacggttggtaaaatatcaacactataaagataatttatttacaaagggagaactatgtaacgcaaaatgcatagtaaaaggctaattaagagactcgtattaaggaactactttagcacgacagataggacatgtggagctatgagaaagccagatgtctacacagtcagcatgaaacacatgtacacaaggtggtaccaaacgcagcgtttcatcgtctttgaattcattcaaacacacaacacattctagctcgcctattcctggctcaattcctctagcttccgtgtaaacgaatgaaggaaacgacttgatggcttcagcgtcaagtcctcgcggtggcctcctcggactcattcgagcttcctcaatgtccccggctgctgcggcacggtttctgcatcgccgaatgtagtaattaatgatataaaacgctatgaacccgatgctcgcaaacgcaaacacaattgttccttcgtttcttttgaagtatgacatgtttcgtactttaacatcttcttgagttttgtaatgggaagagatagagaaagaagaagaagaaagagagacgtggggttcacgtcttcttcgtagtttctaggtgatttctacgcgccaccgtgtttcttcgtgtttcacataataaactagtgcaatgactctagcactttcccatttgctaatattttttagtttcgtaattatagactaaacttaatttgacggaatctagatgagattggttagttttgagatatagattattagaaccgatcaaaaaaggtcgaaatatgtaaacatgatattcatattatgtgtaggtgaatactgaaaacaatattatcgtttttaattatttttctgatgtattaataattatttgacagtgatcttttgtccttctgttttcaacttttgtctcgacaatgttcaagccttcaaggtaatttattatctcattagctctattttatatgaatgatatctaaaaaattattttgaaaagaattcatg

SEQ ID NO: 17880 - DNA, 577 bp, Arabidopsis thaliana columbia
  unsure (1)..(577): unsure at all n locations
nnnnnnnnnnnnnnnnnnnnctaaagacggcatcacgcagcggtgattgacggtacgctcacacagctgggagaactggcgcacgaaatgaacagtccatcgctaattatatttggtcgggttgttggcctgcgcgataaactgaactggttctccaaccattaatttaacccgggccagagaattctggccttcttaatgactctttttatatattcagcaaataaaacatagccccttaataaatattatctgctaatgggttatattcaccgttacagcgacttacaaaattaagtcattcgctcactgacgccaattaaatattcctgtatcgttcttaacgagcagtctgcttatattcatataatcaatgaatattaattaatatataatacatagggaatgtaaatgaacaaatttattaaagttgcactggtaggtgcagtactggctacgttaactgcatgtactggtcatattgaaaaccgtgataagaactgctcttacgactacctgctgcacccggcaatttctatttctaaaatcattggcggttgcggtctactgcacagta

SEQ ID NO: 17881 - DNA, 560 bp, Arabidopsis thaliana columbia
tggaggaaaaggtttcaaatagctgcagagatcgctaccgcactctccttccttcaccaagcaaagccagagcctctggttcatcgtgacctaaaacctgccaatatacttctagataaaaactacgtgagcaagatcagtgacgttggattagctcggttagtacctgcgtcagtggctaacacagtgacgcaataccacatgacatctgcagcaggaacgttctgttacatagaccccgagtaccagcaaacgggcaagttaaccacgaaatcagacatattctcattagggataatgctgcttcagatcatcactgccaagagtccaatgggtttggctcatcatgtgtcgagggcaatcgacaaaggaactttcaaggatatgcttgacccggtcgtgccagattggcctgtcgaagaagcattaaattttgctaagttgtgtctaagatgtgcagactaaggaagagagatagaccagatcttggaaaagaaatagttccagagcttctccgattaagaaacttggggaaggacaatgaaccaggtatattacta

SEQ ID NO: 17882 - DNA, 602 bp, Arabidopsis thaliana columbia
cctcaatttgcaaatctgagagtttactttcctcatcggaaaaagttttgatctcgccgctctccgagcacttccttgtcggagtcccaatttttgtgttcggttttattctcggtcgatgatgaagccgcgattgtgttcagatcggagctgatttcgaatttggatgtgaaattgagattctagggatttcaaattttgacgatcatggcgacgaggaatcgtacgttgctgtttaggaagtacagaaactctctgagaagcgtcagagctccattgtcgtcatcttcattgacgggaacacgatccggcggcgttggtccggtgatcgagatggcgagtacttcgttattgaatccgaatcgctcttacgctcctattagtaccgaagatcctggaacttctaggtactcttctctctctttatcagtgaaaatggtgaacaatttgatcaattagggttaactggaaatgattagcttagcaatgagaatgatgatacatcattgatagtgtagttgaagtaaatgtctgtgagctacgttaagctgagagttagtagttactgagatatttttgggcatgttttagtaaaggtgcga

SEQ ID NO: 17883 - DNA, 551 bp, Arabidopsis thaliana columbia
taaagacgccggaaaacgtttcaaacaggctgctgcgtagccgatgccgctgcactttctcgacatccatgcactgcaacgcctttgtcgggcaggcttcaacacaggccggtcccgtctcccgatgccagcacagatcgcacttaatcgccctcgcctttttgcgcgaagaaacgacctccatcgcaccaaacgggcaagccagcatacagcttttacagccaatgcaacgtgtttgttcaacgaaaatatgcccatgttcgcggcttatcgcgtcaacagggcagacattcgcgcacggtgcatcttcacactgatgacaggctactgacgtggtccagcagtggtctttaatgacacgaatacgggtaataaactcgtctggtgacaacgcagcgcaatcctgattctcatgatgcgacactgcgcaagctacttcacaggtacggtaaccgatacatttcgtcgcatccgcaataatccacaggttcatgatcactcctttgcactacaacagcagagtgccagagagcgcgtctcctatgctttga

SEQ ID NO: 17884 - DNA, 528 bp, Arabidopsis thaliana columbia
tttttttttttttttttttttctattttcgccgatatagcttaatgagttgattaatgaagaagttggccgagaaatctctgtcatcaagtgttacacgagtcttcgagtggtgtaaccaaacctattaaaaaaatgaatgaaggttatataagcttccaaaaccagatatgtcgtattccgtagagacaaacgagaccgtcacagctatcaaagggaactaagtatattgtgtcctccttcgccttctcccaaggagtagggatcttgaccgatgatgaggaacccaacaccagtgtagttagatgttttatatccggtttacaataatcgtcacgccatatggagaccatgagacaaacgagaccgtcacagctatcaaagggaacgccatatggagaccatgagaacatctggatcacctgattgctgacgctctgtcaactgtctttgttggaagaatggagattcgataattgatttccattgtttagacacggcctttgaatctcagcagagaaccacagca

SEQ ID NO: 17885 - DNA, 540 bp, Arabidopsis thaliana columbia
ttttataacaatcataacaagaggtcagacataataatataatcaccctagccaaattgtggaatctttccaatcattgtcaaggtcaagagactctgtttttgtttcctcccaagccaaaccaagatccttaaaacattgtttggctgtcttctccaacgaagcatcttctgagaaacaagtaaggcaaatcttgtcaacagagttcttcaactcctccaaagataatgagtcttcctttaagatcttctgcccggtttgccggatgtaagagttcaaagcgtcgttcaaatgcccaagtaagtcagcctcagagaacatatagtacatcctactaaggtcatcatggcttctctcatccataaacttgacaaaaccctacaaacacacaagtgcttagaaagctattgttcacaagaaatcaaagatatcaaagggaaaagagagctaccttttcaagaatgacagaaacatgatccttgagaagtattctctcaacagcttccatcaacgattcctcaaactctttaaagaagtaga

SEQ ID NO: 17886 - DNA, 482 bp, Arabidopsis thaliana
  unsure (1)..(482): unsure at all n locations
cttttcaaccgttcagcttactcctcttcatcttcctccggcgacgatgaatctcagccttccgtcgacgacagcaacaaacgtatcgattacatgatccaatttctcgaccggagactaagcgaagacggtaatcacgacgggatcggtgatggaaacggctccgattcgttaccggaatttgttggtaagtgtggtgaatctgggatcttcaaagttccgattaggtcagcggttcatccgaatcgaccacctagtcttgatgtgagacctcatccattgagagacactcacattgggaggtttttccggaccatgactagtactgagagacagttatggcctggtggtgcggctggtgcgttgagagtctgggagtctcgtgccttgtctggccgtcggcggggattcgcggtagtgcactcggcgccgtatctcgcgagtttcgggcatgcgtttgggtctgntgctgttgtttgtct

SEQ ID NO: 17887 - DNA, 453 bp, Arabidopsis thaliana columbia
ctcctcgatgcagagatggtggactgccttttggtgatgaaagattttggagcagcagcccaggacggcttgagaggatggagctggcaatgcatttaggtgatcagtcaaattcggcatctagacagatttacttgacattcccagctgacagcacgtttaaggatgaggatgttgctacatatttcaggtattactggacaaccatctctgtctaacaagtgctcgttcttgtatatttatatggaagaattggcaaataagtagtattgattaatcagttgttctttggttaattgatgtctgacaattcatggatgtggcgtttgagaaaataacattattgatttgttgtctatgaagcctctttggaacagtccaagatgtgcggatcccataccaacagaagcgtatgtttggctttgtttcacttgctcatcccgagacagtgaa

SEQ ID NO: 17888 - DNA, 529 bp, Arabidopsis thaliana columbia
gtttgttctccgaatatagacgctgcaaatcatcataccaccaacacaagatttagaaaccaaaaccctcatacttacttgcgaaagaagaaacttaaaaagtataaaaagaagattaccagcaagatttgtgatggcattggaaagagccagagcagaagatacgcctttcccaccaccggacatatcttctccaagaagcaatttagcgaacctgtctttcatcatctccatatctgcaatactttatgtgattattaggttttttttgaaggatataagttattggaaaaggaaagaagatacacacctgcttgttgtctctcagatctttttcctggccgagtaagaggggaaatcattggaaggctgctctctacggggctttctacgaagctgtcggagttttggctttcaggcgtgttggattcgacaatatgagaatctccgttctccacgacaatagtttgagattgttgttgtttcgtcgaagatgaatcaaacattcttttaaagttgaatgatttgg

SEQ ID NO: 17889 - DNA, 532 bp, Arabidopsis thaliana
tggttttcgagtccaagctgacgtaacggaaattcaaatttaagcatggtttagatgtgtaagagaaaaaacgatttatttataagaaggtaaaaattacacaatacaaaagaaagagtaataaataaatgaattaagaaatattagaagttccaaatgtcatacaaatcccaaaatataatttgggtaaagcaaaatacaatgataaataatttgcatgaaacatcaaataaacaatcgaatttctcaaattcagaagcaggcgtcgaggacacaacagcaacacatggccgcaagactgcatttagaaaattaaagcaaagaaaattaatctatatttcaacacacaataaccgatccggtttgatagtaaaaagaagactagaatccatcacccttggactacacctctacgtgcggccccggttataatagaaattaaacaaaaagtagtaaaaagaagactaaccagcctttcaagaatccatcacccttggactttgtctccacggagcaccgtggcatgactgat

SEQ ID NO: 17890 - DNA, 553 bp, Arabidopsis thaliana columbia
tagaggatcaggatcccctaactgaattactataactatatcaagtaaatttctttgttaccttaaaaacagaacaagctattccataacaaacaaaacaaataatatcaagatcggaccacataagccagatacctgctctggagaaccaaacataatgatgtctaaagcctcattccagtctgtagggccattaactccagcaattgtccgaggtaccggggtcctctccagcatttgttcggaaataccatagctttgcctgggagggcaaaaagattgagttgtgtatagaagccacgtgaacaccagaatcttatgtatatgtttaccttggaaataaaggaccagggactgtttgagaaatgtcaccactttgctctgccacctcaggtctggaaacaaacagaaagtcataaattatagacactaaacccatcatagactccttttctgctcctgattactcaaaaaacaacattaaaataattttgtgattctaaaatgcattattaggccttggaatttatgtgattatctttttggcttcact

SEQ ID NO: 17891 - DNA, 623 bp, Arabidopsis thaliana
taaccagagtttttcattatcgcaaggactatctccatgtcgtttatgttcatctgacatccatatgtttcgtgataaatccgaccttttgatgcaatgtcagaatctagtgtgcttctaagagcaagaatgaatccgaaaagaaaagtattagcatctatataagctatacagcacaatccacaatttgagagtaatcgcttgtaaaagatagaactgtgactaacataatcttctacaatctatggattgatgagcaaagagattgactttaatggttcctggaacttaattagcactctgattccttaaatttctaaactttaggttctctaaccaatggccaacaccaattaagttataaaaagaacaatggggtttgaaaaacagaggacttactcagattcagtttcgggagtggtaagagaagcgtgtgcttgagcgttggagacgaagtggtggaggcttggaccatcaaacttaccggaacttgcaatttgagaaatagagaagcttctagaaagatttaaggaaaatccctcatccatattgatcggtttctgtgtgagacgatgggtgctgctacggcaacgatgggagaagagcagaggaagaagatgaag

SEQ ID NO: 17892 - DNA, 446 bp, Arabidopsis thaliana columbia
atcccccttggttttcgccagtgtgctctaaagcgccccccagtgccagtgttgcgcctgcccctgccgccacgccattgactgcacagatcaccggttttggcagttttgccaggcgacgtaccagtgggttatagaaacgttcaactgacatccctaaatccggtgcggggcctgtgggatcaacgttacgatcgttaagatcctgaccagcacaaaatccgcgcccggcacctgtaagtaacaggcaacggatagtgtcgtcgcgctcgacctgtttcaggcactctgccagttgtgcgtgcatctcatcattaaaactgttcaggcgttccgggcggttgagcgttagtgtcatcacgcccttttctacatgactgaggatgaattccatcattagcgtcctttaaagtcgggcgtgcgtttttgtaagaaagcggagatgc

SEQ ID NO: 17893 - DNA, 582 bp, Arabidopsis thaliana
gaccatacaatttgtttgaacttaggataaggacttgcaaatttggtaaagccttgagccagaagggaaatgtgtctttgattctgttgttgtcaacgctaagaaactctagagacgagcagtttaggagagatcttggaagcgtcccagatattagattgaagccaatgtcgagtgtctgaagagagtccccggcacataatgtgtcaggaatacttccttccaaattgttctttcgaagatgcacaaacgtcaaattactcagacattgaggaattttaccggtgaaattgttgtaaggtagagaaagagcagcaagagagcttctgttgcagattgaaagaggtatctctcctgagaaattattataacccgcagagaaggctttgatagagagtggtagattaggaagtgccccttgaatattgtttgaatgcataaataatatctccattgatgaatttactaaaacatctgttgaaccttcgaaaccgttgaaagaattatttgcaagactcatttgatcttaggcgaggaagtctccataaccactcagggattttacgattgattctattgttg

SEQ ID NO: 17894 - DNA, 451 bp, Arabidopsis thaliana
tatgtatgtcaaactgtcttaaggattttggagtagccttaccttccatcctttgggaatgtaaaaacccttaaaagagaagtgatcaatggcctcacgaaaagtgccagaaagaggaggaacaattctcatcacttcacatgcaacattccatgaatatctcattttctcaatgtcctcccaccttaatccttcctattctttattctcctttagtatctccttttgctctgcaattccttagtgtgagtaaattttatctgtaaacttaagactataaaatctatttttctaatgtcaattaagatatacaacctaattcttttacttttgtcgacaacaaattaatatttattggtaaggataatttggtcacattgacggtaccaataatacataatagcacagctatctactttttctcacatatatgatactgatcatatttttg

SEQ ID NO: 17895 - DNA, 532 bp, Arabidopsis thaliana columbia
cgatttcgattttaaattgggattattattattttcagctttctctggaagcaacaatggcgattgctctctcgtcgtcgtcgacgatcacgtccattactctgcagccgaagctgaagacgattcatggattagggacagtacttcctggttattcggtcaaatctcactttcgtagtgtctctctccggcgtacgccgtggtcgtgtcggccattaccggagcttcttccggtgagcttaagtgtcttctctttctatattatattgaatacggagattctagattacttactagattatattgattctccacaggagctggaatagggaaaggtacagctgattcgctagatacagtgaaagtcttggatttgagaggaaatgagattccgatttctgatttatggaaagataggaaggccgttgttgcatttgctcgtcattttgggtaattttctcattatatttgatgattctggtttatgactatgtgtaactatctaagattgcctgttatgtttcagatgtgt

SEQ ID NO: 17896 - DNA, 1156 bp, Arabidopsis thaliana
tcttattacaacgactgatgtcgcgtctcatgggtcagcagcagggcgcttaacgtcaagccagccatcgccgccagatataaccccaccgcacctagcccgtagttagtctgcaaccaggctgcgatatatggcgcaacggaagccccgagaatcgacgctacgttgtaagagaacgatgctccggtgtaacgcacttctgtcggaaacagctctggtaacagcgcacccattggcccgaagtcagacccatcagacttaaccccagcagcaggaaggcaaaaaccagaatcgggttgccagtcattgatgcagtgggtgaaggcgtggaaagcgccagagtcggtgaacgtgttgctgtcgatccggtggtcagctgtgggcattgctatccgtgctctataggtaaaccgaacgtttgtacgacactggctgtattaggtgtgcacgctgacggtggtttcagtgaatatgccgtggttccggcaaaaaatgcgtggaaaattcctgaagcagtggccgatcaatatgcggtaatgatcgaaccttttaccattgcggctaacgtaaccggacatggtcaaccgactgaaaatgataccgttctggtttatggtgccggtccaatcggcctgacgatcgttcaggtattaaaaggcgtctataacgttaaaaatgtgattgttgccgatcgcattgatgaacgactggaaaaagcgaaagagagcggggctgactgggcgattaataacagccagacaccgcttggcgagattttcactgaaaaaggcatcaagccgacattaattatcgatgcggcttgtcatccttctatcctgaaagaggccgtaacgctggcttctccagcggcacgtattgtattgatggggttctccagtgaaccgtctgaagtgattcagcaaggaattaccggaaaagaactctctattttctcttcacgcttaaatgcaaataaattcccgatcgttatcgactggttaagtaaagggttaattaaaccagaaaaattaattacccatacgtttgatttccagcatgttgctgatgccattagtttatctgaacaggatcaaaaacattgctgcaaagtcttactcactttttctgaataatacgaataacggcgagtaagtag

SEQ ID NO: 17897 - DNA, 448 bp, Arabidopsis thaliana
ggaacaaaggaggcggggccgggtgttgttgaccttgaaagtctttagatcggacggttggtctatcatctgggtcaaacatgagctcaagatccggtaacctacctgggtaccaccgtagtaactgtacgatgccccacagagtaaaaacgtctcttgtttggattgactttctatatttcttaacgtacactctcccgtcgaggattactactctgaaatgcgccgtcctcctggctttctcaagcatccctctcgttacacctgtctctttccatggccgtagatcttcgtggatccaacggaagtaagaaggacacgtggatattcttgaatggctgcttctgggtttgtcgttgtttctcgaggagccattttggggaaataattgagtttggttctgaacgacgccgcattggttagggaatctttggcttgtgattggtga

SEQ ID NO: 17898 - DNA, 469 bp, Arabidopsis thaliana columbia
  unsure (1)..(469): unsure at all n locations
tnnnnnnnnnnnnnnnnnnnnnnnntaaagccggtatggaatatgctcaactatgttgccttacaggaagggcgtaacggcatggctgtctttagcgaagggttacgtgaatttgaagtcatcggtgaagagaagaaaacctttgccattacgttgctgcgtggcgtgggcttactgggcaaagaagatctgcttttaaggcctgggcggccttcgggaattaaaatgccagtcccggactcacaactacgtggtctgctttcttgtcgcctaagtttattgagttataccggtacgccaaccgccgctggtgtagctcagcaggcgcgacgatggctgactccagtacagtgttacaacaaaatcccatgggatgtgatgaagctcaacaaagccggattcactttagagnnnnnnnnnnnnnnnnnnnnnnnnnnnnnnnnnnnnnnnnnnnnnnnnnnnnnnnnnn

SEQ ID NO: 17899 - DNA, 615 bp, Arabidopsis thaliana
gtttctcctcatctaaattcttaacatacaagttataactttgaaacttgtcagcaatttccttcaaactctgctcatacggaacctttagttccatttccctttcagacttcttctgagctctatcaacaacccattgcttatcatcaaacgtgtttcccttgagagactccacagccttagaagcagcatcagcattttcaaagttaaccaaacccaaagcccttgttatcttacgaaactcaccaaaagtgttcttcaaatcatcatcagtagttgattcaacaagattcttcacatacacgttggtgaatattgttttgctaccaatagaatccctttcttgcctcttaggaaaggtccaacatacacttgcttgtcatttaacaacatgccgatcaatttactcatagctttccaagcagattcttcagtttcatattgcacaaacccatagccttttaattgtcctgaaaattccacaactacctagcacaagattatgttaaagtaacaggtagcctttctacttgatgcaatttctgtttaacgcatatacttaaatttgccatagatgatatatataccagataaatgtatttcagtatagactat

SEQ ID NO: 17900 - DNA, 497 bp, Arabidopsis thaliana
taatgaaataatcagttccccacttaacggcgtcaatggcatggccaagttcgccgttggattccagctggccaccgtattctatgatgctccaacacattgttgtcaccgtgaaagccatcggaagcccgaatttcacattgtctccggcgtcataatatcctcccactagatccacctgctcaaattttttcgaaaatgtaattaaaataaacataatgtagtactattaattaaacgttataaaaaaaagctccttttgacgtttaggtggccaaaaccatccaaacgcttagattttgatcatattgattaaataatgggtcaacggaaagtcaacactttatatatggatctaaacagcggtaaatctatttataataatttaagaaaattaaaattcagtttgagatatatatttatattaattattattttttgtattatactgattagataaaaaaaatatggagcacaaattcgctgaaccagaaagt

SEQ ID NO: 17901 - DNA, 493 bp, Arabidopsis thaliana columbia
gagtcaaagctttaccttgaacatcggaaaaggaagaccgcggccctcggccagagataaaatcttacaaatagtacagacaattagtttttttttgaaacaaatctcaataagaaaaatgacacttgaaaacatgaaaaacataccttaagaaagtttgccccaaaggtaagcttgtctacattctgcaacttgtaaagacacttgagcaccgtgtcgagaaggaaattagcctttatctctttaagtgagcaaaagcaaatgtctactttagcttcggttaaagacgagatatcaacaaaagtagataaagaattgagaggttttcaatgtgagagaatggatatgcggtgccacaatgtgctttggtcccgaaccccaaatgctaccatggatttccaatattttcaaactcggtgatttggtgagatacagaacatcagttgatcacaaaaatgcaatgttaagctttcgataatcggacaaccagaaa

SEQ ID NO: 17902 - DNA, 510 bp, Arabidopsis thaliana columbia
catacactagtcttgcaagttttggttttcctgcaaacccagctccttcaatgaataagttgtaggcctgaaccttgtgttcccaaagagacaactgaaactttagcaaagtagtaaagaagtttttttcaccactttccatctcacaaacacattgaataacatttcgatagagactacgggtcggggtgtagcccttttcctgcatcctgatgataagtttagcagctatgtctcccctcattagtgtgattgagccatatatcaaactggtgaacattttaaaggaggtgtctacaccacttttattgaatagctcattaatcataagagcgtcctccactttcccaacatcgcaaagagctgatataatcttgcaaccagctatacgtttaggcaataagtcccgttcagcggcacgaataaccagctgcccttgccatgtcaggcttcccttccagcacaaggcattggttagtgtactaaatgtctttccaccaagaaaatgcc

SEQ ID NO: 17903 - DNA, 588 bp, Arabidopsis thaliana columbia
cgctgcccatttactatatatcctctatatgatcgtgcactattacgtggaccaaatgttaaccatttaagagtcttagcatgactgtttaaatcaagctgtatctaacaaaaaggaaaataaaaatatgtcagacagttatagaatttaagcagcagttataaaatttgtctgattaaatatttactcgcctgattttctaaccaagaggcgaaattctgagtatgcgtagtccatagtgtcgatgcatcacgtcagcatcttgagttcgagtcttgtagatgttgcagatgtgcacttgttatagaaaatgaaaataagaagaaatcagatacaattggtgccatatgagcaagtttcttctccaaatcagtgagagaaatcgatctgcctgaagatattggtcaccccttaagaatagagctgttctcatactcaatgtttatgtctgctttctctagaaaatttgtcgtcttcttcaaaaattcattacaaaactggatgcattcttctacaagatagcactcagcaatgcacccctcgtagtcttgcagtgtttcggacaaagtcttttaggacgttcacata

SEQ ID NO: 17904 - DNA, 694 bp, Arabidopsis thaliana
caagtttaaagaaatgagggagctagttggagttcaagatgtgtcgaagtatggcttcaaacttaagagggtgaatgttgggttaagtttgaatatgacttgagcactaagtcattaaatccttgagagattaggactagaatatctaggagtgatctagaaaatatttaggagttatctaaatatacttctattaagattatgattgtttaagagatctctatataaggagatgtaagtatgttgcgtaacttatgagttgagagaattaagaacaagagagtttaagttttgagtagttttcttaaactaattaagaaagttattctttaatctttgtgttcttgacaatttcaaactataaattttaattgaatcaatttaattcgatatggctaatattctaatattgatgatgttaaaaacagaaaagaatgatgatttaatttactgtattatactgtgtggttaatggtatttttaatttatattaatattgattcaaataaccccccctcccccccggctataataactatctcgtgatatataataaaatattaaatgttgaagaacttaaaattttaactcataattattcatatgagtttctttaaagacttttacctataaaattaggacctactatatatataacttggcacagaagtgccaaaaaaattaacgagatagt

SEQ ID NO: 17905 - DNA, 850 bp, Arabidopsis thaliana
ttttgtctagcttctttgctacaaactaaagccatcagaaagagaatcatgtcatgaatttgtgccacagaagaataaatcagacaaatctcacgatttctggcagtgaggattcttttacaaaaataaaaaaccctgaatagaaaggagaagggtaagtttgctaatatcattcttccttagtaaagcctagttttttcttctcacattgattaaaacatcaaaaaaaatgtggaggaacttgggaatagcccaacatggggaatgttaaaacaaagcgaaactgaatataaatcatgtcatgaatttgtgccacagagaataaatcatcccacgatttctggcaatgaggattctttttacaaaaagaaataaccctgaatagaaaggaaagtttgctaatatcattcttccttagtaaagcctagttttttcttctcacattgatgaatagattaaaacaaaactggagaaacttgggaataacgaaacatgtggaatgttaaaacaaagtgaaactgaatataaagaggcagaagaacttacgttgtacttctggtaaccagaatcacctagtccaaacactgcatagcgaacttgttgcaaccaatagtttcccagatttctttgaagaagaaacctccaaaatgccttgaatgattgaaaaagacaatgaacaataataagctacgattaattaaaagcgttttacaggaataaactaattggtaacaaatttcaggactttaaacgaaccttaaaggaatcaggagagtctccttgccctgtagtggagcaacaaaacaacagcctctcatgatgaggtaaggactctgcagaaacaacacat

SEQ ID NO: 17906 - DNA, 643 bp, Arabidopsis thaliana columbia
  unsure (1)..(643): unsure at all n locations
caattaaaaaacttgactgacattttgaaagcgacgtgtctgtcttagaaatcaatcatatattggcacttcctatcaagagagtttggctgaacccaattttactaaattatcattatctcaaacacaacaaggatagatcatcctcataggcgatgttgtttagtggttcagcgatcccattaagcagcttctgctctcttccggagaaaccccacactcttcctatgaaactctctcccgctgcaatccgatcttcatcctcatctgccccggggtcgttgaacttcgatctgaggacgtattggacgactctgatcaccgagatcaaccagaagctggatgaggccataccggtcaagcaccctgcggggatctacgaggctatgagatactctgtactcgcacaaggcgccaagcgtgcccctcctgtgatgtgtgtggcggcctgcgagctcttcggtggcgatcgctcgccgctttcccaccgcctgtgcctagaaatggtgagatagattcactctctctcgccttgtaatctcaatttcgcggttagtgtntgatatgagtgagtaagaagaagaaatagaaagtccttggttgtgctggtgagagatgtgtgtgttgtatctaatatggaatg

SEQ ID NO: 17907 - DNA, 519 bp, Arabidopsis thaliana columbia
cgagaggatccccggttgggaccagaacccttgccaaaatttatcaaacatttaagaagagcattttggaacaatgaatgagatttttagggttttttcccttcttttatttagggttttgaggcttccaaattcctcagttcaagtttcaaaattttaagcatgatgcacagatggaagcaagcataggtcaggccagaactagggatgtgacaccgcggcattgaggctatggagcaccttctctagggggtatgcggggatgaccttgatggggtggccttggaagtagtggcacagtttcctggaggcgacgaggagcgcgacatggagcttctacagcatggggtagcacgcgcgtgtcacacaacaccgtgctgacgaagtacacgaggtgctcaatgagggaagaggtctcaacagtgtccttcgcttcttgagatgagcgggcctcgagatccttgccatctgacggggtagtcaaggccttaggagtgccatcctgaggtggcatggcgc

SEQ ID NO: 17908 - DNA, 523 bp, Arabidopsis thaliana
catacttcatatgcaaattcctagccactaaatcatcatccatactctgaggcaaaacctcaactgtttcttcaatacgacccggtcttctaaccgggtcacctgacccattagctccatcgggtccatttgatcttccaacaaccccatcagaatctctccttctcttaaccggttgatccttaaccggaacagcaacagaaccaggaggtggtggtggtggcttctctttcttatccttgtcagtctcaccgttagttactgcggcggagacaggaggaggaggacggagtctggtttgaccagcttcaagatccggttgggtttcttgttgtttagctctaaccggtaatgagagctgaccggaagaagaatcagtggcggtagtttcaccggagaatttgggacgaaatccggtttttttagcccaggaagacggtggcattgcggcggattctggagttggtggccatggacccggtttaggtccgggtttcgggtcggagcttgacattttttttcc

SEQ ID NO: 17909 - DNA, 505 bp, Arabidopsis thaliana columbia
gaacaaaaatataaaatattttgacagaagtaaatgttttgtatactgtattttgacattccagaattcaaccaaaatcaaagaataaaagtaagtataagttaccaaaaccacgtccattcatccttccaggcatacccctcccataacctctaccagctccaaaagtatcttgaccttgtctgttacattgaataaatataagaggtctgttaaaccttctcacaaaatccaacagtttcacctgcaccatttctggaagattgcttaccgtagttgccagtcaagtgctggagtgtcaatcagcgcctgaattttgctttcttcatctactttgtcgtctgcggttgcaagatgaggacgtggaataatatgctgggcatcttgggtatcaggaatggaataaagatcagtcccaaactcgtcatactcatctgcaggctaagaggtgaatcaggatgacattagtacatctgtagtagacgaaaatcaggtgcagtcaatg

SEQ ID NO: 17910 - DNA, 1018 bp, Arabidopsis thaliana
gtagaattcccaaaaattgaagcatagttaagatttaagactcaaaattgctattccatagttgtgtcatgacgctgagaacattaaagtgcaagcttgatttagcctccgagagattcagaaatattatattaaccaagaaggtaatcacaacagcttatgtgatatgcatcaacaatagaacattaaagatgaattcaacaattccaaaactgaagagaagagaattgtcgacaaagttaagaactgataacagaatacaaagcttaaaaattggtcgagtaacatagatgtcctcacatgactgcaccaagtcctatcacttgaacatagccataattccaaaacagagaagaataaaacataaaagcttaagccttgggggctactttctccttagccttttggagtttcaacactttcttcacaatcttttgctcttcgacaaggaatgcccgaatgatctgtcggaatccaaaaacaacattacgttaaagaacaccaaatttattgtaatagaaagatgactcaagtaagatggacaacaaacctttccctgactgcagaaccagacaagactccaccgtatgctcggtttacagtcctcctgtttcttgataatcttgacctcttgtactcagagggcctcaagtgagggatctgaataaacaaacaaagttattcacataatgcaaaaggaatatgccattgcataatcaaacatatatagttgggaataaactgaaaatttatgccaaaggtggatagcaaatccttatgtaatacaaggaacaacttgaaagacaaagtggcaccgacaatttagcttatgatttatgttatgtactgatgtgggatttatctaatcagcacaagaccgtcaataagcacaatactattaactaagtaacatggtttcttgaaataagaagacatgcccattaaaaatgagactgatcaatactcaaaacattctaaaacactcaatctgattgatttggttatacatagccatcaa

SEQ ID NO: 17911 - DNA, 579 bp, Arabidopsis thaliana
gatcttcttctactgcttcggtggctgattcatctgctgctgcgtcggctgcaacgaatgcggccaaatcaagatggaaaattttgtggcctaattcgctccggtggattcctacgtccaccgattacatcatcgccgccgagaaacgtcttctctccatcctcaagtagatctttctctctcaagcacacatttttattctcaattagggatataactctcagttggattgattgttgacataaatgaatttgaaattctgtaatttgggtttagccctgtttctgggtcattgtttcttagaggacgaaatgtaaaaggagagttttttaggttctatattagggatacgctgcttattagctcttttgggatgattactcttcaggacgccttatgtacaagagcaagtcagtattggttcaggaccaccaggttctaaaatcaggtggtttaggtctacgagcaatgagtcacgttacatcaacactgttacatttgatgccaaggagggagctctacactcgtcatggttcatggttatggtgcttctcaagggtttttctccgtaattttgat

SEQ ID NO: 17912 - DNA, 622 bp, Arabidopsis thaliana columbia
tgttaagaaataaactttgtttaaaatgttaaaaccatagacttctcaggagaaaatatattatgaagtataaatacaataacaaacgcaaacacaaagcgaaacatatgcattaatacttgactgctatttcattctgtgcttgatgactcattagaagaaccaggaggcccttcctcgccttcatctgtatccatgccttcatttgagataacgggtccgagaaggataccgatagaattgaaaattgatcagaacctgaggagaccgtgcaagctcaagcctgtggtcaggagtgtgttgctggttgaatctccctggaactttcgaaggagtctcgtaacagtctttgcaaaggtcatacccaatttcctccttgcagtctttgcatctgtatcgatcccctatgattggatacacctgtagcaaaccgcaccagtgtcaaattacgattcacatattttggtttcaaactaacaatcgggttaaggtaataatgcacttaccccacaagaatcacaaccagctccaaagtgaacatttgatccagggtttgcaaccagggatcatcattgttattgtcgtttgataaggacgggccttctttgagatagctttgaat

SEQ ID NO: 17913 - DNA, 584 bp, Arabidopsis thaliana
aggagataagagggtttatgctagggttttagcccccatttacagatacatagattacgaataaaacgaggttaataattcaaatgcggagatcgaccacgatctcaattgcatcaaaagcaaataaatttctcaatctgtgtcttctccagaaaggtaatcctgtaattgttccgttcattagccgtttctggggaagaactttttctactaagagatcgagtatgaatttagaagaagaaattgatttgttctgtaaaatgattcaatctcgtcctcttccttcaatagttgatttcagtaaagtattgagtaaaatcgccaaatcgaagaattacgatcttgtgatctctctgtttcaccatatggaagtgtgtggaattggtcatgatctttatagttacaacattgtgattaattggttatgtcgatgcgctcgatttggtattgcgttatctgttgttgggaagatgatgaagtttggttacgagcctgatgttgtcacggttagttctttgattaatgggttttgcaagggaatagagttttgatgcgatagagttggttagtaaatggaggaaatg

SEQ ID NO: 17914 - DNA, 433 bp, Arabidopsis thaliana columbia
tgcaattaatcaactcattaataatacacacaaatgcttaatctaagctaacaaggtgatttagttctgtaaactttagtaacaatgcaataacatctcaacaatacaaaacaaggtaaagataaaaaataaacaaaagactaacggatcacagagatctcctgtttaattacataaagggataaacggatcacacattcgcaccttttctacttacaaaacaccaacaccaaataaaaaacttgtataaaataacagagatctaaaaaaaaaacactaaaccaagagtaactaagatataacgttcatgaggctttcgtcgaagcaaatgtcaggccaataaaacgacgcagcttcacaacctccatagcttgagctgctacttgcatccgccggattgttgtgtggaagagaagacgttacagttttaggg

SEQ ID NO: 17915 - DNA, 460 bp, Arabidopsis thaliana
  unsure (1)..(460): unsure at all n locations
gatgatactatacatgtttctccaatcctaatcgtcgcttataataacgatacattattctcaaagtatatgcatatggcttatcccatgggtttcctgcacaaaaggtggaccaatcatgagtgtccatactcatcaataacgagaaaccaaagcaaacaaggctaagacatgaaggaattttgcttactcaagagactcctgacaaaagcttcagcttgaaatactcaatatatatataccttgcgtaaactggaacctcatctttggcagccttgttgagacggacaaaagcatcgaacttgaaagtatcagcacacactaaagctggtctgaatcccttcttccggtggtaacgagcatacttggcacacgttttggtcttgtcaacacctacactcatatttcataaatacgttttctcaaacatgtttactaangaaaacaaaaaacagagaat

SEQ ID NO: 17916 - DNA, 646 bp, Arabidopsis thaliana
  unsure (1)..(646): unsure at all n locations
aagacagtgagtccaaagaaacctaatctcatgatatttttttcttaagtataacatacatggcatttttttttttttttttttttctctaacttcgctgcatgaataaatattaagaattaaattcacattccaaacttattagtttgcaaattaacctttattttcttaatgaatgaaaataggaatgtttagcctaaacgtggtgaaaggaaagagatacttacttcgcatcataaacgcggccatgaacatccaactgtttttcaagatagccaatcacagactgacagttgtagccgccgacgcagtctacaccgcaccttacgtcaccgacgtcattgtcatcgcaccgggccaaaccatcgacgcccttctcttcgccgatcagtccgtcgatacctcctactacatggcagctcacccttacgccagcgctcccgccgtccctttcccaaacaccaccaccagaggcgtcattcactatggcggcgcgtcgaaaacagggcgatcaaagcccgtgttgatgccgaaactaccttccttcttcgacacgttaacggcttacagattctactccaacctcactgccttagtcaatggacctcactgggttccagnttcacgctacgtggacgaagagatg

SEQ ID NO: 17917 - DNA, 782 bp, Arabidopsis thaliana
ctagatgatcacagaggatcctcaccatcaacttcctccactcatcatcattcacagcttcaaattttcaatactcaaattaacaatggcgattttctccacatcacatcttctcttcatctccttcatcatagccacatgtatacataaaccatttccaacattttctgattactactttgattcaataatttatcttcataaaatatcttcgtttataattaattaattttgaattgtattgcaaggtacaatttctgtctccggtacaaccttcaccttaacaaaccattgcggctccacaatctggcctggaatcctcaccgcaaacggcgcacaactcggcgacggcggatttgccttagcttcaggatcttccgtaaccttcaccgtttctccaggttggtccggtcgattttgggctcgaacgtattgtaacttcgacgcctcaggctcaggtaaatgcggtaccggggactgcggcagcaagttaaaatgcgccggcgcaggaggagctccaccagccacactcgccgaattcacaatcggctcctccggaaagaaaaacgccgtgcaagatttttacgacgtgagcctcgtagatggttataacgttcagatgaaaatcacaccgcaaggtggctcaggggattgtaaaaccgcgggatgcgtttcggacgtgaacgcgatttgtccaaaagagctacaagttacgggcccatcgggtgttgcagcgtgtaagagtgcttgtgaggcttttaacaagccggagtattgttgca

SEQ ID NO: 17918 - DNA, 1323 bp, Arabidopsis thaliana
tagataaaatggagaatcaatggctattttctccaaattacatcttctcttcttctccttcatcatagccacatgtatacataaaacatttccaacattttaagatgactactttgatttaataatttatctgataatttttttttgttgtccgtcctagtaatttttttttaattgtatattcttcaaggtacaatttctattgtctccggcaccgtcttcactttatcaaaccgctgcaactttactgtgtggcccggaatcctaaccgcaaaccgcacactactccgcggcggcgaatttgccttagcttcaggttcttctgtaaacttaaccgtttctccaggttggtctggtcgaatctggggtcgaacgggctgcaacttcaacgcctctggttccagaaaatgtaaaaatgcaccggtgcaagaggagcaccaccagccacactagcagaattcagaatcggctcctctggaaagaaatacaccgtacaagattcttacgacgtgagtctcgtcgacggttacaacgttcaggtgaaaatcacaccacaaggtggctcaggcaattgtaaaaccgcgggatgtgtttcggacgtgaatgccatttgtccaaaagagctacgcgttaacggctcatcgggtgttgtggcgtgtaagagtgcttgtgaggcttttaacaaaccggagtattgttgcaccggcgctttcagtaaaccggagacttgcccgccgacgaaatactcgaagatatttaaaggagcttgtcccactgcgtatagctatgtgtacgattatgcttcgagtagatttacatgtactagtgctaattatgttatcagtttctgttcttaggcatagtatagccttttttattgttattattatcaacaatgaataaataattaatcactattaacatagttttatgtttttttttcatcactatgaaatgtattaaagcaaaaaagactaatgttaaaacttaaaagattcaatctaatttagaaagaagttcaaatgacatttaaataccgtataaataatcgacgtcgtttagccaaagtttctactatctatgtatgtggtggaacgaggtccaatggttgaacaagcaaccttatgatatattttatgagaagaggcatacaacacctaacattggattcgagctctctagtgaagaatccgccatggctgttccatttctaagctcttctctacaactcacacccacttctccgattctcttcactaaagtaacaccaacaccaataatccacaaccacagatcaacatgcactatacccacaaagcctcg

SEQ ID NO: 17919 - DNA, 505 bp, Arabidopsis thaliana
gactgataatgcggttgaattgaagaagaatctgacgatggcttataaccgagcgagacaggctaagatcactggggagttgctggagattgtggctggagcagaagctcttcgagagtcttaggtagaaactacagctgtgtaaaatcatttgttgtttgtggtaataaatgtcatgaaagaatttacagatcatgagaaattgagagtcgtttacacctaacgccgacaaaagactaacagtaacaataaattccaattatgtctcgaagaagacaaccaatttaggaaatataagcagcagaaagtaacggctaaaacaagtctcgaccgaatacttggtggatttctaaattctagacagaacttacagaaaacagaaagacagagagtgagagacagaaacatcatttggttggttctttaaatgagcctcatcgacaaaaaaggttttttaagcacctacggtagacgaaaataagactggtataaaagcaagtttaga

SEQ ID NO: 17920 - DNA, 446 bp, Arabidopsis thaliana columbia
cttttgattccttttctgtggtgtattcttctagtgacaaagaagttgaaaaagccgaaaggacttgagagggttgctcttgcagctggtaactatttgcatatctttgtatatgatcattcgtttcgactttctgaaaaatgttgtgtcttttttttttctttcacctcgacgcaggagttgctgcttcgacttttgttgttgcttggaattggtcaagttccaaatatgcagtttcatcccttgatcatatccttagtcaagatgctacacgaatgcagaaagagcttgtgaatgtgtaagcatctgtgagagagctcactctttttgagacttgctgtgttatttgatttgtcaccttcgcttgatttttcttaattctgtatttggctggacatttttccaacctacagcttagtcaggtcaacagaggtgaagcttggaga

SEQ ID NO: 17921 - DNA, 303 bp, Arabidopsis thaliana columbia
aaacattattttcttcacacagaccaagactgatttgattatcaaaatcttatctcgcttgtgatttattttcttacctctcctccgaatttcttaacaccgagaaacttgggattagagtcacgaccgttctttgtagaaccagcagttttcttagtagcccaacgcttgaagaccaaactctagccacttggagaaccatctttaacatccccaaaactagaacaacagcaacaattacacaaatgagttaactagttaagatcatcaaaatatagattttgacaagcgcgaatctatacc

SEQ ID NO: 17922 - DNA, 606 bp, Arabidopsis thaliana
cagaagtctttcttcattggcgaaaacccttgatcacaaactattgcacttaagagcttaccaaacttaattctagtattacatagaacatccggattaggtgtacgtccacatcgatactcctcaataatgtaggaaacctgatatatagtaagaaacccaatcagaaacccaattactagcattctaaaaagaagcaacgaagaaagaacttacaactctttcccaatattcatctgttaaatgcacaacctccaaaggaacatcaacctgtaaaaatggcaccactagaaacagtaaacatcgtcccttcattgtaaaagtatacaaagcatgaagcttttgaaacaggaatcgaaatggtttatcaagaacagtacctgctcacaaacatgttttgcatatttcaaatcatcttcccaagggcactgattccagaaattctcaaagccttcctacacaacattgaaacaatcacaaacccatatgtctatggttccaacaagcaattacgaagaagaagaagaagcacacctgaaacaagattttgagatagaaagcggtacatgagtgaccagcggcgtggaggagacggagagcgacact

SEQ ID NO: 17923 - DNA, 549 bp, Arabidopsis thaliana
agctcactagcagatctttattatcagaaaaaaaaaaacaaataaaaagaaaggaaaaagagagtagatctagatttagaaaaccataaaagggtttaaggaattcaccggccgggacatggtggagctcgattccggtggaattaagagcatgttggatgacatgagggataccactcgtatcaccataagcggagattgagacccgaccacaatagttcattttcttaagcgccgaactaatattctgagcaatcccatgtgcatcaagacccttagggacttgacaattctctatatcccaccatactgaggtcttcgccatcacgtactgagcctcagccgtatccgccgttcccaaatcttctttccccgccgtattcatcgccgatcgcgaaaaggaatttttgttttgaaggactttctgttatcaacgaaaaccacttctttctcttcaatcttcttcaaaggaatctcaatctcctagttgacgaccaagactcctcactcgtcagtgtaccactttccacgatgaaactttattttatt

SEQ ID NO: 17924 - DNA, 533 bp, Arabidopsis thaliana
cgactctccccctgttagccgacgatatttccaaaacggaggtcgatgttaccttgccttttccattgacaggctgagacatcgaatgcgaaggcctgttatcgtgaatctcgtttattcgtttccgatcgaccacctccgacttcgatccaaccatacctctctccctatacatgatctaaaatctctccgaaattccgaatctccccgtcaccggagatccacgccggtgaaagccaaaaacgaaaaggccgtacctggagagagagatgagctctagggtttttaattggagcttctcgtctcgcgaatatctatctgacaactaatctcatggtgtggtacatggacagttttttttttttgttcttgctcgaagttttttttgtagataagaaaagaataaaagaacagggaagggcaaaacgggaaaggaatgaaacaaattgggttctccggtgattcgtcagccagagggagagagagagagagagaaaaagagagcacgtgacgctcacgtgataagattagaa

SEQ ID NO: 17925 - DNA, 584 bp, Arabidopsis thaliana columbia
tcgagtgtgagtagtcatcaactagagttagaaaataaactgcaccagtcgtggatggtgttctataaggaccccatacatcgcaataaactaaatcaaaacattccaaagttttattaatgctaattggaaaaacctcacgtgtttgtttagcacgagaacaagtatcacaactgtcaatcttgcctagatctttcgaagattgatgacactcaggtaaagaaagcaaaaaactagtagaaggatggcctaatctacgatgccacaaagctccagaagaagtagagtctgacgaagttttgtgagcactagcaactaagacacccgtgaaataatacactctctcacgtacttcccccgctccaatcaaagtcctcgaaaacggtcctgtaaaaaacacaaagtattagtaaaaactgcaatagaaccagtttgtttcagcaacttcgaaactgaaatcaacgtgcagtcaaaatctggtacaaataacacatcttgaagcttataagaagaactgagaaggagtgtgcacatttagtagccaagaagctttccatcaggttttgtccagccgatggtatgat

SEQ ID NO: 17926 - DNA, 481 bp, Arabidopsis thaliana columbia
cagccacgatggtcggctaagaacactgcctagctgctggcacatttccccaagcctaaccggattcggcgcagtcccattaataactcctgccaacaaccagcaccaatagcattatgcttcccttgacctattcttaaaaggtaacatagaggacaagtatgtatgttgttacctttataagatggattagtgagggcctcgtaaattaagttcaccaagtcatccacgtgaatccaagagaacctacacaatgaattatggaaatatgatatgatcttcaaattcgtagagagacattcaatagataaccagaaaaagcatccaacgtttaccattgttgtccggaacccagaggtcctccagcaaacatttggaaaaagggtatcatcatggctacaatgcacaaaaagactttggacgatcagcagagtatctaagtccttcacaaacatattacattagcgtgtgggacaaatag

SEQ ID NO: 17927 - DNA, 598 bp, Arabidopsis thaliana columbia
ttagtgttggcttaaagcctcccagagaatcatcgaatgttttaaagcaaagacacttttactacctttccactggctgttactcgatgtgccattgttcaacttgatgtacttcttacctttctgttaagaaagacaaatccaatatttttaaaagattaagattacagttggggcaattgttatgaagtaaccacaactcttaccttgtcccagtgataatttgattgttgctgctttatcccttgcccatcatctgcaactagatctagaacagcagcgtccaacctacaatccgaaatcgtcaatatctgacagaaatttttgttattgcaacatttaaatgcaatcccttgatccttctatggaatgtcacaaatagccacatcaaaaatcattttacctattcgatccaaatccttcgttacccctcagagatagccctgcctctgaatgctacgtgcataagagtaataaagagtcaaactctgcatcatctcaatatgatcataagcattgtagctttgactgctaatgcgtactgacacagaaaatgcttttattcaacgaaaatagcatacatgatttactggtatgg

SEQ ID NO: 17928 - DNA, 463 bp, Arabidopsis thaliana
ctgactttctctcgtcttctgttacacccatatggctccggctcttcttagcattgcggctagctggttcttgacctgaagagtcattacttggttagcaccaccgatgaattgttgccctatgaacacagctggtacactgggtttacaccccatctgtaccaatgccttctcgatctcctgaccgtttgagaattggtctagctcgtagaccgtcatctttgccccaaaccctgagatcagtgtttgaattgagtggctcatgcagcaagagcttttgctgaatatcaccactggtttgtcttcaactaaacttctaacgctttccatttctatgtatataaatgtgatacaaatgtagtgtgactatgtgagtgggaactcaaggatctttatgtttgtttttgctttgatgctatacaaattacaaagtaggcctatttatagagttggatacgtggag

SEQ ID NO: 17929 - DNA, 416 bp, Arabidopsis thaliana columbia
tttctaggggaaattcgaactccacttagaaaaaagaagagaaaagggctacatctacaatgatacataggcaataaaactggaacttcaaaaaattatatatggtcgggaccacaaaaaaaaacagagaaatcacaaaaaataatcaggggtcttccgagtagtatcaggttcaacttgtcgaggagctggatcgaactggaggaagttttgctccatgatctcgcctatcactagaatggcaaccatgtttccacaccggtagcaatagtttggtgcactacacacagtcagcacattcatatcctgctatcatacctcggagagatcaacgattcaatctgagagagagactaatcatgccgtaagaatgttcatacctgacaccagtcacaaccttccatgacaagttgact

SEQ ID NO: 17930 - DNA, 561 bp, Arabidopsis thaliana columbia
ctcaagtagcaaaaaaatgtagtaagcgcaaacttgcgatggaaacaaaaccaagaagcagagcatttgcaatctggtttgcagtaaaaaaaagttcaacatccactgcattttatacatcaattttaaaccacatgtagcaaactcaagacaatagagtctccagcttcacctcttttcattttagtttcgcaaacagctttggtgcaacgtgaagatccaaaatccaatttcatctcagtatcaaactttagaagatatcatatgatgaaacagcaaaataacataattcaagtaacttacacatttgtcaatgcattgccagtagtcaaaataccggccagtgcaatgcttgtggccagaatcatcaccttggattctcttgacacatgcctgagaaccacaaacaagccttgtatcagtcaaacaatgatcttcacaaaacatggcactgtgtcaaaacttataacacaattcataattagtcacaacatcaaccagtttcacctgatattcgagaagtggcttccacattttggtttgcaagattcccaaggtact

SEQ ID NO: 17931 - DNA, 505 bp, Arabidopsis thaliana columbia
tactcatacaactgaagaagcttattgtccatgtcgtcagctacaacagcttgaagctgcaacagatgaaacaaagtcagatttgagaaggattataatgtttgaaaaggaaacatgatcaacctaaaaccaataaagagagtgaatattacctgtttaaccaatttgtatatcagtttttccaaagtgaataaaacatatgactggtttccaataatagctcggcattcatcctcaaacttggaattttcagctgagccattaagcagactaaacagagcattcataaacctgcagaacatacaaatacgagggtttataaattttactgaagtgaataaagaacctgcatagtctacataaaagcaatggaccaattgtatatctacattggttaaggaatgtaccttgcataaggatctggtgaacaagtatctttagtgtttctcagtttcatttcactgccggagcaatatgttttcgcagacagaattctctcgtacag

SEQ ID NO: 17932 - DNA, 575 bp, Arabidopsis thaliana columbia
cctaagtggagatgtttttccagaagcagccaactttactcgtttatgggtgatgtctatggataacaatctgtttacaggaaatattggaaaaggttttcggagcctaccatctttgaatgtacttgacatttcaaacaacaaactcacaggtgttattccaagttggattggcgaacgtcagggattattcgcactgcagctttcaaacaacatgttggaaggtgaaatacctacttccttgttcaacatatcctatcttcagctactggacctctcttcaaacaggttatctggggatatacctccgcacgtaagttccatatatcatggggcagtgttactcctccaaaacaataatttatcaggggttattccagacacactactactgaatgttattgtacttgatctgagaaataaccgactgtctgggaatcttccggagttcatcaacacccaaaacatcagtattcttcttttgcgggggaacaattttacaggacagattcctcaccagttctgcagtctaagtaacatccaacttctggatctttccacaacaaattcaatgg

SEQ ID NO: 17933 - DNA, 394 bp, Arabidopsis thaliana columbia
cagttttgttagtgactaatcaggatcatgattaggctttctataattcttagtgatttttcttgttgatttaggtagcaataatcaggaacctctaatgaaagagagagagaaaggaaatgatatggaggcaggagaggtacggatagagacagattccatcagaaacgatgatagtgactcgaacgcatcgctttctccacgagaaagagagaaggatttcaatgtctcagaccaatcagatgcttctggaactttctgcaaacgaaatgatcgtgttggaaactctgttgcgggtttagtgcctagaagcagtggttcgagttcagtagcaaccgcgagctaaagatacatggagcattttggttacaatacaagaaaatgtcagaatggt

SEQ ID NO: 17934 - DNA, 833 bp, Arabidopsis thaliana
ctaaagttcacgcggatagcagaagcgtgacgatgcagatcgttttccaacaccaccaccgcgtcggcgcgtccggtttccagttcggttaacgcttcttcaagcgaaccgccacccataatgcccagccccatgctgttgacggaacgggcaatcatggtgataccgacgtcagcgccgcgacctttcagggctttcgcgacgttagccgccgcctgaatcacctctaagctaccggcgttcgtcccggagataatcaacggtttcttcgcacctgccagtgcctgcacgatgacgtcgattttgctttgcagctcaggttcgataccgtcaaccgctggtgcagagttatccagcgcatgggcgatggcaaaacctaaacgcgcctgatcttcaaccggtgcgcggtaagtccacgccgcgatatcatccagacgggtgtcatcaacgttggtaacaaacagcggatgcttcgcacgttgaccgatgttgaggattgccgcaatctgccagtcagccactttctgtgctgccgccatttcgcgcgctttacctttcacagcctgacgcactgccagcgcgacgcgcgccggtctgggtaacgtcttcgcccagcaccagtaccgcatcgtaagattcgatttcgcgcagagccggagtataaatgccgccttcacgcagcactttcagcgccagttgcagacgttcctgctcaccgtgagcgataccggtgtagaagttttcttcgcccaccagttcacgcagcgcaaagttgctttccacgctggcacgcggagaaccaataccgatcactttcttcgactgacgcagaa

SEQ ID NO: 17935 - DNA, 339 bp, Arabidopsis thaliana columbia
tggtgcaatctgaaccaatcgtttgatagtaactcaacaattcgtctctcgagcctatcggaaccagaaccgggccgaagatacccgagtcaccccagacggaacacgagctacggtttttactagaatctcctaaacaccaaccaccaggcacaacttcaccaggtttgcgtcccagaagttcatgatcgatgcgatcaaggacagtgtcgtcgtacctgaatcctcttgcaaaagctgctccggagtcaaccatttctgtgaactctttgtgatcaagctgatggtatctttctttagaagtgtcgttagaagctaggtagagtaagttgttgttca

SEQ ID NO: 17936 - DNA, 533 bp, Arabidopsis thaliana columbia
gtaataccgcgttatattagtagtgacttatcagttttagcaacgaaacttctccatagttgtggttttgataatcttgtgtaagatagtgaatttaatgatcaagttttacatattacgttcaacagggatttaggccaactctgagttctctaaagcccatatatgtatcggttggccatcgcatatcactggactctgccgttgaagttgtcaagataacctgcaagtaccgtgttccagaacctattagacaggtaagtgatgcatttaccaacaaacagaaagttatcctgtagatatgtgaaaagtgaaaagtaagagtcgttaagtatacagtttactatatgcaggcagatattagatcaagagcatatctccagaagcatcaaactgagtcttttaaagaactggcagtgcgaccaccggatcaggtaacttctgatgttttcccgccatttctaaccattgtcatattttttcgtctggctcacatgtctcgttgctccttttttgcttacagactgaactta

SEQ ID NO: 17937 - DNA, 738 bp, Arabidopsis thaliana
caaacagcggtggtggtcgaagacacatgttgggttttatgggaatagatgccgaaacgtagagtctattgtgagatctgtagttcagtctcatgtccggtctatcccggctaatgcacctggaattttgcgaatgcatttccacgattgctttgtccatggctgcgatggctcggttctcctcgctggtaacacctcagagagaaccgcagttccgaaccgttcattgagagggttcgaagttattgaagaagctaaggctcggcttgagaaggcttgtcctcgtaccgtttcttgtgctgatattctcacccttgcagcccgagacgccgtcgttttggtaatatactgaaattattacatgcattacatatttcattcgatttcttactttcttatttatgtgtgtatttcacatgattaaaatatataacatatatatatggtcgtgtttagcggtaatttaatattggtttatgcagaccggtggacaacgctgggaagtgcccttgggacgtctcgacggccgaatctcgcaagcctcagacgtgaacttgcccggaccaagcgactccgttgctaagcagaagcaagacttcgctgctaaaactctcaacacattagacctcgtgactcttgttggtacgttgtcattgcatatggtttaaatgtacactttgtaagttattcagaaataatttcctagtagctaatttctaagtgagttttggttttgac

SEQ ID NO: 17938 - DNA, 492 bp, Arabidopsis thaliana columbia
gaaacgatcccggtcaaacgcttggcagttaagggaatgtaacgcagcaaaactccagcatggattgtgacatagtctacaccttgctcagcttgttcaatcagagtctctctgaaaacctcccagttaagattctcagcaattccatccactttctcaagtgcttgataaataggcaccgtaccaacaggcacagctgaattccttaggatccactcacgtgtcgcatggatgtgacgaccagttgagagatccatgattgtatcagctccccacatggttgcccactgaaccttgtagacttcctcttcaatagagctggcaacagcagagtttccgagattcgcattgaccttgaccaagaactttctaccaacaatcatcggttccagctccaaatgcttcttgttggaagggataatcgcccgtcctcgtgcaacttctgatcttacaaactcagggtctagcttctccctagtagcccagtagagc

SEQ ID NO: 17939 - DNA, 509 bp, Arabidopsis thaliana columbia
gtaattagtaacactaacatacaaaaattacttaatgaatcagaatcattatctttatctttgatttctcgtagtgcgaatgtagaagtggataatttggcacgacgaatttgtaccgaaccacatcatatcatatatgtaaacaacattcctcaggaatggctcttttgagctgcaattaatttcggttgacaaaccaaaaaaagaatcagaatcattacctggagaaccctttcaacagaaaccatttctttttctgtttcagtaaaacttgttaacaagcttcctaacagagaaaccaatggagctgcatatgagagcgctaatcccacctgtgatccaaattataaatagtatgcttttcactttcctatatatttatgaaaactgcagtttcttaccagtccaggtgtaccaaaactgattgggaagttcccccggagccgaggacagccattacagcgacaaataagacaatcattgatcctaacaactgcaccattttactc

SEQ ID NO: 17940 - DNA, 751 bp, Arabidopsis thaliana
aaatcagattacgtagagaaagagatgaccaaaccagaattaaacgggttgtttcagaaattggcgacgttagatagaaccggtttggttttgaatccgtatggagggagtttaaacgtgaccgcagtgaatgcaacggcgtttccgcatcggcacaaactatataagatccagcattcggtgacttggcccgatgctggaccggaagcggaaagactttacattggtaatttaagaacgacttataatattatgactccgtttgtgtcgaaaaatcctaggagttcgtatttaaactatagggatattgatatcggggttaatgatcatggagcggatggttatcgaaagggagaaatctatgggaggaagtattttggcgagaattttgatcgattggttcgtgttaaaacggctgttgatccggataatttctttagaaatgagcagagtataccaactttacctcctaatagaagatagataactttagtccatgtaacaatagtaacttccttatagtgtttttttatgaaacttggaatattttttaatagatttagctgcaagctatattgtggcatatatagcacacgttttgaaaaatacatcctttctaagttctaattttctatatcatatgttggttttagtttgcttcataatacactccatgattccatatatcggaaaagagaaaaaccaaattagactgaaccggaactggagttaaaaccggatctaacactca

SEQ ID NO: 17941 - DNA, 1012 bp, Arabidopsis thaliana
tggtcatgtaagaccggtctgatccggttcaactatatatgatggttgaatctctataaccggcttacctacacatattgttaccgttgctatttgcgctcgctagtcgcgctatatatataaccgttgatgttagtgatgaggttcgatttcaaagctcatgaaacgcatcaatgtcgatctccatcttctccattttccgaaattcagaaaatttcaatcacgaaaagtatcttcgtccctacccaaattggaactcgatcagaaatcaccacaggagacagttttcttacttggtcaggtacttgacacttacccagatatcagaacacttagaacagtccactcaagaatcattttggaagatctacgttgtaattcttctttgggtgttaaacttatgagagcttatgcttctctaaaagatgtagcgtcacacagcaaggtgttcgacgaaattcctgagagaaacgtaattatcattaatgttatgattagaagctatgtgaataatgggttttacggtgaaggtgttaaagtgtttgggacgatgtgtggttgtaatgttagacctgatcattatactttcccgtgtgttctaaaggcgtgttcttgctctgggactattgtcattgggaggaaaattcatgggtctgctacaaaagttgggctctcttcgactttgtttgttgggaatggtttagtttctatgtatggaaagtgtggatttttatctgaagcaaggcttgtacttgacgagatgtctaggagagatgtggtgtcttggaactcgttggttgttgggtatgcgcaaaatcagagatttgatgatgctttggaggtttgtagggaaatggagtctgtgaagataagccatgatgctggtacgatggctagtctgttacagcagtgagtacactacaactgaaaccgttatgtatgttaaagatatgttttttaaaatggggaaaaagagtttggtttcatggaatgtgatgatcggtgtgtatat

SEQ ID NO: 17942 - DNA, 430 bp, Arabidopsis thaliana columbia
  unsure (1)..(430): unsure at all n locations
nnnnnnnnnnnnnnnnnnnnnnntaaagatcacgctggtgcaggccgatagacggctcgtccagcacgtacataacgccaaccaggcccgcaccaatctggctcgccagacggatacgctgtgcttcaccgccagaaagcgtttctgccgagcgggaaagcgtcaggtaattcaggccgacgttaacgaggaatttcagacgatcgccgatctctttaaggattttttctgcaatcttcgcccgctgacctgcgagtttgagattgttgaagaattccatcgcatgaccaatgctcatgtcggagatagcaggcagcggcgtattctcgacatacacgtggcgcgcttcctgacgcagacgcgtcccttcgcagctgacgcacggacgattactgataaacttggctaatacttcgcgtacagcgctgga

SEQ ID NO: 17943 - DNA, 436 bp, Arabidopsis thaliana columbia
cctgaactgatgcctatgagtagtcgggtttgttattccggtgatggcccggccagaacttacaggtaacattcataactttgttgattttaatgattgaacgttaaccagagcccatgtgttgtttatcgagtgacttagaatattagtcacaagttttttgaaggtgacatatgatatcaataagcatctgattctgtcaacacttggcttgtaaaagtctttatgcattctgtattagtctcctatgtcggtcacgatctttgcttttattgaatatcacatgatattagtgagaaatgttgtaaagattatttcttttggttgtaccaaatattgagttgtaattggtatgtatatattctgtttttaggagggaacatatcggttatagattcggtttagttcagggactaatctagatggtattttgggt

SEQ ID NO: 17944 - DNA, 439 bp, Arabidopsis thaliana columbia
ccaggtttttcgacccttctggcttcatttcttttatcatcctgacatatagtctccaactggcacttgtctcatcttcgtgctatatctgaatcataatactctggcttacaggttagatctacgggacaagtggatcagctaactcatcagccaataaagggaagaaaacgaggtggtgggattcggtttggtgaaatggagcgagactcactacttgctcatggagcctcctatctattacacgacaggcttcatacatcttcagatcaccacattgcagatgtgtgttcgctatgtggaagcctgctcacatcatctgttgtgaacgttcaacagaagaagcttattcaagacattggaaagttagctcctggtagaactccaaagaaggtaacttgctattcttgcaagacaagtaaaggcatgggaacagttg

SEQ ID NO: 17945 - DNA, 495 bp, Arabidopsis thaliana columbia
  unsure (1)..(495): unsure at all n locations
tnnnnnnnnnnnnnnnnnnnnnnnctaaagggaaatcggcgtttcagaattggcgagtttgtcgaagggcatcaggccggaaatcaccagcgccacgagggtgtagagcaccagaaccagcagacaggaaccaatcagcgctcgtggcatggtttttccggggtttttaatttcgccggtcatataacagatagaggccatgccggtatacgaccaactggtggcagagatccccgccagcagcgccataaagctgcccgttgcgccaatcgcagtggtggtaggggcggcaaaattctccgctttaaaccagaagatcccaaggccaatgacgatagtgaacgggataattttggcgatggtaattagcgtctgaaacgctgcgccgccttcaacggagcgcaggtgtagcaacataaaggcgataattaatccggcggcgataaatttaccgagcaacggatcgataggcgttaaaaagccaagattgctgac

SEQ ID NO: 17946 - DNA, 2121 bp, Arabidopsis thaliana
ccaagttcctctccatctccactaaaagctcaatgctttcttcatactctttcatcctgttgtacccagagatcatcaagttccacgagaacacatcctctttgcatctcctgtcgaaaaccccacgagccatatccattagtccacataaagagtacattttcacaagagcattctgcacataaagattagaacctaatccaaatttcacaacatggcaatgcagcttcttaccacaagccaaagctcctccatcacgcttaagaccgttcaacaagaaaggaaacgtgtggctatccggagtcacaccttccttcaacatattcaaatacaatctaactccttcaccatcacaatccacctttgaccaacctttgatcatattgttccacacaaccacgtctggttcaggtattttcacaaacagcttgtatgcataactcacatggccacctaaacgactacaccagaagacaaagagcttcttttggaatgttgggtttggtgctacacctctcgtaatgctttgtgaatgtaattgcttgaattggtccgtcgttttgcaaactccaaggatagagatgaaacgagagtaatcattggatatagattctgtgatcgttgacatgagcagtgccttgaagatcgatagttcagagttaaaaggagattttagtgggtttcgcagaatcatctccaaaaacacataaaaatctacaataatcaaaagcgagctcggacagtgacgggaggactcggccgttatgtttattgttctgtcgtctcctcataatcggtcgaaccgaaccgggtcgcattaccggatgttcaacaaccaagtcactcaaccggaaccaaaaaaaaaaaagagctcagacggcacttgctatcgtcacagttggtcaggacgactgtgacggcttccgtcacataatttgttctatcttcaccgctcttaaagtcgatcgaactcgtgtcgcacaaattgattaatacgcaaaccactagacgagagcgacttgttgtgaaattactacttatcaaattacataaactaaactgagaaagcaaaacggagcgttttgactcggttgctccaagaacacagagagagcaaattttgtttgtttgatagagagagatcgagaaaggagaagaaggaatcaagagagtagaaaggaaatgaatctatacgcgcacgatctttctcttctcgatttcaattacaacgtctccggtcccttcggcgagccactatctcaccgcttcctctctcctggccctttcttccaaggcgaagaagacgattaccgccgtaatacgagctacagtcacgacggagctaatggacgagaaccggacacagattcaagagcatctccgccgcatcgccacgacgggaggtctccgttacctctgggaatggattggagttctcctcctcgtcatttggtaatcattttctctctgcaatattcgaattcgttgattctgtttggaatttgtttctaactgtaaatttgtcttaggaaggaagggacacggtttggccacatgatcatcgaactggttggagttactgtgtcactgtcccttcttgggttgaccttcccaagtcaagcgtttcagatcctgccgtggtgtgtattatcttatcttttacagatatttgtaccaacctgttggtatagtcattctagctataatatgttagtcttaagattttacttgtgtccttatcagttttatagagtgcaagtagcgatacaatctcctgagggaatcacttctgctaggctggtacttaggaggttcaatgatttcttggagttatattcgtctgtgagtactttctttcctcgatactcttttctttgttctggcttactcatttcagatatttagacattgtcattgggctaccgtgttttcagattaaaaaggagtttgtgaagaaaagcttaccccaggcaccaccaaagaagattctgaggatgagaaccagacacttttggaagaggtagatttcgattctctcaacactttagattagtgacagcaataatattctcaatatgtttagtctattgtagaggaggtgcctctggaaagatggatgaa

SEQ ID NO: 17947 - DNA, 205 bp, Arabidopsis thaliana columbia
agccactcggcaagcaggttttcggtctcatgcatgccgctaagcctggtgttaaagacgccctcatcggcaatgggattttctccgatttgggtatcaagtacctcggcccggttgatggccacgatgtcctctctgtcgaacgagccctcgagcttgctaagcgctatgggcatcccgtcatcgtccatgtcatgacgaccaa

SEQ ID NO: 17948 - DNA, 688 bp, Arabidopsis thaliana
gagaatgtcttagcaagaggtctattgactgatacgataacattaaatgtaatgatcagtgggctgtgtaaaatggagaaggtcaatgaagccaaagagattctagataatgtgaacattttcagatgtaagccagctgtgcaaacatatcaagcgttgagccatgggtattataaagtcggaaatttgaaagaagcctttgcggttaaagagtatatggaaaggaaaggaatcttccccaccatagagatgtataacactctgatatctggtgctttcaaatatagacacttgaataaagtagcggatcttgtgatcgagctacgcgcaagaggattaactcctactgttgctacatatggtgctctcatcaccggctggtgcaatattggaatgatagataaagcctacgctacatgtttcgaaatgatagagaaagggattaccttaaatgtgaatatttgcagcaagattgcaaatagtttgtttcgtcttgataagattgatgaggcttgtttgctattgcagaagattgtggattttgatctgcttcttcccggttaccagagcttgaaagagtttcttgaggccagtgctacgacgtgtcttaaaacacaaaaaatcgctgagtctgtcgagaatagcaccctaagaagctcttagtcccaataacattgttacaatgttg

SEQ ID NO: 17949 - DNA, 1367 bp, Arabidopsis thaliana
  unsure (1)..(1367): unsure at all n locations
gaacggataaacattggttaccattttgtggcatggagtaatttagaaaataacaagaaatatacttttttggtcttcaattgagtttgaagatttttcttaacaattaattaattacggagtttaaagggaccaaattgttaatcaatgtattcacacagacactaaataatctctaacacaacctcacagagtcatatgttagaggagagaatcaaacaagtttatttaattgagaaaggccaaaaaccctaataaatccccccaaaaaattcagtcacgacgtgagacccaattccttttcgtcaaatcatcttccttctcaattcccattttcttattcttcgtttttcattttgtgcattgtgtgtgtttcttaccaaaggagatgattcgtagcattttgtgagaattgattaaattattcagccgacctcgagatctttctcccttagatcagaattcatttgtgggagatttatctgtctttcttcatggaagtggttatgttgttagataggagagatctttgtctctatgagatcatgttaagggttttttctcttgcgtgaaaaggaaggaaaaaaaggaagaaaagggacttttcctctctatctttttacgattctctgtatacgtttctcgtgtagattattgtatagcatatagttgattgggagatttagattgtagaaatggggaatgtatgtgttcatatggtcaacaattgtgtggatacgaaatcgaattcatgggttcgtcccacagatctcatcatggatcatcccttgaagccacaactccaggacaagcctcctcagccaatgctaatgaacaaggatgatgataaaaccaagcttaatgacactcatggtgaccctaaattacttgaggggaaagagaaacctgcgcagaagcaaacgagtcagggacaaggaggaaggaagtgcagtgacgaagagtataagaagcgagcgattgcgtgtgctaacagtaaaagaaaggctcacaatgtgaggagactgatgagtgcagggctacaagcagagtcagtgttgaagaccaaaacagggcatttgaaggaatattataagttgggtagcaagttaggtcatggacagtttgggactacgtttgtgtgtgttgagaaaggaacaggggaggaatatgcatgcaagtcgattccgaagaggaagctagagaacgaagaagacgtggaggatgtgagaagagagattgagataatgaaacatctcttggggcaacganatgtgatctccacaaaggagcttatgaggaccagtggctgtcacatggtgatggaccctgtgtagagaggtgagctgtttgatangatagtggagaga

SEQ ID NO: 17950 - DNA, 2076 bp, Arabidopsis thaliana
tcccaatgtaccttgcgcacccgtgaagatatggctctcgttattagcggtttctgtcaaatccacaagtcttgacagcccaaagtctgaaaccttggcgtttagcttctcgcaaggcaaaatattgcttgactttacgtcgcggtggtaaatgggtggctgtgctgcggagtggagataagctaatccttcagcggtttggtatgcaatctgcagtctgcgccgccaagtcagcggtttccaagtacggtctgaactgccatggagatgttcgaacagcgttccgttgggaataaactcgtagatcaagagaggcaattcaagatcaacacagcaaccgagaagcctaactaagcttctatgattgacttggcagagaatccggacttcgtttaggatctgatcagtgcctttggtgttgttaagctttgctcgtttgatcgcggttatggttccatcctcaagaacagctttaaacacttctccaaaacctccagtgcctatgagattgtcttttgagaaattgttggttgctttcgtgatttctctgccagtgaagattcttgatgattttccagtggaatttgcgctaagcatctcttctcgctccttaacaatgttcttgtggatatcctttttaaccttttggtggctatgtttggttccaattactgcgtaccgcaatcgctagcgtaactcccacaaccgcaacagccgcaccttcaagagcaaagaagttaaaatggagtacaatcatatgggcatttgaatatatttttggtttttcggttcatcctctgtacctgcgaaaacaacggtcttcttcttctttttgcagtgtttcccatggcgacatttaccacctaatacatgtatgccaggaactaatcaatcacaatgatctgattcaagaaatttgttttgaatagttcacttgttatgcagtttacttacatattgcgttaaccggatcccattccaaaccttttttgcaggagcatcgtttcaggccgagactcgttggatcaggcaagcattttgatttacccaacaagaggttacaatctacatcagttttgcaaactggttctttaggcaatgcccattgcaactcgagccccgtgtcaggccattttttcccgggaggaggaacctctttgtttggattcagccccacgaagctttggtacgcgaggcatcccccaccgttgatcctgatcgtgtaagcggtttgagacccgtcggttctgaaggtgcaacacaagggagccttagaacaaggtgatgcattgttcttgatgtagctgtaacataagctggtaggactacaatctattggcgcctgcagaccccaaaatctcttggtcagtcctgaaaaccgggttccattacattttaatcgaaatctactttcattgaacccaaacctaataaccaaactaaaactgatctcaaatttgatcataaaccaatatgttctacaatcttcacaccaaaccaactaaacttttttgctttacctgcagcatagcctgagagcaattaaggagcaagatagtgttgctactagtgatgctgaaagggagatgggggtcgagctcgaggccctgtttagagacatcagctgagatacaggatactgagctagcaagaccaggcgggcgtagaacgatccgctgggtcactgagttgatggacgtaatgacataagatgacccatggagggcaccgaaataaagcttaccaccaacacaatttatcctataggcttgatccccgcaggttggacccgtgcttagaggataaggtacaaccataggtccgcagttaggacaccgtggtggtccggccatgggaggtactgcctaagcatgtcgcgttcaagaatgacccgcgcatgctagccatacggtcaagagagtaggtatcaataaggcgtagtatgatcgcttcttctccattttgttgtataactaattaagagtgtggacaattagtgatcaaaagatgtgagtaaaagtttaggtttatgtactaatgaaaggtcattattatttatttatgttattgggggat

SEQ ID NO: 17951 - DNA, 554 bp, Arabidopsis thaliana columbia
ttcctcttgtattttttccccctgaactgacttttggtttgaatttgaagctatttctccctcctcaacttcttctgcaatatctccctttactacctccaaagcttgagaatcaaccaacggtacagactccacaaggtcattacccaccgccactgcaaccggtagagaaacacttgggccgatgttgatttaacaattacctgttctgagcaaaacagaggacccgtaaaaacctttgttgtacccaagctagccaaacaaccattttcagggtgaccccacttcccacagacaccacaccttggaggcaaccatggatattcaaactcgacacagaactcttctccttaatgttgaaaaaataggtttttggtagcggttttgataaatccacatcaacaaaaatttttgcttcctcgaagcttgttacttactttgtttcttgatgtaatgtttgcggtcccccacaggactagcaagaaaaccaagtccaggccatgtgaacattgagtagggacattttttatgacacccacattggcatagattta

SEQ ID NO: 17952 - DNA, 1073 bp, Arabidopsis thaliana
tggaatgcccttcaagagttgagttcctctagagaaggcccttggttcattactggagatttcaatgatattgtcaatagtgctgaaaaatctggaggtcctgatcgcccagaaggctctttcacagacctgagatcctttatgtcttcttgtgatctctatgacctgaaacatacagggaatttcttatcttggcgaggcagaagacattcccatcttgtaaggtgcagattagacagggcaatggccaatagtgactggataatagcctacccttcaggacgcagtgaatacctcagatttgaaggctctgatcaccgtccgctggttacttcctttgaccatgtccagaaaaaaaccaagaatattttcagatatgaccggaccctgaaagataatcctgaaatttcaaagctgatgaatgagacctggaaatctaatcctagtgctaaagtggattatcgactacacctgtgtagggctgctctcttaaactggagtaaagaacatcatttgaacagccaaaaagagatcctatctctccgggtccaactggaagaagctctgacagatgatgctgcaacccaggattctgtgatctcctgaaccaaaatctcttgttggcttatagaaaagaagagactttctggaagcaacgaagcagaaatctctggctggctctcggggataagaattcttgtttctttcatgctgcaacaaacagtcgtcgagcaatcaatactatctctgtaattgaaaactctgcaggcactagtgtctatgaagattctgaaatcattgagaccatatcagattacttccaggatatttttacctctcaagagggagatagaacttctgtggtagctgaggcgctttctccttgcattactactgatatgaacaacacactcatctctttgccaactgttgctgagattaaacaggcgtgcctatcaattcaccctgacaaagccccgggacgtgatggcttctctgcaagttttttccaatctaattggtctacagttagcgaggaaatcactgctgaggttcaggcctttttcatctcc

SEQ ID NO: 17953 - DNA, 506 bp, Arabidopsis thaliana columbia
gggaatgcagccccaatcgggcggtaaattcagtatcctatctggattctcttggtatgctttccaatacgccaggatatgattaagataaggaccatacccagacagaccacgacagaacatatcaaaagactcctcaagattgctgacaggtccaagctctgtcctttccttgtgaaggaaagtccacatggagatgaaagtgtcctttggttctctccatatgtaaaccatcttacaaccggatttcacaaccgaatcaggtaataactcgtatgggatatgagtcgaaaacagagtgttccctttgtctttgagaacatcaacttcagggaagaaagggaaatctatctcaatgtaaggaacaaactcgtgagggttacgtttcaggagagggttggaggaatcatcgaagcgggaacgatttgcgatggcgaaagtcagggctttgagccaagtggtgcctgtctttgggtagctcagacgaggaagtcactgggtcgtgc

SEQ ID NO: 17954 - DNA, 652 bp, Arabidopsis thaliana
tcaaattggtactttgccatcaacttcctccgcccggcgggtcaggtaattgcacagtactatgaattcctgcgcctcggtcgtgaaggctataccaaagtacagaacgcctcttaccaggttgccgcttatctggcggatgaaatcgccaaactggggccgtatgagttcatctgtacgggtcgcccggacgaaggcatcccggcggtttgcttcaaactgaaagatggtgaagatccgggatacaccctgtacgacctctctgaacgtctgcgtctgcgcggctggcaggttccggccttcactctcggcggtgaagccaccgacatcgtggtgatgcgcattatgtgtcgtcgcggcttcgaaatggactttgctgaactgttgctggaagactacaaagcctccctgaaatatctcagcgatcacccgaaactgcagggtattgcccagcagaacagctttaaacacacctgataacataacgttgtaaaaaccgaatgcccagcctttaaaaaaacagctgggcattcggttgcttattaatcgcaataatatattggctgtctattcatcgtgttgataagatatatgttatatgaatgtttattacatgtagcgattacctttaatgtcacgagaagggattatt

SEQ ID NO: 17955 - DNA, 293 bp, Arabidopsis thaliana columbia
taacggccgccagtgtgctctaaagtttgccgtcgattgccatacctgccagccggtagaagtcatacaccgggtaatagcccggaccggagatcagcagatcctctatctcgtaaaccagatcctgacgcatgtattccaccatatcgaaatccggggtaaactgaatcgccgaggtcggacaggcgtcttcgcagagaccacagaaaatgcagcgtgagaagttgatgcgcaaaaattgcgggtaccagcgaccgtctttgggttctgcgtattgcagcgagatacagccg

SEQ ID NO: 17956 - DNA, 791 bp, Arabidopsis thaliana
ctcttcaaaaaagttaatgctatccaatagtttttatcagtagaatcagtggtgtgtcaagtccgaattatagtttaactacatccgagtataaattaatgacatctatataagtaccctatatagtagtcaacttcactactatactcctctttctatcttggtaattactaagagtactttcttactctctctatatatgtagctcgatgatacacggcataaaatcgctcatagacctgaatgcagtatcacgacgcatcaatagagcatcatgactcctcgctaggatactatcaacacacaaatacatgacaatttaaaacgatcgaatatcataatgagaagtgtgattagatcggcgactaaggatctaagttttgcgtccattacaacagagagagaaggatttgactcggctaaagcgagatcgtagccgttggagaagaatttaccatctgatgttgtgatgagtactgattgtgaaaatgatggatctgatcggatttggttgatggtggagcggagagagtcgagtaaggttgggtttagacggtgttcgccgtcgccggtgagttttagtatgaaaagacgatcacgtttctctaatgaacacatttctcttcctctttgtgactgattattaaatgatttggctagtagtaaaagaaatcgtcatgtcaactaatacatcatatcttagcacatatcaaatctaattttgttgatatatcaaacacaaaaatgtaagaatttcaaaccatattgggaaacgaaaatctatatataag

SEQ ID NO: 17957 - DNA, 499 bp, Arabidopsis thaliana columbia
aggatcccccacattaataaggactaaaaatagaaatagtgggaggtgtttgtttttaaaggctggattttttcttgctctgcttctgcagtggaagtgtaatgtgtatgaacccaaactttctcctctgcgtgacgtactgtttctcttcatgtacctcctctttctctccccgtgccgaaaacttcacatcctgctttagttccttcaacatttggctcaaattcacatttcgcctcggtatttgcccttcaaggctctgtctttggggagcaacaacatcttcctttggaacttgcttacgccttagaacatcacgcattgagatattagactttaacactggctttgggagaatgtcaagtggctcgtgatgcttgttcaaatggctgaaaaaggagcgtcgggtatgattcaaaggtgtaaagttatcgcctttcaatgagtcttttgtcccccgcggaaagcattttcagctgcaagttgcttcacattagcg

SEQ ID NO: 17958 - DNA, 347 bp, Arabidopsis thaliana
actctaccgggtaccgaacgcatctcactaacatctctatgcctagtgacattcatgacgatatattcatctgcagtaaaagcattaccttttcaggattaagagacaccgtgacgccaggaacagctccctccaaagcttccttcacctgaatagctcttgtcttgaaagcattgcattgtttacttcaataacatcacaaaacaaaacaaaaaagaactcttgtgagacataagtatagaagcaaattccatttatagaatgaacacgtccattacgcattgcaattaagctaaagcaagacaagaacacaaacagaaagcagatagtcaagtactcttcacaaa

SEQ ID NO: 17959 - DNA, 914 bp, Arabidopsis thaliana
taacaagtgatttcatagagtcagtaaacacttcttattacagatcaacttctcattcttcctactacaactcgctgcagattacattcttcgaatgataatttgctacagattttttagcatggagtagtagaaagccatacctcaagagcagtccgtcctcttaaaacacgttgcttgtcaattccccaagtaaggcattcagtgttacgcctgccagcactgtcagtgaagtagatgtcaggattgctttgaccaatttctctcacccactcagggatttgtatatgcacatcatctccaacattgcctccacattcgtgaaacgacataacaacctgaagtcaattcaagtcaagaacactttaaaaaggttcatcctcaactctgcatatctttcactaaactgaactgagactcatcgatcaaataacattacctgaatcttaagtccaagctcacgaatcatctgaaaaagtttcttgtaaccactccagttataaacctgtggtgtatgtgactcaacaattccccaccagcagtcaaccataacaccatcaacattaaccgactttaaagttcttaactgatccaaaagctcctccggttccaccacttccgagttcatatcaatcactcccagctacatcattcaacagccaaatcaaccaaacacacacacaaatctctagccaacaaaaataaaatcaaaagaagactcactggtagcataacatatacaggaacacacgctgtgccagcaaaatcacgctcttcgaaatgcacaatttcttcatcaacctaacaaaacgaagagtaaaattgattctggtcacaaacgagtgaatcatccaaatgaaattccacacttacgagctgatcagtagaatcgtcgtcgtcatcaattggaacta

SEQ ID NO: 17960 - DNA, 557 bp, Arabidopsis thaliana columbia
cactctttcttggtaaattaagtcagtctaacaaattaaatcaaagggcacccaagcccaaaaaatccaaacatttgtacatatatacaagttatgtatgttcctacctatatagatgatcatcgtctcaaccttggtcttgtcttgacccatgtcttgttatgctccatatcgaataaatgatcaaatcatcatcaaaaccaacaggacttacgattagtagaaaccctacatattagggtaaggtgtgaccaaactaattattgttgttgaagatcaaaccatcgacttgagaatatgttgtcgtcttcatcaagatcgatcaaaccgtcaaaatcaaagtaagtatttgtgtttgaacttgatccccattcttccttcaccacgtggctccctattattctgttgtccagttcagccgtatgttcttggccggaatcttgaggcaaacccggtggcgcaggaaaatttgtgttggttatctttttcttagaaccggttttggtgatctccggtttccggttagactttggacgagtgtgcggaagttcttgaca

SEQ ID NO: 17961 - DNA, 585 bp, Arabidopsis thaliana columbia
ctctagttgtggaggaacaacctgattttttatctcgcaaggaactacgacacgaaaattctagctacgtccatgggttgatgagctttttatgtagcggagaacaagtcatttttaatcccagcataggtaagtccataactttaccaactatcaaaacaagtggaataatctcccaaagctttttaggatatgatccaatcaatgcccaatacaaagtgttgtgcttgaccaatgttacacggttttgtgaacatcaagtcctcacattgggagctcaaaatagctcatggagaatgatccaatgcagcactcctcactattgtggcgaaaaatctttgtgcatagatggcattttatattacagtgctttcactagttttacaacagtcttggtgagatttgatgtgagggctgaaagtttggaagttgcatccaaatttcccgagggccttaaatcgtcgaatggaattactttgataaactaccatggaaaagtagctgttgtcagtaaaaattatcacaatgaccaccatgatttcaatttgtgggttttggaggacccaagaacaacaatggtcgaat

SEQ ID NO: 17962 - DNA, 431 bp, Arabidopsis thaliana
tattcgggcctcgtgcagctcatactggagtttaagtcgtaaccagatggacacttacaatcgaagcctccatccctgtttctacaggtttttggatccgaacagttatgtgtatcactaatacactcatcgatgtctgaccaaaggaataagtgcacaagatgcaaccaaaaacgtatgaggaagattataaacactcaaaagaagaaagaaagcaaagaaattaatatgaagtacctttgcaaccctctgaacggtatggattcccatcataaccttcattacatttgcagatatacccgtttctagtagtagaattgtaacatgagctgttcttaccgcatattcttgtgcttcagcttgctcacatgtctggttccaatagaccaatctagtgccacagggaacctcgtgacattcatcagattctt

SEQ ID NO: 17963 - DNA, 576 bp, Arabidopsis thaliana columbia
tttgtgattttaatataaatgttttttaattatcatttcaattttttattaggatccgtgaaataacattacaataaccaaataaactctttttcacgttgtacttttttattttggggtcaacttactcaccattcctatcccacatctgacatacacaaccttctttccatgaatcttccctatacgaaaacgtcttcctgcattcatttactcattaaaatcagaaactacttacattttcatctcaaaggaacaagagtctagagactctctcaaggtagaaaaacttaatagaaaccaattcaagtggtaattttagggatcagtgtagataccagagagatcgaggaaaggatgcgtaggatcgagtctgaaatcaacactgccgagaaaagcatcttcttcggtctcaaagaccgtcacaaggccaatgtaaggtcctctacggttgatttttctaatggtagtggcggattttagtttgtgtgagtgtgaaggtgtggtcgaagcacgcaaaacgtgcaaggaagagatgatgatgatgaagaggagaggaaaaagaacatgattgtg

SEQ ID NO: 17964 - DNA, 516 bp, Arabidopsis thaliana columbia
ccttttgagattagaaagatagacgcagtttgacgtgaaagaaacttcaagaagataacagaggacacctagagtttctaaacaaacaagcttcaggttttgtcaatggagagattgtatcgtttagcttcacgagcctctgcaaatttccggtgtatgaagcagatttcggatgggggaaacctttgttggttgcctctgcaagaaatgagctacaaaaatcttgtagctttcattgatactaaggaaggtgatggaattgaagcttggatcaaccttgaccagaacgatatgtctagattcgaagccgatgaggagttgcttcgctatgtctcttcaaacccaagtgtgatggtctctgtatcttgagaaacaagtaatctattagtcgtttctaatgagtttgagcttgttttccttttaagtttgtctttcagatttcattcccttgtacttaatgcatcctttatactatttggtcatattaagaagcacacaagtttaaattactcatat

SEQ ID NO: 17965 - DNA, 564 bp, Arabidopsis thaliana
ctactgcactctcttgcaaatatgtttcaggggaaaactttgtggagattgatgtcgatattggttcttcaatggtcgctagtgccattgttcatctcgcatttggctacgttactacattgacagttgatcttgcgttcctcattgagagtcagaccgaagcagagcttccagaaaagctactaggagctgtgagattctctgagctgcagaccgagtcagccacatctatcgaactgtcctcaagcaccagtaatgaccagtgggatcaaactacctcagagcggtcgagctggtggaaatcgattggaaatggattctctaatctgcttaatcaagatacggccaacatgaacaatacttctcatggggacatccagaaggatgaacatgtacagaagcagtaagtgttttgggagttattaacttcacaattctttgaatttgttcgatttcattaccaaaaaacagaaacaaaaacttgtcaattctttaaaaaaaccacagatgtatagattggtttttactaatatggatggatatgtgatatccgaacaacaattc

SEQ ID NO: 17966 - DNA, 674 bp, Arabidopsis thaliana
tatttccctttcatgccctggcaagtattatggggttgatcaatatgattggtggtgttagttctaggctaaaatataggtcttggtgtctaatcttaattcttagctgtatgaaaaaatttaaatgtgcataaattcatctctgcttaaatttgtctgaccaaattgtacttggtatacgttgctgtgcagtgctaaacgaggagcgcatcgccctattatgaatctccatgaaaggagcttaagcgttctggcgtgccgctacgtggatgaggtgataattggtgctccatgggaagtgtcgagagatacggtgagcttctctgcactttgcttaataacaatacccaaacggctttcatgaaatgctatttttgacattgatttgaacattgcagatcacgacatttgacatctcgttggtggtacatgggacagtagccgagagcgatgattttcgaaaggtaaaacaacattcaagtgtgtatatattaggtaaaagacaaagagctatggtttctcagaatgtggttgttgatttgacaggaggaagataatccgtattctgtaccaattagcatgggcatattccaagttctagatagccctcttgatatcacaacgtccaccataatcaggaggattgtagcaaccatgaagcttatcaggcaagt

SEQ ID NO: 17967 - DNA, 498 bp, Arabidopsis thaliana columbia
gtcttgttcataatcatactcaatgttgtaatcttcatgatcataagactccaaatccctagctctacgagttgagtttcttctccaatactcagaccaaaccaaaaccacatggaacaaacactgtaacccatacacacagatccaaaccctaatcggttcattaggtctttcttcaacggtaccgacaagcataaccgctgacgcaagaactaaagcagcgttccatagtatatcagcagcaactacaggcttcgagtaaccccaatcgattcgtctctcctcgagagcacgcgccgctgtttctctaaccagcatcgacggtgctcggtggccggtgatccgtcctaatagaacggcgagacgtgtaggtctggctgatgaagaagaagaagaaaaagagccgtcgtgtcgtggacggagtagaggcgcatgttgatcacgcgccgccgtggaatctgaagaatacgatgacattagtaacgaagagaattgaga

SEQ ID NO: 17968 - DNA, 591 bp, Arabidopsis thaliana columbia
  unsure (1)..(591): unsure at all n locations
gatctcatgattattattaaaaatcttcaatcttgttcatcaagaaagtgaacaaaaaaaattaagttagggtttttctttaagaagtttacaaaatggtttggttccaatctgaagaacaatttgaggaaaaccctagacccatcatctgcaacgtcgagtccatcgtcacggtacttcctccactgtcagaatccgcctctcgctgcccgaaaacgatgttgttgttgtccgtacaagtcatcctagatttgagatgattctcttgcgagctaaaatcattggaagtgatagccgctccgaagcatggtgacaagaaatgatccgaaggagacataacgctccttggcgagttccaccacgcgccacctccgccaccacaaatcgatgccgtagctttaaactcctccgccatattaagagaatcagaaagttttagtataagctttctactagatcgttgctatacgaaggttaaagttcttatatacatgagtttgttgtatgtgatatgacgagcataagtgtnaaattttgatatatgtttatgagggtgtgtatgtttatataggcaagtactggcaagtgtgt

SEQ ID NO: 17969 - DNA, 614 bp, Arabidopsis thaliana columbia
caaagctgtgaatcatgatggacacaccatgagcctcttatctgtccaggtttgttatttttccatttttggaggacttttaggtttatagacttatataaatttaccatatattgaaactaaatcaagtacttcggtcaatttctagacatacatttgcattatcgaacaattagtattttcaacgaagaagacattcagtcacttgtgtttgtgtaggtgacagaattggtagatggaattttcataggactgtctatgaaccatgcgatgggagacggtactgcgttctggaagttctttaccgcatggtccgaaatcttccaaggacaagagagcaaccaaaacgatgacttgtgtcttaagaatccacccgtgttgaagcgttacatccctgaaggatacggtcctctattcagccttccatatagtcatccagatgaatttatcagaacctacgaatctccaattctcaaggagagaatgttctgtttctcatcagaaaccataagaatgcttaaaacaagggtaaccaaatatgcggaacaactccatctcatctttccaatcgctaacagcggttatatggagatgcataacaagggcgaggagat

SEQ ID NO: 17970 - DNA, 980 bp, Arabidopsis thaliana
atactacgaggctggtgctcgtttcgccaagtggcgtgcggttcttaagattggtgttaatgagccatctcagttagctatccatgagaacgcttatggattggctaggtatgctgtcatttgtcaggagaacggtcttgtgccgattgtggagcctgagattcttgttgatggctctcatgacattcagaagtgtgccgcggtgacagagcgtgttcttgcagcttgctacaaggctctgagtgatcaccatgtcttgctagaaggaacactcttgaaacctaacatggttactccaggatcagagagtgcgaaggttgcaccagaggtgattgctgagcacactgtccgtgctcttcagaggacagttccagctgctgttccagccatagtgttcttgtctggtggacagagcgaggaagaggcgacaagaaaccttaacgcgatgaaccagttgaagacaaagaagccttggtcgttgtctttctcctttggaagggcgttgcagcagagcactttgaagacttggggaggaaaagaggagaatgtgaagaaggctcaagaagcgttcttggtcagatgcaaagctaactctgaagcaacacttggtgcttacaagggtgatgctaagctcggtgaaggtgcagctgagagccttcacgttaaggattacaagtactgaagaaagaggctgaggatcgtagtttttatatcatcgtttatgttcttgctttcactttctctgttttttgtttggtgttttgtttagaagagtggtggcaccaaagaaccccgtttatacttttttatgaggtctttgtgttcttatgaagcctttttaaaaatgaatattagcttgttgggttataatttaacattatcaatagtgacgacatttgggcggttgtatagttcataatgtctacgaactcaagaaaatagaaaagatcatcgaaatattttggactccaactttgaaa

SEQ ID NO: 17971 - DNA, 543 bp, Arabidopsis thaliana columbia
aatgcctgtatccggagtcaacaggtgatccttggaacatgctcctacttgggggaaaagtgctcaaccacgtgtcaacgcatgtccactcgtgacccaatgtattttaatttattacatatacaacacagagtcattagtatttttcttgtgtccgtgtgtgtgtatcagtgtatatatacacaagaatgagtgtccacataaataatccaactaacacatcagcataatcccaaccgaaacagcttctagagagagacaaaaaagaacagagtaactatctaaaactcaaaatgtgtgcacttgtccctccattatatcccaatttcggctggccttgcggagatcatagcttctatgaaaccgacgacgtatccaacacgtttcttgattttccgttgccggacttgacggtgactcatgagaatgtgtcgtctgagaataacagaacattactagacaatcccgtggtgatgaagaagcttaatcacaacgcgagtgaacgtgagcgtcgcaagaagatcaacacaatgttctcatctc

SEQ ID NO: 17972 - DNA, 760 bp, Arabidopsis thaliana
gtaacgtccgccagtgtgctttaaaggacgacctcggtaaggatcgatttaacgacatccgggtactgcaagagggctgaacctgcgagcttgcgattcacttttttagccgggcaacccatattgatatcaataatctgggcaccgctttccacgttaatacgtgctgcatctgccatttctttcggatcgctaccagcaatttgcacggtgcgaataccgggttcatcaatgtgcaccatccgtaaacgagatttgtcgctttcccaaacctgtgggttagaagacatcatctcggatactgtcaatccggctcccatctcgtagcacaacgtccgaaaaggtctgtctgtaatgccagccatgggcgctgcgatcaggcgatttctgagctgatattgtccgatgcgcatgagttaagaaatgaccatactgtgactgcaaggcggcgtatattacgcattttttgcacgagatgaaaggccaaactttgaccaatcctctgagatggatcaaagaattgcatttaaaatgagcgtggtgcgataattactcataaaaatcatcatattagaaaatagtgactaaaatttacactcaaagaaatttgagtaagttctcaatttttctttatgaatgaaaattttggcacgcaaatttgcgtaaataatcggcaaatttacgtgccttttgtgagcttgctgcacttcgccccgcgtcaccctacggcgatgcgaaggttaattcttacgaccggtaa

SEQ ID NO: 17973 - DNA, 866 bp, Arabidopsis thaliana
tagagcattcctgatcaacgcattacctacgaaattactaagctccatcctttggttctcaacaaacgaatgtacccaccgcccgagctccaacgcacctaaatccgagcatgcggataaaacacagacagctgtaaattcattagcactaacattctccatctgcatttccctaaaaagctccaacgctttgttcatctccttgtttctaaccaacccatcaatcatcgcagtccaacaaaccgtatctttaatcttaacatcttgaaaaagctctaacgcctccttaatgaaaccgcattcagaataacaattaatcatgaccgttgctgcaacatgatctctgtcaggcatttcatcgaacatcttcttagcattcaccaattccccagatttcccgtagatttccatcatttttagccctaccgatctactagacccgaaccctagtttcaaaacctgggcatgaatctctctacataccttcaaatcacaagctttcaaaactgaggtgatcacgtagttatcaggcaaaaccgaattgtgaatcatccgatgatacagcgaaactccatcagcagaacgaccagatgacacaaaaccatcgatcatagcagtgtatagatatacattagggttagatacgtaactaaacacgtcgtaggcgtagtcgacggaatcgagagtggagcaaacacggataagttcgaaaacaacgaaagcatcttggtcatggaaggtcctaatgatcttggcgtgaatcgatggaacatgggcaatgttcttgcagcttcgtaatacagagattaatgttttcctgcgtgaaagcctgagagtgtttgaatcgggatccgccggaaagttga

SEQ ID NO: 17974 - DNA, 731 bp, Arabidopsis thaliana
gaatcgtcttcaccacatgttcaaattgcacccggttctcgttttcgtcgtttgtgtctcgtttggtatcacagttctgatacttgtatcgtcgatttacgggaaccgtttaggatcaacggttagttattataagaagaatgatttggatagcgatggttatccatttgctaatctgaagaaccttgtgatggttgctggacattctgtttatacgagtagtgattgtggtaaagttgagaaggaggattcgtggttcttggagtcttatcagaagaatccaggtcaagctgcaacgttcttgagtcatatacaagaaggtgttgaagcagcagcgaaagatgatgagtctttgcttctattcagtggtggagagactcgtaaggacgcaggacctcgtagtgaagctcagagttattgggctgttgctgagtcaaaaggatggtttggtgagtcttattagtttctgctctttattgacttgatggcaaaaatgtggttttgattgtttggcttgtgttaatgaacaggtaagaatgaggtgaggtctagggccttgacggaagagcatgccagagacagctttgagaatcttctctttagcgtttgtcgattcagagagctcacaggctcttacccacagaacataacagtaaagccttttgctttcgaattttgcgctctttagtgagcgaatggttttccattcttgtgatattaatgtatccctc

SEQ ID NO: 17975 - DNA, 408 bp, Arabidopsis thaliana columbia
taggtatttcaatcctgttggtgaacatcctagtggtgacattggtgaagacactcgtggtattccaaacaatctcatgccctttgtacaacaagtggctgttggtaggagacctcatctcactgtctttggaaatgattacaatacaaaagatggaacaggggtatgtacttgtcttttatgttttcataaaacaagaagaggttttcaacattttgatctcatgttttgttttaggttcgagattacattcatgttattgatttagctgatggacacatagcggctctacgtaagctagaagattgcaagatcggtatattatgatttccattcggttcgcttatctactacaatcattctcaagtctcttaactttgtttgtgtgttgtttatattcaggttgtg

SEQ ID NO: 17976 - DNA, 550 bp, Arabidopsis thaliana
agtttgaaaaataaagatagctagataagaacctgatgatcttgtggtggctagtactgcagagagttgtgaacgaaacggaaagaaatcatacaagccgttgcccaacgtattgaccgctactcggtcgtccattcgatacacaactttaccttggctcggtagccatacaaaatccgcaaactcatgttttttcccgaatgttagagcttcatcattgaaatctaaatcgtttctcataacatactttaacgatcttttgaacatcggttgtaattcaaaagtcaccttatcacgaaaaaaatatacatacagtgaaacaattaaaaagggtttgaacatatttatggcaataatattttttgtagtaaaatccaaatatgattttctattttttttggcaaatatatatatgaaaattgaattgatctaacctgagagataacgccaagaacgccaagagaaaccttagctgcgttaaactcgttaggagtcgtagtctcgcttaaaactctaatctttgcaaacccgtcgttgaccgaaccaggac

SEQ ID NO: 17977 - DNA, 605 bp, Arabidopsis thaliana
gctctcttacatctccttgaatctaataccaaatccagaaaacatagacaaccaccagaacggaatcaaaatcaaatttccagttccaaacgcaaacaaagtgatgacaatatatatatactcgatgttttggttacgaatacacaacgcataaacacgtaatctctgcaatgttcggaaaactaaaataggaatttcgatatcgcataggtttcgaatccgtaccgttttttagacctagcgtcgagtcctgaacgttgagatggtagagaatgccttcgtaacggatctcgtacttagaaattagactgatgaaacttcctataaacgtatcgccgacgttgttacccggcgacggagaaggtacagatgacggaggttgagatgacgacggcgaggaagattgcgaactctcactcgccattttttgagattaatcagtggaaaaagtagaacgaatcagagcgcgaaatcgattagggttcttcgttttatctctcttctgttgcaatttgatttttaaaaaatctctctctcggagaaccgtcgtggcttgagtttatctcgtcgtgatatataaaggcggggagatctgtgtgccgttg

SEQ ID NO: 17978 - DNA, 333 bp, Arabidopsis thaliana columbia
caaacccagatgaagtagctgagatcaagtatgtgagccgggaagagctgaaggagctggtgaagaaagcagatgcaggtgaggaaggtttgaaactgtcaccatggttcagattggtggtggacaatttcttgatgaagtggtgggatcatgttgagaaaggaactttggttgaagctatagacatgaaaaccatccacaaactctgaacatctttttttaaagtttttaaatcaatcaactttctcttcatcatttgtatcttttcgatgataataatttgggatatgtgagacacttacaaaacttccaagcacctcaggcaataataaa

SEQ ID NO: 17979 - DNA, 515 bp, Arabidopsis thaliana columbia
tataatggattcatatccagtgatgacacattaatggtaaacaaatgcaacattgtccattgatgtgtgtccaagatgtgcaatccatatggttgtttataccaacacataagttatacatatatagaacaagatgatgaataagtcagaacgctctctcagtcgccaccaacaactcgattgcctccaccaaccaacagacacttcatcaccatatcacagacaaccgtcgcaagaaaccataacaaatccgttggagaaacaactaagaagagacatcgaataaagtaatgacttttagatctagacccaaatctcctgtcgcgaatcactggctgtttcttctgtcgttaaatgtactcgctttcgtcatttacacacctgccatttttgtactccaccagtgccaaaacttgactaatgaagcgagtacattcaattagccgaaactgaatctcagattccaatgaaaccataggaattcgagaagatcaaaataggagaacgaattggtg

SEQ ID NO: 17980 - DNA, 1651 bp, Arabidopsis thaliana
ctggatggattggcgtaggtggaggcgagtttggtccagatcggagcagcagtggtggtgcgaccaacaatcggctggactgaagaggagatcgacccgatgagtgcattgtggatgagtcggtcttggcgacgccatttcgtgaattctgggttgggagaggttgttgtcccaaaagtgatggtttcaaacggaacttctttggattcatccaaatgatcgacaagttcatacccatcaaggagagcatgaacttggagcttccacatgaggtagttttgtgttgtagctttgagatgttcgacatgttgatgttgggaacaacatttgagttgacagcgctggtgttgtctcaagacatggtgacggcgtgagagaaaaaagagaggaaaaaatttaggtcttaggagcttattgctctgataccatataaggattgaatgattcttattatcactaaaagagagattacatcaatatatacatgagtcgtctagggtattaggatcaaagttaattacaattagatcccttaacttattacatacttatacttctatatattctaaaacgattgaatgattattattatcattaaaagagagattacatatatacatgagtcgtctagggtattaggacaattagatcccttaacttattacatacttatacttctatacaccccctcaagatggaggaaactgtgtgactccaatcttgacacaagcatgatgaaattgtgttcttgggagaggtttagtgagtgtatccgccaattgatcattagtgaaaacatgagaaacacgaagaatgccgtcttgaatatgattgcgaacgaagtgataatcaagagctatatgcttcgtacgagagtagaagactggatttgcgcagagataagtggcgccaatattgtcgcaataaataaccggggcagctggtaaccggaccttcatctcgtatagaagtgagcaaagccagcgaaactcaggtgcagtgttcgccactgctcggtattcaaattcagttgaggagcaggagacacctcgttgtttcttagatgaccgagatataggatttctaccgagatatatcaagtagccattagttgagacataatctttcgtgtcgccagcccaatgtgcatcagagaatgcaagaagtgttattggagaagacttgtttagttggataccatgtgtggatgtgccggcaagatagcggagaactcgtttagctgcatgccaatgtgcgtctgttgggtgttggacgaattgagaaatcctgttaaccgcataggcaatgtctggtcttgtgaaggagaggtaatggaggctgcccacaacagaacgatattgcgatgcatcacggagtctttctccggtggtgagtgtgagttttggactggttgtaacgaggttgacactggcttcacatcgagcatgttgttctttgtgagaagatcaattatatatttcctttgcatgagatgaagaccacgagatgagcgtgtaacttcgatgccaagaaaatagtgaagatctgttgggtctttaatagaaaagcgatctgcaaaagaagctaaaacttgttccaccatcatgttatcatttcctgtaacgagaatatcatcagcatacacaaggac

SEQ ID NO: 17981 - DNA, 827 bp, Arabidopsis thaliana
ttttttgaccaagcccctatcttcatgttcccaggaagaaggtatcctgttgacatttgctttactactgcacctgaagctgattacatggacgcagcaataactactgtgcttacgatacatgtgaaggagccacttggggatgttttggtcttcctcccaggtcaagaggaaattgaagccgtagaagagaacttgaagcacaagataagaggtttgggtacaaagatccgcgaactcattatatgcccaatttacgctaaccttccaagtgagctccaagcaaaaatatttgaaccaactcctgaaggggcacgaaaagtcgtgctagcaactaatattgctgaaacatcattgaccatcgatggtataaagtatgtcgttgatccaggctttagcaagatgaaatcctataaccctagaacagggatggaatctttgcttgtaacgcctatctctaaggcttcagcgactcaacgaactggtcgagctggaagaaccagtccagggaagtgttaccgcctgtacacggcgtttaattactacaatgacttggaggacaataccgtacctgaaatacaaaggactaatcttgctagtgtggtgctttctttgaagagtcttggtattcataatctgctgaactttgactttatggacctccgccttctgaagctcttataaagtccttagagctgctctttgctctgggtgctctcaatcagcttggcgaattgactaaagctggtagacggatggcagagtttctcttgatcaatgttgtcgagatgattgttgtttctgcaaatacaatgctcgatgagata

SEQ ID NO: 17982 - DNA, 871 bp, Arabidopsis thaliana
ctgctcttcgtgagatctcgcttctccagatgttatcaacatcgatctatgttgttcgattactctgcgtcgaacatgttcatcaaccatcaaccaaatctcaatctaccaaatccaatctctatctcgttttcgagtatctcgatactgatcttaagaaattcatcgattcgtataggaaaggacctaatcctaagcctcttgagccttttttgattcagaagttgatgtttcagctttgtaaaggtgttgcgcattgtcatagtcatggtgtgcttcaccgtgatcttaaaccgcagaatcttcttctggtgaaagataaagagcttcttaagattgctgatttgggtcttagtcgtgcttttactgtgcctcttaaggcttatacacatgagattgttactctttggtatagagctcctgaagttttgcttggttctactcattactctactgctgttgatatttggtctgttggatgcatctttggttagtaatcagctactatgtctcttttaatggtcttttgttctactgtttggattactgatgtttccccatttttttgtagccgagatgattaggaggcaagctcttttccctggtgattctgagtttcagcaactacttcatattttcaggtatttgcttcttgtttttgatgccaatgtgtatgtatacaggaaccagtttaggactttagcccattaggttcagtactcgtgaactcatttggattatggggactgtctagtatcaatatatctgaagtatggttttgttttgggttctggagattgttaggacaccaactgagcagcaatggccgggtgtaatggcattgcgtgactggcatgtctatcaaagtggg

SEQ ID NO: 17983 - DNA, 1400 bp, Arabidopsis thaliana
gacgaatctacttcaccaatccctatcgaaaacagtattttccggttataacatttgagtatgtgtaactgattcaagatcgatagagaaggaatcatttttgagtaaaggaacgtatcaaatttcagtgttttgtacaaatgaagatttagattgaaatgtttgattatgaaattgtgcataacgtttttgtttttcactatatggctttctctgctacatgcaattgaaatttgaaacctttttctttcaactttttttaatatattaggttcttgtcattgtgggagacactggttcaggaaaaacgacacaaataccacaatatctccatgaagctggttacacaaagcgtggaaaggtacaacctactgcttgtcccaaattgtagcattgaagttgaagttgctaacaaattggtggtatttctttaactaagagctgttagcttgctgaaaacaaacttagccatttcttattttcatgtgaagttgtttgttttttcttcaaaagctgttttattaaacgtatacttggatttaggaagaaagctattgtccatgacctttgtggttgaatgagttcaaaagtatagactggctagtagagtagctcctttatcaaataaagtaccgtaatgcttttctattatatttcaggttggttgtacgcagccccgaagagttgcagctatgagtgttgctgcccgtgtggctcaagagatgggtgtcaaactcggacatgaggtatgcttgtttttcgtctttttctgctggtagctgattgttttaaattgtcggttcactctcagaatctgaactttggttggtacttgtcacaggttggctattccattcgatttgaggattgtacttcagacaaaacagttctgaagtatatgactgatggaatgcttttgcgcgagctgcttggtgagccagacctggccagctacaggtaatgaatattctggcacatttttttattatcactattggacagctaaacgtttttgcttactgattgcaaaacatttcagtgtcgttattgtggatgaggcacatgaaaggaccttgtcaaccgatatactgtttggattagtcaaggcaagtagattttcttgtacaatgtctcttcttacttgtgtaaccagggttaaatccttggatacattctgattgactcttcttatatttgacaggatatagcgcggtttcgacctgatttgaagttgttgatatctagtgcaacaatggatgcagaaaaattttctgattattttgatacagccccgatttttagttttcctggaagaaggtatccagttgaaatcaactatacaagtgcacctgaagctgattacatggacgcagccatagttactatccttacgatccatg

SEQ ID NO: 17984 - DNA, 522 bp, Arabidopsis thaliana
ctaatcagagttctgtaagtggtctcgtctggttccagtccagtttcttttatcctctggtatacttgaactgtcttcttgtaatcctcgatagccgtatacatcttcagcatggaattccatatagcaagctcaaccttgaaattggcctcttccatttcagagaccataatttcagcatctctaactcgtttccctttgcagagaagctcaatcatcatcctataaaggcggattgtgggtaagtaaccagcagctttcatgctactgtatatcttctttacctcaaagatatttccagctcgggcaaatgcgtcaagcatcaagagaatggagcttttgctaatcttaaagcccatatcttgcaattcttcaacaacaacgtagagctcctcgagtctcccatcaacacacaaagcatgcaacaaaatattgatggattcaacagtaggagacggaccatccctcatcatagtgttaaaaatagcccttgcccgctcgtaacagccacactgagcataa

SEQ ID NO: 17985 - DNA, 580 bp, Arabidopsis thaliana columbia
cccagctcctaaacctaattccagtctccggcgtatcacttccaacacacgattcgtcccgatctgaagaacgcgattgattcaatccaggatctgaagaccgagattggttaaacctgggatggttcgatagatcggaggaagaagaagaagatccatcaggtaacggagcgagaaagttagccacaccacgaaattgacgcgtgagggtatgaccaagttccgtcaaatcatctttaaccccacgcgcttgagcctcctcttccggtgacaaacgaacggcgtttctcgagaaatcgtgtctttccgttgaggctttcggggttttctcgtcgttgttgttgtcttcgtcgtcgtcggcggcgtcatcgtctccgattccatcgtataagctttccaaaaaattcgaaaacattatgattgatttcttttttcttttctttttctcaattaatctattgatccatttggttgcacaaaaactaaaactatgcaaattattttatcttttcctaacaaaccccatccaaattaaatatcatatacttgtaatttagttttaaatcccatattttttggt

SEQ ID NO: 17986 - DNA, 399 bp, Arabidopsis thaliana columbia
ataacccaattacaataaagtgtctttagcgcacacgcatgcatatagaggagccattatcatactgtatactaccacaaagattctactaattaattaattatcaccagctaatatattagcaatcaaggaaatgatttgaaaagccattaacatctcgtgggtccaagccaatcctcacaagaacacctttggcatctttagggttcttcatgaaataagcaacttgtggcaccggtggacacagtggggccatgtaatccgctggctcgccgccgttgccaaagccaacattgtgaaatggcatttttgtccagtcggagattagggttagctctttgagaggagggagatttccgtcattactacgtccgagtgcttccatgtaagagtttatgt

SEQ ID NO: 17987 - DNA, 527 bp, Arabidopsis thaliana columbia
aatgcctagcttataacccgatagacaactgctggcgatgcgatcgtaactgggctaataaccggaagaaactagccgactgtgtgctcggattcggccggagaaccaccggaggaaaagacggaccgatatacgtcgtcaaagacgcgtctgacaacgatcttatcaaccctaaaccaggaacgttaaggcatgcagtgactcgagacggaccgctttggatcatattcgcaagaagcatgatcataaaactgcaacaagaactgatgataacgagcgacaaaacaatcgatggaagaggagctagggtttacatcatggaaggtgctggattaacgttgcaatttgtgaataatgtgatcattcacaatatttatgtcaagcacattgttcctgggaacggtgggttgatcagagactctgaggctcacatagggcttaggacaaaaagtgatggtgatggaatcagtttgtttggacaaccaatatttggatcgccatgcgcaatgcaagatgtcagatggtat

SEQ ID NO: 17988 - DNA, 545 bp, Arabidopsis thaliana columbia
ccatcccgcacagcacacaacacatcatcatcatcatcatcactctcttttccagcagtcccgttcttcttcgtagttattttgtcaacaacaacaacagcttcatgaggtgacttgccacttttcgcagcccctttgtcaattaaggccacttcctcatcctcctcaaacacctcctcctgtgattcaacaaaccatataattgaacaatatccaaatcattcttaaaccacaattcattaagcaagttttattgtaacagatttgacgattgtgtatcaaaaacaaatgacaaactcttattagtcacttactccactctcgctttgatgtgctttatccataacaccattagtgtattcagcatcaattttacgccaaatcatcatggaatatccaaaagcttcagtttcactagacctagtaaaatgtggatcatttccttgatcgattttcccatttgatcaaggaacttcttcttcaacttcctggtcttactcataagctggcacttggaaactttcacatgaatggaacctttgacg

SEQ ID NO: 17989 - DNA, 812 bp, Arabidopsis thaliana
gggcgggaaaacgcgagtcctcgatcatacatgcgttgaatctcttctctgtattcagtcagagactcatcaggaattgttggagtcagctccaccacatcacccatcttcagcttccacttgaggtcacttacaggtatttggttcagtcttggccttagttcttcctttgctggtatgccatacatggaccacctcgagctccctggccccgcccggctcagcagatccgagactgttgaactcgctggaaattcttgcacagacatctgcatattccgatttgttcagtataacaatcaagtgtacaactcttttgtactcgacaagataggtttataacaaaccttatcattttcgattacaatgacatagactggtccatcctggctactgttaggcttgtaagaagctgggcagtcctcagagtgagacggaaacttgcaagggggtttgatggaatctgaagaacttatggaagatcggtctttgctcattgcttcgcaatgccaggttacgacccaccgagcccattcaaccatctgaagcacaaacgaagagtatttgcagccaccttccttgtatctccaatgagctgcaaacccaaattctgcttgcaaatgcatctcctgtgtacgtatttggacttcaagtggaactgttccattgtccatcactaccgtgtgcaaagattgatacctaaaatccaaattaccaaagtcagattcattaccttttaacaagccacaaccaaccacaacttaaactatgagatatggagatatgaacttacccgttgaatttgggatgag

SEQ ID NO: 17990 - DNA, 484 bp, Arabidopsis thaliana columbia
ctgcgtttttccctatgtctccaaggttttggaacctgccgatgaagctcccgtatgccggtaccaaaagcctggccagtgagatctttagctcttctttcagctgctcgtcaaacactacccacgtcgaatgcactttacatatctcatcaaactgaatattgaactgcttcagcttctccttcatggtcttccccaaaccgttcatgcctgctgcagtattatccaccttcagcaaccccagcatcttattccatgagcttctctgataattcatatggtattgtttcactttgacattgtgtttccgaatccaatcatctcctaacagcaatcctaggtctccatctttgactttctgaacaatgtatctcccattattcatcagaaacacatagcacaaagctggatctttgtacactttagattttactccaagttactctctagaagcccatgatcaagcatctgacagtcacagagt

SEQ ID NO: 17991 - DNA, 1063 bp, Arabidopsis thaliana columbia
ccgtgtcggacctgttacgcagagcaggaccagggagctcgagatggtcaatgtacagcatcccggcaaaggaagagctaaggccaagacttaaccagacacctgtaagtgatctgaaatgcaagctgaagatgggagatgtggtggagctgactccagccatacctgacaagtctctgactgaatacagagaggaaattcagcggatgtatgatcgagggcttgcgttttcacggcctcaccgtgcagctactggtaccatggttggctggggaagctaactgattctcttaattacctttgttcatgtatatatactatagttgcatatatagtataatgcttcagaagatttgttgtacttcggtattgttgattcccacacaacagtgtatataagatatgcctatatgttctaataaactgactctggtcattaatatttgattctcttacattctaaatcttcaaaccacacatctggatctggtccataaaaactggctctggtcattaatttttgattgtgttacatttctacttgttgatacataaatattatagattttttggtctatctacttatttgggtacttatttgggtcgtctagagagtgggaaagagaccctttgaggagtttggcttggaaggtctgaggtttgttgttgctgctgttgttgttcttgagaggactgtccaggatctgtcatttcttcatcgtcctcggtttcttcaggttctgttgaaaccgacttcttcggtatcacgagctgataatttgggctcagcaatgtgtcctgttcaggtgggagtggaacaccgggtcctgctatcgattttggcagaggtatcttgttcctacttgcagcaagctcaagcagaacctaaatcaaacatcaaaaacagaaacttcaagattcaggaaccaaaaggcatggatgtgacagacaaaaacttgaggttctcagtgatacaatttatgaggcaagagggtccacacagttcataagtcataagtaagagtgataattcctaatgattccatatccaaatgacgatcat

SEQ ID NO: 17992 - DNA, 583 bp, Arabidopsis thaliana
gggtctctcaaggtctcgggacttccacgctcatggataacggtggagaaccggacaatgacaggagtctgaacaccgggagctcggagaaagtcagcacaagtgaggttagagatatcatgagtgacctcaaagaaacctttagcactggctcctctggcatgaaccacacgctctggaatccgttccctgtcgaaattggcaagcttctcaacgagatggtaatcctcaagaaggataggacctgcccaaaaaaacaatcagaaatgcaacaataacattgaggagaacagacttattcatgggagaagaagaggtacctctgggtccaacggtcatggaggagttgttgttccatacaggagcaccagagttggtggtgaagaagggagagttgtaagaactagctggacgatactgcatcatcatcatcaattgcaaaggaaattaaaattaacatcagagaaaaaccacaatgattcgaaagaatcacaagtcaaaaggcacatgatcttagagcaatggaaagacttaattgtatatttgcagattcgagtagaaaaaaaggtcaaactttgggtgc

SEQ ID NO: 17993 - DNA, 1041 bp, Arabidopsis thaliana columbia
gagccagtgtcagtcactaagtcacagaggatcgcctcaattgccaagtatgtgagtgccatgtctctatactcatgaaagctagattaggtttatttacaagctaacggatatataaaatagttccctcctaaaaggtaacaatagtgtccccaaaccaagacgaactcatagcaatggcaaacgctctctgcgccaagaatttgtatcatccctttagatcagacgaaaataagctttctattgaagatatgttccgtgcactaaagccagctattttggttctccttaaaaatggtgttaaagtagttatcgtaactctcggctccaatggagctctcctatgttccaagggaaacccgaaaaaggctctgaacatagacagaaagtttctaagaagtggagaggtcttcaaaagagtacagtctgtatgttcaccaaaccggttttctgaattgggatcgaatcgcagcccgagtcttttcgcaatgcatttcccaaccatcccagccaaagtcaagaagctgactggtgcaggtgattgtctggtaggcgggacagttgcatcgctaagcgaatgggttagatctaatccagagtttagcggttggcattgcgtcggcgaaagcagcggttgagtcagatgataatgtgcctcctgagttcaagttggatcttatatctggtaagaattagttgtgtcaatatgaatgagaatgaattattggttttatgggggctgaaccggtttacgtgttgtgtttggtttgaccgtacaggtgatgcagagttggtatacaatggcgctaagatgttgatggttcaccagtcgatgctatgaactgtgaaggagtttagtggtttacctagtagtctagtcttatcaaataaagtattgctagcaaaaaaaaataatgtccaaaatattccctagtgtttagaaatcaatttagagattttatttttggtgcgcaagggtacaactaaatagttgcaagggtttttcaaatatttagaggaaggagaagtcggtctagagtc

SEQ ID NO: 17994 - DNA, 831 bp, Arabidopsis thaliana
ccacaaaacccgttcattattatagtctttcttttttttcacggagctttcgcatcggtggtagtggcggcgggtgcgtcgccagaaggagtaggagcatcggtggagccacctccaagaccaggagtaggctcttggtgaccttcggctccataagctttcaatttgtaatcttccaaagtacccgtcgccatgtaagggctatcggtcggcaagtcgttgtctttcacttgctccgttttcttctccgtcgttgttgtcgtcgtcggtggtgttttcccggcctccatttttttttttgttttgttagtttcttcttttttatttttcgtttgctattaaaggttttaggttctgcttcatgagatgtgtctgcttttatggagctatctagtacacggtggctcgtgtgattccgacacgttaattacgcggttcctcgagatcgacgtggcttgttgtctgctgatgtcggctgtagtacttatgggccttttggttgaattttaaagtaggcttttcagtgggcttttcttaaagtgggtttaaggcgaataattgagttgaaccaaacaaggaaaaacaggtaccggtaaaaatcacttgataaactctgtagagagtttgaccaaaaataaaaaaaagaagaagatgatttttcaccggtgttttacgcagtttctgaaaaatatccacacttgcattttgtcttcgttgacatagcttttgtgatgattcattatttggttttattgagccttttcatttagaacatccttgagactattacatgttttttttttttgagactagaacatgttaatttagtga

SEQ ID NO: 17995 - DNA, 909 bp, Arabidopsis thaliana
gcgtacccgtctgcaagaagtgaagtagctaaccaaacctgcaagcaaacttggaaagctgccatggaagttgatccttctcgtgcagctagtgacgcggagagagttacacagaatgttactgcaattactctcatcagcaaaagaaagcctgggagagaaatatttcacaagaaaacaagaaccaaacagtgttattttatcagagatttcattgtaaacacattgaattttctttgaagtattttacaataccatttttcatgaatctacagaactgaagatgtttggtactcatgttgaagatatcaacttgacccatcagtttccacaagagtattccacacataaggtatctgaaaatgaacatagaaaccactagtcaattaaagtagaggccattttgagattattcaaggttcacatgcaaaactaaactcactgggatataacatgagcagtggctgctcctgttacgcctaggcggaaaacaaatatgaaaatcgggtcgagtattatgtttgttacatctccaatcactacaaaaaaaaagtggatcattaatcatcaaacaagaaaagtaaagtggatcattagctttgttctgttttaaggattttgaacatatgaaaaaaatagtattaccagtagcgaataacggagttgtcgtgtctttaaatccgcggaaaacgccttgtgccgcaagtgagagtagaacagctggtgcaccaagtgatcttaaagatagatatctctgagaaggtctcatcattggagaatcctgaaaaaatcaaaccatgttaagtgattttgaatctcataacatcatttatagagaacaaaagatcgatacgttacgtgttttctcccatgaaactcaagagaggtttggctgcggatataagaaac

SEQ ID NO: 17996 - DNA, 1076 bp, Arabidopsis thaliana
gaagttaagtaagggcttcagatgccaacaaattggtaggcccaataacataataaacgaggcccaaaaacttcatttggatacttacttatcaaatgtcttcttcgccattctctgcttaaaccctaaaccagcctccttctctctctctgttagctgcgttcttcttcaagctagctctctgcttgtactctagaataatggaggaagagcttcgtgttcggctgaatgaccatcaagtgtcaaaggttttccctgtgaagcccaaatcaacggcgaaacctgtttccgaatcggagactccggaatcgaggtactggtcctccttcaaaaatcattccacacctaatctcgtctcctccgtagccgctttggctttctctccggtccaccctcactccttggccgtcgctcactccgccaccgtctccctcttttcctcgcagtcgctttcctcctcccgccgtttctccttccgcgatgttgtctcctccgtctgtttccgttccgacggagctcttttcgcggcatgcgatctctccggtgtggtccaggtcttcgacatcaaggaacgaatggctctccgtactctccgctcccacagcgcccccgctcgattcgtcaagtatccagttcaggacaagctccacttggtctccggaggcgacgatggagtcgtcaagtactgggatgtcgccggagcaacagtcatctcagatctgctaggccacaaggattatgtccgctgcggtgattgctcgcccgtcaacgattcaatgttggtaacaggctcttacgatcacacggtgaaggtgtgggacgccagagtccacacgtccaattggattgccgagatcaaccacggactcccagtggaggacgtcgtatacctgccttccggtggattgatcgcaaccgctggtggcaacagcgtcaaggtatgggatttgatcggaggcgggaagatggtttgctccatggagagtcacaacaagaccgtcacgtctctccgcgttgcgagaatggaatcggctgagagtcgacttgtgagcgttgctttggacggatacatgaaa

SEQ ID NO: 17997 - DNA, 1266 bp, Arabidopsis thaliana
gcaagatacaactaaatagttgcaagggtttttcaaataaagtaagggttacagttgttcataaaataaatagaaatttaaaatagtttataagtaaaccaaatattgtaatacgcggtttattacaatagataatacatattaaatcttgagactaaatcaagctgaaaattcagataaatacgtactctgtatttactgcttcggagggatcaagaatggaataatcatagatagagatgctgtggggcggctcgatccagacaccaactttctgaccccaggtcagatactcaaagtagtacccttcagggtcttcacaagaactcctgctatataaggaatacttgtaggggtgatttctactgaaaggacaaggagacttggtggaacgcctctcgttgataaatctgctccagaaatacaaaatgttactcattgaccctgtgaggccgtaggtcatcacgcaagacccatcgctcaaaaatattgaggaaccatccaatgtttccttcttctcccaaacggactccaaccggttaagcctatacaccatgggctccagagacgatgcatctacaagaaaaatatgtccttcatattcagtcatccacctgattgagcggggcgccatagggatgggttgcacaggaagtacgttccaagtacgtgcagttggatcgaatacccctagcgcagtttccgaagctgtatagaagagaccatctgagtataagatgtttcctaagcgcctgaagtaagaaggaaacagattagggaagtcctcatgtagccatgtagttgcaccaggacgccaagtgctgattttgattgctacagatgaggaaatattatttataccaaacaccaagcagcttttcttcgtaggagcacaagagaaagcaaaattcgtgtgcactgattccattatcctgtttctaggcaagtctatacgctctcgggtaaacgggttgaaaaagtacatgtcggcaattagtgaaagagagtcgttcatgagtaaccacccatccttggaataaaggatacctgaagacttagatagctcgggtagattcatctcctttgtcttcttcttctcaactgggtcaaaaaatccgtaagagacgcccttgtcttgaaatgcatcatggtacaaaagccagcaacgacgacttttaacccgaacagaagcagcaatatcaccccatgccttgcaaacagtagaagagcgtatgttgtctttgaaagaaagacgagacaatatga

SEQ ID NO: 17998 - DNA, 537 bp, Arabidopsis thaliana columbia
taaaaaaattcagcagcaatagggatgactcgagctggagcctcgttcttcatgatgggtccatgatttctgtaacttgcaggcggttgatatgaaggttgaacagatggcctgaagcttggagtattgttggcttgattttgaatgtttacacccctgggaggtgctctattaacagaatgctgaaccattggttcattaaaaacaaccctgttcggaggcggtatattgcccgtacctgaaaatgtcttctgggcttctgtatctgtttctccaaatattgtagggttccaatggtttcagactgttgtactatcgtctccatgttcagcaccacaataagcctgtacacagtatgaataaatccataagaaaatcacaatcaaagagagcaaaactccttcaaatatgtcatgttcaaccaaaacaattgtgtaactatattttccaactcacacaatcaacaaaatcatctccattatcatcctaaatgttgtccttacatctgcctccaaccattaaatccatgaactcaaa

SEQ ID NO: 17999 - DNA, 618 bp, Arabidopsis thaliana columbia
agctaccttttcatgctggaattgatggaacgagtgccttataacatgctcagcagtaaattgtccttcggcacgactcaatagattcaaaattgtgtagtaactcagcctaaaagtactaagcaaaggggctggttttcccaacatcatgtccctgagtgtattcatctccatctgttgaagaacaaatgaaaattatcctatgtcatataactatactcagtagagataataaaggatcctcttcgaagacagtataaaagatgctatcctttaatgcatataatttgaaaataataaaggatgccgtatattcctatgtcatataactatactcagtagagatatatcggatcttcctggatgggaattactagttggttgccggtaattgatgtaattatctccaatcaaattacttataaaattacctgttcatcaatcataataatgcagatgccacgctcgtcctttccacgacgtccagccctgccgctcatctacaagcattcaatataaacagacaattactacaatatcattttgtgatattcatcaaattcccacttacgtcacaaactacacccacctggatatatcaccagacccaatgtacga

SEQ ID NO: 18000 - DNA, 669 bp, Arabidopsis thaliana
agctttgggcgacaactacgtcatctccagctagagctctttcgagcccttctcgagctagaaatggagtttctgatcaaatgaacgcttataaccgcaacaacacgccttcaattcttagtttctctgctgatattaggagagggaaaattggggaggatcgtgttatggatgcacatttgttgaggcttctatataaccgtgacctgcagtggcggtttgtcaatgcgagggcagactctactgttatggtgcaaaggttgaacgcagaggtatggcttaattatgagtttttcatttccttttgtggtcaatcacagctatggtttatacttttagccactgctgcagattagatagggtatgatttgttcatctatatttaggatcttgatgtaataagtgagcacttgtggaaacttatcatttaggctcctaggtgccatcatcccacagataaatcaggtcaatttggagattaagcatgagtttgttaatcttactggaactaatatagtggaagagtagtttttgtttaaggatgactaaatctatactattagcggcgtaacataaactgtaatttgactctcttgttttttctctttgccagaaaaacctgtggaatgcatgggtatcaatctcggaactgcggcacagtgtcacttt

SEQ ID NO: 18001 - DNA, 546 bp, Arabidopsis thaliana columbia
accgtttaaaaatagtaaaattttcatttgaaaacaaaaattattggagatgattaacgaaccttaatgcgacctttcctagtagcaacatgtaacgcagtgttccctttagaatcagccatattcaacgaagaccgatgtcccttcattaactcaaccaccacatcaatgctttgtcctttcaccgccatgtgaagtggcgtctgaccctttttatcagtcctcgttgccgtgtccggttccaccgccacaatcgcttttaccacttccgcgtgaccattcctagccgccgagtgcaatgctgttttcccgttgctttttgcgatcgcggctaggctactccctgctgcttctagtagatactctacgacctctacgtgtccctgagctgccgccgtgtgtagagccgtcgtgtttgataagtccaccgtcattgatagctccggatgttcttccattagtactctcaaaacatctataaaaatagatttcaaatttcatcaatgtatccacatgtaaataaatatagaatattatcatcagttt

SEQ ID NO: 18002 - DNA, 563 bp, Arabidopsis thaliana columbia
tgataactccatgcttaacagatccaacttccaattcatctggccgtgggaagagtgggcttttgtgttggatcttcccaagtgggcccctaagcgtgtatttgttcaggagattttgcaaagagaagtacgcttgtcttactgggataaaattaagcaggtaacagatcgtcagatatcctaatagctgccaaacttaagcatcagatatacttttctcttagcctagggttatttgtcttattccattttgtgggggatcaatgtttcatcttgttatccacatggatatatcattccaaacttaagcatcagatatccttcctcaggctatattgttttttctatgtgtgtctaacagagcattgagaatgcgactgccctagaagaattacttcctccaaaagctggtccgaattttatgtattccttggaagaaggtaaagagaaaacagaagaacagctattgtcagccgaattgagcaggaaggtcaaggaaaacaaccgcacgtgacatgatagtgtggattgaagaacgatatatctagttcatggttttgaag

SEQ ID NO: 18003 - DNA, 1331 bp, Arabidopsis thaliana
gaactttgtggaatcattcatagtgaataaagttacagttactttggaagaagtcagatctgcgcttcacagcagagtgttgcgtcatcaggcggctggtacagttacagattatcaagcctcaggactagtagccagtggagcagtgggctgggacacgctaagaagaacagaagcagaaatggtttttctaaaagtcctaagcaagatgatatctgctattactgtaaggagaaagggcattagaaatcagactgtcccaagaggaagcaacaaggatctgctgctgtagcagaagatgacaataagtctgaacatgatgttgctcttgtggctgatggaaacgcccacaactctgatgtgtgggttcttgatacaggagcatcatatcatatgtgtccatggagagagtggttctcaacttatgcacaggtagaaaatggctgcatcaagatggctaatagttctgtcagtcaggttgctggaatcggctctatacagataaggacacatgatggcagattttgcacactgaacgatgtcagacatgttccatcgatggaaaagaatttgatatcactaagtctgcttgatagcagaggtctgaaatattctggtggagacggaattttgcaggtctaccaaggttctgatgtgattctgaagggtgtcataagtggtactctgtatatactacagggttcactgttataggcacatcgaatgttgcatctgcagagattcacaaggaggatatgactaagctatggcatatgaggcttggtcatatgagtgaaagagggatgcaaattttgtcaaaggaagatcttttgtgtggtcatgaggtcaagagtcttgagttctgtgagcattgtgtgtatgggaagcttcaccgtagtaagttccctaaggctgttcacataaccaaaggcacattagattatattcactctgattgttggggtccagctcgagttgaatctctggcaggtcacagatattttatgtcgatgattgatgattattccaggaagacttgggtgatcatgctaaaacacaaaagtgaagctttcaagaactttagggagtggaaaattttggtggaaaatcaaactggaaagaagatcaagaggctgcggacagacaatggtctggagttctgttcatcagagttcaatcagctgtgtaaggatgaaggggctgctcgtcatcacactgtcagagataccccacaccagaatggtgtagctgaacggatgaatcagacattactggagagagctaggtgtatgctctctaatgctggttaagaaaaacggttctgggctgaa

SEQ ID NO: 18004 - DNA, 557 bp, Arabidopsis thaliana
cttcagagattcacaaggaggatatgactaagctatggcctatgaggcttggtcatatgagtgaaagagggatgaaaattttgtccaaggaagatcttttgtgtggccatgaggtcaagagtcttgagttctgtgagcattgtgtgtatgggaagcttcaccgtagtaagttccctaaggctgttcacataaccaaaggtacattagattatattcactctgattgttggggtccagctcaagttgaatctctaggaggtcatagatattttgtgtcgatgattgatgattactctaggaagacttgggtgatcaagctaaaacacaaaagtgaagctttcaataacttcagggagtggaaaattttggtggaaaatcaaactggaaagaagatcaagaggctgcggacagacaattgtctggagttctgttcatcagagttcaatcagctgtgtaaggatgaaggggttgctcgtcatcacactgtcagagatcaccataccagaacgttgtagctgaacagatgaatcagactttattgaagagagctaagtgta

SEQ ID NO: 18005 - DNA, 701 bp, Arabidopsis thaliana
aaaagcaagtttctcaaattgggcctaatataaatatgggcctatataaagcccaaaaataaatcaggaaagctttaaaagaggtaaactcgtcaatcgcatctgagtcgctcttctttccttccgccatttttttctttctaggttgcagagttaaaggagaaggttttcaattagggttttgtagagagaaagatgagccgaagtttgggaataccggtgaagcttcttcacgaggcctcaggtcatatcgtgacggtggagctaaagagcggcgagctttacagaggaagtatgattgagtgtgaggataactggaactgtcagctcgaggatattacttataccgccaaggtaatcaactgatactctgaagatctcgattcattttatatgagactgttttttgaaccataggtttcgtttcaatttcattgtttgatgttagtgctgttaaaaccctagatttggtgagctgggcaaatttgctgggaaattttagattgcttcttattttaagttctaagtgagattaagaatccttgaaattcatgctgtataaaaccctagaatgcgtgatcctgccagtgacattagataaattttgactgtagggtatagtccctctgattggttaacttattattgatctataggcacatcaataactgagaagaaaggtctacgtttgtgctttgtac

SEQ ID NO: 18006 - DNA, 295 bp, Arabidopsis thaliana
cgccagtgtgctgtaaagtacgtctgacttcgcagggcgaactatgattggcgatcatttcattgtagctaacgcgattgtttactccttcggtaacgatatatatagctacgaaacaggcgcccactctgatttcgaatctattcgtgcggttgttcgcccggcctatatttgggaccaatataaccagacaggtgttgaactgggctatttcacccagcaaaacaaagatgcgaatagtaataaatttaatgagtctggttataaaaccacgctcttccatacctttaaagtc

SEQ ID NO: 18007 - DNA, 644 bp, Arabidopsis thaliana
cattccgacccgattcgagattctagtcagagttttgacttacctttgcggatgacgctctggaaaacggcgagtgaggttaaggaatgtgccatgtccgaagaagaccaagagtcgcaaaagcagaagcccaagattttaacataaaaaagttttattaatatatttttctttttttccttttttagtgtgaaaaatctgcagaagaatccaaggttttatgtacttgaagcgtttgtcattaagtgaaaaggctccaagaaaagtaggttaaaattttacccttggtccaccatcgaaattaccaaaaaggcagaatattccggaacgcacgtgtaggcaagcggacgtgacgagggtagttatgtaaaattaacagtgggaagcgggttgcaccgaaccaagcccatgtagctaaacactcacacgcgcgacgcatgtctgaaaagtggtaattgaattttgtttagaatgattctacagaggttgaatttggtaaatgaatcagaggaatattaagcatttgagcataatttccaatttggtcagattatgatatatgtaaatatgtccatgattcatgttctgtttttgggttccgtttgttcatttattaagtcatgggctgaagtttcatattttaa

SEQ ID NO: 18008 - DNA, 511 bp, Arabidopsis thaliana
accttataaaatacccgtgctctgcacccaaaccgagatcgtcacatgaagaaaaccattcagttagtgtccttctgtctttcccactgacgaggtacacgatattcttgggatcactagacaggttgttcaagatttcgattgtttcgcgggttggtgttgtcctaatggaacctggctgcaccattgtgccatcataatccaacaaaatggctcggttcttggttctcttataagctgagacaatgtgctcaatcgaaagctttttaaaactcggatcaagcgccacaactctaaagcctaacccgaatccaatcccccaacacctcttcctcacatgatccccgcaagccctttcaagatcttgtatgaagctacgcgcccaataagcaacatcatgtgtgctaacataattgagatgcttctcgtgacgcagttgcttctctgcttctgaaactatgaatgcatagtccattgcatgagtcacagcatcaatgatccacggatttac

SEQ ID NO: 18009 - DNA, 768 bp, Arabidopsis thaliana
tacaagtcaatctcatttgctaaagtagaatctcctcttggtattgaagatgccttcccaaccattcaggggatgtgatatcgctgctcaagaagcttatctgttatgatccagctagtagagctactactatggagatgctgaatgacaaatatttaagtgaagagcctcttccagttccagtttcagagctctatgtgcctccgacaatgagtggaccagatgaggattctccgagaaagtggaatgattacagagaaatggattcagattcagattttgatggctttggacccatgaatgtaaagcctaccagtagtggatttacaatagaattcccctgaccttggcatttaaggtacgcagtcaaaagctctggctcgcttaaacacataaatcagtctcttctctctctctctttcttcttcaaagagaatgggtatataccaaaacctgacatgtgtttctttaggtcttgattgatgcaacactctttgttgtttgaagatcttgttacagaataccgcttagaaaattgttaacttttcgttagtacattgtttaggtatcaatggcggcaaaaacttttgaagatcgtttgctcattgatctcacaacttttgtttgcgccttgtttctctcagcgatcgcagagttaggtgtttatctctccatggcagagtcgatggttgagcagcgtgatgatcccgacttccgctggattcggctactttggctaaaatggtgttgtgtgtgggtgtgtgtggt

SEQ ID NO: 18010 - DNA, 516 bp, Arabidopsis thaliana
actagaactgcggaatattgattttaaagttgaagatgaagatgctgctttgcttctgttggtacctttaccactatcatatgagaactttgttgaatcatttatagtgaataaagttacagttactttggaagaagtcagatctacgcttcacaggatctactgctatagcagaaaatgacactaagtctcaatatgatgttgctcttgtggctgctggaaacgcccacaactctgatgtgtgggttctggatacaaggggcatcatttcatatgtgtccaaggagagagtagttctcaacatatgtacatgtagaaaacggctgcatcaagatggctaacagttctgtctgttaggttgctggaatcggctctatacagatcatgacacatgatggcagattttgcacactgaacgatgtcagacatgttccgtcgacggagaaaactttgatatcactgagtctgcttgatagcaaaggtctacaatattctggtggagacagaattttgcag

SEQ ID NO: 18011 - DNA, 1083 bp, Arabidopsis thaliana
cctgtgcgccattcatgattcattccacgtatatattgtttgttcgaatcaaagcaaactcagaaaatgaaaacgctgaatgacgataaaaatagggacgcttttgttcgaattagcgtgcccattatgtcacgaacgtagattcaagtcttggccataaaacaggattccttatagcatccaccagaacacgagaaatcattctcaaaaacagtctctccaaatccgaactaaacaactcatagcccatataataaggtctgtagtgggatgcgtttttggcttttagaacataccaattggagaacacgctttcttacacatggaaacaaattacgaacgcttccaccaaatatgggctgagataagcccattaacataagacccagtaataaatatataatatgagcccatattaaatgaaccctaatccatttttagtttctatcatataaatagcttcttgtgtttttcacgcccttcttctttgtatttccgcctcccccgagaaaacgaaaaccctagtttcagaggcatctccagacaccgaaaatggcggaaggactcgttttgaagggcaccatgcgtgcacacactgacatggtgacggcaatcgccaccccaatcgataacgcagacatcatcgtctcagcttcccgcgacaaatccatcattttgtggaaactcaccaaggacgacaaagcctacggtgtagctcagaggcgtctcactggtcactctcacttcgttgaggatgttgttctctcctccgatggacaattcgcgctttccggcagctgggacggcgagctccgtctttgggatcttgctgctggtgtctccactcgtagattcgttggacacaccaaggacgtgctctccgtcgccttctcactcgacaaccgtcagatcgtctctgcatctcgtgaccgtacgatcaagctgtggaacactcttggtgagtgcaagtacaccatttcagaaggtggtgagggaaccgtgattgggttactgcgtcagattcagcctaacacgcttcagcgacgattgtatctgcttcgtgggataagaccgtgaaagtgt

SEQ ID NO: 18012 - DNA, 664 bp, Arabidopsis thaliana
gaggagtaaatccaaagttgcaagcatttgaagaaagagagagagcctttgaatactttcactacggttgtcaaaagttttttagtttattcccgtctgttcccaggaaatggttcacaatctctccttttaaaagaaaaaatagcttcattgcaatatataggaacttcttgtgcactactttaatatcgcattctaaaagctggataagtttccaaatccaattctcttaacctgcaactccttcaaatcaactcgttcgacgtttctataaacttggcttattgattatgggctctttggtttgctgccctggaacttcaagttcttggtttgtacgcactccaacttcaatttgtgacatgcaaaggctcctctcgttgtttccggatttggccaaaactatgtaatattattaaaatgttgaaagggtgacccagctagcccggctacatatttacaattttacatagatggcgtgcacgactcacttgtttcctcggtgtatcttttttttttttttttgaataagttcgttcccaaacataaaccagaagtataaaatcttattaaaattagcaaccagcaaaagcaaaaatcatgtacatgtatattgagggttttagtttctgtcactaactatatgaactttgcctaaagaaaa

SEQ ID NO: 18013 - DNA, 546 bp, Arabidopsis thaliana
tgcccggtgtgccgtgcaaaatggaaggaaatcccaatgcagcacccaagttttgatcttccttatctctttgctcggtcttataacaatgatgcagctattagccttgtccaccgcttacctagatctcgtggagttatgaatcaaggacgaggtctggctcctgagccgtctatgtttgatgatgatgaacggttagagcagcaactcgtgttttctgggaagagctatagtgatgctttggagaacaatcatcctgtaagaatgatggacttgaagatatatcctgaggtttccgctgtaccacgagctgactcccgtgagaagtttgatgtattggtgcatcttagagctgctgccatggttactggaaatgctaactctctcaacaatcagatatctaggtatcctcgagctccagttgatcttgtcacggtgcttgacatcagtgggagcatggctggaactaaactggctctactcaaacgagcaatgggttttgtgattcagaaccttggttcaaatgataggctctcggttattgct

SEQ ID NO: 18014 - DNA, 553 bp, Arabidopsis thaliana
taatcttccgtcgtgctcgtcccgcttacaatcacccttcaatgtccgccgctgtatcagctgatcactactcgttcccctcaggtcacgcttctcgcgttttcttcgttgctgcatctgttcacttcttctctgctgctgctgaagcttccatgactggtccaagctactccttcttagatggatggatcagagatcataacgatggcgatgtgaaggtagaagttgtggtcgttgtatggatctgggcaacagtgactgcaatttcaaggattcttttaggaagacattacgttctcgatgtagctgctggtgcttttttagggattgtagaagctctctttgctcttcgatttctgagatttgatgaaatgatctttgggaggtaacaaatgtatccaaattgttgttgtttttaacaaattgttctgtaatttttgtttcgattacattgagaagaagaattgtattgttcatgaatcaaagattgttccttttgtttcactacaaggctcttgttgtatacataatcgttagtgtgaataatgagaga

SEQ ID NO: 18015 - DNA, 456 bp, Arabidopsis thaliana
gtacttagaggatttcttatcttggtttatataggatatctcgggtattacggtcttgggaagcactattgggtgttttctttttacacatcggccctttgttgtaaaatccgccgtgcctatgcataagaaatcgtttattgacactagctattacaacattattattattatttttggtaaaatgtgaagtattacaacattattatactaatatgatactttctcttatgtgatctctaagtttttcaaacactagttgtgtttcggatggatagcaaggaaactttaacaagtgaggttatctccaggtgcaactccaagcttgccacaatagtcttggaaatacttaatcctgttggcggctttggctgtagaatctcctccgctacactccctactattcactgccctgattgttgcgcccagcccgatttaaactcgtgcgacattagt

SEQ ID NO: 18016 - DNA, 687 bp, Arabidopsis thaliana
ccacgttccaccaatgaatgttcgacacgtatcgtcgagtttctttttctttatgcttacgtcatcgcacacgtctatcttcttttggttaaagtgataaacaggaaagtcgtaaatggcttcgtcactgagtctttcctactattttaaccccattagtgacactcctttcttctccactacactccatttctctttcttcttgactcgaccatcgtttctctaatctccgcaactatggcttcatttacgaaaacggtgtgtggggtttcacgatcccgagatcatacttttttccctcctcgtacgtaacgatttttttttgtgattattaatccaaggttttttggcgtctcttttaggttttgatccctattgcgcacggtacggagcctctagaagcggtggcgatgattaccgtgttgcgtcgaggtggtgctgacgtgacggtggcgtctgttgagactcaggttggcgttgatgcttgtcatggcatcaagatggtcgctgatactcttctcactgatataccgactctgttttcgacttattgtgctcccgtaagtctctctgctgatttaacattgtccagatgcttagtttccttgtgtgtaatctaagaactaaggacagccgaataagtggatcgatcaattatcaattagctcacttaactaaagtttcgaa

SEQ ID NO: 18017 - DNA, 537 bp, Arabidopsis thaliana
taagaaaggtacaagcagagacgtaaatagccaagcatttacaaaactaacgaaagtagaaactattccagatccagacatttacgacataacctacgtagatatctctccctccgaaggctcctcttcaccattatccaaatcaccatggtccgttcaagtcgatccatccgccgtagattctccgtatcattcggtgaaagttacgacggatacaaccaaagaaaaatcaaccaaccactctcctaatattctcttggggtcacttgttcgcgaagaaggtcatatctattcattagctacatcaggagatttactctacacaggatctgattccaagaacattagggtttggaaaaaccatgttgagttctcgagttttaaatcgaatagtggattggttaaagccattgttcttgctggagataaaatctttaccggtcatcaagatggtaagatccgtgtgtggaaagctgcatctaaagaatcaaacgttcatcgtcgtgtaggtacaatgcctaaccttctcgattatat

SEQ ID NO: 18018 - DNA, 1734 bp, Arabidopsis thaliana
tcgcaaagataaattgatctgttgactgaacaatcgtcacttccccaatctccgacagccacaacaaccaaatacccccactctgcccgactgcgtcgacacgaaaagatttatcaaagcctaatccctggcaaatgctccctgctcgatccccactcgcatgagtttcaaagattgccaagatttcggttggaaacttttttacaatatatcgaattgatcttcgaaagtggggtttattcgccccctggaaattccatagtaaacaattcatcattatttcttcttgagtaaaaagaaaagccggggcaatccgttatgcgaccatgttcccattaccactaccctgtggaacactacgcatcgtttcctccataggcatcgtactttgattcgaatccaactgaccgaccatgtttttaacgactcgaccttgaccggaattctctacattcgaacttccgtcccctgtctgagtaaacacaccccccggacgtcctggattcttctcctctatccttagacgtttcccgttaaaagatctctccatctcgcctctagttggcccaaacaccagacctcttgtgggcctaacgtggttcatttgattaggcctaggcccattcgaaactgcaacttttttgagcccattccgcttatctttcttccctatacgcgcaccctcattggccctcttagaattctcccctaacggtacaacattaccatgaataactttcttctcattccttgattgaattagaatctcctcattctccttattcccctctaattccaccacatctgcacttaaatcagtaccttccatatcagtcaacaaactcccaaaactgtttgttaccgaaatattcgctgaatcactcttcttccccaaatcacgttgagactttcctaaaccgctcctagtgcctccagctgcgaacacaaccgtcgccggctgcttcgtcccccttcgacctgactgtccgaccgtcgtgaacccatctactgattgactcactggagctaagcttgtctcgaccgccacaatagattgtgtagctttcaccacgttactctgcttcacttgtgggcagttgtgcactagatgtccatacaagccacaaccggagcaaatattcgtaaggccttcataagccacaaaatatctgtcctcatttatcatcaccgtccctttaagcggctttctcaagttaacttcaacacaaacacgagcaaacctagccctttcacaagtcaacgttgtcatatccactttgatcagattacccaggccaccagtaattcccatcaagatcgacggatgataaagattcaacgggatgttcgacaatctcacccacaccggtgtcgtaacaatctcgtccttcattggatcaaaatctggggaccacgcttgaactaacaggtaactgccgaacaccctccacggccctcccgtcagtgctgtcaaatactcttcctctgattcgaaccgaaccatgaagtattgtcgtggtagatccacaacatgcatcgctcctataggcttccacagctctcttaacttcttgcttaacactgcaatagggacactccttcctaacaccttgaccaacatgcaattcttccacaaactgttcatagcttcaaacacctctagcccgattatgattagtggttctcatcctcgccatctggaaacgtcagactcaaccgtgcccttacaaactc

SEQ ID NO: 18019 - DNA, 569 bp, Arabidopsis thaliana
gttcatcgtcgtgtaggtacaatgcctaaccttctcgattatataagaaactccattgttccttcttcttacttcaacttcacgcgacgtaatcgtagcagtgctgcgttagggtttcgtcatttagacgcgatttcttgtcttgcgttaagcgaagataaacggttgttgtactctggttcttgggataaaacgtttaaggtttggagagtttcggatttgcggtgtgtggaatctgtgaacgctcatgaagatgcggtaaacgctgtcgtttccggttttgacggtttggtttttaccggttcagctgatggaacggttaaggtttggagaagagaagatcaagcgaaggatacgaaacatttcttctctgagacgttattgaaacaagactgtgccgttacggcgatcgctgtagatcaaagcgcgacgttagtttattgtggttcgtctgacggaaccgttaatttttgggaacgtgagaataatatgaaaaacggcggcgttttgaaaggtcataaactcgccgtgctttgtcttgtcgcggcggggaatttgatgtttagtgg

SEQ ID NO: 18020 - DNA, 332 bp, Arabidopsis thaliana columbia
atcgatgacatgttctggtatctcatggaaataaacctctgctttgtcccatcctattcttccaactccagttttcaagtttctcacaaaaacagattgcacaacgccaccgtgtgaccccgaatagcctttgataaactcgcgagcttcatctttactagttggttattctctaataagacctttgtacacaacaacagtatctgcagtaatcaatagagttggttgagaatcttgtgtaaactggttttcacctcctaatttcaatataatctcatttgcttttgcttcagcactagtcacaaccaaatcttcaggcctctctttcctaa

SEQ ID NO: 18021 - DNA, 725 bp, Arabidopsis thaliana
attttccatcctcttctcaaaatgattaagaaaatgcaatttcagttctttagccatgagtttggatgatttaggcctctgttcttaaattgtgctttattctcaatttcatcctcaattgattttttgttgtagatgtggccatctcttgttcaaacagcaaaagaaggaggctgcaacgcaatcgagtcttatgtcttctggaatggccatgagccatctcctggaaaggttctaatttcaacgagcttgcaattattactcttggaagatatcttctagatgatgtttgttgaaacattgctgaataatcatgttgctgtcttctagtattattttggtggccggtataatatagtgaagtttatcaagattgttcaacaagctggaatgcatatgattctacgaattggtccttttgttgccgccgagtggaattacgggtaatgagctttctatacaatccttcctttctcaaatattgttgccccctttgtagtttttctaattgaatcttgtggttataggggagtccggtttggctgcattacgtgccaggaacagtcttcagagcggataatgagccatggaaggttagacaggaaaatattgcggaatttgttttttctctctgttactgaaaattcatttgctgtgtgaatttcgttgtttcagcattacatggagagtttcacgacgtatatagtaaacctgttgaacaagag

SEQ ID NO: 18022 - DNA, 1040 bp, Arabidopsis thaliana columbia
tgtgacttaagcattctagatcttaattaaatagtcttcttgaatcaaatcaaaataataccactcaataccaaaaaaagtgattattttttttcagaaaatttgttgattatcaaaaatatttagtatgtcttaattaattaagaacttcatataagcaacaagtactgatcagttgacaaaaatatgtggtggtgaaaatactgctcaagttgatgcaagggtaaaaattaaaggcttttgttatcattcgttgattaacacggacaagaggctaactaatatcaaagtaaatgttaaaagcatacctaataatttacgatatatgtatgaatagtagaggaagaacaattttacgacagagacatttactcctcaaccctctctctataaataagactgttgtcaaatcgattctccaacacacaaaagaacaaacttcatacaagaaatgacatcaaaagagccaaaacacatgtttttcattttcccattcttctgtttcttcttctccttcattgcacaaaacaccgtcccaaacatgtcttatcctctctccacaagctcccgttggatcgtcgacgagaacggtctacgggtaaagctcgtggtgtgcgaactgggccatcacacctcctgcccgttgtagcggaagggctgagcaaacaaccagtggacgcagtggccaagaagatagtggaaatgggtttcaattgtgttaggttaacttggccgttggatttgatgactaatgagacattggctaataatgtcacagtaagacaatcttttcaaagccttggtcttaatgatgacattgttggcttccaaactaacaacccctccattattgatctcccctcattgaagcttacaaggtactcttacaatatctcccatctcttgttaattctaaatattaatgcgtttcattttatgattcgtttgttctatgattattctgagaatgtgaggtaatttatcttgtgccagttacattgccatttgaatttgacgacaagagatatagcgtgttggat

SEQ ID NO: 18023 - DNA, 1084 bp, Arabidopsis thaliana
cagttgtgccccatttttacacttgcacagcgtggcgcaaccatggataaaagtattggtttactacatctaacttgccttgctcttcaccagtaatataatattcctttggtaaatgtttagtgagatccgcttcaaccaaaatctgagcttcttcaaaactaacataagcctctgtttttggatgccgctttactggttcccaaccgcacttgatagaaactccaaacccttgtctgtgaaaattgaaggaggaacattttttaatgtcacccataatggaatggacttcatggcaggttgtgcctcctcagcaaatggagtccactttgatattagcattgggatacctataatattccacatgcctctagttaatattcttctcctcatcgactcactccaaactctaaactttacggtagtctcatgacctcaaagacatcaataagagaagtagtatctccaagtctccatattttgttcacgatcatgtgaattttttcaatatgtggtgccgatgcattaagaaatttccctacaagaaaatcttcccacaccggttttgcatctgcaaaaatctctttcggcaccaccactccttgtttaccatcaaccttagacaccacaacctcctgtttcgtgaaaagatgttttgtagcagcgcaacccatgattttttcaacactgcaaccgaactggaagccgaagttgtaaccaccgggttacacccacctccttgtttgaattctattttatctctttctcgatcccaacgcttgccaaagtttctagtacccttaaatctccctgttgagaaacctccaaaacctccaaactctccgagctcgcgaaatgactcgtaacaacttcaccctcggctaccagagaaggcaatcctttttccgactcaaaaaccaacccaactggaggcggatttaccgcgccgacatcatacgtgtaagaaaaataaaataaaaaactaaatcgcctttggagtcgccagtccaggtcagcactcaaaaatgatattagtagcaaacactattgcaatgttttgttttgaatcattatctattttgat

SEQ ID NO: 18024 - DNA, 896 bp, Arabidopsis thaliana
cttcatccctataacaaagtgtttgacttgttgatggaatcagtattgatatgaatggtatgatttgggtaaaatgaataggtgcattttcaatggaaatggcaagtctttggaagatttagttctagctgctcaagaaggtgttttcgttaatgtcgatagtgagtttgacttgaataacattgtggaagcttcaagaatttctggtaagcaggtcaatgtactgctgcgtatcaatcctgatgttgatcctcaggtatggttaaaatttactttaaactttagcatcatgtctaacataattggtcttggatattagttagtgagcttttctgttttatacatttttcaggtgcatccatatgttgctactgggaacaagaactcaaagtttggtatcaggaacgagaagcttcaatggtttctggatcaggtcaaggcacatcccaaagagctgaagcttgttggagctcattgccatctaggctctaccattactaaggtaacactctgattatagttgcttaaagttgtattttgatgtaatcagatgaatatggattgctctctgtttagtgtttgcttttggtccgtccttagatctcaactcttgagctctacgtatttgcgtatgttctgtttattccaggtggatatattcagagatgcggcagttctcatgatagaatacattgacgagatccggcgtcaaggttttgaagttagttacttgaacattggtggtggtttagggattgattattaccatgccggcgctgtccttcccacacccatggatctcatcaacactgtaagaacaacatctctttcgttcatttgatccaaaagtagtgggatggtagaattgttcaatccttgatgtgttcaggtaagag

SEQ ID NO: 18025 - DNA, 666 bp, Arabidopsis thaliana columbia
  unsure (1)..(666): unsure at all n locations
tatatataaataaaaatactgattcataattttaaatcgataaatatttatttaacatataatatgtaaatttatcatgttattatatatgttatctcgttaaacaaatagttatatacttatttacaaatattaaagttattttgaatcaatggcatttttgtaattaatctaaaaaggaaggataattttggtttatattttatttctctttcctatttacctaaataacaaatttttatgtataaattcttaatttcttgtttatccatgtatatatttttaactcaccctattttttagttatttatttttgtaaacgctttttttcttttaacataataggactctgtttttgcttttgccattttgtctcggggtctctcgaaagctcaagccggcgacaagctcccattgcatcgtagacgagaacggtcaacgtaaagctagtgtgtgcgagctggccatcacacctctagtggcggaagggctaattaagcaagcaaccggtggaagcagtgtggctaagaagatagcggaaatgggtttcaattgtctttggttaacttggccagcagatttgatgactaataagacattagcttatatagtgtccaatgacaatctnttcaaagccttggtcttaatgatgattaaattgttggc

SEQ ID NO: 18026 - DNA, 548 bp, Arabidopsis thaliana
acatcacgtggagtatagtatcaaagcttgtgcaggataagatgagccccacactgtggatgtatagtgaagactctgtaaggtgaatgaacataggaaggtgaaagctcgaaggagaatctctgaagaatcaaagccagagccatctttgcttccaacagagcgaagttctgaccgatgcaaatcctcggtccccacccgaaaggcaagaagcagacctggttctttgttgcctttgcgatcccgtctttgaacctctcgggcttgaactccgctgcatcatcgccccaaagcttagtgtcacggtggattagcagaacaggcatatggacttgaataccgcctggtagtgtcatatcacctagctttatctctttgtgagtcgctctgttcatctggattactggaggatatagcctcaggacttcatatataatcattgtcatctgtaggaacaaaatcatcaaaacaaaattgaagaaatgcatcaacttgatttttttttggtttggttaatacttacaactttgagttggttaatgccttgt

SEQ ID NO: 18027 - DNA, 555 bp, Arabidopsis thaliana
cacccaccaatagggaatgctgaattagattttaacaagacatgctattgaaaagaccctttttatataaaactctctgcaactttctgatcttttaactaaattctgcaaattcttctgtagtgataattttaccgaacgccagaaaaatccaaaagcaacaactgtaaaattacactaatcatcctctctcacacaacaacactacgcagatccagagatcgctgatccttcacacgcaagctaatgaagcctctcactaatggcgatctgttcaaatccccaactctgatcaagatctccgccttagttttcgtcaccgtcgctttcttctacttaggcaagcattggtccgacgatggctaccaacagctcgtcttcttctcctcttccacttccggtagctcgatcccggaggtctccgtttcaccgaatagtaacagagtctttaatttatcagcgataattcctactaaccatacccagattgaaatcccgccacaatacgacaacaacctccgtcggtggtggcggacacggagaaggttaaggtgg

SEQ ID NO: 18028 - DNA, 606 bp, Arabidopsis thaliana
gttacgaatcaaatgcacaagttgcaacgggtattcgcaaataacattgctgtttagtacaaagaagagtgaaacatctctaaattctcttccaaaattatttatttacagattcttaaacgacaacacaaaaacgtcgtttcaacaaacatttaaattccgtgtaaaatgttttcgatctcctttgcagcaacttgcatagttggtcgacattgtctcgtctctttcacacacaactccgccaaaactccaagcgccttcatagactcaatctccttctccgtcgctcctatcccaatcaccggatcaatcacatccatcaatctcccttccttcaaagccttcctcacaaacaccaccaaattcacatcttcctcctcacgattaaaatcaatcgccttcttacaagtcaataactcgaacaacacaaccccgaagctatacacgtcgctcttatccgtcaactgaaagttaagatagtactctggatctaaataacctaatgttccttgagcacaggtggtgacgtgactcacatcactcacacctaatcttgataatccaaaatcagcaaccttaacatcaagattctcgtcgaggagaata

SEQ ID NO: 18029 - DNA, 538 bp, Arabidopsis thaliana
tcccgtggataacatgctatcttgtcacaaactcatcggctttgtcaatggtggaatcacaccaccaccacgtactctcaacgtcgtcacaggagacacctccgtcgatgtcgcaaaccctcagtatgaaagttggttctgcactgatcagctcatccgttcatggctttttggcacgctatcagaagaagttctcgggtatgtccacaatctccaaacctctagagatatttggatctccttagcagaaaacttcaataagagcagtgttgctcgtgagttcacgctccgccgtactctgcaactcttgtcaaaaaaagacaaaactttatcagcgtattgtcgtgagtttattgctgtgtgtgatgctttaagttctataggcaagcctgtggatgaatcaatgaagatctttggttttcttaatggtctgggaagagagtatgatcctatcactactgttatacaaagctctctgagtaaaatttctccaccaaccttcagagatgtgattccggaggttaaagggtttgatgtg

SEQ ID NO: 18030 - DNA, 586 bp, Arabidopsis thaliana
cattattcgaattcaacatcaacagataattaaggcgagaagttgtcatcacaacctccattgcaatcgactttacccttctccttattgctcaacaaaaacacgaagtcgaggttataaagaacagggattatcaaagcagagctcaagaacacaagcacaggcccaaagatccatagcatcaaaggcaagcccatgtagaacagcctattacctaccgtattgagcaagaaagctttctcgagtagttcagagacatactcgggagtcacaaagcttcctatttcgccgaaatcatcagaaaaaggttcttgaggagcgttaataaggatgttgacttggttgatgaagcgaatggagagagaatgagagaagaaggcgaagaggaagattgtgaggatggttacgtatttgagtgcaacagtgaagtcaccatgagctccatatacggcgtcgtttaaaggtttcttgatgctataagtactgcttaaaacggcagcgagacctgcgcagaggaggatgcaagtggttgccattaacgtccctcccattatcgtgtttcgtagtgtttgtaccgctaagatgt

SEQ ID NO: 18031 - DNA, 587 bp, Arabidopsis thaliana
tagtaacttaaggaatttcgaagaagaagaaaagaagaatcaacttgttgagcatctaaccttgtacaagtatttcttacgaagttttatggctgtcgtatgatcttctcactctaattgcaagcagcttgtcattacaaatctgaaaatatctaaaatcagtaagaagttttatcgtagtataaaaagtacaacagtagtattcagcaaagaaacaaagcccaacatgcacaaatgcagtgaaaaacatcctacctttatcatgtcatcgatcgagcgagtttctttcatgattttatgccgattcatgattagaatagccgccacacaaaagactggaagagggtcatctcctttcccacaggatgaaactacacaagaggcatgggttctttcattcctagaccataaatttcttgtcaagccacataaactgtatgaacctgctggcttcatcccaaaatcatcagacagcggaccagtttttggcaatggaccactttctggcagtagaccgctcttggacaacagactgctctttgaagtccggtcgctctttgaagttgatcactatttgtagttgtgca

SEQ ID NO: 18032 - DNA, 1063 bp, Arabidopsis thaliana
actctagcctggtaaaccagcttttgctactagcagaaagctcaatgaactctgggtctccatggtggagaaagcatatgccaagctccatggttcttatgaggcactggaggggggactggttcaggatgctcttgtcgacctaactggaggagctggtgaggagattgacttgcggagtgctcaagcacaaatagatcttgcaagtggcagattgtggtctcaattgttacgttttaaacaagaggggttcttacttggtgctggaagtccatcaggatctgatgttcatgtatcttccagtggcattgtgcaagggcatgcttactccgtcttacaggtattcccttttgctttggttgcatttgccatatcctgagtatgagaacacaatttaatatatttacgtactgtctttcttcaggtgagagaggttgatgggcacagacttgttcagattcgaaatccatgggctaatgaagttgagtggaatggtccctggtcagactcatccccagagtggactgataggatgaagcacaagctgaagcatgttccacaggtagtttctcttgcgcttaacttctttacagctcattccttgtgttccttgaattctcttagtccgattagggggactatatttcagaaactggtaaaagattttgctttattgttaacaaggggacacacatggacaaaacatagtgctcacaaacacatagttaggtgtaaatatatgtaattatgctatggtttcttcaagtaaagtatattgcgtactgatcctgtgcattctgttaaacagtcaaaagaaggtatattctggatgtcttggcaagatttccagattcatttcagatcaatatatgtgtgtcgggtttacccccgtgagatgcgctactctgtaaatggccaatggcgaggttatagtgccggtggctgccaagattatagctcatggcatcaaaatccacaattcaggctgagggcaactggttctgatgcatctttacctattcatgtgttcatcaccttaactcagacgtataacgacgctcag

SEQ ID NO: 18033 - DNA, 691 bp, Arabidopsis thaliana
agattactgaatgagtttagtcattaaaaatcttagaaatcaaatatgtaaaatatacaaaagacacacatagaagcatggaacccatctgttgcaagagaagaaaccaacatgatatgtaatttggttttatttaatttatttccggtttaatgtcttgttaaccggttaagtgatttaggttttcaatttgtctctttatagccttacaagtttaaccaatcaaaaagaacaattttctcaaacgagcccaggatcttcgagctgataattctattttctcaattcatcttctaagacttgtggtttctccttccttggagttcacagagaattgggatttatcctcccttgtccggtttctatgtggccttccacatcacctagattcaccatcaccacaccttatccacacccacgcgccgcctcttctttcttacaggtgaaagctttccaacgcggcgactttgaccgtttggctgataacgttaagtcaggtaaagcatggagagacgcgtggagaagcgctaacgatggattcgagcaattcgtttttgaggctaagaaaaccgctgagcgaattgatcgccaatacgctgtttctcgccgctttagctccgctgctagctcagccgctgaccgtgctcgtgagattgatcgtgagtttgggattactcctcgtgttaggact

SEQ ID NO: 18034 - DNA, 541 bp, Arabidopsis thaliana
tgtacgtctgataccaaatgacatcagttgggagattgtgagacagatgtctttaattagtactcaggttgagaagatagcttgcagtcccaactgccccaacctttcaaccctattactcccatataacaagttggtggatatttcagttggattctttctgtttatgccaaaacttgtggtcttggatctttctacaaactggagtcttattgaattgccggaagaaatttctaacctaggctccctgcaatatctcaatttatcactcacagggataaaatcgctaccagttggtctgaagaagttgaggaaactaatctacttgaatctggagttcactaatgtacttgagagtcttgttggaatagcaacaactttaccaaatctgcaagtgttgaaattattttattctcttttttgtgttgatgacataattatggaggaactacagcgcttgaagcacttgaagattttacagcaaccatagaggatgccatgattttggaaagggtacaaggagttgccgattggcgagtag

SEQ ID NO: 18035 - DNA, 473 bp, Arabidopsis thaliana
tcacgataataacaatgcatctatccaaaaaaatcttgtatgtagtaccacatagagtatcaagcttgaatatcaccacgaagtcttcgactaccactttgtctaccctttccccgaactacctctgtcctgccccccgtggtgtcttacgatgctgttctgcgtcactgcgactttcgtggcttgtgttttccctcataccgcgtccctacctcttgcctctggcccccgcacgaccgatcccgcccctccgccatgccctccacctttgaccggcccgccacgtgtgcaccctcgtcgtctgcgcccgccgcagctcccttcggcggggccctcactctgccgctgctcacctgcgccacacccgccacccccgagtcacagccggcttcgtactctctggcgctctctttcagctggtgcttcacggtggtggcggctttttgttccttcacggtggctaacgcgctttt

SEQ ID NO: 18036 - DNA, 593 bp, Arabidopsis thaliana
ctctttctcaatcaacctgattagtgtgtcacatctccttgcaagttcctgagttgtgcgggattttacaaaccagtcaaacctaaacaagggggatgtccgaaacgctgcctttagctcatcccagtttccatacccaagtttatggaccatgcatatctgataatcacaagttcatcgggtcaatatcatattagaataaaacaataacaatgaaatctcaacaaagagtttgataaatagatgtcataccatgaaacggtcgcactcttcattgtacagcttccctttgttctgaccatattgaatcttcagttccagccacgggtttctgtagcgatccagtttcttcccaatagctttcatgatttcatctttcctagagattcttgcttcccctctctcaatattcttgatgattctgtcgtaatctacaatttttacaaaggaaaacaagaggcagagcttacttaggataaatatccaactttgtcgcactgcaaacactcattaactttacttaacaatctaaagttactaccattcagctctttatatcgcacttggaaaacttgagcatatcgttcaacctc

SEQ ID NO: 18037 - DNA, 1131 bp, Arabidopsis thaliana
gaccccttatatttcccggtcagatgagtcccgtccacaaccaaaacccgtctcaaatatctgaagccctggattgaggcaccaaatgccagaaacatataaagaaaacgttcatcaccattttcctcaatatctgtcacaaggtctgtcatactacctaggtttgtcatattacctaggtttgtcatctttataagctccatatattcagctaatttggtgaagctatcatcatcctcccctaacacatcaactactgccttttccctagccctataacacttgctatatgatgcagacactcttaaatcttcaagaatcagcttttgcaaatccatcgggacaggtcctttaacaggctcactatattgtgctttatacacagctgctatcacccttgaagttgccttcttcttgtacattttccgagtttccacagaacaagtatggtctagtttagctttgcgtatctcataatatccactctcaggcatttcatgagctgttacccgccaatcacatttctcatcggcacagtttaaaacaaatgaatcaagttttgtgcgtgtttgtttgaagtgaaacatatgcctaatagcatatatagctaatccaatttggcaatccgacttgctagcataaacttttcctttatatacatcttcaccgtcagccctatctatatccggcattatggcagcttcatactccgtgtcatcaaacagaggaggaatatcaaactcttcatcgtccacatccgacagcttcctattttctcttgcagtttcatttgtattacaatcacctgttctattgttaacaacttttcccgttccactgctgtttgcaagtaaatcagttggatgcttaatcgaagacgttatcaaatcatcaatttccatgttcgaacctgcaccttccacactggccaccaattctgtgtctactgctggtgacgcaaatcccattctaacatcagcatcttcttccccgacacatattatatccaatgcatttgagccacccatgtcctcatccaagaatgggctccaaaactccacatcataagattggggttttacttctataatctcatcccaagtaagatcttcgcttccttcatccactaga

SEQ ID NO: 18038 - DNA, 669 bp, Arabidopsis thaliana
cacatatggacatgatgaatctaatggaggaaggtggaaactattctcagacagtaacaacacttctcatgtcacaccccacaagtcttctttcagattcagtttccacatcttcttacatccaatcatcgtttgccacgtggagggttgagaatggcaaagagcatcagcaagtgaaaacggcgccgtcgtcacaatgggtgctcaaacaaatgatcttcagagttcctttcctccatgacaacactaaagataagaggctaccgcgggaagatctgagccacgtagtagcagagcgacgcaggagggagaagctgaacgagaaattcataacgttgagatcaatggttccatttgtgaccaagatggataaagtctcaatccttggagacaccattgcgtacgtaaatcatcttcgaaagagggtccatgagcttgagaatactcatcatgagcaacagcataagcggacgcgtacttgtaagagaagaacatcggaggaggtggaggtttccatcatagagaatgatgttttgttagagatgagatgtgagtactgagatggtttgttgctggacattcttcaggttcttcatgagcttgctatagtgactacggcagttcatacttcggtgaacgatcatgattttgacgctgagataagggcga

SEQ ID NO: 18039 - DNA, 544 bp, Arabidopsis thaliana
gttgtgatatctttgatatgttcagaagctcttcaaattcaagaagctaaagaaccaattcgaggtcatcttactagagtcacgattcaaaatgataacgactatctacttggaatccattgtaaatcaagagatgatgatttaggctttcacatacttgcaaaaggtgaattatttggttggaagtttcatgtcaatttctgttattcgacgctctatttttgtggttttagccaaggacaaatgaaaaaaggcgtgtttgaaatttacagagcaaatagagatttttatagatgtgcaaattgtacatggaaagctgagaaagatggtatttacgggtatagtgaggatcctgtaaaaggttatttattttataattggttaaagtaatataaaattgagttatttaagagaaacaaatatgtaatgcagttgctaggcaaatcagtgatgcaagtggcatacaagcaacaccgtgatttggggaagtatttgggaatgcctatcctgcaaaaacgaataaataaggacacttttattgagg

SEQ ID NO: 18040 - DNA, 409 bp, Arabidopsis thaliana
tggcggaaaactcgataactgttttagggttttctcagcttgttgataagtatataaaggatgcaacaactttaatggcaagtgaggaggcaaacgacgtcgcttcagctcttcatttactagacgcagccttatctatctccccgcgtttggaaactgcgttagagctcaaggctagatctctcctcttcctccgtcgtttcaaggatgtcgccgatatgcttcaggattatatccccagtcttaaactcgacgacgaaggatccgcttcttctcaaggctcttcttcctccgacggtatcaaccttctctccgacgcctcttcccctggctcctttaaatgcttctctgtttccgacttgaagaagaaagtcatggcaggcatttgtaaaaaatgcgacaaagaagg

SEQ ID NO: 18041 - DNA, 751 bp, Arabidopsis thaliana
tcgctctaggttagtagtttatacatacataggggtcataagggaatatccccccaaaaatatatacattttcagctatatactgttagcatctttacttgagagagtattagtcaaaacaaacactagtactctagtagtatagctcctacacaaacttatttatataatcaattttagaatttgttttaataaggaatgaatatataagacttcctttgaatttagttatagtgaatgttatcgttggaactatgcataatcatgcatgcatgtgtgatatgaactatgttatatgtgttattggacagacaagttgtattgggacacggcggctcacacggggacaaacacgcctggagggttagttctggtggcgttagctcatgcattggccttgttcgcggctgtttctgcagccatcaatgtctctggtggccacgtcaaccccgctgtcacttttgctgctctaatcggaggcaggatctcggtcattcgagctatctactattgggttgctcagcttataggtgctatcctcgcttgtctcttgttgaggcttgccactaatggcttggtatattacttctcatcaatctctatatattactattgtctttttggtacagttttgtgttgaaccaagaactttgtatatatctctgtaaatatatgctcatgaatgaatgtgattctctgtgatgcagagaccagtaggtttccatgtagcatcaggagttagtgagcttca

SEQ ID NO: 18042 - DNA, 822 bp, Arabidopsis thaliana
ttcggggatgtttaccttctacttctagttttaagagtgagttggtggattctatgtctcacgttactcctgaagccaacaaagtgtctcatgacttgaatgttcaggaatcagttagtagcagcaatgtagatggccagacatcattaagttcgaatggtacatgttcaagtccaaggccagtctctcagaatgatcaatcatgttcactgacagttcaatctttagcatcagaagtcgttgaaacttctccagaacttgttaggcttgatctaatgaagggaggcaatgatggaagaaaggtggatccattcgattcttcaaaatcttgtgcatcttttgatgctaaaaactctgacttgccttctgaaacttcatcaattagttcaacttctgaaggaagcagatgtgatagtaccattgagaagaactgtatggttgcttcaaatttagtaaactcaggcactagtcctcaagcgtttgttgatagtcaaactggtaaacagttacctatcgctgatactgattttgagacaaactctatagttgcttgttctgaagttttagcaaactcaggcagcgatcctgaagaacgtgatggtcgttgcctaacaggaaagctggtaccttgctcagctggggtggggatggaagtttccctgatacgccctctaaagtctgtggtccaagttcagctgatggaattcacttaaaagatactctggatgatgaaacgattgtgtttcagtgactaatgttgttgttgacgttgattctaaaattctgttgcgacgttggttccaaagtcagttgctgacatga

SEQ ID NO: 18043 - DNA, 862 bp, Arabidopsis thaliana
tataaaagacaaaaaaaagaaacccatcaatgatatttcaatacagccaacaatatagcttaagcgaactttgatcatactaaacaaaacataccttctggatcaaaacccttctgaaaatctgagctcttaatattgccataacgttttcccagatagcagtcatgttggtcacaaaagcaatagtaaagatgggttccaacgagtacaaaacagcaattttgctcagcagccgccacaaaggctccggtctcaccccaatcagtacttcaaagaatctacctttactcaaaacaataacacttaccattataaaacagcttcaccaagataaagagaaacacagatgacaagctaaatcatcatacccaaacttaaactacatcaaacccaaagagaaaaaaagagtacagttacaatttgctaatggtgggagagtggattgaagaaccgattaccagaaaaaacaggcatagagagagtgcaagtactgcatccaaggagagtcaataagcaaacactgagcctgagcttgtgcttgctcatcaagctccacagaagcccccaactaattaaatccttcgattcagcctcagatttggattcttcaatctttgggtctggttcttccacgataggcggcgctccggtaacataggcccgagccaatccatcggattttgctctcaacgaatcccggaacggcgcagtggagttaggtaagctgcagaaggaaagaaagggctttaaaccgccgtagggtctaaggactgaagcttggcaccgtctacgagcgacgaggactcgagtggaaccgtggtggaagagaagagtcgttgcagacgccattgatattggtcca

SEQ ID NO: 18044 - DNA, 577 bp, Arabidopsis thaliana
tgaaataaatatctttggtttgtttatttttactagatttttttatttttatttttgtagttgtaagaataatcatgaaagtggaatatggtaaactttagcaaatgatggtatttaaaatattttgtgtatcaattttcttaaggatacaacatgtgataaaaaaaaattaattatttgtactacaaaaaaaataacaaaacaattttttttcctcttttgcacgtgaaacgaaagcaatcttatacaaacatcatctcaacacgtctagaaccctatctttgtatatagtatccaaaaaagagttctgatccccagagacgacgtcgtatcgttaccttaacattatcacatactgttttattcttaacttttttgtgttgtcctcttacaatcctagttggacgggcacgttggcttcttggatccagttagctggaccaacccagttagccacggtgtaagtttcaacctcagccgcagacttagccaccttaacccaaggaggcctctgagtagtggcagctcccggtccacggttattgaactcaatgtatttagcagtcttgtggttttg

SEQ ID NO: 18045 - DNA, 996 bp, Arabidopsis thaliana
agctgattatgatgaatctgttactgaaactttggagaatgattgcttggagcctttggtgattcagcttccaagaaaatctgaacctgaggtgagtgaagaaatgatagaggatggaattggtaatagtacaaagagggaaccaatgatttcaaagagcgggccaatttcaaagagcagcggtttgttgtcaaggagcggtttgctgccgaagagtggtccgttgccaaagactgcgggtcctttctctgatgagagtgagataaagtcagcatcatcctcgtatcacttttgtgggttgacaagaagtctttggtcaaggaatgatagaacaacacatgtcccttgtgtcgtttcatccataaaaaaaggggatgatgctcttcctgtcttttgtgtggcggcgattttaatcatgaatcgacataagatcatgaaagaaactcgctcgatcgatgacatgatacaggtagaaagtttgtttcatttttattttgttctgctcacatgctcagctgatctatactgattcagaagatatattgcagatcttcaatgataaggttcttgtattccgcgtgagaagatgcatacgtacagccatgaaacttcgtaggaaatacatgtacaaggttagatatgctctacaaagaaagcttctgctgctggattattctattttctccatttaactgttaaaacgcttgttagagtcaggtaatcaagactaagagtcacactcagtctcagaatctcaaccaggttcatatccagcatcaaacccatatggagagccagaggccggaggagattcagagccatggtgagaaccagagccaaacaccaagttttcatcatagtcctgccactcagaatggtgactaggcgggattccacctataacagttaaaaagtataaaacaaaaagaagaagaaatagaagctcacacaagtaggtcatctttagttacggattacgaggaaggggtttatgtt

SEQ ID NO: 18046 - DNA, 813 bp, Arabidopsis thaliana
gtttttgcttacccattcaattaagaatcctttgtctttgcaataaggaggcttccactgacaatttccagcaaaagaatcccgaatgcatagatattacccgacacatcaagatatcggctctccattccgtttggggtacacatatcgaaccctggctactaatatttctcaaattcttttctgatcttgcaagaattgtcttccagcattcgaaatcaaccagctgcatcagagaaagtcagaaaaaagaaagaatgtgaacataaagcttagcttagctaattgtattactcagataacaagcaggtctcactttactttaccttgggagtaaaatcttctgtgagataaattgcgtttgagctcagctcagagattgtaaacggaggatcaagttccatatgaaggtacttgagaccacgtgcgatgcctataacaatcttcatccgtcttgcccacgatactaacgccgcttccccgtctgcatcaaaatatttcacataaaaatgttatctagctaaaacaatacaggatgatgcaacaaagctctgaggtaagttagactatttacagtgaaggtgctcatatagtgttccgtttgatgcatactcaaaaacaagcattcttgtaaatggtgagatctctttgcaatatccaagtaatttcgctgtgttctcgtggtttaatctagccaaatctgcaacctgaaacagtgaggagatggatttaaaatctcagaaaaaaggaggatatgtttaaagattgttcaatccaagtggcttggtgatgatgatacatgagaggaagcta

SEQ ID NO: 18047 - DNA, 569 bp, Arabidopsis thaliana
taaacaatcatcttgattctttacatatataatatttgttaaaaacttgtatacactgatctttgtattcacgcagttgtaattcacaaaagattgtgatacttaaagctcgtcgtgcgagaggagggcatcaagagcagtctgattctttttcttgcatccccatctgcatctccagctacacaaggagttgaagatggctagtcgctttgactgcagagatatgatttttgaagctgtgtgagctcttgtgaggtaaaccgcatagccgtcatccatgaactctgccccctgagggaagacctgccagaccagactcccggcaccagcccctcctttccttgttgagttgagggtcatcttgtacactgtgttcaacatcatgtcacggaaagacgtgttgaaaccagggtcatgtgcagacacaccaaactctgtgaacagaaccggcattcccaagtacatctctgcgtcctcaacatgagcttgcatccaagagcttgtgaattccaggaaagaatttgatactgccggagatatcctacagttcacaaattatttactgcggg

SEQ ID NO: 18048 - DNA, 642 bp, Arabidopsis thaliana
ggtccaaaatgcacgatataagatgatgatgatgatgataagctgaattattcaacatcaatggcgaacgagaaagctcaagaaatggcgaatctatcttctcaaatctgcaaccaaatctcatctgtcttcacaaaaccaacctcaccatatccaccaccgctcgatctcctagtaacagagcttaccgcaatctcccgcaaccgcaacaactctcgtatcttcctctacggtgttggacgcgaaggtctaatgctaaaagccttcgcgatgcgtctcttccactttggtctccccactcacttagtcttcgacatgacaacacctccaatctcatcttctgatctcttaatcgcttcagctggtcctggaggattctcaaccgtcgatgcgctttgctctgtagctaaatcgaacggtgctaaggttatacttattactgcagagccagcgataggttcttgtgtgaaacatgcaacggatgtctgttatgtacctgctcagactatggcgagtgataacggtggtggtgattcggtggaaatgggagagagacgtttattgccgatggggagtgtatatgaaggagctttgtttgtgttgtttgagatggttgtgacaagttgggtgaggtttgggtga

SEQ ID NO: 18049 - DNA, 552 bp, Arabidopsis thaliana columbia
gtcttctacatatcaaacaaccatctcagcttctttcacactcgaaggaattccaacctccagtctcattgtagctctataatgctcaggtacaacagcgccagcgtgagcacatatctccacaacagcaggtgcttgcccgtagaagcttcgtagctctcgctgcatcggtggcccattcacatcaggaacatgccaaacatatcttggcggtatcaagtcgtcaagtactgcagattgccaaccatgctggccattccgctgttggtgcttgaatgcaccacagttctgggccttgtgtcccgttggacctacgtgaacctctggacagtacccacagaccctaaccctgtacatcctcatcagctttttggctcctgctctcatttcttcccaggcctgtaatgtttcttcggctaaggagactgtttcttcttcgctagatgggggagtgatctctgagacaggtaactcagttaacaatggcactggaggaggctgaggctctggatcaggcaattcagtttcatctgcatcaacaaactcgctttt

SEQ ID NO: 18050 - DNA, 501 bp, Arabidopsis thaliana
acatttaacctcgagaatgaacttcacattagatagaatctcagcagacagctcaattgcttggttgaaaccattctctcctccgtaagaaacatcaaccacattcaatatcttagcttgaagacgaggatcaaacagttctgattgacttagctcggtcttaaaatccgctgaaccagcaagtataagaccagagacattaggctgactcgtagctggattaatgtaaaactgagtggcaagctccgcggttttcctcacatagttatgtctcttctccatcctaagacgagcaaatcgcaacgcagattgtcctcctcttccgtgctttttcggaagatcgacagtgaacttatgaagaacctctcttgtattcccactcaaagtaccaaacaaagttccatttccatccataacaatgaaaccaaacttatcatcagactccaaaagctcattcaaaggctcggtgtggacttattgtcacacaaatacaacgaagca

SEQ ID NO: 18051 - DNA, 918 bp, Arabidopsis thaliana
taaaacgcaccgggaaaagttgccggctccggtggctgaactacctccgacctgatgtgcgacggggaaatatcacaccagaagaacagctcaccatcatggaacttcatgcaaaatggggaaataggttagtgattacctaaatacacataaaattttaagatagtcaggttatatgtttaacaagagaagcaaagctaagttttcaaactatgcatcggttatatatatattcttgaggctaaagatagaattgatctttgaaaagacatcaaagcaagacattaggtaatgaagccaaacatattggtgggtataacaaagcttttcaactcttttcagccatttgtttgagttttaaacacgtttcgaaattccctcaccactaacattaaaaaacctcgtgccgattctaccacaacttgtgcatgattgtaattcttttacacgaccatatacaaagacaagtaccaaaatatacatctgttttttgtcaacacaaatgtatacgcataaaagtgatagataccgaaagttagatattccatatggtggtgtaactgaaatttggattgaagttgaatattatttgatttatttacggatctttcgggtcttggctcttaaatttttttaaaccacacatgtatttaataatagcttcttttttttaatatgaatgttaacttctttatggaattcgaaagggattctaactaattacaaaatcgaagcatttggcaaatgttgttctacaaccaaagcttacaaagtctcaatgcaaacctttttttattgctcgacgtagatgtagctgtttcattgcatcaacaactagatcgaaccttcaaaaacataatatattttttttcaaacaaaaagtgatatagtttatcaactcgtgatgattatccttca

SEQ ID NO: 18052 - DNA, 1173 bp, Arabidopsis thaliana
aacttcaacgagcttacaaggctcccagacgcgataccgtttgagctaacgaatctgacgaagctctccgtcaactcaaacaagcttgttctcttgccaaactccgttagctacttgacgtcgctgcgtgtgctcgacgcgcggctaaaccgccttagttccctccctgaggatcttgagaacctcgtgaaccttcaggtcctcaacgttagccagaacttccagcacttgacgacgttaccttactccgttgggttgttgatatctctcgtggagcttgatgttagttataacggaattacggttttaccagactccctcggctgtcttcgccggattcagaagctatccgtggagggtaatcccctcatttccccaccatttgaagtggtatgtacaattgtttttcagacaaaacctattaatttgttttttttagaaatgcattcaacaaaaaataatataatacaaagtataacttgtatcacaagcattatgatctacggaattagatcatgacttgtatcacaagcatggtacgcgaaacttttgagacatataaactaaaatgtcttgttcttgctcatccgttagtgacatagtttaaatctgatgacaggtggaacaggggttggaagcattgaagcagtatatgagcgagaagatgaccgagtcttataagaaaactccgaccaagaaaaagtcttggggcattggtaagctcgtaaagtacggcctgagctcttctccggggaggagtaccggccgtgaagacgggaaggaaggcttcatcaatgtatctgattaccgccaaatcgacggaatcgcctcaccgcgacatgtgtccctcttcaacccgcgacgcctcttgtctccactctccgcgtatttctctcctcctaggtattagcttatttaggtgtgttgtctgtctttttttttttcatcttctacatacgattccataccgttttcactgttacatccatgtagtgttaaattgttaatgttcttttacgttgttttctgcatgcttggtgtgaggataaaatttaattaaattgtgtatacgtttttttttccctgtctcatagaatttttctatggcttttctcatttcgttgtattgtagttcaattttgttgaacacatttgtaaactattacatatcac

SEQ ID NO: 18053 - DNA, 712 bp, Arabidopsis thaliana
accataacttgcaacaagtactataataaacctttacttatgataaaacaaaaatatgtatgattttctcttttcaagatgacatggttaggaatcttgaaagttggaattaagtatgagaattaatcttgctatcataaactacaattgcagcaagatcgttggggctagatcatactacccgaaaaaagaaaagtacaagtgggttgaagagaaatcggtgattgacgtgacgggacacggcacacacgtagcctccattgttgctggcaggaaagtagagaaggcggggtactttgggttagcggaaggcacgatgagaggcggtgttcccaacgcgaagatcgccgtttataaaacatgttggagagtaataagaaaaaatggtagagaggattcagtttgtcgagaagataatatcttgaaggcaatagatgatgcgatcgcggacaaggtcgacatcatctcgtattctcaggggtttcaatttacgccactgcaaaaagataaagtctcttgggcgttcttgagagcacttaagaatggaattttgacttcagccgcggcagggaactatgcgaacaatgggaagttttattacactgttgccaatggcgcaccttgggtcatgaccgttgcagcgagcttgaaagatagaatattcgagactaagttggagctggaaggagaagataagcgaattattgtaagt

SEQ ID NO: 18054 - DNA, 810 bp, Arabidopsis thaliana
ataaaccagagtcttccttcaaacttctccaaaagcctccgtaactccaccaccgccgtcctcccaatctccaccgcaaccgtagccggcggttgcgttgaactcggttgctccactagccatttcaagtcaccaagatcaagtatcactccgccgccaccaataggatccgaattctttaatcgggtctgaagcaacccatctaattccttaattcttaaagccttatcggaactaatctcctctaaagaaaccacctttgagttcttcaccgctaaattcccaacttcaccgacttcaattttcttaaggatctcacgaataacccgacccggctccgaatcaccaaccaaaaccgggtttttcttcttcgcccgacccaatatatccataacccgctccacatcatcgttcttactcacccctgattgtaccgacgaagcgttctgttgtaaccgtggattaagatacgaattccgggtcatcggacctccaccaccgggtctaaaattcaacccgactgaagaaacactaggaatcggcgtcggagtaaccgaattattcaacgactgttcaattgtagctttaacggcgggacttgaaaagctagcttctctcataacccgactaacactcggatcatccaaaatcgagataatgagctgttcaagctcaactttaacggccaacaacggttgctgttgttgctccggacaaccacggcgttgatgagcttgagctcgtttaagcgccgccataagcgcgtttgagatcggtggatcattcccggagtggttgtagctgttggga

SEQ ID NO: 18055 - DNA, 518 bp, Arabidopsis thaliana columbia
ggtggagagtagcttgtgtgttgatgaacaggactcatgggagggctgttacgcggtgtgatatcggcatctgcctcgtacatcccctcgaaatgatcttttccgttgttgtatctctgagtctgcaactaagtagagccaatatatcagagaatgaatgattaacaaaggcgttatatcagagaatgaatgattgaatccactaacccttgcgtgtggcggtggagagcggctttgggatggatgaaatgggcttgaaggtctgttccgggaagttacattgccttcagcttcatatctttctctactgtagtctcttccacgttcatgctgcaattacaaaagatttgttttttagtcgatgacggagactaaatgagaagtatgtaaaacaacattgagtaggattagtacggtgttgtagggagctggagagcggcttctgaaggggtgaaatggactcacattggcatctgcctcatacattctctcgtacagctctttggttactcgctaga

SEQ ID NO: 18056 - DNA, 476 bp, Arabidopsis thaliana
atccccgtatatgtatgtatatataattgtttatatatattctacgacaagtaaattaaaaccaacctgtttccccacttagcatgaagttccatgatgataagttgctcttctggagtgatgtttccccgtcgtacgtcggggcggagatagttcagccaccggagccggcaacttttcccggttcgttttagacctatatacattcatattatcaatcatcacaatcaatatgactcttactacgtggatatatattcacataattataattagtagtagcacatatgacatatgagtataaaaatacgtgtatcatttatttttgatgttttaaaaaagtattttagattattttactctaccactaggccatcattaaagcatcatatatccaagtatccaacacatgaaaacgttttaatagttagattgattctttacaaagaacgaatataatagagcatatatatata

SEQ ID NO: 18057 - DNA, 1221 bp, Arabidopsis thaliana columbia
gctaaatataattatgtagtgtgattgcatctttgtatacgttgaaaagtaataatcctataattatttagtcttggcaactatatctagtccagtcttttttgacaactagtctttgcactttggtctttttgttattcatgtttaaacagttctatatgatctcacatgatagcagttataattttgatatttatttttgtttacttagaaaaataatataataactatagtttttggaattagagacgtaatctttctatttaacaactcgtattagaatattaaattcttaagtcttactaattgatatctatatatacatttttgcagccactttgtgaaataaattctggagttgggatttatttacagtggctgccactggcatttaataattgtttttgataattagaaagaaaatctttgaattaaatatttgacaatcttcccaaaatctctccacattaattacacgattagttagtaaaataaaacttccaaaatatttaatatcatttaattactacaaaattatcatttttgatattgtttttctacatgactataataattcgattataatcatcaaaccgcagagatatttgatagcatttaattactacaaaattaaaaaatatttagacaatgattcataaacatatcataaataaaatcagtgagttttttttacgggacggattggcgggacgggtttgacaggacgttacttaataacaatcgtaaactataaaataaaaatattttataaataaatataatttgcaaactattatatatagtaactttaaaaaataaattatctccgcggtataccgcgggttaaaatctagtagtaacataaaatcctaacatttttacacgtaaattattcaaaattcttgagaaaggaaacgtatagaatttgcaataaatttacctgagcaacaacaagaggcatcacagagaaatcaccatccaaggaaggcttgtaaactaaattctcataaaactcattgtactgagtcaaatcacccaagctcggacaacttgacacctgtcgccaccgcctccaccatgactgcgccaccatcgttacaccggatgttgagcttgcagccacctccgtccaaacccagtctccctgccgcgggataccacacagacatagtctcctccagcccgagcttcaggttggagaagacggagtcaaagtcacga

SEQ ID NO: 18058 - DNA, 1883 bp, Arabidopsis thaliana
taccgcgaataaatgccgacagtgtgctctaaaggaaagtgaagctcatgcaaagagttttgagaaataacaaaagcaataaatgcaaagtttgaatagaaaagagagaatggccaaggcattgtgactgggccttggaccacaaattgggctaataaagggaggcttgaaagtgttacttaggcctcattaaataccttgttaagaaaactcactgggacaaaacttgacaagggaaaaagagtgcataagcaacacttaaccctttaccgagcctcttgagccgtgatcactatgaaggaggattgagccacgtcttcttgattcttctttagctccttgagtagtccattgatagcttggttgaacttcttggattttgattttgttagaggacccgccggaacgatgaatgcttcctccggtacaagctgctcctcggcttaaagctgctcctcgtcttcttgtggttcaagtggtttggttgcattggtcatgttctcatcagaacccaacacaggagaaaccatcccacccacaaccaccacaccatcaggaaccgtcgcatgcacagaacctacttcactttctccatctttttaaaaactttaaaccttctcttatgaacatgtaaggcattgtggttagcaacattagagctttgggtagcaacattttggctaatcaaatttatatgagtttggtatttcgttattagcttttcaacaaaaaaaggtaatttaaaatagattagcaaattaatttacctaatttactgattaggtaacgaattagcataataaaaaagaacttaagcgtcacaatttggtctctgttcaaagcctgcaaaactggtaacaaattggtcgcaaattaatctgtgtccctaagtcgtcgtaaatatacgacaattaaccactgtcgcaaaactgtcgcttatatacgaccgaatatatatgtctcaaaggcgtcacaaattgacgacgcaatagtgaccgttttaattagcgaccgttttatagcgactaacatgtatcgtctcacattagtcgcaaagtaacgatttgcgacggtttaaggattcttttgggggttgcaaagacatgttttcttgtagcgcgccgcctgtggggaccgaggattattgagttgtcagatctcttctcaccacatttttgaggcaagcatcaatggccgaagaaagttccatgaatgcatcatttgccgaaacgctcaaaaatattcaggaaaggatttcggacatgacgcaaaagttctcggatgtggagaaagttgttaacacactgcaaacaagccagatatctcttagccaaaacgttagtactatacaatctcgtgttcggtctttgagtacaagaaaccctctaggagtccgaaggagcatgttcagtttgccggggtctcgtaccaagaatggaaccagtggccagactactcctgatgctacaaatatagtaactcaatcggaggactcggaaacacaattcggagatgatgtcgactagtagatcaacttgagcaagagaaccctgagcagttcgaagctatgaaaaaggttagccgcaaattcaaagaaatgagatcgaagttccactaggccaccagtttggagccaaacatcgatcgagttattgaagaaactaggcgaacccctttcacccctcaaattccaagcttgaaaatcagagattctcgaaagctcaatcttgaaccatacaatggactggaagatcctaagagttatctcgcagctttccttattgctgccaaacgggttgatctggatgaagacgaggagtatgcgggattttgcaaactcttctctcgaaaatctgtgtggacaagcattgatatggttcatc

SEQ ID NO: 18059 - DNA, 996 bp, Arabidopsis thaliana
tgcatgtttaggatagttttgcatgcatgttgcatatttgcgttgatttcaggtgatttggagctgttgacgagctatctggaagaagcagacctgattatgacaaaccactcgaccaagaggtcgagtaggagcttcaagatctcaagagaccactcgacaaccaggtcgagtagagcacatcaccacttcacctaaccactcgaccccgtggtcgagtgccatcatctccatcaccagacggtcactcgatcacttcactcgacctcgaggtcgagtgccttcacctccatcatcagacaatcacttgacctcctcactctacccagaggtcgagtatctccatcacaccactcgactgcatactcgatgacaagcttcagagccttcttcattccgcactcatccagacactcgagcacaaggaagaaaagaagactccagctattcactcgagctctcactcgaccacgtgggtcgagtacagttcttaacccgtccaaatacttcgtcgttttgagtattagggtttcgggatatttggctataagtagcatgtacttctcattttcgcagacaagttggtttttacctagtttttatttccgcagaccttgtgttctagactttttgtaatccggatttctctttatctattcagtattcaatattcagtttctgttcttgatttttgtttactgttattcattctgttatcatactgctgttatcatgtcttcaacctgttcaacgtttatgctttctgtgatgatgtctgagtagtgaataggtttctgaggatgggttagagtagtgtagaattctcagtatgctaggtgattgagtattgattgatagatcccttctggattagttgttcttaatgcctattgctttctgatcaactggaatttgagcccagacatttccgcgcccaaaaggtgttcgatgaaatgcctgaaccactaattccagagattcgtgaccctgtaccaa

SEQ ID NO: 18060 - DNA, 1795 bp, Arabidopsis thaliana
gtaataaactctgtttggcttcttttgtcaatgtatatgctggaaatggagctttgccattactatcaatatgtaagcctggccgtgaacaaaatttctaaatatccaatcttgacatgatattgtcttttgatttacccttaacactcatgagagtgttcatgatgttgtcaagaaaattcttctctgtatgcatcacatcaatattatgtcgaagattgaggtctttccagtaagacaactcccacaaaatgctttccttgtgccaattatgttccttcccatagcctcgcatcttcttttcatgaccgttcccaccaacatccttcgtttttggtggatttacactagccaacctctcgtaataaacttgctcccctgtcaaagactcaggtggatattcgctagaagcatctcttcctttcagaaagtcttttctgttcctacgggatggatgaccatgaggaagaaatctacagtgacaatcaaatcagcatgtcttccgtccattgggtagataaaaagactttgtactttccatgcaaacaggacaagacaatttaccatgagtagtccatcctgataacatgttatacgccggaaagtcgctaatcgtccacagtagtactgcttttagattaaagttctgactcaatgaaacatcgtacgcatcgactccagtagaccacaactcttttaactcctcaataagaggttggaggaagacatcaagactagctcgaggatgatttggaccagaattcagaatggtaagaaataagtactcggtattcatgcacataccaggaggtaaattataaggagttaggatcacaggccacaacgaatgattacgagacatgccaaatggattgaacccatcagtacacaacccgagataaatgttacggggttcttcggcaaactcgggatgtaacccttggaaatatctccactttgctgcatctgaaggatgattcatttctccctcctttgattggtgctcagcatgccatcgcattgccgcagctgtctcatggctctgatacattctcttcaaccggtccccaataggtagataccacatacgactatatggtactttggttcttcgatggtcgtccttaggcttccttcttttcgcgccacaaaatcgacattgatcttcttttttgtcttctttccaaaatagcatacaattgttctgacaaacatcaatcgtatgatatggaagtcctaaattgcgcattaacttctcggtctggtaatgtgaagtggtgtcctggtttccttctggtaaaaaatctgtaaacatttcgcaaacagagtccaccaacttttcactcatattatactccgccttgttgtgcatgggtcgagatgctaaggataactgtgattgcccttcacgacaaccatcgtacaaaggattatttgcaccttctaacaagtcgtagaacttatttgaatggttacggaccggttcttccacattctgataactatcatcatgatgatagttatcatcataccccacgttaaaattaaatgcatcgttcaccatatccacatatggatcttctacaacattacccacttcttcatgattttcactaaaatatgtcctatacgtgtaactcgttcctatatccatattcatttcttctccatgcttataccaaacataataatcaggcttaaatccttgactaaacaaatgagtactaactcttctactcgagatgatgtgtttttcattcttgcatacactacaaggacaatgaaattttcctcg

SEQ ID NO: 18061 - DNA, 716 bp, Arabidopsis thaliana
gttacaacgaacaaaggaagaagaagactatttataacagagtccaagtcaaaccctctaataccaagagagtctcttcaatcttctactgaactcaaaccgatttctcctttctccttcaaccaataccaaaccggcattgaaccgtgatccaacaactaactgattaaaccaagtcgacatcaggctaaaccagaagtttgaatcacacctttacaattctccatcttgatacaaatcttcttcaacacagtagactgccatgcttggacttaacctccagcaatgcaagcttaagagcttacttccattcgatcagcttcagagtatctaaatgctgaatcaaaacttttcacgggaatgcatttggtcaacatatcagcaggattaatagaagtgtgaatcttcacaactttcaatgtttccttcttcaataatgtcactcagaaatgacctcttgcgtgccatgtgtttggttcgctcatggaacacactattcctcgataaacagatcgctgactgagaatcactccagacctgtgctttatcctgctgaaaaccgagatcttcaagcaaccctttaacccatatagcttcttttactgcttcagtcaaagctataaactctgcttcagttgatgacaaagccactacggattgtagacaagacttccaactgattgtattacctctactgtgaaaacgtatccactagt

SEQ ID NO: 18062 - DNA, 2014 bp, Arabidopsis thaliana
cattcctagctactgacgagctatcatcgatgtcaagaagggaaaaattgacctaaacctggggaaagagatgaaaatgaccttcgactttaacaaggctatgaagaaccaacaatcaatgaacaagtcttttggatcgaagaaatggatagattggctgacgaattactggaagaacttacagaaggagatcacctagcaagtgctttaaccaacgatggagaagaagggtacctacacctagaaacccaagggtacaaagagtaccttgacgcccacataccaatggaaggaccaaaagagtttgaggaattgatcgttcaatggaaggaccagaagagtttgagaaattgatcgttctcgcagaagaagcagtatcaggatgcaccatgagcctaatcgctgaaaaaacaaactcaactgagatactctaccatggaggggagaatataagttcagatgactggtcagaactcaaagccccaaaggttgaccataagcctcttccaaaaggtttgaggtacgcgtttctcggttcaaatgatacttatcccgtcattattaatgatggactaagtgatgaacaagtgaaccagttgttgaatgaacttagaaagtataggagaggaattgggtattctttagctgatattaaaggaatttcacctagtttatgtactcatagaatccatcttgaaaatgaatcatatactagtatagaaccacagaggagattaaatcaaaatttgaaagatgtggttaaaaaggaaattcttaaattgcttgatgctgatataatctacccaatttctgacagtacatgggtctctcatgtgcactgtgtacccaagaagagaggaatgactgtagttaaaaatgatttagatgagctcattcccactaggactataacaggacatagaatgtgcattgattacaggaaactaaatgctgcaactagaaaggaccattttcccttgccattcattgatcaaatgttagaaggctagctaaccatgtttataaaggctgcaaccccctaagacagttaaggatatcaggagcttcctaggccatgcaggattttacaggaggttcataaaagatttttcaaagactgctcgacccctcactagattgctgtgcaaggaaactgagttcaactttgatgaagattgtctcaaagctttccatttgataaaggaagcattggtgtctgcccctatcgttcaagcacctaactgggaccacccatttgagatcatgtgtgacgcatccgattaagcagttggagctgtcctaggccaaaagattgatggcaaacttcacgtcatctactacgcaagtagaacgatggacgaagcttaaacaaaatatgcaaccacagaaaaggagctattagctgtggttttcgcctttgagaaatttagaagctatttggttggctccaaagtgaaggtctacacagaccatgcagcactaaggcacatctgtgccaagaaggaaaccaagccaagacttctaaggtggatactattgcttcaagagtttgacatggaaatcattgccaagaaagatgttgagaatggagttgcagaccatctctctaggatgagaattgaagattcggtcccgatagatgacactatgcctgaagaacagcttatgttctacgaccttgttaacaaaagcttcaacacaaaggacatgctgaaagaagcatatgtagttgaagaagaaaagttgccctggtatgcagatttagtcaattatttggttagtggtatgatcccagagtttggatgcatataaaaaaaagaagttctttagagacatccaccattactattgggatgagccgtacttgtataaaaaggggagtgatgggctattcaggaggtgtgtctctaaagggggaaattcaaggtatactaggacattgccatggatcacctatggagggcatttcgcgacttcatgactgctcagaaaattttgcaaacaggtatgtggt

SEQ ID NO: 18063 - DNA, 1621 bp, Arabidopsis thaliana
ttcagatatgtagcttctgatggttctatccattctgaattgcaaccaaggtccgacctgtcatctgaagcatcttcgcaacccgcgacaacctgtacggggaaggcatgttcctctttgtcaagctcgatgcttggcttttcgataaactccactgggatgaatctcctcaggtttgggtcggatgttgaggccagagcagctagggcgtcggccgacgtactttcccctcaggaatccttgtcaactcgaactcgtcgaactgtttcacccgatcttgtacatgagcatgataggcttccattcgttcgtctcgagccgtgtactatccgttgaactgattcgcgacgagctaggaggagcaaaaagctcagattttcatgatcttcagtccccgagctagattaagcccagccacgagtgcttcgtattcggccacgttgttggttgcctcgaaattcagtctgaatgactgctcgagaacctcgcccgtgggtgaggtgagacggagatccacgctcgaaccttattttgatgacgagccgtccacgtgtagttgtcaagttgtatcgagcggattctccctagcttcctttgttcgacgataaagtcgtctaggacctgggattttgcacacattttgttccgatactgatgtcatactcgctgagctcgatagcccacttagccagacgaccctattggctcggactacgcaagacagcgcggacgcaatggatcccattaccacgatggagtgggattggaaatagggtcgcagctttcgagctgacattacgactgctaacgcaagtttttccatttgcaggtagtgagattctgcgccagtaaatgtttgtgagacgtaaaagatcggcttctattcgcctctgtcatctcagactaaaactccgctgaacgcagaatccgatacagcgacatacaaatagagtggttctccgattacagatttcgcgaggatcggtggggtcgcttggtacttcttgagtttctggaaagcctcctcgcatcgggttgtccattcgaactttttatttccccgaagcacgtcgtaaaaagccaagcatttgtcggtggatcgggagatgaatcaattaagggctgcgactcttccagttagatgctgcacttcgcgtttgttttgaggcgatgccattcccaataacgcctcgatttgcttcggatttgcctcgatgccgcaatgcgtaactagatatccgaggaatcttactccgaagcgacatttggttggattaaacttaacgttgtagaggttaagctgctggaaacattcgcgtaaatgggctatgtgttcttcctcttccatggattttaccagcatatcgtcgatgtacacttccattgtttttccgatctgtagtgtgaagattttgttgacgaaacgctggtaagttgccctggcgttgctaagtccgaatggcatcactcggtaacaaaaaattctttgctctgtgtagaaatcggtctttggtctttggggttcatcatgatctggttgtatccagcgaaagcgtccatgaatgatagcaatttgttcccagaggtttattccacgaggcgatcgatatgcggtagtggg

SEQ ID NO: 18064 - DNA, 813 bp, Arabidopsis thaliana columbia
ttgattcaaggggcaatcattttcatccaaaccaagaaaactatgacggagctggaatgagatatcaaagagtatgaaagcaacctccttcttctggatcaaacccacgacgagaatttttccgaggaacaagaaaggttcgaattggaagccattctaacaaagaagcgaaatcgtctagccgctcttccctcttcatcattcaacactcaatagttcgaagagttctttaccaagtcgcctcctttgagcgagtccggtttagattgggctggtaagttttaaaacctcaaattttgataccaaaccagagtaagttatacatgcgtttttcctgattcgagatgattgtttcaggtcccagtgatcccgtggaacccgaggtatccatcatgcttgtgaaaactcctgaactggtagtcatcccaccagaaattcctccacccatgaacactgaaacagtggtaatcgaggacgatgatggtttggaccctgggattactaccgaacagcccattactgacgaaccggatgagactgagacggctgccgtggacccggtcgatcctgagccgactcaacctgaactcgaggtggccaaagatccatagtggctgtgtccacttaaagggggttgtccctttttattaacaaactcgaagtttatttttcaaactcttttcatcgcctaagtaggctttttattttctgaacaagtgttttgcctgaggaggcttttaaacctttttaagaccatgatcccaagaggatttctgcaatatttaagtacggatttgcaaaggccatctttta

SEQ ID NO: 18065 - DNA, 686 bp, Arabidopsis thaliana columbia
gatcatctagcaaatattcgtatttcacaaacatgagcacataaagctattgcaaagaagactattaatattaccctatcattcaggacacattccagtgtagcaagacacattctgtatagctattttatcaccaacatacatgtgagaacgagtgtttcacgttatgaacataacaataggaaacaaaaatttctgagcgccaaaacatccatatcaacttacttgcaagaacaaatcagcatactgagtggaaaaagaactaacatagtttcaactaaaaaagtgggatagcaaaaaatgtaacaggtaaaagcacaactaatatcatgatgaatataaagaaaagtaacacaagaatagtgggctgcatacagaaacataccaatcaataacggctatcggcagtgcatcctgtataagagtaggtgcctgtaagaaagatcctaagcggacaagtgtctgatttacttcagacatgagccctgttagattcagcatggggagaccggcagcaagggaggaaatattgatcatctgtctacttcctgcagtagaattggaaaagttgacccgcgcacaacaaaatgaacaaagcatgtatggtgcagttccagataaaatacaatcataatcggaataatcaatcaataaaacactgcactgattagaacataactacttcg

SEQ ID NO: 18066 - DNA, 1350 bp, Arabidopsis thaliana
ccgattcgtaatttgatatctaatacaagtatttagccagataatgaatcaactaaaatacaatcctgacatattcagacagacatacaaaaatgagagacaaaattaccgggaaattagtcgtagttgtaggaccccaatacttaagagctgcaaggtcgtaagctctagctgctttatcttccttatcataaccacctgaacataacaaacaatttacttcatattaatacaaatttaaatataaagagaatgataacgtttcagaagggaattaaatacacaagaaagaagaaagagatgaaataaattgtttaatagagaatttattggaactcacctaaataaactgcagaaacaattaaaaatcatcacaaatttcagatcgtccacggttgggtaatcatttcacgtcacagagacaaaacacaaacataaaaaaaaaagcgacgttagattttgccatgacctctcataagtaaaaaagtgaaagtaaaaaacataaatacaataagcgcattatagtaaacatcaaatgaatcagtctaacacgcgcattttaaagacgaaaatgtaccttgtcttccttttctgctttggccttctcttcggcaactattatcccatagatgagcttcgtatcttccagtccatctatgtctgttatattaataaaaaaaaatcaattataggttttcacaaattataaactcatgcatttacacatgagtttatatgttacactatcgtctaattaattatttaaagtaaacgaataatttggttatacgcaccttgtgactcctctataaatcgaggtacgttgtccaaaactctctacgttcttcttcggagtaggcgacgtctgagacagctagaggattcggttgttgtttatgtacgctagagacctccgacgagtgtccaccggagtagtttcctaggaagctagcggctattgacttgagctcagagtcgtagatctcggcggcggacggaggatgaagcggtggctgtaggtcggaagagaagacaacgccgccaagagattgcacttgttgcattggtcttgttgtcgtcgttgaggctcctccgccgaggaagttctcaagtttaggaccgccggggtatacggaaagaaccgccgtggcatcgctgggtgaaactcccggtgacccatcttgccgttcgactgaaaattgttatcgtttacaaagggtattgaggtaattagtgttttactttgaaggagacaatatctagtgaaagattctataggggaaattaatagatactatttaattttataactagatcttatagatacaggattcactagatttgactgat

SEQ ID NO: 18067 - DNA, 1091 bp, Arabidopsis thaliana
aaatgaactgaggttccctcttctctgacatgagtcacatttcgagataaattcttgagcattcttaaacattgtcggccaccaaaaaccagcttgtaggatttttgacactctcttgaacgttgcaaagtggccaccataggcagacccatggcagtgcagtaggatgccttcgatttcgtcttctgagacgcatctcctgtagatctaatctttgcagagtgtgtagagataaagttcgtcccagtagaaatggttaatgtccttgaagaactttttcttctcatagctcgacagattcggaggcgcttcaccactaaccaagtaattgacgtgatcaacataccatagaagcttttcttcaattgcacatacttgatcgagtgatttccgaatttgagcactctcgttaagttgctgaattgctattagctgttcttctgacatggagtcgtcaatagggacctcgtcttcaattctcattctagatagatgatcagctacaccgttttcaattcccttcttatcaactatctccatgtcgaactcttagagcaataagatcctatgtttggtatctttcttcgcgtatatatgcctcagagcagcatgatcagtgtagactgtcaccttagagcccactaggtagcttttaaatttctcgaatgcaaataccccagctagcagttccttctctgtagtggcataccttacctgtgcatcatccatcgttctgctcgcgtagtagatcacatgcagctttttatcaatccgctggcccaaaactgctcctactgcataatctgaagcatcgcacatgatctcgaatgggaaattccagtttagagcttggactattggggccgtgaccaaagcttccttgattaacttaaaggctgtcaaacattcttcatcaaatgcaaactcggtttccttgcatagtagtctggagagcggtcttgccaacttggagaaatctttgatgaatcttctgtaaaatcctgcatgtccaagaaatctcctgatgtccttgacagtctttggtggttgtaactgcatcatcacgtcaaccttagccttatcaacctcta

SEQ ID NO: 18068 - DNA, 1404 bp, Arabidopsis thaliana
tagtcttgtgaagagcgaacgaacacttagatttcaccgaaatgaatatattttccaagaggtgaaacttggaaaaattcttgagggatgaaatctagtcttgtgaagagcgaactcaacacttagatttcaccgaaatgattatatttttttccgagaggtggaacttggaagaatcattgacggatgaaatctagtcttgtgaagtgcgaactcaatacttagatttcaccgaaatgaatatatttttccaagaagggcaacttggaaaaatccttgagggatgaaatccagtcttgtgaagagcgaactcaacacttcgatttcaccgaaatgaatatattttctcaaactcttggactgcgagactaaggaatgatatctccggtttcacacaaacaaataatgagactttctgtgaagcatgggagcgcttcaaaggttaccagacgcaatgtcctcatcatggtttctccaaagcttcacttctcagcactctctacagaggtgtccttcccaagatcaggatgcttcttgataccgcttctaacgggaacttcctcaacaaagacgttgaagaaggatgggagctggtagagaacttggcacagtcggatggcaactacaatgaagattacgatagaagcatccgccacagctctgattctgatgagaagcaccacagggaaatgaaagctataaatgacaaactggacaagctactccttgtgcaacagaagcacattcattttctgggtgatgatgagacgttccaagtccaggatggggatactctgtagtcagaagaggtcagctatgtgcagaaccaaggaggttacaacaaagatttcaacaacttcaagcagaaccatcccaatctgtcttacagaagtacaaatgttgcaaacccacaggaccaagtctacccctctcagcagctgaataaacccaagccctttgttccatacaaccaaggtcaggggtatgttcctaagcagcagtatcagggcaactatccgccgcaacttccaccacctgggttcacacagcagcaacaacaaccagcttcaacaactccacattcaaacttgaagaacatgttacagcaaatactccagggacaagcagcaggggcaatggatctcgccaacaagatggcagaaatccataacaaggtcgattgcactttcaacgatctgaacattaaacttgaggcactcacctcaaaggtcagatacatggaaggacaaactgcgtcgacctctgctcccaaagtaagaggacttccaggaaagttcatacagaacccgaagcattacagcaccgctcacgctatcaccatctgtcatgatcgagagttgcctattcgacatgtctccacatcaatcactgaggacagtgatg

SEQ ID NO: 18069 - DNA, 485 bp, Arabidopsis thaliana
tgggaattattaaagttatagttattaaacaactagatagtagatacactagtttttcccaacatgcatgcatcgtcagtttctttcttatttatatgtatagggtatcgcgtattctttcattccgaataaacttgaacgattgatagaaaatgtggagactgagaattggtgctaaggccaaagataatactcacttgttcaccaccaataactatgttggtaggcagatttgggagtttgatgccaacgctggctctccggaggaacttgccgaggtcgaggaggctcgtcggaatttctccaacaacaggtcacggttcaaggctagtgccgatctcctatggaggatgcaggtgaaatattttacagtgtaaaacataacaatttggtctttatttcagaaaatagtattttaatttattcttttagtattattttgtggactttacagtttcttagggagaagaagtttgagcagaaga

SEQ ID NO: 18070 - DNA, 532 bp, Arabidopsis thaliana
gccagtgtgctctaaagcagcgtctgcgccacgccatgctgatagcttttccggtgcaatgccgactacggttagcgaaacggtgaaatcctgctcattgagctgggcgcggaacatgaccggagccagcgccaccgcggcgctccatccccggcattcatcgatgcggcagataacccgttgcgcatcgcaagccataaacccacaaggaatggacatccagtccggcgcgacggtagcgcgggtgatgccgttttcctgcaaccactgcgcaatgttgcgcatatgctgttggtgaatcactgctacggttgccagttgctggtcgatattcaacggggcgaaatgcagttcatcgatatcctggttcagctcttcttccagtaaggcgggcagaatagtcggtagcgcacgggagtggaaatgtcgtggcgcgcacccttgcgtaaaaccgtaagttgaatggaatccattgaaggtaactgccgcatcagagcaatcattgctcgtggatcagtgaaatcctgctgat

SEQ ID NO: 18071 - DNA, 1559 bp, Arabidopsis thaliana columbia
gaaaaacatatattcttaaagaatttcatgttctctatattgggctctttttgtcgatggagagattgactttttaataagtaggtttttaggcctacttatgtgctgaagtgtgaggttcagtttaattccccttaaacactaacatatcgatgcagctatagggggtgtcaatcaagtccattgttattgctagcaatcaagatgtgtacagaagcaactaagtcaagccagattataatgatggtgggtttctagtaacaatcctaggtcaggattcaaacaggtaaaaataagaacttaagagccctactagatcattgggtcgagtagaaccaacaggtgacaatattaagaactaaaatgcaatccactcgggatacaaataacaagtaaataaaagtgcaatcaggggttgaatacaaataaatctaaaaagaatagaaatcctaaggatggattcattgataagggcgtctctagggttcatcaggtggctaacaggtgaaaggtagataccctagacgatagattcaaaaaccgggtcaatccactatcgtgacagagacccccataactctaccacttcctaatctcaactctcgttgatgaaacataacagagcagggtttaagcaacaatctaccaaagccaataagcagacaagccaatgtcttggtcaagtctacaaatctctggaattcgtagatgagacatccatttgaacgtcttttggacgatggacgtctatgatcgaatctacacattagccagcgaaaaccaggataggggcgaagcgaatcgagaagggatctaacctaatcttaaccacctgactaaccaagagattaccctaatttaattcatcctcaagagccctaatcactactcaagcaacataactaagaacacaaacccagaaattactgaaatcataccaaaatatagatctaaacaagctaaacaactttactaaaagaactaagtgcaaaaacaaaatagattaagagtaattaagttttgaagattcaagaacacaaagaaaaactaaaggataaaagctagatcctttggacaaatcccaaagtgatttatttatagtaaaatgttgaaaaccctagattcactagaagagaagagacttgaggcggtttgggcgagtgctcggtcttggagatcgagtgaagagggtgctgcaaaatcttcgcctttgtgtctatgctctgagtgatcaattggtcgagtagatgcttcttcctctcctatctgtatgctcagatgtctggttgagtggggaatgaggaggatccgaagatgttttgatagatcaaaaagtcttgtagagttggtcacctttggtcgagtaaataggtcgagtagaggatcgagtaggaggggcgagtagatcaatctgctgcttcttctgaggttgccttgatcgagtaagagggtcgagtgaattgctgcctcctctgtggctgcctggatcgagtgaatggattgagtagaatgctatgctgcttcccgtcctagttggatagagtagagggtcgaataga

SEQ ID NO: 18072 - DNA, 1817 bp, Arabidopsis thaliana
cttcatctcttcgggaatctcgctgcggcctcttcgactgatggaggaatttcgccggctttggtcgcttcaaccctagttgattcatattcccacaagagtcttttactctagccattggaaaataaatttgcggagatgaaagagacaaagacgaaccgaaaacggagaagaaagaagaagagaagaaattgagttttccggcgaaattggtgtcgtcggagacgagagaagggagagagagaaaacgacggagagaagagagaagaagtcgagaagttgaaaaagggaagaagttttcttacttaggtttttctgtagtttctaaggtaaataatacaactgggccgaatatttacattttttattgagcccgagcccaacaaattaagttttcttgtagttttcgtggattgccatgaatgtttcgtcctttactcattttttcgatttaaaaaaatatcaataataaaatttcaaacataagaatggcacgactgattatttcttctacaatagtggcataagaggtgagttctcacttttcaccctctgtttcttctcccatttacgagccctccttccactggttctcatcttcttcttcatgaaagctaagggtatcttcaacctatcagagtcgaattggtttatctcggatccgtacagctccaactacttggattgaaaccctactcgaagaagatgaagaagaaggtttaaaacctaaactttgtttaacatagcttattagagtgataacgagtcgtgactcgttcgagttcccgagttctgttgattgtacgattatagtttaattgggtgtttgaattgggttttgaatttacgattatagtttaattgggtgtttgaattttgggaaaatacccgttcaccctctgtttcttctcccatttacgattatagtttaattgggtgtttgaattttagagttgtggagacaataaagatgtaaaagagttgtcttgtctaatttgacaacttgcatttgttttgaaacaaaatcccctgctagttgcagttgttttttctttgttttcctgtggctgtgaaagtgaatgtttcataaagcttctctattagtcactacacatagtccatctttgatgagtgtcacctactcgtgtcaactatgtatcgatcgtgaatcatggcttttgtgaaatgaaacatgttttcatgttcatggttaagtctatgtgtgcatatggtttgtgagttaactaataactcttcccttttggtttgtgagtagaaggaagagcaaatgattggtgggatatcaggaatgatggatatgaacatggacaagatttttgaggattcagttccttgtagggttcgtgctaaacgtggttgtgctactcatcctcgtagcattgctgaacgggtaattacttaaaagtttgtgctagatgctttgcagtactaattctgtttctgcctcattcttgttttgtcattaagcttttctctgttcattttgttaggtgagaagaacgcgaataagtgatcggattaggaggctgcgatgatgatgattcgtagtgctggcagcggaggaagtgttggtgtgagctgtcaagactttgggaatcaagcgaagatagattgctctcacatgaggtgtagaacttgttgtaagagccgtggcttcgagtgttctactcacgtgagaagcacgtgggttcctgctactaaacgccgtgagagacaacaacaattagctacggttcagcctcaaactcagctccctcgcggtgagagcgttcctaaacgccaccgtgagaatttac

SEQ ID NO: 18073 - DNA, 654 bp, Arabidopsis thaliana
ctttgtagcagtagttatttcaaaactgtaataagatctctagtcagattctcatgctcctatcggataacagagaaaataataagagtcactccacaatgttttcttcggaagtgtttttgtcttctacagtgtctccatcttcagaagcgttgttagcttctacactgtcaccatcttcagattcactggcgcttctcagactaaactttagagtgataggtctacccattatctcctatagaaaaaccaaattgtaatgaaacactttacatgctcaaggctaaaggagcaaactttatattaatatgcttggaacttcataccttcccattgagttttgtgattgcattctcagcttcttctctagtagcaaatgagacaaagccatagccagaagatctaccttcggggtcagcgaaaacaacccgagctgagaccgggttgaaatctgcagcagtgaaaagctctcggagatgtgttgatcttgctatccaagcgagattagatacgtagagtttgtgacgagtgtctacaggggcaggagaaggaagatcgtccgatgatttcggagtaggcttcttgaaccttcttgcaaagttacgctaatgatcctccctgacacttgctgaatacacaggagattagggtgct

SEQ ID NO: 18074 - DNA, 1406 bp, Arabidopsis thaliana
aagtgggaagctcggaagctgaaagatcaggctgcgcgtttcgttctggtcgaggagaaactcttcaagtggcggttatcaggacccttaatgacttgcgtggaaaaagaagcagctcgcaaagtcatgaaagaagttcacggaggcttgtgtggaaatcattccggggaagagccctagctataaagataaaacgccacggttatttctggccagcgatgatcaaggattgcgaaaagttctccaaacgatgcgaaaaatgccaaaggcacgcaccaacgatccatccaccggccgagctttatcaatcgcctcaccatatccatttatgcgttggtcgatggacataatcagcccgatgcacgcctcgaagtaaaagaagttagtttttgtcttaaccgattacttctctaaatggatagaggccgaatcgtacgccagcatcaaggacgctcaagtcgaaaagttttgtgtggaaacacatcctatgtcaccacggtatcccttacgagatcgttacagacaacggctcgcaattcatatcgacccgcttccaaggtttttgcgataagtggggaatccgtcttagcaagtcaacaccacggtatccccaagggaacggtcaagccgaggccgcaaacaagacgatccttgacggcttgaaaaagcgactcaccgccaagaagggctcgtgggccgacgaactcaaaggtgttctatggtcacatcgaacaacgcctcgtcgagccacaggggaaacccattcacattagtctatagaacggaatgtgtgattccagccgaaatgacagtaccgtgtctgcggcggagcctgtctcccgagcgcgaaccagataatactcaaaggataatcgacgagctagatctaatcgatgaacgaagagattcagccctagtgcgaatacagaattaccgacagcgaagatttcatgaaggagaccgagttctccgaaaaatctttcaaaacaccgacgagccgaacgctaggaagcttggggcgaactgggaaggactatacctgatctctaaagtcgtcagacccgcgtttatgaacttgccgatctaagcgcaaagccattccaagatcttggaatgcaatgcacctaaggatatactacaactaaatccgaggtgactaaacttgaactacgaggtggcttgatccctgaaaagggtacgtaggcagctcgtcttgggatgagttcagctaccccccccccaaataaaaaaaggggggagagggtccgtatatccatactcccattcattatttattttgtaagtttccgacttctgcataaataaaaatccatttcccatttctaaacgcttcggttaatacgatgagcgacggctcggagtatcttttatgcttggggagttac

SEQ ID NO: 18075 - DNA, 321 bp, Arabidopsis thaliana
gcctgatgttctcactgtaacctttttccctaagaaactattaagtccacataacaaagaaaataaaaaaaaattttatcaaaaagggaaaaaacaagaaaaataataataaaacaattctctaacaaacgtattgtgttatacgtttcacctgcatcctccataagagatcagcactggccttgtaatgtgagctattgttagagaaattccgacgagcctcctcgacctcggcaagttcttgaggggagcctgcgttggcatcaaactcccaaatctgcctcccaacatagttgttggtcgtgaacgagtgagtatcat

SEQ ID NO: 18076 - DNA, 1418 bp, Arabidopsis thaliana
atcccctcagaccaagattccaatggaagttcttgattatgtctccgtgaagtaactagctgatcccaccaactcaaagcatagtaataaaattcagtagcaacaactcttaccctattaatctcggtgtagtgttgaaggttaaaaccaattcaatcttcttttcccattccaaataagcatctggatcagctcacctagctgaactagctactcttcctgctggtttagctcacctagcttaggtagctagttcatccagcttgtccaactcacctagctggttcagcttgaactttctcgttcttccgactaagtattttcgtccgttcctcgaccatgatctcgttttctcctaaaacaaaccggcctctttatgaacgcgggacgcagtcgttacaatcactctcctcttcgcggaattttccaaacgaatccctgaagtaattcttgaggatgttcctcataaggttggtaactccctaatccctgcacattttgtgggcctgaactacgagtaggaacccaaggatcctcttatccttgaaagagcattcctagctacagttggtgctaggattgatgtgaagagaggtaggatctctctcaaagtttgttatctggagatggagtttgacatggatggttcagcgctcactaagcctatcagtagtattgcctatagcatagacacacctcctctaactgctcaaaatcccaaaacagaaccacacacaacgctcccatcagctcacctcgccaatgagaattgtagagcatcggtgtcgatcgacaccagccctcctgtcgatcgacaccctcgggattcatagacagaggattctggacatcctcttcagcccacaccacttgaggccctctttgataagttctcttctacctcttctcttgctttaccttcgattaattccttagattcttcgaaatctgcttcacatgttaacaagcctagagttcctcgaaaacttgtttcccctgttgttgttgcaggtgacgagaagagtgtcgatcgacacactactgagttcagtttacacaccgccttggagggcgcgaacacaacaacaatcctccaccaatccccccacatcctgaactccgccaagtcaagctattgactcaaaacaagcgcttagtgggaggcaacccactggtttgatttttctgttcttctcttttatttttgatttatttatcccgccttcttcggatttgaatgccattggggacaatgtcgtttaagtctgggggaggttcttactaatattgcttttatttttgattcttattattttcgtttttgagtttattgagtcattttctttctcctaaaaaaaaaaacgtttagttaggaatcatgatctatatttctcttgattattgcatgattagtgagt

SEQ ID NO: 18077 - DNA, 1682 bp, Arabidopsis thaliana
ccaataaatttttaacatttaaattatcattaaatttctatgaagttccaacaaataaggcgtcaaaatcctcaaaacgcgcgatatgatccatatattgttcgtgagataagtcatggaaaagatgttgtctgacaatagcaaagtaggtaggcttgagctcgtagtcgtttctctagaatgggggtggtacgatcgctgatcgattagcatagaacatgtcaagcctgttgaaatcctaagagtacgtcgtggttcacctggttgttgcacatttgcttgttggtcaactcgatttgatccgtcaagaagttgagggtgtcgatcgacagccatctggtatcgcttgacacctacgtctacgttgcgagcaacgagttgcgcgttgagttgcacctgctccattatctgatcctcatcatggatgattatgtgatcatctagtctctgtccagtgacattataggcttgtccatcatcatctctcaaaactcattcttcattagctctgatttgtccgttaaccttagatgttaatctctgagctttgtggttggtgcattttagttatctcaaatcaagtgttagataggttgattaggtccttatcttatgttattcgagttgtaagtctagacatgcacctgaaacacaagagagagagaagatacaaaaaacgcgttggtatcgaaagaaagaaaatttagacaaaaactctaaacaaaacctaatggtcattcccaagaacttctgcaacggcgccaaatttgatgtcagtcaaattaacctcaagcactctctcaaataaaagatctattgcagtattttatggtcgaatttcacaaagttcttttgttcacacagaaggttgtagtctcaaaattaagctaaatcaataggtattagaaagtaaaagaaaacaagaaagcaagcagcatgtttaattgatgtaaattcaaatgattaaagcttcggttttagggatattatcaggaaataaatgactaatagatctagctatgattaagattgttctcaaaccgttctaaaactcaaataactaatgtctggtcgaccaactctcgtttcatcaactaactatacctattaactagggatcccaaccctagttgtaaatcactagtccctaaacatgcactaagatcaggtttgatagttcacttaagtataaaaatcagacctatccatatttaaatactaaagcccatctatgatatagttcaggtaataggtgccttctcgaatgctacctattacccttagatcaagttctagttagttactctagaactaccattaaaaacaaatcaagatgaagaactctaaaaataatcctaacatgttatcgatctatatcatctaaatccctaaggagaaactctaaacccaacaagtagattgtttagacatgatcatagaaataaaaacatgtttgaataagactgcataaagaaatcaaaagaagaatagagtttagaaaatatcttttctctacagggttttgaaatctctgatgaactctccaaagcaaaagtagaacttagaatatggtttttaaacatgtctaaaggtttggtcttaacaatgaccttaaaaatctatatataagtgcctaaaaacatttagagactaataatgcaaacaaagaaattttctggggt

SEQ ID NO: 18078 - DNA, 1036 bp, Arabidopsis thaliana
gtatttagtaggtcgtaggtgccataggtggcccttgggaaacatccacatggatacaaacctcatattataaattctctatgccaaaataattaggaccataggttatgttatgtacctcaaccatcctttgattgagacattaaattccttcacgtttgtaaaccacactttcgtatacattttcttccctaacacttcttggcactgtttcttttattaatttgatttttgaaacatatgtcaaaagaaaagaaaagaatcgaaacatttaattaattaatgtttgtaattgcacgttgtacattcattacttttataaagagactgatcaaatgatgattgataatccttttagtgtatattaggcgtgtcaatggtgtatatattatatagtgtctatatgtcataagaaacgtcataaattttatcaaaggaacaacaatttaagtctgattaatctataattctcatccttacattttcattggcatcaaatttaggtaatttttagaatatagcttaataaatgagtaggccaagaggacggctcgcaattagctgtgtggaaagctaaacgatgtctcctaccgtccacgtcagcgtcttaaatcctcaaatcccattggcaacaaaaaaaacattgtgtatataaatacatgcatacttatcactctctactcacttttacaactaactcataagtaaaacacagacagtttttagatggctaagatatattccccttcttttcccggtactctctgtctttgcatttttactctcttgacgctaatgttcattcgggtttccgctcgacccgcgacattcgtcgaggatttcaaagccgcctggtcggaatctcacatccgtcaaatggaagacggaaaagctatccagctcgtccttgatcagagcactggtacaccaacgccacagttatatttttaaacggaaacattttgaaattaatggtgtttttatgtaatatactctcactgtacatgttcatatttgtcttttaaaggatgtggat

SEQ ID NO: 18079 - DNA, 1192 bp, Arabidopsis thaliana
atgcttcaagctcagattgtttccattctctcttggagacaaagcccatcagtgggaaaagtcgcttcctcaaggctctatcacctcctggaattactgcaagaaagccttcttggctaagtttttctcaaactccaggactgcgagactaaggaatgatatctccggtttcatacagacaaataatgagactttctgcgaagcatgagagcgattcaaaggttaccagacacaatgtcctcatcatggtttctccaaagcttcacttctcagcaccctctacagaggtgtcgttcccaagatcaggatgcttcttgataccgcttctaacgttgcaaacccgcaggaccaagtctacctttcaacgtagcagaatcaacccaagccctttgttccatacaaccaaggttagggttatgttcctaatcagcagtatcagggaaactatccgcagcaacttccaccacctgggttcacacagcagcaacaacaaccagcttcaacaactccagattcagacttgaagaacatgttacagcagattctccagggataagctgcaggtgcaatggatctcgccaaaaagatggcagaaatccacaacaaggttgattgcacttttaacgatctgaatatcaaacttgaggcacttacctctaaggttagatacatggaaggacaaacagcgacaacttctgctccaaaagtaacaagacttccaggaaagtccatacagaacacgaaggaatacgccaccgctcacgctatcaccatttgtcatgatcgagagctgcctactcgacatgtctccacatcaatcaccgaggacagtgatgttcaggacggggaggtttctactcagattgaaatttcaaactcagtctaacctagacgagaaagcagccatcatagagaggatggtaaaacgattcaagccggcaccatcaccttcacgtgctcttccatggaaattcaggaaagcatggatagaaagatacaattctcttgcagagaagcagcttgatgagatggaagcagtgatgcctctaatagaacttctcaacctgatttcgaatcctcacaaagatgtgagaaagtcaattctggaaaggatcaagatttatcaagatttatcaagaatcagaagacgaatgtgatgctaatccgtctaggaccactgttaagaggagtg

SEQ ID NO: 18080 - DNA, 1015 bp, Arabidopsis thaliana
cttcttcttgtcaaatcctaattgttgcatcaacagtgagaacatgttttgattatgagccttaaatctactagtgttgccttgtatttttcacttgtcttctatctttgacttgaaacgcagccagtgaactttgtaatatcaaaagagaagttcttttttcttttaaaactgtagtgaggtccatgaatagtagtaagtaaaggtaccaaattcttactctacgtttacacgattatcaaaacagaaatcaaaagcgaaataaatttaaagaaacgacgctcttgcaattttgttataaacccactaccagccgcagtggctgctactcagattctgcatttgctcaagctgaagttgtcttggtggtggttgcagctgcggaggagccttccttctggtcaccaaagacacgttgacggaaatctttgaccatgagaggcagtccctgacgaagagagacctttggttcccaacctaaaagctctttggcctttgtgatgtcaggctttctcttgtgagggtcgtcttctgtgtttggtctgaactctatgtttgcattcggatcaattgtctcttggaccaccttcaaacaaaaaccaaccaaatcacaattatcagaacccagggtcatatataaaaatcgaaaggtatgtatagagagagagagagagagaccttagcgagctcgagcatcgtgaattcaccagggttaccgaggttgaatgggccgacatgttctccttccatcagtctcatcaaaccttcaaccttttgcatcacaaaaacacgaaatcagattgatcatacaatattgacagctaaaaataaccaggacaaagagggcaataaagttgagagcccatttggtcctttgtcacatgatattgattattgatactcagccgtcttcataagattgctaaaatggagaccatttaatatctataacaaattggggtctcttttgttatcagatcccacgacatacccaccagtttattcaataacaggg

SEQ ID NO: 18081 - DNA, 1014 bp, Arabidopsis thaliana
cagctaatgcaactcctttagagtagcctccctttcctgaagtgatttccaactcatatgcttgaagcattcctactacttcttcgaaatctatcgtgtcagtgtccagcgacgtccccatagcagttctcttgctttcgaatctagatggaagacatctcagcagtttcttgaccaatttcttgtctttgtattttttcccaagattatgtgcttcacttgctatagcacttatttttccactaaactcctcaatgttttcagattcgtccatagtgagattttcaaactgagaagctaacatatcgattctggaccgtttgacactgctagtaccttcataagctttagcgagtttatcccacgcttctttagctgactcacagttttgaattcgcttgaactgattctgatttacagagttgaaaatcaaagacagagctcttgagtttgccgtggcctttgcttcttctgcatcagtccactgatcttcagttttcagcacatcctctccgttttcccctttgacaaccggagctttccatccaacactagtggcaatccaggcttcctttcccagaccacgtattagagctctcatctttactttccagtgaccgtaatttcctttttccagcataattgccttaccaaccgcaacgaactctttggggtagtccatcctctccgcaggatctgcacctgttgttaagtacaacttggttcagatgcctgctctgataccaattgaaaatccggatgaaccaagaactatattccccaaactcagaaccactgagtcttactttattagaaatctgattaagaagtttacaactaccttaataggttttacacaagatctaaactactttagtttgtcaccttagatttcctaacacacacaagagataatcacaagaacacactctttgatttctctagaatcctaatcagagtaaaccttactctctcacaatgaaaagctttgcacttactgttcacaactatcac

SEQ ID NO: 18082 - DNA, 580 bp, Arabidopsis thaliana
ctctcttacaacactttctccggcgaattccgccgtcgtatggccgttttccagtctttgtcagcttagatctcagccacaataatctcaccggaaaaatacctcagattggctctctcttaaaccaaggaccaacagcgttcgccggaaactctgagctctgtggtttcccattacagaagctgtgtaaagatgaaggtacgaaccctaagctcgtcgctccaaaaccagaaggctcgcaaatcctcccgaagaaaccaaaccctagcttcatcgacaaggacggaagaaagaataaaccgatcaccggatccgtaacggtttctctcatctccggagtctcaatcgtaatcggagcagtttctatctccgtatggctgattcgaagaaaattaagctccactgtgagtacaccggaaaaaaacaacacggcggcgccattggatgatgcggcggatgaggaggagaaggaaggtaaattcgtggtgatggacgaaggattcgagctcgagctcgaggatttgctgagagcatcggcttacgtcgtcggaaagagcagaagtgggattgtgtacagagt

SEQ ID NO: 18083 - DNA, 985 bp, Arabidopsis thaliana
gtttaataccatttctcatcatttgtcatcactttacatgtttaggatagatttgcatgcatgttgcatatttgcgttgatttcaggtgatttggagctgttaacgagctatctggaagaagcgggcctgatcatgtcaaaccactcgaccccgaggtcgagtaggagcttcaagatctcaacagatgactcgaccccctggtcgagtagaggacatcattacttcaccacatcactcgaccccgaggtcgagtgtcttcatcccatcacctgaccatcactcgatcgcatcactcgaccccgaggtcgagtgtcttcaccttcattgccagaccactactcgacctcatcactctacctggaagtcgagtatcaccatcaccaccactcgactgcatactcgatgacaagcttcagagccttcttcattctgcactcaaccagacactcgagcacaaggaagaaaagaagagtccagctattcactcgacctcccactcgaccacatgggtcgagtacagttcttaatccgtcccaatacttcgtcgttttgagtattaaggtttcagaatatttggctataagtagcatatacttcacatttttgcacactagaagtttttatctagttttattccgcagactttgtgttatagaccttttgtaatccggatttctctttatctatttagtattcagtattcagcatttgttcttgatttcgtttactgttgttcgttctgttatcatcctgctgttacactgttgttatcatgttttcaacttgttcaatgtttatgctttctattatgatgtctgagtagtgaataggtttctgaggatgggttagagtagtgtaggattctcagtatgctaggtgattgagtattgattgatagatcccttttggattagttgttcttaatgcctatagctttctgatcaactggaatttgagcccagacatttccgcgcccaaaaggtg

SEQ ID NO: 18084 - DNA, 1036 bp, Arabidopsis thaliana
cccaacagcattccaacgatggagattgtcatccaacgatgtatactgcacgctgcgggcatgtaaccgtcgggctgcccacttatctgtcaggattatgcaatctgcgatatagtttcttatttcattgcgccaatcttgaataacaagatcgtctgtggttggggcgttcgtgcaggctgtgttatcgcagaaacgttgggtggtgctgaagaagttgaggcgagtgtattgacgattaagtagattgtcagcagcctgggcaaatccatagttggcgcattttgcatgcttgtagagagagaaagatcaatactaggttgatcgatgctctcgacaggtataatacgactgagaactggataagatgtcaaagcaagtacagcgagcgcgtcagcggacgcattagcgcttcttaggatcttattgagttcaaagagcttaaaactgtgggacagatcgcgaaccaccttgagataggcatccatttgttcatttttttgcctcgtaatcgctttgtattcagctttgttattggaggctggaaatgcgagtctgaaaaattgttctagcccctctcttgtaggagattccaatcgtacgccgactcctgctccttgtcgggaagaagcgccatcaacgtgcaatatccatttctctaacggggtgtattctagtgattttataaccattgggttgaagcttgattataaaatcagcgagtacctgtgatttcgctcatgttcggtttttgtatgtaagatcgtatttgcttagctcgaccgcccattttgctaatcggccagattggctcggactgtgcaagatcgtccgcagaggctagttagtcaaaatttgcaaactgagatggttacggcataagcaagcttctccagtgtagggtatcgcagattgattagcgtagagatctgttttgggtttgtttctattccctgttgggtgacaagatatccgaggaattctccggaagtcacaccgaaagtgcatttggccgggttcacttcatattgtattt

SEQ ID NO: 18085 - DNA, 648 bp, Arabidopsis thaliana
ttctaatgctgctttggagctcgaggctcaacggaagtgggttctgctgtcctgtgctgaagagagcttcttccatcagagatctagagtctcttggtttgccgaagtgatagtaatactcactattttcacagaatggtggactcgagaaagtctttcaacaccataaattcccttgtggatagcaacgggctgctcattgattctcagcagggcatcctggatcactgtgtaacctattatgagaggttgttgggatcgattgaaagtcccttttcaatggagcaagaggacatgaatttgctcctcacttacagatgctctcaagaccaatgtagcgagcttgaaaagtcatttactgatgatgagattaaagctgcgttcaagtctcttccgaggaataagactagtgggccggatgcgtactcagttgagttttttagagatacttggagcattattggtccggaagtgcttgctgccatccatgagttctttgattctgggcagctccttaagcagtggaatgccacactctggttttgatactaaaacttccaacgcctgtactatctctgaatttcgtccatttcctgtctcacacgttgtataaggttatatcaagcttttgactagcaggcccagggg

SEQ ID NO: 18086 - DNA, 1376 bp, Arabidopsis thaliana
tcttttttctttatgcaaaagtgatttgttttttatttgttgttgattattctcgagtagaaagtaacacgtgtagatagatatctgagaatgagaatagttgatgatgttaggttttgatgaagtagacgttgtggcttgtttgttgtaccataaaaagacgactaaattttgttcttccataaacttttcaaagagatttgtaaatttggacaatgtgtgtgggtggtcctcacatgttagtagattcttatgttatgctttagtttgcttttatttttgtgagactttttagcttcattttctctagaggaatatgccatttggggatgggatccagaatcaatttgaatttttaataattaatactagatgacattctagttattatagattatgtaatatgatttgacatgtaattatttatactgaatttatgtatactattatatatagtagatacatcctaataaaaattgcaatgtaatgataccagaaaagaaaatttgcaatgtaactttttcaacataatttttctctttctttcccataagtgttaccattttataaagaagtgttacaacccaatagaaatataaaagtatccctttttaatttaaaatttatccaaaaaaatgaatttttattaatataacaattcaattgtgtatgcatgataggatattcttaatgcttaatattatgaagtcatttcatctttattgaataatattatttttcacttagacttagtggtatgcataaaatcaaatttaatacagtctatagtaattaaaactatatatggagaagtttaataagatttcaaataccaaaaacaaatggcaatttctgagaaatgagtcacagatagcgacgacaagagccttgagaatgggaattggtgtggtggttttgctctcaatatagggatttgttcagcgcctttagccgagctgtggggggtctactatggtttgtacatggcctcagagcggcgggcttcaagagtggtgatcgaggtggattcagagctggttgtcgggttacttacgacggggattagtgaagctaatccgctgtccttcctggtgcgtttgtgccatggcttcatattaagggactggatagttcgtattgttcatgtttatagggaggctaatcgtcttgcggacggattggcgaactatgtcttttctttacctttaggttttcattcttttgagtgtgttcccgagcatgttcgggatatccttttagaagataccggtggaacatgttttcccgtcaggtgcgtttgactatgctttaattttggtttaaaaagtaggggagacaatccacgaaaaaaaaaaaaaaagagcttgagttaaaaa

SEQ ID NO: 18087 - DNA, 1538 bp, Arabidopsis thaliana
gtttctcaccaccatcatcgtgtcgtgcaggtaggcgactcttcgtttgaacatgcgaaggaaagtaatattttgaaaattttaaggtttcttcgttagtacactggtcattatagaaccctcaactcatgcaaagtttttcacctctttcttcaaatggcatatataacgatgagttggacaaactcttgaagatcgggtctataagagaagtgcaatattcagagtaggtagtcaacacgaatgtagttaaaaagaagaatggaaaagatagggtgtgcatcgacatcacgggcctaaataaggcatgccccaaggacagttttccacttccacttatacaccggctcgtggaatccaccgcggcgaatgagctactaacactcatagatgccttctcgggttataatcaaataatgatgaatcctgaggatcaagaaaaaaacatcattcatcacggacataggtatttattgttataaggtaatgctttttggtttaaaaaatgcaggagcaacttatcaatggttggtcaataagatgttccacaagcatcttggaaaaatgatgaagtctacatagctgatatgttggtctgtcgttgaaaaaagaagactattttaagcatctagaggagtgttttgaaattctcaatcaatatcaaatgaagctgaacccggcgaagtgtactttcggggtcccgtccggagaattccttgattatattgtgacaaaaaggggaattgaagccaatccgaaccaaatcaacgcatttctaaacatgccatctccaaaacacttcaaagaagcacaactattgattggtaggattgcaaatttgaatcgttttatctcaagatcaacagataagtctttaccgttttatcaaattctaaaaagaaacaaagaattccttgggatgagaaatgtgaagaagcttttgggtagcttaaagcgtacctaaccactccacctgtattgtccaaacctgaactggatgagaggctctatttttacgtttcaatgtcgaatcatgcagtaagtggagtcctaatctgggaggatcacaacgaacaaaagccgatttactacataagcaagtcaatgacagatccataaactagatacacaatgatggagaagctcacatttgcggtggtgacttcagcccgtaagctacgtctatattttcaatcccaccctatcgaagagttaactaaccagccacttcgaacaatacttcacagcccaagtcagtctgaacagttggtgaagtgggcagtggagctcactgaatataatataaagttcaaaagccaagtcagcatgaaggccaaggttttagctgatttcctaaccgaactaagtacttggtgcgccagaacaaccggagagtcagacttggaaattgcatgtagacggatcttcatcaagacaaggattcggagtgggaatcaagttggagtcacccacatcggaaattcttgaacagtcattcagtctactatttagtgcttctaataatgaggcagagtatg

SEQ ID NO: 18088 - DNA, 830 bp, Arabidopsis thaliana
gtgggatattcgcggagtccgaattggaaatggagcaccggctataacgcatcttcaatttgcagacgattcattattcttttgtcaagctaatgtgaggaactgtcaagctcttaaagatgtgtttgatgtttacgaatattattccgggcagaaaataaatgttcagaaatcattaatcacttttgggtctcgtgtatacggttccactcaaacacgactaaaaacacttctgaacattccaaatcaaggaggagggggtaaatatttgggtcttcccgaacaatttggtaggaaaaaaaaagaaatgttcaattatatcatagatcgtgttaaagaaagaactgcttcatggagtgcaaaattcctctcgccagccggaaaggagatattgctaaaatcagttgccttggcaatgcccgtctacgcgatgtcctgtttcaaacttcctcaaggtattgtctctgagatagagtctcttctgatgaatttctggtgggaaaaagcttcaaataaaagaggaataccatgggttgcttggaagagacttcaatattctaagaaggaaggagggctgggtttccgggatcttgcaaaatttaatgacgccctccttgcaaaacaagcatggcgaatcattcaatatcccaattctcttttcgcgcgggttatgaaggctcgatattttaaagataactcgataattgatgctaaaacaaggtctcaacaatcttacgggtggtcctctttgctttctggtattgcctcctcagaaaaggtcacggtatgtgattggcgatggtaagactatccgtttagggatagacaat

SEQ ID NO: 18089 - DNA, 775 bp, Arabidopsis thaliana
aacctctaactgcaccaattgtccactgcgctatgatcccagcagcaactgcaaacctgagctgtcgctccatcacatcctgatcctcaaacatctcaggacaagttgttagctttctcattatccctgcaacaacagcatcaccagaacctgtcctatcacaggtgaaaggagttataagcacatcttctgttccaatcacaacaccatcaaaagtaggagtatagtaatgaagccgaagtgttccatcagtcacaaccagtagcttcagcttgtcatgccacaatgacttgatttcctctggtgtgtaatggtaatagtctcttctgtttttcgtctgatcaaaatcctcagcgaagtactgtggtgtgtagtttcttctcctctcgtagtaatcttcatcaagtagaaactcaagctcttgctgtgaaacttcaatgatgtttgcttcattccatgctttcttgatcaacttcctagtctcattgcgcgatctccacagcggtaatgggagattcaagtcaaagaaaataagcccaccaaacttcttagaccattgtattgccgtaaaaagagttgattgcattgtaggagacgtcaacacttctgaattgaaatgaaaaatcctcgcctgcattagaagcaccagtaacaaacaaaaagcttaaaaaccaagcagagaagtgctctgtttcattatccaaatcttatcctttatgctcaaagacagagacttttgcataagaaaccaagctcgagctttcatgtcataaac

SEQ ID NO: 18090 - DNA, 1781 bp, Arabidopsis thaliana
acgagattgggagaaatgaaaacaagactaacccgagatgaataatgcgcgaggagtaaaaagcgctcgcgaattgcaggacgccacctgtcaaaggttggcaggatcgtatctttccgattcttgaagcatcggaagacatttccctttgtttccatcgctgtagaaataagggatgaaggatgcattactaagggctcaaaagatacggcaagtaaacaaaaaaaacggaagttctaacctgtgactgatttggtttgaggaacgagaacaacttttaacttgggggtagcatctcggggctcagattcttcctgttaaggagtcgcactcagatcggtttgctcacctccaggtcgagagaaaggagatatgataacaagagaaggaggggaacccatcgagcgtggtggggaagatgatttaggggaacgatcaatccgagctttcaatttgcccctcctaggggaagagttgctgcgggctggcctctctctctttttcgcatcaagtctgcaatcggttcgctgctcaacctatcccgggaagagggtcgaggagagtcacggcgaggagaacgatctcttcgaggtgagcgactgctacgactttcacggtgaggtgtaggtttgaaagcaccggcagatctcgccccttcagcgctgtcgtcatccactagtaaagttctgctgtactctttcttgtcgacagcagacataagaaacgacttgttcgcctcacaggcttccaccatcggtttggacaatgtcttgcaccgggaagcaacagccctgactgaagttcgttgaggtagaggaggaggcggtggaagttggtgaaactgtctgggtggactcattctgagcttacaattagcctctattaaacggtcgagagtgaatgagttccaaagggtctccccttcgataacaatcttgaagaattcgacgaattccgtagtcaagagagtcggagcaatgaaagctgcaaagcgaaaaaccgtaaattcaatcaggtaagtgaataataagcaaaaaagacatacatgacctaatttctattaggtttcgcagaccacttcgatgggagcacatcggaaaggtttccgattgaagcaggggttttcttaatcaaaaaccaaggatggtgccaattctcgtcctcgttcggaaggtgcgagatgagattcctgttagcattcgggtatgccagaaagtacccggttctctttgatgagcttctcatgttgaggagctctttcaattcatgaaccccgatgacaaatctggcctccgccgtgatacttatgattcccaggatagttcggagaagattgggggtcagctggggtaaggcaatctcgagagcttcaaggtaacgaaccaaagcttcaggaagcgggaaggtcagtccgcaacccttaaaataaatttcataaacacaaaagaatctaggacggtggtcttccgcggattctgtgggttcgggcatcttctattccgtcataatctcaggcgggatacggtagagatctttcagtcgcttgagggactgtaaggtgcaggtagattgataatggggaccggcgatgtcgttggggcgagtgcaaatctcgttggaagaaccaccttcatcgaaagatggggactcgtgtctctcattgtcaagattcatcggaaagaaagaaaaatctggtggttcaaggaaggaagaattacagagagaaaaggaagaggaactttgttctaaagggagataaagatcctcttcatccggagaag

SEQ ID NO: 18091 - DNA, 1167 bp, Arabidopsis thaliana
tataatcgtcccatgaggtgatggagtctggggtagagtcttctcccactggtgtaccttgtctcccaaatagaaggaaaatagtctgagtttaaacatgtcttcagtcacaccattgatcttggtaaggccacagagcctatcaaagctgtcaagatggtccaggggatcttccataggcaaaccattaaatttgtttgtttggatcatggagatgagaccattcttgatctcaaagttgttgttctgaactggtggaggcactatcccttgtatttggtgatgattctttggggcattaccaacaccaatgtttcttggttgagcaactataggtgggtcttgaacatcaaatggtctgttctgttgatcaatagcagctggatcaggtgcaaaaggagctggatccatagcagctgttgatccatagcagctggatccatagcaatttttcttggttgagcactataggtggggcacttgcatacacattgcatgttttggtgtgttttcaggtgcagaaggagcttaaaaggattatactcgacctctttactcgatctaggcagctacagaggaggctttagttcactcgatcctcttactcgatcaaggcagcctcagtggaagcagcagattgatctactcgcccctcctactcgatcctctactcgaccaagggtgacccactctacaagacttgttgatttatcaaagcgacttcggatcctcctcattccccactcaaccaaacatcggagcatacggataggagaggaagatgcatctactcgaccaattgatcactcggagcatagacacaaaggcgcaaactttgcagcatcctctttactcgatccccaagatcaagtatcggtctaaaccgcctcaagtctcttgtcttctagtgaatctatggtttcaacattttactataaacacatcactttgggatttgtccaaaggatctagcttttatcctttagttttctttctgtttatgaatcttcaaaacttaattactcttaatctattttgtttttgcatttagttgttttggtaaagttgtttagcttgtttagatctacattttgatatgatttgagtaatttctgggtttgtgttcttgaggatggattagattagggtaatctctaggttagttag

SEQ ID NO: 18092 - DNA, 515 bp, Arabidopsis thaliana
caagaatactgacagatgatgttatatatatgtagtacaaaaaggtcctcaatgccaagccagaaaatgtggagagggaagctgaaattgtagcacaaagtggccgtttaggggcagtaacaattgccacaaatatggcagggcgtgggacagacataattcttggtggaaacgcagagttcatggcacgtttgaagcttcgtgagatacttatgcccaggtatcatgcatgaagcattcaaagttatgaataatactttattatcgctaataaacattttgtccacataagaaagatcctttatccaccattgataaaattgctacaggttatgtactttgtgtaacaaagaaccttggagttcatgatttatttttagctgaagttttgttacgttttaaatgttaccacagagtggtaaagcctactgatggtgtttttgtatctgtgaagaaggccctcccaagagaacatggaaggtttggctttctagagtctctggttttggtaacat

SEQ ID NO: 18093 - DNA, 985 bp, Arabidopsis thaliana
caaaagcccaactcttctcactatgaacctccgcgacagtcaacaacttttcaaccttcaataaattttgcagttcatgaaacatagacttgcttttattaagaaagctcttacgatccaaaatatttgtttcaccattggaaatcgaaagagtccaagaaagagaaaacaacagttagaccaaacggtctggagaagaagctaacttatcatcaccgagagaccgctaaatctgaagcgaaacctgaccaccgatgttgattaaaccaccgatgtcagaaacatagtcggatgaagatgcaaacgaagccatctacagtggaagcaaagccagtctacaccgctgagaaagccggtgcaaccagacgacaaacccgcttcaagcggacaaaagtcaccagattaacacattagtgaaatcaaaattgataagcttcattctctctgaaagatgaaagagagagaagagatagaagagagagaagagagagaagccttttcttggcatccttccctaaagattttcattttgcgaacttagatggggtgacaaatagaagtcaccatttatgagttttatctatgcaaataccaaaagtgttaaattgaaaaaagactagttaccgaaagcttccatacacggtaatcgagacatcccttgcaaccatgccttcctgagccggtgagactcatgttcgccgcgtagggatctgccaaatctctgtaatcttcttcagttcttcgtaatcttctggcccatgttatcttcctctttaagtgcatcttccttgcaaaatcctaaacttttcccttcttttggttttcttctctgagggtcttctctgcgacggaagagtgaattgatactctacaagctctgttctgaatcataactccgacgaagatccgcctttgaacccgataaaagaagaattcaacattgtcttttccaaactccagagtagtcttcacgacacatcatttg

SEQ ID NO: 18094 - DNA, 1403 bp, Arabidopsis thaliana
ttactttgttggtgatgaagagtttctgccagtcaaagagaggtaacaaggacgttattgtaaaacctgtttttctttgtttttttccccttgctgcgactcactagagttctattacctactaatatcttgtcaaatatgttgtatgtgaagttcggttgatttgatcattagttcgttggggcttcactggacaaatgatcttcctggatccatgatacaggttttctcgttttcgttgctttttgttggtgtatgtgaattggtttgtcctatgagaaaatatttataatgtgttggttttggattgtaataactgcagtgcaagctagcactgaagccggatgcgttatttttagcagcaattcttggtggagaaaccttaaagtttgtcctctctttcatttcaaatcaatactcaatgtagagtctcttattccatatcatgtttctgattagcctttacgtattgaaattatttacaagggagctgagaatagcatgcactttggctcacatggagcgggaaggagggattagtcctcggctatcacctttggcacaggtgtgtgtgaatatcttagcaagatcaagttgatttctagtactgaggtgaaagaacatggcttctcttttctttttcaggttagggacgcagggaatctgttgaccagggcgggttttagtcttcctggtgttgatgttgatgaatatgtagttaaatacaagagaggtaaactgttccacttttttcctacttcatcgtttgcaacaacgtgtatcttccaagaattatttctgatttgccttctcgtttatatctttctactcagcgatggatcttatagagcatcttcgtgcgatgggtgaaaccaatgctcttctcgagagaaacaagattttgaatcgtgaaactgctgttgccacggcagccatatatgactccatgtttgccacagaggacggcactatacccgctacttttcaggtctgtccataatagttcagaactaactcaacagtgaaaaaaacccataacctagcttcattattcaagttgttttgctacaatccatgattaaaacaattttatgctaaatactacaagtgaaattaacaacatttgaggcctaaagtatatatcgtttggcattcttgtgtaggtgatttacatgacaggatggagagaacattcgtctcacccgcaggccaaacgaagaggttcagccaccgtatccttcacggatctccaaaagcaatttggcggacaatcttgatggaatgattgaagaagagaaacattcaataagcagagactttacaaatgacacttgagagagaaatcagtgacttaagctataaggtacttggaggaactcttgtagatttgtcggagtctttca

SEQ ID NO: 18095 - DNA, 882 bp, Arabidopsis thaliana
atctacgtaccgccatagacaaatttctccacgcggtttgatttttgcaggaaactgaacttttacactccaaaatgtcttatctgtttggccgatgatagagtttgctcgcttccagattttcaccattgcgaatttcgagtggagtacgcaatacattcatactcaagcttgtgagatttaacatctgaagcgaacctgaaatcagactgctaaacgcggatacaagtttgcagataaacgacaatcggattaaaccttcttcgcataaacgagagtaaacatgtgtttgatgtattcttttgcagagctcattcgctaagagttatatatgctttaacatcaaattttgcagagcttctctgtggtttggctttgcgcgagttcgatataaccaaagtaatttgagaaaagacgtttcgatcggatcaggtttcgccttaagctaacgacgtataatagaaaaaaactaggtttcgactttgatttgtacgatgaggaaaaaaaaaacagattcaacaagaaatttttggactaaacaagcatcatcaaagttttgtgaacctggactatgaattcgcaaaaagagtataatcgttgacaaaagacaatcaaagttagagaacaaacgaagatatagataagaacaaaccggtcgtgcgtatacgatcttaatttgacttccattcaaatttgctccttgaagagcctctttggctgcgactgcttcctccacatgtctgtagtatataaacgcaaagcctcgtgaagaatacaccgtgattctatcaatatcgccgtatcttccacacaactcggtcagatctgactctgtcgtctccggcgttaggctaccgacccagaagacttgtttgactggaa

SEQ ID NO: 18096 - DNA, 845 bp, Arabidopsis thaliana
catgcctgtcgggactcaaagatgcatcactatgaccgagtctaaaatagccacgctatcatctaaatctactcagggtccataacctcatgctaattaaagtggtcaactaagttttgtagtttgattagttttgtgaaacaatctactaggattagctgaagttgaaaagtcaaacatatggcaaagtaatagacgtataaaaagtgtggctcgtgaaacatatgaatggaattgatcaatgatcaaccatataagaaaaaacttggaaaacagcttaggccttacaaaccatgttttctttcgtacattcttatataacaaaatgttgacttttttattgtgtcactaacaaaatgttgaaaatcaatatttttcaagcaaacttcttagccaaagaaaaaatacaggcaccaagatctaacggccttgaaatcgtgaccatatgatcagaattctggatatgctccacgtggttaggagggttgttcttgatcatccagtgctgaaactctttcaccaataacgaaaatagccatatgaacctttttgtagaacaactccatggccttaggaatagcaagccccactcaaactatgtgccagaagaatcaccttctcatcctcacctagactctccattaggcccatcaagggcacaatagactccgcaaccaaccgtagagtctcaggccgttattgatcgattctggatgccgctaagttgaccgcagttacgttatggccttgagatttcaagaatggtatagtttatccaaaaaccgagctccatgaaccgacacaaaatgggcccggccatgttgcgggttgtggcatggcggaga

SEQ ID NO: 18097 - DNA, 802 bp, Arabidopsis thaliana
tagccgcagcctgtggttttgaaattggtatagatgaatcaagagtcttttattgagggattggcagaggagtttcggttgccaattactcatagggttactgaaaatgttgatttggaggatgtggagcaagcttcgttagatgtaaagatatcgtcgtcgaatgtcgggtttcgtcttcttcagaaaatgggttggaaaggaaaaggtcttggaaagcaagagcaaggtgtgtatgtgtgtgtagtcagaattcataaactggttaaatttagagttatgtttcatcttttgatattgtgtttatggtaaggtataacggagcctataaagtccggtataagagatcgaagactcggtttagggaaacaagaagaagatgattatttcactgcagaggaaaacatccagcggaagaaacttgatatcgagattgaggagactgaggaaatcgcaaagaaacgggaggtatgcgttcaaaacatatttggatatatccttgtcttttgacgggaatatcgtagaggggaaagaataaaaaactgcagtcttttattacctggttggtggctttctactgcccgcttcgtgcccattatgacaatccaggtcctagcagaacgtgagcagaagatccagagcgatgttaaagaaatccgtaaagtcttctattgtgaactatgcagcaaacagtatagaacggtgatggagtttgaaggtcacttgagctcatacgatcacaaccataagaagtgtgacaaatactctagttcccttatccttgttttatagcttattagtt

SEQ ID NO: 18098 - DNA, 833 bp, Arabidopsis thaliana columbia
tgtatattagaataacaacctgctttagtctccccctcaggtccagcaggtgtcagaccatagacgtccagcttgtctgtgtcttacgaactaggtttgtctttcattgatgttaagctaccaccagctgttgcgccatctggctgaggactagtagcctgatagacatatatgtagagaatttccacgttatatattttcatgtaaaacggtaaaagaggggggaaaacgtttttcactacgtatatccaaattgatacagaatgaacacacaccctgcttaaaagggactgctctgcatcttgtcccttcttagaagatcgccctttcagctcttcctcgcgacgttgtctttccattctgatggagtcaatacagtgcatcgtcagaaagagaaataattttcagtcatgaaccattgaaaataaaaacaaaaattgcaaagaaagacaagccaaaatacctcctttgcacaagacggataaaatgttgaggtggtacaaaagcgcgttccatatcaactagtgcaaccaccattttcttggcttcattcttgaaaccatcaagtgctgcacttgctatagctacaacctggttgatgattagtcagaaaggaataactgttaccgaaatgataaaatattactgaataaagcaccaaaaaatcattattacctctcgcttgaaaggaggatatctccaagtccaggtgtagcatttgcagaagctgaaactatgtcaacaagaactcggtgaacctaatcaaaagttaagaccatgttagctcaacacgtaaataagacagaagctggatgcatgagttttaaagtagg

SEQ ID NO: 18099 - DNA, 663 bp, Arabidopsis thaliana
tcagatccaatccaacggagtaatgaagaagaacatgccgttgggatgacgatttggagattacctggtggtggtttcgctgttggtaggtttaacgcgggagtgagagaaggtgagaggatattgccggtggtattgacggagatggatggtggtggacttggtagtaatgaaggaccgagaaggatatcttgggttagagctcatgagacaccggagatgagtaggaatggtggtcgttctggtaatggtggtagattgagaagagctgttcgtggaatggtttcgtttatgagaagagttagaccaagtcgtggctcttcgaattcgaatgttattgatttggatagtgatggtgaaactagagttatgaatcgatcaacttcgttgatcagaagatttttctgatgaaactaggtgagatttttttgtttgttgattcaacaatgtatatatatttatttagatgaacttatttggtacctctcttgttacatcaaatttatgtgaaacagaaaaaaaatgtcaaattcattattcttaaaacctttttaatggattctgagaaagtgaaagagagagagattgtgaaaattgatggtttcaattgccagatttgaattcatcttcatttttggtagtgatataggcttcgaatggtga

SEQ ID NO: 18100 - DNA, 1295 bp, Arabidopsis thaliana columbia
gttaaatcactaaaacacacatcaatagttccaacaaagcataagaaaataagtgcaacaagtttcaaaacaaataaccaatagtctgaaataaagcaaaaacaaagtcagaaaacaaagcaagataaggaggatgactagtcctcatgctctgagtcggaggtgggtgcgggagagcgacgacgacgacgagtgggagcaacacaaccgtaacgagaaagtgtagctatggcgttccagacgctcttgaaactatcaacgacgtactgctgaaagacctgtggctccatcgagatgggtggaggagaaggcaattgatatggaagagcggatgaggaagatccaactcttggacccccagcagggtcaatgaactcgtcctcggtctgtgtaggcgcagatcctgcagctgaacctctctgtcgcctggtgcgtggtgcggcatgcagaagagaaggatcgggatgaaagcctatctcctcatgctctcctgtaatctctgtaagtgcaggctgaggtaactgaatcatgtgctgacctgtatcatctctgaagcaccatagtaggttgcctttaagccaatgagagttctttaggtaagtctcatccatagtgaaacgcgtggtgttgacttctacgccctcaaagctgatgcaaaaatgctcgaatatgggagtgagaagactgccaactctctcagatttgtgtcctctacctgtaaagggcttgatcttaaaagaaaccaagtgatgagcgaacacaacaccaaagttgacattacggtcaacctgctcaaatccaaggctgtcaggaaataagtcatgaagagcgtgatagagcaataataactcagatagtctcatcttgccaggctccatcttgcacaacagtgtgctactaataagcctaaccaaatatcgcagaatagggtggcggatctctgagtgaactgcgtccttggaatcatagattccattaccaaacctgctccagaaaatctgagaatccttaaactgaccaggcagggaaactccagtgagatcatcgtcaaacccatatatgtcacacaaatctcgtagtggtaaactgtatctaacaccgcgaatgaagaagataagagttccttcctgagcgttgcgtttcctgtcatgcaaataagaaaccctaacagaggccatgaattgtttaatcagctcaggatacaaatcatactgcctacaacagatggttcccaaacctatgtcatctagcagtcctaaaactgatttctctatctacaaacactgcatcaaacc

SEQ ID NO: 18101 - DNA, 1442 bp, Arabidopsis thaliana
cacaaattaatgcaaggatcttccagaaacacaagatgatgttcataaagtgtatcaaagagttagaagagaagatacctttggttgatactcccaaggaagtaatcaaagagttagaagggcagatttctttattgaagaaggaaatttagatgctgagttgttgagtgggttggaaaatcctattccgtactccattccgactcgccacctaggagagcccgagaagcttcttatgatagaaggaggacctagcttagaggttgagactaaggggaaccatttggatgttggtcctattgctagagagcttatggagctcaggaaacagtatggagctcaaggcgagaccatggaaaagttggacctcaagatggaggagctgaactacgctatcctggagcttaaggagatgattaaaggttatccaggtcctgagatcgatgaatactttgaggaacccgatcttggagaagaagactatagtactgatgagaaagaggcttacttcgaggaaagatcaaatgagtactccacactccagctatcaagagaaaatgcggagtatgattcagactttgaggattcaacaagtgaggatgaggacttctcagttcctctcctcgatctcttctctacctaaacattgtgagagtcaagcttagtgactttaaacaagctcacttgggaggaagtcccatgtctatccttgtatatattgctttcttgttatttttgatgtttttgtttaagtatttcagggaaaaagacttctggagaatttcaggccacactcgaccgtactattcggctacaggccgagtgtgggtttcaattgaccaaaggcccaagactgaatagtactcgccccacaacactcggcccaaagtcgagtatggacctcaatgttcaaaggcccaacaagatgcagcactcggcccgaagccgagtcagaaaaagaagcccatcaggcccaacactgtactcgacacgcgcgtcgagtatgtcggccgagttcacacgtgcgaggtcaacacaattcaaattcgaatttgaattcgaatttgctgggccccaccaatcaaatcctgctccccaaagcccttcaaagattctgctgcaaatagtgagacatgtccccttgaccaaatgaagggtgaggatctaaggtgtttggagggctaggatcaaatcttcttgtctataaaaccagacttaacaagctaagtcactcacactctctcaaaaatttcgaattttactccttctctccaaacgtttcaagttcttgctctcacttctctagttttctcagaaattttgccaaaatctcttgttacaaaccttttcaaagcctctctgacactctttgttcattttaaacatcaatttctcttctactttgacctacctttggctattttgtggtgactacctgtagt

SEQ ID NO: 18102 - DNA, 1952 bp, Arabidopsis thaliana
tttaagtcattttttgaaacccaaaagttatggtttattaattctgaattgttttattagataaaaaatgtttagagtgagtctctcggttgcgacccgatcgtattcactccttgaccagcgtttaggaacgagctgggataccggtgttaaaagtataaccgggtttctgaagatgaaaattccttatcagaaataatctgataagttttcacctcgtatttgtatagcgcgctgtagccgaataggcgtaatggatactccgagccgtcgctcattgtattagacgagtaaaaagttgaatttttaatttttgatagtaaaaatgggagtatgaatatacggagccacgtactgaactcgtccgaagacgagctgcctacgtacccttttcagggatcaagccacctcgtagttcaagtttagtcacctcggatttagttgtagtatttccttgggtgcattgcgttccatgatcttggaacggctttaccgtttaagtcagcgagctcatacactccgggtcggatgacttttgacattaagtatggtccttccagttcgtcccgagttttccagcgttcggttcggcagtgttctggtaaacttttcggaggacccgatttccttcgtggaatcttcgttgccgaacatttgaattgtaatgacgagccgtttcattctgataattttgtattcgaaccagggacgaatctcttcgttcgtcaatcagatcaagttcgtcgaggagcctttgagagttatcaggagtgttctccggggataggcttcgtcgtaggcttggaactatcatctcggccggaattatgcactgtcccgtagactaaggcgaaaggggtttctcctgtggctcggcgaggagttgtcggatgcgacaaaagcacgccttcgagttcgtcggaccacgagccattgttagcatcgagccgtttctttaagccgtcgaggagcgttttgtttgcggcctcggcttggccgttcccttggggatatcgtggtgttgactttgctaagtcgaatcccccatttatcacaaaagccttggaaacgggtcgatataaatttggagccgttatccgtaacaatttcatacggtatcccgtggcgacataagatatgtttccacacgaagttttcgacttgagcgtcctttatgctggcgtaagattcggcttctatccatttagagatatagtcggtcaggacgaggactaactttttttgcttcgagggatgcataggtccaattatatccattgaccatcgcatgaagggatatggcgaggtgatacaagactagagctcggccagttgatggattgttggcgcgtgcctttgacacttttcacatcgttttaaaattttttcgcaatccttgatcatcgtcggccagaagaatctgtgtatgtcagagcgtttttgatagcctgaagttgagagcgttttagtgtatgtcctctttgtttgtcctctgaggtgctttttatagagtttgagaatatcacctatcgcgatattctcggaagatttctttttatctttatcttgttgaaggagattgcccttatcttccgaagattctaggactttctgtatccggtgatatcttccaagattatctcttccggggtttttggagatgatgtgttttaaacttataccggctaagtcttttgaagttttcctcgtctaacccgaaactcttccgagccgtgattaagctggcctcgggtcgtgctcgggatgctcggtccgcggtattcgaggacagattcccgaggtgtcttggagcccgcctcgggacgatttgccgggttttatgcccgaggcgtttcgaggtcgggtcgggggaccatttcaagagactgctccgaagcgttctcgacatcgcctcagtgtggattcttgacgagatctccgaggcgttttgt

SEQ ID NO: 18103 - DNA, 1462 bp, Arabidopsis thaliana
tgacagaagtggagcaaacgaaaagcgtcatacgcaccagattgctgttctctctctctgtctctatgtctgtctctgcctctctgtatgtctgtctctctctgtctgtatgtctgtgtatgtctgtctctgtctgcctctgtctctgcctctgtctctgtctctgtctctctctctctctctctctctctctctctctctctctcgctgttccgtttactgattcggaaacccgtgaccgtttggatgagttgtttaaggttaggggaatacctaacctagtgatggttgatgatcatggtaaacttgtgaatgagaatggtgttggggtcatacgaagctatggagctgatgcttatcctttcacaccagagaaaatgaaggagatcaaagaggatgaagatagagctcggagaggacagaccttaagatctgtcttggtgactccttcacgagactttgtgatttcgcctgacggaaacaaggtgcacattaatagcttgtgagatcagattctttttcgtcaataggaagattatatctatacaagactcttgcattagttagttattacggacctgtttctcttttgttgacttaatgagaccgatcaattgcatattcattaggtacccgtatcagagcttgagggaaaaaccattggccttctcttctctgtggcctcttacaggaaatgcacagagcttactccaaagcttgttgagttttatacgaagctgaaggagaataaggaggattttgagattgtgttgatatctcttgaagatgatgaggagtcttttaatcaagacttcaagaccaagccatggctagcattgccgttcaacgacaaaagtggatcaaaattggctcggcatttcatgctgtcaacactaccgacactggtcattctcggccctgatggaaaaacccgtcactcgaatgtcgctgaagctattgatgactatggagttcttgcgtatcctttcactccagagaagtttcaagaactcaaggagctagaaaaggcaaaggtagaggctcaaacgctcgagtcacttcttgtctcaggtgatctcaactacgttctcggaaaagatggggcaaaggtatagctctcgataccctcttcattttctaaacactgttcttcaaggctgatctgaaccaacctgtaaaaatttggctttctttgttaggtgcttgtttcggatctggtggggaagactattcttatgtacttctcagctcactggtgtcctccttgtcgcgcttttacaccaaagcttgttgaagtatacaagcagataaaggagcggaatgaagcgtttgaattgatcttcatctccagtgaccgtgaccaggaatcattcgatgagtactattcgcaaatgccgtggctggctcttccatttggtgacctaggaaagcacccttggcaaaaacctttaaggttggtggg

SEQ ID NO: 18104 - DNA, 1941 bp, Arabidopsis thaliana
aggaaccgacttgcttacatggaaaaaagactattgcgggctcgtgctggttttgaaaggcaatcggcccgcacattgtaaatacgagaaaagaacttaatactaaaagaagggaaaaaacagacaagggaactaaaagtcgccaactcagcaacaaaggtaggccactccgaagattttcaagaagagagatagaatcagcactgtcagatgcgaaagagcaatccgagacacctaaggagatcatgcattccattgcccacaacaaggaatctacttcagcgtgtagtggtgatagactcttccgtgcactcttaaggcccaaaagtaggacgatgtcttggtctaccaagacccatccatgtccactcaaggtgtcctttagatgccaagatgcgtcaaactggcaaacattccgagtagggggaagattagcagggaccacctgaggaggagggtactccgtagccacctcctttgaatttgcttgtttccaaacatttgcttcttgaattgcaaaatccagaataacttgcggggattcaataacgttttcgaaaataaaccggttacgactcttccaaatataccaaagtatccatggaaagatctccataatatcttctgctatatcaaattcttttcctcgcgagagtaagaaatcaaaattatagaagagagaattccggggaaaaatgtactccgaagacgggataggggacaaggcccagatttgtctcgaaggcggacagagaaaaagaagatggtttatagactcttcctctgcaccacatcgagggcaaactttttcggtaccaatgtgacgggagaaaagtctttggtttgtcgctagacagcccgaaaggcattgccactcgaaatgtttaaatttacgcgtagttttaattttccatacttgtgcctgaagcgccgaaacactaggtccctgaaaagggaggtcacaagtaggacgagagagatctctcgcggcccaataaccggattttacagtataattcccagatttggtaaatgaccagctgaaatcatcacttttgtaagtacgactcggccgaattcctaaaatcaaaggaatatcggaagggtcaaccaactcttgaagtctacctaatttccattgctttgtcacgggatcaattaaatcattaacatagaggtgtgtgtcccttatgttaagaatactttttgcaggccttggtggaaaagaagggatccaagggtcttcccacactcgggttagcattccagatcctattgttctccttagacccgagagaaggagtggtttagcagccataatgcttctccatccaaacgaaggacgattagcctttccaatttgaataggatcactatacctaaagtaccttcccctcaacaccctgcttaggagagaatttggaaatctaattaggcgccaaagttgctttgctagtaacacaagattaaattcctccaacgttctaaacccgagaccaccatcagagaatggtgtacaaagcttgtcccaagctatccaatgaataccattactttcctcccttgtcttccaccagaaattagccacaacactacttagttttgagcggatagctttggggagaaggaaacacgacataacatatgtcggaagagcctgcgccacagacttgataagtatctctttgcctccttttagacaagaatttggacgtccatccatttattcttttttgaagtctatctcttacaaaggaaaaaacttgagtcttcgagccatgaatttgttttgggagtcccaaataagatcccatacccccatccttatgaatcccaagagatactttaatggtatttctgatagagttatcacctcatgaccgaacattaccgaggacttgtcgggattcaactgttgtcctgaagcctccccatataggc

SEQ ID NO: 18105 - DNA, 1452 bp, Arabidopsis thaliana
acttatccacggctggtaacaagatgttcagtgagcatgtcggaaaacaatggaagtctacatcgatgatatgctgattaagtcgctgaaaaaggaagaccacgtaaaacatctggaagagtgtttcgcgattctcaaccaatatcaaatgaagttgaatccggcgaagtgtacgtttggagtcccatctggggaatttctcggctacattgtcacgaaaagaggaattgaggcaaacccgaaccaaatcaacgctttcctcaacatgccgtctccaaagaatttcaaagaagtacaacgattaaccggtcggattgcagcattgaatcgttttatttcaaggtcgaccgataaatctttacccttttatcaaatcttaaagggtaacaaggaatttctttgggatgaaaagtgtgaggaagcattcggacagctaaaagcgtatctgacttcgccgcccgtactgttcaaaccagagttagacgaaaaactttatctatacgtctcagtttctaatcatgcagtcagcggagtcttaatccgggaagaccggggggaacaaaaaccaatttattacataagtaagtttatgacggaccctgaaaccagatacacaatgatggagaagcttgcacttgcagtagtaatctcagcttgaaaacttcgtccatattttcaatcccatccaatcgaagtataatcaaatcggccacttcggactattctccatagcccgaaccagtccggtaggttagcaaaatgggcggtggagttgagtgaatacgacatagagtacaagaaccgagtcgccatgaaagctcaggtcctagccgattttttaacagaattatcggtacccggagagaaggaacaacctcaaaattagacttgaagctacatgttgatggatcatcatcaaaaaacgcatccggagtgggaatcaaattaggaagtccttgaacagtcatttcgcttcttattcaactcattcaataatgaagcagagtacgaagcattaattgttggacttaggttggcacagggagttggggctgatgaagtggtcgcctactgtgattcgcaactagttgttaaccaattcaatggtgattatgaagcaaaagattcacgaatggaagcataccttcatgtggttaaagacttggctaaaaattttaggaaattcgaactcattcgcataccacgaggacaaaacactaccgcagatgcgctcgcagccctggcatcaacatccgatcccgaagtcaatagcatcattccggtagagtgtatttcggaaaggagcattaaggaagaaaaggaggcgttcgtagtcacaagatcccgagctgcagcccgagatcgtggcgacactgctgttgaattacacctgttaaaagacgaaagcaaaggaagcaaccgtacctaagccgctgtgcaggaaaatattgg

SEQ ID NO: 18106 - DNA, 556 bp, Arabidopsis thaliana columbia
  unsure (1)..(556): unsure at all n locations
nnnnnnnnnnnnnnnnnnnnctaaagcttcgccgtcacctgacctttggcagttcgcacaacggctggcgtggtgtgctggatctgcgtcacggcagaaagttcatacacgcgcccgccgttgagggangtggcgtccgcttcgccaatggcaaggtttagcggatgaatatgcccaccgctgtgatccagcagcgcaccggtatagcgatcgctggctacttcacggcgaatggcgttggcgtccagcaattccagctgtttattgccgtagcgttcccagttctctttctgctcttcaagtgtggcgagctgtttatcattcatcgccacaaacaggccgccggggcgttagtcgcagtcaatctgataacgtttgatacgttcgcggatgatctcaccaccttcgaacatcatgctgccgagcatacgggcggtgtccatgccgtagcttttttcgatcacgtcgatgtcgcggctgtaggagttcaaagctgtcgccattgcgcccgcttgcccaaagccgatgcgtgaggcttcgagaacactacgtaaag

SEQ ID NO: 18107 - DNA, 2078 bp, Arabidopsis thaliana
aaataagcacaatcttttttcaaaaacgtgacttcattcatgatcaaagttataaagaataaagatgattatacatgctaactccaaaaatagggagaaatggtacctgtaaatttccatcaaattgttagtgtatgtgtttcagtatttggtcgtttcatctacgcacgatatgctatcaaagttagaaaacgatttcaggatgcataatttattttagaaataattcctaagatagaacacaattatatgtttatttctagaatagaacacaattggaggttttttacagcctcaaccaaccttaatcctcctgcccagttaatggactgtcttatctggcttttatctccctcaagggataaaaatatttgtctcattatcaggcttgcctttcaggcttgtgtttatgcaatttggagagaaagaaaccaacgtctccactccggcgtctctcgctctactgagtctatcttgaaggacatccagctcaccattcgcgctcgtctggatcctttgtctcgcagcacggcgcatctccctaacgctctgtccttgctaggaacttggttttctcttttctagttcagggatgtttgttttggttttccagtgttgcaggtttcgtcttcccttttgtttcttgcaggagcaggtttgttctcctgtcttgggcctgtggtttttatttgggcttttgtcattatatgtttttagttgaatggaaaattatgaattaaaaaaaaaaaaaaaaaaagaaacagaatacattttttttttattactcacatgttttcagtagttgtgtaattacaattaacattcctgattagttataattaattattattatttaatacgttttaactaaaattaaatgaaaaaacagtgattatacatgtcatcaatccatgtcattaatataatccacgtcattaatcaactccaaaatgcacaaacgtttcggtttcttactgttcatcggcggaaaaaaaaactctctctttctttctctctcgatagggaacgaactcttcaccctattccgtcgcagttttcgctgttctcgtctgttctgaccgaaaatcatacgccggagtctaatttctggtttcgcgaagtcacatccgacatctggagtcgcatttgtggtttctggctaagttccggtaagtatgattccaaactttatttcgaattttccgacaagaatccgacatctaagttcaatcgcaagtgattcccgtcactgaaatcgttttccgttgcttaacgatggtttttaaggtcgtcgttgattgacatatggtggctgatttgttagatctatttgatttgacggctgagttactgtttgtttgctgactgatttatgatttatcaattcatctgtgtctgagtttgttttatgctgtgattgagttatggtttaaccttacatcgatggctgagtttctgttatatgacggctgagtttgtttatgttatggctgagtttctgttatgatatggttgagtttgtttatgttttgactgagttgttgttatgttatggtttgactgagtttctgttaatatatagctgagttagatttatgttatggctgagttatgttatgtgtggctgagataggtttatgttatgactgagttatgttatctatggctgagttaggtttatgttttgcctgagttatggtatttgtagatgagtttgttttatgttatggctgagttattgaatgcttacggctgatttatggttatacagatgtctgaagaccaagcaaggattaccctccaagactttacccagaggaggattctaatctggagagtaaaggcattaatcacaacataaagctgggagatttccctgcaattagagaatcaataggaaaagatatatgggaagaactgaaagagacaccgcttggattaattgctaagcttgttgatagtcattttgtatggtctggtaagactgtacattatctactatgcagacagctgagaatactgaagaaggagctttgatgtatcgtggctggtcaacccatccagtttggattgaacga

SEQ ID NO: 18108 - DNA, 524 bp, Arabidopsis thaliana columbia
cttcatccttggtacccatactcgaagatatctgctcgcgaagttgcttcaactgctttatttcacgcatgaaacctttttcttcattcagagataaagttgtgtgctgcatcgtatgttccatattacgcacctgattggaggcagagaaataagatagattagcataatcaaattagacaagctaaaaacttgaacaaaacttagctggaaatgtgatcattgggagtctcacccttgaatcaatatcatcaacagacgcagcacttttaacccggctaatcatagactgaagggcctcaatttcctgccgttttgaatgcattgcttttcttgcagatctctcttctgccatgaccggcttgtaactgatatcatagtccttacatattgcctagaaataacaatttcaaaaaatgtcagaggcaaatttagaacaaagatgttttagcatatgaaaatctcaaaagcgtttcttacgcgtatcttctggatatcgctctaagagcatccgattttgtgtt

SEQ ID NO: 18109 - DNA, 434 bp, Arabidopsis thaliana columbia
agccggagtcggcagtggagctacaacaacaacaggatccagccggagccggtgacggaactggagctggaaccgagttggatccggtgctggagtcggggctggagcaggagccagtgctagatccagacaatccagcgtcgtcctgacggagaccattgagtctagttgcaacaaaagctggagctgaagttggagcaggagtaggaacagcggaagacaaagctgaagcttgacaatccagggtcttcctctctgtgactgagttcctcctgcttctctttctccttggaacatcatcaaatattctccggcatctctcacgatccattctccgcgtacacctagctgactctgacaaaagaaagtgttgttttctcacaagggacagataataagaaatagattgactagggtgaatgagagaggagatt

SEQ ID NO: 18110 - DNA, 1722 bp, Arabidopsis thaliana
agacatatatgtaaaaacagattctcaattctcatcctagagagatggtcagctacaccgttttcaattcccttcttattaactatcttcatgtcaaacttttggagcaataagatctatctcaacagcctaggtttggtatccttcttcgcatatatatgcctcaaagtagcatgatcagtgtagactgtcaccttagaacctactaggtagcttctaaatttctcgaatgcaaataccatagctagcagttctttctctgtagtggcataccttacttgtgcatcatccatcattctgctcgcgtagtagatcacatgtagctttctgtcaatccggtggcccaaaactgctcctattgcataatttgaagcatcgcgcatgatctcaagcgggaagtcccagtttggagcttggactattggggcagtgaccaaagcttccttgatcatcttaaggctgtcaaacattcttcatcaaatgcaaactcagtttccttgcagagcagtctggtgagcggtctggccaacttgaagaaatttttgatgaatcttctgtaaaatcctacatgcccaaggaaactccttatgtccttgacagtttttggcggctgtaactgcatcatcacatcaaccttagccttatcaacctctattccctcttctgtaattgtgtgccccaaaacgatgccttctctaaccatgaaatgatattgctcccagttcaaaaccatgtttgtctcttcacatcttttgagtaccctgcacaagttcaacaaatacgaggagaaggaagaggcatacacagaaaaatcatccatgaatacctccaccatctcctctatcaaatccaggaaaatggaagtcatacaccgctgaaaagtagcaggtgcattacagagaccgaaaggcatacgcttgtaagcaaaggtcccataaggacaagtaaaagtagttttctcttggtcatttgggtgaatagggatttgaaaaaatctgctatagccatccaagaagcaatagtaaggatggtttgctaatctttctagcatctgatcaatgaagggcaatgggaaatggtcttttctagaggcagcatttaacttcctataatcaatacacatcctatgtctagttatagtcctagtgggtatcagttcatctttataatttttaataactggcatacctccttttttaggagcgcagtgaactggagataccgaagtgctatcagagatagggtaagtatctcctttttcacaacctctttcaagtttgggtttaatctcctttgaggtttaatgctagagtaggattcattttcaagatggattatatgggtgcataaggtgggtgaaatccccttaatatcatctaacgagtatcctatagctctcctatacttcttgagctcagttatcagcaggtttacttgatcagtagttagctcgtcattcactatgacaggataagtagagtttagtccaagaaaaacgtaccttagcccttttggtagcgttttcaaatctactttgggtgccttgagttcagaccagtcatcggatactaagttggcttcagaggaggggttgtgatcgagtagttcggtcgagtacactgaatggtctattggtcgagtgatgtggtcgagtatattgataagtgtgtattttacatgttttgagcatccatttgtcatcaatttagcatcatatcatcg

SEQ ID NO: 18111 - DNA, 549 bp, Arabidopsis thaliana columbia
actagtcaaagtagttacaagtccttctatctcaggaacaacaattttatcttccgaattcttgaagatagtatcaatccctttgagaatttgcctcgtcagcggcgaaaactgagaagccataagcccgcaaagttctgaaaaaactctcgaactaactttggcagatagaaatggaattgtagcactgaggacatttagcacatgagcagcctctgcattctcggatttcaacgtcgagtcaaccttagaaccttcctcaatcttcgtcgagcttaagtcagataagacaggcttatattctttaagtaaagcatatactgtattactagcttccttgataacagtagatgatcggagagaaccaaataacttctctagacactcttgagcacatcttctaacctaacagaagcaaaaacacaaaaaccacgattccttgttactataatataatacttcttcactaaaatcaaagaaatgggaaactaccttgggacgtttatcaatggcgaatttaagaagtaaagcaaaaccaatttgaagaga

SEQ ID NO: 18112 - DNA, 535 bp, Arabidopsis thaliana columbia
ccgtccactatcttctcccttatttgttccggtttcgacaaaagatcttccttttgcatctctatctctttttctttcttcacaatttcttctgaaacatcttctgttacaagatactctacttgaggacacgcagccacctacatgtcaggtcaaattatattctcagttatagcaaaacgaagaaaatgtttcagctagaaacttggagttacctgcatcgccagatcatcaacaagttccttgaaaatgtcgccacgtgagacaaaatcagtctcacaattaacctccaagaggacaccgattctgctgtcgtggatataagcaccaattcttccctcggatgtggctctgcttgctttcttatctgcgctcgctagtcccttcttgcggaggtactcttgagctttgaccatatcgccctcactctctgaaagagcattcttgcagtccatcattcctgcccctgtttcttctctcagctgcttcactagagctggtgaaatgcctgttacatttttgtgttaggagatgg

SEQ ID NO: 18113 - DNA, 630 bp, Arabidopsis thaliana columbia
  unsure (1)..(630): unsure at all n locations
nnnnnnnnnnnnnnnnnnnnnnctaaaggtccgtacaaaaaaatctacttcaactggaaaagcggcaagtcagaaaaatgcatcttctgttacccacgaattgagtccggtcaaccgaccgtgtgctcagaaacctgcgtgggtcgcatccggtatctgggcgtgctgctttacgacgccgaccgcatcgaggaagcggcgagcaccgagcgcgaagttgacctctatgaacgccagtgcgaagtgttcctcgatccacacgatccctcagtgatcgaggaagccctgaaacaaggtattccacaaaatgtgattgacgctgcccagcgttcgccagtctacaaaatggcgatggactggaaactggcactaccgttgcaccctgaataccgcaccctgccgatggtctggtacgttcctccgctgtcaccgattcagtcctacgcagatgcgggcggtttgccgaaaagcgaaggcgtgctgcccgccatcgaaagcctgcgtattccggtgcaatatctcgccaatatgttgagtgccggcgataccggtccggtactgcgggcgctgaaacggatgatggcgatgcgcgactatatgcgttcacaaaccgtggaaggcgttactgat

SEQ ID NO: 18114 - DNA, 586 bp, Arabidopsis thaliana
ctaagaaaatagcgacaattcatcagcttttcctttcccatccttcattaccttaacttactcgagattcatcttccagctgaaattgtgaaacttcgtttctgggtttttatcagaaaacactctgtgacttattgtgtggtgatcgaggaaagaaaaaagatggttggtggtggaaacaggagagatgagggatcgatgccgattcagaacaccaacttgtttgctgctttggatacttcgaggaagaagaagaagtctgataaggctggtaagagcaaagcttcctctaagagagaagattcacagaaggagcctgagccacaggttttctgggcacctacgcctctcaaagcaaaggcttgggctgatatcgatagcgatgatgaagatgatgattattacgctaccactgctccacctcagtccctgtggagcacttctgaagcctcccattcagatgctaaagacgttcccgctgaggtcacaagtccaaatctttcatatatatgttgattttgggttcatcatcatagctttatgcatttcacatgttgaaaattgtaacactggtttaatatgtctc

SEQ ID NO: 18115 - DNA, 615 bp, Arabidopsis thaliana
gtccacctctgtctagctgtcatcttatgacctaaagatgacatcattgggtctgcatatagtcctcccattctccctcctgttaccaacaacagacaaatgagcagagttgttaaaagttaaactaaataaaaaaactgaaactttatatctcaagaacacatcatcaagctaaaaacacctattttggtgggaaattctcgaagctcaattgaaagattcaaaggagtgattctagaattcctcaagaaccattattttccttattcttagctcaaaaatccacgaaaaggattggtctttgaatcagatttaagccaacaaatgcttaaaaggcagagaattttcaattacccatacaccaaagtgaagaagaatcactaaaaaatcaattaaaccacacaaaaattctgaatttttttaaaaatttcaaaaggagtcctttttttatctttagatgaacagagaagaagaaactaaatgatagaagaaaggatagaaacctgcaagatcttgttgagcagtgagagttttatgcatctcaacaagacgctcacaaatggtgccgtaaatagcaatctgtttcgtgagagtttcatactgctcatcggtcat

SEQ ID NO: 18116 - DNA, 453 bp, Arabidopsis thaliana
tataaatacataattaatcatgtgattctagtattacataatttcttcaactcaaacaaaaactattcttttcatgttcaattaaaaatccatggtttttaaataagtcatttgtgactgaaaaatatgactaaaacatgttttatcttatattgcgataatgattatttttccattatcttttcagatctgatcatcgttgtaatgaaaaaaatatatttcacatgcttcttgtttttactatatgatatcttctaacgcaaggcaacatgattgatgtagtcagtaccatcaagagactctcgataatcttcatcaagctatgcttaacactgggattctctgtgccgtcatgctcgacaccaaggttcgattacatgacttccatttttatagtttatgttgttttgtttcaatttcatctcctttgacttagattcgactgtgatttgg

SEQ ID NO: 18117 - DNA, 773 bp, Arabidopsis thaliana
cacttttttgacaatctcttttgcgttatatactcaggtgaaagccctttatgtcaagaatattccagagaatacctcaacagagcagctaaaggaactctttcagaggcatggagaagtgaccaaaatcgttacacctcctggaaagggtggaaaacgtgattttgggtttgtccactatgctgaaagatctagtgcattgaaggctgtcaaagataccgagagatatgaagtcaatggtaagtttttttagtcatctagaagacagctattgagtattatgaacgttatgctatcaatttgtctctaatggcgtatgttttttcgtctcaagagatgttattgagtaacacattccacaaacttgcaaactacaggtcaaccactagaagttgtgcttgctaaaccccaggctgaaaggaagcatgacccttcttcttattcttacggggctgcacctactcctgccccctttgtgcatcccacgtttggtggttttgctgcggctccttacggtgctatgggtgccggtttgggtattgccggtagttttagtcaggtatatatgtttctaagaaagagctgtttgtcatccttgactagtcttatcagccattgttttgtgtaacgtttggttttaattttgcattgagcagccaatgatctatggtagaggagcaatgccaacagggatgcgaatggttccaatgcttcttcccgatggccgagttggcctatgttctgtaagtcgatggttcttgtcaacaaatttg

SEQ ID NO: 18118 - DNA, 1613 bp, Arabidopsis thaliana
ctggtctattcggacggatctgttaagaaacagacagcatcgacttcagcagcgataactctgagcagagatatccgatggagttacggttagattccctggaacgctgatctccggggcaatccgtggaatggttatacgtcatctggttcattgtatcttgacgggaatccccccgcaagtagacggatctgattgtcttggcttgatgagcgtacatcgaatacttggatgaatgatatgcgaagagagttctttgtcgttccccacagacggcgccaattgttgaaccaaggattcacacaatagatttgtttagagagggaaaacaaatctagtaatttctcttcattaggtattctatccaagactcgattacaaaagatgttctaatctcttatgaaatacattagggttttgctcaagaacagaaaaagagttagggttttaaaaaggtatagctgcatccatgatggattgcctacgtaccctgtgaagggatcaagccattcgtagttctcaataggtataaagttatgtgttcttgtgagtatccaaagatccccctcttgtgaagtccctgaggcactttatataggatccttaaaccgcccccttagcgatattcttcggaagattcttatttatccttaggtcggttctagaggataatcgtcctaaggatattctccttattcttcggaggttttggggagatttcctgatttcaacattatcttcaaagattctccttaagtctttgcctcgcgtgttcttcacggctcggtggtcgtttgagaggtggcttcggggcaaacggtatgtaccggctcggggcgcgcttgatgactgtccattaagctcagttggctgtctcccgagccgatatagatgtttcccgcagcgttctcgcgattggctcgggctgtgttcatatgattaacacccgagccattttacaaactctcttcgggacggtcgatcgaataaggtcccgaggtgctttgttctaggctaggggccaatcatatgtttaaccatgaggtgattgttattcttagactgtttggctcggtcttgcttgtgggggaatcgaccccaacagttagccccccagctcgttggttaagagttaatgccacgagcttcatgaatggtgtgaccgagccagctgctttcgcatctaaactgactaatccgtatcttttgaaagtaaggcttgttttttcttggtgctacgagattctgttcttgacgggtgttgctatctcgaactcaaaatgttagctgttgacaagttgtgagctaggaaagctgctaggagacttgttgaagaactccaagctgttgacgagctgttaggcgggcaatagcaagctaggaaggctgccgacgagctgttagctgggcgaactacgagtcagagaaactgcagacggactgtgagctaggaaaagtgcagactaggtgctagctagacgaactgcgagctaggaaagctacagacgaacaaggagctaagaaagctgcagacgagctgttagctaggcgaagtgcacacgagctgctagctaggaaagctacagacagcttgatagtctccaagagctcac

SEQ ID NO: 18119 - DNA, 1667 bp, Arabidopsis thaliana columbia
actcttgagttagtttgttggtctaagtacaaatggcttattattttccgttttgtgaaaataatgtataatcctgtataaaataaagtttcgagtaattttatatgacttagcgaatgaatacacaagctaaatatattagtatattacccttcgttcgttgatatattggcaattttgagggaaacaaataaatgacgagactatttaatggccggatacgttttgaaatgttacccaagttactttctcgacattttaggcggatgatccattgactaattatcctcttaattattcgaacaataaaaaaaactacactatccaaaacgtgtggtaagaagatatttatccacaatgttccgtaaatatctcatttatttacattttgaaacctatcatcaaactaagtaaccaaccctgaaatatttagtcaattatcttacaaaagaaactcaacaaatcccctatcattgtgacaaaaacccttgatttcactctctatatatacttaatgatcttcctaaaacacagtcacaacgaaataagcatggcaaaagcaatcgctttaactgtctgcatgcccttattcatggacattaatatctctaaccctagcaacagattatccactattcacaaagtctcgatggatcgtaaacaacaagggccaccgcgtgaagctacgttgcgcgaactggccttcgcacctcaagccagtggtagcagaggtgctgagcagccagccaatggattcaatatcgaaaaagataaaagacatgggattcaattgtgttaggctcacttggccacttgaattaatgattaatgacactttagcctttaatgttaccgtgaaacaatcatttgagagatatggattggatcatgagcttcaagggatttacactcacaatccatacattgtcaatactcctctcatcaatgtctttcaggtataaatacataattaatcatgtgattctagtattacataatttcttcaactcaaacaaaaactattcttttcatgttcaattaaaaatccatggtttttaaataagtcatttgtgactgaaaaatatgactaaaacatgttttatcttatattgcaataatgattatttttccatttcttttcagatctgatcatcgttgtaatgaaaaaaatatatttcacatgcttcttgtttttactatatgatatcttctaacgcaaggcaacatgtttgtgtaggctgtggtgtatagtcttgggaggcatgatgtgatggtgatacttgacaaccacaagaccgtaccggggtggtgttgtagcaacgatgacccggacgcgttctttggcgacccaaaattcaacccggatctatggatgttgggtcttaagaagatggccacaatatttatgaacgtgaaaaacgttgttggtatgagcctgaggaatgaacttagaggctacaatcatacatcaaaagattggtacaagtacgtatttataaattccattttcatttatttatcataacgcccatgtgaagcttgaaggccaaggaaattaatacacgttaattatctgtctaatttagatcttaacagattatattcccgtgtgctatacataattaaatctacaataatagttaagtacaaagtacataaaaatatat

SEQ ID NO: 18120 - DNA, 1344 bp, Arabidopsis thaliana columbia
ttaaaatttccattatgataactttgatttatttatctttggttgtaaatatagtatgttcgaggattttctttctgtgaaatatccaaccttgtccgaaaaagaactctacgcgaaaagagctgaagaatattatcaatgggttaaagaatatgtaagtctacatcattttagtaatttttaaaagtgatcatttaaattatgttgatattgatattgtttatttattatgtaggtaacatattggaaccctagttttccatttcctacttgggttcaagagattgtgcatggacctttgaacaaggttaaaacttggccaatgtatttcacacgaggatatttgtttcatccaaaaaatcatggcgctggacgaaaaacatgtaactatggggtatgtgttaaaggagaaaattacgcggattcatctgatgaaccggatttctaaggtaccttaactgatattatagaactcgagtatgagggtatcgtcaatttgaggatcacactttttaagtgtaagtggtatgacccaaagatcgggagaggcactcgacgaagccatggtggcgttgtagacgttctatctacgaggaaatacaataaatacgagccatttattcttggtacgtaattattctgaagtccaaaatacgtttctttgttaattattaataatttgtctttgagatatgtgtacaggatctcaagcagatcaagtttgttatattctgtatccatatacgaagaaaccaaagaacatttggctcaatgttctaaaagtcaatccgaggggaaacatttctggagaatatgaaaacaatgatccaactcttttgcaaacagaaaatgatgatgatgttttgctcactacaattgaagatcttgtacttgaaactccggtagccaacttaaacccaataatccttgattacgatgtcggggatgctgaaccagaagacgaattccgatgtaatttatcgtcctcggacgaagatgaagtagaagatgaagatgtataactgtgtgaatatatgtataattatttgaataaatattagaatgaattttgtttcataatatcattgcacttttttatgatatacaaatatttcataaaaatttggggcttttaaatttcgaggcccaaacccattagtataggcgtctatactgcgactaaataccgagacaagtttgttttgtgggcttctaaatttcggggcccaaacccattattatcggcgacaatattgcgactattggccgacaaatgtttggtattttgggcttctaaatgttgaaccgtaaacccagtaataatttatgacaagatgcgctatg

SEQ ID NO: 18121 - DNA, 1853 bp, Arabidopsis thaliana
cgcggaaatgtcttggctcaaattccagttgattggaaagcaataggcattaagaacaactaatccagaagggatctatcaatcaatactcaatcacctagcatactgagaattctacactaccctaatccatcctcagaaacctattcactactcagacatcataacagaaagcataaacgttgaacaagttgaaaacatgataacaacagtataacagcaggatgataacagaatgaacaagaataaacgaaatcaagaacaaaagctgaatactgaatgctgaatagataaagagaaatccgtattacaaaagatctagaacacaaggtctgcggaaataaaactagatacaaaacttttctccgaaaatgtgaagtacatgctacttatagccaaatattccgaaaccctaatactcaaaacgacgaagtattgggatggattaagaactgtactcgacccatgtggtcgagtgggaggtcgagtgtgtagctggagtcttcttttcttccttgtgctcgagtgtctggttgagtgcggaatgaagaaggctctgaaggttgtcatcaagtatgcagtcgagtggtgtgatggtgatactcgacttccaggtagagtgatgaggtcgagtagtggtctggcaatgaaggtgaagacactcgacctcggggtccgtgatgtgatcgagtgaaggacaggacatactcgacttcctggttgagtgatgaggtcgagtagtggtctgtcaatgaaggtgaagacactcgacctcggggtcgagtgatgtgatcgagtgatggtcaggtgatggagatgaagacgctcgacctcgtggtcgagtggtgaggtgaagttgtgatgtcttctactcgacctgggggtcgagtggtctcttgagatcttgaagcttctactcgacctctgggtcgagtggttttgtcatgatcaggtccgcttcttccagatagctcgtcaacggctgcaaatcacctgaaatcaacgcaaatatgcaacatgcatgcaaatctatcctaaacatgtaaagtgatgataaatgatgagaaatggatgctcaaaacatgcaaaatacacacttatcaactcccccaaacttagtctttgcttgccctcaagcaaacaatcaagaacaagctggaggtgaggtttgaaagcggggactcagagccaaagcaccagataaactagatgaaatcaatgtccaagttgaaagttctaagctgcaatatgatcgaattctactcaaaaacgttagccatgccttgttatcaatcaatccgactcatattctcgacctacacatgttttcaaatctaccaatccctttaacattcattagttctggaacgtgaatcaagcaatgcatcatcaatgaactcatttggctaaggtaaaggtcaagagacaaagattgtcccttacagaataggcttcaataacagggatctctcaaaaaatgattaagctttagtagaatgctaaaggtaagtccaacgctatgcatacagagataagatcccatctacgctgagtatatcaaatgaagctctaatggtaatcccatctccaatcccaatataagaacctaactctacccttcgcattcattgaatcctttaagccctttttcctaatcattcttttcttttctcttaactctaggagaagctttctcaacactttgatatatctagcggatttcgatttctttaacaactatggttcctgattttgaaattttaaaaccgaggcttttgcccttcttcaatagctaacaagaactctttcttttctttacaaatcccaaaacctttgctagactttttccggga

SEQ ID NO: 18122 - DNA, 2334 bp, Arabidopsis thaliana
gttaagttgcttcgattattgtttaaaggttttgagtattgaaaatgttaataattgaaatttgcaaataaaacgaggaggtgggtctgggtgctttgaattcataagaggagaagtttgcacgaaagacttgagtcagaacaacactttttattttattttttaatattgtaagaactatgcttgtgaaattgttatgtatgaaaaaaaaagaagaaggaaattgttatgtatgtatttatttatgcgtaggacaaaaagaagatgaattctaaaagatagtagaccaatgtaatatttggtaaatattctatatccataaggttttggaggtggaggtctctacaaactgtaagaaaaatcaatatacaattttttggtgtttataataacgagtccatttaaatatatccattcggaaacctttttaccaatctatattcattctatataccatgtccataataacaagagattcgataaatcgtggtttgtaaagaaaccaaagttccatgtccataaggtcttggaagtggaggtctctacaaactgaaagaaaaatcaacaaacaattttttgatgtccataataacgagtctatttatatatatccattcagaaaccttttattgattcatatccattctatataccatgttcataataacaggagattcgattaaccgtggtttggaaagaaaccaaagtgccatgtccataaggtcttggagatggaggtctctgcaaactgaaagaaaaatcaacaaacaattttttgatgtccataataacgagtctatttatatatatccattcagaaaccttttattgattcatatccattctatataccatgttcataataacaggagattcgattaaccgtggtttggaaagaaaccaaagtgccatgtccataaggtcttggagatggaggtctctgcaaactgcaagaaaaattagcaaacaattttttggtgtccattataacgagtccatttaaatatatccattgggaaacatttttacttatctatatccattctatatatcatgtccatattaacaggagattcgattaaccgtaatcttgatgctacgtagatgaaacgaatttgacccatgagagagagcaaaaatcaaatcaagccaccattgttgaagaagaagaagttttttaaaggaactgaatctcaagtttatatcaaaacaaagatttaaattgcaaaataaatcacaatcttaaaaaaaacaacggctatgactatccaattaagataatttattctttggcttgagaataaatcaaaaaccaaaatcaaattaccacagccacccatttgctcaaggcggtggaggaacccgtggtggaggtggtggcagataccgcagcggaggcgctaatgaatacggaggaggtggtggcggaaatggaggaggcggtggtgattacgagagacatagcagaggttgtggtggaaaaggatacggtagtggtggccgtgagggaggtggctaaggaggaggtgacgttggaagctacggaggaaacggagtgggggttagtaatcaaagatagtcttgttttgtgtcaccgttagattgttgagagatagggaggatgatgataaaccctatgagattcaaatttaaattttgaattatgaatattgaggttgtcctataatatttgattttgattctggaaaaaaagagagagatgaagaagagaagctttcgtaagagaggtggcgaagaacagaagaaatgttgctaaagaaaacgagaaaagaagtttgagggcaaattggacaatttaacaagtcaaagtgccttctcctttggaagtgccttctcctttggaagtgcctaaacccacaaatttttgtaaaagtgtcccactgtgtaatattttctataattaaatgaaaatatatgtcggtttaagtttagaaaagaatggttagagtttaaattttccaattaatttaatttaggggtttttaatgaattgatttatttaatattaattgttttaatttggttaattagatgatatggcaaatttcaaattagttaattaagagggggtgaatgaaagatgttcacccaaggggtgaacccaataattgttcttatttgagtgggtcatgacaaaacgtcaattacatgcctcatcccgatgtagtcaattatatgcctcatttatatgcttaatattcaatatattcagtttggaaactaacatttatgttacaccactaatttttaagtaagtggatatagttgcatcatataatagattatatttaacatatacatcgatatatctac

SEQ ID NO: 18123 - DNA, 1881 bp, Arabidopsis thaliana
tatatagattgaagttatcgatagactattgggtggttcggacaggtacgctttcaattgtttgatggcttgctcgcagtcctcattccaatcaaactttttatcctttcggaggagctgatagaaagggacgcatttatcggtacacctggatatgaacctgttgagggcggcgatacggccggttagacgttggacctcccgtgccgtttttggcgatggcatgtcgatgaaggctgcaatctgcttaggattggccttgatgcctctttcagttactaggtatccgaggaattctccttagggaactctgaaagagcatttctcggggtttagcttcatttcaaatttgtttaggattttgaagcattctcttaattgctggacgtgttctttttcgcgagctgacttgaccagcatgtcgtcgatatagacctctatcgttttacctagctggtcggcgaacattctgttcaccaatctttggtaagtagctccagcgttttttaaaccaaagggcattactttataacagtaggcttattcctcggaagttcgcacttgaccaggcgaacgtgtctttattttctttgagaaaggttatgagatcctctcgtatcgctgggtcgaggtcttgacctatcccaaagcatcgtttgggatctgattcgtctatgtagacctgtgttatcaacggttttcgaggtctgctctaagaagggtcagaggatctgactattttcattttcgtgagtttgtcttctatcattagtactacggggtcaacttttttgataagctcgtagctgcccatatagcactttcgggagctacgttggctgtcgtatacgactgctatccccttgtccgaggggaatttaacgcattggtggtaggttgatgggacggctttcatggcgtgtagccatggtcttcccagtattgcgttgaaaggagctttcttatcgactacgaggaaactcgtgagtcgcctcactcctcgtgcgacggttgggagctggatggttcctagagaaaatgtcgtatctccagcaaacccggtaagtggcgtttttctgccttgcagctcggaatcgaggtgccccatttttttgaaggcctcgtaaaagagtacgtcaactgagcttcccgtcttgatcattatacggaaagttcatagttgcctacatcgattcgaataacgagagcgtcatcgtaaggtttatcgaggtcggtggtttcgctttcccagaatgtgatctggtggtcaggtcccatcatcgggctcttgccttttgtgtaggaattttccttcttctgatgagttttgatcgaattgattgagtcgttgcagagctgagatcctcccatgatgaaatcaatgcgttacggggagaggtgctcggttgcgcttctgcagtatttcgagaggcgtcacggaaacctcatgtttgtcttatggggggcggggggaggtgtggtgactgaccttcctgtcctgccacctagatcgagttctacaaagactaggtctatgcgttctctcctagtgggtgggggagagtcacctcctccggcgttcgttcccgtgtcttttgtttgggagtttgctcctcctcctgttcgtcgggaggagggatttcaactttagggtttgaaccttttttagttttgcccccagctgcgattaattttttgacagtgcgacactcctcagtggaatgtcctctgttttgtggtacttgtaatattgtccgaggtcaagttctggactctcgtccttagctactctattgcgaataaggtatgctgcccttgcgtttggttttcctttttgaagggttttttaattgcaaggggagcgttttgcgttttagattc

SEQ ID NO: 18124 - DNA, 1917 bp, Arabidopsis thaliana
ttgaggaaactatttaggtccgcgaagactaaattgtttttagctcgggaaacatcgaagcgaaggtaagattattgaaatctacatgatgctgttcgtgaaaatatgacgaaagacttcgtatacgagatagaactcggttttatggatttaaatattatagtctgaacccggagtgcgggctgcctacgtacctaaagatagggatcaagtcttacgtagttcaaattacaagtgcattaaatctaaaaacgtttgagatgagcggcattccatgctctgcgaactattttgccttccatgttaatgagacgatagaccccgttccggactatgtgagtgattttgtaaggaccttcccaactgatccccaattttccagctcctttttcagccgtgttttgctggattcggcgaaggaccagagttccgacctcgaatgatctgtttcggacatttgagttatagtatcgagctgcggcgttatgatagttttgcatccgaactaacgcttggttgcgtcgttcgtcgataatatcaatcatatcaaccatcatttggttgttcgcagcctcgttctggggattttgtactcttctcgtactcgggactttgatctcggctgggataactgcttccattccatgaaagagagcgaagggggtctcaccggtagctctcctaggagttgtacggattgcccataacacgttttgtaactctccgaaccaagctcccttatactcatttagtttttttttgaggttcgagatgatcgttttattcatcgcctcggcctgaccattcccttgcgggttgcgaggtgttgaccgactgaggcggatttgccaccttgcacaaaaaacttcaaactgttaggagattaactgaggcccattgtcggttactatttcatacggcatgtcgtgcctacagatgatttccttccaaatgaactgggggacttgtacctgagttatgtttgagtaggctgcagctttaacccacttcgagaaatagtcggttagaacaagtaggaatctgactccccgagttgaaacgtgaagtggtccaatgttgtccatagaccatttcatgaatggataaggtgacgataccgaagtgagaagttcggcgggttgaaggatatacggtgcgtgcttctgacactacacacagcggcgtgcatacgctttgcaatccgctaccattgtgggccagaaataaccgtacttttttactttaaaggccaaagagcgacctccagagtggtttccacaagttccatcgtggatttcttttatgacagtccgagtttgttccccgaaaatacaaatagcatccggagccgagatgattcttctgtataaaatgccatctgctacgcagaaacgagcacaagtggtcttcagctttcgagcgtcccacttgtcggtagggagtaccccgttgaggatgtagtctcggattggttctctccagtctgccccccagtcgtgaggtgtctgattatcagggacttcgggactatttggaccagacaattcttcggtaattggaggcgggacaacctttggaacgtcgttttcgtcatcgagctgctgcaggtcggtattgttttcttgtgcttcaggcgggacaaaatttgatctttgagattttgaagctcactgcttacaccatccggctcctggggagactctgaggtcggacgtctaagggagggctctactcgaaataatgatggagttggtgcggtaactccatcaataggaaggtcgggatttgccggggtagtcagtacaacctggttctggtttgaagttgcccaacttcaacttgagagacgagaggtaactgaggtggcggagtctgctgacctgctcctgcctgtgaagtttggatgctcgaactgat

SEQ ID NO: 18125 - DNA, 566 bp, Arabidopsis thaliana
caaaaaaaaaaaacaaatgtttggatttacgacgaaaggtatgacatcagccctgaagcttcagtaaccgccgcagcttcttcatcaagaaacaaattatcacttcttctaaccgccgcatgaatcagaaccaacacggcggcggttaacaaagatcccagaatattcgaagtagcgtgagtcaacaaaagcatcacaaccgtcaaaaccgataaaccaataagaaccgtccgatcatcaatctgataaccaaaaacaacaagaggctcgtcacggaggacatagagatagatccagaagacgaccaagattgataacacgatcaactgaggttgggtgatatagaaggcttaggaagaggatgaagagaactccgatggcgtaattagctctgaaatagccgagattcgttttgatcctcgagatcgcgtcgaagaaaccgtgagggagagtcattgattcgcaatcgaacattgatttccatgggcggcgcgtacgtagaccggattttatacggtgtttggcgcgtgcgatgtattcgagatctatcgccggtgatggatgag

SEQ ID NO: 18126 - DNA, 1800 bp, Arabidopsis thaliana
tcgaggaccttcagaaccatcacccttggggtcgagtaggagagatcaagcaagttttgtgatcgatcatagtgaatcaagccaagaggaggaagtgatgcaagaagaagagaccttcaggtctccagctgaaaatactcgatcccgaaagtcgagtaagctttctgcaagagaattctcgaggaataaggaagatatcactcaagggaagaagcccgtggggaggaggttggagctggtagttgaagactccgaggaagatatggcttcaccaaaggaagatgatcaaacggagaaaggaggcgatgatgatttggaatcaaagaagtgttcaactcgaaatgaatactacaagctgctaaagcgcaataagttattaggaactcggtaccctcatcccgagaccatggagagactcggcatctatgatgatgtagactatatgtttaagcaatgcaacctgaatattcacatgtttcggccaatggaggggtatgagaaagagaccattcagtttctttcatccgtggaattgctcttatatggagagtcagagggacgatgaaatcaggccatacggaagtttgggatacctggagttttgtgtgtatgatgtagagtatcggcttccaatagagcatctcgagctgatgtatggatttccaagcggaaaagacaagcacagtcattgtcagacacagagagagcttcagtcattctggcccacacttggttctaagcatggatccgcatcgtataggaccaagagcaatgagataaggagtgcggtggatagatactgtcataggtccttggcaagtgcactatttccaagagagcggaatgaaaccaatgtcaatggagaactagagttgatggagacaacactacaagagttgcttggtttagcatcggatggtacagttctagctggagatcagacagacacttcggtctcattctacctaatcgagcacctgctgagttacagaggatgggctaagggacttcagaaaccaggaaaaatggtttgtgagagaagttgtaacaccaattctgagagcttgcaatgtacctctacattcaatgctgattcctccgatatggattgatatggaacaccttatcaattccaggagtttttggttgcagcaaaagaatggcctatataagtataggtttgatcatcccacagcaggacaatccatttttctcctcccaaaccccgcttccacttcgattagagatggtggcaacattgagttttgcccaccaatggagaacctctatatttcgggagatgaagctgtgccgatggaaggaatgaatgatgatgaggctccaatccatcattctgataatgaggcagaacctatggacgagtcttacgatacacaacagttttactgtgaggagtactcagcaccaaggcaaagtaaagactcaaaggagattcacaagcgccttgggttcctccaaagctggtgtaagttccaggacaaggctctcgcggcactcaacaagaagtttaacaatctccaacttaagatcagttgttcttcctcaactacagcaatgccacataacatgccttttgggagaagcggatccactcgtcacgaacctatgcattttgatccgccctcaccaccaagacagtcttcatatgagccgagggaacaccatgctgcacctgcaccaccaaggcaatcatccttcgaacctagagaaaaagaaaagaggagcaagttgaaaaagcgaagaagaacaaggaaatcagacactggagcaagccactct

SEQ ID NO: 18127 - DNA, 559 bp, Arabidopsis thaliana
tgctgttatatctggctgcaattcatccaccactgtctctcagaccaaataaattataaacagaatcaatatgaaaattgttttgtataattaccttgagaatatcaaccgcaatggtgtttggaccgcgagaagagaaggaagcaataacaggagatgtccgattaaagattgcttcagtttttagaacaatcgcttgtggagagctgagaagacaaacacaaatctatttcagaataaagatggataaatctaaagctgatgtataaagcatagagaagatgattgttaatttactcagtggactcaaggtaagagacaagagactcaaagtcttctgttagtaaaccagcggcaggtaaagggtgaatgaaggctacgtctggtttaggggttctataaatgagtccaacagctccaactgattcaactatcttcaaaccacccggaccaccacacactaagatctttcccttcacacgggatttgtctacacacgatagctcacaagccctgagaataattgatctcattacattagaaatttgatttttaaaaa

SEQ ID NO: 18128 - DNA, 1320 bp, Arabidopsis thaliana
ttggcttttatacccaaaacctatatttgtatttggtaatgtatatcaatacattacatatgaataagaatcggtattcttaaaactctcgtgtatcctctcattagtctagtccggactaatcccaactcgcggtcgcggtacgggttgccgagcctctaagtctcgtggtcgcgaggggcggtcttctacagtcgggcctggccttgggtgatctttggctggattcgtctgcgggtggacgcaaccagacgtgacgcttccggattcgttccttagtcctaggatggttcgggggtgttacacgacgatcctcgcgaaacgtgtaatcggagaaccactctatttgtatgtaatcgtatccgatactgcggtcattggagttttagtccgggaggacagagacaaacaaaagccgatcttttacgtctcacaaacattaaccggcacaaaatctcgctatccgcaaatggaaaagctgccttagcagtcgtattgtcagcttggaaactgtgatcctatttccaatcacactccatagtggtaatgggatccatgccgctccgcgctatcctgcatagtctgagccaatccggtcgactggctaaatgggcaatcaaactcagtgagtacgatatcaaatatcaaaacaaaacatgcgcaaagtcccaagtcctagccgactttatcgtcgaactacctacaaaagaagctcgagagaatccgctcgacacgatttggctcctgtacgtggacgagtcatcatcaaaacaaggttcgggcatgggcatctgtctcacttcacccatatgcgaggttcttgagcaatctttcaaactaaatttcgaggcaaccaacaacgtggccgaaaacgaagcactcgtagcatggcttaatttagctcgagggctgaagattgctaaaatatgggcttattgcgattctaagctcctcgcaaatcagttcaacggtgaatacacggctcgagacgaaagaatggaagcttatctagcccacatacacagtctggcgaagcaattcgacatccgacccaaacctgaggagggtcatcccagtcgagtttatcgagtagcctagcatcgagctcgacaaagaggaacacgcctttcccgtgcagaatgtcgcggattgcctcagagtcgaacaacagctcagacttgggttgtgatttagagtggataaagcccatcagaagttatatatccgaggggaaagtgccctcgtttcattttggttgaagagaaacatagaaaaagaagcagctcgcaaagttatgaaagaaatccacggaagctcatg

SEQ ID NO: 18129 - DNA, 657 bp, Arabidopsis thaliana columbia
tctagtaacggccagtgtgctctaaagtgaacgctattgatatggatatgaaccatattcctgatgcggcgatgaccattgccacggcggcgttatttgcaaaaggcaccaccacgctgcgcaatatctataactggcgtgttaaagagaccgatcgcctgtttgcgatggcaacagaactgcgtaaagtcggcgcggaagtggaagaggggcacgattacattcgtatcactcctccggaaaaactgaactttgccgagatcgcgacatacaatgatcaccggatggcgatgtgtttctcgctggtggcgttgtcagatacaccagtgacgattcttgatcccaaatgcacggccaaaacatttccggattatttcgagcagctggcgcggattagccaggcagcctgaatgaacaacgggcaataaatagccaaatctttctttatcaaaacgtcggcacattgtcggcgttttttttcggaccttgtgagtcattttgattaatggtagcgtcgcttgtcaatgtaagttgttgatacataatatttatatatgattaatcaacggatgattcacatgaagaatactaaattactgctggcgattgcgacatctgcagcattactgacagggtgtcaaatcccacggtattgat

SEQ ID NO: 18130 - DNA, 1113 bp, Arabidopsis thaliana
ctttgatagctctgatttattacgcgtcatgtatttcagaaacaatgaaacatatcttccattactaataattttttaactagcgagtcttgtgggataaaatagaagagattaaaagttttgaggaacctgtcagacagaacattaacttcctctagagtatcagttgtatccaaattcttcatagtattattttgtttagccgattattattcaaactgtcactgatatttttgttctcatctatgtgtagagttgaaaagttcaaggaaaagtttcctacagatgaagaatacaagattaacgacattgcttccaaatttgaagagaagttttttgacatagcaaccgataaggtgctaaaatacaaattctttctccatctattaacttcagaatctgaatttgatatcttactcattgtctccttgctatgtctcagaatgattaccttcggaaactcagtgaaaagctgcattatatactgagaacttacactcgagttccaggtaataagtttttggtttcaaaattacactattttagcttaataacaaacaaattacttactaacttttttttttcgatgtctttatctaaactaaacatcagcttctcaagtagttatgaatcaagctcaatctcttcccacctcgttgccatatacgcagactacaacaaaccaacaatggatacagcaaaatacacagagaaatctcaacattcctgtgtcatcttctttgccaagtcaggtacatggtaggcaacagcttcttcctcagcagcaacagcctcaacagcctcaaatgaatcaaatccgccatgggaatctacgaccttcgcacatgcagcaacaagctcagccaccgcagccgcagcatcatccgcaaagtctgttgaaacaacctattcaacagtcctttccacaatcaagttcaagccaacaaaactctcaatcactgccaagaaatcagtttccgacacaacgggtcagttctagtcatcaaaaacagatggttctgccgtcccaaagacaagaacaagagcaagtcattaatcaactgatgaatgttcaacatcacgacctaacaacagagaccaacaaggagcttt

SEQ ID NO: 18131 - DNA, 509 bp, Arabidopsis thaliana columbia
attggtagtggtgtcattctcctcctaatgttcttcacaagtgcatccttcacttcttccgtaacagcaggtacaaccttagtcacctacaaacagaaaacttgtaagattagcaccaaataaagttagtactaaccgctaaaacgatgccagagaacatagtatatacctcttgcccatcaggcccaacttctttgatctcacgggtgagaggacccaacactgaatcaggatccgtcactaagatcttgatagcctgaacaatagaaaattatatatgagaactaaatgaccatagagacacacaatgaatctccaattcacaaaattcttacctcagaagcatgaccatgtcgtcgatacaaaggccaaccaatgttcacatacgagtcctgcaacatgaaagctccaatcaatttctattcaacgatcacatcactaagctatgatatttgatgatatctctaagaagcgaaatccaaatccagtagataatcccagatttgaac

SEQ ID NO: 18132 - DNA, 523 bp, Arabidopsis thaliana
taatcacaaataacataacacggatttaaaggaaaaccctttaattattacaaaaatcagaaaacataataaaacataacttcaaaatttaaattttaaaatgataaaaacagaaatacaaattattaaattcttcaatcggacaaaaatccccataggactaaggattatttgtgatgttaggcgcacaagcatcagcggtggtagtgatggtagtgagacgattagtttcaaactggtggtggctgccatccatggaaggaatgtccccatcctctttaacattaagatcttgaagaacacgaggaggtaaagaagaagaaggctcaccattcttcttaaggtactcaatcctgcttttaaggctatcgagatagtcatcaataacagaactcaaatcttgaagatccttttcaccgagttgacacacatcaatagttccttcgatacaaccccacataatttgtcgagccctcaaaactcgattttcatcacgcagcttttgcaattgcgcttgtgcttt

SEQ ID NO: 18133 - DNA, 2000 bp, Arabidopsis thaliana
gcattttgattggtttaaaagacggttcctcgcaattttctagcaaggtttgcgagtgatttgcgaggaaatatattcttatatatactcgataacctattttgagcggagtcaaacctgccgcattaaaccctaaacctaagttttttctttgattctcttcttctccgatctgttttcctcgtcgccggcttctcttcttctccgatctattttcttcggtgccgcctctcttcttcttcgatttgattacgtcgccgcctctcttctttttctccgccgcgtctcttattctccagcagccgccgcaactcttcttctccaacttcagccgcgagtcgatctgtttcttctccaaggtaacgtcttcttctccgatataacttcttctttccattccaacttccaccgttcgatctaacttcttcttcttctccgttgcgtctcgtcttctccagcaaccgtcatgactcttcttctccagcagccgtcgcaactcttcttctccagcagccgtcgcgactcttcttctccagtagcagcagcgactcgatctcttttacctccaaggtagcgtcttcttctccgatctaactgcttctctccgatctaactttttcttcatctccgatctggcattgttttccagatctaatatgttctagtttacggatctaaactcagggttttgtttgttttgcaagatgccgtcgtcggagaatacttatgcacgatataggtcacagcagcgagacccgttgcatgtcaattctcctgtcagtgctgggaatatttcaggggttcaaggttcatgccatccaccatcgcctccaacgccaaccactcagccttctgtcaaccattctgattctcaagctgagcgtctcaacaatctcacactggaggagcttcttgatagtcctggtcgtgctggcttgacaaggctagacccaaagcgtcccccgagaactctctggtaaggttaaattcattgtcctagaacagcttaggttgtagtgccttagaactttgtagtgccttagagcgtaatggaattaggttctagtgccttagaagtttcaacaaatagaacagcttggttgtacttagcattgtgatgtcttagaagtttaaagacatagaaatccttatgtgtgggctggttggtcttcttgtaggtttgacgatgacgctgcagttgcacaacagtccacaacatctttgaaagagatttcaaagaaccttatgccaattggtcacaaacatcaaaggctacaatcgatcgatggtatgaaacgtttgcggtaagttctgtgctcttttgatgtttatgcttgttttgtgtatggtttcatttctgatgttagcttctcttttgtagcaagtatataactgggaccgttcaattaacaaaagagtaagggttgagtttgaagcaaagctaaagtctaggatgactgatcaagtgtcatagtggaagggaaattggaaggagaagggtgatgaagccaagccaaaatggattgatcctgatgtgtggaaaggtctagtactgttttggcaagatccaaagtcagaaaaaagagtaacaacaacagaaatgctaggtatcatgatccggatggcaaaggcatctataaacactgttcaggccagacctcatacaaagctcgtgtaagaaaacgggtaagataagtattcttctctccttaccattacttaatctagaattacatactgacatcttgtttatctctttgtgtttcagtgtgagaagactggagaaaaaactcctgatttccttgagctgctagatgagacacacagaaaagcggatggaagcttcatcaatgagaagtcagaggagatctacaagcaagtgacatctaggattgaagaggaagagtctcatatgggttcaggggacaatccggagagcactggatcaggtggactttctgttcatgccaagaacaagatatttactgaagtaaatttta

SEQ ID NO: 18134 - DNA, 594 bp, Arabidopsis thaliana columbia
gtgctgttttcgtgttatctgcggaataaacgtacgagagatgttttagttttgtttgataagatgaagaacgatgtcgatggttgtgtaaaaccagatggtgtaacatgtttgttagctttacaagcttgtgctaacttgggggcgttggattttggtaaacaagttcatgactttatcgatgaaaatggactcagtggtgctttgaatttgagtaacactctggtttcaatgtactcacgttgcgggtctatggataaggcttaccaagtattttatggaatgcgtgaaagaaacgtagtctcgtggacggctctgatctcgggtttagctatgaatgggtttggaaaagaagccattgaagctttcaacgaaatgttgaagtttggaatctctccagaggaacagacactcactggtttattgtctgcctgtagccattccgggctggtcgctgaaggaatgatgtttttcgatagaatgaggagtggtgaatttaagataaagccaaatttacatcactatggctgcgttgttgactcttgggacgtgctcgctacttgataaacttcagtctcataagcaatggagatg

SEQ ID NO: 18135 - DNA, 727 bp, Arabidopsis thaliana
actaaaactgttataactattaattatttctgatatgataatattttctctgaaaaaaactaaattttttccacccaaattcattacttagtaaatagatataacataacaacaaatttaaagtgaaaccctttaattattagaaaaataagaaaacataacttcgaaatttgaactttaaaaatgataaaaaaacagaaatacaaattattaaattattcaatcggataaaaatccctataggactaaggattattggtgatgttaggcgcacaagcatcagcggtggtagtgatggtagcgagacgattagtttcagactggtgatggctgccatccatggaaggaatgtccccatcctcttcaacattaagatcttgaagaacacgaggaggtaaagaagaagaaggctcaccattcttcttaaggtactcaatcctgcttttaaggctatcgagatagtcatcaataacagaactcaaatcttgaagatccttttcaccgagttgacacacatcaatagttccttcgatacaaccccacataatttgtcgagccctcaaaactcgattttcatcacgcagcttttgcaattgcgcttgtgctttttcaatcctctcacgcagaaaagcctcttgatccatctttttcatggtctagtcttagttatgggtctttgtcttattggcatgaagattgtttatatagtaaaggaaatgtgctatga

SEQ ID NO: 18136 - DNA, 1138 bp, Arabidopsis thaliana
aaacctaacttcaaccttttgtactttaagttttgcatattcttttaacctcattacctgcatttagctcttcctcactaggagaatcttgttttactctcgcttctatgtacaattgcttggcacatatgtataattgtttcagtgtttgttcgctaaacgattatcgtaagttcgaatattaactacggattattttctctgttttgtatttttagtgcaattaaaatggtatcacttcctcttgaatatcagttataaccaaattcttcatagtcactgatattttgttctcatgtatgtgtagagttgaaaagttcaaggaaaagtttcatgcacatgaagaatataagattaacgacatcgcttccaaatttgaagaaaatttttatagcatagcaaccgataaggtgttaaactacaaattgtttctccatctattaacttcagaatctgaatttgatatcttactcattgtccccttgctatgtttcagaatgattaccttaggaaactcagtgaaacactgcattatatacagagaacttacactagagttctaggtaataagtttttggtttcataattatactattttagcttaataacaaagaaatcactaactaactttttttttctatgtgtttatctaaacatcagcttctcaagtagttgtgaatcaagctcaatctcttcccgccttgttgccatatatgcagactacaacgagccaacaatggttacagcaaaacacacagagcaatctctgtgtcatctgctttgccaagtcaggtccctataaccgttcccggttctcaaagacagatacatggtaggcaacaacttcttcctcagcagcaacagcctcaaatgaatcaaatccgccatggtaatttacgaccttcgcacatgcaacaacaagctcggtcaccgcagccgcaacatcatccgcaaagtttgttgaaacaacctattcaacagccttttcctcaatcaagctaacaaaacactcaatcactgaccagaaatcagttttcgatacaacgggtcagttttagtcatcaacaacagatggttctgccgtctcaagaacagaaacgacaagaacaagagcaactcattaatcaactgacgaatc

SEQ ID NO: 18137 - DNA, 388 bp, Arabidopsis thaliana columbia
tgttcgagtacatgtagagttgtagacgcatataaattaggttttcgtgattcataaatgagttacgataaatcatgacaagttaaagtgtcgacatatatagattggatactagtaagctgataagctgaggtttgagacacttaggcagatcgtgggtgttgttacgccggttcaagcggcatagtatttgctcgccgagtatgagatgaaacttgtcgttgcaagagtggggaagagttagagaaaggcgtgggtgtgcacgtggggaggatgcaacgccgcaagatgcggacgtcgaacgtcaaacttgaccaattgttgatgtgagtacgtgagtttgaggtacgtatcgtagataatcgtattgtagctattgtctaagtag

SEQ ID NO: 18138 - DNA, 484 bp, Arabidopsis thaliana columbia
ttcattcatatatttagatcagaagacggaaacaactcacatagatcatagtacttgtgaggtgatagcttcgaagtccgtaactcgcttagcatctgagccgaatacttgagagcatctttcagattattcgagtcctaattaaccaaaaacaagacaagttttttcccaaaaccaaaattagggttccttcaattctacacatcaatgaaaagtacaaatttggaaatttctcaatttcaacgaaaatagtcacagagaaacgaaaggaagaagtgaagggaaaagcagaatttacaatagcgcgttgcatgtaaaatgcgttttgcttgaaagcagcagcaccggcggcgagccgtttctcttcatcttctgatccgtctgcgatcatctactgatcttcgtcttctctagatctcaatctcgatctctgggtttccacttgtcaggttcaaaaaaaagaccttgtgaaagtctttggatg

SEQ ID NO: 18139 - DNA, 458 bp, Arabidopsis thaliana
tcggtggagcaacacataaaccctaaattttgggatttagggtttcgcgatttggaagcggattcatggtgagtttcttgttattgttcgtaattccagagaaattttggtatctatgattcatgactgcgcgattcatcttctcgaattgaaacagagagtagttgggtcggaatagctttcaacactgtagcatttgtagcattgtcttttgtaatgtattctctgattctccatggaagaaggttggtccaatcgcagaaatgcttgagtttgagtgtttcagtgcaaaatgcatttgtattgtccaattccttctcttctgctagagctgctgatgtgagcattagagatggtcgaaaagggaagaactttacagtctcttacctcgttgattcattgggtttatctaaaaagctcgctgaatccatctcaaggaaagttagctttgaggacaa

SEQ ID NO: 18140 - DNA, 855 bp, Arabidopsis thaliana
ggctctcaagataattcacaaggttagtgcccatgccatagtaggccaatctttcacagcactcatttcctacacaaaacacataaaactggttaatcttatatggatagatccaatcagggcccaagctatataataaaaaaatataatggccctttctttatttagacaatttttttgaagaaaacagagcagattttaggtttataactcttttttcatagtgatcaccctacaaaactaaacatttccaataatattttaaattttatttgttctctatcattcaatttgcttttaatcgtatataatctctttttaatcattacatttattatttacatgtaaatgtttttagtggaccttaaaaaacaggggacacgagaggccattacttaagctggtccaggtcctatacggcaataatgaagaaaaagattggtgaaacgattagaacgttaccgagaatgaagcggcaagctttccaatttccggttatctccttgtttgcaggatttttgtgaatatcaacagttccatcttgcgtatacacatctttttcttccatattcctaataaagaaaaatagtttagctttttcaagaaagatgtaccaaacacatacctaaagatccccaatttagagatccatacttcaggtataaggttatgagaaaacccttaaaaatatacgtgaaagaaattgactagtagatgcttagatcgaaatatgcagatgaagcaagcaagtacgaaattgtcatgctctgaaattatagtttatgtgtgaccagatgaggttatggttgtacttgtaacgctaggatactcataaaagacttagcaaaaagggag

SEQ ID NO: 18141 - DNA, 1049 bp, Arabidopsis thaliana
atatgctccatttcccatctttgtcccgatatcaccaacagttatattcggaagaggagaatgatcttctaacgttcgcagttgcacgatgaatcctggaagagaaagtttaagaaagcaatacccaagcaagaaaaattgaacaaaaaaaaaatactggaaacttttcccggtacataccatggataccgtagtcttttccgttagttatgagacgagcgtaaacaacagcatgagtagaaacttttcccaaaccaccaggccaccactattcaaacaatcaagacagatgaaaatcttacacaaccaagagaaactgtgcataatactcaatcaaaggcttcttggtatacttactttggatgcagtctgagttggagtgtgaattacaaactcatcagtcttgggatcaaatgtggcagttgtctcaagtccttgaacatttgagccatgaccaagctcagtctgtgcataacacccaataatctgcatcttattggccagcgacaaccacttcttctgctgctcctctgtaccctgccccttaatagcaggcacaaacattccctatagagcagagatacaaaaacaatgaatcaaagaatcaaaatcctgtctccagaagataaatgagacgcaggtagtacccagtgcagatccacataggcaggctggtcgataaagtgcctcaatcttcctgcttcttcctctgtaacaaacaaaaaatgaaagagcacaataataagacgcaatcaaaaaaccttgataacaatacgtgtgtgagaacaatccataccattgagacgaagctcgataatccttttaaacgcatgggcacattttctcaacgtactcttaaacagctccttcctactcaaccgagctcgattgcttttctcaaatacctatataaacaagattgagaaattcacaaatctaagagagacctaatcatattccctcgccgcaaaaacatttcccggaatccaaacgaaaccagaacaaaaatcaacgagaatcgcgaagaaattcaccggatcgctggcgac

SEQ ID NO: 18142 - DNA, 539 bp, Arabidopsis thaliana
aacctttgagcaacctttcttattcagagaatttcctctatatggtggaatcaatgtacgttattgtccctctttgtttgatttggagatggtagccataaaactgtgcacttgtttagtctcatcttccattgattacaggggagataggtcttacaagcctaatcctcgtttggctcgagtgctggacatcctcttcatactgcaagctgaacatgaaatgaactgctctactgctgctgctaggcacctttcctctaggtactacttatcattggttagagattcatttgagtctgctatgagatactttttaatcagcacataaatcctctgtttatgtagtggtggtgatgtgtatactgctgtttcgggaggtgttggagccatttatggtccccttcatggtggtgcagttgaggctacgattaacatgttatcagagattgggactgttgaaaatattccagagttcattgaaagcgtgaagaataagtaactcaattcttagagagtatacctagaatgtgatggtcaat

SEQ ID NO: 18143 - DNA, 1787 bp, Arabidopsis thaliana
gcattctcggaaaggtattgttctatctgttgatgatctgtttccttaacgtatctgtgtataagttgcgggactagaaaaagggtttacaacgtgtttgcaggcaccaacaattgcagcagctgcttatttgaggacggcaggcaggcctcctgttctcccttcggccaacctttcttattcagagaatttcctctatatgctggattcaatgtactttcccctctttcttctgtctttatttgatttaacacttgcattttaaaagggtagtcagaaaaactgtgtttctttagtcagtttaaatctgtttcaagcttcaaacgtgtctgtaacacaggatacattctttaatcttcaattgattacaggggcaataggtcttacaagcctaatcctcgtttggctcgagtgctggacatcctcttcatactgcatgctgaacatgaaatgaactgctctactgctgctgctcggcatcttgcctctaggtacttatcagttatcactgattagagatattcatttagacttctttgagtgtttaaatcagtattgtgtttctgcagtggtgttgatgtgtacaccgcatgtgctggagctgttggggcgctttatggtccacttcatggtggcgcgaacgaggccgtgcttaagatgttagcagagattgggactgctgaaaatattccagatttcattgaaggcgtgaagaacaggtaactcaatgcttaataactacaagcaccaagtactctgaattgtggtgagtcatgccggtaatgttatatcccttttctatgttctcagaaagaggaagatgtcaggttttggacatcgtgtttacaaaaactatgacccccgagcaaaagttataaaaaaactggcagatgaagtgttctccattgttggtagggatcctctcatcgaggtactgtagatccttgtgctcacgtatctctcctagtatttggttgtcaaaaaaattcttatataacatgactgtgggttaaattttgttttgacggatgatgttttcaggtagcagttgctctagagaaggcggcactgtctgatgaatattttgttaagagaaagctgtacccaaatgttgatttctactctggattaatctataggtaagacattgctgattcatctgacatagaccctgtaaccattaagttctttacctgaaccttgtgttggtaattgaaatgggggaaaaacacagggcaatgggattcccaccagaattcttcacagtcctgttcgcagtcccgcgtatggctggatacttgtcacactggcgtgagtcgttagatgatcctgacactaggatcatgagaccccaacaggtaaaatacataacttgtttgatagatcaaaaggtttatagtttgagctaactgaattgtgtggctgcatataggcctatactggagtgtggatgaggcattacgagccagtgagagaacgaacgttatcaagtgattcggataaggataagtttggtcaagtttccatttcgaatgcatcaagaaggcgtttagctggatcatctgccctttagtctcaatcctaatactcaccaataaagaagaaaacattgggatacctctgggaaaacaagagagtcttctcaacaacatgtgttgttttctttctcttattcttaaacacttaataatacaaccctattcttattgtttgtctgttattttaaaatgttatgatttaataataataatcttgttatagggacgacatgtacttttgataaattg

SEQ ID NO: 18144 - DNA, 1321 bp, Arabidopsis thaliana
catattcttactgattttcagccgaacaatattgcaatgcgaggcttatggagaaatcgcagtggactttgacagaaggttttgatcccttcgcaataacaatattgttattgcccttgcttgatggaaggtagttatatattatgccggtggtcaccgtgtgaagattgtaagccatgcccctatatcaattgtgtatcctgaacctgatctcgaggaagtgaaagaaattaaaatggtatggactctgtcgttaaaataatgtcttcaaatagcattttataaacttatccactatttcttgtcattctcttttaaggttgtcgactaatacaagaggaataaaatcatcacaatgcttgctgcttcaatattattatcacaagtttttttttttttccctcttatgtacccctcaaacttaatgtcactttcttatcgtttgaatactgtaatttcttgatattatttattattatcgtcatttttcctttttttcggttgctacgaacaaattattgctacagatacatgattagctaataccaatgtctttcaataaaaatttcatttttaatccataagaaactactttcgtggattgctgtttatagataggttaataaattgattttctttcatatcctaatcacttttaggtctatacgttatattctctctcttttatccgcatctgaattgagttccgtccccaaaattgagaaactgttttatagcgggacaatttcccaccgattataacttttagtaaaaccgcaaaaatactgtaactacttactcaaaccttaataatctctatataataaagatccaaaattgttttatgttttttccattacccatctctttagttaaaacctgaacacagagaaattatgcagaagtttacgaagatacacaacaatgaaacatcatctatttcagatgttaaaatggttgttcatccaaacctaaagtacttagttttctatagttttaactacatctttaagcaaatactaacaatctcttccgtttgtttttttcaacaggttgttgctatcccataaatttacttgccaccccggtgcttgctaaaattgttagctactcagaatctggtgttgatgctttgaaaccctttgttaaggctggtctgttatttaaagcggcagtctattccgaggaaactctaagttgtgtccgccttgacatatctcggtattttatgtggtggtcaatgccgcattccatctattatcatttctttacaaaatatattgaagccaacaatccacatgctttaactgctgtattatac

SEQ ID NO: 18145 - DNA, 1443 bp, Arabidopsis thaliana
tccttgaatcaaccgagccagtaacatgtacgtcaggtcatatactcatgtagttttaacttggcttatactgagattagtccttcttgattacctcttgcagtgagagcagttgctttcggtgctatgtggattcttttgggaaagcgtgtctggttcttccccaacattctagctgaggaagccacattgaaggaactgttccgtttctggccaaagaaagacgaggaagaaccgcccaagtggacatctcgacttttctacacagtagtggctattgttgttgtcatgctgcttaggcgtcatgcccctgatgaagctgctcgggccaggtatacactgccttctcgtccacctttaaatatcgcttaaactaattgtactctactcatttgaatttagtgcagtagaggttgaattgtgatgagttttgttcatacaggtaccaaagaaggatgtccaacatcattgatgatgtccttgagtggtcaccaaagctagcactttctggtttgatggagaatcagcaacctgtaaacatcacagatgcggcaaacaactcctcagattcagcaggaggtcccgaccagactgaagaggtcgacctagatgaaactcaaggcgaggacctagacgaaacgcaaggcaaggaggaagctgaaggttggactgactctgatcttaaaacataaaaaaaccaaaatatagaaacgaaagttcattgtaacaataagtcaacttaagtgaccaagacgaggtgagttctttataagaaagtcttgaaagattttgtggtactccattactcctttacattttgacacaatctggaatttagctctcaatcacagttttgtattccaaacttcaattccagctaagaaatgtttagttaagatagaattgaaaaagaaaagtggcaacatctgaagtattccaaactgaaagggaaaaagtcacaaaaagctacaaaaagtatttgtacaaaatcagaagaaaaaaaaacgagagaaaatactctttcatggctgctaccgaataagccaacaaagagaaagccaagaatgaattgccgccttgtgaggtcatttaatggctagacgagcttgagaaggatggtttgaggaaaggctgttccattgctgccctgaacactctccttcttcccttctcttataagctgagctctgcatctcatctccctgaggtgttctatagtcaccattccaagcttcaccttgatcagaattagatgatgacggggactgagtagcatgaccattgctcttttcttcagctttacgctttgaagcttcggtgttggttttctttgcaaaccgtcctccagtaccccttggcctcctcatagcatgttgatgccgagattcatgtagataaggctgtggaccatgcaacaaagaaagagatgcattaacgagtgtg

SEQ ID NO: 18146 - DNA, 996 bp, Arabidopsis thaliana
gaagttaaaagtaaaacaccgccccgaaagtgggtccacggttaaatatgagttttgaaatcgccccgaaagttgggtccacgatcgatgtatcaaaataaattacaaagacgatctgaatcccctcaatttccttttccaaaaaaatgacaaagctcataaatggaaaacatagagaaaatactattctgcctcggaaacaggcaagatggaaaatcatcgaaaatagaagttaaaagtaaaacaccgccccgaaagtgggtccacggttaaatatgagttttgaaatcgccccgaaagttgggtccacgatcgatgtatcaaaataaattacaaagacgacctattcagatcgtctggctcgcctcttcatcgcttacacgtcgaatatcactaccgcaaacaaggtcgacattcgagccgtgctggtccgccactggagcaacttgagaggtttgcctcgaaaaaccaagctgatctggagacatgttcaggtcttcatccccaagctcgatgacgttcaaagcattgacttcgtcggacgcccttttggttaactccttaaggctgctgagttcggatgccgcaatcttcgcgcctctctgcatcagaatacctactatctcctcagcacctttggcctgattctcagcatccacctttggcccgacaaggtcctcttgctccttgagataagcctttactctatcaagacgagcttgggctttctttgtagtacgggtgaccttagaagctcgatcattccgcagtctgttgcactcccgctccccgtgctccttcgcagcaaccaacgcgacttgaagatcgctgatctctttctgaagagcagcttctcgaccattgagcctgttgacctcgtcgttcaacgagctcatctccgccttgtgtggctccggagatcgcccgctcacttacatgattcccggagaaaatgagcgtccatggaatcccctcgagggtacgtctgtatgtatg

SEQ ID NO: 18147 - DNA, 1414 bp, Arabidopsis thaliana
ctacatttagctcgtgcgagattacttccgtactgattccagtcatctcgccaactgtccaagcgaacgttgttttattcgttttaaggaaaagaattaatttgcttcggaaagtttcgcccagattagccccgattccaacgagctgatccggatggtcatcgtttataactacccgctccacgaggtcgtcgcctacttttttgatcggattcggggacgcctcgagctgtggttgctatttgattttgagcttatgcccggtcatgtagcacatcctagacgtgcgctgactcccgaggatttgtccaactccggaagaggttggaaacttgacacattgatggtaggtagatggtaccgctttcatctcgtacagccagggagttccgagaattacgttgtacgcagcaggtcggtcaaaaaccgtgaattcaaccatcttgactattccttgcgcagtaacaggaagtattatagtaccaagagacatcgaagtttcgctggtgaaagatacgagtggactcggggctccctttatatccttcttggagattcccattcgtagtaaagtgtcgagaaagatcaaatcgaccgagctcccagtgtcaataagaatcctctgcacttcgcaattcgcaatgtcaagagttattaccagagcatcatcgtgcggtttgtccagatcgctggtttcttcctcggtaaaggatatttctgggtaatcaacccgaccggttctcggtttctttgcaaccggggtgacagattttctctcatgctgttttatcgcgctaacagaatcacgaaaaagttttgaacctcccataatcactttgaccattttcttcggacctttaggaattatgggagccggatcgctcttctgctttttgctcggagatgaagcttcctctgattctgggactttgcttgcggtctgagccaattcgatcgccgtaatgtccacttcggaaatttttcccgaagcatacttcgctgctaacagtctgcccaacgctttgcaatccttggttgcatgaccgttcatcttatgaatatcgcaatatgcattcgggtctcagacccatttgttactcggaaaagcgccgtttttgcccttaggagaaaaaggcggcttggacggtgaagctttaggagaagatttcggtgactctttctcgatggagaaagttcctgctgcaggctttctgatttcggcaggttttttggtagttgcgggctgagacacttttggtgcagcatttgaagcactgaattttttagctagaaaagctcgttcttcttctgcatttatccagttcgttgctcgatgaagtgcatcttggattgtctcaggtcgatttagtgcaaagactcgcggaaacgtgattcatgccaaagaccatttttg

SEQ ID NO: 18148 - DNA, 1547 bp, Arabidopsis thaliana
  unsure (1)..(1547): unsure at all n locations
ccttactcaccgtcaagtctctcgaccacaggcgtcgattctccaggcactgacagagtttcctcgaccacgtgcaagatttactgaatttgggcaagttttctcgtctgcagacgagttatctgtcgggcagccttacagtctctctctcgccttcaaaaatgaaaacgggcagagatgagcatcatttatagtccgcccaaggtcggccatgcagcatcgccccctgccacatgtccggacagctgtcgtgcccacatgcgacaggtgtgtctcagacgatggcgtggcgacaggtggcgacgtgatatgatcatggaaaacattaaggatatggagcatgaaccggagcttgaacgtgagcttgtagccgaggaaggagctaagcttgtagccaaggatgagcttgtagcgggggagaagcttgaggcagaggatgttcttgtcgcaccggacgttccaatgactcgttctagagttaagctattcaaccaagccattggatggatgcttaaccacatttgggaccgaccaaatgacttgagccaagtcactacctctttggttttgattcaagctcaaggacctcatcaagatggataagtgattcatgagtggtctttttccctacctttggttttgtcccacagggttttccaaaggaaggtttttaatgaggcttatgttttcacttcatatcatccattttgatgattcaaggcccaaacccactaaaataaagagacaatttcgtggccttagtagttgaagggntttatttgaatttcaaactttgtttttaatttctcttgtgttctaggcagccttagagtatgttccaagacttgcctcttcatcttctcttctccttctctttatatactcttgtattctcttttgagaacttatcttttttttaatcaaaaaccttttctaagcagatcatcttgttggtgtgtatatccagcaaaatccttagtctcttttggtgcgcatatccaaaggatctaagcctcgatatcttgaagcccttccacaagcttctgtgatatccatcgattcattcaaatctatccatcatcacggcatcacagccacctctatcctttgctcaacctaagagtgtcgagtccttgggaggatctcatcatcaggccattgaagagtcgccctgttctgtttcagctcgaggtccttgagggtactccacctcatcccctctcttacggccaacaccgcaacgaagatactcggcctcttatcttctgctgcggccagcaccgctgtcgcgtaaacttctagtctagagaagtcttgtactcttgctgctagatcgagtgagcacaactttcttcttcctcccgtattcccaaggctcgtatgatgaatgccacgcatgaacttgtgagaccctttgctcactaggctcaggcttgtgtatacttggcttaggctcatcatatctcctcgatggcatgtcttgaggaggcggtccatgcagaatagctgtagtggaagaggtgaagtttatcatagccttcagagcc

SEQ ID NO: 18149 - DNA, 764 bp, Arabidopsis thaliana
cttccaactttcttgataatgtcttctagatgttgcactaaactcgtgagtaacgccactgttccttgaacttctttgatcctctctgtaatcatgtccttcacacgtttgtgtgagttcggtattagcgcaagacagtctactagaggcattgtgatttcaaggtccttcaattttttttccaagagagcttcatacttctttatcagttgcttcttaaatctccctggaaatggtaatggaggcttgtagggtggaggaacaaagactttatctttggttttagcagatgcaggctttttaactgaagaaagtactacttgagcttgggatcgagtactgtgatcgagtatgggctcctctaatgctattttagcttgaatttcattctgaacaaaatcctccccttcttgaacttcactgtccctagtgatggaggtagaggcatgtcgagttggcagctctcgatcatggcagatattgatggcgtgagcagtggcgtactccttaggattctggattgctctccctggaagctggcctgggttgttgttaacagatggtgtagcgaggatgccttccacatatctcatcctagtgctcagtgcttcgaacttgctgttaagttcgacgctttgtcggtcgactttgttatttaatttatccaacttcttagcgatttccattgctcctgtggcttgtccttgaatgagcagctggagcatagtcattatgtctgaattctgaggcgaagaatatctaca

SEQ ID NO: 18150 - DNA, 1485 bp, Arabidopsis thaliana
cgtccatgccgtagatatcatcatctctatgtccaaacaattaagataagtgttatctattataatctaacaagaacagcttaatcatatatatgctttttctgtcatattttttgcgcaaacttgcaaaaacactcgtctaccgagcaaaaagactcgtctacggagcaaaaaaagcaactcttctatcgagtaaaaaaagagctccggcctcttcaccataacctgaactacgggttggcttgatccttgcaaagggtacgtaggcagcttgtctccggacgagttcagctagcccccacaaagaaaaaagggggggggagtggggtccgtatatccatactcccacttcaatttttctacttcgaattttcttggaatttgatttctaaatctttttactttgaaatattttaacgggcgacggcctattattttcaaagtttcatttacaccgcttcggttacagcgcgctatataaatattcaagataagaatctgctcgaatgtttttccgagcaggctatgaattctatcttctgaaatccggttatacttaacaccggtgccccagctcgtttctaaacgctggtaaaagattgaatcaaatcgggtcgcaaccgtgggtattcaaatctactgaaatccagttactctaaacacactggtaccgagtcaaccgcctcggaaactaaatcccagttatcataaacactggtgccgaggttttgcttcggctaaatacagtttcttatctgctttggtctgtgcttagaaatccagttatcccgaagaacctggtaccgagacgatcagctcggaacgaagtatactgaacccaactttgactcaggcaatttgtacccgagccaaccacctcagttcgtctgtagctttcctagctcgaagttcgtctagctagcagctcgtctgcacttcgcctagctgacagctcgtctgcagcctttctagctcccagttcgtctgtagctttcctagctagcagctcgtctgcacttcgcctagctaacagctcgtctgcagctttcttagctccctgatcgtctgtagctttcctagctcgcagttcgtctagctagcacctagtctgcacttttcctagctcagtccgtctgcagtttctctgactcgtagttcgcccagctaacagctcgtcggcagccgtcctagctattgcccgcctaacagctcgtcaacagcttggagttcttcaacaagtctcctagcagctttcctagctcacaacttgtcaacagctaacattttgagttcgagatagcaacactcgtcaagaacagaatctcgtagcaccaagaaaaaacaagccttactctcaaaagatacggatcagtcagtatagatgcggaagcagctggctcggtcacaccattcatgaagctcgtcgcattaactcttaaccaacgagctggggggctaactgttggggtcggattccccacaagc

SEQ ID NO: 18151 - DNA, 1369 bp, Arabidopsis thaliana columbia
ctaaaacttatacttaaaacatagttaaaaccggtaaaaatagggatatatcatagatcacttagaaattgtcactttttatatttccttgcatgtttaaaatccggctaggttaaccaatgaactgcatatagattccatcacctcatatgcttaaattcatttggttaaaaaccgactaggttgttggctgcatgtagatgaacactagggctttacttgttgattgcttgttcgtttgtgtgcatccgtttacttgattgtttgtattgcttgtttactttgcatgcgagtcttgttgtcatgcttgtgagtcgccatctttgaatccatgtcggatgagagatgtgcactgtttggtataggtgatcttggatgcggaatccgagtatcatagaagtctagtttagggtgctgccagttcttgcatgtgtgtggggaagcttgcgagtctcggtcccaaggaaacacttgtcgggtagtctcggaacctaggtcgagagtgcatgacgatgcatttgggcttattggtatcctgggtgggttcaataagtcgtgatgttgttggtttcctgtgtggattcaacgagtggttggtcgggttgacggatccatataggaaaactcaacttccgacgttttgtaaggaggaatggagcacatggcccataggtcgagtttaggttatatcttgtcttttgtcttgcttgtattgcttgtgtgtttacgtgcttttcgcgtgttactctgattttttgttgcattcttgctttgcttccgtttgttaacccctctaggttgttagatttgcataagaatggcttagagttgccgtaggttccatgttgcattggcctggctgagtaatactagattactcatgattttcttgtctttcaggcagctgtagcttcaaccagtagagggaagacgaacgataaggccgccagactagggtaattttttaagttgcttttgtaaaacctgattttgtattttcacgttttatttaaaatgcggatccgttttactaactgttttttttggtgatctttttgcgaataacattaaagtacaaagggttttacaaatgcgggtgtttcgtgatgatacaaggctttgtccgagccgcacaatactgggtacaccgcaagggttggcaagcctacgcggtgcatctagtggggagatgaccggatgagaattggccaaggacttgaaagcccgggtctttagccgagttgcgcctaatggtcaggctcgggggcgttacagccacatcctcaccttcttcaactctaagatgttgacgtggtcctgtcctctgcctcacataagcctcatgaatcatatcaatacttctcgccag

SEQ ID NO: 18152 - DNA, 1949 bp, Arabidopsis thaliana
tcccttttttcaatttatatataccacataattactttaattcaggggataaataagtaatcataagaaaatcaaattcaagcacatatttttgttgaagagttaaccctctcaaagttgttaaataggtaaaatttagaattttctctattataacagatgatggtattaattcatgtattcttttaaccactcaaaactccaaagagattcaagttttatccaaaaatatttgtggagcctatattgctaaaaaggttagaacaatcggtgaataaatatggcagagaaggtggaggtgaccacgatgcccaagtcttctcttttaggaaagcttgaggtagaagttgagatcaaagctcccgcggcgatattctaccacatctatgctggaagaccacaccatgttgctaaagccactcctcgcaacgtgcaatcatgtgatctccatgatggggaatggggcaccgtaggcagcatcgtctattggaactacgttcatggtaatttatatgacttcgaaaatattttttgaatatagaagatttgattggtgaatgttttggttgtagaggggcaagcaaaggttgcaaaagagaggattgaattagtagagccagagaagaaactgatcaagtttagggtcattgaaggagatgttatggccgagtacaagagtttcttgatcacgattcaggtgaccccgaaggaaggagggattggaagtgttgtgaaatggcacattgagtatgagaagattgatgagaacgtgcctcaccctgagaatcttctccctttcttcgccgagatgaccaaagagattgacgaacacctcttatccgaggaatgaaaacatactcttggtaatagttatatcttgtgttgtcgctatatataatttattgcatgataatcatatgtatggggtttcatagttgatgtgaatacttttcaaagtatggtgtgattattaataattaataaggaaactatataatatatatttatcttcgttaaatgttataactctcttactatgaactatggaggttttttcgtaaatgatacaaataaacaaaaaaagatttgaagacatagaggagaattgtggaagtccgcttggcccaatgattgactaaaggttcattaatgcttctacatcaagaggtttggggttcgagtcccacctactacgatttattagcatatttgtagattaatggagacaagtgtgctaatggagacaagtgtgcaggaaatctccaacgatatacaattatagccgttcctcaggattctacgcagtgaagatattgaaggtgtccatcaagagtatggagaaagagaaggaggtgtcgtctgtcgtggatataataagatcagaaggaattgttcgtggtagaatcgtctatatcacagtttcatgatttgcgattaataataaatctagacagcaaaaataaaagacatagaggagaatgcatttggttgagtaattgttggcgttggctgtaagtggctgaaacaaagtagagagagttctactttgatttggttttggtaaatccaataatatgaggtcaaaatagtagacgaaaacaaattattataactgaaatgcatgaacacagatcaaaccaaaaggcaaaagagtcaatgaaacgttcatgtagattattctgttttattaaaattcatgttttcgaccaagaattgcaatggaagtagtcaactaaaattattcataatcgaatatgcaactttttatacatttcacattgaccagtaataagcaaattgaaatcttggactcttggaacgaacgtctcttattacacacgaaaccggcacacgtccaacattcattcaataggcaaattctctgcttcatatctaatcgaatcgaacagtttagtcgataaataacgttccctccactaggaaaaacc

SEQ ID NO: 18153 - DNA, 472 bp, Arabidopsis thaliana columbia
tgaagttgtcgaaatctgcactgattcttataagccgatccctctccaccgataactcattggataaagacgctactttatccgcaagcagaaatttttcatcttctatggactttaaagatgcttctatctcagcaatcttcccctcgttgttgtctgctaaagcttctttataggatttcagcaacgctgtgataacagctgcttcttcttcctcagcttcaccctcctcagcactggcattttcattctcgacatcaacagcaccatccgtctcctgctccatgatttcagaagtgaaacaaaaaatcagaaaaagagcaatccagtttacatagacgtttcctatctattcctgataaaagctgagacagaacacacactaacgacacaattttttaatgacctcctaaacaatcagattaacaccaaaaaagcttcagaacattctgtggccccatacaagaatcac

SEQ ID NO: 18154 - DNA, 228 bp, Arabidopsis thaliana columbia
cccatgtaccacggctacgccccatcagagacacggggtcgatccattcccagatgagcgtgccagttaaggctgatcccaccagtgtgaccaccaacagcacgtagcgaatgtggctagcgatcgtcgcagactgattgtggtcacagcgcctgcgtaaccagttcgctaagtcggtaatcgggttcagcgggcagacccagctgcgaaataatcgctttcccgcca

SEQ ID NO: 18155 - DNA, 497 bp, Arabidopsis thaliana columbia
tgtgcctccaccaatcaacgcattcatcattactgcggcacttacgtcaacgaattaatcttttatcgataaaattccaagaggccctaacttaggcttaatcaattattgggcctataaagaacggcaactgatgtagatccaaatgggctttatttagtaagcccaaactttatgttttctcttatatcttcctgctctgttattagaaagaatctccgatttagatagaaacaacaatcctccggtggtcactcgctaatctccgtttgatctcgccgacactcgagccttttaccgatgaaggatggagattccttaccaataagcacttcttccgtcgcggcgacgacggtgaccggaaagaaggaaaccggttattccgctctcttctcgaaaggccggtacaagttttgggccttagctgcgattctgttactcgctttctggtcaatgctcactggcacggtcaatctccgttggtctgccggtaacat

SEQ ID NO: 18156 - DNA, 458 bp, Arabidopsis thaliana columbia
ctggtcgttgctccggtccagaaggatcatagaaacgcaacagcgtcttcgtgttttggtatgagctgcttgtctctatatactgagatagatgcagtgaagccgatcttaggtcaaaagcagccattccaacctgaacagagaaatccaaaatcgaatccaacatcacaatcgaaatatcaagcgagaaacaagattttgaagctacgatatcgatcccagaaatcgccgtcgcaaaatcgatacccaaagagaacacaaatcatatcataatcctgccaaatccgagcaatggagaagccgtacctacctctttggctctgttctcaattaggccggcgacgaaactcgatctctctcctccgtcgtcttccattttcgctccacagatcagaatttgaaaattgagtgaaaggtacacgagttccgaaaatgaaggcaaaagcgcgccactgtga

SEQ ID NO: 18157 - DNA, 502 bp, Arabidopsis thaliana columbia
caggtcgatagcataactcaatgaaccagactttgcaaatgcactcaccagtccgctgccaacaaaaagatctgtgagcaaccctgatttctgtatggtgcacatgatctgctcgagcaaacgaacatctggttcagtcaaagaacaagcagtagttacaagactaccaaaagtgtattcagttggtctagaaccatcatattgcatgctagagaaaatcctaaacgcagatctctgatccccagcctgtgaataaaccgaaataatcgaattccatgaaacagaattcttaacttctatgtcaccgaaagcacagagagcataaccgacagacccgatacatttccagtacattgatatgagcacattagaaacaactgcatccactgcataagaaagtttgaacatcaggccatgaatttgtctcccgaaaagaatccaacagaacctatctcctgacaagcccgaagaacactaacaaaagcgtattgattagaaaaaa

SEQ ID NO: 18158 - DNA, 536 bp, Arabidopsis thaliana columbia
  unsure (1)..(536): unsure at all n locations
nnnnnnnnnnnnnnnnnnnnnnctaaaggcctgtattcataactattccttacatcgacgaatgataatttgtaggatagcgaactgtatttttctttctgcgagttaacgcgttgcctttttgggtaaataacgcgcttttggttttttgaggaatagtaatgacgaaacatgccaggtttttcctcctgccctcctttattctgatctccgcggctttaatcgccggttgtaacgataagggagaagagaaagctcacgtcggtgaaccgcaggttaccgttcatattgtaaaaacggccccgttagaagttaagactgaattaccaggccgcaccaatgcttatcgtatagccgaagttcgcccacaggttagcgggatcgtactgaatcgcaatttcactgaaggcagcgatgtgcaagcaggccagtccctgtaccagatcgatcccgcgacctatcaggcaaattatgacagcgcgaaaggcgaactggcgaaaagtgaagccgccgctgccatcgcgcatttgacggta

SEQ ID NO: 18159 - DNA, 507 bp, Arabidopsis thaliana columbia
  unsure (1)..(507): unsure at all n locations
nnnnnnnnnnnnnnnnnnnnnnctaaagagcgcgttctcactgcttccagcgcaaaatgcgaccggtaactggatcaaagtcgttcagcgtctgcctgtgcgtatcgaactggaccagaaacagctggagcaatatccgctgcgtatcggtttgtccacgctggtgagcgtcaataccactaaccgtgacggtcaggtactggcaaataaagtacgttccactccggtagcggtaacaccgcgcgtgaaatcagcctggcacctgtcaataaactgatcgacgatatcgtaaaagctaacgctggctaatccagaggtgcgtgtgatgcaacagcaaaaaccgctggaaggcgcgcaactggtcattatgacgattgcgctgtcactggcgacattcatgcaggtgctggactccaccattgctaacgtggcgatcccactatcgccgggaatctgggctcatcgctcagccagggaacgtgggtaatcacttctttcggggtggcg

SEQ ID NO: 18160 - DNA, 571 bp, Arabidopsis thaliana columbia
aatccaaaatgagactaagttttgagtttcatattgtgtaagctaaatggagtgtcatgttttgtaacctatctaccaaaatctctgtaaccttctctatatgcaataaaatgttcatttctttatattatagagcctcttgattatttgttatagaacattagtcatgtaattaaaaatcaaggtatatgaattagtttggaatcaattttggcagaaacttgaaactagatttattcagataacagagaaaatactctgtgaaaaccaaggaaattgacaagagtgaagaaacagaaacagaacagaacaagattgaaactatttagacttagatttcatgagcttttgagcatcagctggagtgggaagtgcaggaatagctcctttctgagtagtacacactgctccacatgcatttgcaaaggcaagtgcttccttcagcttcccttcatcctgcaacattcacattactcaatcaccaagactcaatttcatatgccttatctatgaactgaaaacgtctttggttatacgtacatcgagtatggagcatcttttccaatgagac

SEQ ID NO: 18161 - DNA, 442 bp, Arabidopsis thaliana columbia
gccagtgtgctctaaaggcgatgtttatcgtattttcccgtctggctgttatacaccccttcatcacgaataccggttgttgaatcagtccataaaaatactcgtgaacgccacattccccacagatcaatatttggtgttaaagcccaataacctaatgctccttcagaaactgtcggtaatgtacgttgcgaactgccagccattaacggaatacgataaggtaagctaccataactataatccgtcccgaagcgacctaatttaagcaggctattttcactgggttttatttttactgcccccagggcaaagcccaaacttttatcaccatcaagataccaccgggtactcatatcagcacgagcatctaatttataaacataatacgccccgccttcaacgccaataatattggaataataaccactattgagatcga

SEQ ID NO: 18162 - DNA, 511 bp, Arabidopsis thaliana columbia
cactgcgcagttatacacaaacacaccaacattctctttaactccaagcactttccaatccaagtttccatctttagctcccgatttcggacaccaagaattcaccacaatgccctcgccatgaggacctcgttgcccacaaaacaccaacaattgatccccgcacggtttaaacgccagtccccaaccgtttgacgagtccaccatcggcggtaaccttcccatcacttcccatttgttcttcaccttatcatacttcttaaccatattggttgagtactcaagcgtgaatagctcgttgttaaccactacaacaagtggtggagcctgtgctgctcggttcacattcggatacattccttctatcttcctccatttccttgtctcaagatcaaactcctctccaaaagtgactgatacattagggctcgacatgcctccaatcacataaaacttaccatccatgaaaaaacccgagcatagtcttcgaggtgaatgcatattgggaagc

SEQ ID NO: 18163 - DNA, 825 bp, Arabidopsis thaliana
attgacatgttcttgaaggtaatgtccgctctcaaatgcatcggatttatgtcattcgaaactaaagttttgatcttttgattatacagcaacatccaggaataacaaagagtgagaagaaatcatcaagcaaattaatggattgccggaaattatcgccggacgttgtgctcacgccgtgcaaaacgagaggttaccattacgagtcgttgtacaaatcctcttcttcgagcaagttcgtgccaccacgaaaccttctcttccaccgagcggctcgcacgggagctcaagaacgacaacagaagaagagtgtgagtcagtcacagccacggaggagacgacaactacgacgagagacaagacgagtagttctgagaagacgaaagcaaaaggagttgtaatgtctcggattttctcgaagctttggacaggtaaagataaagatggcgttggagatgttagtagctcagatacatctgaaagtcctggctcagttactaccgtcggtgataaatcgacgccgtcgactcgccggagaaggtcatcgtcttgactttagacaatttgggctttttaaaaatcagggcttttctttaagctaacaaatttgggtttttttgttttggtgattaataacccaaagttattggttatgtgaaccgttacaattttgagaaatccaaattctaatgactaatgttgcctctttttgttttgtcaagaattctactaatgttacccttttagttttctttttaaatttaactaaaaagtaatataaccgttttggcccattttgtttatatgtatagccaaccaacttag

SEQ ID NO: 18164 - DNA, 1699 bp, Arabidopsis thaliana
caagtacaccatatataaaccaaacaaaataaatcataattcattaaaccaatagatgtagatcctaatctcggatgtttacgtatagcatatagttacatcttatattaaatgttgaccatgaccaagcttatatacattacaattttcattttgataataagacgttgagtttgccaaaatctcttccaaacttgtttgactatgacatatgatattttagaataaaataggatcggagactttttgcaaattcctaataagataaaacttcaacccacttccaagaaactacacatgaagaagacttcagatagtcagctagtagctagctgctcctgtcctggtcgatgacccaagcgcgtcctaattctccaaatgactattcctacctttcaccttccgctagactacacgcataacacaattcttagtcagtcagtcagtggctagatcacctcccatcagactatgcgcataacaccttccattctcatgatgtgtttttccgccaaaaccgcaaaattttattttctagccaccatccgaaccagttttctcctatttagcccacatatcggagggcgttgattttggttgttccgaaaggacgagctatcgttctttgaatttgaaatagttcaagactccaatatataaaaatgaaataattctctggttttggttattcctcattttaatttattttcaacatatacgaatacgattcaattaagaatatcaataacacacttcaaaacacacacaagaataagccaagtcctccaacaggattaaaataataaaaaattacattcgcatggatgtatcttcaaccacaagtaaacgaccaaaccatgccactattctcttagctgcgagtcacttgcttcggttccgcaccacgtagagtaccgatccaagctggtggctgcatcccagtctgctcataaaccgtatcaagaaccggaggcaacatcttgtaaagtccagctatatccttcatagcattcccactaccaccaccctgttctccaccatggttccaaacactaatcttgggctgcaagtctctaaccgccatcgcattagtcttagcgatctcttgataaataccattgttaatcatcaagaagtctctaagacaagaatagtcattctgaacagcgtctaagagggttcttagataagtcccttgcgcactagctaaggcaacaagtccctctgcttctttctgctttgagtagaaagccgcatccgcttgcgctttctgtgcctcggcttgcttttgtttctcgtatagaaccgcctctgcttgtttctgcttgttgtatagttcccaatttgcttcttgaaccttggtttcatactcaacactagctttgctaaggaactcagccttgagcttctctgttcgagtcaaagcgttcattttctcgacctgagtctgaagctcagcttctctcaaagccacggccttggttgcttcaacgtcagccacctgagcatccttagtccaagcagcttttttcatcgcaagctcggcattggccttagctacatcagcctccttctgattctcaaacactttaacgtcagtcctcactttgatttcttcttttgttccttctccttgcctctgcatcgatatgatctttgactcagcgtcaattttggctgcgttctggagagtaagacc

SEQ ID NO: 18165 - DNA, 1001 bp, Arabidopsis thaliana
aaggcgatctttttgtgaccccaaacctaacaataagcatagacttcccttgccctgtaggtctacaaagaaacagccctgaaaaatagttcttcactccatccttcccctcgaactctcgattgttctgcagaacacaaggagcatcaaaccgaagtaaattactccctttcccaccttctttctctcggccccaagtccctgcgaaaccccgattacttcgctctgtgacctcgaaaaccaaaggctgagcatcttctcttttagcagtgaaatccgttctatcatgagagataggaacatgagcaggatccatcagattctctaaaagaatggaatggtcataaggaagctcatgagtagtcgaaatgtcgaaaaaaccgggtctagcgaaattctcaaaccaaggaagcttctcagggtttggaggtgtctttgttgacatccacacccacacaactccttgtgaatccttcacctcatacgtcttcacacaagcagcctttggaatcttagcacttgcaggaagctgttagaaacagaacccaaaaccagtaagtacagagtaaagagaaaatctcgaaatagcaaaaatcagtaaacaaagaacctgaggaatcttgacacatttgccctctccttcaaattgccaaccatgatacaaacattccaatctcccatcaatcaattgtccttcagacaacttagccaacctttataaaaaaaaagacaaaactcaatttcagattcctaaacaaaagtacaaaactagtggttgtggttttgctagatgatttatcttaccgatgaggacaccgatcttcgtaacaacgaagtgttccttcaccgtctttatacaaaacaatttgacgatcgtagacggtgaggccaagaggcgcatcttcagggacgtttttagttaagtacaatggataccattcctctgtccaatcataatccgccacctcaacacgtttctcttcttcagggtttaaaagaac

SEQ ID NO: 18166 - DNA, 916 bp, Arabidopsis thaliana
tggcagatattctcctaggttgagtacaaatgatgttgcagaatgctccccgaccagactctatctctgattccaaaatgtattgtggaagctgagttgtcttaccacatccagtctccccagatacaactatcacctgagaatttgagagttgagatcaaaaaattaatttccatgcattgctgcattgcgaagatatcccgctctaaaattcacctggttccgagcaatagcttgaagaagtctttctttgtccttgaatgaaggcaaagttttcctgaattccagcatcgtccgtccctcaggggattcctattattcaaccaaataactactgctatagcagaaagtttttgataaaaagacaagaggcgtggggtaaagatgattgagtaatacctgccaggttctctgcatattgcgcatccgcatactcctcctctgaagtaccttctccataacagaaccatcgagaaacgaatcagaattttcatcgggaagttcttcagtctgtttaggaggttgagaatcacgtacgcattcattagcctttcctgagcttagctgctgactatcaagatgttcctggaggagtccctctacccttctttgcaaactcaacggaagcaccacctgcacgatgagatgcattacaatttcagcataaaactacaaataaaaactgtgcattatgattttggtaaaccaagggagacactgttacctcccgttgtggtcgcttatcatccaaatctggtcggtagttaggacgaaaaaccttgcttgcaacaaccacttttccataaatttcacccttaaattggaaccaagaattgggttagcacatagcgcacacaaacacatagggttatttgattccaataaaagtcagttatctatacctgtagggaacctc

SEQ ID NO: 18167 - DNA, 625 bp, Arabidopsis thaliana
tataatctgttgatgacttgattatcaccttcaaactctacaaaacgatatcccaaaccccaagtgcattgcattgcccaaattaaggccgtgcattcagcttcttctattgtataacaaccttcatattttcccataccacagttgaggacgaatccttctgtattccgaataatctaccctaatcccgacacagtgtctccttcatggtgtgaaacatcgtaattttatttaacccatccatgttttggttttttccatttcttttgtgtttgagaccgtagaggaagcagttgctgctgactcccctgtttactagtagggtcgttagatgtagagagccattcttgggtgtccgctactgccaactgaattaccttagtaaaatccatgggttgcttgttgaagactagattgttacgagatttccataatctccacattagccagaagggtagacattgaggaagcttgtctaaatgagggtgattgtgtaatccgaacaaatgtcgtaacttgtcctccaatgacacgttggtgtcgccaattagatgagttgggaatccagccgctctccaatcagaggttgcaaagtcgcatgaaaaaacaggtggtcacttgtttc

SEQ ID NO: 18168 - DNA, 691 bp, Arabidopsis thaliana
tctattgcatggtttttgtatcttatctttgtttggtttgtgatatgacagaggaacaccatgtgttttgccttccactcaccattagcttttcttgggattcgtctttaaattattatagcatatttatatatacaaaaacataggagagagagaaagagatcgacattaaagacgcaaaagggtccatttttcctcaagtacatcaaagtttgcagctttcaattgtcccaaagaaaccctcaatttcttgtatccctacattaaataaccaaatgacaaataaacaaaaagagccctcaattttatttcgatattataatgattcaactagtgaaaattttgtctcttttattcaggtatcaaattggttcataaatgctagggttcgtttatggaaaccaatggtggaagaaatgtaccaacaagaatcaaaagaaagagaaagagaagaggaattagaagagaacgaagaagatcaagaaacaaaaaacagcaacgacgacaagagcacaaaatccaacaacaatgaaagcaacttcactgccgttcggaccacttcacaaactccaacgacaaccgcaccagacgcatcagacgcagacgcagcagtagcgacaggccaccgtctaagatccaacattaatgcttacgaaaacgacgcttcatcacttctactcccttcctctta

SEQ ID NO: 18169 - DNA, 1073 bp, Arabidopsis thaliana
ctccttttcttctctgcaaattgccatctgtttttcctatagacccattgtcctcctctcatttctctctttccccatttaatcttattttcaaaaaaaaaaaaaatcacatctctatatcaccacacaaaaaaccataaaatcaaaaatcgttacccacatttctttcattctatcctaaatcctcatcactcaacctgagctcacaaagctaaacaaaaaaaaaagagcttaggcggagaagaagaggagaccaaaacaccaaacaaacaacaatggctgtctcaactatctactcaacacaagctctcaattcaactcatttcttaacctcttcttcctcctccaaacaagtcttcctctaccgtcgtcaaccacaaaccaaccgtagattcaacacactcatcacttgcgcacaagaaaccatcgtgatcggactagctgctgactctggctgcggcaaaagtacctttatgcggaggctcaccagcgtctttggtggcgctgctaagcaccaaaaggcgggaacctgattccaacacactcatcagcgacacgaccactgtgatctgtcttgatgattaccattctttggataggtacggtaggaaagagcagaaagtcaccgctttggacccacgcgccaatgactttgatctcatgtatgagcaagtcaaagctcttaagaatggtatagccgtcgtgtaaccgattgaataaccatgtcactggacttcttgaccctccggagcttattcagcctcctaagattcttgtcatcgaaggtcttcacccaatgtaagctacacatactctgttatgatactctgtcttgtatctgagacatactcaaattttagagtttggaagtctcttatcttgtcggaatttcggagaattaagaatctggacttagatttatactagaatcagtatcagaataattaaagatggatctttgaatctatgcatgtagtgtgtgacaccgattaatttttattcgaataattaagtctatagttttggtacttgtaatgttttataataatatttatctacttgtgaaggtttga

SEQ ID NO: 18170 - DNA, 572 bp, Arabidopsis thaliana
ttttgtttatatggatttgaagggacgaaagagtttaagaaggaagtgtttgataaggttcaattagaattagaccagtttggtctcgtaatctacaatgcaaacgtgaaacagctcgttgacgtgcctggacatgagtacttctcttacttgggtcagaaaacccaaatggaagcagcaaatcaggccaggatcgatgtggctgaggccaagatgaagggagagatcggtgccaaggaacggactgggcttacgctacagaacgctgcgaaaattgacgcggagtcaaagatcatatcgatgcagaggcaaggagaagggacgaaggcggagatcaaagtgaagactgaggttaaagtgtttgagaatcagaaggaagctgatgtagctaaggccaactccgagctagctatgaagaaagctgcttggaccaaggatgctaaggttgctgaggttgaagcaaccaaggccgtggctttgagagaagctgagcttcagactcaggtcgagaaaatgaacgctttgactcgaacagagaagctcaaagccgagttccttagcaaagccagtgt

SEQ ID NO: 18171 - DNA, 1052 bp, Arabidopsis thaliana
attctctatacatcaaaaacaggatcagtaccggttactaggagaaaatgtagccaagttacggactgatatgatgaaagaacagctctccacgttccgttcccagcttgaagagttcgctcgtaaacacaaggtcgttatttgttgattcttttttatattttgttgttgttgtgtttgctgttgttttgtcatcgtcttgatttcgtaataagaacatgtagtttaataacattttcctgaatttgataaaattgtggtgaaaagaggcataattttttctttggttgcagaatgacattcgtaagaatcctgccttcagggctcagttccatgaaatgtgtgctaacattggtgtggatcctcttgcttctaacaagggtttctgggctgagctccttggtattggtgacttctactatgaacttggtatgtttgctctctctttctagtgccactgaagaagatgcttctgatttttggttagctatgagtcttaagggatataaaatctcttgtgtacttttttctcttgttttgaattggacatgccctctgtgatattagaaagcagggatgtaacaattttcgtgaattcattaaataggagttcagattattgaagtttgcatgcttacaagatcacataatggaggtttgatcagcttgcaagagctctgcaaccatcttcgtcagagaaggaagaaagaccgtgaagctgtgactgaagatgattgtcttcgagctattagcaagctaaaggtttctatctaacttgtgtttttgttttttctttcagatttttaatcaatgggaaaattttgaactgttcttgctggtatcttgggattttctctcaggtattgggtagcggatttgaggttacactattggcaagaaaaagcttgtccgttcagtcccacagagctgaacaaagaccataccagattttggagttggtcaggttataacatatgagatcatattcgcaaaagaaaacactattcatgtgttcgatatacttagtagtctcgtgaagtaccaaggattct

SEQ ID NO: 18172 - DNA, 584 bp, Arabidopsis thaliana
ctagtaacggtccgccagtgtgctctaaagtatgtccttgctctgcaagttccatccaatttgcctcatatagtttgggaccaatgaggaagttcaaatctttgatcttgtcatcttcacgtaggagtgtggcagtcaacccaagcttgctctgcgtcgcaatggcagaggtaacctttcgaaacatgatcgcgggcacgacgtggacctcgtcaagaatcataagaccccattcccgcgactgaatccagtccatcatcttctgtgcgtcgtgggatcgtgctcttgtttgagaaaccattgaataagtggagacaataataccagtagaccggcggaatttctccttattgtcggaagtgaaaacggcaatatcgccggggtcgatatttgaccaacgcaaaaattcgttcctccactgtacaactgacatggaactggtgcaaaggatgattgttcccttcttgatcgtgcaggcagcggtgataccaacgagtgtcttgcccgcaccacaaggcaggacaatgataccactctttgcccgtccattaccaaacatcttactcaagctcttttcctggtag

SEQ ID NO: 18173 - DNA, 1240 bp, Arabidopsis thaliana
tttgatcgaatgtcggaagagacaaagatcagaaaacgttgatcaagttcaggaaaggacacagatcggaaaacgttgatcaagtctaggaaaggacaaagatcgggaaataatgatcgagttcgggaaaggaattggatcggaaatttgatcgaatgtcggaagagacaaaagatcagaaaacgttgatcaagtccaggaaaggacaaagattggaaaacgttgaccaaatccaagaaaggacaaagatcagaaaatattgatcaagtccacgaaaggacaaaaatcgagaaataatgatcgagtccgagaaaggaccaggatcagaaatttgatcaaatgtcggaagagacaaagatcagaaaacgttgatcaagtccaggaaaggacacagatcggaaaacgttgatcaagtccaggaaaggacaaagatcgggaaataatgatcgagtccaggaaaggaccaggatcggaaatttgatcgaatgtcagaagagacaaagatcagaaaacgttgatcaagtccaggaaaggacaaagattggaaaacgttgaccaaatccaagaaaggacaaagatcggaaaatattgatcaagtccaagaaaggacaaagatcgaaaataatgattgagttcgggaaaggactaagatcaggaaacttgatcaagctcggaaatagagatttgatcaggaaacttgatcaagctcggaaatagagatttgatcaaatatgatatctaaagtctcggagagctaaagatgggaaaacgttaaggagtaaacaagatcttacatccgctgaattcgaggacaaattcagtttaaggggggtagacttgtaacgcccgtgtcccaagttagggagtaaacaagatctctcacccgccgaattcgaggacgaattcagtgtaaggggggtagacttgtaacgaccgcgtctcgcgttcataaagaggcaggtttgtcttaggagaaaactagatcatggtcgaggaacggaacaaaatactaagtaggaagaacgagaaagtataagctaaaccagctaggtgagctggacaagctgtatgaactagctaggtaagctatgtgagctaaaccagctggaagactagctagctcagctaggtgagctgaccgacagctcgactgagctcggtgagctgatcaagtactaacccagctgggtggtccggtcagctgacactcgagctggtggactgtggtagctcaggggat

SEQ ID NO: 18174 - DNA, 678 bp, Arabidopsis thaliana columbia
catacaacaacccctctcttttattttggtcctagcttcactctctttttaaggatttctctgaactacttctctcattgtggattcgatcctaaaatacaactccgatataatgtgcacttgcagtagtcgtgtggtctttcaggtaaaagtctgaaagcgaaataaacgaaataaaacacgcatcagctcttaagttcttatttttgtggtttgaatcctgatttaggattgttactagaaacccaccatcattataatctggcttgacttagttgcttctatacacatcttgattgctagcaataacaatggactggattggcaccccttatagctgcattgatatgttagtgtttaaggggaattgaactgaaccacacttcagcacataagtaggcctgaaaaacctatttattaatttggcgccgttgccaattcattgttggattgttacattcaagatatcagaaaagttaagatcaacttcttttacattactcaagttactaactcatcttttcgtctgcttgtttttgtggtataggtactaatctttgtaaatgcaaactcggtccaaaggttctgcacacctactaccttttaaagatagaatagacagaatagctcgtgagttacaagaagccaaagcaaaggcagcttgtgattagcaagaca

SEQ ID NO: 18175 - DNA, 982 bp, Arabidopsis thaliana
ttctactagacgggcatatagtgtacgtactcttgtagttgtttccatgaccaatctaattatatgattttgtgcttgcagacaggaaagaaggacgatgttgtcgaagcgggtgtttctcaaactgaagcaatcgttgctcccgtaaatgagaaagagaagaaaagtgtaagacggagagttaccttctccgatgacacaaaaaatgatgataaaaaaggtcctgatgtaatatttgttgaggagagagaggcaggcccggaggtttttgttaaggctggcgattcgttgtacaatcctttggagaaggttgaagaagctaaattccagaaattatgcaatataatgcaaggagaaaaaaggtatgcatctgtgcattcacacaattatctgtttgtttgtcaatcttatatcaatcataactatttcatatgtcttactaatttcaggtgccatactcttttcggctttcgaaaagtgggcaacgaattcttcataactctagccgaggctaatgattgggttggctcatacgtaagtgaccattaattacgtacactgttgtaagtgtacgtatatgtaataatatgtttttgaaagtacgtacataacatcatacttttattaactttccagcacatggaaatgatcgcactcttgatgtggcataagaacggggagcatatgaagagaaatcggtatgtcgtggtggatcccagactcttgatgtggcataaaaacggggagcatatgaagagaaatcggtatgtcgacgttatatatgttctcatgaacttgaaagatgagaagcattgggttgggttggctatatgcctgtaacgtcgctctattgaaatcaaggatcctttgatttcacttacgcgggagtctgtggttaggtcacgtatccttccaatactggagatgttgtcgtacctagtcagagcgacatgcaaagattatctcgaaaagccttatcccg

SEQ ID NO: 18176 - DNA, 1533 bp, Arabidopsis thaliana
ttttataccatttcacacatttgtcatcactttgcatgtttaggatagttttgcatgcatgttacatatttgtgttgttttcaggtgatttggagctgtcgacgagctaactggaagaagcggacctgatcatgacaaaccactcgacccagaggtcgagtaggagcttcaagatctcaagagaccactcgacccccaggtcgagtagaagacatcaccaattcacctcaccactcgaccaccaggtcgagtgtcttcatctccatctcctgaccaccactcaatcacatcactcgaccccgaggtcgagtgtcttcatcccattgccagaccactactcgacctcatcactccacctggaagtcgagtatcaccatcaacaccactcgactacatactcgatgacaagcttcagagccttcttcattccgcactcaacaagacactcgagcacaaggaagaaaagaagactccagctattcactcgacctcccactcgaccacatgggtcgagtacagttcttaatccgtcccaatacttcgtcgttttaagtattagggtttcggaatatttggctataagtagcatgtacttcacattttcgcagacaagaagtttttatctagttttattccgcagaccttgtgttctagacattttaacagtcctaagtattagtgctctgcaaagagctgtgttggtcgagtgtttcactgtttctgtttgattttctgttttctgcatgttcacttaggactgttagaacacaccaaaacctgttattgcttggcttgacttagtgacttctgatcacatcttgattgttagcatcacacccatttggattgacaatctaaaatactacaacgacatgattggtgttttaggataattgactaaaaacctattatcaataacaatcctaatattagctagatctacaattcatctatctccagagacaattccttagacccgacgctttaatcacttgaatctacacatcgtttacttgcttatttgtcttttacattcatttactttatctagcttatttaaaaacatcataagtctattgtgtgaacatagagagctcagtggaattcgacccttaagtgctaacgacgatcttttatttgagggagtaagcttaaggcaatttgagctatatcaactgcctatttgtatctatactcgcacagagatgtaaagttggctatatctcaaccaatgtaatagatgtatcttctcttaaagttatttcaaagagactttgattcattttttcataagagtgacctttcaatatcttctacatgttgtctcgctactatttgctttggaccttttggcgaatagtcttccctgtgcatgtaagggattttatttttttgttcgattgaagattcacttacaatcatctaactatcctttggtgtatcaaaaacaggcagtgactttttcggacttgtttctagttgtttgtcttcaatgtgtaatgtatatattgataaaacctgtagaatatattt

SEQ ID NO: 18177 - DNA, 639 bp, Arabidopsis thaliana
caactgcgatcgtatgtcgcgatcagatcgttagccagggcggcggtctggaaaaagagccatgtttaaagccaaaatactaggatactaagccacaggaagacatgtaactagcgcgtacctcaagtgatgatctggcaaacttctgatatccctcttttagaaccagatcgtcaggattagggaaatccttcgtcccagggagcatcaagttgcgccaaagatggctggcggcctcttgatctctcacgaggaatttctcaccagaatacttgaacgtaaactggtcagaattaagagtctcgcctcgcgacaggcgaaacgtctttggagcagcggcctcatctaaaccggcttcagaagccgacctcttcttggattggttagcccctcctttccctttctcctcacgggacctcctggaaatcccgggctcagcaacggtttcgtccttgtcttgatcaaggatagttaggcccgtgttgacctcttcgcctgctggaggggcggcataaacgacgacggagcggtcgtcggtaatattttgaacttcaggctcgacgacctgaacggactgacttcgatcgcactcggcgatctcttgagctggcacgacgtcggccccgttcaagacacatc

SEQ ID NO: 18178 - DNA, 1428 bp, Arabidopsis thaliana
gtagagtttttcatctaccagaacgaagcgtgcagcctgagctttaagtttccgagcttcccatttgtccgagggcaatttcccctcggatatgtagcttttgatgggttctatccactaagagttgaattcgtcagggctgtcgtccggagcgtcgttgtgatccgtgccgatttgtatggggaggacatgttcttcttcgtcgagctcaatacttggcttttcgatgaactctactgggatgactcttctcaggcgcgggtcagatgtcgaggctagagctgctagggcgtcagccgatgtattttctcctcgagggatccttgttaactcgaactcgtcgaaattcttcgccagattttgtacattagtcagataggtttccattctttcgtcccgagctatgtattctccgttgaactgatttgcgacaagttgggagtcgcaaaaagctcggattttctctatctttagcccccgatccagattaagtcctgctacgagcgcttcgtattcggccacattgttggtagccttgaagtttaatctaaatgattgctcgaggacctctgctgttggcgaagtgaggcggatgctacacccgagccttgttttgatgacgagccgtctacgtgcaatagcctagttgtatcgagtggatttccaggcatccttagtgggcagttcgacgataaaatcggctaggacctgggattttgcacatgttttgttccagatattcgatcgtattcgctgagctcgattgcccactaagccaggcgtccttattggcttggactgtgtaagatggcgcagagtggcatggatcccattactatgacggaatgggattgaaagtagggtcgtagcttccgagccgacattatgactcctgaaaccagtttttccatttacgaatagcgaaattctgtgccggtgaaagtctgcgagacgtaaaaaatcggtttctgctcgcctctgtcttctcggactaacactctgctgaccgcagtatccgatacggtaacatacaagtatagtgtttctccgattacgggttttgcgaggatgggcgatgttgccagatacttcttgagttcctgaaaagcttcttcgcatcgggtcgtccattcgaacttcttatttccctgaagcacatcgtaaaaggccaagcatttgtcggttgagcgagagatgaaacgattaagggccttaactcttccggttaggcgctgcacttctcgcttgttctgaggtgacgccattcccaacaatgcctcgatttgctttggatttgcctcgatgccgcggtgtgtgactaggtacctgaggaactcgccagatcttactccgaagcggcactttgtaggattgagtttgatgttgtagaggttaagctgcctgaaaattcgcgtaaatggggtatgt

SEQ ID NO: 18179 - DNA, 531 bp, Arabidopsis thaliana
ggtgagtgtgacttactgtattggccccaaggaatgagacatcgagagcaatgagcaatgtcgaaggctctggccggaaatgggagcctaatagaggctaacactcctatgatggcagggactcctctctcaagtgcgaactgaacctgagcttcgtgtgtgtctcttggtgcaaacgacatcgttactatgttcctcgacattagatacgccccaaagctcgctacctattagcatcattagtttagactttagagacagtcgataaatttacataacctatgatcgtaaacgctagaattaaatttacccatttacatcaataagacaaaaaaaacagtttaaaagtcttttgaccactttacttccatatgaagattgaaactatcgatgctaagaaatccacattttccaactgattgacctctaaagtctaaaccaggcatttacttagctgtaatgcaatttaattacttgttgggattaaaaggtactgataaaaaacattacagcctgattattcaataaaaa

SEQ ID NO: 18180 - DNA, 1499 bp, Arabidopsis thaliana
tttttgctttcaaatgttagttgttcactatgtctcatttacattaaactctctttttctttttcccaaaagttgttcaccaaaaccaattgattagctctcattctcataaaaaaaacaaaactttacaacaattactaacctttcacatgcacccatttatttaccaaactacgaaaaaagatacaaccttttatatctctctctttaactaacttaaggaactaaccattctctcttcctttttttttttcagatacaaaacaatgaagaacatactagcttgcatagttaccatcataaccctctcaaacctcataaccatttctcaaggaagaagggtatcacagtcatttgaaacatttgagtacacagcaattatttgcagatcccacagtgcctccataacagagtacggtggtgtaggagacggcaagacgctaaacacaaaggccttccagagcgccgttgatcatctcagccaatactcatctgaaggcggagcacagctctttgtacccgccgggaaatggctcaccggaagtttcaacctcacaagccatttcactctgtttcttcacaaagacgcaattcttctcgctgctcaagacttaaacgaatacccaattctaaaggctttgccttcgtacggacgaggacgtgacgccgccggtggaagattcgctagtctcatcttcggcactaatctctccgacgtaattatcaccggtaaaagttttatcctttttttcttttttcaataattcgaaattagagagaaataaacctgaaccgttggatattattttacagggaacaacggcacaatcgacggtcaaggatcgttttggtggcaaaagttccacggtggcaagctaaaatacactcgcccgtacctgattgagttaatgttctcagatacaattcagatttcaaatctaacgttccttgattctccatcgtggaacatccacccagtgtatagtaggtatagttatatcctgtgtcacactctcatctaataccatgcacactcaccataaccaccgtacgatttaatttattaattaaaatatcccacgtggcagcaatatcatcgtaaaaggcgttacgatcatcgccccggtaaaatctccgaacaccgacggaatcaatccaggttcgtcgccggtgatcagatcggattaattactccaaattctcctactttatttctctaatttcgattttaatttgagttcagattcttgcacgaacacgaggatcgaagactgttacatcatatccggcgacgattgcatcgccgtgaaaagcggatgggacgaatacggaatctcattcggaatgccgacgaagcacctcgtgatccgtagattaacctgtatctcaccgtacagcgccgcgatcgctctcggaagcgaaatgtccggcggaatcgaagacgtgagagcggaagatatcaccgcataccaaacagaatccggcgtacggataaaaac

SEQ ID NO: 18181 - DNA, 708 bp, Arabidopsis thaliana columbia
gtggggaggatgctgacatggaataccaaggttggagttttgaggagaattatagtttgtccactaatagaagatctatcaggtattatttaataatctttgatctaatgttttcattcattaaaaaaaaaactttataatatagtctgtgtgtgtgtgtattgatgtctaggccacaagatgaactagtggagttattatggcgagatggacaagtggttctgcagagccaaactcatagagaacaaacccaaacccagaaacaagatcatcatgaagaagccctaagatccagcacctttcttgaagatcaagaaactgtctcttggatccaataccctccagatgaagacccattcgaacccgacgacttctcctcccacttcttctcaaccatggatcccctccagagaccaacctcagagacggttaagcctaagtccagtcctgaacctcctcaagtcatggttaagcctaaggcctgtcctgaccctcctcctcaagtcatgactcctccaaaatttaggttaacaaattcatcatcggggattagggaaacagaaatggaacagtactcggtaacgaccgttggacctagccattgcggaacgaacccatcagagaacgatctcgatgtctcaatgagtcatgatcgaagcaaaaacatagaagaaaagcttaatccgtacgcaagttcctcatcaggtg

SEQ ID NO: 18182 - DNA, 1298 bp, Arabidopsis thaliana
cactctatctctcaatctctcgatctctcgatctctcaatctctcgatctctctatctctctcacttgtctcgatctctcgatctctcaatctctcgatctctcgatctctcaatctctctctatctctctatctctcaatctctcgatctccgtcgatcttccatgccgaacgccggtcgaggaggctcccgaaagaggaagacgacgcctaatgttactcagagagtcggcggttcaacgacgcctagacctcgggatctgccggcgcagtacaacttcactctggcgccgacggttcatgttccaacgacgcagccgactcaagctggtgtccgttcaacgtcagccccccacgtacgcgactatccaccgcctctacaactcttccagaactccaccactccacctcagggtgatggtgctccgcctcgatctgaagaggtccacttcaatccaccgccggaagagcctgctcagcaagatcctgagtcgccggaagagccagctaacagcaacccttcgtctcaagggaacaacttccaaaaggaagttcctaggacgttgccggagcttcaagaagactcggcggtggctctacaagatattatgtcagtgccaaacagggagcagtggacttgtgtcttgtctccaattcccaggccaaaaaccgagtggtaagtctctcaatctttaatttgttgtgtaacatagtagccttgtgaatactcgtgtgtgctcttgtgaatactcgtgtgtgctcttgtgaatacttgtctttgcttcgatttgaacactcgtgtgtgctcttgtgaatacttgtgaatactcgtgtgtgctttagtgaatacttgtgaatacttgtgtgtactcttgtgaatactcgtgtgtccttgttcagttctatacttgtgaatcgtgttctcttgttaatcgagtctcttgttaatcgtgttctcttgatgttctattgtggaaattgactttgatgtctgttaattgtgttctgttgctactcatgctcttgttatgttctatagtatgttctcttctctactgtgttctgttgcaactcatgatctattattgaacatagttgacttttgaacttagttgtgttatattttgttgtgtgcttttgacttttgaactcatactcatttcttattaattgtgttctatactgttgtgtgctcttgttcagttctatagtgtatgttctattgtgaatctgcctcagttctgcctgtgtagtgtgtaacatagtagacttgtgaatctccctcagttctatagtct

SEQ ID NO: 18183 - DNA, 730 bp, Arabidopsis thaliana columbia
gatcccccatccacagacggccacttgttgggaccgtcatccacacaccgccgcttgtttgaacctgaacctgatgcatccatgatctcggaatggttttgtttctcagagaaaggacaagagaagaatgaagagttgtagttgctaagaatcgacaagtgaaaagacaagaggaaaccagtgtatatatagtcctctaacgacgtttggtcctctaacgtaaagacgtttggtcctctaacgacgtttgggttcttgactattctggtgtcgtaaagcggtgtatgtatagtcctaaagtgacgtctagtttatttgatgggagggaagtttgggtttgacaagtcaaccaccacgttatacaaactcagccatcaaacgatttgtgtgatgacaagtcagccaccgcgttataataactcagctaaacatcgaattaaacaacaataactcagccgtgtagcacaatttgagcaatgataactcagccttcacgttagcatatatcagccgtaaaacgaatcgagcgatgataagtcagccattacattggtttttgttataattaacataataatagattcatacagacataattcttgttatcaatcatagtgtcaatatttagtacaatcacatgctaaaatcccaaaagacacagacatgttcgaaaaagcaaatcatgtctcaaaaaactgaatgggcattctatgaggtagttcatcgtaga

SEQ ID NO: 18184 - DNA, 1696 bp, Arabidopsis thaliana
ttgttaaggttgattctgcctctgttttctttcatcggagtatacagtagctggctgagtgaccacttgccagctagctaattggtcctggttctgatattaggaaaacaagcagaattgatgtcaaactgtaacaaacaaaaatttctaacgtttcttatcaaatccaaaactcaaaagaacactgaacttggaacataagaacatgtaagaaagaaatcccctttttctgtatgtaagaaagaactttggaacataagaacatggagattgacactatttaaataaaccctgttccacaccttcgcgatcccaagaaactctccttcccttgcagcttctgctttactaatgtgctttgataaagcgttccacgttttgcaagtcactcggacttctctcatcgatttcactggaacccttgagagtatttcctctaccaattcccggggaagatcggacatcttctccatatttttttcttttatggtttcaacaatcaacaaagatcgttgtagtagaattagggtttcttcttatatcccacgtctcagtttatagattaaaattaaataagtaaataaaactaacgtagcaacaaagtcgttgtagtatagtggtaagtattcccgcctgtcacgcgggtgacccgggttcgatccccggcaacggcgtctttctatgtctctcaagatttttaacatcattaacgttacctttacgttattgccttattggggatacctttacgtcatttgaggtaatcgtctcaatggtgacacacaaagctaaagagaagaaagggctagcatcttgttgtctggtaatggaatttcgtttgattcaaaaccattgtggttcagcaaactacaactaactatcttcagggttgctggcagtcttatggactttggtgatcatagtttatgtcagttccactttgtaatgttgttctcttcatgttattcgttggtgaacaagttaatggaggtacaaagatggtaaaaacggtaagttacacaatggagataataagaagagagacatgtttagtaagaaacaacgtttccaaaatcaaaatctacaactcttgagcgcaaatgcaaagtcatctagaatactgaacatgccatagttccaactgacaagtatcgaaactccgctaaaatgtcatttaagatttaaagcaacagtgtcaaataggctagtaatccaacaaaccatttcatgcggtctagattttctattcaacccttgaatatccctgactttgaaccagcattacaactcataatctgagaccgctactttaagatctggttcatgtttccttcgcagggcctttcttggctgcttcagctgcagccttctctgcttcgatctcagccacaatgatatcaatttcttcttcttctagttgcttcagaacaccttcctctcgtgtcattacagcaacctcaatgttctttcccccactctcaacaacctgcaaaatgcaaatccttttcagcttctttacaagttccaccactgacttgtgcgtttgctaagtaagctcatctaacattataatccaactcaattagtaaggtcttctacattttcaaaaactttaacattctctaacattcacttttaacctaaagccacacctataaataatgaagaatcataatgaggttcaaagtttggcatg

SEQ ID NO: 18185 - DNA, 747 bp, Arabidopsis thaliana
tctaggttttccaatagtcggattgattcaaacctgcaacactcatcaatcaggcaataaacaagagaaatatagatcatgattcctaactaaactaaagaaaacgtttttgttttttttttttttttccttttggggaaagaagggaaagaaataagccaggggaacggcaaattgggaaccaaaaaataaaagcatcattagtaagaacctcctctagacttaaatgacactgtccttagtggcattcaaatccagagaaagcgggaaaaataaatcaaaaagaaaataaaagaaagggaaaagaaaaatcaaaccagtgagttgcctcccactaagagcttgttttgagtcaatagcttaacttggcggagttcaagatgtgggtggagtggtggaggattgctgctgcctcctcgccttccaaggcggtgtgaaaacggatctggttggagcagtttctggtgtcgatcgacactcaggtgtgtgtcgatcgacactcttcttgtcacctgcaagagcaacaggagaaacaagctttcgaggaactctgggcttgttatctagtgaagcagtcttcgcataatctaaagcattaatcaaagataaaccaggagaagagagagaagagaacttatcacataggtcctcaattggtgtgggctgaagagactgtgcagaatcctctgtttgcaaaactcgagggtgtcgatcgacaggggtagtggtgtcgatcgacatcgttcc

SEQ ID NO: 18186 - DNA, 721 bp, Arabidopsis thaliana
ggctcggtctatgctatgtagggggaatccgactccaaactaggagaaccaagacggaagagagcacgaacgagatcgatgagggtgtctagaaagtgcctgaagaaggttcatgtgatgatcaaactctggaatgctactgggagtactgactgtaccaaaacctcctccaacagtgccacagggaacaagcaagccccatatcaacagtttttctcctaacagcttttactctctccagcctcatggttttctcctcatcttcatcagactcaggcagcaggcgattatcttcagctacccactagtcagtaacatcaagtatagaatcatcatcagctactctctcaccgtcagctttttccttggcttcctcaggcttagtcttggggacagaagaagtatcaccgtcggctttttccttggcttccttaggtgattttggcttttttattgtcacctttggagtcacctttgtagcagcctttcttcctcttttggctggctctttcacaattagctcatttaaggttttctcctaaacattacctttcttctttggtgatgtcttcgctttggaaattctcctcgccgccgtcatagagcgtaaacggcgggaatcaggagacttctcaataaaatcaatatcagaattgtttccatcagtggccttagcaaattctccatcaagattcctactaaccccaacctcagcaaaatc

SEQ ID NO: 18187 - DNA, 680 bp, Arabidopsis thaliana
tgattttgttttattgtttttggtcataagtaaataattgtcgatggaattacaggaccatttgtttaaatgggttgaagattgtgtgtatgaagaggttgtagatgcaataccgagaatctctatcattgacagcgaggtaaacaatgccaaatcggaggttgctcgagattgctgaattaaagggtttgatccaagaattgaaagaagatgaaatgtggagcaaaagagaattgaagagatggaaatcgatgaccaaagtgtgcttggtgtgcctttgtataattttcattgcaattgtgatcataatgttctacaagaccaaaaatgaggaaattgaagagaggttactagcgtttgtgtttggttagatggtttgtgtttactagtgatgtgtgtttggttactagtgtttgtgtttggttagatggcttttatctaagtttgtaatgaaatggtactatggtaatgcaatgcttgttttgttcttggttactaatgtttgtgtttggttagatggcttttatctaagtttgtaatgaaaccatgattggtaatgcaattctcgctatggatcacaatgactaataatcctacaccaagttcatacattaaaaacagattcatacattataacactcatgtcacacagcccagacaagtcaccacaacaaaatgaa

SEQ ID NO: 18188 - DNA, 805 bp, Arabidopsis thaliana
ccccaaatggagagcttgctttagcaatcataatgtcatcttggaaactgcgaccctacttccagtcccactccatcgtggtgatgggatccatgccgctccgtgctatcctgcatagtccgagccagttaggtcgactggctaagtgggcgatagaggtcaatgagtacgatatcgaaccaaaactagacatgtgcaaagtcccaagtcctagccgactttatcgtcgaactacctactaaagaagctcgagagaatccgctcgatacaacttggctcctgcacgaggacggctcatcatcaaaacaaggctcgggtgtaggcatctgtctcacctcacccacatgcgaggttctcgagcaatccttcagactaaaattcgaggccaccaacaacgtggcctaatacgaagcgcttaagttagcttgggggctgaagatctcaaaaatctgggctttttacgattttcagctcgtcgcgaatcagttcaacggtgagtacatagctcgggacgaacgaatggaagcttatatagctcatgtacaaaatcaagcgaagcaattcgacgagtttgagttaaccagaattcccagaggagaaaacacgtcggccgacgccctagctgctctggcttccacatccgacctgaacctgaggagggtgatcccagtcgagttaatcgaaaagcctagcatcgagctcgacaaagaggaacatgcttttcccgtgcagagtaccgcgaattgcgaagatgcttcgaagtcgaatgacgtctcagacttggactgtgattcagaatggattg

SEQ ID NO: 18189 - DNA, 1468 bp, Arabidopsis thaliana columbia
tatccaaaattccccatttcgtcagaactttcccgacgagatcttcaaggacagcgtcctccaaagccacgaagaagaagtaatcagtgtaggcatcatccttgctcggaaaaccctcgataatcttcctgttcttggccgaagaaatatagaatctatccgcctcggacttcggaactcgccggatctccaaataattttggaggtgagcaagcgtgacctcactctcggtttcataaccacgcaccagaatcccgatgagatgtcttagcgattgggcagtaatttgcgagagggctatttgatacgaggtcacgtaatccaaaatcagcctcgggacgggcaaccagagaaaacaaaggtagaaaaatccttcgtacagagtgagaaagccctcgggaggatcgtcgactcgctcatttgggttaggaacgcgaagggtgacgttgccaaaaccgaaccacctttttgtttttcttccacttctttttctcggctttctcaaaagcggtctgctcgaacgctagaacaaggttctccgtctcatcaggcccgaaaaacagatgctcttcgatcttaactttgggataaaacggctcggtcacgtcctgccaatttgaagcaccggcctcgtcagcagttgggacacggagcttacgaacaagggaagggtcggaatctttgggcaaatctagctcgcgagcaatatcagcagtagcgtcctcccgagccacaaagggagtttcctcgaatgcattcgaagacgacgctgcatcagcctcggagccctcagatgaagtccaaacaattcgacgcttgtaaatcgggggaagatcatttcggtgattggaatcgatggaatcggcgagcctactggaaaccgagggagaaacgctgtttcgtggaaaactcatcttcggctcggagtcaactgacgaaacaaggatttggaaaatttctagccggaaaaatcaaaatgctaacaaacaacggcggaagactaccggaaaaagaaaaacgatgcaaagaaatcaagatcagagaaaaagaagcaaacctcaaattttttcttcggcaacttcagataaatgagtcctgaggagcagctcaatatatatagaggcataaaggcgcgtcgggtcacaaggagaaattaaaacacctcaacagcgcgtgagctcggtaggagaaaacacgcgcgcaaacctcgggaataagcgagacgtttccacttctcaagaaagaaggcggtcgcgcataaatgaaagtttgaccgtccgggaattcgaagcgccagagatcatgaacagagaagacatatcgccggctcggttatcaaaccgcatgaaactcatcgctcataaacaaagacaacgagctggggggcaaactgttggggtcggacttggtctcgtaggaaccgagccaactaaacaagctccgagaacgcctcggaaacatatttgtc

SEQ ID NO: 18190 - DNA, 2264 bp, Arabidopsis thaliana
tcgcccaataatattttataaccaaatcatgtaactccaaacttcttctccgatcttcatcatccataatgctaatgaaagcaggcaaatgcgtgaaaacaaggatacttttggatatcgaacaccttacaactgcaagttttcaaaagcaagctcaccatatattctattactctctcgcatgtgtcaacatattcacgctcgaatgaatttagctccatcacttttagcttctcggctttaacccacaaatcatgtaaataattctccaacaaaggcaccatcttattttctaaggatccagacgcggcttccatctgatgttcattaaaccaaacggagatttttttgatgattgcatcaagcattggcaataacgagtacttccttacgtctaagttgtgtctaagttgtatctttcccggggaaaaaacatcttgcccatttttcttccacggttgtatcctccaaatacttggtcgccttggggtatctcaacttaaacttatcatacgcccggttgaagttagcaacggtgtagttccgacttaacttctggaacttccatgcgagtacgtctctgttggtgttagtagcatggtcttttacattttgggacaaatgccaattacaatacccgtgatgagccgcggtatacacgttccgtatggcctttatgaggcttgcatttatgtcggttctgaagaccaattcagaagtattgggtacaaccgtttttagcttctcgaaaaaccaatcccaactagcatcattctcaccaacgagtacgacaatcgttatgatgtaatggtgacggttagggtcttgagccgaggcaaacactagcaccatgccatatccgttcttcaaatgtgttgcatccacaattaaaactttcctcatcactctaaagccttcaatgctagctcccaaagctacgaatacgtactgacatttatcattctcatccaatttcagataagtaaatgtaccatcatttaccttcttcaacatatacaaataacaattaatatccttgtatctttcttccgggctaccttttaagtcataaatcgcatgatatttcccccttagcgttgtcgagtatgatactttcacacctaatttcgtctgaactagctccatgataatccttggaaccggagtttccaactgtcccggaaaatgatcatgaaggagaggtgcgactaattatgggttgcctttcctttttctgagcctactactacctttacttagccgagtgcaactatgcatcttattgtaccttctaatcgagaatatatcagtattactgatatttgacgctcgtaaacgccaagaacaactttctttggcacacttaaggacatagcgctccttatccgacttcttaatcacataaccaaaactgttagcaaatgcagctctacccaccagctcgtgcaatgccgccttgtttggaaattcttgacgtaaggtcaacccaattccgtctttccattcttttttaaacatacccggttctacagcaggtggcgactcaacatactgttcccccctatcagaattatccatagactcatcatagcgtgtttcatcttcttgagtcccgtgatcctccactattgcctcaagttgatgttgagttccttgttcctcttctaataagacgatgagtgcaccatcatccactctcatttcatcctcctctgaattcaactccgtatagttcttaccaacagaactattaccaactctagacaattgctcgggcaattgctccggctcgggcggtttagagatctcctccacaaccaaaacacttctccggttattttttgcggatgttacataaacacagacatcctcatcatcacaaacgttcatttcttcctctactccgaacaaccgtggattgtacctcatatgcaattttaccttatttccatctaatccaagcttcgtcattagcctatcttctaacattgagaaagtaatcttctcccctaatgtcttcatcatcacattatacatgcgaccttggaatttaaaatatatgatcacattctctttcattgtaatctgccaaaacaatacacatactcagtcaatattactagtattaccgattctagtacattgtcagtaatactagtactaattctgaaatattacatgtgtgagtaatactattacatatatgaaatactacgtgtctaagtaatactggtgctatttaaacatattatctatataaatac

SEQ ID NO: 18191 - DNA, 541 bp, Arabidopsis thaliana columbia
  unsure (1)..(541): unsure at all n locations
nnnnnnnnnnnnnnnnnnnnnnctaaaggtgaagtcgaaggcggccgtggctgagtcgtaacgcgaaacagcgcgtccgaagaaaggcaacaaacacgctgaatcaaaagctgatcgtgaagaagcacgcagacagtacgtggcggtaaaggcggaaaacgtaaaggttcttcgctgcagcaaggcttccagaagcctgctcaggccgttaaccgtgacgttgtgatcggcgaaactatcaccgttggcgaactggcgaacaagatggcggttaaaggctctcaggtcatcaaagcgatgatgaaactgggcgcaatggcaaccatcaaccaggttatcgatcaggaaaccgcacagctggttgctgaagagatgggccataaagttatcctgcgtcgtgaaaacgagctggaagaggcggtaatgagcgaccgtgacacgggtgctgcggctgaaccgcgcgcgccggttgtgaccatcatgggtcacgttgaccacggtaaaacctctctgctggactacattcgttcaacgaaagtgg

SEQ ID NO: 18192 - DNA, 1492 bp, Arabidopsis thaliana
atggccacagctatgaggagtattccatacgcaaaagtgggcaaacaatgaatgtaccacacataaacgtagcatatgaagagcttcttttgaggatggactatcttgagtcaatatcctcaacgattctacttaccttgctgtggatgtcagattcacacactcaagtatttatttagttagtgagaaggattattcttgaggacgaatgtactggaaaatagattgatgattatagagaaaactatgagttttggaagaaaatgtgtataagaagtttgcacaaaaatgcgtgtgtctctctacatggtctttgacccacaatttatactcaatgaatacatttaattaccatttatacacaattattctatattaaatgtgtctgtttcagtcttcaaattaactattcgaacgttcgaatttgaattgattccaaaatttctgggcttcgtcctctggcccacccgactctccaatccgggcagttctgacatcgatgtccagtccacctcgctgatcaatcacctcacgtatacttttactcagaaaagcccatgggcctttcctcttttagatcattccctcttacgtggcgatctttgaccggtcccgagcccacggtgcgggatccgacaccaacaattagccccccaagtctttcgaagtgatactccaattcggaagactttaatacctcaatgggcaaagattgctccaaatgactctctgacttcccgccaacatcacattactcatatgattttggaatcacccataattactctcgtgacatctgtcacagttatgaccacatatcaattatctactattaaagcgggaaaaactcttccacttcctccatgactcccaaggctgtttcgtcatcatcactagcttgcgtaaggtaaattcactttacttatcactttttacgcttcatcttttttttagaacaaagcccctttcttcttcctctctaaactctctctcctctgaaccctcagactatccatttttatgatgaattcggaaagtgaaaggcctgaatctccgtctttcgaagaaagcggatctaataacgacatttgcacccgaccgaatgatatcgccggtccacattatcaatccacatgcacccttcaatccctcaatcgattgggagagctctgtcggatttcaaccgatattatgagggattcccagatgcccaaacccatagagtcgccgaaagaccaccgtcccgggttcttctgcgtgtacgagatctacttcaagggttgcggtttgacctttcctcttcccggagcccttgttcggtacttagcagcccttgaaattgccttgccccaactaacccctaacctcctccggactattttagagattattacaatcgcggcaaaggccggatatgttatcggggtcccgaactgaatgaacttctcagcgtgaggagttcttcgaagaaagccgaatacttctaggctta

SEQ ID NO: 18193 - DNA, 1166 bp, Arabidopsis thaliana
ccttgatcaaatgtgtcattgtacccttggaaaacttccgttttaccgaccgtctcgcatgcgtttagggcacggttttgattcttcagaagttgggccatcgtgttcttcagttcgaacatcttgtttgagtcagagtctttagtatggatggttctatcaaaatcagtggaagcatttctgttgctggtcgccaaattctctatataggcatgtgcatcgtcaacattcttggttgtgaagtcgccattgctagccgtatcaagaaagagttggaacttggtatgcagtccactataaaaggtacttataacgttaccttcgaggaaaccatgatgaggacaatcgtgttcgtagtccttaaatcattttcatgcttcatagaaggattcgaccggtctttgttagaatccttgcagcttgttccttaaagacttggatctggacttcatatagaagtgatttaggaaggctaacttacatccttcccacaaagtaatcgaccgtggagataaagactttaaccatctaatgtccttgtcggccaacgagaaaggaaaaagcttacacttaaaatagtctttacgtatcccatgggattgtgtagtactgtagatttcttcgaagaggttgatatgatccatcgggtgctctatgttcaaaccatggaatttgttttgcttcacaaggccaatgatttgaggtttgatctcaaaatcttgccttagactaggtactcgtatggcagctcaatcctgagggtaccggttaggtgcgtcgtaattgactatcgtacgttgaggagcggccagtcttattggtggaatatatgtcggttgcctaggaaaattgggaggtcatggaagaggaacatttatgttttctccgacgcatagagggtgagcttcaagatactctcggtcttgtggatcgacatgttcttcggccgcctcgtagatggggttgccatcatcatcgtgtaagggttgtccgtgctcacctaaggccggaacttgttgcggctgatacgcagggagaccttaatctcggttcctttgttcggccatgattgttgtctttgaagtcttcggattttgtgttccagttgacctatgtcttgatatggcggtacaccggagtttttgctctttgtactggcggccgtt

SEQ ID NO: 18194 - DNA, 376 bp, Arabidopsis thaliana columbia
ccacccattcctcccattccacccattcctcccatgccgcccatgcctcccattcctcccattccttccattcctgccatatccatatctgcggcacctaaacataacatagaaaacaaataagttaacacatcctgaactttatataaagtgcagagagtgtacacaagaacagataatataagcgttaagatgaatgctaaccagcactgccttcatcgtcctcatcaacccacttgtcccaatcaaccttgacatagtgtgggggcttcttcacacggagtagcttattccacctttccggctctgctttctcaattatgcagaatatgcttctctctccaatgttgattttgctttcctaaaagggaaaaag

SEQ ID NO: 18195 - DNA, 564 bp, Arabidopsis thaliana columbia
aggtttgattattccggtgaaagaatgacagggaaaagcgttcttgacccacccgcaccgacggctctggcgtcgcctttctgttgcacctccggagactcgagcagtttcgggtttgggtttctttgatcggtttatccttacttgacccatgcaagtgactttaggtgaagttggttcttgtgtctccgccgcagcagaagcatttttccgacggaaaaagataggtcttcttgaacgagaacggcttctgcttctgcttttggtccgcaagaaccgcatgagtagaggcgggttttcggttcgacccggactcgaaacgggtctagatgaagaaaacctcatctctttttgtgtctaaggattttttggtactgaaactctcactcttttttttggttcctctggtccctctctatatgattcagatcgaacactgtggttttatattttttaatgttttgttatgtcacacgttgggttcgaaaaattgacggccgagatcttttctataagaggaaatcggtggttctacttagctaatcgtttttactagaaaagttt

SEQ ID NO: 18196 - DNA, 337 bp, Arabidopsis thaliana
gaacaaaaattccaagaatatagtgaagtaaacccatatcagtcatggagaattcagatgtaagagaggatagaattgacctgagaagagttggtgatgaagctgtgagtaagatatcatcgacgtagagaagaaggtaggtaagatcagagcctcgatggtagacgaacagatagggatcactcgtggtaatagtaaaaccggcctttgttgcgtatagtgagaatctttgaaacccagctcgaggagctcgtttgagcccgtagagtgatttctagagatggcactcatgatgtggtcgtgtcgggtctgtgagtcccggtggatggtgcatatc

SEQ ID NO: 18197 - DNA, 563 bp, Arabidopsis thaliana columbia
tgtcataatctggtgattgaaagaggaatgtaaattgtaagtattagatatgtcgtacacaaagagcagtaacactgactaatggccaaacaacaatgaagccatcacaagtagcagtgtctgattactgaataaatttacctcggacagaacacatgtgccttctcccaagaaatcctgatcctttagctttaatgtctgcaaagttatacagtatattgaaaccacttttgatgtgtagcatttattatcgatatgcaaacttcttgatgttactatcaatgaaaatattaccttcactggcacattatgatatctggtatcaacatcatacacgtgaaaactgaaaagaaaaagattcatacaagtttaaacatgagttcaacatgtgcaatttatcagaaaagaatagttaacagttgcatacactaatgtctggacagcttcaaactgaaaagagactgttatcttctcaatccacttaggattcaagttgttaagtatgacttcagtacggccaatttcctcaagtctcccatcctttttcgtcaaatacatgacag

SEQ ID NO: 18198 - DNA, 572 bp, Arabidopsis thaliana columbia
caggttcagtcatcttttaagctattgtaacatctattaatcatctccatcttcacaaatttattcaatttaatgattcttattttggaaaatgaagctggacaaatcggagtatgctacgggatgctaggcgataccttgccaagtccatcggacgttgtggctctttacaaacaacaaaacatccagcgaatgcggctctacggccctgacccaggcgctcttgccgctctccgtggctctgacatcgagctcatcctcgacgttcccagttcagatcttgaacgtctcgcctccagtcaaacggaggccgacaagtgggttcaagaaaacgttcagagctacagagatggtgtcagattccggtacatcaacgttggaaatgaggtgaaacctcagttggggggtttctcttacaagcaatgcagaacatcgagaacgcggtttctggagcagggcttgaagtcaaggtctcaacagctatagccactgacaccgacacgtgatacgtctcctccgtctcaaggaaggctcagggatgagtataagagctttctcgaaccagtgatagg

SEQ ID NO: 18199 - DNA, 528 bp, Arabidopsis thaliana columbia
  unsure (1)..(528): unsure at all n locations
nnnnnnnnnnnnnnnnnnnnnnnnnnnnctaaagccccatgcatcacttcatacgattttttcaggatcacatcagtatgtttggttaggtctttgaaaatgcctttattcatcgcgtcgtagcgtttggcattgctctcaatcggtataaagatatctttcacgcgaaccatgttatcgacagccgttgcgtaatccgggtatagccccagacctaccgctgtattaatcgctgcccccaggcttgcacaaccgttaatggcgttacgtcgtgccggaaggttgaacacgtcggcaaaaatctgcataaacagatcgctgttcgaaccgccgccagtaatgatcacatgcttcgcaaagtgattcatttcattacacatattgtcgtaattgttcttcagcgtcacgcncacgctttccagtatcgaacgatatatccatgcgtaatccatgctggaacaaagccgatcataatcccgcgtttggatttatgaaagacgaacaactgcgaaacgatttgccaaggat

SEQ ID NO: 18200 - DNA, 1489 bp, Arabidopsis thaliana
tccattagagaccagtttataatcttggccactgatggggtaagaacatttgaataagcaactttgttttgttagtttatattggcagcgtagtcatgtaattgaaacattataggtatgggatgtgatatcaaaccaagaggccatagatattgtttcctcgacggcggacggggcaaaagctgccaacgactggtacagcaagcagttagggcttggaatagaaagagacgcggaatcgccatggatgatatctctgccgtgtgcctcttcttccattcttcatcgtcgtcgccatctctatagcaacatcttctccatgccacgacctgcaagtaggtactagtacttttggaccgggcaagaaaagaaaaaatgctgcaatgtagatagacttgcgtaaaatcgcattgaatattactttcttgccaaaccagagtcctatcacaatctaaagaacacaattggttacttgtaattttaataatcatttaaaaagtgggaacttcttaagttattatgaaacatgtgatgaggaaacaagcttttggaacaagaatcaaacatatatcaactccaaagttgtaagaacatatccgcaattgaagatgtattgtacagcttgaggcacataaacattatgatttacaagaagtgtatactatacacacacatacctctgcgaacctaggaagcaatcaaatgaatttcttctttctatataactaacatctctatacataagtaacgtgtgagcttaggtactctattaactgattaaagagaactgggcgtacaataaatagtggttagtggaagacttgaggagcagtgtagaactcagattcgttgaaacctggtctgagatcttcttgatcacacatgaactgtaatggggaagcacacaaggttccctcttgtctccttcagaatctcccacgagtcgctgccgcatgattctagcctctccggtgcaatgccaaggtcgatcgtagtgtgacccaacttgtctttacaaagagccatattgtgtctcaatgcagctctgtgtttagaaagacaaagtcagaagcagatttgatcatctctcagttgcgtttaaaaagccaacgtagttacgtatctttaatcactaaagttatggagatttagttaaaaagggatgacgtatgaaccttgagcgtatatgttcattcgggatgcacgagaagacttggttgtagatgtccgtgtttttcttagctgttgccatccataagtctttgtatgttgcatctttgattggatcttcgatcttctgaatctaaacacaaaaaacaaaatcaacattttcaaattttctatggaggtaacggtagttaaaagaagctttcagctcaaggaatcttatccaacggaaataggataccaagactatcagagaacagagcaaaaacaagtaaaaatactaaaaagttttcggctatatatactcaaatgaaaataaagg

SEQ ID NO: 18201 - DNA, 481 bp, Arabidopsis thaliana
gtgatgtttttggatcttttttttgtttatgaagtttggatttttttttatttggtcaggtatttacataatcaatcttggaaagacatgggacaagcttcagatggctgctagggttattgtagcaatcgaaaacccaaaagacataattgttcaatcagccaggccttatggacaaagagctgtcttgaagtttgctcagtacactggtgttaatgcgattgctggaagacacactcctggtactttcactaaccaaatgcagacttctttcagtgagcctaggttgttgattctcaccgacccaagaaccgaccatcaggtatattgaatgtgttttacctcatcagttgtgatttaactgtgtaggtttttggttttgctaatgcggttttggtttgtgtttgcagccaatcaaggaaggtgctttgggaaacattccaactattgccttctgtgacacggattctcgaatgggatt

SEQ ID NO: 18202 - DNA, 537 bp, Arabidopsis thaliana columbia
tcttaatcggcgattccggcgtctcgtatcagcttcccggtgcaccgttcgagtttcaattcagctattctgagacaccgaaagttaaaccggttgggattcgtgaaccggcttttatgccgtttgctccaccgacgatgccgagaccgtggactgggaaagcaccgttgaagaaatcgaagaagaagattccattgtttgattcttttaatccaccgccggcgggaaaatctggagttaagtatgtagaaatgcctgggccgttaccgtttgggaggtatcaaaggaaggaatgaatagagaagaggttttaggagagccattgaagagatgggagaaaggaatgttgattaagcctcatatgcatgataatcgtcaggttaatttgggtgagtattgttgttgtacttgtcttcacttaggagttttgatttggatttggatttgatgtttgtgtgttttataggtagagatggatttaccataatatgttggaattgatacattcgcattggaagagacgacgtgtttgtaaag

SEQ ID NO: 18203 - DNA, 658 bp, Arabidopsis thaliana
acccttgaatttggtcataaaaatccaaaatgactcattcggcccttgtgacaaattccaaacatcggtgtccgaaatgctcttatccataagaatgaagtattgtttcaaaaacacggctgacaattcgttgaagttactgattgaacgtggctctaattaggtgaaccacatcagcgcttgtccacaaagattctcagaaaagagcttggagtaccccgcgtcttcctcagcttcatccaagtcaactcctcctgcggcgattaacccgtcattttcaacccccaaattagtctcaaatcagtcgcaaaccaaggttttacgactatataacgactgaaaaaattgtcgctaaaaaacggtcgctaaataaattagtcacaacagggtcgcttatttacgactattatctgaaagcagttttcagtcgcacataagcgactggtatgtgactactttagaaagttgtagatatccgactaaaaagcaacgccgcttacttaagacagttttgagacaaaaattgtcggtctcaagtgatttgggactctttgttctactgtctgttacctaacctgattagattttgaattgagaagcgattagtactagataaagaggattaaaaacatgaaacaagttaacattcctaaaatca

SEQ ID NO: 18204 - DNA, 1388 bp, Arabidopsis thaliana
taaaacgaagataacaaaaaaaaagaatcagcttccctcttaaagaaggagaaaaacagagagaataagaagtaattttttagggttcttcctttttcattttgattcttctttttctttgagatagaattgtttctctttcgttctctctctgtgtatcaaacaaaaatttgattatggaataactcttaacttcttggtttcttaaattcttctttctttctttttttcatttctatggtacagcagcaaacagagaattttatggcagcttcttcaacatctttctcaaggtactgcttactaagttaaacgcatccttctttacatatatacatgttcttgaaatattgttggtccatataaaaatagctctctttttttgtaagttcgaatactatagatttatctctttcattgattttgtttgctatcttctttttctcttcatttactctctatttatcgttttcatattaatccttctcttacttttcatttgcaaaagataattcaagacattctgtgttttcctgcaaacacttgaatgagttcatggaacagaaccaagagacaaagcttatatttgcgtcgaccacttagtatatattgtttaaatcaggtaagactcctttcaattatcttggttgagattgaaagtaaattactaaatactaattataaaggttttacatcagttctgatgagatacattagtttctttacatccaagaaacaggttttgtctaatcattttttcctgcaattctcagattctgtttttttgtatgtcaggaacagaattgaaacgttttgaaagaaacaggagaatcttttggttcaagtaatctaaaaccatggcagccaaagatggagctaagagccaagaagactataagcttaaagacatgaaaccagagcttggagagagatggccacatggaggacagcgtggaggaaccggatggattggcagtgaacgagctgcaagcacatatgaccttgttgagcaaatgttttatctctatgttcgggtcgtcaaagccaaggatcttcctccaaaccctgtcaccagcaactgtgatccttatgtggaagtgaaaataggaaactacaaaggaaagactaaacacttcgagaaaagaaccaacccggagtggaatcaagttttcgcattttcaaaagacaaggtccaatcctctactgttgaagtctttgtgcgcgataaggagatggttacaagagatgaatacatcgggaaggttgtgtttgatatgcgtgaggttcctacaagagttcctcctgatagtccacttgcacctcagtggtacagattagaagatcggcgaggtgagagtaagaaaagaggagaggttatggtagcggtt

SEQ ID NO: 18205 - DNA, 903 bp, Arabidopsis thaliana
gttgccattgagaacccacaggacatcatcgtccagtcagctaggccctatggacagagagctgtgttgaagtttgctcagtacactggagccaatgccattgctggaagacacactcctggtaccttcaccaatcagatgcagacatccttcagtgaaccaaggctgttgattcttactgacccaagaactgaccaccaggtaaactcttcatatgattcatatactagtgattgattaatgatttttgttattgataaatgtcttgtgtgtgttgcagcctatcaaggaaggtgctttgggaaacattccaatcattgctttctgtgacacagactctccaatgagatttgttgacattggtatcccagccaacaacaagggaaagcacagcattgggtgccttttctggcttctggctcgcatggtccttcagatgcgtggaaccattgctgctggacagaagtgggatgtcatggtaagaatatcattcttggagctcttagattagaaaggcatctgttcattaaaaactttccctgtttattgactgaatttttcatatggtatggtgttgtgcaggttgacctgttcttttacagggaacctgaggagactaagccagaggatgaagatgaagctggccctcaggcagaatatggtgcacttcctgctccagaatatggaatggtaggtggagaccaatggaccaccgctcagatccctgatgctgcatggccaggagaaggtcaggcaccaatctctgctgcacctgctgctgcttcttggagtgattccgctggtgagtttttgataaccatttgaaccctattctaacagatcttgattctaatgttatgtttattttgctgttctagctgcaccggcagatggtggatggga

SEQ ID NO: 18206 - DNA, 1454 bp, Arabidopsis thaliana
gtgccgtgctactcactatgcttaatagtattgattccaactctcttctaaatccctagaactaagcaagcattataatcaggtttgataagttcacctaagtaatggacgctagcacgcatctaaatactaggctcatctaagatagttccagtaatagatacctatggtgggtatacctattatcctaaaatcaagttctagttagttactctaaaactaacattaagaacaatcatgaagaattctaaatatattatcctaacagggtttttgatttactaattcaaccaaatccctaatgagaatcccttaaccaaacaagagaactactcaagcatgattatagaaaaaacaaaacatgattgaataagaagtcaatgatgaaattaagaagagaaaagagtttagaagaatcttctctaaagggagtctccataggattttgccccaaagtacataatagagaataatagttagatctaaacaatgaccataaaaatcaatatataagttcctaaaacgtgatgggccttcttagaaataagggaaagttctgggccgattttggaaacatcaataagttgcgcgattgacttgccgtcaggtattggtgtcgctcgacaacaggggttgtgtcgatcgacacctacgtcaatttttgtcttcggattgctgctgcaacttaagttgtctgatttgcaccagaatgctccataatctccaaatgcatcccaaacatttaaagacctgaaaaagactagaaaagactctacaaataacaaaagactctaaaaactatacctaattcatagctaaaagcattgaaaatcgaggtatatcaactcccccagacttagtttttgcttgccctcaagcaaaacacaaaagccaaacccgtggaagaggtttgaaaacacaggaactccgaatctctctagcttattatcctgatcatacaaaccaattctatgcactaaatagttctagccaaatcctgaccactatgtaattctccgctagcccacacaacatcctagattccataccaaagcactcaactatatccattataaagatttagaaactgtaaactgtttcttgtatttactttgatgcatattacatgtcttttataggctacagaagagatcatagaaattcctaaattacaatcaatgcataatcacaatcgtatcaatcgtatacagattgtatcaaaaacagagcaacttccttatatggttacgtgatcgtcgggatcatgacatggtccgcaaactccgttgagtcgttaataccttcccgcaagttggagcgtgcaaatcttgtatgcccaacttgatacataaccgatcaaattccttcttccccaacggctttgtaaagatatctgcaagttatttgtgactttgtacatgtaacaggcgtatatttttggatagtacctcgtc

SEQ ID NO: 18207 - DNA, 777 bp, Arabidopsis thaliana
catacacgttccatatccatggaagtgttttggtataaaggtgtctggtttgttcactccacaccaaaatactctttttgtgtttggttagcagttcaaaaccggctctcaacagggatataatgaaccagtggaacggaggacaatcagctacttgtgtgctatgtaacaatgcattagaaactcgggatcacttatttttctcctgcgattttgcttcagaaatctggagtaacttagcaacggaaatctatggagacagatattccacgagttggcaagacctgatacaagccatttccggctgttggaggactcggcttgatggtttctttgcgtgatatatttttcaagtctcggttcacacaatttggcgtgaaaggaagggaaggaaacatgaagagaaaccacactcagcagctcttttaaccaaatggatagacaagcaaacccggaatcaactatcttcgatcagagcaagtggggataagagatatgacatgagcttgcaagtctggtttgcgatgagacaaggagccacaaattcttgattttgttctagtttgtttcaaaattattcaaaaaacgttgcactcgatgtaaaaacgttattttcttttgaatctaatttaacattattttcaaaaaaaaaatatatatattcgtttttagaagagaatatttggccactgtgtaatttatcttgtattttgattagatttatgttcaagaaaaaaaaacaaaatttgacatatctattgatttttttttcttttt

SEQ ID NO: 18208 - DNA, 726 bp, Arabidopsis thaliana
ctttcaacttggacattgatttcatctggtttatctagtgctttggctctgagtccccgctttcaaacctcacctccagcttgttcttgattgtttgcttgagggcaagcaaagactaagtttgggggagttgataagtgtgtattttgcatgttttgagcatccatttgtcatcattttagcatcatatcatcactgttttatatcatttcacaacatttatcatcactttgcatgtttaggatagttttgcatgcatgttgcatatttgcgatgatttcaggtgatttggagctgttgacgtgctatctggaagaagcggacctgatcatgacaaaccactcgacccagaggtcgagcaggagcttcaagatctcaagagaccactcgaccaccaggtcgagtagaggacatcaccactttacctcaccactcgccccgaggtcgagtgccatcatctccatcaccagaccgtcactcgatcacttcactcgaccacgagggcgagtgccatcatctccatcaccagaccgtcactcgatcacttcactcgaccacgaggtcgagtgccttcacctctatcatcagacaaccactcgacctcctcactctacccagaggtcgagtatctccatcacaccactcgacagcatactcgatgacaagcttcagagccttcttcattccgcactcaaccagacattcgagcacaaggaagaaaagaag

SEQ ID NO: 18209 - DNA, 545 bp, Arabidopsis thaliana columbia
ttatttagtgataaaaataaaactaaattgcgactacctgtataaagaaaactctaattcgatcgattcacttcttatttcatccaaacaacactctgcttcttcgatcttcttcttcaacttcttcttcgatccatttcgaatcgacttctccttcttctatctgttattcgatcttttattcgtctcatctctacataaacccaatcgagttcttcttcttcttcttagatctgatttgattcgaatcatcttctctttcttcaatctcttcgctttcttctactcttcgatttgttcttcgtttgagtcttcttcgatctctctgtctctcttcatcgatgcctaacgccagtcatggaggttcacgaaagcggaagacaacccccaacgttactcagagagccggagggtcaacaacgcttgaaaggccctcttcggtgcctcagcagtacgacttcactatcggcgtggcgcctcaaaccgccaaagcctcaacgtcagcccccactaccgcaactatccgtcgccgcagcaacggggat

SEQ ID NO: 18210 - DNA, 1883 bp, Arabidopsis thaliana
ctcagatagcgatttgatgaaatcgatatgaataccttgttggccaacgaggtattcaacatgtactcgctgagatcaacatcggtcaagacctccttcgagaatgcaatattttttgtttgttttgaagcagatatgaatggcccaagaaaccggaacccttcagtagagacacgacgaataatgtcaacaacaagatcttttacaatatgaaccattgcagtgttttggtgaaggtggttatttttttaatgtgaaattatgttaagggttttttgggttataaataaggaagtgaatttattactggtaggtgaaacacgggcttatttggaggggagacacgcttctggtttcatccataaatatgttaaaaaaaataatgcctcatgcttcaccatatagaagaagatattctttgtcatcacatcccaaattcctctacattaaattgtttaattaactaatgttaaaagtttgccttcaagaaatatttgggtgtgagacatgaatggattggggtagtagatggagttatatgtcagcttagtgtgtaaggtcatggatagtaaatgaaagttggatttgatagatatggttagggagacatgagcggatgtaggagtaaaagtgggtaaggaggataaacataggaattctataaaaagcaacgatttattgatgcagagaagctttgcaaaaattataaaatgttatatataccagcaaggattcggagtgatattgttcagagggtagggagacaagggttccgagagttgtcatccttcattgcagtcggaccagatgggagggactatgtttacaagatgaggttttggaagaagtggaataggatgagttccaaattggtgagttcacttgcaaatgaaggtttcatatacaagccatttttaatgagatgcttggaagcgaaaaaccctacagctcagtacgtggagggtttaagactggcagtgaagaatggcccttctacagaaagtttggagctaatgagagttgcagaggaatacgtggtctatgatatgtttgcgtatggaatattttctatatgtgctaggagttatgaagaggacattgagtcgttgtgtactttcagtaaccgacttggatggttagagtccattgtggacaaaggggagacggtgatggctcaaattacagatatagaaccaccaatgaccggaagctataatgcaacttataggtttccccaagcagatgtgcctaattgtgtctactttgcatgcacactagaagatgtttgttttgattgagtaaactattggtactcccgcaaggtgctttacatgtactcagaaaagaagagcaagactgtagtaattggagaatggttggtaagaaaatcatttaacttatatctaaatctgattgtgaagatgagttatgttttacttattgtaacattatggtctggtttttcttattgtaagataatgttgatgcttttgtaacaatattgtcactttttctgcttgtaagcttagtttgatgtttttgtaagaaaaaacatatgttctgtcctgtgaaatattaaaaaaaaaaagttgtacaatgtacttgcttattcgaggatcactataccctatgtatgtgactcagaaaaccttaaaaaccaatttgtcaaccttgtaaacagcctaagtaatttaacaaattaaaaggaagaagcaaaactaaactctagagtatggattactaaacccaagtagaacgatatcaaaagaatagcaaaacgataaacagttggttattgaaaacgatgtggaaggatgtcctttctgatgatggttgcacactaaaccctaggtttgggaccatggacccaaatattatgaata

SEQ ID NO: 18211 - DNA, 508 bp, Arabidopsis thaliana
cttcttcttcttcttcttcttcttcttcttcttcttcttcttcttcttcttcttcttcttcttcttcttcttcttcttcttaaccctaaatcgatccgtctttcaccaacaaaccctaatacatcgatccatctcgattctctcttcttcgattctctcttcttcgccaaactctcccttgcctcttcgatcaatctcgattctctcatctccaagaggatgcctaacgccggtcgtggaggatctcgaaagaggaagaccacaccaaacctgactcaaagagtcggaggttcaacgcctgctggaagaccctcttcgccaccgcagcagtacgctttcaccccggcggcaacgacggttctagttccttcatcgattccgcctctaggagccggtgccgggcctcatcctctgccccccactaccgtaactacccaccaccgcagcaactcttccaacactccaccaatcaaccacagcgtgtagatccgttgccacacaagagact

SEQ ID NO: 18212 - DNA, 1464 bp, Arabidopsis thaliana columbia
tcgcggaacgcattcacgtcgccttgttcgctctgcatttaaagaatatctccaaaacgaatattttctgaatcaaggaaagttggaaagtttccttaaataaactgggccgaagccgagtaggtaagtccatgcgaaaataaaaggttttgagtctcagaaaacatttagcgaaggggctcaggaacaggctcctgcatcgccggtacggggttcgaagtggacgcctcgtttttgacgtccacgtcgggttcattcttcacgcgcttccaggtgttactgtcctcctcctagtcgtcactgtcctcactgtcagacgggatcacttgaaccggagcgtttacaggaccggagacttggcctcgagcacgaaggtacatccggagcatgtgcgggatcttcgccacgcagtcgaagttcctccactttcactgaaaagggtcgctctccatggcacttattttactctcgatgcgagcaattcgggccttgagcgtttgcctcttaaggcctaaacgctgcctttcatcgcacaggcggcgatgcttgtcgacgacctaaagtacgaactggttagaaaacaagtagaactcgttccgaaaaagagaacaagagagtctttaccttgttcataaagtcgtacgcctccttcttttccttcgaaggaaagtggaaacaagcgtgtggaaagaggaggccggcgggctcgaagccatcgccggacaagaacaaaggactcctggggtcgagggggcagacggtggatgctccttcgcgttccattctataggtgttgttcaagtaaatttctgcgatcatgtctttcgagagttaagaaagtttatgcccttatttatagtgatttagggttttactcgaaaccacaaagttaataattgtggcgtgtccgagtgagtttatccatttttgggaattgaggaaaaggcaattattgcctcagaagcgtgacacttttccagatttccaaggacaaaaaggcaactgtcacatttaagataagtgggccattaaatgcagggtaaatagtaaaggctcagaacccgcaaaaataatcgaactgactaaacccgagttggggagttggagagttcgcggattcaagtctgcatttttagggataggtctgatcaaccaacaaatcccgtaacttgaccacatggttaaacaaaaacgctatttaaagagatggactttgcaaattcatactgaaaattagcacaaggaaagcctctcgggatcataatcttaaagaaaaggtttaaaagcctcctcaggcaaagtatttgtttaaagcctacttaggcagataaagtaattcaaaaagaaaaacaacgataatgaatttcgagtttaagggacaatccccacttaagtggacacagccactacgggttctcgggtatctcgggttcggtttgaactgactcaggatcgggagagtcg

SEQ ID NO: 18213 - DNA, 1273 bp, Arabidopsis thaliana
tgtagactcaaaaatatacacaatgcaacacacacttcctgagccctcccccaaacttaaatcacacagtccactgtgtgaataaacttggaagagagtactcaggacaaatccaatcacagaaacaaaaaatgaagaaacaaatcacaacagacggtataatacaatggtgaagtgaggcgcttacctcagtcgaagaatgaacgtagttgctcgtcaatggctgcctgcgattgctcccaggccatagacgaacctccttgttctgtatcagctccagcaggtgggtactcgacctcatcagctctgtggcggccacaccgctctgaggaaactcgactctctccttctgctgcggccagtaccgcggtcgagtgatctcctcgagtaaatgaggcgtgatctgctgctagatcgagtgagtgtagcttccttcttctcttgtgttcccaggattcgaatgacaaatgcctagcctggacatgtgggactctctgctcgctaagctcaggcctgtgcgcaggtgcattaattctactcgatggcatctccataggaggctgtacctgtggaatagcagtggtggaggaagagcaactcagcttatctgtcagaagcttgaaacacttggcgatcagcttgtcctgcttcttgcaccacttctgcaatttactgttatttttatgagcttcagtcaagctcttgctctgcctcgctggaggtacatgttcagcaaagtgatacatgctagtgtcgaacttcactgccctatcttcatccatcccatccgaggcagcttcttcaagaagatcatcctcatccaatggcggagcgttctcatagtagaggcgtccaatctcaggcctaaaatcaatgttatctccctctattatccgtgtgacctcatggctagggagaaggatgttagctctcctgtctgtagagtgctcaaacctgaacctgtggagatcgtcaaccattgcaaactccaggaattcgcagtgacgtaggtgctcgatatccattgctcgcggctcgagtccagcagaaatgagtgggactcacaagctatcagaatcggtgtcacaacgccacctacgcacagagcgcctcgtgctctcttgcggttattggtgacagccaactcttgtatccacacaaatggatcagaagaagtacatctaggggtgtgcattaattcaccctggaggggcatacattcttagtttggcgaagagttccttgaggccatgcgatcactcatacagagtag

SEQ ID NO: 18214 - DNA, 1782 bp, Arabidopsis thaliana
gccggtgtcatcaccggctgttggtcccaaggctcgcttcggcggtgttcgatccgggcggaggacattgtcaggtggggagtttggctgatagcggcacatctgttaacagataacgcaagtatgctacgaggagcccttatcacgcacacgaacttcatcacaatcaaactcaaaaatgcagggataatcctttgtgacttttgacacagacaacaaagatttagtaattagaggacaaaccaatacatctttaagatgaagcttacctgaagtagaaccaatacttgtagaaccggtatgagtgataggtagaaaattcccattgccaaccattacagaatcagaaccagcataggactttgtctgttgcagatgacgtggcgagttggtgatgtgagcagtagcagcactgtctgtgacccattcgctgccagagtgatcagtaatgtctgtgatctgcgttgctgggagagcctgtggtaacacatcaagctgataactattatcaaatctgtgccagcagttgagagcatgatgaccatgtttcccacaaatctgacatgttggacgttctgcagaggcgttggaagaagaatcattgtatgagagctactgatggaagccacgaccccgagtggagaaggaaccttggcctcgtgacccaccaaaccgacggttcccttgacctctgccgcggttggtgtagaagacagagttagcttgaactgtattgaaagctagatgaggactaacatcagagtttgctgcataagcctgaagtctatcatcataacccgttgagtctaggcatgatttcatcaagcttaggagtgggaggaatatcaatggtaccttcaatacttgttttgataggctcatattccctacctagaccattaagagcagcaaagattttcatcttctcaggaactggactccctacagaagctaactgttcatagatggtttgtaactccttaagatagacttgcataggtttatctttcttttctagagtttgtaaacgcctttgaagctcaaatagcctagatgaagtagctctattgaagtgatttgcaagagtagaccatacctcatgagcagtgacgtagttcacaacaacactcaggatatcttcagcaaaggaccctagaagccaagacttgacaaccttgtctgtcttgaaccaaacatcaaactctggatttggtctgtctgtggtgacaccattgatatctggaacaggaatggttggtgacggtgcagaaatagatccagtgacaaacccaagcaagccttgaccagaaaggaaagattcgaactgactcttccacagaatatagttctgctgcgtaagagtgactgtaacgcaatttgaaatgttgagttgaggaacagtatagagctccatggatcttctttccatgagctctgataccatgaagagatttatgaatctatgagaagctttgtaacttaactttcagatttcattcattcttaagagttttacaagcggctcaagctttagcttttatacaagaacacttgagaactgaaaccctagctaaacccttacaggtgtcttcatcctgttgtctctaacccatcaagggctgagaattggtttgaaagcttggtcgtctccgtacaagcttttgctttcgtcatctctgtttctctatttcctttgtcttttttgcaggaacattgaagacgaacgttgagagctggacgtcgtcgtttccgtcttaaacttaaatggtttgggcttaagtg

SEQ ID NO: 18215 - DNA, 1156 bp, Arabidopsis thaliana columbia
ggctttaacatgttgattcgataatgcctgcttagttagagatcgctaatgggaattaggtcagtgtctagctttgtttgaggatttctatcacgggagtgaattaatctgttgttgaacttgttgtctagggatagcttctttcaagttttgtcaaccacctgaatagattaaggagaccacactattcgattaccccatccttaggaatcgtttatccatttgattgccagttatcatttctgctttgttattcacctgcctgttactcccatttctgcttttagtttcatttcatttctgttattgcatactaggactgctagaaccaaccaactctctacttggcttgacatagagctttctaatcatatctcatctgtttgcatcacaccggattggattgacacctaaaatactacaatgacaggatagtcgtaacgcccgtgtcccaagttagggagtaaacaagatctctcatccgccgaattcgaggacgaattcagtgtaaggggggtagacttgtaacgaccgcatctcgcgttcataaagaggcaggtttgttttaggagaaaactagatcatggtcgaggaacggaataaaatactacgtaggaagaacgagaaagtataagctaaaccagctaggtgagctggacaagctgtatgaactagctaggtaagctatgtgagctaaaccagctggaagactagctagctcagctaggtgagctgaccgacagctcgactgagcttggtgagctgatcaagtactgacccagctgggtggtccggtcagctgacactcgagctggtggactgtggtagctcacgggtgaagaggtgtctcggccaaaaggtgtaaggtcgagcgggtaccaacgaacgtttgcatcgcccaaaggatgcaaggaacagatgtgacctttcgaaaggatgcaaggaacggatgtgaccttccggagggatgcaaggaacggatgtgatgcttcgggaagcatccattcgccccctatataagggaggacgcccaaggcatctcagatcatctcagaacatccaaaacaccataaaacattcttaaaggagccattcttggaagaggtttaaaagctacaccactcagtgcccctatcatggtttttagaaggcttca

SEQ ID NO: 18216 - DNA, 1509 bp, Arabidopsis thaliana
tgccaagttcttctctaatgctcgcatcgctagattgaggaacaagatctcacgttttaacaagaaaaacaaggaaactttctaggaagcttgggagaggtttaaaagctgcaccactcagtgcccccatcacggtttcaagaaggcttcattattgagcacactctaaagaggagctttaccaaagatcagaatgctacttgacattgcgtccaatggaaattcctgaacaagaatgtagtagaaggctgggagttggtcgaaaatctagcacaatctgatgggtgctacaatgaagactatgatcgttcaatgagaggaactggaggaactgaggataaacagagcaaggatatcaaggctctgaatgaaaagttagacaagctgttgttggctcagtagaagcagatatactacatcactaatgaagagcacttccaaatgcaagaaggggggaatgatcaaactgaagagctttgctacattcagaactaaggagggttcaacaagggctacaacaactacaagcccaacccgaacctctcctacagaagcactaatgtagctaacccccaagatcaagtgtatccactcaacagattcagtccaagcctttttgatatgtctataatttgcatgttttcagtgttcattcatcatcattttgagtctagtttcatatcactcatcattgttttatatcatttctcatcattcttgcatgattagaatagctttgcatacatattgcattcttgatttggagctgttgacgagcaaagtggaagaagagagtcggaatcagaggacatactcgacctccaggccgtgtacatccatcaccatactcgaccccctggtcgagtaactttggagctattcttcccatctactcgacctcgtggtcgagtaacctcagctcaggccactcgatgacgccactcaacccccagatcgagtatcacttcgccataccacctgaccaccctcgaccgtccactctaccatattactcgacccctaggtcgagtatcatcactcaccaccagaaccatcactcgaccaagcactcgatcacatcgtcggagtctattcaaatccgcactcaaccagacaagctgagcacaagaaagagaagggagaagaagtgtttggaagcggcctggagctccatcggatcacgacgcccatctcggcccattatcactctatgggccgggcgattaggttaatggcccgtctactatcattttatttcgctttgtataaatagatgtcttagggttctgtccggagacatctagtcgacattgagtttttgcttcagttttattttctgttttactcgtgtacgccacttttgcttctacaaacctgtaattcgagatttttgcaagttattcagattctgcatttgatttcatctttcatcttgtttctctactctttatctctttacttatgcaatattatcattcacctgcgtttatgtctttgagggcgatcccc

SEQ ID NO: 18217 - DNA, 651 bp, Arabidopsis thaliana
ccctaagtagtgaaaagaaaaatctttagttttaaaaacttagcatgtgtcttttttggtatcaaataagtaagcatgacgaattatcgcaccaacatttgcattagcacgacgaaccatcttcaaacaattctgcgatgaatcgagcagttgccaaagaagacgatcctccatccatcaaagccttccttgccgcatcagccatctccttaaccttttttctcttctcatctccaccgtccatcaaagatcgtacggctctggctatctcatcacaagtcaccaaacccccacgactcgacacgtaatccatccgcaggtccaccgcaagcccaagctctttcaccagcgtgaaggcgttaagctgttgctctgcgtacatcggccacgttgcgacaggaaccccgaaccataagctttcaagcgtggagttccaaccacagtgagacacaaatcctcctattgctttatgggccaacacttccacttgtggagcccaaccacataccaaacctcggcctgctactcggcccatgaacccctccggcaacacatcgttaggattcgtctcgacgtcgccgcttgtactaattgaccaaagaaatctgcagccgacgagttccaaagctcgagctatctccttcacttgcg

SEQ ID NO: 18218 - DNA, 1445 bp, Arabidopsis thaliana
taatttgtgaattctattatataacacataagtacaatttaccaataatattttttttgtttataaatacatacaaccataatcttatttctacaaagtaataatattaaattaataaaacctacaacctgttgtaactagagaaagatatagaagaaaatgagtgtagtattccattgagaaaaaggttctttatataggagtacaaggaaagggtaaaaccctagaaacatctagatgatgggcttagatgatgggccttataatgggcatccatctttattcataacactcccccttgatgaccattatagtaccataatggtaaagtatttgaaatgctgcctcattaaaaaccttaccaggaaaactcaatgagaaaaaccatggttaagaaaaaaagagtgcaacatacaattactcccccttatgagtatattcatcgagatatttgagacagcgtaatccgatacgatagactaacttcttgaaaatagcagtaggtagcgccttggtgaataagtcagccagattatcattcgaacggatctgtagaactcgtacatcgccgctcttttgtagatcgtgtgtgaagaagaattttggtaggatgtgctttgttctatcgcctttgatgtatccgtctttgagttgtgcgatgcatgctgcattgtcttcgtacataattgttggagtctttttccctgcatacataccacagtcttcttgtatatggtgaactatggatcttagccatacacactcacagctagcttcatgatctggcaaaatctctgcgtcggttcgaggatgtgacagagtctgtcacagcatctgcggatacgtgtgccaactcttctcttgaacaaatttctggataaagtacaacgccattcttctgctgctcatgaatcttttagatgattcatcttgaccatcttatttatttctctaaatatcattagtgtatgatattcatttggatgattgatagaattttctaatattcatcaagtgtattatttgcgtgttctttaatgtcttgttaaaaactttgtcatagaaaaatcatgtgggataaaaactatgataaggaaaaagggtacatccacgcatatcattcaatctccccctcggaaacatcttcttcaggagatgattttcaatcaaatacaatatctcgttggaattaataaccataatcttaatgatcaaaattatatggttttcatatagacatataaatatcattatctagtgatattttatcatagattattgtcatcgtattacttatgataactttgtaggagttttaatgattttcaaaacaaatattagtttgatcaatatattttgacaaactcaacataaatatacatttatatgattatatgtcatgttacatatttcttcttttttttttttttttttttattcgatcg

SEQ ID NO: 18219 - DNA, 1056 bp, Arabidopsis thaliana
gactaatatcaccatttctaggcacgagcttacatatttgcaaatgacgtcgatatgtattcgtaccatttttgtgtgcattgtacgcataatctgatttgcaatgcttgcacatagctctttcttcactttttcccaaatgattaacctttttaatcactatgaaatcgttccagacttttgagtattgccttctcttctttggtttcgatgactttccattgtcctcatcatcatcaacatcatcagctccattgtccccatcgtcatcttcttcatcatcatcatcttcgtcttcatcactaatctcaaacactttttttggttttttagatgcttcagcttcagacttttttcttctctctgttttagaggcagaagcttcatcacccttgcctcttttttgggtttttgatgcttctagttcacacacttttttcttctatgtcataggtgttcctgtttcatctctcagttttcttttcagctttttagatcctcctgcttcatcattagcttgttgttgttcatatctagcttgttccaactcaatgactctccaagatttcacatctaatgatctcaaatactcagcatcaacagaatccaacggatcctatcattaacaaaatacaaaaactagtcaagactagcaaattgtttatgtgtagtcacaaataacataccattacaagtgttagatgctctgtttgatctgaaatctgaatctaaaaagcttcaatgatcgtaaaaaaaaaaacttgaagagatagagaatgacttttcagtttccttgttaagcaattgagcgtgaactgctacttctaggttttgaactgcacaagaaactttaatagagagaaaaggtttgaaagcctctatgagaagtgaagggttttaaaagagttggtttttctttcgtgggctacccgcatacccgcaatccgcaacgggcttgtctgctagaatccgcagtccgtaatgggcctgcccgcgaggccgctaatttgtggcaaaaaaacaacgtctaagccgctccgcatgggtacttggcaa

SEQ ID NO: 18220 - DNA, 1128 bp, Arabidopsis thaliana
gtctaccttgtcactttaaccgccgttggtggagaagttgcaagtgactcaaggattgaagagatcccggtagtgaacgaatttgaagatgtgttcaagcccttggaaggattaccaccgccgaggaatcatccatttactattaatcttgaacctggggcaactccaattgcaagggcaccatataggatggcgccaaccgagcttgcagaacttaagaaacaattggaggatctacttgaaaagggatttattcgtccaaactaatcaccatggggagctccggtattctttgttaagaagaaagatggaaatatgcggttatgtatcgactaccgagatcttaacaacatgactattaaggacaagtacccattgccgcgagttgatgagctattggatcagttgaggggagcaagttggttctcaaaaattgatctggcatcggggtatcatcaaatttcaatctcggagccggatgtaatgaagactgcctttcagacaaggtatgggcaatatgaatttgtagtcataccatttggacttacaaatgcgcccgcagctttcatgagacttatgaacgaggtattccatgattatttggatagcttcgttatcatatttatcgatgatatcttggtatattcatggagtgcggaagagcatcgtgaacatctatggaaagtaatggacagacttagggaacaacagttgtttgctaagtttagcaagtgtaagttttggcaacgagaaattggatttcttggccaccgaatttcatgacaaggagttacggcagatcctgaaaagattgccgtaatacagcaatggccgaaacctacatccgttacagaagtacggagctttttagtattggcaggctattaccgtaagtttgtcaagggattctcgtcaattactaagcctttgacccgacttactggtaaaggtttaccctttatatggaataaggttgttgaggaggccttcgttaagttgaaaaaggcactaacaaccgctccaattctagctttgctggagccaaataaaccatatgatatttcccggatgcttcgagagttggcttgggatgtgtccttatgcaagacggaaaggtaattgccgatg

SEQ ID NO: 18221 - DNA, 996 bp, Arabidopsis thaliana
caactcaattcaaaaagaggtacaaataacaagtcaaaacaagtataaatgacttcaaaacaagtacaaatgacttcaaaacgagaggtacaattagtttatagagagatacaaatgactcaattccaaaagacgtacaaataacatcaaaacaagtcaaaacaagtacaaatgaatctaaaacaggtacaaatgattctagaaataggcactcaacatagtttcaaaccttaacatacttgttgcaacataaaaaggaaatacaatcaagtcaattcccattttacttctttccaagtgtactccataagccttgcgatctctgcatctttcttgtccaagcgggctttcaggtcctcaatttcaacacggatttggttaatgtggagaaaattactatcacctccatatttgaatgtgttttgaatcaattccttgtgctcgccaaatcgtttgtcgatgcaaaagcattgctcgtgaactgcaagatcccaacaattgtctatgtgatgcttatcatcttgatcacttcttggacatttgagaaatgtcttcatttgattgtcaaagatacgttttgaaaggtaaagatgtttacaacaaaaaagtttgtaggaacaccaaaatcaccatcgtatttgcaaggatcctcggatcgttcgtctgatgaagaaggtgacgaataactaagcggcattgtttgttgtagccaaacacatgaaaataattaggggacaaattccaaaatccaaaccctagatctttaagaaaatccaaaatccaactcctagatatcaaactatcataaacgacaaccctaattccatttcaaaccataattcgatgcaaaaggggaaaaaatcaaaaccctaatttcatttcaatccaacccgaaacttacctctggagcttaatggatgtcagagaacttggatccggcggttgatgaggaagattcggtggtcagcgtcagcggaggttcgtggcaatgttcgt

SEQ ID NO: 18222 - DNA, 892 bp, Arabidopsis thaliana
gatcccacttcgaagattttaaagaagtaatcaaaggataagtaggagaagagatggaggagtacctatcatagggaactgaaatagatgtgggttgggaaagaggtgcagaaccatctgtctgtgaagctcgatggtgtcgattgacagggggtgtggtttggatcgacactgattctctacagatctcatctgcgcttgaattgacattgccatgattttcctgcaaacttgtctcaaccaagtagatactctcttcaggtagaaaatcattgataggaacgtcatcttcaaccttgatccttgacaaatgattagcaactccattttcaatccctttcctatcccgtacttcgatgtcaaactcttgaagaagaagaatccatcgtagtaatcttggcttagcatcctttttctgcataaggtacttgagtgctgaatgaattgtatgcacaattacctttgaaccaaccagataagagcgaaacttctcaaaagcaaaaaccacagctaacaattctttctctgttgtcgcataattctgctatgcatcatcaagtgttctacttgcatagtggataacatgtagtttattgcctttcctctgtcccaaaacagctccaacgacataatcacttgcatcacacatgatctcaaaagataaattccagtccggaggttgaactattggagcactcactaaggcattcttaatctgattaatagcagcatgacactcagcattgaagtcaaacttcacatgcttacaaagcacagctgttagtggtctggcaatcgtactgaaatccttgacgaatctccactaaaagccagcatgtccaagatagctcctcactgatttcacgttatatggtgcctgtagacttgtcat

SEQ ID NO: 18223 - DNA, 1847 bp, Arabidopsis thaliana
atctctattttatatgtataccatggatttaatgtgatatgcggttttgtaatggatagagcttgattatattattgtgttccatccatatatttatatccataaggtatacgatatgtggattattattttatactaattatatactaaaggtttgttacttacttagtagaatggtccacatcttaaatggtaatgtagcataattggaaaactaaaaccagaaaaaaagaaaggagctaataaatgaaaaacaaaggttcctaatggttaaaaaaaaaagacaacattaaaatcgaacttcacatatttggacaagttttctgtgctgcacttttgcatcggcagcaccttgcattcattgctcgcactcggggctaagccgagtaagctccatcgatttgtacccatcctccgtcctctccataaggctccacccataaaggtgccctgtagcattcttcaacaaaattctcatatgctattcctttgtacaatacagcagtcaaagcatggggattttttgcttgaagacatttattgaagaaatgataataaatcgagtgtggcattgaccaccacatgaaataccgagatctgtcaagtcggacacaacgtagggttttctctgaatacacagcctccttaaataccggacctgctttaatcaaatttttcaatgcatccacgccatcctcagccaggtagttaacaattttagcaagcaatggagggggaatgtgaaattcttgaatggtggtttcctggccaaaaaataataacttaataagacaatataaataaaagtataaagtaggagagtttatgatttttgtaatgtttgtaaaaccatttttacactacagccggcggatggttcactcctgcgtctctgtcttctcataattgatatgctcgcaagaaatcaaataagaaataatttataaactggggagaaatcgtggatacttatttaaaaaagattatggtttatattctcctattcttctacttcctttaatttcgcaccacaaactgaaatttcaaatgcagaatattccctatcttaaccattacgcaagttttacggagataagttttcatttggagcgaccctgtaaaagtaaatattcctaatttaggtaactaaaaaaaaaataaaaaatgtgggtatgtatatcatgtggtagttatatctctattagcttgaaagaacaatctaaatttatttccctccataacattgataaacttcgttattacgggaatattcccaccttcccaactacaacatttaataaaccggaaaaatataaaaataaatataaccatagtaatctctagttaagaaaacctcccacgattcgtttaagtttctttcatacccattcaatcagtttcaacttcaaaacatagaaataaaaaggagttaacgaaggtcgacatgagtgaaccatcatctgtttcaggtgtcaaaaaggtagggcagcgtatcataagctaaattcttatacgttttacatccaacataaacaaaaaaccaattgtttccaattttctttttttaacgcaggttgctattatcgcctgaaattcacatcctgacaccagtacttgctaaaattgttagctacgttgctgaagatggcgtggatgctttgaaacccttggtgaaggcaggtccggtatttaagacggtaatgtattccaaaaaaaacactaagtcgtgttagccttaacaaatctcgttattttatatggttgtccatgacaaactccatctataataaaaaagtcacgatatgtcttgaagccgacaatccaaatgctttaaatgttgtattgta

SEQ ID NO: 18224 - DNA, 1157 bp, Arabidopsis thaliana
atccagtgccacaaacttcttgaacacattcacaacgaaaacgcaaatagtccatccactgatagtctgacaaagttcggaaacagaatgatatccatccatgttaacaaacgacagcttcctttattagtggggtgggctctttttttggataggatgaaatatgaatggtgtaaaatcgattgtaatcctgtcttaaataatattccaaccgacgtgacgattggtactcgcagtgccacctgtcaaccgacgcgacgattggtatttcaactgacgcgttgactgggatgccacccgtatttatagttgacccaaatgaacctgttgtactaggtttgccaaacaacgactggttcatagttgaacctgttgaactatgtttggcaattctgttgaactaaaaaacttaactatgcttcaaaattccgaaaacacaaatttaaaaacaaaggattgttcttaattgaacctgtcgaacaatatttgacaattccgagaaacacaaatttacacacaaagactttatcgtagttgaacttcttgtactagttgacgagttgacgtcaatcatcattggtttcaggctgcaaccacctctccaagttgatgccaggagtagctttgttattagtcttctttcggcgcttctcacctctggatgaaaaccgggtttcttgattccttcctttttttggagtgtaatctggcggttttgcgaccttctccacataatcaggaggaaagaaccagtgagcctgatgcggcaccacataaatcgttatgtaatatgccaatgcccacgtctcgatcaagtaatacttcgagcaaagaccatagatacttacattcaagattgaacggctattccaatccatcttagatcgctttatggctgcagctatagcatggacgcacgggtacttatctatatcaaattctctgcaagaacaagtattcctttccaagtccaccaaataagaaaaaccatcatttccaattacgctgtattcttgtcggaagctgtttagttcagttgcatttagctttgcaccaattggacagcgcgtgtgtaatatattctccacaacaggcaccacttgccttgtgttcgatgcagacgcggaatctttgcgatgtgtgttgaaccactcaga

SEQ ID NO: 18225 - DNA, 520 bp, Arabidopsis thaliana columbia
actctagatcccccccattgttttggcagtactcatttcaactctctttttcgtttccattaccctcaggtaatcataacatatatataagttacatttgtagatacatatgtctttagttttgtgtaatttgttacttaattattattttctatggtgttgtagaagaagatgaataggccgggagattggaactgcagattgtgtagccacctcaacttccagaggagggattcatgccaacgttgtagagagcctagaccgggcgggatcagtaccgatttactcagcggttttggtggccgtccggttagtagctccttcggtttcaacaccgggcccgatgtgcgacccggggattggtattgcaaccttggggattgtgggacacataattttgccaataggtccagttgtttcaagtgtggtgccgcaaaagatgagttttcatgctcaagtgctgctgcaacaaccgggtttatggacatgaatgttggtctgagacgtggcctttttggtt

SEQ ID NO: 18226 - DNA, 552 bp, Arabidopsis thaliana columbia
ggtgaggtgcatgcttgatgaatcaggtcttgaagaaacgttttgagctgagactgcagcaacagatgcatacttgattaacaggtcacctgcttcagcagttgatcacaatgtgccagagcagttgtggctcaacagagaacctggatataagcacctgagaagattcagttctatagcctatgttcatcaagaacaaggcaagttaaaaccgagagtattgaaaggagtgtttctcggatatcctcaaggcactaaaggttacaaggtgtggttaattgatgaagaaaaatgtgttatcagcagaaatgtggtgtttaatgaagattcagtgttcaaggacttacagtcaggaagcaaagatgaagatgaaacagtaacacaggaatctcagattgagattgaaacgccgccaagtacagaacttgaaacacagaatcaggttcaaggtggagctactcaagtccagctcaatgattctgaagatgaatataatgatgttgaaggagtagttacatgaagcaatctgaagacttatcagttggctagaga

SEQ ID NO: 18227 - DNA, 588 bp, Arabidopsis thaliana columbia
  unsure (1)..(588): unsure at all n locations
nnnnnnnnnnnnnnnnnnnnnnctaaagaaatcacaggcgcgatgctactatgattttcctgaggagaacagaggagatacagcgccacgcccgaaggactggcagtctggttaggatttatcttcctgcggcatgtggcggtagatatagataccgcttaacaatgtgaagattaaggtaagggcggtcaggccaaagactttaaagttgacccaaatattttgcggcagcagaatgcgatgtagatgtttgccagaccgcaaaggataaagaaaacagcccaggccagattcagcttcgaccataccggttgcggcacggtgagttctttacccagcatccgctgaattagcggctttttcatcacccattggctgactaacagggctcccgcaaatagagcataaatgacagtaaccttccatttaataaactcatcattgtggaagaacagcgtcaagccaccgaagacgaccaccagaacaaaagtgatcagggccatcttctcaaccttacgaaagcgaacccagctatagataagcacaatcgccgtggcgacgatcagcgccgcagtagccgcatagatg

SEQ ID NO: 18228 - DNA, 422 bp, Arabidopsis thaliana columbia
aagatcagaggctgactagcatttgaaggtacacatgcagtctttgccacagcttgtggcacatcataggggttacttgtatcgaccaaaaggtctgtgcttatcgatttcaatccattaccaaactgtcgaacccagactcgatcatggatatcctcatcatacctatagaaatgagaggaaaagccactagacttgtttttgttaactcaaaaacaaataacaaaaaaaagaaagtcccgtcgttaaatgcaacatccagatctagccgttaatgttgttcgtttctaaaatcgctttttccatatgcatgttgcatttggataaaacgttttgcatccgaaaatccgaatgcaaataccaaatttttcaaactagctagcaatatctggtgcactttacatcaagatattgcatgattt

SEQ ID NO: 18229 - DNA, 471 bp, Arabidopsis thaliana columbia
tgttcttgctcttcctcccaccacgattcccaacttttttctgccggaacaccaatacccccgatgttgtttatccatttattccaatcagtccaatcatcaacaatcttctgccattcaaaaccagaaggattgaagaggaagggagcaaaaagccaggtcccgaccatgaaccacatagatatggtgatcaaaagatatgcaaggacgcctctgtaagcactaccaaatatttgatacacaacgagtagcagcatcatttcaagtcccttcacaaaatggctccgggaatacagtctgtaattatcagcaaatttggcatgaaagacgacaaatcctcttcctgtggatctgtacttggcaccgccatgaagtaacgtccgcccatagtagtgagtctttgtcccaagagagaacgtaaagaacactggcgccaactgaagctgcatcagcacaaattcactcaaggca

SEQ ID NO: 18230 - DNA, 640 bp, Arabidopsis thaliana columbia
  unsure (1)..(640): unsure at all n locations
ctcaacgaagtttatgaagtcttcctttgtcctgtctccttcgtacactacaacatttccgctcgctgacctgaagtaaatggtcgggaatcctttcacatcgaaggtatcacttgggatatcatttgcggttgcgtcctgcacagacacagacacggttaagtcaatccaggaggagtatatcaagttatagtttgacatgtaaagaacataaaagagaggcttaccaattttgctatgatcacacttgggtcgttctggaatgacaaagccacttcgtccaagattggagcaagtttttgacaatgtccacaccatggtgcatagaactcaatcaagactgatagataaattgatgtttatcagtcttgcgttcgcaaaaaaattgaaaccattattagagttttcaaataatgtactcaccattctttccagacttgaaaactatgtcgtcaaggctctcggcaacaacaaccttcacaggttcgttgttctcagctggaataggttgggattttttgtggacagcaacttttcagtcctgaagaaaacatgttgtntgtttagggtatcattgattcatacgtacttcttttttcataaaccttgtgtgaatgtgtgcgaagagaatgaacctgga

SEQ ID NO: 18231 - DNA, 574 bp, Arabidopsis thaliana columbia
tgaaggattgggtcaagagaagagtggcttctggtgtttcagagtcgacatgtttccttccttttcttgttggtgccaagaaaatggtatgttgtttgttatgtcaaattaatgacttgtgaagtttttagatttattgacatatagactacatgggatttggattttaggatatacataatatcttgagttatgaagtttgtttgaagtatattgcatctgtgaattgaattcatcacctttttttggctttagtgatgtccgtgtaagatctcatattcatttagatattgtttgactactagtttacttttaaagtcattcgaatcttcaagtcaattagtgactaagttattagatttattgacataatgactatatgggatttggtgtcaggttgattgtcttgtttgccataagccggtgtacccgggggaagacttatcgtgttctgttcgcggctgccaaggcgcttatcactcgctttgtgcgaaagaaagtcttggttttctaagcaagcaaatttaaatgcctcaacatgtaagatcccatttattgtttagactaaggaaga

SEQ ID NO: 18232 - DNA, 1412 bp, Arabidopsis thaliana
cagtgtgcttacaaactacatgacatgtttagaaagtattagtgatgtctccgtcaactctaagcaaatagtcaagccacaactcgaggacttggtttctagggcaagagtggctctagccatctttgtctccgtcttgcctgccagagacgatctcaaaatgatcatttccaatcgcttcccgtcgtggctaactgctcttgacagaaagcttttagaatcttctcccaaggtaataaaaaatcatgttcaattcttatacttcaattaataaatatggccaatatatttctaggaaagaaaaagtttcggttgtaatgtaacaaaaaaataacttttacctatctttcgtcattcaaactctaaacactttgaccttttactagacacttaaggtgaccgcgaacgttgtggtggcaaaagacggcaccggaaagttcaaaacagtgaatgaggcagtggcggcagcaccggagaacagcaatacaagatacgttatatacgtaaagaaaggggtttacaaagaaactattgacataggaaagaaaaagaagaacttaatgcttgttggtgatggcaaagacgcaacgatcataaccggtagtttgaatgtcattgatggatccaccaccttcagatcagccactgttggtaatataacatttttctttcatttgtgtcttttaagttattacattcttgtatccgaagaacttaaaatattgctttgaaaacatgtacagctgccaatggagacgggtttatggcacaagacatatggttccaaaacactgcagggccggcaaagcaccaggctgtggctctacgagtgagtgctgatcaaactgttataaatcgttgtcgcatagatgcgtatcaagacacgctctacactcacacgttgagacaattctaccgcgacagtacatcaccggtaccgtagatttcatcttcggaaactctgctgtggtattccagaactgcgacatcgtggcacgaaatcctggagctgggcaaaagaacatgtttacggcacaaggacgggaggatcagaatccgaacacagccatttcgatctaaaaatgtaagataacggcaagttcagatcttgctcctgtaaaaaggatatgtgaaaatgttccttggacagccgtggaagttgttctcaagaacagtgatcatgcagtctttcattgacaagcacattgacccgactggttggtcccatgggatgccgagtttgtgctctccacattgtactatgtagagtatgcgaataccggtcctaagagcggatagtagccctgtgcatgtgggtatttgggtcgggtttggttagggtttactttgggtctaggtaattcggatattggttaaagactcataaataaccaaaactatttcgggtttga

SEQ ID NO: 18233 - DNA, 297 bp, Arabidopsis thaliana columbia
catttggtgttgttctttttgaagttctttgcgctagacccgctgttgatccgttgcttgttagggagcaagtaaatttagcagaatgggcaatagagtggcaaaggaaagggatgcttgatcagatcgttgatccgaatatcgcagatgaaatcaaaccgtgctcgttgaagaaattcgctgaaaccgcagagaaatgctgtgcggattacggtgtagatagaccgacaattggcgatgttctatggcacttagaacatgtgcctcagcttcaagaatccggaccattgaacattc

SEQ ID NO: 18234 - DNA, 593 bp, Arabidopsis thaliana columbia
cctgtggaaagatcatttggtagctcaatttcacgggctatgtccttcatctaatcgtatttttaatgacttgaatttgatttgaggccggtttggtaatattacagtgggactaatctctgaaacgacaactctcatctttattacggcgcctcttactcgacaatgggttattgatgtcggcttttggcacgcggggaactgttcatgcacagtttatccttggtctcctgacggtcctcttgagctggaggaacttcatacggcgcctacgtgggcggttttgcgtaatgtccctcctcaactatattccttagatggaattatagtcattgccagtggtattggagattctctccacactgagaagtccaagcttgatctagtgaacattggctttaccaaagtcaaagttataatcaaactagacgccctgctccccaccacagtgatagtaaaagactgtcaaggaaacgtaactcgtattgtaatggaatatcctcggcctccacctaaatgtctgaattgtggaagatatggacatctcctaagctgttgtccaagcatctgatgaaaaaccctttttagaaggt

SEQ ID NO: 18235 - DNA, 1283 bp, Arabidopsis thaliana
ttaagcttcacttcaaagatgcgactttctcccacaaaacatatttacgtatatatcatctcatgatgttcacttgattaaaaattaacatcacgaatttaacagaatatattattaaataatccagcaggtaacaaagttataaatggcacacgtgtgggctcatacccagataagctctcgttcctcatactcttaacgctcacaacaaacaatctcacctttcttcttcttcttcttctctctgtttctcaagtttcttaatgcctaggaatatagaaccattggatcttggaatccaaataccatatcatttcagatgtccaatatcactcgaacttatgcaagacccagtcaccgtctgcaccggccaaacctacgaccgagccagcatcgagtcatgggtctccatcggtaacaacacgacatgtccagtcacacgtgtcgctctctccgacttcactctcatccctaaccacactctccgccgtcttatccaagaatggtgcgtcgctaaccgctctaacggcgtcgaacggattcctacacctaaacaaccggcggatccaatctccgttaggtcacttctcagtcaagcatccgcaattaccggaactcacgtctctgttcgttcacgcgccgccgctattcgtcgtttgagaggattagctagagatagtgagaagaatcgcgttttgatcgctggtcataacgcgagggagattttggtgaggattttgttcgccgatattgaaacgacgtcgttgtcttcggagcttgtttctgagtcgcttgctcttttggttttattgcatatgacggagacggagtgtgaagctgttgcgtcggatcctagtcgggtcgggtttatgacccgattgttgtttgattcttcgattgaaattagggttaacgccgccgcgttgattgagatggtgttgaccggagcgaaatccatggatctgaaattgatcatttccggatctgattcgatattcgaaggcgttctcgatcttctcaagaatccgatttcatcgcggcgagctttgaagatcggaatcaaagcgattttcgtctctgtctcgtgaaacaaacgagacatctagcgatctccgccggagctccggggattttaatcgaccgtctcgcggcggatttcgataggtgtgatacggagcgaggtttagcgacagtggagcttctttgccgattaccagaaggatgtgctgcgtttggtgagcatgctttgacggtgccgctaatggtgaagacgatattaagag

SEQ ID NO: 18236 - DNA, 546 bp, Arabidopsis thaliana columbia
tggtatcttgaggattccttgtgaagttgctgtgttcgagagcattttgaagataatggaggacaacaagagtgatgcgtacctgaccactcaagagtgcagattcaatgccacaagtgaggaagtgatgagttatcgtcatccttcggattgcccgaggacaccatctcaccaacctcacagcccaatgtgcagatagttttattttgttatgttttgatttgcttgttgctttgaaccattcttcttcctcttccccatgttcccactttttcccttgggggtttggactttgtgtactatgcaacttcaatgagaaaaagagtgagatatagagagatttttgaataatggaatgtacaaacggatcatttgaaacagaccaaacaatcctctttggttgaaatttgaaacatataaatgtaagaccacaatacaatctcccctttaaagatatgtgttattttgaaatatcataaaagtcaatccttcatctcagtagataactctagaagagaatgtattacatggctagtgtaagaatga

SEQ ID NO: 18237 - DNA, 1213 bp, Arabidopsis thaliana columbia
ctctttctggatgactttactatgaagctggcaagtctcgcttcttcaaatcaactgcatctttctcagcctttaggcaactgctggagtcgacggatacacttgcatcttcacctgcatgttgagagctattctgcaaggatcttctcggaacaaactctggtgcatctggattcatgcttcttggcgtcccaactccatttgagtgaatagcactataatatggtggtgagtgaatcccacatgaaactacagcccaggaaatagggtctgcaaccataattgggtagctgcctattgttgctgctgagctttgcagatcaataaccaagaaacctccagggttgtaaggctctgcggaggctgatagctttgtccggcttatatcagaagtttttttcccacgataggaccccagatccccttcagactctgacgttaagttttccactgactcagcactttcttgtgattcttgtttctcacagtgaagctctgtgccttcgattggcaaatccaacattacagtgtcggacttgctttcttctccagatgacgcacttgaagtcctgtatatctgagtttcagttctctccaaattcagttctaatttttctaacattggcttcagaactgtacctggtggtgccaaagcaacctctttgtatgagagagactttgaggccaaagtagtactggtcacagcagcagcaccagaagcctttaactgtggtttagttgtatttgtactgacatctatctctgcattctttagagccctacggggtgatgacttagagagggagggtcctttgcttgttttctgcaagggagaatatatattctgttgctgaacatcctgattcctgttgtgatgtttattaagcaacattctctttttcataagatcaggctgcctttgtctggatttccttccagcaccatttccggatctcccctttgagtatgcctcttgccaggcctcgtctaaagttgactcttccacagtttgcctgtctacatttagcctgtgtactacaatatcacctgtctcaatattggtcttatcaacaactgtatcaggatcatttacttcgctcctactcttagtgacatccgcttctgccacattgttccatgtaacaatgtcaatctgtgaagcaactctatgggcgtcatcatcagctgatgcaacttatcattgacctgtaat

SEQ ID NO: 18238 - DNA, 1031 bp, Arabidopsis thaliana
atccccttaagaatataaattagtattcaaatttaactgatgattgtgttaagtcttttataatttttcacagccacaaaagtaagaaaacataaagcactgaagttaaataccaaattcaaaagagcttcgtttacaagtacatacacataaaatcagaatgatcattagatacaatagtgttacacataactcatacggacatataaaataaaataacacttgtagaacatatcccattcataagaaacgtaattagcctcttaaacaaaaaacgtaagaagctaatcttcatttttttttttctcattccacacaaattttcccattaaacacacaaaaacgagttacaattacttaacacggcaacgaggttgctttctccttctgttcgtctcactgtacagttaaaaatggctctatggactgtgcaagttctttagctgctcaaccacatcaagagtattgcttagctgatgataatcggagcgatgaagagcgtttatttgtcccgaggttttggttccatcattgaaatggttctttgcaggtccaccacgagggcagtgacgcacacggattctatgctttcttgtctcagtcgagaaccttccgtggaccacgaggaccaatatgacttccttgtctcttgtgtcttcacaccaagagttctgagcaacaccgtccacaaactcttctactgttgggaagtcttccagatgcactgaaacctcggctatttggtttggtttgattgtgccagttcctggagacacctgtttgcaaatataagagcatttagtaaaattgattccaaagaaattctcaagacacacgacatgatttcagtgtctaggacatgctagttaagtgttgtattttaggaaacagaacagtgagactctaatgaaaagccaaactgcaagtatgagagaacaactaactaacctccagccactggggaaacccgaaagagcctcttgctcggtggtcgtgtgcctgaccgtcctcctcgattttagattgacttc

SEQ ID NO: 18239 - DNA, 591 bp, Arabidopsis thaliana columbia
cctctactcattcccgaggctcaggtggtgtctctaggaattactatacccctgcagacaacttcgttgcatccaaaagccatggtagagggatctctcctaatgcttcctctcagggccacggatcctcttctcataaacattattctgcggtggatagaactaacctcccctctggagaaaggtctagaagtgtctttccgcaaagaagtgtttcactattatcctcagggtatagagcacggcctagctctaaagctcaagtttatcacactaaccaccctcatggtgcgggttctgctaatctggggaatctctaatggcaagaaaaacactcaaatgtaccaagattttcccaggaaacctctgattcttccagaacaagaagacccccctcttgagagagatgtctctccgcggaccctcaaactccacctctcctgcctgctcctctctctaactggaatcaaagactttctgaggtctctccccccagttgtcatacctccaaagataagtctttggtgactgcgtgaagtcacaattaaacttgacgtgtgttgtctattgagagccactaggaacaaagag

SEQ ID NO: 18240 - DNA, 607 bp, Arabidopsis thaliana columbia
ctcttccttgccttctttttctgcccagtcaacttgcagattgatagaattgatacttggggaagatagaggatggaattttgatcagtttagagcctgaaatcacaagaaacggtgaagaatcgaagattctagagagaaaatggtgaattcggtggtttggaagaaagtgaaatgaagaagatgaaatttttaggttaagtcgacttacgtggaaaatgagggtgtcgatcgacaccatagcgtttggtcgacgcgtcctttttttttctaaatctaaataaaaaatcctatacaatcaaaaatcctaagttaaaaatcaaatgaatgaaatgaagaaaaagagaaatacttaccagtgggttgcctcctactaagcgcttgtttatagtcaatagcttgactctacagttgctcagtcaacaggtgggtcttgaagatccaaaggcttttctactggaatctcggcttcagcccggtagtgtttgactctctgtccattcacggcaaatggtttccattgttgtttttaagaatgattgtccatatggtctaaccgagtggactgtgtagggacctgacacgagaagcaattttcaggaaatat

SEQ ID NO: 18241 - DNA, 475 bp, Arabidopsis thaliana
tgaagagaggtgattggcataggaccaaagatttggtgctcaagggtactgattggattgtcaatgaaatgaagaaatctggacttcgtggacgtggtggtgctggtttcccttctggtcttaagtggtcctttatgcctaaagtttctgatggccgtccctcctatgtggttgtcaatgctgatgagagtgagcctggaacttgtaaagatagggagatcatgcgtcatgaccctcacaaattgttggaagggtgtttgattgctggtgttggaatgagagctagtgctgcgtatatttacatcaggggtgaatatgtgaatgagcgtttgaatctagagaaggctagaagagaagcgtatctagctggtctcttggggaagaatgcatgtggttctggttatgattttgaagtttatatccactttggtgctggtgcgtacatttgtggtgaagagactgcgcttcttgaaag

SEQ ID NO: 18242 - DNA, 747 bp, Arabidopsis thaliana
  unsure (1)..(747): unsure at all n locations
ataacacagggcagggtatataagacctggatttgatggaatgtagttccatcaggagaacaacctatcctacttcccttgccaaagccgcgataacatcgatactatcagctctaactctcaagttataattcccatgccttcgtaacccgcctagtatccttgcagttatagcccttcgatggcgctctctcaacttagttcgctccttctcttcaagcggtctacttctgcgacttcctcctcccccaggagtgcccacttgatcttgcattgactgctgaaacataaactcgtcattactactactgcctgaagctgcgtgtttgtctctatttcgtcggtctccatcatcttcttccttcacatccatgtccatttcttcgtcatcatcctcttcactagttccaagcagtttatgcatatccgtcgccattacttctcttataacccaaccacccaaacctctgttagtttaagaacgttattgccctcttatgatgaaatgttccatctttacttctctggttttaacactccacgtgtaatccttctggacaatgcagccaaatattctatgatatttccttgcttacagttagttagaaaattggagataattttagtatcaacgaaattaatcttcaatctctcaatgtgcataagctgctctcagtttaacttcatcanagatcctacaagacaagaatcagacatataaacagcattttcaactacaaacatatt

SEQ ID NO: 18243 - DNA, 800 bp, Arabidopsis thaliana
ccaaccgaagttatcgacctctttgctttcgtggtgaagtttccattcaagcctttaaaatccgagacagagctaatctccagagagcttctactgaaatccaacaccttcccttcaacaatctccttctcttgatccaaccaaagatgcaaattcgcatcaatataccaaacattcaaagcatttgtaacactaaaccccaccttatgagtcttcccatctaacaaacttcccaagaacggcgtgatctcgatatcgtaactcggcaaatcaaaagagccaatagcagtaattggtctccaaagcaaaggattaatcccaccggtgaaaacaacagggaaaggccaaacagcaccagcaatatcaccgtcaagactaaccacaacttctctaaaaggtccattaccagcaacactaagattattagcagtaacatagtcattaggaagatttccataccaaaactcatcattctcatgaaaagaaacataaacctcaagcacagctctataaacattcctaggaatctcaaactccttatacttggtatcattcgaattcacaatttcaaaccacaatccatcgttcaacggaagatttctcgaaatcggcaggatcatatcagctttagaagagctataaccagaaacatcttgaagattactttcggattgatagaaatggaagatgacatcaacatggtaaacaccagtataggttttatcgataagattaccaagataaacagagagaatctgagtctcgtttttgacgagcaaagagtgatacttggtcacatc

SEQ ID NO: 18244 - DNA, 1915 bp, Arabidopsis thaliana
tctcaccatatgctggcagctttctctcttgctaacattgtactatcccttcgtgtctgtggatttgcggcggtcgaaaaacgttgctataagcatgggacattcaagctttcagagactgtgtctttgtctaatgttctttatgtcccagcgttaaattgctcattaatatctgtttccaagctagtgaaacagatcaaatgtttggcattgttcactgatacaatttgtgttttacaggaccgattttcgaggactttgattggaaccggggaggaacgtgatggagtgtattatctaacggatgcggctacaacaacggtgcataaagtggatgtcacaacagatcatgctttgtggcaccaacgtttaggacatccaagtttttctgttctttcatctttacctttgttttcgggatcctcttgttctgttagctctcgttcttgtgacgtatgttttagagcaaaacaaacaagagaagtatttccagatagtagcaataaatcaacagattgtttttctttaattcattgtgatgtttggggaccatatcgagtgccatcttcatgtggagcagtttattttttaacaatagtggatgatttttcaaggtcagtttggacatatctactattggcaaagtcagaagttcgtagtgttcttactaattttcttgcatacacggaaaaacagtttggaaaatctgttaaaatcattcgcagtgataatggtacagaattcatgtgtctttcatcctactttaaagaacaaggcattgttcaccagacttcgtgtgtaggaactccacaacaaaatggtagagtcgagcgcaagcataggcacattctgaatgtttcaagagcactcttgtttcaagcatcactaccaatcaagttttggggagaagcagtcatgacagcagcttatttaatcaatcgtacaccgtcttctattcacaatggtctctctccctatgagttgctgcatggatgtaagccggattatgatcaattaagagtcttcggctctgcttgctatgctcatcgtgttacacgggataaagataagtttggtgagagaagccgtttatgcatttttgttggctatccatttggacaaaaagggtggaaagtatacgacttgagtactaatgaattcatagtctctcgtgacgtggtgtttagagaaaatgtgtttccttatgcaacaaatgagggtgatacgatctacacaccaccggtcacttgtccgatcacttatgatgaagattggttgccatttacgactctagaagacagggggagcgatgaaaattatttgtctgatccaccggtttgtgtcactaatgtttctgagtcagatacggagcatgatactccacaaagtcttccgactccagttgatgacccactttctccgtctacaagtgtcactccaactcagacgccaactaactcttctagttcaacatcaccgtctacaaatgtctctccaccccagcaagacaccactccgattattgaaaacactcctccgcgacaaggaaaacgacaagttcaacaacttgctcgtctgaaagattacattctatacaatgcttcttgcactccaaacactcctcacgttctctctccttctacatctcagtcctcgtcatcgatccaaggtaactcacaatatcctttaacggattatatttttgatgagtgttttccgcagacataaggtgttcttgctgcaatcactgcaaatgatgagcctaaacattttaaagaagctgttaaagttaaagtctggaatgatgcaatgtataaagaagttgacgcactcgaagttaacaagacatgggacattgtcgatctgccaactggaaaagtagctattggaagtcagtgggtttcaaacaaagttt

SEQ ID NO: 18245 - DNA, 1234 bp, Arabidopsis thaliana
tgatatccaattttagatacacaaaaaacttcatcttactcatcatcaacgtacgatttgaaccaaaacatcaccttcagataacaaaaagaaaaccgaaaattatcacatatcacacttaccaataaactttgtttcttattatttgtcaatatccattttacaagttagtcactcttatcaataatgtccatcaagaatcataatccattagaggatatataatttagtaattttcgctccacaacaaaagaacaataatataaaagatactaaaacgaaaaacataaagttacactcacacatatgaaacaattacatataaggctgagttaaatatctatgctcagaaaaagaggaaattaaaaaagtatgcttgataattctgtatttaaatttctctcttcctctacaacaatctctgatgcttttatccctatcaacatcaaatattattaaatatgtaatgatgcggcaacatttaatgcttctgaaaatatctgcataaaatcttggtgtcggcattgggaagggaaaatagaaaaactaattatttacatgacagttatttattgggttgcgagatatcatttatagactttggactatttagtagcacaatattgcagttggaggaacaaaacagatctagtaaactaaaaagcttagcttcagagaagttattacagtttctggggaaacaccaaaaatcagtcaacccgaaaaggtatgagttaaagctctaacgattacatccataaatgtacttcccccgaaaagtcattacatgtcaccagtttcaaatctaaccatgctaacgactatattatcggcgaatatatttgcaggtgcactatggctttcgttgttaggttgatcctaggagaatggaaacaagatgaaaatgggtttttcgaacacgtcggcgagttggaagggtttagcgtgggcgtacgactgagggagcaggatgggtacgcaagcttggtgaatgttgtgaaagaaaaatccagggctggtcgagaagataaagtcgaactgagttatcagtggccacactggatgatggggccagattggaaacaagctaacccgatctacataacaatcgacgaagatatgacattgttcagggcaattagggcggattcgaaggaagttcatctaaaggtgaagattatatgggacgagactgagcacaactttaattcctactggagtacatggatttggg

SEQ ID NO: 18246 - DNA, 1092 bp, Arabidopsis thaliana
catggttggcgactttcaccgctacaggttcgagcattcatcgattagaatcgccaacattcttttcccctgcatttacgctactaggattctcgagggcaggaacattgacttcaagcctgcgcttgaagatctttatttcgagggcagtccgccaactgaggagattagtcacaccgaagagctacaatagaagatgttgatgagacatatgatatagatgaggcggagtttgacacgagcatgtatcatttcagtgagcatatacctccagcgaggaaaagcaagagtttgagcgacgtcacaggaacaacagcaagctgcagaagtggtgcaagaaacaggataagttactcgccaagtgcctcagggctatcaagtttctgaaggacaagatcagctgctcctcttccactacaactattccgcaatgacagctccctcaggacatgccttcgaggagatatgacgcgcccgagcctagagagcagaagattccgcatgtccctgcgaggcattcatcattcgagcctcgtgaatctgggaggaagaggaggaccacactcactcaatctagcagcacgagcaaacgacttctccagtctcgtagtttacgcgaccgcggtggctgtccgcagcagaagaagagaggtcgagtatcctcatagcggtgctggccgccacagagctgatgagatcgagtacccacctgctggagctgatacagaacatggcggttcgtctatggcctgtgagcaatgacaggcagccattgacgaccaactccgttcattcttcgactgaggtaagcgcctcacttcaccattgtattatatcatctcttgcgatttgttctttattttgtttttgtgattggatttgtcctgaatactcttttccaagtttattcacacagtggactatgtgatttaagtttgggggagggctcaggaagtgtgtgttgcattgtgtatattcttgagtctgcattcatctaaggcatagaaaaacaatgaagatttgaaaaatttcagaaaatgattcacaaaaatagtgtcatgtagtgcatacatttaggacgagctagagtgt

SEQ ID NO: 18247 - DNA, 2223 bp, Arabidopsis thaliana
cagcgtgttccagctatgatcatgcaggctgtgcttcagctatgtgcccgtctaacgaaatcacatgctttagctatccagtttctggaaaatggaggcttatcttcactttttaatcttccgaaaaaatgttttttccctgggtatgatactgttgcatctgttattgtacggcatcttgttgaagatcctcagactctccaaattgctatggaaacagaaatacgtcagaccttgagtgggaagagacatataggtagagtattacctcggacattcctgacgacaatggcacctgtaatttcaagagatccggttgtttttatgaaagctgtggcttcaacttgtcagttggagtcatcaggaggtacggactttgtgatactgacaaaggaaaaagaaaagccgaaagtttctggcagtgaacacgggttttctttaaatgaaccccttggaatatctgaaaataagcttcatgatgggtcaggaaaatgttcaaaaagccacagaagagtccccactaacttcatccaagttattgatcagcttattgacattgtcttgagttttcctgggttgaagaggcaggaaggtgaagcagccaatttaatttcgatggatgttgatgagccaactactaaagtgaagggtaaatcaaaagttggtgagccggagaaagcagaacttgggtctgaaaaatctgaagaattggccagggtaacttttattttgaagttgttgagtgatattgttctcatgtacctacatggtaccagtgtcatactgagacgggatacagaaatatctcaacttcgagggtccaatctacctgatgattcacctggaaatggagggttaatttaccatgtcattcatcgattgcttcctatatctctcgaaaagtttgttggacctgaagaatggaaggagaaactgtctgaaaaggcgtcctggtttctggttgttttgtgcagtcgttccaatgaagggcgtaaaagaataatcaatgagcttacgagggttctatccgtatttgcttccttgggaaggagttcgagtcaaagtgttctattacctgataaaagagttcttgcttttgctaacctggtttattcgatcttgacaaagaattcatcttcaagcaatttccctggttgtggctgttcacctgacgttgcaaagagcatgatagacgggggaactatccagtgtctgaccagcatccttaacgtgattgatcttgaccaccctgatgccccaaagcttgtcactcttattctcaagtctctcgagacactgacgagggctgcaaatgccgctgagcagctaaaatcagaagtaccaaatgagcaaaaaaatacagattctgatgagagacatgatagtcatggaacttcaacttcaactgaagttgatgagctagaatcaaaataatagcagtctacagcaagtaacagatgcagtagataatggacaggagcagcttcaagtttcctctcagagtgaaggtgaaaggggttctagtctaacccaggctatgcttcaggagatgaggatagagggcgatgagacaatactacctgaacctattcagatggatttatgtcgagaagagattgaacgtgatcaaatcgaaatgagttttcatgttgaagatagagctgacgatgatgtagatgatgacatggacgatgaaggagaggatgatgaaggagatgatgaagatgcagattcagtggaagatggagctggtgttatgtctattgctggaactgatgttgaagaccctgaagatactggccttggagatggatataatgatgacatggttgatgaagatgaggaagatgaggatgaatataatgatgacatggttgatgaagatgaggatgatgaggatgaatataatgatgacatggtggatgaagatgaggatgatttccacgagactcgtgtaatagaagtgcggtggagggaagctcttgatgggctggatcacttccagattgttgggcgatctggtggtggaaatggttttattgacgatattactgctgagctgtttgaaggtgtgaatgtagacgatctgtttgctctgcggagatccttgggcttcgagcgtagacgtcaaacaggcagatcttgttttgatcgatctggctcagaagtacatggttttcagcatccgctcttctccaggccttcacaaactggcaatacagc

SEQ ID NO: 18248 - DNA, 1611 bp, Arabidopsis thaliana
acgccatcatcatccatccatcaccactcgaccccatcactttctctcttcatatattcgacctcttcttctcattcttgcatccaaaagacacaacaagccgccatcgctttccctcacaactctcactcgaccaccgcccgctctctcacttactcggcttcatcgctctcatcgccatctctcaacatactcgacctcgcgatatcactcgagctcgccgcttctcaccgcctctccatcgtcaccgcctgctccctctctccaaggaaacaactcgagctctccatttcactcactcgacctctaccaccaagccggcttcaccacttctagctcttaaccactcgaccaccttcaccatcaaccaatcaaatcgttttctcctccattaaagcttgacatactcgaccgctgaacacttatcaccttcaagctcctcatctcttcatcgtttccaacaccgctgctctcatcccccacgaaagcttgtcatcacctctcactcatcaccagttcactcgattcagcaaccaaactcgacctcgtctctcttgccactcatagtcactcgatctctcctcaccatcttcatcatctcccttactcgaccaccgtgcgtctcgctccaccattgccatttaaaagctcactcgattgtcaaagagaagaagagtgaagctcaaccaccgccactcgaccgcgtttccctctacacattcaacactcgaccacggtgctaccatctccacacccgctcttgttcaccatacactcgaccaacaactctcaaagtaaaaaaaaaaagaaaaaaaaagtcaaaaccgacagtttcactcaaccggtttactcgaccggtacgctggtttagattgtgtttttggttttgctattactaacatattaacgtttatctttgagtttcgtctgtttttaggtttcatcatgagtaactacagtggaaaatcctctatggaccctgattataatgtggatgaagctaagtcctggtccactagaccggagtgagagcaacatgtttacgagagctatagggatgaatttgaacgctctgcagctcgacgtaatcaaagaagagctgaaatcgctagaggaaagagggcgatgtcgagtagatatgagctgattgatgaggatatcaaaactgagtatgagccagagtcatggcgcaaggagacgaagctactgaacaaatccgacgaggttacagtggaggagtatatcagattctttgagatgaatgacttctggggaacgaggtatccctgatatgagactttagcccagttggggttactggaggacgtgcagcatctgttcgagaagtgtcatctgataaggaggagacaatcgagtttctttccacactgcaagtggaaatgtatgagggactcacagactttgagctggataccatggggttaggcttcttgacgttcttagtggatgaacagcggtaccagatttagatcaagaaattggaagaactgtttggtttccctagtggaaagggaaccaaccccaggtttgacagggaagagcttaaggatttgtgggctactattgggaacaatctaccgctaaactcga

SEQ ID NO: 18249 - DNA, 783 bp, Arabidopsis thaliana
ctcagaactattctgcacagtctgactcaatcaggtcgacttgcaaaatgggctatagaactaagtgagtacgatatagaatatcgcaccagaactagcctgaaagcacaggtcctagccgactttgtaatcgagctcccgttagcggacctggatggaaccaattccaataaaaaatggctcctccacgtcgatggctcctacaaccgacatggatccggagtaagaatacaactcacctcccccaccggggaagtcatcgaacaatcgttctgactcggattcaacgcatcaaataacgagtctgagtacaaagccctcattgctggcattaggctagctcaaggaatgggaatctgcgatatacacgcccatagcgactcccaactcgtcaccagccagttccacggggaatatgaagctaaagacgagcgcatggaagcgtacctcgaactagtcaaaaccttgacccaacagttcgagtcttttgaactgaccaggatccccagaggtgaaaacacctctgcagatgccttggcagctctcgcctccacgtcagatcctttcgtcaaaagaattatcccagttgaaggaatagaacacccgagcatcgacctaacggtcaaacacgctgaaatggaaacctcggcaacttgcaactttacgcgagtaacccgaagcaccaccgccgcggctagaaccattgcagcagccgcggaggcagatgcagcggaggaagagccggagctcggaacccccgaacaacttgcctcgtacgaacct

SEQ ID NO: 18250 - DNA, 1450 bp, Arabidopsis thaliana
gtactgtggagaatgcgaagatgtgcggaatctatcacatccatgtctgtgttagacacgatgtctgtagactccctggagtaaagaacattggctacttagcactgaaagtagcgaatcaatggactccagatttggttgctcttggaccgggcagagtttagcggtacattgttcccaatagtagcccacaaatccttaaagtctccctgtcaaacttgggcttggttccctttccactatggaaaccaaacagttctttcaacttcttgatcgacaactgatagcgctgctcatccactgaaaatgtcaagaatcccaatctcatggtgtctagctcaaattctgtgagaccctgatacatctccacttgcattgtggagagaaacttgatcgtctcctccttgtaggcagcgtatgggtaagacatgagtgtctccagatgacacttcacgaacagatgctgcacgtcctcaagtaaccccagctgggctaaattctcatagcagggatagctcattccccaaaaatcgttcagctcaaagaatctgatatactcctccactgtaacctcgtcaggtttgttcaacagctttgtctccttgcgccatgactctggctcatactcagtttcgatgtcctcatcaatcaactcatatctactcgacatcgctctctttcctctagcgatttcagctatcgagcgttctatttctatcctgaagctttcgtaaatgtgttcttctctctctggtctagttgaccaagactcagcttcatctacattatattcaggatccacagaggattccctactttagtttctcatgacgaaacctgaaattagatggaacacaaagaaaaatgttaatacgttagtcccaacaaaaccaaaacacaaaccaatcgagtataccggtcaagtaaactggtcaagtaaaccgttttttttttttggtttggtgaattgttgatcgagtgattccttgagtgagtgaatggagtgttctccgcgatcgagtgaggttgagaggcgagacttcttgtgggattcattggtgatacgcgatcgagtgttgctagtgaagagtgagacgaggtcgagtgatcttgtgaggtcgagtgaagctagtttcgtggttgtgagatagagtgaaacgacggtcgagtgaatcggttgttgatggtggcgtcttccttcttcttctcttttgattcagggagcgagttgatttgagaatgagatgatggtcgagtgaactaatggagcttgagcggtgaggagcagtggagaagtcgagtgattgtttcggtgagaagagaaaacggtggcagttggtcgagtgactggaacaaagcggtggaaaacgatgaggctatgagggagctgcagtcgagtgttgttggtggcgagataaggtgagaagtggcgatgtgatgaagatggtga

SEQ ID NO: 18251 - DNA, 797 bp, Arabidopsis thaliana columbia
caaaccctagtatcgagcgacaccaatacctgacggcaatacaagtgcgcaacttattgaagttttgaagatttccaaattcggcccagaactttaccttatttctaaataaggtccatcacgtttttaggtcatatatatagttttaaaggtcattgtttagacctaacacttatttatctattctgtactttggagcaaaaccatgtggagactccctttagagaagattcttctaaactctttgttcttcataatttcatcattgatttcttattccctcatgttttgttcttctatgatcatgcttcagtagttctcttgttgggtttagggattctcattagggatttggatgaattagcagatcaaaaaccctgttaggataatatatttagaattcttcatcttagattgttcttaaggttagttttagagtaactaactagaacttgattttaggataataggtatacccaccataggtatttattactagaactatctaagatgagcctagtatttagatgcgtgctagcgtccattagttaggtgaacttatcaaacctgattataatgcttgcttagttctaggaatttacaagagagttggaatcaatactattaagcatagtgagtagcacggcacaccaccagttactttatattagtgacttgtgttcaagaatggttcgataatattcataatttactgctaaatttactattctgatatctcctgagaatttctctaaacctgacatcttaatcatctgaatctaaagccaacttttaat

SEQ ID NO: 18252 - DNA, 1118 bp, Arabidopsis thaliana
gcccaagcgatgcgtagaagtcggcggagatctaggagaagagttaacaactgaactcaccgctttcctcaaagaaaacgtcaatacgttcgcctggtccccagaagatttacccggagtaagtgttgacattttttcacacgagctcaacatcgacctgactttcaaacctatcaagcagaagaggagaaaattgggtcgggagcgagcagaagccgtgaaagccgaagtagagaaattgctgaggatcggctccatcaccgaggcaaaatatcatgattggatcgcaaacccggtcgtagtaaaaaagaaaaacggcaaatggagagtctgcgtagatttcactgaccttaacaaagcctgcccgaaagacagtttcccattaccgcacatcgatcgcctcatagaatcaacttctggaaacaagctactatcgtacatggacgctttcgccggttacaaccagatcatgatgaacccgaagatcaagaaaaaaccgctttctacacagaacaaggcatcttttgttaccgagtgatgccctacggactcaaaaacgccggggcaacttaccaatgcttcgtcaacaaaatcttcgcattagagatcggcaagaaaatggaagtttacatcgacgacatgttagtgaaatctatggcagagaaagatcacataccccatttacgcgaatgtttcaggcagcttaacatctacaacgtcaaactcaatcctgcaaagtgccgcttcggagtaagatccggcgagttccttgggtacctagttacgcaccacggcatcgaggcaaatccgaagcaaatcgaggcattgttgggaatggcgtcacctcagaacaagcgagaagtgcagtgcctaaccggaagagttgcggcccttaaccgtttcatctctcgctcaaccgaaaaatgtttagccttttacgatgtgcttcggagaaacaaaaagttcgaatggacgacccgatgcgaagaagcttttcaggaactcaagaagtacctggcaactccacccatcctcgcaaaacccgtaatcggagaaccacaatacttgtatgttgccgtatcggatactgcggtcagcggagaattagtccgagaaga

SEQ ID NO: 18253 - DNA, 753 bp, Arabidopsis thaliana columbia
atctcgaacaaggaaagagataggcttgaatatcaaggaggatctcgaacaaggaaaagaaataggcttgacgattcaagaaagatcccgctcattgattctcggagatcctagggattagggttagcgagaatagcataaatattctatgagtaggcattgagccgcctaaccacactagaatattgccatacgtgtaaagctttcgaagcttagcaaaagcttagaaagtgggtgtctgtaatctctcctcttcacatgcgtgtgataagaaacataggagcgattaggcttagatttgttcttagtcggggttaatcattagggtagaatagatcaaataattgccgagataataaaatccttctaaaagatttattattaataagaataaagaaaaaacgtttgtttggcgcgttccaaacaaaatcagcgtgttgtgtatcctctataccctcttaattggtatcagagcggacacttggtaaaagaagttgtgaatctgttcaacaggtgagatcttgcgacaagggaaggagaaagcacaacggttcattgcgatacctaagccactgaagctggatgctgagcattacgggtattggaaggtgttgatcaagcgatcgattcacagtatcgacatggatgcatggtttgcagtagaagatggttggatgcctcctaccacaaaggatgcaaagagagacattgtttcgaaatcacggactgaatggattgcggctgagaagacag

SEQ ID NO: 18254 - DNA, 1027 bp, Arabidopsis thaliana
atgaaggataatgagaaatgatcttttctagaggctgcattaagcttcctagagtcgatacacatcctatgtcctgttatggtcctagtgggtatcagttcatcttcagaattttttatgactgtcatacctccctttttgggaacagaatggactggagatactcaagtgctatcagatatagggtagattatacccgcgtctaatagtttaagtatctctttctttaccacttctttcaggtttgggtttaatcttctttgaggttcaatactagaataagattcgttttctaaatgaattctatgggtgcatagggtgggtgagatcccttgatatcatctagtgaatatcctatagctctcctatatttttttaattcagttaataacagattaacttgatcggtgtttagctcatcactaatgataacagggtaagtagagttttgtccaaggaaaaagtaccttaacctttttggctgcggtttcagatccacctttggtgccttgagttcggaccagtcgtcggatgtcagatcggcgtcagagggaaggttgtgatcgagtagctcggtcgagtggacagtctgttgaatgacgtgatcgagtatattctgctcctttgcatttccgaacaaatcgtcatactcctctggattctcaacttctttatgcatatctaacaacttccggtaccccaaagtttccaagtgtaaatcttcttctttcccatcctttgttagagcattctatagatggtcttcttctgctagctcttctgcagttcatcagccaacatatccgtctcttcaatccagaagacctttccttctattgtaggcttcttcatggtgttagtgatgtcgaaggtcatcttgagttctttgccaatgttaagattgatctttcctttcttgacatcaatgatggctccagctgtagctaagaaaggtcttcctaggatcaaagggtccctgggttcttcatccatttctagcacacaaagtctgtaggaacctcacagt

SEQ ID NO: 18255 - DNA, 1833 bp, Arabidopsis thaliana
aacagttcctcgcaaaatatgcgagggaattgcgatattttaccatttgcgagaagcgatttgcgaggaacttgttttcctcacaaatatcttgcgtttagctgtttgcgagggattagcgagtaattcttcccttgcaaatcgactgttttcttgtagtgtttaagaaagaacaggtaggctcatagaagggctctggtttagatactaggtgaattaatcaagcttattaacaatgcatactttagcataggatttatcggcttctctagttatcttagctttaagtatagagagtttcgcggaacgccaccggttactctagaatcatagtttgagtttgagaatcgtgcgattacaatcctgatattagctagatctacaatttatatatctcccgagacaattccttagactcgatgctttaatcacttgaatctacaactcatttacttgcttatttgtcttttacattcaattacttcatttagcttattaaacaacatcataagtccattgtgtgagcatcgagagctcagtggaattcgacccttaagtgctaaagacgatcttttatttgagggagtaagcttaaggcaatttgagctatatcaaatttggcgtcgttgccgaagttctcttttagttcaccattagactaggtgtcatattaagtctagatactacttttctaccacctattcacgtgtttctttgtcttttggtctcttgtatttcaggtaccttcagattgagaatcacgttcccatggcagactttcacggttatgtcgaccaacaccatcagggtgtcgatctacaccctctgcagaaccagactgctagaataggcgattttaacagaattgatctcttctacacaaaccgatcagcattcaagctacctccttttgaaagagatgactttgctatacaccctgcctattatgatcttgtatctagaggaaagtttagaggagctcctgataaatcactattagatcatttggaagtcttcgaatacatcgtttcctctattaaagaagaaggtgtaccagctgattaccttctttgcaaactcttcccctactctctcgcgagaagaggaacatcatggttgcgtcaactggaaccaggttccttaaccaattggactgatacgaagaatgcattcatgaatcacttcttcgatgaatccgtgacagagacaattcgtttgcaaatttcttcattctcccaagctccagtagagtccctgagagcatcttggctccgattcatgtcttatcagcgtgaatgtccccaacatggcttccaagagatccaactcatcaacatattctacaaaggaatagacaagcaataccagaatcaacttgatgcagcaagctcctgtaacttcatgacaataaccattagtgaagctttacttctcatcaccaatgcattaacttgtctttcaacgcagggatttgacaaagaacaaagaatttcagctgagatagctactgcgagcaaagagactcctatttcagcaatttctgctccaatccaagccccccccctccaccaaaatcagaaaccagaatggagtctatgtttacgcagcttcttgcaggcctcacaaagcttgacaccaaatatgaatctctctccacaaagcttgatagcaagtatgattctttctccatagatggcaatagcacgattgacaatctccgctctcaattctccaatctctcacctacatcagcttctatcaatgctgtcacactacgcagcggaaagcagctcaacccaatacttcagcgcgaacgatcagctcagccttcat

SEQ ID NO: 18256 - DNA, 581 bp, Arabidopsis thaliana columbia
tagtagtagtacttgttgtagcaaaggttggaacttttcttgggatgagatttcacttcttctccaattgaaagatgggttaggagatgaagctattgaagttatctatgttggttgtttgaaagaagagattcctcttaatgagcaagaagaagtgtatcagattcttcttgagagtttcaagtgtgtgcctacgtttttgcctttggatttgtacactagatactaccatggattctgtaagcaacagctttggcctttgtttcattacatgttgccactttctcctgatcttggaggtaggtttgataggactttgtggcaagcttatgtctctgtgaacaagatttttgctgatagaattatggaggtgattaatcctgaggatgattttgtgtggatacatgattatcatttgatggttttgcctactttcttgaggaagaggtttaacagagtcaagcttggtttcttccttcatagtccatttccatcgtctgagatttcaaaactttgcctattcgtgaagagcttcttcgggctttgctaaactcggatttgatagggtccatacttttgac

SEQ ID NO: 18257 - DNA, 935 bp, Arabidopsis thaliana
gataccaaaatgaagtagagataccaatattgttgaacggttaagattgtctattttggatgctaaacccgattaggtatttgaatccgtgattaagagaccattactcctaacccacccgaaattaaaaacgtggatcctataagctttaatagattgagttgaccaaattacccttaatgcctatatacaaaatccaaaattaaaattgaaattgagaccaaatttatctatttttcaatttgtacttcccttttcataataatgggattggaaatcaaaacaaaaatcatttgttattcaatcattgattttaaaattctaattaaaaaatcatgtgttattgattcgatgatttataaatactaactaaaatcctttgttattcgtttttttttttttttgtcatccaaaaattaattaggactcaaacgagccaatcctgaggaatgttgtttacaaatgtaatatgaagcggttgggtacgaacttttcgtgccaaaaaatccgctttaacattagtactacgagagattaaagatagagaaaagtttgtgaactcatccttgtcgctctgtaactcctccaaatacgatgagaaagccggccattcggttggggaagacaccatctccaccagatctgaacagtctgtaagaaaaactacatcttggttgtcggcaccaatcatacacttcatcgcccagaggagggcttccacctcggcatgtaaaggagatagacttcttatgagattggcagctcccaaagttggtgtctctccagttgatgatgtacagtaccatcctaagcctgaaaacttgtcagtatctttccaagatccatctacaaaacaacgatatccagaataattgttgtctacagaaaaatgccgcactcgattacgatcttccacattgaaagaaccaaaattt

SEQ ID NO: 18258 - DNA, 284 bp, Arabidopsis thaliana columbia
ttcaaagcattgaatcaacgatccaagcgccaatgtcacaatcctctgacctaatccggcgccgggacaagttctccggccattcccaaacggcatcagcttgtaaacatagtaatcgcttccgcatccgtcattatatcgatctggattaaacttctctggctcctcccaaatctctggatctctatgtatagcccaagcgttaaccatcactatcgtatctcgcgggacgtcgtaacctccgattttcatgtcgtccgtcggtgaaccagggattacaaacg

SEQ ID NO: 18259 - DNA, 595 bp, Arabidopsis thaliana columbia
caccatcttggaaaggaatgaagtcataggaaatatcatagggaatcgcttgaattacagcctcaaagtagtcgatgctgaatccactgaaaattgttgaattggtgataggatccctagtagctttcacaaattgttgaaaagtgttattaactgggacgcctatctgcagccttttcccatttgtcgggatttcccatcctttgggtacggaagtagtgtctccaggccatataattggtctgagtcgatcttgccaagaagagaaagtggtcttgctagctggtttttggtccacgttcttaaagagaccatactctttcatccagaatcctatggtccttcctccttgcccattcacattaacaatctcaaagactgatggctgcaattctccattgataaattggaaatcaccagcaagaccttggaaccgaactcgagagagcgtctggagaagttttggaccatattgagatacacctagaccctggagttcagacacgttcctcttggcatccatcttgacaaatgtcaaatttgatgcccagcttcttcgatggcaatgcaatgcagtggtggcacatatgccata

SEQ ID NO: 18260 - DNA, 560 bp, Arabidopsis thaliana columbia
tattctacaagatatataactgtagggcttgcttctgtggcaccaatattgttcttgatcttttctagacataacctggaacagaggcatgtgaaggataaggttctccatcaaatagataggaaaatgatcaaatagattcccatacctcctggaggaagtcagcaacgccttttctctctggacatttaaatccacaaccttcaaagaatttacagatatcagctcttggagcatggtaaattatctttccttcccccaaaagaatcacatcgtcaaaaagctcaaatgtttctggtgcaggctgaagaagtgaaatcagtatggtggctccagctatatgtgccaactgttggaggcacgacactatctggaacgtagttgagctgtccaaaccattcgatatttcatccattaacagagtagtagctgggcccacaacaatttcacctacaatagtcgacatagatatttaaaagctctgatcagaaaactatgagaagctgtaagaaagtgaaagtacatgttgtcacctcctcttttggccacagatatccagg

SEQ ID NO: 18261 - DNA, 445 bp, Arabidopsis thaliana columbia
catagagacccggctatatgggaagacccagaaatgttcaagccagagaggttcaaaaatgaaaagctagatcacaagttgttgtcgtttgggatgggacgacgagcctgtcccgggtatggcctagctcatcgggtagtgagcttgactcttggatcgatggttcagtgtttcgaatggcagagaattggacaagaatatgttgacaatagtgaagacaaaactgtggtcttgatgcgtcctacgacaccgttgctagccatgtgtaaagctcgtcccattgtccatgagattcttgatgcttttgcttgaagtttaactctcctttctttgtcttttggaaaattaattaaaaaaaatacatgtaccctttacatgagttcacataatactcatgggttcttttaaataattgtctttcctgaaccacaagtacgacacattt

SEQ ID NO: 18262 - DNA, 1514 bp, Arabidopsis thaliana
tctgcaaagactaggtctatgcgatcttttctagcagtggaggagaatcgccttcttccggtgtttggtcccgtttcttttgtttggagtttgttcctcctcctgctcgtcgggaggaggggttttggctttggggttgaaccttttttagttttgccctctgctgtgattaattttttaacggcacgacattcctcggtggaatgtcctctcttttgtggtacttgcaatattttttgaggtcaagttctcgactctcgtcctcggctgcctcttctattgcgaataggatatgcttctcttgtgtttggttttcctttttgaagggttttttagttgcaagggcagtgttttgtgctttagattctttgaatcttagggccaaaacggcgagctcctcttcggctttagcgaagtggagaggtatgtgaagggcatcgtctaaagagaccggttatctaacggtgagttcctcaaggaacctagaggaaaaccacaagccgttgcgaagggcggctatggcaacctcctcgtttaggttcgcaatctttgatttgattgctttgaatttttcgacgtaagatcgttgggattcgttctgaagttgggtgagaccccagaggtcggctttagacgtcctgtttacgatgagtatcgagtactgttttaagaaggcggcggcgagctggtcgaaggtatcaataaagttcccttcaagactagcaaaccatttgagggcgtgacctacgaggttctctgcgaagaaacggaaatgacctgcttcgttttcttcgtccgtctggtacgctcgtgttatagccagacggaaggctctcagatgagcctttgggtcgctcgttttgtgaccgtgaatggggtgcgcttggtttcttcgatcactcgatctatgttgggagcatcgctcactgctagatgcattcgtgaatgcatttgagccatgttcgcgtttgtttgtgctgcatagttgcggaatgtttccatatccacgacgttacgcggatcgatcggtgctcggggattggttggaccgttttggaggtcgcttcctgaaaaaacataattgaaaaatcttttttgtcatgtatacaaatgagatttaattagcatagttttgttaaggaagattttaaaatctaaacgaaatgataatttgttattagattgccatattcgaaaatatctaataatatcttacaaaaataatttagtttacatatatgcatttttcaattaaacatacaatatatttgcatttttaaagatatttctatattttagtagttgttaatttactaaattatccatgcaaaaattcatctacctagtttaaaactaccctcacaatgttgtagttcacaaaatgcttctcaattaatagtatagatacaagctctaaatctttattacctcttaaaaaaccaaaccacaaaaaaaactgaattttaattttaagagaaatttaaaaatttaaccaacaaaaaaattatatttgc

SEQ ID NO: 18263 - DNA, 461 bp, Arabidopsis thaliana columbia
cgaaaacgcatacgccatcctgattaaccaaacacacatatgatcaagtcctaaatgcagacagaatatgttttaaccaaacatgaatgtatatatatacctggaattgctggtgacagagctcatgccacagaaaaacacagcaaccgcaacaacgcctaagcacacgattccaccagtaccgctcccaaacctattcttgaaagctaagtagaagatctcagcaatggcatacccaccagagttgttggtctcactcagaagagaaggtatgtctgtgacggcatagcttatgcccaatatataaccccatccaaacagaattgatataccaattgcactgattattcctctgggcccgttcttgtctgcgtcgactgtctcttctgtctgcaaatttactttctgatcaatcctcaagaaaagctaatcaatcattaagaacagaatccattacactc

SEQ ID NO: 18264 - DNA, 534 bp, Arabidopsis thaliana columbia
ggatctatgcaagagtctgtttgggaaaggtgtttaccctgaagtcgatgcaacaaacctgtattatggaagtgacagaattgctggtatgtaataacggaaaacatctcgatgctactcatatattttcgcacattccaacagtttcttcttattcgtaatttgcagcgaccaagattatcttcacaaatgggtcacaggatccatggcgtcatgcatccaaacagacctcatctcctgaacgtaagtctccatttagtatgatcaaatccttataacattatctcaggcttagtctatgtcgtacagtagcactcagacaaatactttctatgcgacactaacaagttaatacttgacgacacagtgccttcttacattgtgacttgccacaactgtggccatggaagtgatctccgtggatgccctcaatctcccatggtcattggaggtatattactggcctcttctctctttccgatccctgaagtcaaagacagactagtattggacaactgttaaaacatattattt

SEQ ID NO: 18265 - DNA, 338 bp, Arabidopsis thaliana columbia
tagtgtgctctaaagagaccttccagagtttccagcaggctggtatcgaacggttttcccgcagcggcgtcatcgatagctttgcgttaaacctgtgcggtgcgtgcacaatagtagaaagatttggtacgaccttcgatatgcagcggatgcacgcccattttaggcagtcgtttctacatgcgcgatggcgcgcagatcattcgagttcatgatgtaagtgccgtgctcatcttcatacgcggtcatatactcgcccggacgctgggccgtctgcgatcatgaacactttgtcggttggggcgccgatactcagcgtcggctcagcgattttgcac

SEQ ID NO: 18266 - DNA, 488 bp, Arabidopsis thaliana columbia
  unsure (1)..(488): unsure at all n locations
attcctctgattctatttctctttatatatattcacccattaaccatctcaatcttataaccctcaaaatcacaatcttctcttacaaaaaactttgaaagatgaagattcttctagcatcattgtgtttgatcagtcttctcgtaatcttgccttctgtcttctctgcttcttcttcctctgaagattttgatttcttctacttcgtccaacaagtaataaaatcattctaagaatgtttctgatgattttttataatcatctaatattgttttgtgttttattgtatagtggccaggatcatactgtgacacacagaagaagtgttgttatccaaattcaggcaaaccagctgctgattttggcattgatggtctttggcctaactacaaagatggaacttatccatctaactgtgatgcctctaaaccattcgatagctcaacggtaataagatanacatttctgttttaaggtcaaaatatggt

SEQ ID NO: 18267 - DNA, 537 bp, Arabidopsis thaliana
caaatcaattttaaaataaattgaattcagtttctatttaatacaaatataatcccatgacaattaatttcctaagagagattatacaaatccaaaaaacaaaaggatccgcttaagttaaacctatgcgtatataagatatatataaattacaaaaggagaaagcagatatatgaatagagaagtaacttctccctcactgtgtttaggctttaaagctaaaacctgagtgtgtaacataaagataacagccgacgacccaaaagaaaaagaatggagtgttggatacattagcttcgttatgttgagtttggtgaagaaccgtaaccgaaaggattgttgcttgcccagttccactgatccctacacatttcttcgattccaaaatttgccctgtccacagattttgagtttcttcattcttagagactatgccaaaacaggtccatgatacatacttaataaaaacattcgttgggtcttttacttacttccagtttagttcgcgttcagctttttctgttgacgcatagacgg

SEQ ID NO: 18268 - DNA, 379 bp, Arabidopsis thaliana columbia
  unsure (1)..(379): unsure at all n locations
nnnnnnnnnnnnnnnnnnnnnnctaaagagcttttttgaaagttaatctcctggttcaccgtctgctcgtacgcggttaccaggtcggcggccgccacgtgtgcgcgcgcgggactaatcccggtccgcgcgtcgggctcaaagtcctcctcgcgcagaaccgctcgcggttcaggccatgccgcaactcgcgccctgcgtggaactttcgatcccgcatctcctcgggctcctctccctcgcggtcgcgaaacaggttctgccgcggcacgtacgcctcgcgcgtgtcacgcttcagctgcacccttgggtgtcgctcaggagagggcggtcctagccgcgccaggccctcgagctcctccaagtccaggtagtgccg

SEQ ID NO: 18269 - DNA, 583 bp, Arabidopsis thaliana
atccaaatccaaggttctttataatcccctcctctgttttggtctggttctgtttatatgtttatcggcaatcacaagaccaattctttttttataacgttttcataatgtttttctaggagttattacaaatgcacagctccaggatgtacagtgaggaaacatgttgaaagagcttctcatgatctcaaatccgttataacaacttacgaaggcaaacataaccatgacgtccccgctgcacgcaacagcagccacggaggcggtggtgatagtggtaacggtaacagcggcggttcagccgcagtttctcaccattaccacaacggtcatcactcagagccgccacgtgggagattcgacagacaagtcacaactaacaatcagtctccttttagccgtccctttagctttcagccacatttgggtcctccttctggtttctccttcggtttaggacaaaccggtttggttaatctttcaatgcctggtttagcgtatggtcaagggaaaatgccgggtttgcctcacccgtatatgacacaagccggttgggatgagtgaagcaatgatgcagagaggg

SEQ ID NO: 18270 - DNA, 433 bp, Arabidopsis thaliana columbia
gattcagttaaagctcagatgagctgaagcacacacttagccgaaacaatctcaccagcattattgtacagaatccctcaaaactaaaatacaagctttcacaatgacaaagcataaatatccaaagcaacatagtgatccttagaaatcaaaatctaaactagaatacgcggcaaaacacaaagctgaagcaaatataggtctcagaatcacaaaccttcgactaaaatacccatgagaatggcttcagtcccggtacttggatacttgagcttcctagcctccaattctcccattgcaagtgactttatagctctcgccgaccatctaaaatcaaacaattaataaaaaaacctcaacaattcaaacgtataagctctacaattacaaattctatacgtaatttggagtgagactcactttgggatcttat

SEQ ID NO: 18271 - DNA, 493 bp, Arabidopsis thaliana
gaacaggacgtgcaggcaaatctggaatagcaactgccttcttcaacgagaacaatgcacaactggctaggtcgcttgctgagctaatgcaagaagccaatcaagaggtccccgagtggctcacacgatatgcttcacgtgcttcatttggtggtggtaagaaacggtctggtggtcggtttggtggccgtgacttcagaagggaaggctcttacagtagaggaggaggcggcggcggcggaggaggcggcagtgattactatggcggaggaggctatggtggtggtggatacggtggtgctccaagcggtgggtatggtgctggagtgaccagtgcttgggattagccaattaggctccccaatttttcctctttttaacctgactatttatttcttctcttctacattcccaagagagcacgtgtatttgcccccacctttgagatctctcattcaagagatggatttaactaatcttgctattaggtgga

SEQ ID NO: 18272 - DNA, 457 bp, Arabidopsis thaliana
caaaaaccactaatataaatagccaagctgatgattcaatcactgacattgttaagagaggtttatgatgatcaaaaaacttttaaaagttgaaacctttacaatgctaatcatagtgtacctcttgaatgatcttgacagcaactctatctttaacactacctcctggattcaaaaactcgcatttcccaagaatctgatcaccagacgaaacaagtagaatgaaaattacatctttaactcataaatcacactatcagttcgtcagaccaaacagaaaatagcaaaagaacatcgagaaaaacctcacatccagtagcctcagagagactattgatacgaatcagaggagtattgccaatggcatcaacaagcccgtttctcatagtcaacttctccttcctcttcttcttctcggagagacggaaaaagaagctgtaagaagtaagcatcaaca

SEQ ID NO: 18273 - DNA, 1502 bp, Arabidopsis thaliana
ctagagggggtacgacttagcgatattcttcggaagattcttatttatccttaggtcggttctagaggataatcgtcctaaggatattctccttattcttcggaggttttggggagatttcctgattttaacattatcttcaaagattctccttaagtctttgcctcgcgtgttcttcacggctcggtggtcgtttgagaggtggcttcggggcaaacggtatgtaccggctcggggcgcgcttgatgactgtccattaagctcagttggctgtctcccgagccgatatagatgtttcccgcagcgttctcacgattggctcgggctgtgttcatatgattaacacccgagccattttacaaactctctttgggacggtcgatcgaataaggtcccgaggtgctttgttctaggctaggggccaatcatatgtttaaccatgaggtgattgttattcttagactgtttggctcggtcttgcttgtggggaatccgccccaacaagttgtttcaaaactctcaatgaaaacaccaattgataaggtcagaatcacttatcaagtaagtaaccaaaaggagatgagaaaatagaagaattaggttgagaagcagaagaattcagaagtagaaagaagaagaacaagagagaagagagatgatgaagaagataaacatattgttatgatctatttcgatagtgttcccgtaagggagaaagagttgttaaatacaaaggttaagggcttaagatgccaacaaattggcagcccaataacatactaaaagaggcccaataaaccacaattggatacttatcaatactccccttttgaagtatcaccttgtcctcaaggtggaaggaaatgaaactctgccagtacattgccttgtttgcccgtgcatcagcctttgttgtagcttcgagaatgtctgcaccttcagtctttaacttgatggagaagatctcattaaagtccttatgagtaatctcaaactgcttccgttcgttctcttcaacttgtatctctcacgcagttgtgttctcaattattgagaccaactttgaaaagaacagctccaaaagcttgccatcactggaaactctgtttcggaatcttgatactttccccaagaatgcaaactgtaagagagggtccttagacagtgacttccaaacatgagtgctacacgttttcttcttcatgtcaaacggtctattctccactgtcatatctatattttgggcttcacgggttgctctaaggttctcctgttcctgccattctccaaacaacagttcaggtggccgtgacgattgagacacttcacagttggtatcaatcttaaccaagtttccaagatgaaactgaaagagctgggtcgacatggtctctatcaaagtagattgatctctcacaagacaaatgaacttatttgatatcatagctacaacgtccttattgatcttgatcaacctacttgtaatcttttgttctatctct

SEQ ID NO: 18274 - DNA, 743 bp, Arabidopsis thaliana columbia
aaccttagttttgaaagcttttactaactattcgatcattcatgctttcgtatatacttttaaaacaatttttttacataattaaatctttcgtatatatattgtggtaccactttatacatagaattagaaactcttacacattcgtattaatatctaaaatatataaattgaaattttgacaaatagttttttttttcaacgtagtgtaatactcgaattttggataccacatcaaggaaacatcttcttaaactgatgagttcattcttttttcttaacactagttaatatatccaagtacattcttgaatcaaataattgctagttagttgttctaagcatgaccatatcatttaacatacagggtaaacgctcgacatcagatcacatcgtgcaggcagtgaactacatcaaagacttacaaatcaaaatcaaagaactcaacgaaaagagaaatcgggtaaaaaaagtcatatcggccacaactactactcattcagctatagaggaatgcaccagtagtttatcatcatcagcagcatcaacactatcatcaagctgctcatgtgtaggagacaaacacattactgttgtggtcacaccttgtttagttggtgttgagatcatcataagttgttgtctcggacgaaacaagtcttgtctctcgagtgtcttcaaatgttagctcaagaacaaaggttcagtgtagttagttgcactcagctagacggcaacagaga

SEQ ID NO: 18275 - DNA, 534 bp, Arabidopsis thaliana
  unsure (1)..(534): unsure at all n locations
tagaggaccatctttgtcttgtcaaagtttccagcattttgaaaccgagggaaaccgagtgatcacaatcgaagaactagcaagggtatggtgttaaatgtaatcctctcgattcataggaccggtgtttggcttcggaactgaatttgactctggttattgaacaggaactgaatgtgggtgcgtctgcgtatggacacttgagagattgggtaagaagcagtgacgggaagctgagttacttagggttcactaagttcttgcacggagttactcttcgtgctgctcacgcaagacctcgctagtccttctctaattttaggtctttttcttaatattttttttcttcatcagaacagagcaaatagacttctgagagaggtgaggggtattttcgtcagtttgttttgttctttatcgtattatagagtttcaattttatggtacaganaagaccaaaatgagaaaaagatataaacatgtgcataaggtagatgggtacagtcatttttttgcaagtataatatatgaaca

SEQ ID NO: 18276 - DNA, 814 bp, Arabidopsis thaliana
ctaaagaaccatcagcggccgaagtggtcggcgattgccacggtgatcatcatcggcctcgggctggtgcagatgaccgtgctggcgcggattatcgacaaccaccagttcggcctgcttaccgtgtcgctggtgattatcgcgctggcagatacgctttctgacttcggtatcgctaactccgatattcagcgaaaagaaatcagtcaccttgaactcaccacgttgtactggctgaacgtcgggctggggatcgtggtgtgcgtggcggtgtttttgttgagtgatctcatcggcgacgtgctgaataacccggacctggcaccgttgattaaaacattatcgctggcgtttgtggtaatcccccacgggcaacagttccgcgcgttgatgcaaaaagagctggagttcaacaaaatcggcatgatcgaaaccagcgcggtgctggcgggcttcacttgtacggtggttagcgcccatttctggccgctggcgatgaccgcgatcctcggttatctggtcaatagtgcggtgagaacgctgctgtttggctactttggccgcaaaatttatcgccccggtctgcatttctcgctggcgtcggtggcaccgaacttacgctttggtgcctggctgacggcggacagcatcatcaactatctcaataccaacctttcaacgctcgtgctggcgcgtattctcggcgcgggcgtggcagggggatacaactggcgtacaacgtggccgttgtgccacgatgaagctgaaccaatcatcaccgcgtgttgtttcggcattcgcaaaatcaggacga

SEQ ID NO: 18277 - DNA, 650 bp, Arabidopsis thaliana
tgcgattttgcagaaaatttgtcaatcaagaaaatctgcataattgcattagaaaacgcaaaaacgcagactctgattatgttttaattcaagattagtttgattatgttttcacatgaaaatggaaaagccgacattttaaatggataaagatatacagcctaatggtttctgctagtaccatcgatgcgcaaccatatatgttcaaacttcataatattgttgaccaaaaaaaacacgtcaaaaatgattttcagggtacaaggatgagttttggggtggacgtgtgcatgagctttgaagagcaattgtatttaaatcttcctgaggttcaaaaggctctccatgctaaccgaactaaactaccgtatgaatggtctatgtgcagcaggtatagtataacttgaaccatctctaatcttaatctatatgtcatcatttatttgaactcttaaggttatgtttcatcatcatagcctcttgaactacaaatacactgacgggaacgccaacatgcttccaattcttaaaagaatcgtgaagagcaaagtccctgtttgggtcttcaggtatattgattccattctttagacccttaatttctttgtcctctactttagcaatctggtggtaacgtttaaataaataaa

SEQ ID NO: 18278 - DNA, 1103 bp, Arabidopsis thaliana
cgaaaagtaaacaatggtaataactcgattccttccatcttgcattactcgaggaccatttttaactcttgcacttcttcgatattggggtcgacagtcacatctgatatcccggcataattttggaacttcacgtgtttgaggccagtatgatacctaaagatcttccaccatgtgagtgcaacaaataaaattgtcaataacaatactgtcattgcgacaagatcgaaatttcctatgcaagtcaaccgccaattcgccaaaagcctcacatttcaacctctccttactgaaacatataaaacagtgttacaattatacccctctcaagaaaaatacatgatgaaaagaaagaaatttagaagtaaagaaacaaaagaaattatactatttgtccataatctcgaaggtaagtctgaatccgtccatctcccaaccatcttctgtaatatttctcagacatccgacatcgacgagtgcaccaaccaaatcagggagtatgaaataaagattaaaaactggcatgtgaaagtatgaaatttgcattagatacatattacttaccgaccaaattttcagtatgagcggtgtcttcaataatgtagtcaaaaggtgtgaatctgttaaataatacagtttcccttgggtcggaatgagttacctcaattgcattcatgaactcaatcatgtatttgtgggttgttgatcggacaaaaccacagttttcaatgacaccaaaagttctgatttctttccactgattctcttcaagcatgtcgtagtaacgttgagaaaaccgacttccgattatagcttcaatttggataccctatgaaaacaacattggagggtgagttatatagggaataagacaagcacaaggttaaatatgacttgtatcacgagtgaagattctattacccactcttcgacaaagacgacccgtagttcgaatgagttatctgtgaaaaacgagacgtacttcctaagaaccataacacaaatcgtccagcaagttatggaaggattcaagtcgcggaggcagttgtaacccatggtgaaattccgagtcgttgaaaattaaagaaatattttgaactcgt

SEQ ID NO: 18279 - DNA, 1500 bp, Arabidopsis thaliana
caatggcgatcctatccgtgaatggggtgcgcctggttacttcgttcactcgatctatgtcgggagcatcgctcactgctagatgcattcgtgaatgcatttgaaccatgttcgcatttgtttgagctgcgtaattacggaatgttgccatatccacgacgttacgcggatcgatcggtgctcggggatcgggttgaccgttaaggaggtcgcttcctggtatccggggaacggatggtggattggcgatagaggtccgttcttgcgttgtgttcccgggaacgcgggagctggactcatttgtttggtttctagtccacgtgtacctcggaggcgagtagcctagcggtagtataggtgggagcggtagccttgggaaggtaggcgttgtacgtgtctcattccctgttgcttggttttcgacgagaatgttcactggtgcctgtaaaaaggcgacctgccagttgataggtggtgagacctctcggggagacggtacctttcaaatctaggcaggaatcccagtttcgcgagaggaaatttccttacccgcggtatcgcgctttacctcctgtgccatgcgagtggagtcgagtctctgctgacccacagacggtgttagtttcggtgttggaataatctatttccgtccccacagtcggcgccaaatgtgggttctgaaaactacactagagatttgtaattaagattatgagaaaggagggctagatctacacaggaaccttgagagttatgttgctatatgaactttttgtattgattatgaccaaccttttacaatgtgaaaggagattacaagtgtaaaagtataagtgtgaatgtaaagctgagttgaatgtgtcttccaagtcgtccttgctcccttatataggcctacgcacatcgtagctctgtccgggatctgcggagattcccctttgatattcggaaggtcagttccgagatatcaggtccgctccacgaatatctccctgttatttcctaggttgttattcgcttatcttcctccagtcccaagtacccattcgcgtatgtgggctcatcacttgcgtaggtcctctacttggtgggcatggtgggctttgtgggctggcttggtatttttgcaggtgggctccaggaggggaatccagctcctacagtctttaagtcggtttagcaagctgctgcatcactggtgccccgccgctagttgcgaccctctcggttacacatggcgctgagtcacggccagggacaccctgcgcagtccgttggtcgacagccgtccagggagtgctcgggtggcgaaacgtccagggagtgctcgggtggcgaaacgtccagggagtgctctggtggcgacacggccatgagtcactgcccacgtgtcgtcgtaccgcaagcagctctgtggccgatcggagccacaagattatggcggcccgacatgactgtttctcagccaaagaatgttggagcagcttacccacatgcttg

SEQ ID NO: 18280 - DNA, 1197 bp, Arabidopsis thaliana
ggagatctaggatctttccatatcccggggttacctcagaaattcgaattcgaggagctggaacaagcaactgagaatttcaagatgcagataggatcaggcggatttggatcagtctacaaaggaactctcccagatgaaacactcattgctgtcaagaaaatcacaaaccatggacttcacggtagacaagagttttgtacggaaatcgcgataattggaaatatcagacacacgaatctagtgaaactgcgaggcttttgcgctcgcgggaggcagttactcttagtctacgagtacatgaaccatggctcgttagaaaagactctgtttagtgggaatggtccggtgcttgagtggcaagaaaggtttgatatagcgctcgggactgctcgcgggctcgcgtatctccacagtggttgcgaccagaagatcatacactgcgatgtgaagccagagaacatcttactgcacgatcatttccaacctaagatatctgatttcgggttatcaaagcttcttaatcaagaagaatcaagtctgttcactacgatgagaggtactcgaggctatttagctccagagtggataacaaacgcagcgatctccgagaaagctgatgtgtacagctatggaatggttttgttagaactagtgagtggtaggaaaaactgttcttttcgatctcggagcaacagtgtgacggaggataataatcagaaccactcgtcgactacgaccactagtactggtttggtgtatttcccattgtacgctttggatatgcatgaacaagggaggtatatggagctcgctgatccgaggctagagggtcgggtaacgagccaagaggctgagaagttggttcggatagctttgtgttgcgtccacgaggagccagcattgaggccaacaatggcagcggtagtgggtatgttcgaaggaagtataccgttggggaaccgaggatggagtcgttgaacttcttgaggttttatgggctgaggtttgcggagtcttccatggttgaaggacaaaatggggagagtgaactatggtcttccacggcgagagagcctaatagtggcgctctagcagtctgcgtcgacatagcgctcaggaagtgtcggccgcgatgagatccctaatgtgaattattttgtctttgtttatttggtttggttatttgtaatagtg

SEQ ID NO: 18281 - DNA, 830 bp, Arabidopsis thaliana
atgggctatttttgtctctatttctgtaagattaatataagagcctgctgagattggaggcccgtcaagtataaagttgctctcatactaagtaattctatcaacattttcctgaacatttgttgtcttcttcaaaaattcactaaaaactgtatgcattcttcagctagataacaaaatcctttagaactttcatatatctttcaaacggatacatccatctgaaatgaactggtccacctaaccgaacttctctgcctaaatgtactgtcaaatcctccattatatcaaagaagcttggtgggaaaaacctttcaaacaggcaaagggtttcaacgatctcagtttctagttccaaaagttgctccatatcaattactcgtcgacacaagtggttgaagaacgtacatatgcccctgattgcaaccctaggacctttaggtagcaaccctctaagagcaatatgcagaagtagttgcattaacacgtgataatcctgtgacttaagtcccgtgaccttacactcatctaatgagacgcctcttgatatgtctgagcagtacccatctggacctttgaagtcatacaactgtttgaagtcatacaaccataagatggtcccttctggcagtcgaccctgcgatcgagtatatcagtcatttctatcactttttactgttttctgcatcaacattaggactgttagaaaacaaccaaattctgcctggcttgacttagaaacttctgatcatatctcatctgtctgcatcacacccatttggattgacccgaaaatactacgacgacaggattagtgttttaggataatt

SEQ ID NO: 18282 - DNA, 1515 bp, Arabidopsis thaliana
taccaaacacctgtcctcagaaaccaaacttctagttatcgtgtggagaaaagcaaatttgaagttcgtgccttagcttcaaggtgtctcgtggaaggcgatcaacttgatgatatggtcatctcaaaggaagatatgacaccaagcgaaagagattctgaactaggcaatcggatttctcctggaacacaagctgataatgttgaaagacatgagagagtaagtaggctattgtagttaaaaaaatgtcttagtaggatgctaattgtttgtggctatttcttttgttagtttatctcctaaaattactgttattcaaccactatatcatctacaggaacatgaaaagcctataaggtttgaagaaccaacatcagataacacactcaccaagggggatgtggaaagggtttcagaggacaatccacggtgcagtcagccactgcgatctgtggccacagtgctggattccccagctcagtcaaccggtcctaaaatgttttccacattagaatttagtttccaaaacctcaggacaaggaggttagagaggctgtcgagattgcagtccacaggttatgtatctaaatgtatgaatacgccacagcctaaaaagtaagatttctttccttcttcttttgtgtagtgtgtttctatttgcatttagagaaatgggattctttaaaatgacaactacgtctacaggtgctttgccgctgcaacattagagttatctcaaccggatgatgaagagcgaaaagcaagggctttagctgcagctacttctgagctggaaaggctttttcgaaaagaggatttcaggagaatgcaggttgctatctttttgactaagcgagcaccgaaagattgatagattaaaaaaatttcattctactctatcctggctcggtcgagaaatatatttatctgttttttctgtgtgataggtactcgggcaattcaatcttgggttcatcattgcaaaattggagcgagatctgttcattgtggatcaggtgagtcttcatatatgcatgcttccagagcccttttttcctccttcgatttgtttagttattggttgagttgtggaaaatggaagtttctatcatttcagagttcttccctagtctgatttttgaagaaatggtatagactagtgattgaattttatggccagcatgcagctgatgagaaattcaacttcgaacatttagcaaggtcaactgtcctgaaccagcaacccttactccagtgagtttctttgtgagatcaatctagattcttgatttcattacactgctttcactttttcacatcaaattccccggcggcattcttttatgtcccatgttactttagctatacttgaaccagtagtaatacctcttttccactactctatatgttacccatatttatctatttttttcctaaactcaggcctttgaacttggaactctctccagaagaagaagtaactgtgttaatgcacatggatattatcaggtgaag

SEQ ID NO: 18283 - DNA, 825 bp, Arabidopsis thaliana
gtattatttaccctagaaaaacctaagtaaaaaactaacttttcaacttcaacttctcgacttctttccttctttctccgtcgtctttctctcccttctctcgtctccgacgacatcaatttttgccgaaaaactcaatctcttctcttctcgttgtcggctccgttttcgtttcgtctttgtctctttcatctccgtatatttcttttccaatggctagagtaaaagactctcgtggggaatatgaatcaagtgatagggttgaagccggcgaaattcctcaatcagtcgaagaggccgccgagattcctcaaagagatgaagaaggcgcagagcttcttacaacagaagaagaggccggcgaaattcagcctacaactggagttgcaaccgattgtgacgccgccgatttgggtcattctaacaccgtcgaattgtatccaacaaaggatcttttagacccaattgccgaatcttctgatgaagaagaagaggcaacaaatgcatatgttaatgttgatgatgcagcaaatgaggtatgagagaagaccgttatttttttggattgtcttaggctggttttaggagattatgcatcggtaaatgattggatttgtgaatgttgcttcagataaaacaagtagtacaagtaggttgtaaatttgtgaatgatcattcaggaacaagtagtagaactaggtcgttaatgtggaattgaaagtattttggattgaatatgcaggatgatggtgatgatgataacatgctgcagaatatgcaggatgatgatgatgatgataccgaccattgccgccagaagttatg

SEQ ID NO: 18284 - DNA, 1480 bp, Arabidopsis thaliana
tcctatcatcctcatcttcttcctcaacagaattcaccggcctttccatcggcctttcgacagccacgatctccgtacctactacattctcacaatcattcacatcattatcatatccatcatgcaccatctcacatacttcatttaaaacatttacaccaactgaacttcgacgctccggtatagaaatttcctctctcctctcaactcctataccatttaattcctccacatgcaaaacaggaatccgactctcttcatcagattctgttaaaaatatgaagacatcctcatcatctacaatatatgtctctctcctaactttagacagattgtaactcagtttcaacttgacagaagcttcatcaatcgcaaccttcttcatgatcttgtcaactaacatcgaatagctaatcttctccaaactactcgtcttaaacgatatagcatatagtgaatttttaccaatccactcattcacttcagaatagtatcctccaaagtcaaaatgtaccttagtgtggatcttcttcttcatcgctcctgaaaatacaaccaggtcaactccaatcaaacattttaatagttataccacatgtactcttatcatacgttgaaatcaatctctcgtcgcactcgtctctactgaacctaattcgttacctttcaattgatttccaatgttaatacatacctattcgttaaactaattggttaatctaaactttgcaaacacaaaccccccaaatctttaatatgaaatctcggaattcaaattcaactcacattcaacctacattcctttgctcatcacctcaaataacgtttcggcaacctctaatcgattactctttactttgcaaaccaatcatcaaactatcaaattgaatctgggaattatatagaattcaaaatcccaatctaaaatcacaatgcaccaatgtcaaaggaaatatgagaagaaactgacctaattcgttggcttttacgccggatttcaagtcggcggcggccggaatcgatggtggccgacgaagaagatgaacgtcgaccaaagaagaagaacacgacgacgaagaggagagagaacggaggatctcgattctttatttagcttttgaatttctttttcatttttttaatcaactcattaagggtacaactggtatatcacattttcggtggcattcagattaactgatggcagtccagatcagtttttttaaaaaagtggcataagtgataaaagttcatcttgacttgggttatggtttcgagattgatttcttgacctaactcaacttgcttgttcttgaagaaactgcttttagtttctttctttttttaaactgcttttagttaaacataaaaaccatgaaatctttattcaacgtacgcaaatatgtcacaacaacagaaaaaagttacacagttgaagcataactattcaaacaaaaacagatgatttcacagtgaatag

SEQ ID NO: 18285 - DNA, 771 bp, Arabidopsis thaliana columbia
ttctggattcgcttggcccctatgcggttttcggtggctaatgtggagattcgatcatagacgtccagcgtccaaaagacgttcaaatggatgtctgcctacgaattccagagatctgtagactcgaccaagggattgacttgtctgcctattggctttggtagattgtttcttaaaccctgctctgctatgtttcatcaacgagagttgagattaggaagtggtagagttatgggggtctctgtcacgagagtggattgacccagtttgtgaatctatcgtcatgggtatctacctttcgcctattagccatttgatgaaccctagagttacccttatcaatgaatccatccttagaatttctactagatttatttgtatccatgttggttgcacttttatttacccgttatttgtatcccctatttgtatcccctgttgattgcattttagttcttaattttgtcatctgttggttctactcgacccaatgatcgagtaggctcttaagttctcatttttacttgtttgaatcctgacctaggattgttactagaaacccaccatcattataatctggcttgacttagttgcttttgttcacatctagattgctagcaatacagtggactggattgacaccccctatagctgcatcgacatgtttgtgttttaggggaattgaactgaatcacacattcaacataagcagacctgaaaaacctgcttatcaatttggcgtcgttgccaattcatcgttgcattgttaca

SEQ ID NO: 18286 - DNA, 554 bp, Arabidopsis thaliana columbia
tataaaagccaaattatcccgcgtatcaaatttttcttccgcctaatgtattgataacgtttacaaattaaacaaacgctatataaaatcttgggtacatatacaatagcataaacactaaaaacgctatcttcttatgctatgaatagtcgatattcttgtagtgtaggtgaactaatcaagcttaatgatataacccgattttcaccgattttatctatgttttaggtataggattttaagtctttatgttatttctcgagtctttttagtgtcttttcaggtattctatgcagtgggacaacaatggagataaggagacattttggagcaaaagctaaggaaaaggaaggtaaggacgattttggctcaggaatcagcgaggagtgtcgaccgacacactcttgctaacgatcgacaccagtttcggcccagcaaaaaccctacacgctttcaagttttcagaagctcaagtttatccagaagacttccctatttgcattactagtccctggacattttaagggtctatatatattggttttagcctaagt

SEQ ID NO: 18287 - DNA, 1729 bp, Arabidopsis thaliana
tacaacgtacactgtttgttgagtaaatgtagaaatgtaaatgtggacgtacactgaaaccgtcagtaaaacgtacacgtctagttttaagctgttattaaaaagaggttgctcataacaacaataacaaattatatatggaatactattactttgatttgacaatatgaatacacatcatcacttaatacctttgcaataaatacaaccataacttacccaaccatatcttcaatgatgcttatttaagtgttcgaattttattttgtcgaaacaccttactcctaaatatgacaaacccaaatattcctgacgatttgcttgcgaagatagccaagaaaatggctgagaaatgttggtggtacctcggacctatgttgaaatccggtcctcgtggacgagacattgtctaccgtccggatgtcctcaaagatgcaaacattttcagcatgtgcgacgatcccgatgacttctacgcggcaggccacgatccaaatgacatcaactccgaaggtcgctatagacccttcttcaaacggtgcttacaagctggtaaccccacggctatttaccatgaaggactgcgtctcgttacacatgagtctgacattcagggagctatcctacacttagagcgaatcgccccaaggaacgccgctgcaacccttgcatgcgcaattctttacatatgtgctggtaatgctcacatgggtggtgtctaccttcggctcttcggaagcaaccattatgctttggaatcggaggaggcacgtgacatttgtgaggaggtgctagaagatataaagaaatatggtaatactttaaaatacacatacgctaacagttttttgtacccggaatgtggtgacgtaagcactcctgaatgcgcggagatgtgttacatgagatcgagactcttcaataatctttgcaaccaatgttacatctggttgtgtgctaaacggattagccagatcctgtagagctcacattcgccacgatcctgtcatatttataagttttccatgcaacaatatgtgagctttttacgttgattatcagtaatggaagtttgtaaatgaagacgaaaggaaatttgatttgacgtcgtataacccatatctagaagatttcgctccatattaattactcgttgtcaaatacactctagaagtgacctccatcacactctcattaatatctctattagacgtacacggttcccgagcaatgtactcaattgatttggcagataaaataagtaagttaatgtttatttgaaaagattgttagtaaatgcgttgacccctaatatagcactatacatgaagccatattgttccacttatatgccatacaaacagacgtcaactcaaccttctgtcagagaacgtaatgagtattgtgtagacgtacacggcgcgagtaatacaccgatccatgagaccatatgcattctgtgttgtataagaagatagatactcagagtagattacacgttcccacatggattcactagatctgaactggatcttgcaggaaaatgttgtggagatatataaatgcagcaactgcgtcttcaaatttcataaacgcagtaaacatggatacattgtcgatttaaaattgtgctttcatatgttcgttgggacattagatccaaggcttcatctagtacctataaaatatcaacaaccctaagaataactgattcttagagcaaaaaaaa

SEQ ID NO: 18288 - DNA, 1473 bp, Arabidopsis thaliana
ctatttttaggaaatgaagcaatagtttcataaaatgcatccgtaaccatatcatgaaatctattttcctggttatgcccataaccaaattgatcaggtacttgctgaccataattcgcatcattattaaaattactaggttgctcgacaccacaatttgtattactagttcctgcgctatctctacaaccatctccttgacttaaccatacatagtagtttggcataaatcctctattataaagatgcttcttcactacattaaatttcaaatatttctcattgagacatttacgacatggacagaatattgtactgttctcacgagcaaatggttcgtttgtcgtttgatacatgaaaccgcgcagtccgtcgtaatactctctcgtcacctctccggtcgcctgatctctatgattatacatccaacttcgtaatgtgtaaatctcatgctctccgccccaagacattcttatatttgtaataagtttttttttctcaaaatattttttttgtttgtaagtaaatgttgtgatttgagttatgatttcttagacattacattggctatttatagatgtcccaaaaaatattgcgagggatttgctaggattttgctagaaattgcgagggaagcccaccaaccaaccagaccggtaagataatttaaaacgtgctcacctaacccgccaagactcgctactccgtcgcaaaagttacgactgaataaacaggcgtagcaaattcgtcgcaatttgcgagggagacaagttacccgtaaatccctcgcaaatttgcgtcgtttttgcgaggaatgatgctttccacgcagattcctcgcaatcgtctcgcagatttgcgagggaagtgttcgttcgcaaattttgcgagggataagcgaggttgccttcttccctcgcaaaagtctcgcaaatccgtagcaaattgcgagggatttgttccaccgcaaattttcctcgcaaatcgcctgttttcttgtagtgtaagttttcaatatgagaggctaagaagaatctgcagcagttgcttaaggcaggaatttctgccctcatcgtcagtctcaacctctgcctctttttcgtggtcctaccaactatcttacgaggaatagaagagaagatatgtatgcacatgatgaatatcaccgatcatctttgaactctcagtcgcagatgtctgaaaactcttttcctacgcctatagaaccctccacgggttgcagctccttctttgaatcattaagaattggtggctgcttattttcctcatgcaagaactgcttctttaccagataatgcagtaatggatcatcaaacttcctcgagcagacaattggtgtcaaggaactctaacatccaaccgttttctagaaatgctattgcatcaaatgttcctcgtcttgttgaaatagatgaatcttcaagaatgtgagattggggaatcagtgaacat

SEQ ID NO: 18289 - DNA, 519 bp, Arabidopsis thaliana columbia
ccagcttgatcttgatcccgtgctgtgagactctcatgttgcaagaaggtgggcatttgcagtagtgggccacactcatagaccaggggcttaatttcaacaatggctccatcgtaataaggtatctttccaccgtttttcacaatgcaggcacagttttttgacttggagcagccgtttgtgcaaccgcagctctttggaggaattggccggcaccaatccggatatatcattttagccgtgtagataaacggtggcggtttctcatcgtctaaattgttcacagcgcatatgggtaatgtctctttcccttctgtgatatcaacattgcaaagaccatcccggaactcagattttttcgatttcgcaacctctttccagggaagctcgggttgtccaggaatacgccgtagtttgaacttgaagacgagtttaccgtgagacccggtttcttcccagtactcttccaccagatacaatccatcgtaaacataattctttgcaacaactgatgattgt

SEQ ID NO: 18290 - DNA, 1479 bp, Arabidopsis thaliana
cgtctctaatcaggatatgttgtcccaagtagagaaaaaaacaaccaaattacacacagagatcccacagtgaaaaaaaacgagtaaaaagacacattaaaagcgagaagaaaaactaaagcaccagcaaggaatctaattatattacaagaccaaaccgctaattaattttaaagcctttgacttcacgagaactccatgtaaaaaacatgggcctgtccttatcttctccttctctccggcgtccaatgcggtaaggatgggctaaaatgcgccgacacaaccctagaatctagtaactccacgataggtgtaaagttcacgcaccttggtaccttgtactggttaattgatgcacctcttgagattgcgtaatccatcagctcctcgaacgttccgtttctcaccactctaatctccaatggtccaaccgagttgtccgcgactcggctttgcgggtaaaccgagtttaatgactcttccatcccaaggcagcaacgagtcagagtctcatgacttggctgcctcgccccatccctcactaacaactcccagtataagacatagtggcccgggatcgtgcttgtgtctgcgtacgtagtgtactcggctacgcggctcccacactcttcatgaagaatacttgatgcattctccaccgccttttgaagctctgactcgtcggtcttgtcagagtcgatgctgaggaggacgttcttcctcctcacgaagtggaactgaggtgcggagttatggaaacctgtgactcgaaggatgtcaccaactcggtatcgacagagaccagcataggtcgtgacaacgagttcatactctttaccgatatttacatcaacgagttcaacggccttggtgccaccgagagggatgaactcgaagtaggccatgttgggcatgatggtgtaagagacttctgatggtttgctcattgggttaaggttcaaaccaaagtaacactcggaggaggcgtacatggtgcaagccatcggaagaccaccactatagtattccaacgttgggatatactgagccatggctccagttacgatgacgtcaaggtacttagtgtttggccaaattcgggtaatgattttttcccaattgtccgacttgcactcccggcggatgaactctgccaggacaggatctggtttgagaataccggacatgcattgtcttatagacgggtcagttatctcggagtcaagacatcctaactcgatgtcatgggcgaagcgagaccaatggagctggaggaagcggatggcacggaggagaccagaggcaaagacggcgcccactcggaggacagaaaggcggtcaaggaggccgcatagcatctgagtgtacatactttgaaatgaatcgggacagagaatggcttcgttgggacttgtgtagacgttgtcggtctcgttgacaaggaagctatcaatcaacagaagcaacaactatgcctta

SEQ ID NO: 18291 - DNA, 577 bp, Arabidopsis thaliana columbia
cacagtagtctccttgtatacaagacaaattcttgctgggttgaattatctccacgataaaggctttgttcacaggtttgactagtaaactctcttgtcatagtatttcttaaaaatctgatttctttcatgtgttacttacttttctcatctgatgcgacaaagggacattaaatgtgcaaatatgttggtggacgctaatggcaccgtcaaacttgcagattttggattggcagaggttcttttccattaatagatgtttgtagttttattactaattaataatatggtacatcgcttatcccactgacatggtacctgtgtcattttgttatataggcgtcaaagttcaacgacattatgtcttgcaagggaacattattttggatggctccggaggtaattgtgttgggatccttctcattgttttggattgtgtgaatacaatgatagacaacatatcatacatcaatagcaatgttctcggcattgataacgttaaaaaaacccgattatgtttccttcaaggtatttggttaaattttgtttatggtgagttggtactgttagtatgttt

SEQ ID NO: 18292 - DNA, 574 bp, Arabidopsis thaliana columbia
ttacccaaacttggttcgactatgtttaacctgtaaataacagtgaattatcagctttatgctgtacatctcacgatacacacatcagcagcaattagaaaaatacagattcatctgctaatcttttacaaatgcagaaagagttccatatatgaaaagagaaattaactctacgctggaaactcacagaaaattgtagatttggcctgaaaaatgaagtaagtacaatttttgtttcctttgacaggtgaagtgactcaagaatatcttcctgaacgttaacagtggctgttgcagtcaatgccattatcggtacatcatattctaagaattccaaattgctggcacagaaattttcccgcaacaccgataatttcctgaagatccggcagtgggaaatctatttgtgtagaaactaagtttacccacaacagaacttgagaaataacaataacaagtcttgactcttaacatcatacctgtagtgcggacggacatcatgtcccactttgatacgcaatggcgtcatcaattgcaaaagagcaatccatgagtctttgcaagctctggagtg

SEQ ID NO: 18293 - DNA, 851 bp, Arabidopsis thaliana
tcgttttttttttgttagctttgtcgtcgcttggctttaaagactttcttctctatactctcctcttaccaaaccctaattctcctctcttgattcccgtttctcaaatcttcctctcatcttcaaacaataccaaacataatctccatatttttactcaacaagtttaaaaccctaacgcaagagtggggagatagagtaacaactcgttaattggggggtggccggtcatgagcggtggtgggaacacaatcactgccgtgggaggcggaggtggtggttgtggtggaggaggcagcagtgggggaggaggaagtagtggcggtggtggtggtgggccatgtggtgcttgtaagtttctaaggaggaagtgtgtgccgggatgtatatttgcaccgtactttgactccgagcaaggatcggcttattttgcggcggtgcataaagtgttcggagccagtaacgtctcgaagcttctattacacataccggttcatcgaaggtccgatgctgtcgtaacaatttgctatgaagctcaggctaggataagggatcctatctacggttgcgtcgctcacatctttgctcttcagcaacaggtagttcataatttattaaactttttctcaatagtaaaatgcgttggaaatcaatatatgtgaaacatactaattgacttggactaaccacaatgtatattggtgacagttacaattttcagtatcattgccaatgtagcgcacttcggttccgtttgggaataatctataatgttaaactcatgcaaattcgtgttagtctgcaccatgttttggtgtgcatgagatgaaatcgtcgagtttgtcgagagt

SEQ ID NO: 18294 - DNA, 556 bp, Arabidopsis thaliana columbia
cttctcttaagagcttctgtccacataatacatcaatggcttcaccaaatctattagctctacataatcgctccaccacaacaccaccgtcctcatggttcggattgaagaactttttatctgaaaaccgcttcagtgaggcgtgaaaagatgatagatttctctttaatataaatccatggagagtagttaactttctcgcatttgaatgattcatcttcttcaccaaaacaaaaagagttcaaattcaaagatctcgtcggcggcaacataagaaatccaccgattgctttactcttaagaaaccctctacctgacttcgaaggttccacaatctttgtaaaaaatcaaaagtaaaaacaaaaaagctccgatgccgggaatcgaacccgggtctcctgggtgaaagccagatatcctaaccgctggacgacatcggatttgttgttctatctctcattaagagaaatataaatccaacattatatagattttgtttttgtcgtcccaacattatatttaattttttgctgaatcattattttattttaaaatg

SEQ ID NO: 18295 - DNA, 599 bp, Arabidopsis thaliana columbia
  unsure (1)..(599): unsure at all n locations
cattccttgctctcctgtgcttatataagctttggtgtttgatttgcaggcatattagttcaactcccattgccgaaacatattaatgaggagcatatattgggtgcaatcagcattgataaagatgtcgatggcttccatcctttgaatattggtaagctagccatgaaaggcagagaacccctcttccttccttgcaccccaaaggtacttctcctttttttgcatatagacttcagtctctttcaagcgagaaatctcagtgttctgtttttcttctgtatcaactatgaggtgattttctgtgtgtgcagggatgtttggaactcctagctagaagcggcgtaaagataaaggggcaacgagcagttgttgtaggtcggagtaacattgttggtttgcccgtttcacttcttttgctcaaggctgatgctactgtcacaactgtacattctcacaccaaggatcctgaggctatcatacgggaagctgacattgttattgctgcatgcggacaagcccancatggtgattttcatacattttcattgtcatttagaagataatttagtctacctcttgtagatcaatgtgaatag

SEQ ID NO: 18296 - DNA, 579 bp, Arabidopsis thaliana columbia
ctcttactgagaacaaaaataataaccaacacagcaacaattatggccacagaagcaactgatgcaacaatcaccaccgggaatttcttcttcgagtttttttctgtgcaggaaccagagagacaaagccttgggttgccttgaactctgcaagaaaaagagtgttgttaaaaacatcaaatcacaaaagggctgtggaaaataactgtggaatattaaaaagtacgtgggaagtttcttacagtaattctagtccctctcttcgaagaccttgaggaaggggaccactaagattgttgccgcttaagtttctattaaagaagagcaatcttcatgcatacagacacatgaaccaaaggagaactgaaagtaaacgaaaatatgctgagcaacttacatgatcaccaacgatttcatctgggctagaaattccggcaccactccagttagtgtgttatttgacaagtccctaaaagtttattccaaaataaagtagagctcattaggttttcctcatcaacaaaaccaatattaactatggccatacttacagtttttctaaatgtgtaaggttttgaa

SEQ ID NO: 18297 - DNA, 599 bp, Arabidopsis thaliana columbia
tcaaagcttgatgtcaactaaataaaaacagtataattcgtttataagtattttcttttgtaaatttggtctccataacatcattttggcctcaaccttaatcgtaatgtatatgtcaatctcataaggatttgctttgtcgtgctgaagtaaatccgcaagtgtctcttctctaacacaaaataaagtcacatagtcatcatccccagcactaaactactattattctacaccacttgtctttacatttaacgacatttacaatgttcgtgctgcttctttagaactactaaaccacacttgttctgttttgcattagtgagagttttgttacatgtttctgtaaccctagtggaataactgtttttaattttgtttgaaccattggaccgcatgcataacagttatttcggtgaatggagggtaaaacacgttactcaaaaagtattacgatacgtcgataagtgtttcggccatttctagctcctcaaaccttggtgactatcttccctatttccataacaaaaatcaattgacataatatttctcgaagatttactcctttcaagtttttgagattacaaaaccatgagatatga

SEQ ID NO: 18298 - DNA, 499 bp, Arabidopsis thaliana columbia
gagctatctatatggacttgatgaatcacaattcatggggagacttaaatcatcacaactagagtcttataaagaataccttccaaaccatcttccctgattcaactatcataaattaaacatcgaatactactaaatgtacccacgttactctcaatcaaaaacaagtatacgaatttcacaagtataaacttactctcaatggaagcaaatcgaatgcagaaaagctcatctttcaactcgccgtcggagaaatcagtagcgtgccataaacaagacttttcattcccactatgttcctgaacactcatcccagacgaaactgcataatttcaacaaaagatacataaagtttagccctttcgaagaaaaaaaaaaaagatcttcttcgagagagaatcaaacatactgaggtgattggcacagatctttagggttttagattgtctcataacaagacgaacttttccagtttccttatgcttcaataacttcacag

SEQ ID NO: 18299 - DNA, 350 bp, Arabidopsis thaliana columbia
atctccttcacctcctcgacctacagtagacattatcatccgcaaaagttctctgtactctggataacttgcataaacgtcctggagaatgtcagtcagtctatcctgcgctttgcttatctccctgcagtaaattggtgtgaaaattactgaaacgatgctgtatatttatttaaatatcattttcagatgtcaaaacatattataatactcccagaaggtttactaatatttcccttggggccgaataagaaaggtggacagagtctaaacttccaattaatgtcacattatttgaactgtaccttggcttaacattagagtttttgttccacacaagccgtcttgta

SEQ ID NO: 18300 - DNA, 603 bp, Arabidopsis thaliana
aaacgtcctttttctgtactgttgtcttgtttgttgcttagatctggatggacccatgggcctataacgggcctatcaattaaatactcatcatcatcaaaataaaacttcgacaccggaagtcttcacggcgaggcaaatcggacagactcgcactgctccgacgtcgcatccattacaaagaatcaaatgttgacacggcaatgccatcaccgtcgcagatttccgccggcaaatcctacaacttggtccgatcaattcgatccgctccggatccacgtaaaccgattcagcgtcctctgcttcttccgcgtctccgccgtcttctccgaacgtactctgtttcgccgccgtatctaggcggttagctatggcttgttggagatgagcatgtaacgaggacacctcagcttcccgcgtcgccgctcttaactgccagtttcgcgcctcttccacgatgtgagctacacgcgcttctagctcagcgtgacggcgcgtggctttctccaactccgcttctttttttctcaatttccgtccgactatctcctccgcagcgcacaataactctacgtagcgtctctctctgttatccgctaacgt

SEQ ID NO: 18301 - DNA, 500 bp, Arabidopsis thaliana columbia
  unsure (1)..(500): unsure at all n locations
nnnnnnnnnnnnnnnnnnnnnnnctaaagccgtcgcaatattgccgcgcccgccgaccagttcaatcaaccgatcgatatccgtttggtttattttgctcatcataaagccccatggcagatgacatttttggttggctgcagaatatattgcgcggaaaaatttaaaaacgggaacgttcccgaaacgcagcgaagatcacaatttatcgttcaggaaacgatcaggacagggtggcggggatgatgatttgttgcggttcgctgcgcccggttacctgcgcgatcaactggcaagccgcctggcgtccagcttcggcgtaaccgggatctacggttacgatctccggatggaggaatttcattaacggcgtattaccgacgctcgccagttgcaaggtgtcgatgcgttgctcttgcaggtatttacttgcgccaagtgccagcgtgtcggttgcgcacagtaaggcggtagtttcaggcgtaatcacttttgcaacg

SEQ ID NO: 18302 - DNA, 1119 bp, Arabidopsis thaliana
gttgaggcatagttaaaaccaccatcactctttacaaccatgagtgggatgtcgaagccttcaaggaaaatcacacgagcaccttcactttcttcaaccaaccccttgctattcaattcctcaattactttagcaatatgagggttgtaaaagctttctccctgtcatgaattaaatcaatgcatttttcattacccatccatgtatctctttttccattatatctcaaataatgttgtacaggtccagctattactttaccttttcttcaagctcaactcgaaggcgttggtaaaccttggcaaactcagttcggctgatgtcacagatcttagcccaagccttacggtaaacaggatcaccaccctgcgccatagaaaggaatatattaagacttgtgagtaatttagatcttgcaaccaaaggcagctgcaaattgagacactgcaaaacagaataacacactagtgattatttacctgtagacggaccacagcctgttgtgctttttccttaaaggcctcgtccagatcaaatttatgttttgatgccttgtaaaacacctatcaaacgacatctctaaggttagaaactatattgctttggttcttcacatgcaagcatattatgccaatattgctacataataaaactgtaaagcttgagagggcatattatagaaggcagctgacctgaacgatctccaattgctgtctcggtcacactatctgtatcaggaaatttctcaaagcggtactcaattagcatgccaaactgcagactagatgcagcttttacgtcgctgatgcctattggaacacaacaattaccactacagaaccatggtcatcaaaccatttgaagagcagaaaagtagctaccagtgttccccagtcaccaacatggtttctgcgtagaacttcaacatgtgcgcactcgagcatgcgagctagagtgtcacccatgatagttgatcttagatgaccaacatgcatttctcctgcaatgtcgggcgaggaacaagcaactacagttctctcaaccgaaagagtaggtgcccatgtgtcaactccctcgctgtgcttattcgacctcgtctgcctttagagcacactggcg

SEQ ID NO: 18303 - DNA, 1128 bp, Arabidopsis thaliana
gcacctacttgtctatttttttcttcggtacagggtggagatcctgtttaccgccaggcatgggctaagatttgcgaaatcagccgaaacgagtttgccaaggtttacaaacgccttcgaatcgagcttgaagaaaaggtaaaggaataactgggacgtatactaaattatttgagatatacatgaatgggtaatggaaactacattgttttatgacagggagaaagcttttacaacccttatatcgctaacgtaattgaggaattgagcagcaaggggttagttgaagaaagtaaaggtgctcgtgtgatattcattgaaggctttaaaatcccactcattgttgtaaagagtgatggtggttttaactatgcctcaactgatctaactgctctttggtgggttatctttatgttaatctggagtttagtagcaatctttggcaaatgcatctcatatattattggcttggccaggtatcggcttaatgaagagaaagctgagtggattatatatgtgaccgacgttggccagcagcagcattttgatatgttcttcaaagtaggttttgataaatattttcattgtttttcacgtcttgtgaaatgttgtcttagttgaaactcagtcgtaactgttgtttttcctgtaggctgccagaaaagcaggatggcttccagacgatgataaaacttaccctagagttagccatgttggttttggtcttgtccttggagatgataacaagcgatttagaactcgggcagcagaggtagtccgcctagctgatttgctagatgaggccaaggatcgcagtaaagctgcccttattgagcgcggtatggtatccaactttgtgtcagcactctctcaattgctgaactattcattgttcagttattatttggtcttattcatccccgtatatgttgtttctctgtttaggtaaggacaaagaatggtcacccgaggagctggaccaaatagctgaggcagttggatatggtgccctgaagtaagtattcatatctctctattctactgctggtgatagtgaattctatttagtatcttctggttttcaatgacttttgcaatgaggctgcacaaatgtgataaatgacggga

SEQ ID NO: 18304 - DNA, 500 bp, Arabidopsis thaliana
taagtagattgttgacttctccatacttatcttgagtccagagaactttgcaaagatgtcaaaaacttccacgatgccatctatagatcgcaccttaccatcggagagaaccataagatcgtcagcgaagctgagatgggttagacttaattctttgcatcttgagtgataaccaaatttctttgcacttgcagcttggtctagcaacttggagagaacatccatactcataacaaatagatatggcgaaagtgaacagccctgtcttaggcctcttttactctgaaaaaacccaactaattctccatttacttggactgagaaagaagcagtagagatgcataacatgatccagtgaacaaactccattgggaaatccatagataaaagaatgttccgaataaaagaccattgaaccgaattgaaagcctttgaaatgtcaattttgatagcacatctactcgaaaccgactctttatggtaatctttgactagctctg

SEQ ID NO: 18305 - DNA, 525 bp, Arabidopsis thaliana
aataaacatgttcttcaagtggaaaatcacgaggggctttaaccggagaatctcacctgcaatcccagcccatccgtcaaccattatgtatgtgataaagaatgtagctttcatcggtatggagaccccaatggttcgaggaatcctgcataaacacaataaacaagagcatttaagatatgagttttaattcaaagttagaatctttagacggttaatagaagtaaaaggtggtttactgagatggtgattggtgaaggaaagagtgcagctgctcaaacgcggttccagcaatgatacttcccaagaacacattaactaacatgaagtaatagtactttgctgctgctctacgctcaagggttgataaagcgatgtacccgcaatcttcgacataattagcagaaccgtagggagaatccacaagaaaattttcagcgcaagaccggggaggaaacctgtaagaatgacttgatgaaatcctgcaataaatccaaggagagggataatggtctacatccaaga

SEQ ID NO: 18306 - DNA, 408 bp, Arabidopsis thaliana
gataagctgtgcaaagcaaacacatggcagcgagcacaaactacaactgatgtggtttctcttctatctgagataaaaattggaactggaaaaaatgaactttggtctgggataagaactgctaatatcccagctgtgatggctgcagcagctgcagcgtcatggggcaaacttaaaagtttctgaagcctttaacttggaagtacttggtactggtgtagtcagtgcaacggtaaagtgcaaccatgctggagacattgctggcatgcgaaggttgtacaacagtattggtggatttcaatctggctcgacacctagtggttttcgtggtggccttcaaagattagtatctggagcattttccaggcaccacaaccagacgatgattcatgtaatgagatgttaatt

SEQ ID NO: 18307 - DNA, 464 bp, Arabidopsis thaliana
aactctgttattcaggtggatatgacgagcgattgaaggagaatgttgagtacttggaggagctcagaagtttagccgagaaagaaggagtttctgatcgagttaactttatcacatcttgttcaaccgctgaaagaaatgaacttctctcaagctgcttggtgcgtctctacacccccacggtaaaagtcaccatccgttgtggggtttgtctttctccaagttttcaatctcatctcatttcattgtccatatcaattgctaggatgaacattttggtattgttccattagaagcaatggctgcatacaaacccggtgatagcctgcaacagtggtggccccgtggagacggtaaagaatggagtaacaggctatgtttgtgaaccaactccagaagatttcagttcggcgatggctagattcatcgagaatcctgagttggcgaatagaatgggagctgaa

SEQ ID NO: 18308 - DNA, 505 bp, Arabidopsis thaliana
attgagaatgagtatggaagacaagggcagttattgggcgctgaaggtcacaactacatgacatgggcagctaaaatggctatagcaactgagactggtgtcccgtgggtcatgtgcaaagaagacgatgcccctgaccctgtggtgagtttcttttgattgcataagcattgtaataacttaattaatgagtctagagtgggtgaatgtctttgactttgaagaatgaactctaactcattggttttggttgacagataaacacatgtaacggtttctactgtgattcatttgctccgaacaagccatacaagcctttgatatggacagaggcatggagcggctggtagagattctcatttgctttccctttatatctgtacatggatttgttctcttcaaatcggtaaccttttttattctgtaaattggaaatgcattaccaggttcactgagttcggtgggccaatgcaccatagaccagtgcaggatctggcgtttggtg

SEQ ID NO: 18309 - DNA, 1235 bp, Arabidopsis thaliana
tttagggtttagtgtaatgttatagttatttgggttattcagcttggttaggcgagagtagtactaggatgtgttacctccaggaaagtcctcgtgttgaatccctcattgtcggttttttagggtttagggtataatgtttatggcatttgataagtgtgtattttgcatgttttgagcatccatttgtcatcactttagcatcatatcatcactgttttataccatttctcatcatttgtcatcactttacatgtttaggatagctttgcatgcatgttgcatatttgtgttgatttaggtgatttggagctgttgacgagctaactggaagaagctgacctgatcatgtcaaaccactcgaccccaaagtcgagtaggatcttcaagatctcaagagaccactcgacccccaggtcgagtagagggcttctcgatttcatcacatcactcgaccacgaggtcgagtgtcttcatccccatcacttgaccatcactcgatcacatcactcgaccacgaggtcgagtgtcttcacctccattacctgatcatcactctaccatgaagtcgagtatcaccatcaccaccactcgactgcatactcgatgacaagcttcagagtcttcttcattccgcactcaactagacactcgagcacaaggaagaaaagaagactccagctattcactcgacctctcactcgaccacatgggtcgagtacagttcttaatccgtctcaatacttcgtcgttttaagtattagggtttcggaatatttgactataagtagcatgtacttcatatttttggacaagaagttttttatctagttttattccgcagaccttttgttctatactttttgtaatccggatttctctttatctattcagtctttagtattcagcttttgttcttgattttgtttactgttgttcattctgttatcatcctgctattacactgttgttatcatgttttcaacttgttcaacgtctatgctttctgttatgatgtctgagtagtgaataggtttctgaggatgggttagagtagtgtaggattctcagtatgctaggtgattgagtattgattgatacatctcttctggattagttattcttaatgcctattgctttctgatcaactggaatttgagcccagacatttccgcgcccaaaaggtgttcgatgaaatgtctgaaccactaattccagggattcgtgaccctggg

SEQ ID NO: 18310 - DNA, 1103 bp, Arabidopsis thaliana
atattgaggcaacatgctgctagacagtaagtgtcaagtgtatatatgtattttgttaatctcatatatttgtctttctaatacctatggtacaaattgcagaggttgcttgcttgttcgacagtcttttttccacaatgatccaaccaactgtgaaccagttggtggtaacatcttaggatgtaggggatttcactccagtttcagaacaacgcagggtggcatgtcacttaatatgggtacataatttcacttgtacttgatgttggtgtttgattctgtctgttgtagcaataatttagtgtctaatagtttatgttttgttcttatgctagatgttacaaccaccatgatcatcaagcctggtccagtggttgattcctaattgctaacaaaatgctagggacccttattcgattgactggtctaaggttaactacttattatgatatgtggctttttcataatctaaacatgttccttacctcttttgcttggcttgacacattttaacatgttgttttcaacaggctaaacgaacccttaagaacctaagggtaaaggtcagcccctcaggccaagaattcaagataaccggattgagtgacaagccttgcagggaacaaacgtaagatattcactaatttgactttgttgtgagatgcatttgtttctgttttagttttctgacgttgtgatctctttcaaagataaatggttctctgaagtttgctttttacactgtctaggtttgaattgaagaaaaggaacccaaatgaaaatggagagttcgaaactactgaagttacagttgctgactacttccgcgatacaaggcatattgatttgcaatattctgcggatttgccttgcatcaatgttgggaaccaaagcgacccacttacattcctctcgaggtttgcctcttatactcatcaacgttctcatagtcatggtattaatttgtttcaaaaatcatgctaatgtatgtaatgtggtggaatttcgcagctctgcgcgttggttcacttcagaggtaccaaaacacttacacgttcaaagactgccttgttgagaatcagcagaacccaagagagatgctg

SEQ ID NO: 18311 - DNA, 622 bp, Arabidopsis thaliana
  unsure (1)..(622): unsure at all n locations
atccctgccgaccaaaatatccactaattaaaaaaagtataaaaaagagatcttgttttctacttttgtaagtcacattcaacaatagttaaataagtataatgtaccatggggagaagacttttgaaaggagcatagatttcttcaccattaaatgacccgacccgaatagaagatgcttgggttaatgacccgaaataattagcttgttgcactttctcctttgtagcccaagatattcccctgccaccattttttgtttcattatataagaacatattcaacttgctcattattcaatatccaattgcgggaatatgaatatattataatcccacacaccataggacacacaactttattcccttttgaaacagtttattataacaaacaattaagaagaaaaaatattttacttactcacgattggcgataacaccagcggtaagtgtagaaccattgttgcctcccaaccaacgagcattactctgccaaaatttaatcagacaaagcaaaacctgcgttaatcaaataatgaattgtaaatctattaaaaagtattttaactgaaaaagganaaaaatattttatctaacattaaaatgattttagagaataagat

SEQ ID NO: 18312 - DNA, 505 bp, Arabidopsis thaliana
taatgtccctaaaaggagatgtccctgattagtctatttaaagggccagagcaagattaaatagactaaggaaaaaaaaaaactgcattaaccttttggttcaagagaagttcagggacatctccttttacaattcgctcggccaacctgaaaatgtttaagaatagtatttcagtacaatcataagtttgagagatataattacagactaattacccttctacaatagcggtttttccaacacccggttcaccaatgataacaggattgctttctgtcatcctgcatagtatttggatgcaccggttaacttcatcatcacgtccaatgagaggagggagttttccttgtctagccatcttggttaaatcacttccatatgtttcaagtgcttcatgcttagcatcagtctacatatagaaaaaaacaccttataagaaactaagataatcactaacctagtcaaaagaaaaaaacgtatgatgattaattaatgacataatga

SEQ ID NO: 18313 - DNA, 456 bp, Arabidopsis thaliana
gactgacaagaagaagaagagtaatcatcatcgagtgtttattacgattatgtccttaacgaaatcttcagaatcagttttcactgaagaagaagaagaagattcctttagcggtcgatacacgttatggatcaaagaagcattagaggagcttccacacaatttcacaatcaccgacccgtttatttcgggtcacccgattgttttcgcgagcttagggtttttgaaaatgactggctattcacgagaagaagtgatcggaagaaacggtaaagtttttcaaggacctaagactaatcgaagatcgatcatggagattcgtgaagcgattcgtgaagagagatcagtgcaagtgagcttgttgaattatcgtaaatctgggtctcagttttggatgttgtttcatatgtgtcctgtttttgggaaagatgatggtaaagtcacaattttgtggcg

SEQ ID NO: 18314 - DNA, 1277 bp, Arabidopsis thaliana
cttgtttttttttcattacaagaagagcaattgggcagagcagtcagtattggtgacgttttgatcaaaacacatacaaaacctgatgggacgtatgttgatcgaaaggcggagaagattgtagagttatatcaaaagaatttgcaattgaggcagtctgagctccagggcagaaacttctgctgtttcagatggcacttcgcgggaacgggagctcacagctgaggaatgtacaaccatatttcttcaggtaacgttttatgtttcccaatttagtgttttcgagttcaattttcattctctattctcagcttttatcatactttgcagtccactgagagggattcgagaggcgttccttatagagtaggaagcctcatagagtctcttgtcaatgccaagcggaacaagcaggtgactcaacttcttttgtggctttgcaagaacaattattggaagctcaacgcaagatagaagagcaggcctcttacaatcagaggcgtgaatatgagattgctttgcgtgaagctgagaaatccgtagttgctgatgagaagaagaagaagattgagcacttgtccttattggagaagtttttgcgcgaaactgatctttggttcctgaatttcctcgaatctcattcagctaaggagacaaccacagatcctatctcaccctctccagctgcctctccattttcatctgcttcataggtctatgtcttaactccttcctcaagactcaatatcacttttcaaagtttttctatatgtgtacttgtgttgcttgtacttgtgctaaacaaaattctaagttgtagtgaatcgaacatgtttctgtaatttgggttttgtacttttctgaaatgacaataaatttgttttcatgcttcttgtattgtgtttatgcttattgtaatgttttgttttctcaggaaggtttccatctttgtaacaatcatatagatgttctaataacaacaatagtcgcaaatttagtcatcaaaaatgtaaccaagcagtcgtttattgataacaattcagtcacaaaaatttccgactaaggatattttagtcgcaaatcagtcttaaatatagtgacaacatagtcgtaaattttaacgactaattaactacaacgactaaataaccctcaagttaatcgttaatttgtcgtctaatagtcgctaaatttaacgactaaaatgtcactaaaaaagcgattacctaaacttagtcgtaactttgtcgctcttttgcgactaaaatacgattacg

SEQ ID NO: 18315 - DNA, 923 bp, Arabidopsis thaliana
tagaaaaatacaaagccatttttgataagcagctaaaggagattgaactaagaatgtcgttaatggatgctttcatgttcattccacactcccacaagtacctcaaaaatctgattatgaaaagaattaaggaaaatgcaagttcagatgacttgtcagaactcaaagctccaaaggttgaccttaagcctcttccaaaaggtctgaggtacgcgttccttggtccaaatgatacttatcttgtcattattaataatggattaagtgatgaacaagtgcatcagttgttaaaagagcttagaaagtatatgaaagaaattgggtattcattagctgatattaaaggaatttcacctagtttatgcactcatacgatccatcttgaaaatgaatcatatactagtattgaaccacaaaggagattaaatccaaatttgaaagatgtggttaaaaaggaaattcttaaattacttgatgctgatatcatctacccaatttctgacagtacatgggtctctcctgtgcattgtgtacctaagaagggaggaatgactctagttaaaaatgatttagatgagctcattcccactagaactataacatgacacataatgtgcattgattacagaaaactaaaagctgcaactagaaaggatcattttcctttgtcattcattgatcaaatgttagaaatgctagctaaccatgtttattactgttttcttgatggttgtagtggtttctttcaaattgcaattcaccctaatgatcaagaaaaaaccacgtttacctgcccctatggaacttttgcatataagagaatgccttttggtctatgtaatgctcctggaactttccagagaacatgacttcgatattctcggattttattgaggagataatggaggtattcatagacgatt

SEQ ID NO: 18316 - DNA, 445 bp, Arabidopsis thaliana
aaatgacaggttaccaaaacattttaactactttatgcaactacgtacatgcctttgaaacaatcagattttttttttatattaagaattttgaaaggcatcacgattagtactttaatatcttttttttttgtatattaatttaaataaaagacagctgctgggcgttctccacagtggcagcagtagagggattaaacaagattgtgacaggagagttaatctcattgtccgagcaagaattggtcgactgcaacctagtcaacaacggttgttatggatcaggactaatggacacagctttccagttccttatcaataacaatggtcttgattccgaaaaagattatccataccagggcactcaaggctcctgtaaccgcaaacaggttcacctattagtgctgccgtaattaaacactcacatatatgtgcatatatttat

SEQ ID NO: 18317 - DNA, 845 bp, Arabidopsis thaliana
ttagagatgtcgaaagtgggcgagaagagctgtggacagggaaaacgaggcgtgggaaatcttcgtcggagattcctttcgatttgaggagattcacggcggagaggataacggaaagatcattcgccggaggagcaagtcggggattctgaggaacaattccgagagaagaaaggtgtcttagattttcacggtgtgaggtttggaattttagatagagaggcttagagcttgaaggagaaggaggagacgagaaagacgagagaggttgaagatgatgaagtgaagcaataacagccatatcgatgattcttcacttcttacttctcatcccggttcgattttatttatatctgttaaataaaccagaaattagcttttgaagcggtttagtatgaggccggttctgttaactactatacttcatggaccttaatataaattgggctgagataacaaagcccatcattataaaacccctagaccagaagaatctttttctctttgctctttagattctcaaaatccagagagagctcgttaggaaaaatgaaggcagtgatagggacagtggtgtcgaacaaaatgcagatgtcggtggtggtagccgtcgacagactcttccacaataatatctacaatcgatatgtcaagcgtacttccaagttcatggctcacgatgagaaggactcctgtaacatcggcgatcgagtatttccccttcatattttgaatttgatatacgatttgatcaagagctcgagaatttagggaagctctaggaatatttgaactcaaccattggaagtagacttgcctgtttgttattaggctgctttggaaat

SEQ ID NO: 18318 - DNA, 531 bp, Arabidopsis thaliana
gcttgagcatgcaattcacaccaagtatcgcacatagagaaggatgacaggctcttggaatccaacgagtatcatcatccctgttacactttcctttctcctctcattcattcacaattttgcggacgtggttgcagctcctactaggcacttgtgtcttcccgaacaaagggatgcacttctcgaactcaagaacgagtttgagattgggaagccttcctctaatgattattgctatcgcaataatagccgtgtaagccctcatccgacgacagagtcatggaggaataacagcgactgttgtaattgggagggtatcacgtgtgataccaagtccggggaagtgatcgagctcgaccttagctgcagctggctctatggcagctttcattccaatagcagtctttttaggcttcaaaacctccgtgttctagaccttactcaaaatgatcttgatggtgaaatcccttcttcaatcggaaatctttctcatctcacctctctccacctatcttataatcagtttttggg

SEQ ID NO: 18319 - DNA, 378 bp, Arabidopsis thaliana columbia
gggtatcgagctggatattttcagcatgtaatggatcagtcgtagcttgtacgcgaagagagatcctcatggctgcactagcggaacgataagctcgattcgtcggtatatccagaagccggaatctttaagctagacttggcgcatcttagtgtccggagtactctgctaccttgtttgacgaggtattggggatgatcgagttccaaaaggcgcgatcactgaagcttatcagccaagtaggcgatagggttcaatatggagacaagaggcttcgcggccaagaggcgctcggcgtgatgtatcctctgcgtctaactgatgctgtagtctcaagtgctaggtctacatatggatatgttgcgcatagtcttggag

SEQ ID NO: 18320 - DNA, 796 bp, Arabidopsis thaliana
cctcttttcaggagattatcgcagtttaccctgccctatctcctccaaccatgactcctgctcaatctaacagggtgtgcaatgcacttgctcttcttcaggtgcataaaatattgtcagtttcctctttcttttttagggagacttacaaacgtttatatatgtatgttcaatttggaagactctattttttattgattcgactcttttttcgtacatccagtgtgttgcttctcatactgatacgagaatgttgttcctaaaaggtacagtcctgtgcccgaacaattcttccttagttctcattcaaataatttcggtgtttgctctgtgactaaagttatagagatagattgcattagttgaatacccaacccgtctaccaaaactagttttaagagccaccttgttggtctctttctgattgatctcatttattagatgtgtgtttggctataatatgcttaaagtttaaagtctgttgcttttcaaaatacagcccatctgccattgtacctgtatgctttcttgaatacatcaagcaaatcaagaccgtttgagtacctgcggctgactagcttgggggttattggtgcacttgttaaggtatgtattgatatttgagttttgtttcctcgtctagttatttagtatgtttatgccaaaaaggcaggaacacttcttttacatgctaacaactgtttggctgtaaataaatattttggtgatttgagaaacaacgattttagcatgctaagacctttgagtagatcctgttaagacatcattagtgata

SEQ ID NO: 18321 - DNA, 559 bp, Arabidopsis thaliana
catcaaagacttcagcagaattgcaagaccattgactgctttactctgtaaagaagtcaaattcgagtttacacaagagtctcatgatgcctttcagtagataaaacaagccttgatcagcgcaccaattgttcagccaccagattgggatttaccttttgaggtaatgtgtgatgcgagtgattttgcagttggagctgttctaggaaagagaaaggataagaaacttcatgccatctactatgcaagtagaactcttgatgatgatcaaaggaattatgcaactgagttgttagctgttgtgtttgctttcgagaaattcagatcttatcttgttggatccaaggttattgttcacacaggtcatgctgccatgaaatatttgatgcaaaagaaggatgctaagccaagatttttgagatgtattttgcttcttgaggaatttgaatcgacaagaaattggtcccaactgagaattgcgccgtcacagtagtcgagaaggattcccatggtatgctgatattgttaattacttagctgcagatgtgggaccgaataa

SEQ ID NO: 18322 - DNA, 474 bp, Arabidopsis thaliana columbia
  unsure (1)..(474): unsure at all n locations
nnnnnnnnnnnnnnnnnnnnnnctaaaggccgataaccacaaacaacaccagccaagtgaaggtcatcagccagccgtcgcgttttttgcggcgtttaccgagggaaaaactctgcatcggcgcaacttttgcagcccgaagtggagcctgcttttccagccctggcagcagttcttcttctggaatatgtaccagacgcgcataagagcggatatatcccgcaggaatgttgaagcaagatcggcgggtgccttatcttcttcaatgtcgcgtaccgtggaaaccttcaggcaaagtcgctcggcaacggcctgctgactaagtcctagttgttcgcgagcattacgcaggcgagcgcctggtagtaagtgcttcattttggtcgtgcgtggcttcagtattcattcgctgcaggtacgtttaaatgagaattgagatgccggtgaccatcatgctcaccacaccgcgaaaca

SEQ ID NO: 18323 - DNA, 504 bp, Arabidopsis thaliana
agtgttcaaagatcatcaatgaattcccagtctcaaatgactgaaagttcatttccagtacccatgactccacctccaagagttgatcctcctccaatgaatcactctgaatttgtagctgcttatccacatcttgcaacagctacaaatgtgaattacaggtttacaggagactcaagcacctccagacaagacttatcatctggttcaaacaatattctgccaagaagaactactcatttcacagaccatcgaaggtgctttgaagctggtcaatcctcaagacaaaatgaaaacagagaaccaagaagacctacagaaagaatgttgcctccatctcactttgatcatgttcaacgctctggagggattctgaaacctccaaaaaaacgctaaccaatcgatcagtttctgtcattttttgggaaagtttgcaggcctagtagaacacagcttcaagtttgaagaagtctgcttagttgagtatggtctttggttatgaca

SEQ ID NO: 18324 - DNA, 511 bp, Arabidopsis thaliana
catctagaaaccgtgatccaccctcacttgcgagtcaaaaccaacaagccgatttatttcctccacaatccaattcaaactcgcctaatccatctcattcagctactcaaccaccaactgccggtctcaaagatatgacattggatgagctcctcgacagtccggggcgtcagtctttgcagaagctagatccaaatcgtcctccgggaactctcttgtaaggatgattttggttctactttaaatttaatttcagttttagatttttggtatgtagattctcattgtattttaggtatgtagactaagtactaatttggttatacattgtattttaggtatgttgattcgcattgtaatgatttttttttgtaggtttgagattgatggttcagttgcagcttctgtctgaaaggtttatgaaagagatttcaaggaacctcatgccaattggacacaaactcctaaaacagtgatcactcgttggttgagacttttgcggtaagtgaaa

SEQ ID NO: 18325 - DNA, 1107 bp, Arabidopsis thaliana
tctggcaacccctgaaatatgaaagaattcttgatttgaacctactttcttggggttcaagaaacaaagtataatcgtcttacctgagagcacggcgagaaagctgttaacgaaaatggataggcagagaatgggtgtgatttgggttgcgtacgaaccacttctctctcgttgctgaatacataaccccaactttttcggtaactgtaaagtgtgatggttgttattaatgcaccaacaccaccaaggaaaatggcagaattaaccgcggctcgagctgccctatgatttccagctcctagctcgtttgagacatgtgtgctatagtgttaaacaggataaaataggttaagagatactatgttacatgaaaaaatcagattcttgtgaacaattgaaatctataaaaccttgcggatgctcctatcgcattcaccagaacgaaatgcacagccgatgttgtgaggctgttccatgaatagaagttaggaatatcacaagctttttgactgtttgaattattttacaaaatgatatgtatgtaccaaatggatatcaccgatgtttcgagctttgagtttggtaagagtccagacattagtagtagaatctcaaacgaccaccattccaggctttacttacacacaaaaaaagaaagaacaaagaacaaaaaaaattatggattcattgtagatcagagtcagaccaagaagcttttaaatcttgctgagatttgttttttttggatgtagatatgtaaattaccatatcatcattgcagaggggatcgcgagggcgatgaactgcttcatgctcgagatgagttcttgcaaaccaagattcttcatttcacgatgcaaagcagagtatctcatgaaaatccaaagcaaaaatacgttgagccaatatgaaaaaccgatggacaaagcggcgccaactattccaaatttcagtttatagacaagaagccaacagaaaggaatgtgaaaacaaagagctccaagagagctcacgaagagaggaagagttattccttgtgactggaaataccgagtcataggttgaagaagagtgaatctgaataaagccggtatgagccagattgag

SEQ ID NO: 18326 - DNA, 603 bp, Arabidopsis thaliana
ctcacgatctaggagagatcatttcattggactttcatgaggctacctctcctcagattgcttttattagagttagagttcgttttggtataacggacagactgaggttttttcaaagagtcatctttgactctggtgaaactgcaaccatcaggttccaatatgaacgactccgaagactatgtagtagctgtttcagatttactcacaatcgagcttactgtccctaccgtcaacgtcctcttagcatcgcaagagaaagagccctcttctgtgatagtgttcaaagatcttcaatgaactcacaatctcagatgactgaaagctcctttccggtgcccttgactccacctccaagagtggatcctccaccagtgaatcacgctgaatttacagctgcctatcctcatcttgcaacagcaacaaacgagaatcacagggatgtaggagaatcaagcacctccagacaggatatgtcatcaggatcaaacaactttctggcaaggagaactactcacttcacagaccatcgaaggtgctttgaaggtggtcagcatcaagacaaaatgaaaacagggaacaagacgtctactgaaaggatga

SEQ ID NO: 18327 - DNA, 521 bp, Arabidopsis thaliana columbia
ccattagattttgagcatttgacaacaacctgaggagcttcttgacctctatgcgctcgatacactctatcgttttcaacaatctctgcaactttctggttacacaagtcaggccctgagtgaatcaaatcatcaacatgtgtccaaaaaacatttggggataaacctctagcccaactctcttcatcatcaccagcccctggaatataattccaactaaactctgaactagttctgttttgaagttcaccagaagcagaagctgagacaaggataagaggtgtgaaatcccatgaatcatgctcaggtacttcattcaaccatataacagttttctgtgaaacccaaagaggacgcaaaggttttctcaaacatgaagctagagaagctatatcagctccactctcatctaactctcttgtccactcatccaatctagcttcaatagaagccctctcagtatttgaaacccatagtggtagatgtaacgaacaatccatttatctacaattcctgatgtt

SEQ ID NO: 18328 - DNA, 501 bp, Arabidopsis thaliana columbia
gttaaagggtttcaaccagggctgtaccagacgaatggcggtggagctaatgtggtggctcatggttacacaaagggttcaggtcttggtgcagagattgttggaacttttgttctggtttacactgttttctcagctactgatgctaagagaagtgccagagactctcatgtccctgtatgttgctaattctctagtatccttgagttgtgttgagttcatattcttcacatagagctcatgtgttttttggttatcgaacattttgcagatcttggctccgcttccaattgggtttgctgtcttcttggtgcacttggctaccatcccaattactggaactggcattaacccggccaggagtctcggagctgccatcatctacatcaaggatcatgcttgggatgacgatgtaagttttcctctttaattacatcaacggttgtgctaagtatgataagttatgaattgcatctgaatagcaactcagaatttttgata

SEQ ID NO: 18329 - DNA, 476 bp, Arabidopsis thaliana columbia
agaactgacgacaatcatggaccaagaagaaaaagggcaaatgattgtcatcccaatcttctataaagtgagaacggaagacgtggagaaacaaacgggagagttcggccatatgttttggagttgcgatgaagaagcaagtcttgaagagatggagaaatggcaagtggctttgaaggctgtgtgcaacaaaattggactcacgttggatcttaaaaggtaagtgagctcattttttgtttattatttccacttgagccgtaaaagccctactcaatttagagttccaaccaattcagaaaaatatacgatagttgtattattttctttcgtgaacaatatatactaccaaaattgtttctatttagaacatgaacgacgtaacggatatgatgagctcgtcatttatactaatctctttcccgaaaaaagtcaacgtttcacggctttagttgatgatccgactattccaaaaa

SEQ ID NO: 18330 - DNA, 526 bp, Arabidopsis thaliana columbia
ctctgtttaagtttcaaccttttaagtatttgtgttgtttttgcattagtgattgattcttctgaacttccttcttcttctttaatgataaaagctactttagcttcatttgtgttaagttctgaaacagagtgttttgacttgatttggtgatgaccacgttagaactcttagaatttagatttttataattattatcatcttccataaacataaacaccccacactttaaaacacaccaattgaccaacaattaatcaacactaatacaagttttaacttattgccataacacacaacacaaactcatctttctttctctgcttcacttgaatctcaaatccatttttagaaagtctctacggctgctgtaggattcagttctgtaactgcagaagcattcttcattgctgcgaaccgtggctccttgggctgaaacttgacccctgcataaagcttcatgtagtcatcaaagacgaaactcgggtactcggaatctttctcgacaagcgaagtagctggtgag

SEQ ID NO: 18331 - DNA, 579 bp, Arabidopsis thaliana
aacggccgccagtgtgctctaaagcttgacagcctcaagcagaggatcatacacagggtcgaaagacatggtaaacgcactgtcgacgatgcgaccgttgatatgagctccaaagtcgaccttcatcacatcgccctgctgcaataccatcttgttgcctgcattcggggtatagtgcgcacggcagtgattgatgctcaggccgcaagggaaacccataccgcccttgatattatcaccctcctcaagaccttggtgaccggtcagcgcacgaacagaatcctcaatgccctccgcaatctccgtcaaggtctggccgggcttgatgttcttctgtgcatattggcggacctgacggtgaacctcggcaccttggcggtactcctgcaggaagtcattgttcatacggtcgaggtagcgtttctcttcgttggtcgtgcgatacgaattctcattcttgtactcgacaatctcaccctcggggtactggccgttcgcgaataggctcgacaccggaacgcggggaggagagctctgtactttggcgccaccttcttcttcttcttagacttgcgcttc

SEQ ID NO: 18332 - DNA, 551 bp, Arabidopsis thaliana columbia
tgatatgttttcttccttcagaatgggtctcaagctctcacgagggcctgtaaaagaaaaatcacctttggaattcacaagggttcacattctgacttacttcaccacaaattcttacctacgtaacttggtgtccaagaaacgaagacggttaatcatcggtggatatgatctcgacatgtcttacatctccgacaaattattggcaatgtcttttccagctgaacgaatgagagcagtctatagaaaccctctttggcaagtcaagtccgtgctcgatatgcgacatcctgatcattacaaggtcaataaaacaaacgtctaatattaaaacatcaatcaactagctatttttattaacattgaaatttggtcaggtctataatctatgtatagaggaatcttatgatccagacaacttttatggccgcgtggagcgatttccgtttgatgacaatcatgttccatccctcaaaatgatccaacttttctgtgaaagtgttcattcttggctctcattagatccaagaacatcgcggttgtcattgcat

SEQ ID NO: 18333 - DNA, 564 bp, Arabidopsis thaliana columbia
caataatagccgggagaggattcgtagcgggaacgtcaccaatttggtatatgtcaaggaattcatcatcatatggcaaaattggagatggaatgacggcagcaggtgaagagaatgtatctttattctttttgtcagcaaatgggaaaatatcttcctgaaagaccacatcgcgagagacaaaaaaaatttgtgattcaatatcataaatacgccaacctttttgtccatggggatagccaacgaatatgcattttcgtcctctctcttgaaatttatccaaacgaccagtgtgttttcttgcaaaacagaggctgccaaagacacgaagtgaagcataagacggtggttgtgagtagagaatcttgtatggggttttgccatctagaattggagtaggagttcgatttatgaggtaggcggctgtaagaacactttcttcccagaagctaatgggaagttctgcttgaaataagagtgaacgtgctacattcaagatgtgtctatgcttacgctcgacacgtccattttgctgatgtgtatagacaccagagatttgatgac

SEQ ID NO: 18334 - DNA, 387 bp, Arabidopsis thaliana
gacatttgcagtggttgttgtggaaaactgcattgtacaggaaccacaaagttatcaagaagctatggagagtcaggactgtgaaaaatgggacatggctacacatgatgaaatggattcattaaggaaaaatggaacctgggatcttgtggacgagcctggagacagaatgattattggatgcaggtggctgtttaaattgaagtctggaattcctggtgtggaaccaacaaggtttaaggcacgtttggtagccaaaggtatactcaaagagaaggagtggactatcaggagatatttgcacctgtggttaaacatgtgtcgataagaattctaatgtctgtggtggttgataatgacttagaacgcgaacaaatggatgttaag

SEQ ID NO: 18335 - DNA, 950 bp, Arabidopsis thaliana
ccggcatgtcagaggcaggtggaggatgaggtaatgaggcacgtgaaggctgtggaggtgacacgagctatgactctcaacaatctccaaatcggcctgcccaatgtattccaagccttgaccagcttctcatctctcttcactgaatctctccagactgtctggtccgttctactccatcaactgattatgtccaagtttctcatttatttttaagctctcattacgttggtatcatgtagatttgaggattgattaaattgagtcttgtggttttgtgaggactcacaatctttctcatttaatacatgagcagacacggcacctaactaatggcccaaaggtggcccgccaaattgaatacaagggtaagaaatgggccaagaaagtgagagcccaaaagaggccgatcgttcgtttttgactcaatggccgttgacgttgacatcgtacgccgcacccaacgaccgccaaacagcaaacaacaacactttcccctttctctctctaaacatggcgatgctttctactgcttccgtttcggggagcgtcgaccttcctcgaggaaccatgaaggttgactcgtctgcgtctccggaggtcgtatccgatctcccaccatcttccccaaagggctcacctgatcgccatgacccttccacttcttctccgagccccagtcgtggtggtgacaatcaggtatctgatgaattctctctgcttcgatctattcgtttccttggtttatgacctggatttcttcttacttattctcctctagtctgaagtcatatccaagagtgaagagtatcggcaattgtttcggcttccagctgacgaagtaagtattgccctctcgtcttgaaatccatcaatgagagaagtactgctccacattgcttccgattgtgtagatcttgtcaagattttactgtgcttgcaggagagta

SEQ ID NO: 18336 - DNA, 941 bp, Arabidopsis thaliana
  unsure (1)..(941): unsure at all n locations
ctcacgagatgtatctccatcagaaggctcaccaattttttcttcctcgcaaacattagcttcagtcgcagcactggcatcactttcttctccctgaaacaaatacagtgtaatccagtgtcaacaatctctgcttcagtggacgaagaatccagtccatcttttgcagtaaaatcactttcattattggcttcatcctgtaagcagacagtacagttatacgtacatatggatttgaaaatatttaggaatgtacgtacatgccatacctggtcatcaatgaatccttgcatatcttccttattggaatcagagagctcaatagtgtcgacagtaaaagaaaccctcttcttcggccttgaagaatttcttcttccgccgacaacaatggtaggtagtccagggacatccaaatcttcctctttggaattaccaccaacagaaagagcaggagtgtccacatcatgagaaacacgattcagccttgaagactttctcgttctagtgcttccttttgtagacatccttctcgatgccttcttcgcactcaccagtgccttatccatagatgtaggtgtttcccgtgaatcatgggaaggtatggtttgttctggctttttgcctattggatcaagggcagcacgtatctcctgatggacaaagtgtttcatatcttcttgcatttgattcatttgggcttcctgcttcttgaaacacctcctcatttcaactaaacacctctcaagcaccggctctccacgacaatcctcatcattttcttcattatcacattcaacaacagatttctattttttcatagcaggtgctttcgggctcgggccgantgcatttcttttcctcttgacacctacaatataccagttgctgctatttattggttttctcttggtgcaataccagaaaatatgaaaccacattta

SEQ ID NO: 18337 - DNA, 1452 bp, Arabidopsis thaliana
aactgtcaatattaggaaacaactacttgtatgatttctggataatactgtcattactaggatataactatgcgttttttggtcaaactgtcaatactaggaaacaactacgtatatgatttctggataatattgtcattactaggatataactatgcgtttttgggtcaaactgtcaatactaggaaacaactacgtgtatgatttctggataatgctgtcattactaggatataactatgtgtatgattctatgtaccatcggtagtaatatgaatgaatgtctgttgcaggagatcgacgaggaaacagaagcagtaccacccttgagtatgtatttcccgccctcggaatatgtgaagaaaatcaagctttcaacttggtgctatattcacgaattgttgactacattcgataagttggagccgccgatgagcaagtccgagaggttatggtttgagaaccatccgagtttccaacacatcttccacatgccaagagacccaaaccaccgacttatggggatgtggatgctcctttttcgcacggcgcgcattgaaaggaagaaagaagcgtggttcatcgtcaatggcgttccaatctaatatgttatattggaacacgcattgatatcgggcttcaattgcaagaactatacacttgggtataaaaatacgggaaatttggatttcaagaagaagcatttcaagaatattgttgtgaaacacgaagacgtgagaaagaaactcataggaatggtacccgcgggtgaaagatcaaaagaaaggttgaggatgatggtcttgtatttcttaaccagcattatcatagcacctatcaagaccggggataaggcacctcaagtggatgaattttgcctcaaggctgtgagtgatctcacgttttgtagaaattttcaatgggggaggtattttttcgattacatgttaggaaccatctcacacacggtgaatcattttaatggttcagtcaccaacaacgagaagtacgtatggtcggttctgggtttctgtcttccgatggaggttagttaaaacttatattaataggtgattatttgcaatactgataatactgtagaatactatttgttattagatattgttttcttattctgtagcttcttgcattcgaggcaatcccacagttgagggaaacatttatggaggacattgcaggagcagatgagggatgtcctaggatgtgcaaggtgaggttcaagaagaaccatttgaaaggctttcctcttgataccatttatgcagaattgggtataactcaggttagttgtcctagatttactgttttatgaaacgtttgctattctaattagttataataattcattcatactgtttatctttacaggtcattgattgtatcacacacctggaattgaggagcatgcctcatgaaaaaaaatcacggaag

SEQ ID NO: 18338 - DNA, 1046 bp, Arabidopsis thaliana
cacaataggatcgaaatcctatgataataagaaaatttgttaaatattgttatttgagcaaatatgattatgattaagaattatcaaattttaaacatacatgatatagaaagaagaagcaaaaaaacatatttaaaagcggaaaatcaaacgattacattttaagattgattctagttataatgttgccatacatgttcaactaaatcagctttcaattcttcatgtttaatccgatcacgaactcgagctctagtggccatcatattaccgagatttgaaggcatatctgtagcataagtgaaatccacttgtgaagagctagctgattctggatgtacgaattcagatacatcaaactgagtgtaaccatctcgtttgtcctctactatcatattgtgaagtattatacatgctcgcataatattgccaattttcaccttatcatgaaaaagagctggatgtttgataatgggcaaaccgagcttgcaaaactccgaaagcacgctcaacatctttacgacaagcttcttgagttgtagcaaataaagaagctttattaccttgtagaattgaaattgattggataaatgtagcctatttaggataaattccatctgtgaggtagtaagccaaattatagtctttcccgttgactacgtatttcacttttggagctcgaccttgtaatatatcatcaaaaactggtgagcggtcaagaacattgatatcgtttaaggtacatggaggtccaaaaaacgcgtgccatattcagagatcttgtgaagcaacggcctctaaaacgattgttggttttcctgatccacgtgtatattgtcctttccaagcggtgggacaatttttccactcccaatgcatacagtcgatgcttcctatcatcccgggaaatccacgttgctctccaatatggagaagtcgtataagatcatctcgtgtgggtcttcttagatactcatccccgaacagatttatgatttcttctgcaaaatgttccaaacataacaacgacgtggggatcgatcctc

SEQ ID NO: 18339 - DNA, 607 bp, Arabidopsis thaliana
tcccggtaagtgacgaagaccttgctgttgctgtggtgatccatgaaacgttggaggacccgacccggataatcctctatggatatagtaagaacctgacccggataatcccattgcatctcttcgatccatttcgcatttacaatagttgaagaagaaagactcttttcaactttttaagtgaacttgtgaaaccctaaaaagattgtggctagaattatgaggagagagagaaaaagaaagaggataaatggataagaggaaaaaacagaatcaaaggttgagagactttacgatgaagatataaacttggagagaaaggaacatgcaaagctctaaacactttctctgcttcttacttctcctcctctctctctttcattctttcaccataagcaacaagaaaagaaaagctttctcttctatcaacaatggttaggacttggttttgaggctatctctctctctctctcttcttgaatttgtttgctttttagttttctgggtgacagaaggaaacagaaacaaacaaaaaacctctaacagactctctctcaagcaaaagcatttcttgtgaggataacacaatgggatcttttaatctttt

SEQ ID NO: 18340 - DNA, 474 bp, Arabidopsis thaliana
gcggtaatgataggcatcccggtcgtgcccattggcattggcttcggtgcgctgtttgcgctggcaataacggcgctgtggatctggcagcgcgtcattaatatttaacgccggttttaaccgcgttaatcttatggtgccggataagtataaacctgatgcaccgcttcaatttcagctaatacgtcttcgcttaactccagatgcaaactttcgatgttagttttcagctgatccatcgtggttgcgcccagcagagtgctggcaacaaacatttgacggcgtacaaacgcgagcgccatctgagcagggtccaggccatgacgtctggcgatatcaacatacgccgcgacggctttttgcgtttgctcaccgctatagcggctgaaccgactaaagagcgtattacgtgcgccacggggttttgcaccattgagatatttccggtcagcgtccgaaaccaggcacgaatag

SEQ ID NO: 18341 - DNA, 561 bp, Arabidopsis thaliana columbia
agaggtagagcgatagtagaatatacactgagatttcactcttcgtatgactgttagtcaaagactattgaccatcactagattggagattacaagttgtggaaaaaaaaaaaacagtttgacaaaccaagatttacaaagtgagatagaatctaacgaactagaacttaaaagtcaacgagataagaagagaagtccggaaccggagaagaagaaggacgaggtaaggagaaaccaccaatgtaaataacactccgatcatggggacgccggggaaggattccggagacaattttggcgagacagccgtgtactggccaagtagctcagcaaatatccgtattgcgaacattgtttagaaaaactaatcagaggaataatgtagagtatcaaaaagttcttgtggaaaaagtattcagggatcgctgaatattgggatgggtgattttttttgggtaatggatattgaagaaggtaagtagtagttataggatggatagggattataggcgatgtggcaggtcatgtgggtgtggactagagattcttgtgtgtgtgtgt

SEQ ID NO: 18342 - DNA, 964 bp, Arabidopsis thaliana
gttgttcccaattctaattgtggtgtactccttgcaaggatgtgctagcctagagagacctagcgtgaagtgcttgaacttgaactaaaattgatcagctggggctgacctatccagaaagcctttcttcctcaaatgctccatatcaatgtagttgactgtgacattgggagtatgaagagggactccagcagctatgagtatgggtgtgattactcctccagcacacaagcttcctccataaccggattggtggatgccggttgcatattccctgaagcttatcaaatgatcaatcaacaccactgaaagagatgtatcagccctatccccttccatctctatccccttccttgtgtgccccaaaatgaaacatagggtaagatcaagcatcttcagttctccctcattaacatggccggttgtcttcttcgggaagaaggcattcgcaatgcaaaggtggagatacctaagtaccggactccttatcgctgaacttttggccctagatgacttgtagggaagtgaaccagctattattaaccatagatcatggagctcgtccttgctgaaggtttggcggatcccatacttggtggggaacttgaatacagcatccaactacctaatcagaagagagtaatgagttccatacaccatgaatgtgatatagccaactcctttatgtagcaccttctctctctcatcggcataaaaatggagcttcaaggtggctaggaactggcagctctcttccttgaatccctcacacttgtaagtaaagaatgtctccagcttggccatctccatgagatattcaacatctttacatatccccaaagcttgcatggtaggtctatggggatatcttgtcccttcaaaactcatctccatgaggtactggtagtgctcttcaatggtaggctctttctttctccttgggttgttccttctccttggtgca

SEQ ID NO: 18343 - DNA, 654 bp, Arabidopsis thaliana columbia
cccatgctaaacgatttcgataagttcaccttaatagataggccaattcttattacacacctataaatcagtctcatcaaataatagttattatagcaatacctatggagggtatatctattatctggaataacgttgtaattaattactgtagaactagcattaagagcaactaaagatgaagaatcttacagttaacctagaaaggggaaatctactaaatgatatgaatccctagtgagaaaccctaaccctaacaagcatactactcagacatggcaattgaaacaaacaacatgattgagtgagaaagcataaacaaatcattaaagaaaagaattagaaaagatctcttcactgttattgaaaatctctgaataaatctctgaaaacaggggatgaatagcttggttgcagggaaacttgataaaaagcctgataggtctaaacaatgacctttaaaactatatataccacctaaaaacgtacatgcagggattattaatgaaaataggtaagtcttctgggcaaattaccaattcttcaaacttaaaagcgtgatgaacttctcggagccgcaactggtgtgtcgatcgacaccaagagtgtgtcgatcgacactctcgactggatctgaaagtgaatttgtccttt

SEQ ID NO: 18344 - DNA, 329 bp, Arabidopsis thaliana
tggttgccttgcagtacaagtaagttcagtttcctaagttttccgacttctgaaggtattggaccagacagttgattgttgctgaggtcaagcttcacaagattggtggagtgagagagctcatgaggtataacaccggagattctgttactctgcataaacagctctgacaaattccaagcgtatccgatcgcattaggtattggaccagacaaggagttctaagccaggtcgatgatggagacatgatgcagagacataactccttgaggtatagttctaacaaggcggttgctcgtagcacggaaccgtatgagggtcttgcagct

SEQ ID NO: 18345 - DNA, 471 bp, Arabidopsis thaliana
aaagacgctgcggctttatctgacggagaggtttcgaaacggatatccagtttcttatcgccagctatcggtgctaaacgccagttgttatctgccgccgggtgaatttcccccgcacgtttcgactcatcagcaatccacgctgccagcaccgagcggttctcatccggtgaagcaaaagcgatatggctgtcggccgtaccggcaaatttgccgccgtaagcgcgatagttattggtggcaaccaggaacatggcgttcggatcaatcggcttgccattaaaggtcaggttcttaatcctttccgcattggcattaatcatctggcactcgccgtcataacgggcgggctgggtaacatcaatctgataattcacaccatcaataacatcaaagttataagtgcggaaaccgatcccagttgatgagtgactgtggtttcgtgctgttgggatcaatctggttaaactg

SEQ ID NO: 18346 - DNA, 1265 bp, Arabidopsis thaliana
tcatgaggatccctgacaataaagtgtatatatagatgtttatgtttttttttactaaacaataaaaataaatagaagggaaattaattaatactatattgtaattgttctcttatatcactttaaaaaatgaaaaaaatatggtcacggttaaaaaaatgagtttataggaagaaatggtaaaatgttttttcaaaaactagttttatagattttagaaagaaattaaaaccaattttctaaaattgtaaatggatagttaagtaattaatttctacgaaaatataaaaccaatacactttaatttaaaactatactattcgtaaaagtgttatgtagtgtctcatttagctactctagatgaatttattttcttgttaatcgttttcagtaaccggtatataaataaaagtttcgtatgtgaaccactcggttctatggtgtagtggttagcactctggactttgaatccagcgacctgggttcgactcccggtaggacctttctttttaatttttatacttgaaaaggcccatttttgtacaatcctcatcaaacatctccattcgaagccaaagattatataacctgtggatattttaacaatcttagctacgacttttttggtaagaggaattctactttcaatagtaaagtggtaacaacgagaggtcttactaaagaagttatgaacatagcaccaaaatatacaaaagatctttcaagacaaagaaagaacaactcaaaagcttctaaggtttcacataaaccttaaaaaagctacttcgtttataatactaatctccatcaacatgatgtttatatatacaacataactattcctctgtcttaatgagcaggatgaggaaccgcattgtgtgcacgatgagcctgaaggatacaagcacagtgcacagttgttaagttcagacagccgctcatgacaagcgaatgccttcctgagcatgtgtgaagtgcgggaaatgaatcgcaaacagcttgaaccgctgaaggtgtaagggcagtgcattggctaatgttgagacttctcagtccttcttcatcgtatttacctttcttaaccgatttccacgatcccggtttgttctttaccccgctttgagctagcgagtacattgctctgtctgttatgtttctgcaatagtatagccccagtgacctcaagtggacacaccagtctgctagagctaccacactctcatctgcgaaatagtacaagacaaaccgaattgagtctcaagatc

SEQ ID NO: 18347 - DNA, 774 bp, Arabidopsis thaliana
gccaacaaacccggagttgctttgtgtttatgcaggcactggagttcaatgctttggaatgattcttgtcaccatgatctttgcttgtcttggctttttatctccttcaaaccgtggtggtcttatgacggctatgcttttgctttgggttttcatgggactattggcaggatacgcgtcttcacgcctctacaagacgttaagaggaaccgaatggaaaagaaacgctctgaaaaccgcattcatgtttcccgctaccgtctttgtcgccttctttgtccttaatgcgataatctggggacaaaaatcatccggtgcagtcccatttggtacaatgtttgctttggttgtcctctggtttggtatctctgttccacttgttttcatcggtggctacattggtttcagaaaacctgcaccggaagatccagtgaaaaccaacaagatcccgcggcagatcccaacacaggcctggtacatgaacccaatcttctccattttgattggaggcattctcccatttggcgcagtcttcatcgagctcttcttcatactcacctcaatatggctacatcagttctactacatattcggcttcctcttcatcgtcttcatcattttgatcatcacttgcgcagagatcacggtcgtcctctgttattttcagctgtgtagtgaagactatcaatggtggtggagatcttacttaacatcaggctcttccgcggtttacctctttctttacgcagtcttttacttctacaccaaacttga

SEQ ID NO: 18348 - DNA, 497 bp, Arabidopsis thaliana columbia
gccagaatccggcgaccggaactccacaccgatcagccactcctatagcccacgaagccagcaaatcaaccacaacacaagccacatccaagtcttcttctagtaggagccgttcgagctgtggtggcatgatgttctccattgagttctctatcgagaagaagtccgagggaggtgcgtccggacgatcttgaccgtcagataaggccaagaacgtgatcccaagatcctcgttagtagccgagatcctacggtggatagactcgggagtcataacgacaggggagaatccacggctgaggaaagccgatgcaaggtgaagcatcggagtgacgtggccttgcgcggataagggatgaatattatctttggcttttgtgttactttcatatcttggtatttctcttcctatatttttgagttttcgtaattgatagttgcttatgttaattatgtgagatcgagtgattatataacgaggaagatgacagactaca

SEQ ID NO: 18349 - DNA, 449 bp, Arabidopsis thaliana columbia
cgttcgtccgacgagctctgctttagtaacatccattcccggacgatataagcttgactgagaacagaatccggcgatgtcggagtcactaatcggagctccggcactttcaaaagcgtcgagaattttccgatcgtctcgattcagtacaagcaaagatccaggagaaatatctagagattcatcaccatcaccgaggaataaaaagctttgatccgctctttgaatttttaaaccatcaaatccggctaatgtagtatcagcacggaggttaccgtcgcgtttccagatcttgtaagtatcagagggagcgatttttccgacgaacggaatcacagagctctcgaaatgaaaagagatctccatgtaaaaatctctcatacgacggagaacagctatcaaacgaggtaatctcctgcgccatttacaccaagctaaacggtggtgat

SEQ ID NO: 18350 - DNA, 639 bp, Arabidopsis thaliana columbia
acagttactacccaaccagttcttgaacatgtcggaatatcaacgtggccaggtattgtttgtattttctcaatagtcacggttttggaatgtgtactcactgttgccacaatactattcaggtcgcttaatcctgacagaccattccctatattttgaggccttaaaggtcgtgtcttatgacacaccaaagcgatatcacctatctgaagatctaaagcaaataattaaacctgagttaactggtccttggggcactcggcttttcgacaaggccgtttcttaccagtctatatctctgtaaggccgtgtctttttgcatttaatcgattgtaaatttgtaatctcttgtacatgctctttttgttttgtgcatggtcagttaacagcttttaatggctatctgttgtagatcagaaccagtggtaatggaattcccagagcttaaaggccacacacgccgtgattactggatcaatccgatacatgaggtcttatatctgcatagtcccctcagcttgtacaagagcaccgggttggtaagacacgctgcactgtcactggctgcccttggcggtatgcgtggccaagctcttcgagaactcaatctgacaatcgctgtgcggtacgataatcttc

SEQ ID NO: 18351 - DNA, 929 bp, Arabidopsis thaliana
cagatgcaagaacaggttctgagctttcatgcgcaagagaatgatgtgtggaagtttcagcttcttggtgttgagactcaggatcccaaaattggtgttcatgatgaccatgaccagagtatctaggagaaggagaacttgggtaattttcaacgctccggttattgaaattgtgaaggagatggattggagatgagccatgtgttggtgtggttggacggctagagaaaggtgtgttggatcccgagtgtcttccgtgtttcgtctcgttctttgcagtgtgatgccacttctttaatgccgtcgctactctatcgttgaatactgttggcttcattttactacccatctgcacacaattttcattcaacacaatgtaaaaaaaactaaagatcatataaccaaaatctggcatccatgtaacactaatgttttctagtacctgagtaacaagtgcatagagtggaagagtcacatagctgcaaagtatctgcacaacagctctgcaagatttataaaaagggggattatactttttcagttaaaggacaaattctcagaagaatcaatagtcaagataatgttagcttacccaactacaagtctaatgaccacatctgcagtgctttcatggaaacaattattgagattgaattcatactgcaaatacagaaaatttatgacataacaattagtatagcccgtaacagcgatgttttcaaagaaaatgaaatggctcgcttaccgtactccaggcaaagaatgcaagttgaaatgcattctgcaaagataagaaaatttattctaccgttaggagaaaaaacccgaaaaagatcgaaaaaacgagcggtgaaggatacaagtattgtaccgtaaaaaggaccaagtgaataaggaaaagaatgaagcgtggcttgcaaaccagaaga

SEQ ID NO: 18352 - DNA, 573 bp, Arabidopsis thaliana columbia
tcgactctatgcgggccgccagtgtgctctaaagcatcgctatctggttgaaaactttgccgtgcgcgcgaactggtaaccgtttcggaaaccctgcaacagatccttgagaaccacgattatccgcagcccgttaaaaacgtgctggcagaactgctggttgcgaccagcctgttaaccgctacgctgaagtttgatggtgatatcaccgtacagctgcagggcgacggtccgatgaatctggcggttattaacggtaacaataaccagcagatgcgcggtgtggccgcgtgcagggcgaaattccagaaaatgccgacctgaaaacgctggtcggcaatggttacgtggtgatcaccattaccccgagcgaagcgaacgctatcagggcgtagttggtctggaaggtgatacctggcggcctgcctggaagattactttatgcgttctgaacagctgccgacgcgcctgtttattcgcaccggcgacgtagacggcaaaccggctgcaggcggtatgttgttgcaggtaatcctgcgcaaaatgcccacaggacgactttgaccactggcg

SEQ ID NO: 18353 - DNA, 502 bp, Arabidopsis thaliana columbia
gatgcttttctttgtgatgtttttaaaatgctttcttttcagtttttttctttcttaactataaatcttgatgcaatgcctaccttcttagaacataagatcttctttaaaatccaaaatcgtaggccactatttcattatacttatgtgagatatgtgatacagatacatctatatacaaattaaacacgaaaccatacgttgcacggtgtgatcacacacgcacacacatagaaacataaacacgcaataatttctatacagtgtaatttcatttttaacttacttcgttttttttggtgaagattcttgagagaaaagaaatcgaagatggcaacaaaatccaccgggagtacctgagaaaaccaaggtcgatagatgtgaaggagaaactaatcaacgtgttgatcgtcgatgatgatccattaaaccgtagactccacgagatgatcatcaaaacgatcggaggaatttctcagactgcaaagaatggcgaggaggc

SEQ ID NO: 18354 - DNA, 1035 bp, Arabidopsis thaliana
ctacaacactcatcaatcaggcaattaaccagaggaatatagatcatgattcctaactaaactaaaggaaaccttttttttttttttttctttttgaaagaaaataaaagaaataaccaaaataactgcaaaataagaaacaaaaataaaagcatcattagtacgaacctcccccagacttaaacgatagtgtctccagtggcattcaaatccagagaaagcaggaaaataaaatcaaaaataaaagaaaagaaaagaaaaggaaaagaaaaatctaaccaacgggttgcctcccactaagcgcttgttttgagtcaatagcttgacttggcggagttcaggatgtgggtggagtggtggtggaggattgatgctgcctcctagccttccaaggcggtgcgtaaatggatctggttggagccgcttctcttgtcgatcgacactcaggggtgtgtcgatcgacactcttctcgtcacctacaaaaacaacaggagaaacaagctttcgaggaactctaggtttgttatcttgtgaagcagtcttcgattaatccaaagaagtaatcaaagataaaataggagaagagatagaagagaacttatcacataggtcctcaagtggtgtgggctggagagagtgtgtagaatcatctgtctgtgaaacccgagggtgtcgattgacaggggtagtggtgtcggtcgacacggtgctcttcaactctcattggtgagttgaacgtgttggagcattgtgtgtggctttgtggtgggattatgatctgtctgaggaggtatgtctgtgctggaacaatgcaattgataggtttagtaagctctgaaccatccatgccaaactccatctccaaatcacaaaccttgagagagattctcctctcttcacatcaaacctcgcaccagttatagctaggaatgcttttccaaggataaggggatctttgggttccttctcgtagtccaggaccacaaaatcagaagggatacagagttacaaccttaacaggaacacttaaagga

SEQ ID NO: 18355 - DNA, 573 bp, Arabidopsis thaliana columbia
taacacaaacatctgaatgattcagatatctgatgtgaatcgttaacttttcttcttccatcttaggtgagtctcaaagatggaactgtgaagggctttgatacacgtgcttctgatttatcaccaagtttcattatccatgctcatgatagtgaagtctcctccatatcatacaacatacatgccaccaatgtacacacatatatctctctttctctcttgtctcctaccatattcatagtgtagtcgtttaatatccgagctgtgcagcttttggctacgggatctgcggatgaaagtgtgaaactttgggatctttcaaacaaccaaccatcatggattgctacaaacaagccaaatgctgtaagagccatgaataagaacttttgctgccatatgtttgtttctggtttctttgtttccattccaaactttgatatatcaaacagggagaagttttctcggtctcattctcagcggactgcccttcttactcgctgttggtggctcagaggggctaaatgtaagtagggattttgatggtacaagaaatacaaattctgtttttgagat

SEQ ID NO: 18356 - DNA, 546 bp, Arabidopsis thaliana columbia
  unsure (1)..(546): unsure at all n locations
gttgtgccctcgagtcagctgttttctggtaggctcttacaggaagagatgtcaactatcaaaagctacttgagggagtacagatcttcttgnggtggttacaggttgttccataatggcagatacttggaccaacacagagggcaagaaaatgatcagtttcttggtctcgtgtctcgtggtgtctacttccactcctcgattgatgccactgatatagtagaagatgctttaagccttttcaagtgtctagacaaactagttgacgacattggcgaggaaaatgtggtgcaggttattacacagaacactgctatctttagaagtgctggaaaattacttgaagagaagagaaagaatttgtattggactccttgtgcaatacattgcacagaactggttcttgaagacttctcaaagctagaatttgtctccgagtgcttagagaaagcccaaagaatcacaagattcatttacaatcaaacatggctgcttaatcttatgaagaacgaattcacacagggactagatcttcttagaccagca

SEQ ID NO: 18357 - DNA, 509 bp, Arabidopsis thaliana columbia
gggcagttccaacactctgctcaatatgttgatcttacatttgccaacaaaaggaaaggaagattaaaaatggtaaaatttatccatggaagttaagttaaagcggatcacaggaacaagaatggcgtggtggatgctgatgcgacatactcacaccgctaacgctactcttagaggccataacttcatctagcgacaacctctgcctctcagatcgctggcgcggtgcgtagtgtgaacgcacttttgccttaaaggacttagttttctccatgtagccaggagtactcacactgctttcatagtcacacaaagcctttccaccaacactcttagctggagactgcattacataatagcgattattagcagaatggtgatgcaataatctcggcgtgttctgcgcggtagaaacttccacttctcatccgagaaacacaactccaaatcattccctttgtaaacaaaatcgccttcatagtcagacattgaaacaacattgtgcactt

SEQ ID NO: 18358 - DNA, 569 bp, Arabidopsis thaliana columbia
tgcactgatcctaagttctggtggaatcgcaaacagctaagctctaaagagaagacactgtacctaaacgcaaggaagacgtacctggattatgactattgttctgacagacagcgatatccaaaggtgcctcaagaatgtggaagttacacttagagaaagatcaatacctgtcacagggttaagcctacaaaacaattatcttgaaaaaataacttatgttactgtaagatgctttatgataagccttttctatcaaataacaacattattgtcatcaatgctagatacattactatgtcacgagttcatatacagatacctatttacacagaaccaagttggttcagatcgggtttgcttgaggtttacaagcactgaaacctctgaaaagaaccttacaggttacaagactgcattttctcagacatcaagataagtcaaatatgagaaaaaatcggaaagaagcatacaatagaaactgcacattagattatatatagttaggctaagtcgcagcaatgatggttttgctcaataacatatacgttaacagagagaacaagagt

SEQ ID NO: 18359 - DNA, 488 bp, Arabidopsis thaliana columbia
tgtatcgattggtacaaaaataaacatgagttttagttaagtcaagttcgtaggaatgatggaaattttacgtgtaagcaaacagtggactaaccctggataatatggcgtgggaagcaagaaagcgtcaccgggatctgcaagacaaaacattagagtctcgtttgcggaagtggctccagcagtgagcacaaggttgtttgaatcaaaagaaactcgatttcctctattttctgacatgaaatcagcaaaggcctgaaaatcattcgagcaagatcagcaacctacaaataaatttgataaatacaattaataatcttacatttttgaaggaagagaggccatggtagtcttgaaagagagcgagttccggaaaacagactggccatctctcttgaaacaggctgcgtctgtgttttgtgcaagccatgactctagtagatcaaagcatagctacagaaatccaataaaattaaacatactttaaa

SEQ ID NO: 18360 - DNA, 552 bp, Arabidopsis thaliana columbia
tgagttatctatacagattcttgctaggcttcctagaatttgttactcgagtgttcggttggtttctcggaggtggagatcggctgtttcgacttctgaggtgtatagtttgaggaaagaacttgggaggactgaggagtggctctatgtgttgactaaaggtcatgaggataagcttttgtggtatgctttagatcctgtgtctactaaatggcagagattgcctccaatgccggttgttgtttatgaagaagagtctagaaagagtttatctggtttgtggaatatgattacaccgagctttaatgttggtgcgattgtgaggagctttctaggtaggagggactcctctgagcaaatgccgttttgtgggtgcgctattggtgctgttgatgggggtctttatgttattggtggactttctaggtctaaaacagtgagctgtgtttggcggtttgatccgattttgaactcttggagtgaagttagttctatgttggcgagtcgggcttattcaaaacaggtgtattgaataagaaccatatgttgttg

SEQ ID NO: 18361 - DNA, 583 bp, Arabidopsis thaliana columbia
tgagacgctctcgggtcctcctttgattgagatccaaaaaaatgaggaagaggaagagagaatcagtgttgaggttaagaagtttcaaaatccagggggtgttgagattcagtcaggagctcagaaaagtccaatgaagaccgggaaaagcccgtttctctctcatgttctatctaatggaggagggggaggaggagaaaacaaagggattacgatcgatagccttcataagctgaatcctaagaatgtttccgcatggaaaatgaagaggctgatgaatataatccggaatggatcacttaccactttggatgaacagcttcaggatccaagcttggatgatgataaaggaaaccaaattagaagtgagtttgaggcaaagctcgctgcaagaaagatctttcataatgttgctaagccaggatcaaagtaaagaaaatcacttttttctttatacaaaggctttacaatagtattgcattatagatactaaccagtagcaattgcttattttctcatttaggttcatctatgcaaacgacataatgcggtttctgccagatgacgaagcttttgaagactt

SEQ ID NO: 18362 - DNA, 475 bp, Arabidopsis thaliana columbia
aatatgagaaaagaatttttaaaaaatatttgtgatagtaactttttttgtgctagtaactttgaaaagtacagaggtgtttattctttataaaagtttttgatgtcaaatttatggttttctctagaaatatgatttttgattatacatcatccacatatcattcaacgatttgaatgacttgggatggtattttttttaatatgatcatgagaattgataagattataagtttttttttgttttttttgggtatttgtgtagatactggtgttatgagtggagcgatggtgtttatagaagaagatttgaagacaaacgacgttcaaatagaagttctcactggaattctcaacctttgtgcccttgtcggatcattgctcgccggaagaacgtcggacataatcggacggcgttacacaatcgtcttggcctcaatactattcatgttaggctcaatattgatgggttgggg

SEQ ID NO: 18363 - DNA, 487 bp, Arabidopsis thaliana columbia
tgcagatgcatgcattctcactcggctgaacaatgttaaacgctgatcagccgtacatgtctcgaatatcttctgcaccacatagtttccatactggtccttcatcatcatctgttaaaggtggattacagttaatatccaatctaatcagttcaagcagaaaatgtatcaggtttggtccataaggtctcaccaatagactattatagctctcgtcaggccctgcaatctctttgatgatgagatcccgctcaactcgaccaccatactccagacacttctctattacatttgacgcaaatttgtggaggctaagttgcacgatgtgccctgagagttttccccaatcctctccctttcttcagatgtccctttctccaagacatgctgccaaataccaacatcggttattactggttagtccgtttattttgacttcagttgtagatgatttgtaagttttaaatggcatgacatacctgtgtga

SEQ ID NO: 18364 - DNA, 532 bp, Arabidopsis thaliana columbia
  unsure (1)..(532): unsure at all n locations
cagtgtgctctaaaggcgtaatatccatcgacagcatgacgcggttcagcaacccacggtcgcgtagctactgaagcatcgcaatacgcttttcgtccgggtagtaactgttcttgccgatggtgtcgaactgcacgtacgcgccgagatcgatcatcttcaaaaatgttgtcgaggttgtctttcagatcgcagtgaccaacggtgacgcgcgaaagatcaaccccgtgggcttgtagcaacgccagttgctccagccccatcgtgctgaacgacgtatgcgtggagatcgggcgtccggtctggttatgcgccacgcaggtcnatataaataccttctcttccagcggcgtaatctttccttcgctggtgccgatctccgcgatgatcccggctttcagctccgtgccatcgataccctgttcaatttcatcgaccatctcctgcgccagttcctgcacgctgcgggtcgcacatgttccgggaaaaacgcgtcctggtaataaccggtacaggcaccacgttgatcccg

SEQ ID NO: 18365 - DNA, 478 bp, Arabidopsis thaliana columbia
cacgttgaagcccaaaacaatcattgtcataattgtcataagacagagccttgttgctgcgagaagatgacatcatttcagaaaaggcttgtagagaccaaccttcagatggtccagactgagacgaatcatatctcgtaggagttccctgcctctcttcagttgctgagcttctacttagtgagttctgaccatagatttgaccatctgagacttgctttgatagacgagggtgctgtgtcagtttaagtgtagatgaacttgcagggtgcaagtagctttgggacgaaagtggtgacgtagggaaagatgatggttgtgaagctagtgaaagagacaactgtgcaggagatagatatgatggtgctgcagactctgttgaaacattttctttctgtaagatacataaaagatgcgaaagagacgttaggcatcgacaatatgagagactcagctactgatgaaacaagcattacct

SEQ ID NO: 18366 - DNA, 890 bp, Arabidopsis thaliana
tataaatatacaagacaacacatgatgctgatgcaatatacacaacaaagtattaaatcttagatattgtgggtctccctttcttctattcattttcttattcattaaaaaaaaaaaatggatactctctttagactagtcagtctccaacaacaacaacaatccgatagtatcattacaaatcaatcttcgttaagcagaacttccaccaccactactggctctccacaaactgcttatcactacaactttccacaaaacgacgtcgtcgaagaatgcttcaactttttcatggatgaagaagacctttcctcttcttcttctcaccacaaccatcacaaccacaacaatcctaatacttactactctcctttcactactcccacccaataccatcccgccacatcatcaaccccttcctccaccgccgcagccgcagctttagcctcgccttactcctcctccggccaccataatgacccttccgcgttctccatacctcaaactcctccgtccttcgacttctcagccaatgccaagtgggcagactcggtccttcttgaagcggcacgtgccttctccgacaaagacactgcacgtgcgcaacaaatcctatggacgctcaacgagctctcttctccgtacggagacaccgagcaaaaactggcttcttacttcctccaagctctcttcaaccgcatgaccggttcaggcgaacgatgctaccgaaccatggtaacagctgcagccacagagaagacttgctccttcgagtcaacgcgaaaaactgtactaaagttccaagaagttagcccctgggccacgtttggacacgtggcggcaaacggagcaatcttggaagcagtagacggagaggcaaagatccacat

SEQ ID NO: 18367 - DNA, 857 bp, Arabidopsis thaliana
ttcttgccgccagtagtcgttggaagccctgtaataaaattcattgttatcatatcccatttccactcttgtagaggtaaattctagagtaaaccactcagaaccttattctctatttttacttactgacaagtctgacacttcgatacccaagcagccacatcaaggtttcatattattccaattgtaataccgctttagatcgtggtacatactagtcgtcctagggtgaactaagaaccgcgaactatgagccgttgccaagatcgcatcccttagacccttatcacctggcacccgaactcggcttttatacatgaacataccattctccacagtgtggaatccctcaactttgttttccatcgcctttttcaaatcggcatcaaatttttgtgcttcctggattctccacaataagtctgcctgattcacatcttctaatccaacaacgtcttcttaagctgaggtcgcacaaataatcagagaaaatatgtgtcttctagatctcgtatctctttctcactagagacatcacttctacgcctactcaaggtatcatcaaactgattagcctttcctggacggtaggcaatatccaagtcataatttgctaacaattccatccatctcctctacctgagattaaggtctgattgagtgaagatatacctcagacttttatggtctgtaaataattgaaccttcttctcatcgaggtatgctcgcaaaatctttaaagcaaagactacagctgctaactctaaatcattagtaggataattaacctcgtgtcgtctcagctgtctcgacgcagaagcgataaccctctcaccttgcatcaacacacaccctaa

SEQ ID NO: 18368 - DNA, 580 bp, Arabidopsis thaliana
gttgtgtaggtacattgcttggattttagttgcagctttgtaccatctcccaagttttcagtcaatgggtttggatttgaggatgaatttgtccttgtttctaacaatttacatatcatccatagttttcctacttgtcttccacattatttttcttgggctttggtatattggtcttgtttctcgtgtggctggaagacgcccagagatcttaaccattcttcaaagttgtgctgtaagtatgctatccccaatcttgtagatcaaggttacttgctcaaaaacattattcttaaagaaaaatcaaatttcagtgtcctttatcttgtgtaggttcttagcatatcgtgctgtattttctacagccattgtggtaatcgtgcttttcagagacaaacacccctctgagaaaaggcattctagccgtttttcattatggaaaggagaagatggcaacagtacttggcttgcgaaatttactcacattgatgagctaagagaccaagtctgcgtcacatggtttgctcctgttggatctgcacgtgattaccattattgccaaatgggtcactatggggag

SEQ ID NO: 18369 - DNA, 255 bp, Arabidopsis thaliana
tgctctaaagagtggcaaaccgacatcctggcaggtgaatggcgaatcgctgctgactcgcgagccaaagatcaacttcttcaagccgatgatcgacaaccacaagcaggagtacgaagggctgtggcaaccgaatcatttgcagatcatgcaggaacatctgcgcgactttgccgtagaacagagcgatggtgaagtgctgatcatcagccgcacagttattgccccgccggtgtttgacttcgggatgcgctg

SEQ ID NO: 18370 - DNA, 543 bp, Arabidopsis thaliana columbia
atacacacaaaatcactagaaaaatcaataaaaaacaaactaacagtacttatcataactctctttagccatgaatagaagcaaagtgattaatcaaagctaaagcattacttgttaaatgagcaataaccaaaatcctccctctaaccaaaaccttaaccttcccgtccatatcttctccttcaaatccgtcagtacatgtgttcacatctgtcaaagccgcactgacccaagtctgtatatcgcttatgtaaacttcatagttcgagccacttagctgacacatctcaccaatcgatttcctaagctcctccaacgtgtcacctaactcctcgacgcagtctctcatggccgagacttctttaggcttgagccgactattcgagagacgcaccatcattgctgaagttactttagccgaggctaatgtgatgttgagagccgcatgagccatgagcttggggcttgtttggatgagactagcatgagttgagagtgaagagaaacagagtcttgggtacgttgtgaaagtgcatgatgatt

SEQ ID NO: 18371 - DNA, 507 bp, Arabidopsis thaliana
  unsure (1)..(507): unsure at all n locations
tnnnnnnnnnnnnnnnnnnnnnnnctaaaggcattgatgccgaagaaaaagtttaccagatggtgccgccaggtgcgcggaatactgaaatggtgggggaataagccatgcaaaacacaactcatgacaacgtaattctggagctcaccgttcgcaaccatccgggcgtaatgacccacgtttgtggcctttttgcccgccgcgcttttaacgttgaaggcattctttgtctgccgattcaggacagcgacaaaagccatatctggctactggtcaatgacgaccagcgtctggagcagatgataagccaaatcgataagctggaagatgtcgtgaaagtgcagcgtaatcagtccgatccgacgatgtttaacaagatcgcggtgttttttcagtaaccgctcaaggcttgaacaacatcgcgcttatcgttaaggtaagcgcgtattttttttacccgccaggacaagaccatgatcacggttgccttatagacgatcactcatc

SEQ ID NO: 18372 - DNA, 444 bp, Arabidopsis thaliana
gccagtgtgctctaaaggttctggaccaactcattaattcgtatctacgggctgaaaattttcctcagcaccaaaggctatctcaacgagtttttgctctggctgggcgttatcgacacaccaatccgtatcatgttcacgcccagtgcggtgattatcggtctggtttacattctgctgccgtttatggtgatgccgctgtactccagtatcgaaaaactggataagccgttgcttgaggcggcgcgcgatctcggtgccagcaagttacagacttttatccgtatcattattccactgacgatgccgggaattattgccggatgtctgctggtgatgcttccagcgatgggcctgttctatgtatccgacctgatgggctgtgcgaaaaacctgctgatcggtaacgtcagcaaggtccagttcctttatattcgtgactgg

SEQ ID NO: 18373 - DNA, 485 bp, Arabidopsis thaliana
cgcaccaaacaatttcagattatcgaagacaccgattgttatcaccgtgtaaggatcatagacttcccaagtatactgctcattccactttggatcgaaagtgtccacaatggtcctcgttctcacccattttgttccgtatttcgccacacaatacgcatcggtagttcctcggccacctcttgacttcatcggcattaaacccgtagcatttaaaactcctagctccaacacaccaataggtggagtccatagaagcttagctgaagctctgtaatcgctgctatactgaatcgactcatcaagaacgtgataacctccgtctaaagaaacccgcaaatgaatcctcccagcaaatctcctcccttctccggtctcaccaatgtgttcaacgttgtaccacaatgacggcaccggaccaggaagcacccttctctcaacctgagataactttatctcacaccttcctaaacactcttctctcg

SEQ ID NO: 18374 - DNA, 1020 bp, Arabidopsis thaliana
gattcctacacgtatcccaccggatagtccattggctccacaatgggataggttagaagatagaaatgcgaacagatttggagaagaggttatggtatctgtatggatggggacacaagccgatgaagtttgccctgaggcttggcattcggattcggctacagtgactggagaaaacgcggtgattgtgcggtctaaagtgtatctatctccgaggttatggtatttgcgagtcaatgttatagaggctcaagttttggttctgttgcaaggaaacagaacaaatccggaggttttagtaaaagggtttgtaggaaatgttgttgtgaggagtcgggtttcgcagagtcgaacaatgagtccagttttggaacgaggatatgatgtttgttgcggttgagccgtttgaagatagtttgttacttagcttggaaaataaggtaggtcaaaaagaagagtgtttaggtctatgtgagataaagttgtctcaggttgagagacgggtattgccgggacctgtaccggctctatggtataacctggagcgcgttggggactcgggattcgcagggaggattcatttgcgggtttcattggacggaggataccatgtgcttgatgagtcgattcagtatagcagtgactacagagcttctgctaagcttctatggactccaactattggtgtattggtgctcggagtcatcagtgcatctggttcgattccgatgaagtcccgagatggtcgaggcaccaccgatgcatattgcgtggcgaaatatgggcaaaaatgggtgagaacaaggacgattgtagatagtttaagcccaaaatggagcgagcagtatacttgggaggtttatgatccttataccgtaataaccgttgccgtgttcgacaatctacatctataagtacctggaaactcaaatggtgaaaaagactcgagaattggtaaaatcaggatacgtttgtccacactcgaaacggagaggatctacacgcattcgtatccgctca

SEQ ID NO: 18375 - DNA, 724 bp, Arabidopsis thaliana
gagtggctcgtttggaatggaaccggcgctaccttgcagttctaggagttgagaacgatagactctattcaattagactccaaacacccgagaaagttttcctggaagaagaaaaagatctaagaagagtcatggattcgtttagggtcgagaagatttagaagagctcacattctcaatgtgaatttcttcttattccaaaccaaaaaatcttgttgcttactacttttgattaccaaactaataaatgattttgattcaaattttgagatgtcattatgacatagttgagaaatattgtgcactaccaaaaagaagagtaaaccagtcgtaaattgaaatgaaccggttaaccaaaattgagaaattattaccggttatgtaagctcttcgttttttggtttaaggccttgacttgacaaaagccctcaccggaaaaaagaagtagaagacgacgacgatggcgggatttgagagctatgtggttgttcacaacatagcaaagcgtcacaacgtcggaactttagctcgtagcgccactgcctttggtgtgacggagctaatcctcgtcggtcgccgtgatttcaacgccttcggtagtcatggttcagcttctcacatccgtttccgccattttcactctctcatcgaagctcgcaactatctcaaggtcttaatttcactctgaattacacaaagtttggaactttctttatgggtctta

SEQ ID NO: 18376 - DNA, 597 bp, Arabidopsis thaliana
tactgggaagatgttctgttggatgcacaaatcaaggcggatccatctgttcttcctaaagagcacacaatcttacagacttggaataacggtccggagaacacaaagagaatcgtagctgctggttacagagtaattgtctcttcatcagagttctactacttagactgtggtcacggcgggtttctagggaatgatagtatatatgatcagaaagaaagcggtggcgggtcttggtgtgcaccatttaagacgtggcagagcatatacaactatgatatagctgatggtttgctcaatgaggaagagaggaagctggtgctaggaggagaggttgcattgtggtcagagcaagctgactcgacggttttagactcacgtctttggccacgtgcctctgcgttggcggagagcttgtggtcagggaatagagacgagagaggtgttaagagatgtggtgaagccgtggaccgtttaaacctgtggaggtataggatggtgtaagagagggattggagctgaacctatccaaccactgtggtgtttgaagaatcctggaatgtgtaatacagtccatggtgcgcttcaagatctata

SEQ ID NO: 18377 - DNA, 583 bp, Arabidopsis thaliana
  unsure (1)..(583): unsure at all n locations
tctagtcagtgtgctctaaagaaccatattgccgataaaatatcctggaggaccaaccagctgcgggacgataaaatcgcccagtgtgagtgagaaggtaaagatagagccagcgcaaatacccgggattgccagcggagcaccacatagcgaaaggtttgtcgtggacgtgcgccgagatcagccgacgcctgcaacaatgacggcggcaaacgctcaagcgccgcctgaacgggcaggatcatgaacggcaaccagatatagagaaacaccagaaagcgccccagcccggaagttgacagcgtatttccgcccaccgcaggtagatgtaaggaacgcagtcagcagtggttccagcccaagatgttgtaaaaaccactgagccacgccatcttttgccagcaataacgtccaggcataggctttaacaatgtagctcgcccacatcggcaacattaccgcaatataaaaaaacgctttcattttcccgctggtatagcgcgccatataccacgccattggaaaagccagaatgcgcntggcgatagtgactgcacagccatagtcagcgtgcggagaatga

SEQ ID NO: 18378 - DNA, 1147 bp, Arabidopsis thaliana
attgctgcgcactgtccttctctggtattacgcccctcgcttcgcgaactgccggtatcaccagccagccgctgctggcgtggacaaagctggtcgctcccggtgcagacgctggtgtcatcacctcgttgacgtttattccggcaattttactgatgatgaccagtttcacccgcatcatcattgtttttggtttattggtaacgcgctgggaacaccctccgcgccacctaaccaggtattgctggggctggcactgtttttgaccttttttattatgtcaccggtgatcgacaaaatttatgtagatgcgtaccagccattcagcgaagagaaaatatcaatgcaggaggcgctggaaaaaggggcgcagccgctgcgtgagtttatgctgcgtcagacccgtgaggcagatttagggttgtttgccagactggcgaataccggcccgttgcagggacctgaagccgtgccgatgcgcattttgctcccggcctacgtgaccagcgagttgaaaaccgcatttcagataggcttcacgattttcatcccttttttgattatcgacctggtgatagccagcgtgttgatggcattggggatgatgatggttccccagccaccattgctctgccctttaaactgatgctgtttgtactggtggatggctggcaattgctggtcggttcgctggcgcagagcttttacagctagagaggcaaaatgacacctgaatcggtcatgatgatggggactgaagcgatgaaagtcgcgctggcactggctgccccgctattgttggtagcgttggtcacgggccttatcatcagtattttgcaggccgccacgcagattaacgaaatgacgctgtcgtttattccgaaaatcatcgccgtatttatcgccattattattgccggaccgtggatgctcaatctgttgctggattacgtccgcaccttgttcactaacctgccgtatatcatcgggtagccgtactatgttgcaggtgacaagcgaacaatggctatcctggttaaacctgtacttctggccgttactgcgcgtgctggcgctgatctccaccgcgccgattctgagcgaacgcagcgtaccgaaacgggtaaaactgggtctggcaatgatg

SEQ ID NO: 18379 - DNA, 1262 bp, Arabidopsis thaliana
atcacataatgcatccaatagaattctataaaccacaatgtcctcacctgaacctttctgtgagatcctccagaacattgaatacaacaggtgagtggcttcctcaagtttcccctctagacaaaaccccttcatcaaaatcctgtaactgtctctgtccggataacaaccctggtaattcatctcttgaaaaacctgagacgcaaggtcagagcgattgacctggcaaagaaccttcataagcaaattcagagccgttattcgagaattcacctcccaaccataacaatactttctgaagatatgacaagcagcttcgagctcggattctttaaccatctcctgtaaaagagtatcgaaagatagactccaattcacacaattgaactcatgaaggctcttgaagagagaaatagcatcttccagccttccagctctggagaatgtacgaataaccgatgcaaaaaccgaatctttacattcacaagaatcttccttcattctctcaatgacatatttcatttccaacacacggttagatttaccgagaatgtcaatcatggtagcatacaccgagccattgtgaccgtaactcggaaacctctctttcgcttcctcaaaaagcttaagtgctgtcactggattcttctgcttctttaggatttgagaaagaagacttggcgttagaactcttggccatctaacaacactcatgataactcagaaatctcttcaggtcacatcaaggaatcagatttcctgcacaatcaatctcgcctcgtcagcttaaagatgataagaacacgagtcaacagtctaaaccctagaaaccaaaatcatttcaaattaaacaaatttcgccatctaacttttcaaagttgtgatttttcaataacctggagatttcagtatcggattttaggggtctcttcttcaagttcagtctcgtaaaggcagagactttggaagaggttgtgataattgtttcgtagtacggtaaataaagaaactttccatttttgccccataactttcaactattcatacaaaataccccgcatacttcaggatttgagaattacaacccacaactacaaagcaaagtatgtatacaacaatcaaaagagcctgatcaagagcatgtttatgctttctttgactcggatccaatttcgaaactatctgtttttattgatcttgaagagcaccatggactgtattcacattccaggattcttcaaacaccacaatggttggatagg

SEQ ID NO: 18380 - DNA, 547 bp, Arabidopsis thaliana
tgaagactctggactaccttatatacaggaccaaaacctccttcaccgagcttgttttcatcggagaagtcatctgttgccgatactacactttcaaagctaaaaatctgaagctcgttattactcttcctttcatttctcttgtgtatgcagctcctatcaattcccaattcacgtagtagcatttcttggtctattgttgaaccaaaccttagtgataaaattctcctccgtatgaaaccaatcactaacatattaatagcaaatattacattaatagacatgcttttacaaatattattcagctaaatctcaggtacgtacgtacgttgaggagtgagctctctccatagaaagtagtatattccacgaaataaaacacgtcctggatcataaaaagaaagaaagagggtgaacttgttagtaagaaaaccattgagactaaaactgttttgtgagtaattctgatacaatttctacgttttacattaaatttcctcaacacgagatagattataaccaaattataggtgcatgaggacagtgt

SEQ ID NO: 18381 - DNA, 529 bp, Arabidopsis thaliana
tcacagcctgtttacaatcaggaacacacatcaataagcaaacttattgatttctacaatatgtttcaattcagacaatgatttaaaccttcttagccttctcttctttgtcatctttgcgtttgtccttatcagaaccctgggaaataggtcaaaggaaaggtttagaatcattgacgcaagttaatagacgacaatgaagaaatgatacatgatatgtcttaccagcttgatgaagatttcatcattagacttcttgtttgacagttgttgcattgattcaaacactttcgtatcaactttcctctcagaggtagttaatgattgaagtgcctttttcttctcctcgagtattttctcatactcatcaagagtcatttcctgtagaaacacaagtcaataaacaataagtgaaaataaaaaaaactgataccagtatagtaaagaggagcctagcatttctattctattctctgtttacgttatcctcaggctctttctcctcaacaacagtatcctccttgttagc

SEQ ID NO: 18382 - DNA, 639 bp, Arabidopsis thaliana
cttgcataagtgaagctgctagttgcctcatcttaaggagtttccgccatatccacgatcccacactactctcccaaacactctaatacacattttgacgacaccatgctacccaaagtgatacagatagtgtgaaaagtctctagatgagactgagcgcaaaaacacaagacgagtcttgcatcctttggtttacacacttcctcccaagtaactttcgtttttgtgtcatcggttgtgtgaccataagaaaacattgcacaaactaccaatgatttcaaagcaacgcttcgggtaaccgaaaaatagaacaccaaatttttataatgctcatgatgagggattatgatataaccctattattaatgtttttggctatgttttagatacaagttttagagtctttttgttatttctagtccttttagagtcttttcaagtattctatgtattgagacaagaatggagataaggagatattttggagcaaaaactgaagaaaccaagtcaaaggacgaattcactttcagatcaagtcgagagtgtcgatcgagacactcttgctatcgattgacactagttgcggtcagaaaagtccaagatggtttagagtttgaagaaaggaaattgccccagatt

SEQ ID NO: 18383 - DNA, 718 bp, Arabidopsis thaliana
tcgactcatcccctgacctgccagtgtgctctaaaggctgatcaagcaaggtttggtgacagttaacggacaagtggtgcgtgaactagcaaccactatcaagtcaggcgacaaggtcgaagttgaaggtcaacctatctacaacgaagaaaaggtctattatctgcttagcaaaccacgcggtgccaataccatggaacctgtttgttataagagaaaacatataaacttctcggaccagttgatctttgcgttgttttcaagattacacaaagattattaaatcaagatatttctgcggttcttgatgattactatttgataagaatgtggagggtagtgctatatttaaggcatgagtctgttgcaatagcagtaaatatggagaatgggcacgtaccaccacacctcccacggcgtctgagaggatgtggcggggaattgcagtgatcgatgaatgctacctggttgatcctgccagtagtcatatgcttgtctcaaagattaagccatgcatgtgtaagtatgaacgaattcagactgtgaaactgcgaatggctcattaaatcagttatagtttgtttgatggtaactactactcggataaccgtagtaattctagagctaatacgtgcacaaacccggacttatggaagggacgcatttattagataaaaggtcgacgcgggctctgcgactagctctgatgcatcatgat

SEQ ID NO: 18384 - DNA, 1291 bp, Arabidopsis thaliana columbia
gatgtagtgttgagcacactttggccaatggttaatagtagtcatatgttttgttttgtcaggcgctggacacattcaacgcagcaattgtttctccaatctattatgtgatgttcacaacactcacaattgtcgctagtgcaatcatgttcaaggtagagagatttcaacaaacattaaagagtaatgatcctcgtgtttcaagattgtcaaatgaatcacctttttcttaacaggactggaatgggcaaaacacagacagcatagcctctgagatttgtggattcatcacagtgcttacaggaacggttatactccattccacgagagaagaggaacaagcttcgccacgacgaatgagatggcaggattcagggaagagctttgacgaagaacatttgacaagtttgtacagtcctgaatattaggaaggtaacaaagatttaaaccttgtgctgaacggaaggatgttgggatccgaatcagaagatcatctaattaatctcttagtggggaaaagaatgtaaactagctttctgtatatacttgatagttttgtaacagtcttttgtatacaaatttgtccactgtttgttcatattcatttctttttgagctcttaggacagatttgttacccatactatacgatcatcatacacattgacctattattattttgatccaacaacactgttccttctccttgtaggtgaaggaatggaaaatatactaaataataaaaccctattgatatgatgaattcataaccgtccgatcaaaacccaaaaagatctaactataaaaaggaaatcgagattcggtgagccattcattgtttttgattcacacgaagagaagagaagaagaagaagaagaagcagaagaagagaagaagagaagaagaatccaatcatggcggctgctgtatcatctgtttgggcaaagcctggtgcttgggctcttgaagccgaggaacatgaagctgagctcaaacaacaaccctctcccaccaaccagaaatcctctgccgaagattcctccgatttcccttccttagccgctgcagcgaccaccaaaacgaagaagaagaagggccaaaccatctctcttgctgaattcgctacctacggtactgctaaggcaaagctgtctccacagacggagcgtctcactcaggctgagctggtcgctcttccgaccggtccacgtgaacgctctgctgaggagcttgatagatctaagcttggaggtggtttctggagctatggtggtggtcgttatggagatga

SEQ ID NO: 18385 - DNA, 977 bp, Arabidopsis thaliana
tcataaaaaaaagtcgagtttaaaaacaattaaacaactaatctgataaaccttaagaaacaaacacaccataatagataattttatagatatgatgatatttcattcccacgtagcagagatcatggaattggcaacaccagactgctccaaggttaagttagattcatactccaatgtctttgattcacctggaatcgcttgtgttagcttcaatggcttcttcctctctgattcctcaagctgggaatagcagaatgaccagagaagctacagtggagacagcaataagatcagaaaatatcagacaaaaatatagaacaagaaccattgttgtttcttagggatttgcagacctgaattgtgtctgttttgaggaaattcctctggagtctttgtccgttaggtaaacggatcccaactctgcattgtaggctgcgatcgcctccctttggttcttccggcagtggtgggaatgttggcaggaccgcggatgtaactgcttcaactgctacttcttcaggtattattgttgattgatcatctgaagactctttcatgttgttatcttccaaggaagcagctaatgctcgttgcagttcctcttcttcttcatcttttgcaacatcctctaacggaatatgtcagtcagatcaatctttttccccaacagactaaagataatgctgcggaaaagttttaaaactaacctttgggtttggaatgaggagtcaatgagaagctgcctcttggccgcttctttgagagagaagcaaagtgttcacgaggaccaccatccatgaacggcactaaatcctctagcaaattctcagggtcaaccattccggtccacattctcattctttgaccagtggttggatcaattacaagcaccacgggaatagattcgagcttgtagtatgtgcaaacctttcttccttccgtggtatcatcatagacctagtaacagaaaaggc

SEQ ID NO: 18386 - DNA, 514 bp, Arabidopsis thaliana columbia
tatttcctgttttagatcttttctaatctctgttctcacaagtatacagtaccattaaccaaccaaatttctgaaattgattaacagctaaagttagaagactttacgacattgcaaatgtatttgcctcgatgaatttaatcgagaaggtaagagctttgttcctaagccaatacattaacactgtaatacttgcaaatttccagtgtatcatcttttagttattattattattttttttgctttctccagactcatataccagtgactaggaaaccagcatataggtggttagggtccaaaagcatagctgaaagaggattaagcttatttaattccggagaaccgaagcgggtatttggaacagagatcacaaacttgagggcaaagagaaacaaaacatattgttcatcaatccgcaagcaaattggatataagaaacatgacgaggaaaacacagagcaggaatcgaaaccagctgcaagtaaatatgtgtttggccgttctcccaata

SEQ ID NO: 18387 - DNA, 830 bp, Arabidopsis thaliana
tcttcgaccctattatcttcttgcacggctggcttaggtacggctgctccttttgactttcgtcttttgacaggtggtaattcaatcgcgggttcattgcgatcctgggctgcagctcgagaccttgtaatgacgagtgtttatttttcttcgttaatgcttctatctgaaatacattccaccagaatgattctcttgacttcgggatctgacgttgacgccagagccgcgagtgcatccgtgattgtgttttctcctcgtggtatgcgaatgagttcgaacttcttaaaatatttagccaaatctttgaccacctcaagatatgcctccattcttgaatctttggcttcatagtctccattgaactggttaacaaccagttgtgaatcatagtaggcgatcacttcatcagctccaactccctgtgccaatctgagtccgacaattaatgcttcatattctgcttcattattagatgcagtgaataataaccggaatgattgctcaaggatttccgaggtgggagactccaatttgatccccaccctggaaccattttttgatgaagacctatcgacgtgtaacttcaaggtctgattttctggttgtcccgcccgccaagtaccggaaattctgttaaaaaatcggcctgaacttgagccttcatggcgactcggctcttgtactctatatcatactcacttaattccaccgccaacttcgccaacctcccagattggttcggactatgaagaattgttcgaagcggttgatttgataagacttcgattgggtgagactgaaaatacgggcaaagcttccgagctgag

SEQ ID NO: 18388 - DNA, 458 bp, Arabidopsis thaliana columbia
tgctgaggaacttgaagagggagaatggattcctgaagaagattttgatccacaagaagagaactttggtgaaggtttttatctcttctgttcttttcatttgctttatttccgctccatatcagctttcttggtcatggtttttgatatatgaagctaaataaatccttattcctcatggtggatagtatttttctctcgtaagctgatcttaaaatttgaaataattaactaacccccgtagtgctgtttagggggatcttattacttcgatgatgtgttttcttcggctcatattcatagctttcatgctcactgtttcatttctagctgctccttcaagcgaggaagaaagatggctagcacaatatggtcaagtcatcgaatcccctgggaagaccctgcctgagatcccgtctgttgatttgtgggattggaaacttgtatgtgaaccagag

SEQ ID NO: 18389 - DNA, 500 bp, Arabidopsis thaliana columbia
taacgcaccagaagctcctttgctgattttctgtcccttggatctttttgtacactacacaagttaaagcaccatttcaaatgcctactcgttatagcaacaaaaatgacatgacaactggtcgaaatctgtctcaccattgcgagatgaaggagcaaaactctggagaaaagagattggaaggtgcacaaggaggcgggttttcaacaatggcgtccacaagctcgtacacgctactccatcctttcttgtgttctggaggagtatacgggaatttacccgttgcacattcgagcaaaaccagtcccaagctccaaatatcgctcttgttactgtacaaactcccgctgattctctctggctgcaaaacatgataacaacaccagtaagtcgtataaaaccacttgtaactctgaaaattgagtttgtatgtatattgagtgttgagaggtgaatggaggagactcacagacatataagggtatgtgccacgaaagaat

SEQ ID NO: 18390 - DNA, 500 bp, Arabidopsis thaliana columbia
tccagtgcaagaagcttctccttcaatgtcaacactaaaatcctcagggtttagtcgtaagtctacacgaacatgcgtaagagcaatgttatgacacaatggtattaagctgctggtttgttttgctccgttgatcccagctattttcgccactccaagaacatctcctttccccatttgattcgctaagaccaaatcaaatactcgtttcccaagaataactttacaacaggccaatgcagttctcttggaattgtccttagaagaaacatccaccatttgagcttcccctgcgataccaacatgtgttagcttagacatatcactagccacttttgcatattgttctatagcttgcgaatcattcttgctcgagtgtgtagatttatgatactcaatttgttgtctaaaatcaatattcttcgatctcaaaggttcgattttggatgattcaactcagagaaatcatttgcccaggaccatcgggagaaggttcttgt

SEQ ID NO: 18391 - DNA, 489 bp, Arabidopsis thaliana columbia
tacacccaagaagttggaaagccaaataataatggataaaggaataagagaccagcaagcaaaccttgacatgattactaggaaaagcagaggttctaagagtctcctgtgtctcatcggtaagcttccttcttggcacactaagaacaaaggcagcctgatcccaagttgcagcaactgatgtaattctgtagccattttcccatcgacgatgtataccttcactagggtatagaaaatctagttctataacctgaatcacaaaaaaaaaaaaacatattatcaatgatgtaattcaatgtgattcatgcttctctttaagtctagacccatacaatatataaacttcacagacctgatcagaaaaagaaccccacgagacattacaattcccatttgcttcagcagttccattgatgtacataaacccttcctcactttttatttatcccttgaagggaaagaatcctgactttgtaggattgttgt

SEQ ID NO: 18392 - DNA, 479 bp, Arabidopsis thaliana columbia
tatacaaaagaatataggtactaacctcataatgctgaaaaactttcactgagatgatttgcattaaggaaagtgtctttgaagtccactatttccaacaggtttggcatattaggccactgtgcagcagaagggttgccatacccaagaaaaacattatgcaaccactccggcacaatacaatattcgttcataagatctctgatagattccagaatagccttgaagttgttctcttttggtttcctcctcattagcacattaaatgttgcatacacatcctcagcacctttttcagcgatgtctgtaacatctatatgatactgtgcagcatctaaagcgacagtcacagtcctcatttcaccttttgggggcttcattcatccgtttactctccagtaaaacattcacagattacctctcacgcggatacgatgattcacaaccacgaacatctgaagccgagctctgtggactgt

SEQ ID NO: 18393 - DNA, 524 bp, Arabidopsis thaliana columbia
tgaacaagtgatgtgaaattttcttaaactgtttattaattttcatatgctacagttgcgtatatgattttattaatcgttccaattactgttatttccatagaaaagttttctctaacctcgagctagttaagtcataattgaggatatttgttcgggaagaaaaagcaatgaactattcatctttcgtcggataacaaatttacatcactacctaatttttgttacatatcccgcatcgctattaaataaatccaacgtgtccgaaagtacaaatgttgtttgtatctgtgttttccagttcaagatcatataactaacacatgtcctcttcgtgagaccccacacatacaaaataagccgtcaaatctaaaccatcggatcagagcaagattatttcgattctggtgacgtggcacaaatcatgcgtccaagagagtgttttggtcacagttctaatcatatttctgaatgcatgttaagcaccgaatcaacgtaaccatggtttcgcgcttctatataga

SEQ ID NO: 18394 - DNA, 437 bp, Arabidopsis thaliana columbia
tttgtctgtccacaacaagattttcaacttcacctttaaacaaatagcaaaacttttgagaagaaacatagaaaatgatttacctttaggccattgagcaatgattttctccttgagagatgcaacagtcatgaattgactatatttgcttggaccaatgtcggtaccatctgcgagtctgaacttcaattctattaaatcttcatctcccatctttaaattattacctcaagaaaagatctctagaaagaagaaaagcagagagttccgttgtctttgagcagagcaaatttagaaaataacaataattgggtctcttactctctttctcaacttatataataactaccagaaatctcaagatacagtcatctctcgatttacagctatacccatctgcgatgacctttttggttgactatatacgatcaatttgc

SEQ ID NO: 18395 - DNA, 523 bp, Arabidopsis thaliana columbia
caagtgattcaatatagataaatacttggggttcctgaacttcatattcgtggtatctttcgtcgcattctcgagcttattctcgaaataaaacttctgaagattcgcagattctaactgcttcaacacaggcacatacgaagagttcaaaaacgtataatcctcaacagctttaacttctacatgagctcctttatactccttcagtttaaacataacctgcatagctccaagattcatcttatcagtcacaacgtgaaaaacatgcttccacggctccttagcattcttcacagcagagttcacaaccaccgaagccgcaatcacattatccgaaaatatagcgtaatggtaaagattcggatcctcgagctcccgcggtctatctttcccttcatcagtatacttctcagggtgagcaatcctctcttccatcagcctcatagcaagacaatgcaatcctttcggaatcgatttcgcagcgatcaaactcgaaaacgcaccttgcttcttagcattagtt

SEQ ID NO: 18396 - DNA, 792 bp, Arabidopsis thaliana
tctgagattacgattcatgttatgcgtaagtgcgtagattctcactaagtgtttaaataaatcagatttaatttcgactatgtatgtatgtgtgtgaacattttgaaaaatgtgtaaccagaagtcaaaaagtcaaaatatatagataaattagttgttctttcggatatcaatcgcatcgcgacgctcattttagaattgaacatctttcacgtcaaagtgtttcgtatccaaatcagacaaggcaaccacaaaagccaaaatattttgtcgtctaacctagctaggcctagccatacttaaatagtattcgaaatatatttatttgggtataagtagtattcaaaatatataattagttagtgggaataagcaagcaacaaacatatccttgcaattgatagctaaaaatcttgagtagacccatatagagaatagaatcgtgttacacttttcctttggtgtttcatcaccaatttccatttcatctttatatcaatgtccaaagacagtataccactaagtgtccccatgctaatcacatcattatcgataatcactattagactcttaataattatttacgttatcagcttactgtataattgagactatcacaagaaaagtgtaaagtgacaaaaagtaacaagattagaaaatggtaaatgacagggaacaatatctacaaagaaaataaaagcttgaaaatcctaagaactatttccataattgtcttcaattgcggcaatgacggccccatggaaatacccgagaacttgaccccgatgcgat

SEQ ID NO: 18397 - DNA, 506 bp, Arabidopsis thaliana columbia
  unsure (1)..(506): unsure at all n locations
cgccagtgtgctttaaagcggcgacagattcagcgggttggcgataaatggctcattcagtacttgttcaactaccggatggcgaccttcggtaatgcgaatcccggtttatcaatgaaggtcgggcaggtgtagttcagggtataggcccgttccgccaggttaaccagcacgtcgagttccgccagcgcgctcgcgtcntcgttgcaacgcttccagatgcggcaacagcaggtcgaacagctcttcataaagctgtttttccagtgccagtgctttgccttttgaggtgagaactttatcttcgtactcttttagctctggaatgatgtagcgctcggcgtttttcagcgtctggcgacgcatgtagttgatgggtgccagatggctttgccacggctgatttgaatgtagtagccgtgcaccgcattaaagccaactttcagcgtgtccaggccggtacgttcacgctcgcggacttccagacgctccagataatcggtcgc

SEQ ID NO: 18398 - DNA, 506 bp, Arabidopsis thaliana columbia
tgtcagttttctcgcagtttccggattagtggtaattggtagattcacacatgatgcttctctgattattaggggtgaaatgggtctatcagaagaagatcagaagaaaactcaagaagggcgatttcagctaaatggtacagtccattccgtaaagatcaatgggaaagtgagtcaagaatcatcggttcacaacgccgatgtttcctgttgccagtcacgagctgcagaacctaatggttgttgccaacaaaatgggaacagctcttcatgttgtcaagacgacactactctgatgttgtcactgggaacatcagaagataatcaacttgaaagtgaaaacaacactgagaagctgacaccaggaagaaaaattgcagaaaagactttctttagaattaatagtgacaaaggatcttcgacacgtaaggtttgcggaatacaacatggttagagagctgggagcgagaagatacttatgctgctcttgctgttgtctgtgctgc

SEQ ID NO: 18399 - DNA, 902 bp, Arabidopsis thaliana
caagtacacactattagaaagtaactcaatgaaaatgacaaagggttgaatccatccaaaacctagtccaataccgatggataaattcaaagccaccggggaacttggacacgacaccgaaattagacaaatgattggaggtgcggttcacctcttgtagcaggttatgggttacacgtggcatcctccttttatttttgttttgtttttttgatggccactcgtgacatgtttttttttctttacttgtttttgatggccatggtggctagtggccacgaagtagtgagtataaattgagccaatgagaaacgattttctcgtagcaaactttctttgactttttggcgcttcttttcaccaatgtcagctcttacgttccctatcggatccgttcatcacttgatgccggttctagctcttggaactgctgcgtctcctccacccgaaccaatagtgttgaaacggacggtgttggaagccatcaagctcggttatcgtcacttcgacacctctcctaggtaccagacggaggaaccgcttggtgaagctttggcggaggcggtttctctcgggttaatccaatctcgatcagaactcttcgtcacttctaagctatggtgtgccgatgctcatggtggccttgttgtaccggcgatccaacggagtttggagtaagatttgagttccttattatatagaaaaggatagcaaatgagatttgtggttacatgaaagatttaaatagacttttgaactctagatggttaaactcaaatatatacttaggggtgtgcatggatactccaaaatttcatgatattcgagtttggattcgttgatatatatacgcactcgttggtatcaaaattggcgaaataatattttaagaacgaaaacag

SEQ ID NO: 18400 - DNA, 599 bp, Arabidopsis thaliana columbia
tgtatgttgacattcttcagcatgcttctggagttggtaatagccaatccaagaaaagaagtttgactgagaaggctagtcaccgtgctcttgccaaataccttattaaagatcttgctcattacgctacttctactatatctaagcgcttaaaagccagaacatcattcattcctgctgaaaccggcgatgctcctataatttatgatgatgctcagttcgagaaacttgtgtggccttggaaaggtaatgatgatgacgcatactcctatgtcattacaagtatcgtagtattagcactatttggatttatagcctctctactaaccgaagttgtatctgtggtgtggctgggataggagttttggttaatattcccacgacgagtacagaagatggtcggtcttgtactggagagagtggaccaaaacttaaggatgaattaatccgaagaggattcacccaattagagttcgtactgtgtgggaccgtttcggtcattcgggaacggaatagtggaatttacagagactggaatggacttcaagatgctttggtgtttagaaggcttatgaaggagatgggcatgggaaaaagga

SEQ ID NO: 18401 - DNA, 486 bp, Arabidopsis thaliana columbia
tgttcctgcaatttcacatctcaattaccatatcttcacaatgtcataatgttaattaacttcaagaagaaaagagaacatacctgccaacagtaactgcaagatctcctcggattgttccaggctcagatttctgaggatcagtggctccaatcagtttacgtccgtatctgatcacaccatctccttcccagacctaaaaccgagtcataatgttatcgagtttgttatcaaattccaaaagctgaatgaagagtttctctttatcttaccatggcaataacaggaccagagctaaggaagtcacacaaaccattgaagaaaggtctttccttaagatcatggtaatgcttttgtgcgaaatctttagaaggaacaatgactttgataccaactagcttgaatcccttgcgttcgaatcgagaaatgatctctgatatctgagatagtatttgcacatatgattaagaaacttatacaactgag

SEQ ID NO: 18402 - DNA, 921 bp, Arabidopsis thaliana
ctagacatggctatttgatcaacaatagccttttctcggtaaagagcagcgagccataaagcgccttctcatgacgtcatttgctcctgcaaacttctagaccgtctcacgagattgggtatgttgctaatgtcagaagccatatgtctgattacaccaatcaaaacaccaattttccacagcttcttgagatcatgaggcttcttgtaaggtggcggaacacctcgcaaatcaacgggtaaagacagttgatcccaccaatcttctttccccgttggccaccatggcggtgtcacgcctttctccaacggaaaccgcctctgaggagggttgcagtgaggatacagagccgataacagagctccaagagtagtatcttgaagctcaagcaacttctgtgcggtagaatccccaacctcagaccctgaatcacttccatcagaaagattgatatccctgtggtgcttgattatagcagctgggccgttcctatcaaacctcactttgtctttccaccattcacggagattatcagaagatcccgctaccgttttcccattctctaacacaatcccataaacaaaaccttgagctttatatcgctccacttgcttcgacatgtacttcaagatcccatcttgtgccttgtacatggttctcttactagagtgctctggaaaatcatcatgttgctgcttcaacaacaatcttgttcctagaccgttcttcgccatttccttgagccgctttaaacgctgcttgtctctccagatcttcttctcaagctcctctatttccatttcctcatcactactcagatcatcgcacaaagccgtatgcgaatcagaacacatatgtccctctgtaaatggaggcgccgagctacaaactaaactccggaacatccctatattgttgtta

SEQ ID NO: 18403 - DNA, 941 bp, Arabidopsis thaliana
tcctctagcccatactgtagtacgcgctccaaagaacggatctccatatccagacccaattcctcagacatagcaaccatagctaatccaatcacagctggaccctggtggatatcacctttcaccagatgctctccacactgagccagaaggtcttggacctgaatagtttgaatagtttgaagagtcagactaaactagaaagaagtgaataatctaattcaaccactagcacacttgatcagataccttaaggacattcccggttccagcatatgcacatgaaagaagtgtcatatcacaatactttctgattttctcattgaacgtctttgaaacttctgcagtagcctccacactttcctgctcgatattggaacaagttaaaactaataatcggggaaataacgatcaagtacacgaacaagaaaaataatcaagtatgactggctgcccacctgtttgccaaggtacaaaagaccaagtccaagaggcaagaaacgagtgagggcttcacccagctctgcctcgctccgatccatcaaagcaaatataatagattgtgcaacctcttcgttacacgaaccaacataaatcatccccaaactaagtgcagcaaatgcaatcacatcgagaggtgcgttggcatcatttagtattggagacaacctgatttttatctatccaaacagtgagcatgttattgtctcgtcaacagaacattcaacttagcaccataggtaagaagataacatgtattcacctgatcattttgggaaccgcatatgcaatcccgagacccataatagcaccaattcggacagatgaatcctcattgtcaatataacctgaaagaagggcaaatgcctgagaaagagagctgagtgagaatgaatggcgaaaaattgtgacacagaggttccatattaaaaaaaaaaaaa

SEQ ID NO: 18404 - DNA, 623 bp, Arabidopsis thaliana
ctaaagttgcgctggccatcctagagaaacaccgcgacgtcattatggatcatttgaagcagttcgatgaggttttgaaatacagtatgttccctctccatctcacgtacctcactcacgtaggtgacggcctatgttcggcctgcgctaatcgactggggatagtcaacgaactctccaacaccatggacctcattccaatcctcacccgcgcagaaactctctttcatcgctttggtcggcagattgaagccattgacaagaagaataatttccctacgccgccggggcagcctcaagctcagcgacctacgcctgctcagcctcagtcatcaaagggaaaatcacctgagcgacaattagcagccagcacgggtgtcagctcaagtacacaagcggggcctggtagtaaaccggaagcagcgaaaattataccccaagagttgagggatttgttcaggaaagatgttttttggaatgggaatagccagcactcgaattcgaaaccctaaaactatatggtaagaaaggcactttagctatctgcaccgtcgctgcaggacaggacatactacggcaggatagcttgatgaggcagactgggctacaatatgttatgatat

SEQ ID NO: 18405 - DNA, 617 bp, Arabidopsis thaliana
  unsure (1)..(617): unsure at all n locations
ggtacccggctnnnnnnnnnnnnnnnnnnnnnnnttaaagacttcctgctctctttctcgtttttcatttctggcacaccgcttgcaataccttcttcgtgtagcagaaccattaccgaattctgaccggagggatctatgaagctggtgaccgtgataatcaaaccattcaagctggaagacgttcgtgaagcgttatcttccattggtattcagggcctgaccgtcaccgaagtgaaaggtttcgggcgtcagaaagggcatgccgagctgtaccggggggcggaatacagcgtcaatttcctgccaaaagtaaaaattgatgtggcgattgctgatgaccaactcgatgaagtgatcgatatcgtcagtaaggcggcttacaccggaaaaattggcgacggcaaaatcttcgtcgctgaattgcaacgcgtcattcgtattcgtaccggcgacgacngtaagcggcgctgtaatctctggcacacagcaacaggaacgaaaaatgaagatagcgacgataaaaactgggcttgcttcactggcgatgcttccgggaatggtaatggctgcacatgcggtggccgataaagccgcaatgcgtttatgatgatttg

SEQ ID NO: 18406 - DNA, 493 bp, Arabidopsis thaliana columbia
tcatggtttttctcgtttttcctggggaggaacttctccggggataacttggcacagcccaaactgcttcatgcatcgatctgggaagtgccattctactacttttggaccaatcagttttgttctggaccttccaagtagtagattatctttgaaactttgtggcacaatgtcaaggtctccttcaaagggacaccaactaacctaaaagagtaacaaaatatcataatggattcaaaacaaagaaatgtataagaaaacaatgatttaattcttacatttgatggatctaaatcgtcaagtgccttgcgatacttaaacaagtcattctttgatcgactctgttgccttcctttccacaaaagtgccagtggaaactgacgagtggttctctttggccggtcaatattgaggtggaagtaactccagcactgaagatggtacacaactggttaagaacttcttggagaaaaagaaccaccagagaagatga

SEQ ID NO: 18407 - DNA, 635 bp, Arabidopsis thaliana
  unsure (1)..(635): unsure at all n locations
nnnnnnnnnnnnnnnnnnnnnnnctaaagttcaggcaggcaagatagataacggtaaattcacaccagccaggcagttgaaatgcgatgcgatcgcctgattcaatacccttcgctaacatccagtttgccagacagctcgcggcgtgatcgagcgcgctataggtgtacgatgcaccatgattatcgaccacggcaattttgtctggcatcgcacgagcggtctgctgccagtaatcggccagcgaacatcgccccataacccttgctgacgatacgccgcacgacgttgttcgttaaacgttaatgtcactttcatgttggactctcgaaacagaacatcaggcccgagatgcgggcatgtgggatgcatgattagccgtagcgaaaatcaataccgaagtgccatgcgggatattgccactgttcgagaatagtgttaccgcacagcacccgacaggtgccgcactccagacaaccggcggaatcaaaatgaatgtttcctgcgtcatcctgcttataaagtccggcaggcaggctttcattaatttatggaattcattgatatcgggattttccgcagaatgatatgcgggtggcctcatcaacatggaatttattgacgcctaatttgat

SEQ ID NO: 18408 - DNA, 595 bp, Arabidopsis thaliana columbia
aaaaacattgtaagaagaagaaagatatggagaagataccaaaaggtcggtaataataaatgggtgattaatgagcaataagcacgagaatattttgtcataactaataaccaaagaggagataatcataataataataacgattgagagagattttcagacatgaaaatctgaaaacgaaaacaaacgatatcaagaaaagtgaaatattacaacctcaagagtttaattattgaaaagtaaatttaggataacaatcttaaggcaggacaggacttaaacgttgtccttaagttttcttcttcgtcttcaatggtatcattttcactctctttccattaactacgacaccctctcgcagttcgagccattgaaataatcttatggccgtactcctcctcgtcgtcgtcatcggaaataaccactacctcaatttgtttcttggggataaagatctttcgttttactttgctacactctccgaaaaatgcggagatagcaagatcgtaatgggctttgatgggtggcttagacagcagagaccaagctagcgaggctttatcagcagcttcttggctaaatgggaaatagttat

SEQ ID NO: 18409 - DNA, 1021 bp, Arabidopsis thaliana
tcaacaacaactgtcctctgctgtctgaactagcagccgccgcttctgccgcagcataagcctccggaggtggagtcaaaagccctgacgctgcaagaccaccaccaatacctagaccaacaacgatacctttactctcacgcatcttgttgacctggttaatagctggctggaggatgttgtaaaggacccatgcaatggctgggacgatgggaaggagaagagctaagccacggttgtcgctactggcgtttgctgcagcgagctgagcgatctgttggatggctaaagctggctcagagtagctgagggaagagaagacggctccggctagggcggtgcttgtgacggcgagagagacgtttggttttggtggggttggtagggagatgaatggtttggatttggtttggttttggagtttaggaggagatgggtttagagacatgcacttggttgctgttgccatagctgctgccattgtctgatgatgatcggagatggcttgaagatgagatgagaaagaggtttgatgagtttgtgagatggtttttgggattatagaaggagagaggaggaccaatggaaattgaaggcttcttgatagttgtcttatccaatgagaagtgagttggagattttggtgtgatttgagccactgattctatcaccttactctcttgttcttatcacttcccttctcaaatctcaatcgattatttcacctaattgaatttttatgtcataatgacaataaatgacttatatttcaatattcaatccaagtaatatgttggcatctgcaatggtcttatttaaatattttattttcctcaatatacttgagaggctaatatattatgtacaaaaaaagaagatttaagaggttataatgtaaatttcattgaaattttacggtagataaattattgtaatttacagacatgagtctatgttggctatatcaaaatctcgattccagaaagtctggatgaaacagtagagatcgatgagcatactt

SEQ ID NO: 18410 - DNA, 1077 bp, Arabidopsis thaliana columbia
cgtcctcgggactgcgtttctccatcttctggttgattctccgcgtttgtaccatccggggtcgtttgatcacatgttgcatttcgcggaagggaatttggggatccgaagatagttcttcgaactctaggattttctacatttaaagaacggacacgagactgaatggtactaacattttggctgagcgatacctgggttgtttgcagtgtttcaacggttttttccacgtttgaaaacttttgcgccatatcaaccatagtttgttgcatggtcttgagggtttcggctatcgaagtgttggtagcatcctctccagacattgcggatcacttcgggtatgtaatgcacagaaaaaatctgatgactcaagaatcctccgtccccacagacggcgccaaaatgtggatgtcggattcgcacactcaagtatttatttgttttgtgggagagattattcttgaggacaaatatacttgacaatagatagatgattatagagaaaactatgagtattgtcaaagaaggtgtatagctcgtttgcaccaagaaatgtgtgtgtctttacatggtctttgacccacaatttatacccaaagaatacatgtaatacctatttactcgtaatcattctactttaaatgtatctgtttttagtctttgaatttacttatttgaacgttaaaaccgagtccactccgggccttctggacctccgtctcggcccatttggtttcttcaattcgagtagtcctgacttcgatgctgccttcaccccgcaaaccaacatctcgcccatactctcacctcgaggatgcttatgggccctccctcttatgggcttgttttacttgtgcagcaatctttggctggatccgagcccatggtgcgggatccgacaccaacaattagccccccaagtctttcgaattgttactccagtttggaaggcttttaatgttctaaggacaaagattgcgccaaatgactctcccatttcccacctaaattacgtaatcgcgttgatttcggaatctcttgcaatcactcgcgtgacacctgtcacgggatgagtcg

SEQ ID NO: 18411 - DNA, 709 bp, Arabidopsis thaliana
tttcttaatattattaagattgttctttggtaacaatcctaaattcatcattcgatacaaagaatgataattgacatgtcccattcttgcatgccataaatcatttgagtcaagcaaataaacagaagcagtgctattgcttgcgttttcattaacgatcgatacaacattcaatttgaaaataccatcacataagtagccttttcctacatacatctcacctttagtgagtacaaccttatcagattcaaatacaatcttaaagcctttgttgctaagaagtgagcctgaaatcagattctttcgaatctgagggacatggagcacgtttgtgagtgcaagttccttcccagatgtgagttttaacaccactttgccttttcctgcaatcgtcgcggtgctcgcgtttccaatgtaaaccctaaacccgaaactctaacttctaatatttagttataataaccatcaaactgattcattgtttcaacaactttagcctctaacttgagcttctccttatttaacactgaattctcctcaactaccttaacacaatgctcatataaggttttgtaattctctgcaaactcttcatcactaatacttgcatcatcatcatccctttgatcattatcactttcagttgcagatcttgttgcagacgctgatgcagaccctgatgcagatgctgacacatgcaaatgctgac

SEQ ID NO: 18412 - DNA, 1048 bp, Arabidopsis thaliana
aataagtaaaaaattattacaacatacacaattcagaaaactatgattacaagacaaaatatagcgaaagcgtttgagattatcctagttagacccaacaaagaagatgaggatacatgatttgatgagagaacataaacacaaatgtaaaaatattcgataacacatcagttatctactaaccgccagcaaggattaaagcggagactagcttcttcacttcactttgaaggctgccaacatcgaaatccacacattcaggtacacctccgatagcatgagtatgaataaaaagtctagattatatgcatgtgtcaagaggtgaagttaccagtagaatgacagaagggcgctgtatagaaaatggatccagaagaaattgactcataagaggattgaaggctgcttgtttgaaaaggtatggcagctttgctgcgagaggcataagctcatcctgaaaagcagaatccttgcggcattggatattcgaatcgaagacaatgcaatgattttccggcattttagatcaacagctaaagctacctaatgctttttgtcaaagttaaaaggcagatatatgtaatcagcctccgtgaataacagcacacggtcagattccccaacgccggaaagaatatcaattagaggtaaagagaattcgaactccgtttttgagttgcatcgggaaaactttgggaattggagacagaacaatgaaacaaactttcgaatcaaggacttcgagacgaagtatctcgccgtccacatcatcagtccgcaacaaatgacgactaaactaatgagagcatctattacctgtgtgcatgacaaaaatacgaaaattttaagtaaatgcccaaaacaatttagaacttaatacgcatatataccgcaaacataatactttggaagaaagatttttcttgcggtcaattaagtccaaaatgtctttattagacagagcaatcccaccacaaatgctaatagaattgtaaagaacgcaaggttacatgagagattccccgaatgaaataaaatacaaacaatg

SEQ ID NO: 18413 - DNA, 1110 bp, Arabidopsis thaliana
tcgtttgattcgaagttctttgtataaatatgtttcatttgcgattgtacgggggacggagagatacacagaaactatagaaaaataaatatactttttccgattgatcattgttcgtttaacaagtcttaagatcctcgaagcatccacaaaattctaattgcagattccgacatccacattaagaacccccacttaatatactatcattgaggttgccaaaaattaaaatcttatataaactcttaccaacaaaatttctttattaaaaattgttaagaaccttgattaataacccttcattgaggatggtctaattactttcttcaaaaacaattagaaaaacacacaaacagatgtttccttgcacgccttaggctagtcatcgaatagtgacgtataataaaataaaggaattaattcaatcattgattaactaacgttgaaagcacataaagatagaattttcgttaattgtaaagtacaagttttcggatgaagttctctaccaatatcctcaagataacgtaaataaacatgtattgccgtattgggggattacgaatccaaagatcacatcaaacttataatacaaaaaactttgaagtttaaacattactaacataggaagaaggcatgaatcacaaattcttatatataaatttttaaagaattaatatgcatttatattacaacttgaactaaaaaacactcgctagcttctcatggattgctcttagccggttttgtctccggacaactaatcagagttcttatcaaaaacaaaaacaaaaagctaatcagaatctataaaattctttgatacataagataatttatgaatgtatacatacctatattttccagtatctatgtgtatcttgtatgtaaatgtaatcttctaatcaaacaaaacaaactacatgtatataaattgactatatatctccggattcgggtatttgattcaagtcgggttttattacggcggagtggagtgagcatcgaaggagcggcagaagctagaagagcgtcgactctggcgccgacctccgccgcttttcccttataagagctgcgggcatgtcagcggtggtggcggctgagaga

SEQ ID NO: 18414 - DNA, 1140 bp, Arabidopsis thaliana
gtcttttggacgctggatacctatggtagaatttccacattagccagcgaaaaccgcataggggccaacgaatccagaagggatctaacctaatcttaaccacctaactaacctagagattaccctaatctaatccatcctcaagaaccctaatcactactcaagcaacataactaagaactcaaacccagaaattacaaaaatcatatcaaaatgtagatctaaacaagctagacaactttactcaaggaactaagtgcaaaaacaaaatatattaagagtaattaagttttgaagattcaagaacacaaagaaaaactaagagataaaagctagatccattggacaaatcccaaagtgatctatttatactaaattttgaaaaccctagattcatttgaagacaagagagttgaggcggtttggacgattgctcgatcttggggatcgagtaaacaaggtgctgtaaagtctgcacctttgcctccatgttccgagtgatcaattggtcgagtagatgcttatcctctcctattcttatgctaagatgtctggttgagtggagaatgaggaggatcagaagacgctttgatagatcaacaagtcttttagagtaggtcgcctttggtcgagtgattgggtcgagtaggggatcgagtaggagggttgagtagtgtctgctgcctcctctgtggctgcctggatcgagtaaaaaggtcgagtggttgctctgctgcttccctcctggcttgatagagtagagggtcgagtataatccttgtaaactccttctgcacctgaaaacacaccaaaacatgcaatatgtatgcaagatgatcctaaatgcctaggtgtgcaaaataagctaaatgtgatgcaaaatgatatgaaataatgagtgatcactaagctaaatgatgataaatacatgtctagaatgagtaaaatacaatgttatcaagcttccagtttcccttacagtgagagatttgatcgcacatcctatccttcagctttgcttcaaactatatcctaactctctagtttattgcacggtcccagttgtatacttgctacaaaacagacagaagatatatcaaaaagtgcaatcaagtcaaaaaattaacacaagaaaacata

SEQ ID NO: 18415 - DNA, 239 bp, Arabidopsis thaliana columbia
attctcaaactttaaatactaagaagaaacgaagaacaaataccagatctgccatcttgatcagtccttcaagtctagaatcatgcttaatgttgatacgatgaaactggatccgaccagcccattgaacggtatcaggctcaagcaagtgcttgatcttatcattgtaaacatcaagcgcaagaaccttgtgaggagtctccgtcataagcttctcacagagatgagagccaatgaaa

SEQ ID NO: 18416 - DNA, 509 bp, Arabidopsis thaliana columbia
gtccatttggaaccagtttctttgaaaccagcggtgaaccatgaatctgcatttccatcgctagttggttcgtggatacctccgtgcaagtgaaccaccgtgggaatgccgccgtgtttagggattgccggagagattgttgggtcccaagggaggatatgatgtaaagggaggtgatttcgccacgtcacgtaggtgtcgacgccataaacagcttctattgttggtccaggaactgttgctgaacgctttgatgtaccatatgcgaacactggcgtggcaggcaagtctctgtggaatttctgtacttcacaatgatttaactcatatcagtgtgtgacagagttagagaaattcaaaaacttaaatcattcgaatcattagcagagtaataaaatagtttaaaggaacagagcacaattagctaggccaaagtggtagaaaagcaatcataattatatagttagtgggtaataacttctatcaattaatcattagatttgatgatg

SEQ ID NO: 18417 - DNA, 652 bp, Arabidopsis thaliana
caaattgatatgagccgtattgaaccatttctatcaacacaggacagactgcgactcctctccatggtagtagatacagtgacgggagcgtccgatagagtctcatggggtccaagccaggatgggagattcagtgtgaagtcggccgcgtcgttttttacagtggaatcattccccgagaccaaatgtagagtctttgtttgggaagatttggaagtgtgtagttccagagcggatcagagtattcatgtggctaatagtgagtcaagtgattatgacaaattcagagagattccggcgacacttgtgtgattctaatgcctgtcaggtatgtatatgtggagaggagactattttccatgttttacgggattgtcctgctatgtcggggatctggaacagtttggttgcgcggaataacagagcacaattttttagccaatccctactcgaatggatttacgccaatgtgagtgacgggaagctgaaggacgacgtgccttggttaacggtgtttgggatggcagcgtggtggggatggaagtggagatgtgggaatgtttttggggtgacagggaagtgtagagaccgggtgcgttttgtgaaggatattgcaagggaggtctatcaagcacatgctccggtgttggga

SEQ ID NO: 18418 - DNA, 251 bp, Arabidopsis thaliana columbia
aacctcttgagaagagctaagtgtcacaaatccgcaacccttggatctaccgcagtccctgtcgtagacaaccctagcttcaactacctttccttgcacgataaacaagttctcaagtgccatgtcatcaactccccaagaaaggttgcccacgtggagacggagtcctggacctgagcccgaagcggaccctgaccccgaaccataactggtacgttgagagcctgcgtaagctagcagcactacggtga

SEQ ID NO: 18419 - DNA, 579 bp, Arabidopsis thaliana columbia
ttttgcatatgctttcttcatgcggacggatatattcggcgcaactttttagcaaataagtcaaaaaagaaaccgtctgcaaatgatccgaaaacaaaagtcaatatatcatgtcatctcccagttacaaacaatataattcagatcaaacaatgagtcggtgtaggccttgatataataatatttccaacaatgtagaaagctttggttcccttccttacgaagaaacattgtctcaccttaacctgtgcaccttttaactctatgaactgaggcttcaaatgtgaagggacattctcaggtccagggacagatatagcagcaaccatcagtggaagtaaatgaggaatgttggtctgaacgagtcggctatacagctggaaaaggaacataacaacaagggggctctctgtgattatcttgaatgaccgagtactcggattaagctgcacattcccgataggtggggtaggggtaagggactgatcagaagacgtaggcatctccataggcttcacttcttccattttaacattatcgaaaaaatggctgacagtgaatctgaaaatcgaatagatt

SEQ ID NO: 18420 - DNA, 756 bp, Arabidopsis thaliana
tggtttgcgggaagtagtgcaacagggaaggagctgggttgttggagatggtaagaaaattttattctggaaggattagtggctttcaggtgagacactcttggagtctgtaaatggtaccccaccagaggactatgaccgtctaagggcagcagatctgtggacacatgggtcaggctggcagttgcacagaatctcgccatatgtgtctgagaataagagactggagcttgctactgttgttcttgatacagtgacaagagctcgtgataggctttcatggggagaacaaccggatggtaaattctctgtgagctcagcgtatgatcttctcactcgggatgagagtcaccatcctaacatggagtcgtttttcagaaagatttggcgagtagtagtcccagagagagtgagagtgtttctctggggtgattgggaatcaagcggtgatgaccaatgagaaaagactgcgaagacatttgtgtgactcagacatttgtcaagtctgcaagggagggatagagtcgattatccacattctaagagattgcctggcgatgatgggaatctgggctagaatctttcatcggcagaagcgccaaggtttctttactaaatcattgcttgaatgggtgtatgataacctgtgtgagaggttgatagtggctgaggttccttggagaacgatgtttgctgtggcgatttggtggggatggaagtggagatgtgggaatgtgtttggagagattgggaaat

SEQ ID NO: 18421 - DNA, 461 bp, Arabidopsis thaliana columbia
taatttttaactttcgaattaaaattaatatagatatttttttaaaagaaaaatataaaagttatctatttcatcacgtcaaaaaaatacagtagaaccacaaactgttttattagtaacagccttacaaacaccaaaaaaaaaaaaatctaagaagaaataaaaaatctagtaacagaaaaataacataaattcacatcaaatattttttatatttctgtttgggtgagtcaaggacaccttgggttccgaccaggccctccatagtaaaaataagtcccccatacattgtttttgccttgtctgatgtcataacaagcggggtgatcggccaagacatggagattcttcagaggcaagagattgttgtcccagtcaacaacttgtaaattcctaaagtaggcagctttctcaaacccttcatctgcgaaatggccgcttcccatctgtgttccggtgtg

SEQ ID NO: 18422 - DNA, 1242 bp, Arabidopsis thaliana
gcagactttcggcctataagctgctgtaatctggcctacaagatcatttcgaatattctggccactcgcctcagacctttgctgctggaatgcatttctcctaacctaactgcctttctgagtgggagaagtcttggtgaaaatgtacttctggctttagaacttatacgcaggtatgacaaggtttcttgtcctcgaagctctctcctcaaagtggatattaggaagacatttgatacggtgtgctgggacttcgttctcaaacttctcgaagctcagaattttccgcctctgtttatctcttggatcaaagaatgcatttcttcgccgcgtttctctatcgccatcaatggtgagttagcgggtttctttgaaggtatgaaggggctaaggcagggagattgtatctctccatatctgtttattatggtcatggaggttttatctagaatgctggacaaagggacagagcagggcaagttttcggcgcacccactttgtttatctcctcgcttgactcatctagctttcgctgatgacctcctggttttctccgatggctcccacagttctcttcttggtatcagtgagattttgcgtctcttccattctttctcgggattggatatgaatcctgcaaagtctgagctttttctgggcgggtttgatgatgtggaagctataatggtctctgatctgcttgaggttaggttggattcattcccgacgcgttatctcggtcttccgttgaaccctacaaagctatctcttgctacccttcaaccttttttacagaagatcactggtcatcttcactcttggactaccaagtttttatcttacgctgggaaaattcgccttatagtctctgtcatctatggaaaggtgaatttttggagccaagtttttgtcttgtctaagggtttctacaagaaagttgatgctctctgctcagcttttctctgaaaaatgcctccaccattgcaagaggtggtgtcatagttgcttggaaggacatttgtaaaacaaaagaggagggtgggttgggtatccggtctcttgaagattttgctgtggttttcagactaaaacaagtgtggtatctgttttctaggcctgagactttgtgggttaagtggttggatcacaacatctttggtcgtcggaactattggctaatggaaccttctcctcgtctcttttggacgataaggaagatgcttgatttaaagtctctcttca

SEQ ID NO: 18423 - DNA, 499 bp, Arabidopsis thaliana columbia
gctatgaaccagaacgtcaaatactggtggattagtatctgtctggtggatccttagctgatcacctttacggtatgaaaatcctcaagtatctagcaattctcatcatctttttgcaaaatcatcttcctcgcaaagctatagctgtcggtgatatcttgcttctgcaggtccacgtagcaaaaggcattcattgaactgggtttcaagactaaaagttgctgttgatgctgcaaaaggtacatcttcaacatctgcggatctgccattggtatcattataataaaactcgtttgatcctggtagatagtaaaagttttggcttattcatgaaggattggactacctgcataatggaagtgagccgagaattatacatcgggatgtaaagagcagtaacatacttttagacaaggatatgaacgcgaaagtatctgattttggcctgtcaaaacaatttacaaaagcagatgcatctcatattactactgttgttaaa

SEQ ID NO: 18424 - DNA, 619 bp, Arabidopsis thaliana columbia
ctaattggattggagtacatagtgtcagagaagctgttcatgactttgcctgacgaagagaagaagctttggcactcgcacgagtgggaagtgaaaggagggttcttgttcatgcctggtgttccaggtgccattcagcgtaaagatcttgataaagtcgctaagacttatgggaaagttttccatttttggcaagttgatttgggccatgagcttcccattggtttacctaatgtcatgatggctgttacacgcgatggccagcttttccacgagatgattcagggtacgtaagaaaattcgtatattagttatatcatgtcttatattaatgtgagatttcttgtggttttacattttaattttcttagaaaaaacaatagacagtgtttagtttaatgttgaaaaaacggtctaggtagttatgactattattttttaggcattgaaattaagcgtttttgtcataaaacaattataggctgtctatatttaactcttaaccaattatcgtttaattgtcaattatttgctcgttgacttttcaatttatatttatgtagacggcgtctagacatgtttagctaatgctccttttatttatggcataatgtagtaa

SEQ ID NO: 18425 - DNA, 543 bp, Arabidopsis thaliana columbia
cagtggcgtaaccttgtgacgcgattcctgcgggaacaatcatcgacggctcagatctaatgtggatgttcctcgctctgatgccaaacgagttaggagacgacgcgagagtgaatcgagagctgacggaagctccggtggtggctggagtgagattgtgcgaaatacacgaattgaaggaggctaacgcggcggagagagtctgcctcgacgggagtgaagatcggcgcaatactccggcgatcattttcagattcaacggtgagacgaagaaatgacgacgagagattgaaggaaatctgaaaaaccccaaattagggtttcagtgaaagagtaagcgaaatcagagagaattgtgaggacaggatcacctgtgacgagtgtacgttatcttacggtgagctacagtataattttgtttttttactgagacaagtgaaaagatgcaaaaatgttaaaatcccaggaagcaaggtgaataaaaattacaaattaactctactagtttaaccagagataatcagagtaatacataagagagac

SEQ ID NO: 18426 - DNA, 135 bp, Arabidopsis thaliana columbia
cgtaattacacttgcgatccgagtaaatcgtactcggtcgctgatttgaactacccgtcgttcgccgttaacgttgatggagtcggtgcgtataagtacacgcgcacggtgacgagcgtgggaggagctgggact

SEQ ID NO: 18427 - DNA, 421 bp, Arabidopsis thaliana columbia
ggtgccacactgtttatcgacattgttccgtttatgtaatctggtgtggaccatttccgcagaggtggataatgcgattccgagacttgaccgcacagaatcccagcagtaactgtcttaaccgatatcttaaatgggtttccccagtctcttcaaagagcacaagtagattacttgacggctttaaccacgaacgcggtacatggtacctgtacaatgatattatgtcagtaccatggcattcaatagtcattgcggagttattacatgcacattacctggtttgtgtaggctttccacaatttgttgtgcacttatctgaattgtaggctccacgataatcacaggttctgtcacatccatccttttgggaaatgatattccaataccttccaatatgttgtccattgacccaagcttg

SEQ ID NO: 18428 - DNA, 445 bp, Arabidopsis thaliana columbia
tgcctgaaagtttgtgcatttcgccaagaactgaagctaacaatgaagacttccctgaaccaacggtcccaacaatcgcagcgagctctcctttcttaacttcaaagttgatgttttcaattgcaggctcgtcatcttcatcatcccaactaaagcttccatctttgatctccacagcgacattcccatcacacccttgactcctttccacagtctcttccgatagctccctgctcatcatgtaagcatcgagtcttccgagagagatcatagcctgcgaaagagagatcatagactgcggaaacgtccttatcggttcttgaagaatcttgaaaatcgtcgttgtggtgaaaacgttcctgcatcaagcttgacacccaagaaaaccgcggttgtgaaagttagcgccgagatcaacaccggtgtgctccaaagcacgataatg

SEQ ID NO: 18429 - DNA, 533 bp, Arabidopsis thaliana
  unsure (1)..(533): unsure at all n locations
tagtaacatccgccagtgtgctttaaagggctcccggtggcagcggtacttccacctgaccgtagcgcagaactgcatcctgctcgctggtaagcgtgatttcatcgagatacagcgcatcgctgtcaatctcattgctggtcaccggttgcagaataaagctcatctcttcttcaccagggataagccgatacaactggcgttcaacggtcaccggaatgttactttgttgagccatttttgccggctcacgtcagcggacctgcacattttgcggcgataattcgtcaccaaaagagagaatgtccggcacgccctgaccaacccaacgccagtcttcgccccctccagttaacttatgtttagcccatgcgcccgcaggcgagtgctaaaacaactggaggcattgtcgccatatatttcgccagccagttcatggccagcgcgcgctcaatagtggattgctcctttagagnnnnnnnnnnnnnnnnnnnnnnnnnnnnnnnnnnnnnnnnnnnnnnnnnnnnnnnnnn

SEQ ID NO: 18430 - DNA, 568 bp, Arabidopsis thaliana
  unsure (1)..(568): unsure at all n locations
nnnnnnnnnnnnnnnnnnnnnnctaaagcggaagcaacgcgttgtggcaccacttccagaacgttgccgttgcgtctttcagcgtcatgaccagatggtaaagataaggggattctgctgaccattgctgcggctgttcgacagtaaaagcaaagctggcgctggtcagtttttcaattgccaaatgatcaatggcgctgctgtgcaccacgcgttcgccatcaaacagggtatattccagcgtcgtgacgacaggggaggcggcgagattttccagcaccacttcgcaggaaagcgtggcatcgcaataggcttcgtcaaagtcggtacgcacagtgaaatcgttaatatgcgttaggtgttttccgaccagataaacatcgcggaagatcccgctgaccaccacatatcctggtcttccacgtaggtagagtccgcccactgcatcacgcgcacacacaacaggttgtcgccggttttaaccatcgcgctgatgtcaactctgcggtcaggcgactgcacttgctgaaacccacatactgacggttaacatagacttcaaaatagg

SEQ ID NO: 18431 - DNA, 623 bp, Arabidopsis thaliana
accaatctctctggtaccatctcaatcttcttccctttttgttagttggtatatatagtaggggtttctagttttttaataaggctagtgtccacacagcgactgtgtttggcgaactatggaggcttgagcctcttgctcctcagaagaaggccatgtggcgcagagaacttgagtggctgctctgtgttagcgattctatcgttgagctcattccttccattcagcagttccctggaggcggaacttatgagatcatggagacccgtccacgttctgatctctatgccaatctccctgctctcaagaagctcgatgctatgttgatcgatatgcttgacgctttctccgatactgagttctggtacactgatcgcggcatagttcttggtgattgtgacaaggattcttacaattctccagcttccgttaggcaggaggacaagtggtggctgccttgccctaaggttccgcctaacggtttgtcagaagaggccaggaagaaactgcagcagtgtcgggactttgctaaccagattctcaaggctgcattggcaattaacagtggcgtgcttgccgaaatggagattccgacccttacttggagactttgccaaggtatg

SEQ ID NO: 18432 - DNA, 1114 bp, Arabidopsis thaliana columbia
aaaaagtaacatcatcgatttctccttttcgagatgaagaagaaggagatccttactctctgctacaaagctccctcttcccttaatctccctctttttctggttccatgttcttctctcttgtcttacttatggtttctggtttcgttgtttttttttgggtaaaaggtttctttggttttgaatcataaaggccaatgttacatgttattcgttgattctagattaggctttagattgtaaatcttaaaactttttttttatgttatgtgttcttaattttatgattttatccttcaatttaaatttatatttgttagatctgttgaatttgttgcctttgtttttgaattgaaaaatgtttggatgtcatttgcgtagacggaaagtgattggacgcataaggctgggtatgtggtggttatgcaagaagattggttgatgtttatgagctttttttgaaactttggtccatgagcgtgcgctggccgccgtgagttccagtgtcttgtctggcaactccatacttatgtcgactcatggatgtcaagaaaagtttatgagaaaacacgaaaatgtatatccatttgttcggcgctaggtggatacaccttcatttcttacactatatccatttggtctatgtttcatggatacaactctacttctaaaaatcatatatgaacacgtacttgccgattgtcagctaaaggaatccgtccattactcttcgaagatatgttatccaactaatgaagtgttcttttatttgattttggtgaacaatgtttagatttggtgttattcatctttcgtgtatttgtttgtgcagataaaacatttcaacgtaagagctgtaaaatataggatcattcctatggtgatattcatatgattatattcaaaaatggttcatacgagtgtgtaaacctctacgctttacattaaatcctaatttacttaccctaaaattaaactcaaaccctcccatgatccttctccactaaatctaaaaccataaaacaaaactctaaaccatacaaaaaatgataattttaccaatcaataaaatacatttgcagcaaatcaaagacatagttgtccattgatgact

SEQ ID NO: 18433 - DNA, 613 bp, Arabidopsis thaliana
tggaattttttatatatgtctgcagaaaagaagggttcacttgactttagagcttccctggagtgctgatcgtgcaattcagcaatttggaagaactcaccggtcaaatcagacatctgcacctgaatataggttgaatgacaacgcttgtgtttaattttgtatccgtccaatagcaaaagtatgctgttgaagttgatagttcttttgttttggtcctgtcagactactcttcactaatctcggtggggaacgccgctttgcctctattgttgcaaagagactagaaacacttggtgctttaacacagggagaccgcaggaaagtccctttcttaactatttcttagttagtcttttggcttgttattgcttaaaaccttgccatgtgttttgtctcaaaatttggtgtggtgtactgcagggctgggcctccggcgtgtctttgagtgcgtataattatgatagtaactttggtaaaaaatccttgatggtgatgtatcgaggcataatggagcaggtatcctcataaaagcctgtagtctcttactccttaattttgcttcttcagtatttaggaacaatgatacaggataaagtgtgaaatatagtat

SEQ ID NO: 18434 - DNA, 645 bp, Arabidopsis thaliana
agaaatactgagtatgagaacaactctatccttggagggcgtcctatctctgcaggcacctttattagtcttacagaaatggagagaaaaatagctcatttggctgtgatccagaatatggctgtcgtcgaaccttatgtagagtaagttacaatctatctctctttctattgcttttctatattgcttttcactttctgcttctatgaatgctgattctgaattttgttttctctgtttactagtgagcacctgcagcttctacaaaacactaatgggagatgcagacgtgatgcgtctctgttatggagtatgcacactcaaaattttgcatcttggcttaaagaacaggctagtatttgtctttcacttagtagtttagcttaaagaacaggctagcaatagatataagagcctgactttttctatttttctttgatagatacatcttgattcaagtactcatggtgaaacactgaaatggctggcttatggtccacgttgttgcgcaagatcatttactggttacatagtgaatgggcaacgatttcacacaagaacagttgacaggaacacacagaatagtggtgttttctatgaagccacagcagtttgtaggtctagtgcaaaggataaggaacaagt

SEQ ID NO: 18435 - DNA, 681 bp, Arabidopsis thaliana
attcgaaactcacggataacagtctctaccatttctgtgtgttttccgataacattattgctacttctgttgtggttaattctactgctctcaattccaaggcccctgagaaagttgtgtttcatcttgtgactaatgagatcaactatgctgcaatgaaggcttggttcgccattaatatggacaacctcagaggagtcactgtggaggttcagaagttcgaggatttctcatggctgaatgcttcctatgttccggtcctcaagcagctgcaagactctgatacgcaaagctattatttctctggacacaacgatgatgggcgcactccaatcaaattcaggaaccccaagtatctttccatgctcaaccatcttaggttctacatccctgaagtgtttcctgcgctgaagaaggtggtctttcttgatgatgatgttgtagttcagaaggatctttcatctctcttttcgatcgatttaaacaaaaatgtgaacggggctgttgagacctgcatggagaccttccaccgctaccacaagtacttgaactattctcatcctctcatacgctcccactttgatccagatgcgtgtgggtgggcgtttggaatgaacgtctttgatttagttgagtggaggaagagaaatgtgaccggcatatacactactggcaagaaaa

SEQ ID NO: 18436 - DNA, 409 bp, Arabidopsis thaliana
atgatcccctcgctggtgtgaacacactaaatcagtaagttggcagcatcacccagaatcaggaggaacagcacgccaacggtgatagccgtcaaaccggttttaccgcccgccgccgtacccgccgcagactcgatgtataccgctgccggagccgcacccaccaggccagagaaaacgctgctcatggagtcagtggtcagtgctttcccaccgtcgatgatctgcccatctttatccagcaggttcgcctggccggcgacggacgagatagttccggtggcatcaaatactgccgtcatcaccagcgccagaacgcttggcaggactacaggattcagcgcgcccataatgtccaggctgccaatcagtgaattgccgttttcatcgctcaatgaaggcatggcga

SEQ ID NO: 18437 - DNA, 933 bp, Arabidopsis thaliana
tatccaacctctgcccaccagtagtaaacttgatctccttcaacgcatgaacggataaaaatctatatatgagtatgaactagccattgctgatagtagattttccaaaaagttttgagtcttctttaaacgaatggaacaagagtttagactcatctaaagaagagagaatcgcagcagagtagccaaacagagaagtacagacagacaaaatggtcccaaaactgacaaagaaggaggaccctataattgcataatgagatctaacaaaacaagagcacaacacagactctgtatggtcttcacttgagagggatgaacctggaggagtgggtagcaccaacgccaggcctaccgtgcttaactggcttgtacgagatggagaactctgcaaggtaatgtccaatcatctcaggcttgatctccacttggttgaaagtctttccattgtacacaccaatgatgcttccaatcatttcaggcacaatgatcatgttcctcaagtgggttctcactggttctggcttctcaccagctggtgcctctcttttctggtcacgcataacaaagcagtaatctttagaagttgaaccaatttggttgcatagaacaaacacaaaacttctcacgcatttctaagtaaagcacacagatgcaatgagaggaaaacacatagctcacaacgtagaatcagattcaacaaacatagaacagtaccaattcaaaacagttctaattagtaacgagagaaattagggatcttaccgccttgcggagtttcttaatcaaagccataggctttctcgtcaatcctctagagaacctatacaaagagaattcaaattagtcaaaacacatgagatgattctacaaaggacgaaacttttactgagttcaaaaagcgttaccttctgcgaatacgggaagagaaga

SEQ ID NO: 18438 - DNA, 1442 bp, Arabidopsis thaliana
taacggccgtgctctaaaggttgcgggccacccagttgcatgtgaaagctaaagacctcacgcccaagtaacttgttgagtgtagagaagccagtcaagatgatcggctgatcaagtctctgtatgcaccgcatacctaggcgggcaagataagcaccaattccaaccgttcttccactaacaaaggttaaagtaaaagtttcattgtatgcctttgagtaagcacccgctatggccccacttcctgttaagttctctacaccaatcccacttccttagccaacgatcgtatcaatcacccacctagtttccccactagagagctttacttcatgggcaatgacagatgatccaatcctttcgtggtcttcagggcttaggtatatatactgaaaaccattctcaggggaaatttcatccgaccatccaactttgaagcaggctttgacttcttcagcaaccccaagtcgggcaccagaatttgctgccaagtaaatcaagggaagctttttggtacaagcgagttcagtcacagcaaggaaaaatgcgtcctctctaggaccaaaagaaccagctttgaatgtgacatcattggcgacaatgagaagtttccgtcccataggaaactcaggagtcgacatctctaagatccaggccaccattccaatgtcgttgagaccagctggtcgttcaaccggaataagagatgtacccaaagaaccttctgtattggagaatacaagctctttgacgttgatgagtctattcttgcatggtttcctaactcccgagtgttgtgatgcccaattcagctccaatgctgtctcaaatgcctgaagagacaggaaataacataaggtgggttggaaacagccaaaagaataaactaagtgtgaaacttcagaattcagttactaaccaaggggaagtcatagcaataagtagtgttactcctccttgcggctaaacgtttcctgtccagattattaagtggtttatattgaccattgatcagagttccatgcaaaggtcccttcttagttattgagtggtagattaaactgtttctcccagtagcttccacttctcggtatatctgaaacatgaatcacagagagtcaaggtttggagaagtgtacctatgtatgttaccaacaacaaactatttgtaagctgaatttacatggacagtgcaggtacggccagtcacgtttgcaaccacgaccctccaagcgccatttgccagtcccgaggacaccaaccacagtcgcacttcccattcgcaaacacccaatgcatgcattctcactccaacagacctatgtatttcctgtgttgcttcttctaagatcgtctcaactgtagtttcttcatcctccgcattcacttcaaatctcctgagagaaacattttgaacattgttactataaagttctaacaca

SEQ ID NO: 18439 - DNA, 609 bp, Arabidopsis thaliana
  unsure (1)..(609): unsure at all n locations
ggaagatcttctaaggaatatcttgatctttccaccaccaaatacctagtaatattggaagctttttttttattctttgtagatggtggaaagatcaagatattccctataagcttccttacatgagggatagaattgtggagacctatttccctacattgggactatattttgagccacgattttcacttgggagaattataatagctaaaatgatcatcatcgtggtttctttgaatgacgtgtgtgattcatatgcaacttaccccgaagctaaaagtctcatagactctttgcaaacgtactactatatgcatccagttatcattcgtttatgccttgtagatttatttattaattattttattatttttcttaaaacacttattttgtctagaacagaaaacaatattttcatacgaaatggcaatattggacaggtgggatattgaagcgattgacgaattccaaactattcgagaanagtctctgattaatattggaactataggagagatgaaagagaaatgaacctcgaggaagactgctagtgtcacacacgatagatgaggtgattatagccaaacatatcatagtgctgtgaaagag

SEQ ID NO: 18440 - DNA, 666 bp, Arabidopsis thaliana columbia
cgccggcctttttcttttaggcatggtgcacttttacttcaatttcattgactacgcatcagacaatgcttacaaaagtaaccggtggtgtgccgtgctactcactatgcttaatagtattcatcccaactctcttgtaaatccctagaactaagcaagcattagaatcaggttcgagaagtgcgacttagtcagggacactagccagcaggtaactctccgtgaacaaaaacgatatcaccgggactcgcctcgaggaatcgaatagagcgagctgcaagaaacaaggaaataagttaagcgtcaaatctcaacgatcatctcgggtgtaaactaataattctaagtctaactaccaagagtgccccatctcgtcaaaatcgtcccgaccaggttttcgggaacactgacatcgttgagagccacaaagaaaaaatgatcagtatagggcccgtccttgctaaggaacccccagatgattatcttgtctttcgcaggggaaatgtagtatctgttcaccaccgacttgggtactcggcgaatctctaaataattctttcgatgcgtaacggtgatctcattctccgtctcgtaattccgcaccaaaatcccgacgagatgcctcagggaacgtgttgtaatctaggaaagagtaatctggtatga

SEQ ID NO: 18441 - DNA, 1075 bp, Arabidopsis thaliana columbia
agtttgcattattcattttgtttcacatcacataaatttaatgtatagaatttatttttaattagttgcattaaaaaataatgtggaagaaagccattgttttacagaatccattctaaattaagtcctcaaaaaaactcaatatgtaatcaggtttctaattcagaatatttcaaatagtatgtgtaaaacatgtaaaagatatttccactgttttgtattttaattttgtaagttttctttatttggtaattgattgttaatatatagtaaaatgattaattagatacttcatttgaataattcaacttttaaatagatgaatacaatattgaatatacaacatgagttcgatccaaacccaccatatattaacaatcaattacccaataaacagttgaatagaaaaaaagagaaaagaaaaagtaacatctaccatatatatcattaaatcagattaatttttctctcttcgcttgtaatacgatattatttattgacaggaaagtgaatgttgaattggaatgtggaagcaaatttctcgtatgtgttttgtcaacatgttcgaaaaacttatgtgcatatggtgactacagaaaggggaggacgtgtttctctgcacatggttaacggtgacgaagctcatgctttagctgaagtggtggctccaaagctttgagatgtaggtcgtgatcatatgaaaataaatcgtgaaaaatgtattattgtgatgtaagattcttaaattcatttttttcttcttttttgtcatcagattttatttacacctcaaaagagtcaattctgaggaaaattgtttacataagtgatataaagcggttcaatacgaatttttcgtgtcaatttgtgcctttacatttgcagttcgagaaattaaagataaggaaaatcttatgaattcttccttatcggtcttgaattcctccaaataagttgaaaacgctggccattcggttggggaaaacaccatcttcaccaggtctgaacagtctgtaaaaaatgctacttcttggttgtcggcaccaatcatacacttcatcgcccagaagtaaag

SEQ ID NO: 18442 - DNA, 543 bp, Arabidopsis thaliana
ttcctctacctagtcttaactattcctcttaatatttcatttggtttaatacctcgtaggtgactatgtcgttgtttatacgatatagaacactcaaagcttgtaatatttttggcttggagtcaaaccattcgtacaatggtttctcgtcgcaatcttccatcgcgataaagctgtacaaagcaaaatcatccatccccccagtgacctccccaacctccatgtactcatcaaaggttggcatatagccttcacttgcccattttgataatgctaggtacgctctccctaagctcttagtctaaggatttcatttgaaaagaaaagaaaaaacttaattaaaaagaattacccttttcacagcacttatgtatattttttggtctattaatcacctcatctatcgtgtgttgtacactagcagatcttcctcggggcttcatttctctttcaatctctcctatagtttccaatattaatcggaggactattctcgaatagtttggtagttcgtcaatcgcttcaatatcccactgtccaata

SEQ ID NO: 18443 - DNA, 689 bp, Arabidopsis thaliana
gtgcaataattaataaaaggtgtcatagtatgcaagataagggatgtataatctatcagagttcaaacatatccataattgtgcaatagaaaaacaatggattgctatattcaactgcaatcccaaaatgaatatgagaaatgagctatacagattacagaaaaacaataacggaacaagaaaaaaagaccattcagacagaaagttatacctcgggaccattgaatacagaaggctcattcatgtcattccaggtgtacaatgatggagttgaaccaacatagttcttatacgagaacctcccaccccaccattttctaatctctgggctcaacatatcaatgtaagatgatgaaccaggccagcaccaaccatcaaagtcttttccagatgaatccttaacatagtatcccatctgagtagcctctttgtgtaagaagtatgagtcatccctcttgatatgaggatccacaatggtcaccatcttcctaccctttgcagccaatttcttttgcatctcctctggatgaggaaacaacacactatcccatgtaaagtatctcttcccatctgtatgctcaatgtcaagccagagaacatcataaggaatatcgtgttcatcgaatttcgagtcacctgtgccacatcctcctcatctttgtagtccacctacattgatgataccagtg

SEQ ID NO: 18444 - DNA, 1226 bp, Arabidopsis thaliana
cgatctgaggacgcatgaatcgggatctgaaagaatcatgagtatccatcaaggaagcaatagtacttgtgatttgctaacctctccaacatctgatcgataaatggtaaggggaaatggtctttcctggtagcagcattcagctttctgtaatcgatgcacatccgatgtcctgtgattgtccgagtaggaatcagctcgtctttctcattcttgactactgtaacacctcccttcttagggaccacatgaactggactaacccaactgttatctgaaattagatagataatcactgcttccaacagtttcataatctctttcttaaccacttcttttagattcggattcagccttcgctaatgttcaactgaagacttagactcatcctcaaggtagatcctatgcatgcatacatctggagatatacttgcaatgtcatcatgagaatagccaagagctttgcgatgattgcgcacttgcttagcaataaggtgagctatgcgggattaagagaagcaatcacaataaaaggataagtagaattttcaccaagaaaagtgtacttgagccctgctagaagtggtttcaattcgattttaggagcctttgttggatcccaatctaaagtagtagtcgacgttgaagtcacagatggaagagcttcttcaactgtaagttgcatcacatgttcggtctcatctagcagcttagtatatgttgaagtttcgcagtccaaatctgcactatcctctatggaagagaccaaaactcgctctaatgggtcttctaattccatctctgaaatactatctgaagctgaggaagtgaaagaatctatcaagaaggttttcccttctatgatcggtttcttgaccaaagtgttcatatcgaattgcattcagccatatcctcccttgtcgaacatctatgattgctctagctttgtgcaagaaggatctccctaggattaatggatccttaggttccttctcataaggcaagactacaaaatttgtaggaatcatgctctttccaatcatcacgagaacatcaataagaattccatctcgaattcgggtagaacgatctactaacacaagagtgataaaggtaggctcaagattggaataccaagacgcatagcaactgaacgaggcatcatattcacactagaaccgagatcacataaagctccttggaaggaataatgattaatggtgaca

SEQ ID NO: 18445 - DNA, 975 bp, Arabidopsis thaliana columbia
gttaattctgttttttgtaaacaaggaatcagcgaggagtgacgatcgacatactcttggtgtcgatcgacacagtttcggcccagcaaaaaccctagacgctttcaagtttccagaagatcaaatttgctctagaagactttcctatttgcattattagtccctggacatttttagggtctatatatattgtttttagacctaagtttcttttatcaagtcttttatcaagttttctacaaaccctattactgagagacataagccattcgtcgattgttttcagagttttattcagatcttaatatagtgaagagatccattctttccccttctctatttactgtgtttatactttcacactcaatcatgttgtttgcttcaatcaatatatctgagtaatttgcttgttaggaatagggtttctcattagggattcatatggtttagtagattgccccctctgcttggttatctatagatttcttcatctttgattatgcttaatgctagatctagagtaattaactagatcttgaatccagacaatagatatgcccaccataggtatctgtagttggatctattattcgatgagcctggtttataggtgtgtaataagaatcggcctatctactagtgaacaatcgaactcgttaagaatgcatatttaggttaataatctctcggcttctctggttattcttagctatagatatagggagtttcgcggaacaccaccgattattccataattagagtttgagtttaagaatggttcgataataacctagctttcattagatctactaaccaatagtttcctgagaataccctgttcctaactcttttcttaatcatttacaacacaatcaacctgctatctttttactttattttcattttatttcaatcatcaccttctagcttaatcttgacattgaactcattgtttgacaaaagacagtgtgaatt

SEQ ID NO: 18446 - DNA, 555 bp, Arabidopsis thaliana columbia
gcttcccttatggacgttacggcatgtccaaatccagacctggatgggaacagtcctggtgagattaactgcttagagaattacaatattttttttcattgaatatacgtttataggtttgttctcttttctaatgcaacaattatttttattattttcgcggcatgtaggtcaaggtggtggcatgggagagatcggtattagtgaaaaatatttatgttaatgttttcgaatatcacggttcaactttttggtttccaatatataattattgattttgaacagaacataaattttttataatgaaatttctaattcgagaaaaaaaaatttagtcacttccgatccacaaaatctgagttaagaaattgaaaaaaaagagctaaatgttttatgtttatggaacattattttaaatgttattttaggtagtcaaatgggttatctttgggccagacattagtcattgaggaggccacaaaggtatagaactagagtaacgaagccttgccttgaaggcaataatcgcttccccacatcggaagtttgaggatg

SEQ ID NO: 18447 - DNA, 1123 bp, Arabidopsis thaliana
  unsure (1)..(1123): unsure at all n locations
ggtgatggtggcggtctgattcgtcggagttaaacgcagccggagttaattgatggtgaagatgactgtgatgttgtgatgtgtcacggacgagaggcctggatgagagacgaagagaagtctcttgtttcaccagaacgaagagcaaccaacaaaaggtgaaggtttgcagttgcggataggttatggattcccattacctttataaagaagaagaagaagctggtgtgagactaagtgtcgaagaatgagacaagggagaaagactcttattgtaagagagggtcttagctactatcttagtgtcgttttaggcttgtgggtgtatttaagcactgcttccgcattattagggtttttatcttatgaagatcaatcaaacaaactttctaaaatctctcttatctctcttcttctcgaccttaaaggtgcaatacttctctccctccatttctttctgttcttttcatatgagggcttatcagttgctttcgccaggagtagccatcaaagtagtcggaatctgagtttgattttgtcattgaaaggcaagctccatcttctccatgtcgagaacaagagagctcggtggggaaaggaggagacgatggctgacgggaaaaattcgtatgttcgccggaggtcgttggagtctggcagnggagntntantctgcgnttacgtcattagatgacgttggttgtcggagatgtcgatgtcgtcgaggaagtgtgttgttgtcaaaaggtggagattgttattgggtttgaccaaaacacacaacattgggcttttattgggccagacggagttaatataaagaaaagaagaacaaaagtggtccatcacacacatatatatatatatatatatatatatatgtggatgtaggtgtgagacaagacacaaagagagttctagagagaaagagaagaaacgagagtttattcttcaagaagctttctccttctttgttctttgtgtttgatctttgttcttcttgagattgtacgtgaatccatagacaacatcacaagtcaagtggtgtttgtgatctctttgatatagtgaagctttgggagcaagagatctctcctcagacatagcggttaagccgtgaact

SEQ ID NO: 18448 - DNA, 479 bp, Arabidopsis thaliana columbia
actctaccccaataatgtgagttagattcaatggtatgcttcccgtcaagtaacaagctttttggaatcgatggtttaaacgcaatgaaacctcctgcattgtgttggagtttacaatgttgattttggctttccccattaacaagattaatgttgaagaatcttaacagaaagaatattacctggtgaatcataatattctggtgggtcatagaaaaccatcccctctcgaagcctgtggcgttttccttcggtacctgcatactggaatgttgtatgcacggcatatggttctagcctgagttgttgatacatagccttccatcgaaaatagaagttacctgttaggtcatttctgaacacaaaagaaaagaggatgataatataacacaaaaacaggaagcatgaagaaaggtacctgaacaaaataagtatgaccactgcaaaatatgctagctggcaaaattccaccttgagat

SEQ ID NO: 18449 - DNA, 487 bp, Arabidopsis thaliana columbia
tcgccagttctgcttaccaaggaactgatgtgagtatattctcctctaaacttagatttactgtaacattttctgtaatttagactgattttgtacaaaaacacatgatcaactaagaatcttgcgtggaatgatgagcaaactcgtttctaccttgaactaagaattgaggagaagcttaaaggaaatattaggaatcagaatgtcaatgatgctgggagacagactattatagatagattttatgaggttgatggtcgagtccaaggtagaatgctttgatattttacgcatgcaccagtcaacatttaggagtttatgcaagattctttcagaacaatacaagttagaggagtcctgcaatatctatcttgaagagagcgttgcaatgttcatagagatggttgcacaagatttaactgtacgggtcatagctgagagatatcagcattcacttgagacagtgaaaaggaagctggatgaagta

SEQ ID NO: 18450 - DNA, 490 bp, Arabidopsis thaliana columbia
taatctgcatttgcatagaccttaagctgaagttcagaagttgcagaatagaagagaccttgcccaatagtacctttaatgtattgcagaatcttgtaaactgcttgtaaatgagctttacgaggtgccatggagaattgagccagcttattgacagcaaaagtgatgtcagggcgtgtgatgttaaggtacatcaatcgtccaatgagccgtctataaggtccaacttcaacaaagtcaccaccactatcatgagcaaaaaccatacttggatccataggaatgcttgatggcttacaaccaagctgacctgtttcatcaagaaggtccaaagcatattttcgctgacttatatgaataccgttatctgatctaacaatctccaagccaagaaaatatttcaattcacccaaatcacgaagcttgaagaatgatttcatctgtgactttagaatatcaactgctgcatcattgttactagcaatgatga

SEQ ID NO: 18451 - DNA, 538 bp, Arabidopsis thaliana columbia
tattacatttaataacaatatatcaaaccaaagattttaatacatttctttcttttcttttcatgtcacaggatcataacttcacaactcacaacattcatctcgtacgtattatcttctaaccggaatgctttgttcgtttttccaaaagttttccgcatcaatcgtggttttaatatccactaatctctcgaaattctccttgaaatatttagccccgtagattttaccttcctggtacgtagacttaacacttgaccctatgtcaagatcacggtaattcaaaaacgcctccctcggattactagacacgtacggggtcatgaatctataaaattcattcgcgagtgccaaatatttcttctccacattatctccagcttctgaccagtctatgatatactcaatgttgaacaaattgcctgctctatgtgggaatggtgtcctcgaactcgggatctcaccatccttcctccatacggattccaattcattttaactttctcaacctctaccaatttgttgagtacaaaccgag

SEQ ID NO: 18452 - DNA, 222 bp, Arabidopsis thaliana columbia
tttcctgaagacaacccgaaaggactaccaccaattcgtggaattgagcatcagatcgattttgtgccaggagcttcacttccaaaccgaccagcatatagaaccaatccggtggagacaaaagaactacaaagacaagtggacaagcttatggagaaaggacacattagagagagcatgagtctctgtgccgttccagttttgcttgtgccttaagaaaga

SEQ ID NO: 18453 - DNA, 263 bp, Arabidopsis thaliana columbia
tcagcttaaatgtttgatgttctaacgttgacccgtaatccgggttgcggacagtgtctggtgggtagtttgactggggcggtctcctcctaaagagtaacggaggagcacgaaggttggctaatcctgcaacgttacaaaggaggctttccccatgatacgacgggtcatcattcggccagcaaccgagacttcaatgtttaaggattccagttcctggttatccttcgcatcaaactcttcgtgcaactggtcagaggtat

SEQ ID NO: 18454 - DNA, 488 bp, Arabidopsis thaliana columbia
caccccacgctagtccatgccctttcaatcccttgttttttctctatttatgaccgtcgatatatccataactgggggcctggtcactctgtgagcaaagatatataccagttaattttgtgtgtgtgtggtatagatggggtgtcactttgttgtccaagatagtcttgaagtcctggcctcaagtgatcctcccacctctgcctctcaaagtgttaggattataggcgtcacgactatcgctggcccaataggtttttttgatatcgcagtgtcttatacctcacgtttgtctctagtgagtctcagaacgggatatataacatggtgatactattcttctttctagctacttcagtgccctcatcctggtggagggcatggatatcgagtccttgcataagtgtgctttggatgacagaagagaactgcatcagtttgcgcaggatgggcttatttgtcaggtgacttggaatagcgtctttttt

SEQ ID NO: 18455 - DNA, 539 bp, Arabidopsis thaliana columbia
tcccctttgtggattgtttctttgcaggggaagaaggagttgtatcggtgtttaagaacactcaaagacagcttcacacgacaagatcatgggactttctaggacttgttgagtctaaatacaaaagaagtgttggaattgaaagtaacatcattgtgggagttcttgacacaggtaaagtaaatttactagttagaactcgaatctgaaaatatcgataaaccccgatttataacccttttttattgttgtcaaaaggaatcgatgttgaatcaccgagctttaatgacaaaggcgttggccctcctccagctaaatggaaaggaaaatgtgtaactggaaataactttactcgttgcaataagtataaatcctctgtttttataatcctctgtttctgcaacttctctactctcttctttttactgaatttggttttggattaatgttaaaacagtaaagtgattggagcaaagtacttccacatccaatcagaaggccttcctgatggcgagggagacactgcagcagatcacgat

SEQ ID NO: 18456 - DNA, 756 bp, Arabidopsis thaliana
tatggtgtttggtcagtggaatgtacattaaagaagggttttgttcgacaaatgatacaggattgttcaagtggatctcaagttccctcccaaacccattgtgtcatcatctgcaaaggacctgattagccaggtttctactcgcattcctcgtaaatctctctaagtgtttgtgcatttgaagagtgaattctgattttcacactttctgatcaaacagatgttggttaaggagtctacgcaacgtttggccttgcacaagcttcttgaacacccgtggattgtgcaaaacgcagacccatcaggcctttacagaggatgaagcgatgaagctaggaaaagatttaagattgcattcttggcactttgcaccacttactgcaaaaagtctgaccatttcatagttctatatatgtaattgctgtgttccaaaagtatttgtactacatttttctacgaagtttatatagccacaagattcgtgtaactttactccaattattttcgaatcctacatcactttttaaataaaaattgttcggaatggtttcaaacttacaacagcttttgttcatcggtaacttattcaccaattgattggttaacgttaactgatgttactgcaggtaaccaaatgagatggatttgttcacaagagatccggaacattttttatgttgtaagatgcaaaggtgcaaaggcaaacgaatgaaagattaaccgaacatgaacaaaacaacaagagacgcactctgc

SEQ ID NO: 18457 - DNA, 555 bp, Arabidopsis thaliana columbia
caactcatttcgccatgtaatctaatcttctccaattgtgctactccaagacctctctgtggctgcttcggcttctcggagccattcttcttccctcttcttgtcgctggagaagaagaggatgacgtcggagacgatgaaggcggcgaagatcccaccacgtttggtctaccaaagaaagtacttcccatgtttctttgatcggccttaaattttacttgcgatcgtaaggtataccggaaaattcaagaaactagagagagaaagtcttctctagagagaaagagagggagagagagagaagaaatgaattttcttattttgctttgagctaagaaattggagagatctctttcatggtgaattggtgatctcttttttataatcttttttacaattcattttgagtttttatagaaaaccttagtgtataactactgcatcgctggatcagattgttccagatttcaatagatacgccaccacacaaatacattatacattacattacgtagattttatgccttattttgattttgcactccctttttttat

SEQ ID NO: 18458 - DNA, 137 bp, Arabidopsis thaliana columbia
agacgcacggcgatcaggggctggcagccgatcctatcaaagcgtacttcaacggcaccgcaggccagagcttcggcgtgtggaacgcgggcggcgtggaactgtacctgaccggtgatgccaacgactatgtcggt

SEQ ID NO: 18459 - DNA, 639 bp, Arabidopsis thaliana columbia
tgtagactaagaacctgcagcggggttggatactgcggcttatggaatcccttataacttttgacacaaaacagtggggtcttgggttttaataaaggaaagagaagaggtggagtttacgaactgaaactgtaaattaatgcgaaatgacaagttttggtagacagaaaatggatagttgttgcatgaggctgttgtatctttttctttgattcatcagtcctgacatggatatatagttatatactatgggaggatcaacctcgatcaaaggaatattatgtttttcttgtttttttcttgacgtatagctttatgcctttatcaaatggtaattctaggaccttaacagattaacatttagtttcaccatcgatcatgcaaaagcaaaacatctcttgatgcagatgttagcaacggtatatggtctcttagcctaaatgcttctatgactcatatatgctatcttcctttccggctcagtgagctgttatcaagtaagaccgcctgcaaaaccagtcattgatttcaacagctctaaagtagttgaacccaattattctcaagttgtgttcatataaaaacattgcaatagcttaaatctttattggggttcatgtaagtgtatttatagggtag

SEQ ID NO: 18460 - DNA, 800 bp, Arabidopsis thaliana
agattgatcggaaaggaattcagttccgccgtccccactatgttcaagagagaagactacaagctgactatacacgacatcgcattctccaaatggcggaatcttataagacacaatgattggaaagatttcaataatagaaaagaaagggtccgtagatacagacatgaggacttaccccctcaacgttgtacgggtctgtatgagctcggtgtaggcgtcatcggtcaagaccaaggccaaaactttgatcctgataataatgttcttggtgtatatgtcggacaatgtgtagacgtaaaatcaagactccaggattatggaagacgcggtggtcatttgccctcgggtttatatgaggacatattctcggaaggatactcagttttttatagatgggcaccagtaaatacatgtcttcttatcttctctagttggtctgctacgtatacacctttgatcctaactcatgtgattgtttctctgctttaccgtgatttatcagatgggatctaattaagtaggaagctgctgcaacagaagggatgcttttgagcacttttgattatgcatggaacacatgcagtaatggggaacgacgccatcttgagttacagaagctcggtgaccccgagtttatgagcaagagaaagtcacaagtgctagttccttctattcgagaccaagttgttaccatcaaagtagagaagagtaattatactttcctcacttcaacactcaaagtgatgagaccatttggttaaccggagtaaacctacatcgactaggtcaaagatatg

SEQ ID NO: 18461 - DNA, 584 bp, Arabidopsis thaliana columbia
gttcttgatgatgtgtattaggtctcagagtggataactaaacgaggtatcttcgatctaagcactgaagattttgcatctaggctttgtcttgttgagatcagtacagggttgaaagaagcagaaaagttcttcaaaagcattcctgaaaacatgagagacgactcagtccacaccactctcttaagcttgtacacaatatccaagaaaacaagacacgaagcggaaccacttaccagacgatgagggtgcaaaacatgcttttgaaaccttacccttattacagcatgatttatctctatgctcttcttggagaaaaaaacatgatcgacgagattctcaggcagatgaaggagaatggagtagaacatgacaagaatctcactgccaataacgttttgaaggcttacgcgagtctacctgatgtggaggcaatggaaatgtttctgatgggattagaagtcgaagaaccgcgattctcattggcgtgcaaacgggaataagcatccaaaggcgtatttaaaaggtggtcaagtagaaaagcggtagagatgttgccgtagacagaacttgtagttgatcaa

SEQ ID NO: 18462 - DNA, 572 bp, Arabidopsis thaliana
caagatcgcctaaatcaataatttcgtagaaccatatccatctatcgtcacaaatatatacacacttataatacaatttcataaagtacaaggttcccttatttgatgagagtggagcaaaacacaaactaaaaaatattatgtgccacgctcaaaagtgtatactttggtctatctcattgcacacataccaatatgttccatatccttcttgtactcctcatgattttcccaatcaactgagcgatgcacgatccgatcaaattcgacgacggaattaggctcgttctcgctggagaaatcccggcgaacgaacctccggtttcaggagctttctttctcatgtagaagcttctactgcctaattctccaattatttctcttttctccaaacctgaaaattacattacatcgaacttaagtatattttgattgtcttaaccattcaattatgtgacaccaaagagaggtaaatcgttaggtttagtcacattttctttattacaggctatataactcaagaattatgtgatgtatctatgttcacatgagcgatgagtagttttgatatt

SEQ ID NO: 18463 - DNA, 575 bp, Arabidopsis thaliana
tccatcacctctctctctctcctttcatttatctttattctagaagaagagcattttatcacctttaaagcgaaggaggcacatactgtctagacaaactaaacagatctttaccctcaaaaggcgatgtccactctctcccatttccaactaaagcagcttcctgcactcccattgccacacccatcccattcccattcgtcatcattcttgtccttccattcatgtgcgcttcatacggggatgatgctgcactatatggggatgatgctgccacatactgctggctaggtctcacacaagctaggcctttatctagactccagtcgatgttgttgtaatccaaatgccccagtgacccatccgtgttccagtccagcccagaagaagatgatcccgccagtgatccaaaccccgagaagagcccaagagaagcagctggagccacagcaggcggacgagaagatcctgccattctgtgaccattgttgtcacttggccttgatattgttgatactgaagttgctggtacatcaggtttgagttcagatcattaggaggcagacttcttgagg

SEQ ID NO: 18464 - DNA, 844 bp, Arabidopsis thaliana
ctaaagtttcgacggtttttggcgtgaactgggcgacactggcgacaaaactgatggttgcaggaatacgcagatctggcgcggcatcgaggatcagccgggcttcaccgcccagtttcagcgtgcccgcctgttcggttggcaggaagaaagtcatatagacgtcgctgagatcgaccatattcagcacccgaccgcctgccgccagcacttcgcctggcttggcaacccgatactgcacgcgtccgtcacgcggggctttcagttcgctgtcatcgatatctgcggcaatgcgccgttcagtggcttgtgccgcttcgacgcgggtttgcgcctgaatgatattggtgcgtgccgcttctatagccgctttagaagccgatacctgagctttcgccgattccagcgcagtcagggcgctctcagcggcggcgcgatcgtcatccagctgttgcgcagaaatagcccctcgttgggccagtgaacgggaacgcgtatgacgttttgctacggagtccagttctgcctggcgttgattaaccagcgactgtgcggcacgagtttcgctttgtcgttgctccagcaaagcctgcgcggcacaagcggcgctttgtgcctctttgatttgcgcgatggcttccagtcgctgttcctgcaacacgcgagtatccatcttcgccagcacttcaccttcgcgaacaaacttgccttctttcaccagaatggtgtcgatacgcccggcaattttgctggcaatatccacttccgtcgcttcaatgcgcccattactgacagcaaagccttccggcacacctgccgggcgcaacagccaccacgccacgat

SEQ ID NO: 18465 - DNA, 552 bp, Arabidopsis thaliana
  unsure (1)..(552): unsure at all n locations
nnnnnnnnnnnnnnnnnnnnnctaaagcgtcctgatttatgcctgcctgtatgcaggattttcattgcttccctgctaccggtaaccattccgggcagcatcatcgggatgctgattctgtttgtcctgctggccttgcaaattcttccggcaaaatgggtcaatccggggtgctacgtactgattcgctatatggcgctattgtttgtgccgattggcgtaggcgtcatgcaatattttgatttgctccgcgcacagtttggcccggtagtggtttcctgtgcagtcagtacgctggtggtttttatggtggtgagctggagttcgcaactggtacacggtgaacgtaaagtcgtaggtcagaaaggatcagaagaatgatggcgaatatctggtggtcattaccgctgacattgattgtcttttttgccgcccgcaaactggcggcacggtataagtttcccttgcttaacccgttgctggtacaatggtggtgatcatccttttttaatctgactggcatctcttcgacagctacttaaaggtacgaag

SEQ ID NO: 18466 - DNA, 539 bp, Arabidopsis thaliana
  unsure (1)..(539): unsure at all n locations
nnnnnnnnnnnnnnnnnnnnnnttaaagacggctgaaatgatgctggaacagtcgcggttgatgcacttgttggcgcaggatagccgtttgcgggaagaactggtgatgaacctgattcaggcagaggagaatactcccgcacttactgaatgggcgcaacggctggggatcgatctcaatccaccgcgagtggtggctattgttgaggtcgacagcggtcagcttggcgtggacagcgcaatggcggagttacaacaactgcaaaacgcgctgactacgcccgagcgtaataatctggtggcgattgtctcgctaaccgaaatggtggtgttgaaaccggcgttgaactcttttgggcgctgggatgcagaagatcatcgtaagcgagttgaacaactgattacccgcatgaaagagtacggccagctgcgttttcgcgtttcactgggcaactattttaccggtcctggcagtattgccgatcctatcgtacggcgaaaacgacgatggtggtgggtactttagagnnnnnnnnnnn

SEQ ID NO: 18467 - DNA, 619 bp, Arabidopsis thaliana
atcagcgttaaccggccgattgagaagcttttccggagaattcgcggcaatagaagcgagcgtggagaggaaaggatcctttggatttatcggaggcatagggattttggcagaggctttggcgcgaaaggcgtaacgaaaagtcttcaagtttcttctcccggatgaattcgaagatagaggaggatgaggagaaaaagaagaagagcgtggaagcagagaattcatggatgcttgtaaacaagacgccatggtcgaggagctcttggacacggaagctcgcgaaaatggactcgttggacaaaggaaaccagaggatttatcgatgctttcggaggggagagaataattactgggtcgggtttcgggttgacccgctatttgatattccggctatagcccaaatcacattttagggaacaggcccagtcgcaatagactttactttcggaccaaattgcaattattctgggccatttcgtttacacaaaactctggtgctatggcctatgagctgtagtgtgttgttactgttggtaggatacaggcaggggttgtactgttttagagtgacgttatcaaaaacaaaagcaagtttagttttacactgcaagtttag

SEQ ID NO: 18468 - DNA, 1117 bp, Arabidopsis thaliana
ccgttaaacccatcaagaaccggataaaacctcatcatctcattaccatcagccaaacaccgtgcatcctcttcttcacacgtgcctccgttaaaacccgcacgtgacttcacaacctctctatactcctcgaaccgggttacagtccttgacccgtgttccactttgaaaatcatctcgatccgacccggaaactcgtcggagctccagcttgaatgaaatataatctccactacgtttcttgacgggtgaccatcgggcagctcggtcagtgcgtctgatgttcgggcagatttgcttcgtcgggtccggtttggcgggttaagtaactctgtttcggttcgacaagacttgaaacgccttagattcgggtcgggtttctggtttttcttgcttaaccgggtatcgatcacgtctttgacgcaatgtgagctctttcgactacaattgtaactcgacgacgacattagtgatttactgttgaaattgtagacatcatcgaacgcttttgatttgcattgcaatgatttgatccacccatttggcatgttcgggttcttggatccggatctttattgttcttgtctctctttctctcttcaacaagttatgtatatgtatgttatgaacaaaaaaaatacccgcgagcgttttatcatatgatcattcatattacgattttaccctctaatttttctcctgggcctggcccatatggtttacataatcaatacctagaaaaatatgatacttatttggtttgatgtggtgactcaaattgtataatagattgattataagtttctaaacaaatattttatgaaatccaaacttattattcgtatctgatttttttttttgtgtgtgtgtgtattcaagcgactgattttgttgataaggatttttatttattctttcttgaaactaaagttattgaagaatgaatttatgattaaaacaggcagagtgataagagagaagttaggtgaagaaagcaagaattttctttacatttaatgaggaaagcaaattgacgcagtgtttccttttaacatatcaagaattgaatgatttaagtgttgtgtcgggttttatttattgagatattgacaatcat

SEQ ID NO: 18469 - DNA, 629 bp, Arabidopsis thaliana
cgattaattctttagattctttgaagtctgcttcacaagataacaaacctagagttcttcgaaagcttgtttctccttttgttcttgcaggtgacgagaagagtgttgatcgacacaccactaagtgtcgatcgacaccttcagctgcctcgaccagatcagtttactcaccgccttggaaggcaaggaggcaggaataatcctccaccactcaacccacatcctgaactctgccaagtcaagctattgactaaaaacatgggcttagcgggaggcaacccactagtttgatttttttcccctttcttttattttcttttatttttgatttatttttcccgctttctctatatttgaatgtcactggggacaatgtcgtttaagtctgggggaggttcttactaattatgcttttatttttgtttcttattatttttcgtttctaagtttattaagtcaatataaaaaattaaaaaaaaaacaaaataaacaaaataaaaaaaacataaataaaaaataaaaaacgttttctttagactagttcggaatcatgatctatatttctcttgattattgcgttattgatgagtgttgcaggttcgagtcaaccgactattggaaaactatat

SEQ ID NO: 18470 - DNA, 1156 bp, Arabidopsis thaliana
tgagatccctgggccatgaacgcaaaagtccatcaggccactacttcggctcccgaagtggaaaaggttattgaggcaacgaggagaacaccttttaccccaaggatctctaagttgcgtatccgtgagttccgagatttcaagcttcccgtttataatggaaaaggagatccgaatgagcatttgacttccttccaagtcatcgttcgacgggtccccctagagccatacgaagaagatgctgggctttgcaagttgttctcggaaaatttgtcaggacccgctctcacctggtttacccaactggaagaaggctcgattgacaatttcaagcaactctctactgcgttcattaagcagtacggatacttcattaagagtgacatcactgaagcccatctttggaatctttctcaatccgcagatgacccacttcggacgtatattattgtgttcaaagagatcatggttcaaatacctagcttatctgactcaactgctcaattcgcgctaaaaaatggtctttggcatgagtcacgcttccgcgagtctttgacagtaaaccggcctgagacgattcaagatgcacttcattgagcaacgaactggataaacgcagaagaagaacgagcttttctagccaaaaagttcagtgcttcaaatgttgcaccaaaggcgcctcaacccgtaaccaccaaaaaacccgccgagccctgaaaacctacagcaggaactttttccgttgagaaagaatcatcgaagtcctctcctaaagcttcaccgtccaaaccacctttctctcctaagggcaaaaacggcgcttttccgagtaacaaatgggtccaagatctgaatgcgtactgtgatattcataagatgaatggtcatgcaaccaaggactgcaaagctttgggcagattgttagcggcgaagtacgcgtcaggagaaatttccgaatttgacatcacaccgatcgaattggctcagaccgcgaacgaaacattagaatcagaggaagcttcacctccgagcaagaaacagaaacgtgacccagcccttgtaattcctaaagggccgaagaaaatggtcaaagtgattatgggaggttcaaactttttcgtgattctattagcgcgatagagcagcatgagagaag

SEQ ID NO: 18471 - DNA, 524 bp, Arabidopsis thaliana
attatgaacgtcattgtcctcctcctgagagacgattcaattgcttgattccgcctcctaatggatataaggtgtctatcgatatgttatacagttttatcgatatgattagttacgatgacataactgttttctcttccaatatgttttaggttccgattaaatggccaaaaagcagagatgaagtgtggaaagtgaacatacctcatactcatcttgcacatgagaagtctgaccaaaactggatggttgtcaaaggagataagattaatttccctggtggaggcacacattttcattatggtgctgataagtatattgcatcgatggcaaatgtaaggaagttacacttggtgtttgtacaagagaacgtatattattctttcatttgctaattgtattcttggaaatttttcagatgcttaactatcctaacaacgtgctgaacaacggtggaaggctaaggacggttttcgatgttggttgtggtgttcgagttttggaggttacttttatcacggata

SEQ ID NO: 18472 - DNA, 706 bp, Arabidopsis thaliana
atattttgaagtttttttctatgtgaatgtgctagattccaatcaagtggccgaaaagcagagacgaagtttggaaagtgaacattcctcatactcacttagcgcatgagaagtctgaccaaaactggatggttgttaaaggagagaaaatcaatttccctggtggaggcacacattttcattatggtgctgataagtatattgcatcaatggcaaatgtaaggcagttactagatcttatgtggaatagaggtgtgtgtccatcttcatttactgatactattcatggaaattgcagatgcttaattttccgaacaatgttttgaacaatgggggaaggctgaggacatttcttgatgttggctgtggtgttgctagctttggaggttatcttcttgcatcagaaattatgacgatgtctttggcacctaatgatgttcatcagaaccaaatccaatttgctcttgagagagggattcctgcatacctcggcgttctagggaccaagaggctcccatacccaagcagatcctttgaacttgctcactgttcacgttgtcgtatcgattggcttcaaagagatggtattcttcttctcgagctagacagggtgctaagacctggtggctattttgcatattcatctccagaagcatatgcacaagatgaagaggactcagaatatggagagaatgagtgtcttgtg

SEQ ID NO: 18473 - DNA, 1021 bp, Arabidopsis thaliana
ttataattctggtcgataaacaattgataaaatgctacatcaaaactatttagtgcaaagacattattaactaattcgtcaacatttttatactagactttactttattcaataaattaaattcctatattcaaattaagactaaaatctgtgaacacttattacaacttaggttaaagagataccaatgttaaatcaaaaacaaaaatatggaaataacctaaatgacaaaacaaatgatgaaactacaataaaaaaaaaacgaactcaatgcttgagaagagactcctgaatgcatactatacccgggccctccaaagaaaatgtaagtacccccatcatcactaaccatgtctttgatatcgtataatttagggttggttgcctttaattttacgtcttgagcgggctggaatatgttgttatctacgatctccaagttgcgcaagtagctaactttgccgaagctttcattggggaagtgaccggagcccatctgggttgtcgtatgtcggccggaactttgtgagttcacgatctcaccaccccattgcacctcgtctccataagctaaatttgtgaaaatctcggctggccagtatccaaccaatgaattgttggatcccacactcaaccaccagtttctgtgcttttgatcctacataatttgtttattaaaaatgatatgtaactatttatttgaaagtgtaaattttgttacataaatagaaaattcttttgataataaacaaactaaccttccatatggatacagtgatctcaaattggttgcctccgaatgctgagatgggagtaatggtgcctccaaaaacaatgttgtcactggtttgtataaatccaggacactggagattgtagcatccagaaacattgtatccgtcactctggataaaatttcatattaattttattagttaacttatcaaaaccatattgtaaataattttaaattaagtatgtgaagaaaaaaaaaaactagattatatggtgtagtagcgga

SEQ ID NO: 18474 - DNA, 1008 bp, Arabidopsis thaliana
  unsure (1)..(1008): unsure at all n locations
cacttctctaaagtctaggcttagcatccttcttttgcatcaaatacttcaaggcaacatgatctgtgtgaacaataaccttggatccaacgagataagatttgaatttctcgaaagcaaacaccacaactaacaactccttctctgtagttgcataattcctttgagcatcatcaagagttctacctgcatagtagatgacatgaagcttcttatccttcctctgtcctaaaacagctccaactgcaaaatcactcgcatcacacattacctcaaaaggtaaatcccaatctggtggctgatcaaggcttgttttatctgcttaaaggcatcatgacactcttgtgtaaactcaaatttgacttctttacagagtaaagcagtcaatggtcttgcgattctaatgaagtatttgatgaatctcctgtagaaaccagcatgtccaaggaaactccttattactttaacattatcaggcgcttgaagacttgtcataacctcaatcttagctctatcaacttctataccatgctcagaaatcctgtgtccgagaactatcccatcctgcaccataaatgacatttctcccaatttaaaactagatgtttctcctcacatcttgctaacactctgtagagattcgctaagcaatcctcaaatgacgatccataaactgaaaaatcatccatgaaaacttccatgatatcctcaatcatgtctgtgaagatagacatcatacctctctgaaatgttgcaggagcattacaaagaccgaatgacattctccgataagcaaatgtaccataagagcaagtgaaagtcgttttctcctggtcatctcgatgaatcgggatctgaaagaatcttgagtatccatcaaggaaacaatagtatttatgatttgctaacatctctaacatctgatcgataaatggtaaggganaatggtctttcctggtagcagcattcatctttctataatcgatgcacatccgggggcctgtgatt

SEQ ID NO: 18475 - DNA, 1022 bp, Arabidopsis thaliana
gagaagactgtcctaacttgtgccagcccttgcaacatcgtggacaccctccgtttatgatccaaaagcatttaactcaacccaagttcaacttatattaacttgagttagctttaaacttgcttatcaagttcatatcttcacagttttgatttgcggtttctgacttcattcaaaattttattatgatgatgttatgttcctttgtttgctaagagtctgagaatcgattcattatgaaaactagagtatgcatatgccaacacttttcgaatcatttgatatgacaatcattgaagacgtatggtcagttttacgcaaaccaattgatatgaagtgatatttcgacactttatgagtaatgacgacgaaaaatgattagattatctaatacttgaaagggttctccttcaaggttataccatttactaaaagagaattagtggtttgttattttagaatatgtagatttcttcttcttttgtgttgctttcgtttgattaagttttttctcatgtttgaattttcattaataactaaatatcttaatgtttggtttctttgcacaatttttctcttctaaggaaacttgagagcaattacgagcacattctactttgattccttggaataaggttgtttggttcaagaatgcagtgccaaggtattctttcatcacttagcttgcattgaaaggtagattgcttaagaaagacaggctcataagttggggactgaatatctctgcagcttgtgtgctttgctctaacggtatcgaaacccacaaccacctcttctttaaatgctctttctcttcaaccgcgtgacaagtttttgcttctcgaatctggcctcgttcaccatcaacgttggcctccatcgcctcttgaattttgcagtctcggacaccaccacagctgattgtatgagtttgtgtctatatgaatgttaacttaatacgcaactcatttattttgcatacgattcttcagagatgtaatcaagattatagtcacattagt

SEQ ID NO: 18476 - DNA, 608 bp, Arabidopsis thaliana
tccgtgtctcgtattctctctccgcttcttcacctctaccacctcatgctcctcgccgtcgtcccaattacatccctaaccgtatatccgatcccaattacgtcagaatcttcgatacaactctccgagacggtgaacagtctcccggagctacactaacctccaaggaaaagctcgatatcgctcgtcaattagccaagctcggagtcgacatcatcgaagctggatttcccgctgcttcaaaagacgatttcgaagctgttaaaaccatagctgagactgttggcaataccgtcgacgaaaatggctatgtccctgtaatctgtggtctctcgagatgtaacaagaaggatattgagacggcttgggaagctgtgaagtacgctaagcggccaagaatccatacgtttattgccactagtgatattcatctgaagtataagttgaagaagagtaaagaagaagttattgagatcgctaggaacatggttagattcgccagaagcttgggatgtgaagatgttgaatttagtccagaagatgccggaaggtaatagttttgttgtaaaatgccgtcatggaatgtcccaagttcatttttttttgga

SEQ ID NO: 18477 - DNA, 1093 bp, Arabidopsis thaliana columbia
tctactacaggatccctacactatgttaaaaaaacgtaaacagttttttttttttttttggaaaaatacaaattacattagaaacatgtgattggagacttaacgcgtttttccaaaaacacaattgatttccgcacttataatgtttccattcaaggcctaattcaattattattttagtcttatgattcttaaatattgaaaactcaccaaaaatagaaacactagataagttatttttaataactactaacattaatgcgaaacaagcggttatagaaatgcggtttgagtaatgcgggacaagcggttatagaagtgcggtttgggtaatgtgggacaagcggttataaaagtgcggtgtggttttaattggtgcagtttagagaaacgcatctagcgcaacaagtacgattactccaaaataatttagtaattgtttctgtttatctcaccacagatgaggtcctccaccaacaaatccaaatagaagtcaccgcttggcgtgccaggcgggctatggccttcgaagacgacgacgacccatttgtctccgccaaatcatccgctgaaacgctctttgatccgccagcaagtcccagtatccctgaatttaatcgggatagacttcgcaagaggctttaccaaattgaaaagttaccattttggaatatgaggtagttgcatttatcacaaacaagcaaacaaatgtaactaccaaactaaagcgaatcaccacaattccacactatcaattttacctcgtccggagtaaatgtccctttcttcaacaacaactcctaaattccccagatttccagttgtattcagttctataaaacctctttcttctagtacattaatagagtaactaaagtgtctaaccctactatattaccattttaaaaataaatatccatttatcaaccaattgaaaacggaaagcatttattactgaacagtttctgcttctttgcgccgaaccaacctgtcaccatctgagacacagtacctgacccacacaaagggtattttcatcctcaaaattccacgtgcactcgaattgttgtacattgtgtaagaggaagctttg

SEQ ID NO: 18478 - DNA, 609 bp, Arabidopsis thaliana
cagaaaaggaccggagtcgctgagagggacacaaccaacggcgatgctgaagctgccttgctactgctgtgcaccgggctgcaagaacaacatagaccacccaagggctaggccgctcaaggacttccgtacgcttcagacacattacaagcggaagcacggtgtgaggccctttgcttgtcgtaggtgtgggaaggcatttgcggtcaaaggagattggaggactcacgagaagaactgtgggaagctatggtattgctcatgtgggtcggattttaagcacaagaggtcacttaaagaccacgttaaggcctttgggaatggtcatgtcccttgttgtggaattgatcatgaggaagaggaggctgcttctgatgtcgagcagcaagaatgatcgtgtttagtgttgttgttgtttcgagcattaattaattgtatgctttatgcttgtgatttcttcttcgtcgtctttgctttttttagggattagtataattattaatgggaatagcagaagctttaaatttactgtattaattgcctattgaggtctttgtaacaaatgttagacgtatctaaaaaaagttttagaatgtgcttatttgatat

SEQ ID NO: 18479 - DNA, 960 bp, Arabidopsis thaliana
tattacacgtataaacgatatcaataaattgattggcgatcgatagtaagagcaaggagaatcagctagtatcaatacgacacaacgagttttaaggtttgccacagagcacaaaatctatcgagcaagaaaaaaatcagatagtactatcttgacaagcgatataatcacaattacctatgcatgtcttcataataaatcacgtcaaggctcataattacgccacgtggattttaaccgcgtggacacacgttttcacaaggtataaaagaagcaaccctacctctctttcttctacgtgattcgcacaccactgtaaaagtgtaaaaaaactctttttttgttcttcttcacatttcattcgattcaaaaaatattctgttcttagattgtaatctgtttttttttctgtaatctcccattattgggttttgaatttctcgtcattttacgaaaaaggttgtgaatcggcctaatcgatctcggtcgtcataagtgagtgcttcttcctccgtattagctctcaaaaacatttgtgtttctatttgaaacgtaacaatttacgatatttttcctcacaaattaatgtaattgaaacacaaaaccctatcatgcatgatgcacccatatattaccatctttaattccaaaatcatcattttccttccatgatttgtatctgaaatggtcatgcatctatgttgcgcaggatcttacgtgtgttttactaatcgtgaaacaatatcaacgtcagattcttctctatacacttttctttaagtttacccaatcatcatgtctccaagtatggagccaaagtgtgaccattgtgcaacctcgcaagcattgatttactgcaaatccgatttggctaaactatgccgtaaactgcgacgtccatgtacactctgcgaatcctctgtctcacaggcacatacgctctttgatctgcgagaaatg

SEQ ID NO: 18480 - DNA, 565 bp, Arabidopsis thaliana columbia
gaatatctcaatatcaacctcagagtgaatctacagtgaacaatagtaagaacatcaagcacttgcaataacaatttcgtaaagaagaagtctgagactaaacttacaatagcatcaagtaatctgtggtagattgaagaatgaaaccttccagcattcaaaagctttacaaattccattaatgttcccaacacaattccctaaatcaaccaaaaacattaggtaacaaaaaataacaaagctatgtaacttcaagagaacgcagagaagatagatagaaaaatcttacccttagagaatcttctgattgttgagagacaagaacatcgagtaaaagcttgacgaattcgtcaaattttgatctgagccaagctttgaacacaacttcagggtcctatgttttggttgaagaaggagacgtagaagtcggaggaagctgagagagtagaggagtgaaaaaggattggagtgagaggagtgattcaacgacgaactgcggcggagattctggtgagacgaaggtgagaaggagaggaaggttattgatgtgagatcgagaagtgag

SEQ ID NO: 18481 - DNA, 553 bp, Arabidopsis thaliana columbia
gaaaagagttaacaatttttgattttttcactagtctatcagttgtaatgaaaatctataccataagttcggcttttggctcattggtatcatggtccagttgatatgttgaactagtgttgtctttgctgcaagggtaaagatctttcaagtatagtggggaaggggcagcctgtagattataataaagaataaatcgtcatcgtttcaccaccaacatcattaataagaaaacagtaattaccttgcgtagaatgcattcaatgtggcctagaaaatcacattcgtcacaggaataagcatgatgtcctgcatacaccattgtctcgcaaacgccacaatactccaaaaattcatcctcatatgggagaaatttgcacacaagtggatgaatgtgatgagacttctcgaccacaaactcaggtatctcaagacactcgaaatggaaaaccatagagcattgtatgcagtaaaaaaaagagtcaagagatatcacaatacttctcctgcatatttgacattgatcattctctgtgaaacttatgtgagattt

SEQ ID NO: 18482 - DNA, 576 bp, Arabidopsis thaliana columbia
agaaagaaccgagagcaaccagatggctaaattgtctccagaaataactgttgcccccgtggaaccctccctattttctgttgcctcttcttcttcatcttcttccttttctttgggatgaatgcatatgcagattttatctttctcatccttttcctgatcttgcacagaatctaggatccccacaagtgcttgaacgaatttggcacacaattgtgtctcattcagattttctatcatcttctggtcgtcaactttggcagcacagataataatagcagctccaccaatttttattttcgggtccctggtatttatcacccttttagctatagatgacacgcaatctctggcattgttgaccatgtttcccaaaacaataggctgatctcggcaaagtcttgacaaaacttcaatagctttgtcctgtagtgaaggattagcaacactcactatagatgagactattggggccatactgttgggagattcagccaaaacagcccaagctggttttacatttccattagctcctgaccttgagaatatagcaagcgcatctagggcctctgatat

SEQ ID NO: 18483 - DNA, 551 bp, Arabidopsis thaliana
agtgtgctctaaaggcgcacgagtggcgatgatctttcaggaaccgatgaccgccctcaatccgacacgtcgaataggtcttcagatgatggacgtgatccgccatcatcaaccaataagtcgtcgggaagccagagctaaagcgattgacctgctggaagagatgcaaatcccggatgccgtggaagttatgtcgcgctatccgtttgagctttcaggtggtatgcgccacgaggtaatgattgcgctggcattctcctgcgagccgcaattgattattgccgacgaaccgactacggcgctggacgtcacggtgcagttgcaggtactgcgtttgcttaaacataaagctcgcgccagtggaactgcggttctgttcatcagccatgatatggccgtggtgtcgcaactgtgcgatacggtttacgtgatgtatgccagaagcgtaattgaaagcggcgtgacggcagacgttatccatcatccccggcatccgtataccattggtttgctgcaatgcgcaccagaacatggagtacacgccagctatt

SEQ ID NO: 18484 - DNA, 676 bp, Arabidopsis thaliana
tataatctcgactcccaaaagccattctttgaaacatccttatctgagcagattgtagtctcgagtcaaacacttggctctgtcctggtctcattccgttggttatgtccgttgcttcttcaagtgtgtccaaagctctcaccacttgactcatctttggtctttttgcagctgagtggcggacacatgcagccgcagcttctaccattctgaacatctctcctgggatgaagtttttccctagcctcggatctactagctcgtcgaattcttcgttctcgattgcttgacccagcaagggtcttgcctaataaaagttatgtaaccaaagggggttagaagacacttgttgaatcatggaagttcaagaaatatggtaaaactagagctgcacttacccattcaacaaggctctcatcaccaagtggttgagacgtatctacgggtttacggccagttataagctccaacagtattaccccatacgaataaacatctgctttttcagacagctttccacttgttgcatattcaggagccatgtacctaagagaatttgacagttaatatcggttagttcttctgtgagtagttgatttcacacaaagaacgttctaataaatagtgcatacacacacacccaaaggttcccattacgcgcgttgagacgtgtgtg

SEQ ID NO: 18485 - DNA, 583 bp, Arabidopsis thaliana
  unsure (1)..(583): unsure at all n locations
nnnnnnnnnnnnnnnnnnnnntaaaggggagtaacgtattatgtcagaagaaaataaagaaaatggatttaatcatgtcaaaacattcaccaaaattatatttattttttctgtattagtttttaatgataacgaatataaaattaccgatgccgccgtcaatttatttatccagatttaatgagaaatttataatgcgctatttcatactaatgttcactttcgtatgttcctttgttgcagcccaaccaactattgtcccacaattacagcaacaagttacggatcttacgagtagcttaaactcataagaaaagaaagaactgacgcacaagttagaatctattttcaataatacccaagtgcaaattgccgtattaattgttcccacaaccaaagacgagacaattgaacaatatgctacaagagtttttgacaattggcgtttaggagatgccaaacgtaatgatgggatactgatcgttgttgcctggtcggatcgcactgtccgcatccaggtaggttatgggctggaagaaaaggtaaccgatgctctggctggagatacatcagtagcacatga

SEQ ID NO: 18486 - DNA, 1036 bp, Arabidopsis thaliana
tctcttcttttacccttttttatctgttttatttctcgaggaacagaaatttaattttttcagagggaacgaaagatcactcactcaccttctcagtttttcacttttctctagtcatttagtacatggttgatttaacatatcctccaatttcaaagaaaccatgatttgaatgattaaaagaaaatgataaagtcaatgggggtgtaacaaaaagattgaactcctttttcaactttgcattcgtcaacattggtattcaacaaaggcctttaatcactaaccaataccccggttaggccacatattcactttcttcctaaacaagcaacaaagcatcaaacaaaggggaaaaaaagactttgtaactgtttggaactcaatgatctgttttggctaggagattgcataaacggatgggatttcaagtactgaaaaatgtagctagcacaaaatgaactccataaaaactcaaaggccggccttttcagatttaatgcatcttcaagtcttgtattgactaaccgaagcatcctttagagatgaaaagaccaatgagagaatcaaacgtcccatcactcaccactcttttttttttatctcttgacatatcttgtttagttataaacatcatcagaattttcttccatcactaaacaacactccaaaaacttctcccttcttcttctttctcaaattcacaaaacatgattttcatatctaaaatcttttaacacctattttagtgcataaactaatcaactattggattatgaaaatttatgaaattatgataacatcttatagactatggaaagattattaacggatcagaaagaaagacgaagaagatattcaataaaccggaccggtgcatttagatgatgaatgaacttctagtgaaaaaggcaatcatggcgtcaaagactttgattagtgatcaattgaaaaattacgagagggggatatttgtctctctaaaagtaagggatacatgcgataattgtttaattttgggcagagagaaggggtatgt

SEQ ID NO: 18487 - DNA, 550 bp, Arabidopsis thaliana columbia
attatgtttcagtttcacagtggatatcagaattttttaacatacttgacatattgcaggctctaccggaaacatgtttcacattctatggaccaaaagctcttgagattcatgcagtaccaaccaaaacagcgactgccttttacgaggcaagttccgttccccatcattttcaacttcgttacttattcaaggacaagttaaatcttcttattaccatttacttgatactcatttgttctgcagaaagaactgggtgtgcttctaacacctccatcagggaaaaatcagatgcaggagtggaaagggttacaatctcaccggttacttcaaatcgaaatcaacgatgcaaaaaggtgaaatatatatcttccattcccatctatgtttagtaaaacaaatgatcctcacctaacgttaacacacctcttgatcagaccggctagtgatgtggcaatatcagggttaggatggatttcaattgaaccaatccgcaaaacacgaggaactgaaccgagagatctcaatgaagcagagcatgagatacata

SEQ ID NO: 18488 - DNA, 534 bp, Arabidopsis thaliana
caaaaagagaaacactcttgatcaatcagatggtttgtttctttttctagctgtatattattaggtcaagtcaagaagtgtttctatttctgacctgaaccatacgaggtcgttttaaagcggaatgtctaacacaagacgctgccgtttcaatcattttatagacttcactttcgacgtaatcattctctagccgtggatccactacttcgctgatgtcacctttttcaatggcctcgattagccttggacgtgcctgccaaaaaaccaacaaatattcaaccctcatgagattttttcatttatattgaaaacacaaataaactcataggatcaaaatataaaaatttacccattcgacgagactttcttcacccaaaggttgagaggtatcaacaggtttgcgaccggtgatgagttcgagaagcacaactccaaatgaaaactcatctgatctatccgttagctttccgcttgacgcatattctggtgctagatacctgcattgcattatgttatgtaatgttgttaata

SEQ ID NO: 18489 - DNA, 607 bp, Arabidopsis thaliana
ttgataaagcttacagtctcattaagtcaatggagatgaaaccggactcaaccatttggcgtaccttctcggggcttgtagagtccatggagatgtggaacttggggaacgtgtgatctctcatctcatcgaactcaaagccgaagaagctggagattacgttctgttactcaacacatactccacggttgggaaatgggagaaagtgactgaattgcgttctttaatgaaggagaaaagaatccatactaaacctggatgcagcgcgatcgagctacaaggaaccgttcatgagtttatagtagacgatgtttcgcatccgcggaaggaagaaatctataaaatgctggcggaaatcaatcagcagctgaagattgcggggtatgtggcggaaattacatcggaactgcacaatcttgagtcagaagaagaaaagggatacgcgttaagataccatagcgagaagctagctatagcctttgggattctggtgactcaccaggaacaaccattagagtgaccaagaatctcagaacttgtgttgattgtcataattttgcaaagtttgtatctgatgtttatgatcgtatcgtgatcgttagagacc

SEQ ID NO: 18490 - DNA, 535 bp, Arabidopsis thaliana columbia
caatttatttcccaaatttctaaaacatacaagtgatgacattgagaagacggttgtcgatttaaacccgtaatttttccgccaaaaacgtaaacccgtcatttttacacttcacatttgtattttggtagcgtatgtgcgcggagagaagtctggacttttacatgagaaaacatttcacatgggggagacattgaacggacatagaaaattagtcattgagaccgaaatggagctaatgaaacaaaaactgaaagagctacagaaacaaaattgttcagaagaagagatttcacagtctatgaaagatcttggaatgtcaaggtgatcagtgtaataatcacaaactagagttattatttattactgaaaatatccactgacctagaaccaaactggtcttcattattagggcaaagcttcatggatggccaaacacatatgtgtttccagatcaatgggagagatgcttcttggtaattatagagaaaacctcccatcgttatcatccgtccacaatgatcactagcacttt

SEQ ID NO: 18491 - DNA, 1334 bp, Arabidopsis thaliana
atgatctcattaatgttgaggatagatgcaggagacgtgataggctagaggagttgttttacccggctgacattgagatcatagtcaagaggaatccagtggtgagtatggatgatttttgggtttggttacattctaaatccggtgaatactcagtaaagtctgggtattggttagcttttcaaaccaataaaccggagctgattagagaggctagggtacaaccttcaactaatggcctgaaagaaaaaatctggtctactcttacttctccaaaaataaagttgtttttgtggagaattttaagctctgctttaccggtagcttatcaaattatcagaaggggaatgcctattgaccctcggtgccaagtttgtggtgaagaaggagagtccatcaatcatgtcctcttcacttgctctttggctcgtcaagtatgggctttgtctggagttcctacctcgcagtttggctttcagaatagctcaatttttgctaatatccaataccttttagagcttaaagggaaaggcttgattccggagcaaattaagaagtcttggccatgggttttatggagactttggaagaatagagacaaattgttctttgaaggtaccattttcagccctttaaaatcaattgaaaagattagggatgatgttcaggagtggtttcttgctcaagctcttgttcgaagtgttgatgcgggagaaactgtttgctctgctccttgtccttcttcgtgggagccgcctcctttgggttgggtaaaatgcaacattagtggcgtgtggtctggaaaaaagagagtttgtggtggtgcttgggttcttagagatgatcatgggaaggtgttattacatagtcgaagagccttcagtaatctctctgtcaagaaggatgccttgttttgctgtgtcaagtgggctattgagagtatgtctagccacagacagtctaaggttttgtttgcttttgagcctggggacttactgtccgcttttgccaggccgaaagcttggccctcttttgcttttcatgtttcagaactaactcattttttggagaagattggagattggaaggtctcggaggaaaaggtcgattctaacaggggagcttctcttattgctcagagtattgttaaaggagataggtttcaatcttatgtagcggttggacatcttcggtggctccacaactatttgagggtgagagaactcttccaaggccttgtttctttgctttggtttttgaccattgtcaatcttcagttcttttggggaattgttgtttcccgactattcctgtaccttaattggctttttgta

SEQ ID NO: 18492 - DNA, 368 bp, Arabidopsis thaliana columbia
gctaccatcttgcaacaggtttttgaagcaaagccgtcaagaaaacttcaccatgtttcgaatcagctttgttagccaccgcccatttcaccttcttataccccaatttcccgatcatcggtgcataaacattttcaagatcaacttttttactaaagaaccgatccaaccaaagataaccaccaccacgaagaatcctatccaaatcaaagaagaaaaattccataaccgtcaccggaatccaccgattcaccgctcttccacacctaaccaaatccacaacaccatcaaacaccggaagccgttgctgtaacggcacatgaagcggcacaagtcctctcatcgccaccgcttcactatacggcgca

SEQ ID NO: 18493 - DNA, 494 bp, Arabidopsis thaliana
  unsure (1)..(494): unsure at all n locations
nnnnnnnnnnnnnnnnnnnnnnctaaagctgattggcggcatcatggagcatattgagcaggcgggcgtgcactccggtgactccgcatgttctctgccagcctacaccttaagtcaggaaattcaggatgtgatgcgccacgaggtgcagaaactggccttcgaattgcaggtgcgcggcctgatgaacgtgcagtttgcggtgaaaaacaacgaagtctacctgattgaagttaacccgcgtgcgcgcgtaccgttccgttcgtctccaaagccaccggcgtaccgctggcaaaagtggcggcgcgcgtgatggctggcaaatcgctggctgagcagggcgtaaccaaagaagttatcccgccgtactactcggtgaaagaagtggtgctgccgttcaatagattcccgggcgttgacccgctgttagggccagaaatgcgctctaccggggaagtcatgggcgtgggcgcaccttcgctgaagcgtttgca

SEQ ID NO: 18494 - DNA, 631 bp, Arabidopsis thaliana columbia
aattaagacacagaatgaagacaagagtaacttaccaaccaaataaatacatctgtgccatggtcaagaataacagccttatctgattgcatagagagatcatacgctggtagttcctcgaatgtaccaccttcttggtgcatcaagcaacggcggtgctaccatacgaagagacagatcgaaagatgcgtttagaaacaaatttcgtagcaccgatctttcatcttcatgaccaatgatgtttcccagtaaaggaccccttctaagatggaagaggagttctgggagggatgatagttccttagggaagctataaagctttgattttggcacttgtgatccgaatttcaaagcaatgtctttgattctttcgtctactgtagcacgcatatcgactgcgtccttctgatttttcgctaataaaagagttctcttggagatgaggaccgcagaagcttcgtcctcaacactctgaagatatgctgagatgctatcaacagttggcaatttgaacgtaattacccgagacacatctgcttgataaacatccgaataatggaaagcaaactggaaaaatacatgatcgcttttgatgtcctcttattctccattgagagagagaagctttgtg

SEQ ID NO: 18495 - DNA, 1266 bp, Arabidopsis thaliana
actagcgattgttagcgccgttgggttctttacgttcttgttcatttccaagtcgtacatctatcgtcgagtggatcgagtgtagtttccaaatgaaaaaaaaatgcttctttaacattaagttacttcttgatggtctctgtagtttgtatactgtaactttacacaaaataagttttttaatcataaaaagacaagaaataccttttgaaggtcaaacaaactcaaacaagtttctatatgttgtttattgtctctttcgttagagacagagaaaatgacgacgacttccaaaacttctcttcaagaagaatacgtcatcgacgccgttgaccaccgtggcttttccgccagaaggtctattaccggtagatggagagctgcatggttcattatcggtaaccttcaatcactagctgctctgtttttcaatttcctcttctttgaatccctgaggacatttttgcaggtgtggaggtggcggagaggttcgcgaactatggaatcggatcaaacttaataagctacttgactggaccacttggtgaatccacggctgtagccgccgctaatgtcaacgcgtggtcaggaattgccactcttcttcctcttcttggagcttttgtcgccgacgcatttctcggtcgttacataacaattatcatctcttcttttatctacgtcctggttcgttctcttctctttagtctttttttcttttggtttacttgttcttcatgattgagaagtaacttaaagaagaatttgaatttgatgtgttagggattggcgtttctgactttatctgcgtttctgattcccaatactactgaagtgacatcttcaacttcttcttttctcaatgtactcttcttcttctctctgtatttggtggctattggacaaagtggacacaagccttgtgttcaagcttttggtgctgaccagtttgatgaaaaagactctcaagagaaatctgacagaagctccttcttcaactggtggtaccttagtctgtctgcaggaatctgctttgcgattttagttgttgtatacatccaggaagagttcagctgggcttttgggtttggaacccatgtgtgttcatggtgatctctcttgttcttttcgtgtcagggagaaggatttataggtacagtaaaagaagacatgaagaggaaataaacccttttacgaggataggtagagtcttctttgtagcactcaagaaccaaagattgagttcatcagacttgtgcaaagttg

SEQ ID NO: 18496 - DNA, 553 bp, Arabidopsis thaliana
cagatgcttatcttggtcgttaccgtaccattgttgttgcttccctcatctacatacttgtaataacgttcttgtctcttacttcaatatcttgataacattttagaattttcactaaaatttgaggggatttttgttacagggactaggactattgaccttatcctctatcttaatcctaatgggattatcggagcaacgtcaacataaccgcaacgcttctgctaaaccgtttttttgggtgaatatattattcttttgttctctgtatttggtggcgatcggacaaggcggacacaagccatgtgttcaagcttttggtgctgaccagtttgatgtgggagatcaaaggagagaataagtagaggatcgtttttcaattggtggttcttgagtttatccgcgggaataactttgtcgattattgtggtggtttacgttcaagacaatgttaattgggctcttgggtttggtacccttgtttgtcatggtcatgctcttgtctcttcttgtttggaagaaaacttatagataccaagaggagacgcgaggg

SEQ ID NO: 18497 - DNA, 615 bp, Arabidopsis thaliana columbia
acccgcagtgtgaaactcaaatttgaagaagcaatctctgtgccagtatctgaaaggcgttcagtagctgagtccattgacttccatacaataggtatccttcatctgtttgcttattttttggttgtcttatagcttgcagtttgttgtgtcacctggttctttcgtctcttgttatgccatgcctttgattcagtagttgaaaaatggttgaatgtagctttagactagtaatcattcttctacctattgtcacataatagggaacaaacccagatcatcatccatgcccaccaaaacggctttagcagcagttgttgcagcagtaatggtggtggcggtccggggatttgccacaactgagatactcatggtgttggtttcggtggtattagggacattttggtggggtagcttcagtggtagtagtgtcttttctctggttaaaccctcatcctaggatcaatgtggattgttttcatgcatatcaaacctggatagttcctttcttggagtccagttgagaattgcaaagctcaatgatattgatgtcaaaacatctcacaggagtggacatttcatagattactaatacgctaattttggtttgttatg

SEQ ID NO: 18498 - DNA, 811 bp, Arabidopsis thaliana
ctctcgcactctcaattccgtttgtcatttacttaatttcgaacctaaccaatccagatcgtgtaactcaacccgaaaccttgagtgaattcaaccgatcgtttgaatccaaactagaaataccaaaacaaacaaaagcttctcacttggaaatacttcaatttttttccaaccaatgattttcactttttacacaaagaagcgacatatgtcttccgttaggattttgataaacctcaatcacaataaaataggtgattgacatggatgatattttattaatcaataatctcatatataatctctatatatggataagatgaatactattctactaagaataaatccatcttcttctactaccttcactaccatctagaatcaagactctaatgaaggagtccttgaagggcaatgctcacatacctaatgcataatggtcagtatgcagaaaccaaggaagaagatccatagccactgcgatgaagcttttgccatctccatgccatctttaaactttcttgaagattggtgtgcttagctgtccaattcagctcttctttgatttttcttggatcgctgtaaacctctgcgtaatctcctgcccgtctttccaagtaatcgacttttatatcaacgccggtcgcctttttgcacgcttccacaaactccttcaccgagctacctgcttgcacaacaattaataccacattctctgaaatccattcacttcactatcctagaatctttgccaaacatctaattttatacctttcccggtaccaacattgaagataccactttgcggggt

SEQ ID NO: 18499 - DNA, 1834 bp, Arabidopsis thaliana
gtactgctttttttaaagttctacttctaagtaattgatattgcagctcttcataatccattatctatgaaattgatcttggtaaatgccggttgttgaattattgtggtcactcattttcttcatgtggtcagtataacattgaacctccccttttagtattatttgatttgaccatatggtgggattcgtcctcggaccccattcgctttgtgctgtttcttatggtggtgacctctctctcttgttctcctttcgatggattatattattgcatgtttctctcatttgtgggccttgacatttttctccggggcttcgcattgtcacagcctacaacttaatttgttcaataacaaagcaagaagactcttctacctctggaagggtacattatgttattgtatgatttatataaaagtgtagtaacccttatgataatcagtaaaataagctagtggcagagctgactttaataaccttgaaacttcataatggtaaagattatgacatctctctttagttgactaagtgtattggccacctccactaaactattgctttaagcctttcagtgattttccttctcatcatcctgtacatttgatttttgaattgtttatgttttgttttccagtgtgagtatttgcagatctaatgaaattttcctttattggcttgtaactgtgaaatataaacatttagtagttcaagatatgaagacagtaacattctcgtaatatttaccactttacagttgacatgctaaacttgtttttaagtgtagaccgcttgtaatctcaaataattctaaaacatagtagtttaatcatagctgctacaaatatctaggtgactagttctagttcacctaaaccagcgtatccatctttccggttctagtggtgctatttggagaatgatgctgtcttgtggtggttgagtagagtttaacgagcttgtttggctgcagtcggcaatcttctcgcatgtctggatgaggcagtgcctgcaggtgggacaggacgagtgtgaactaagccacttgtctatacaacggacatggaatccatggtggcatgtcggcaacagcttcacacgttcctcggctacaaattccgagagacagatagcacactcggtatctaagccaggcagatttagttcagtagagtaacttactgtctggaaactcttcaaggcttttcgtttgactcctgtgttggtcaagcgaacaggatagttgtcaccaccagcttcagatggtactaaattggagcacctcaaggcacatcttattatagaattgagtccaagtgagcaaacaagtgcacataagaggactgataggaccataacaacatttgcatcaaagttgttatcgcctacatatggggatggtgctggagttggtgattgatcatgggtatgaaatagtaattttcttgagtaagaacttccaagaatttcttgaaagatctcagttggttttatggtggaaatggaaatggaaatggtagtgcacatgataacttagttttaagatagattggtggctttctgtgtttccgttggaggttgtttatatagagtaaaggtttggaggctaattgtttatatagaggaaaggtaaagtttcaattttttttcagatatttaatgaggaatttttttttatatatttcatttagaaaaacttatggttggatgaataagaagctataaagatcaagctcacattatggacctttacctttagtgtctaattttataaaatcatttgcagcgtaatatgctttgttatataaaatgggtccatcataccagttgctgc

SEQ ID NO: 18500 - DNA, 393 bp, Arabidopsis thaliana columbia
catcttgaggtcaaccttccgaagataaggagctccatccatggaaaccttcacaaaggcgacggttcctccaccactactcattgcctcctctgcttcgccgctcttctgattagccataacatttttccggtagttcctcaccggtggccaacccaccacttgtgctctgcatagaatataacaacacacacacacattcaataacgttattacttatgcatccttacatctttcatatatatgtattttaagaacttttatatcaactattagtctttttatctcaaaaaaaaaaacaaaaagtcttcccttttagggaaggtcttcttcttaaggaatcgtgtaaatcgaccttacttagcaggaggcttagaagggtctttaaggaag

SEQ ID NO: 18501 - DNA, 1129 bp, Arabidopsis thaliana
tgcacaatttgtaaactgaaatcagatttttgtgcaggttgggaacatatagaatattgtttaaagcaagggaacgagattgagtagagagagttgatgaaccagtgtgagtgatcggaagagtagagccatcagcaattgtgacttcttctccaccattgtaaggttgatgaagagcaaggttgttcaaatctgtggtaagatggtgtgttgctccgctatcaagaagccaaggattgtacgacatggctgccatatttgcacggggctgccatggaacagtagcattagggtattgacttggagatggggtggagtaagcgccagacatctgaagctgtgaacaacgtctagcgctatggccaaaaactccacagatttggcattttccttgataaccacgagaagagggctgatcgtttcttggctgttggtatgaattagcaccacgattgttgttgttacggttttgtccgcgatagttgttggagttgttatgcttgttgttggctggaggacgataacttgcagcatttgcagagatcggaagagacgatgccgcagcttgaagtttcacttcatgattaagtaacttctcgtgaatttcagtgagagagggaggtacctcacgaccttgaatttggtcaatgacctgtttgtagtcatcggagagcccttccacaatgacttccatctgttcctcactctccatcggcttgccaaggagagctagttgatcaaatcgcatcaccaagccttggaagaattcatcgatggatttggtgtccttcttccattgcttgatctgttgtcgtaattgttggatgtgagaccagctgggtttagcatatgtgtccatcagcttagtccaaatttcagcagatgttgttgttcgggagaggatcggttgaaccgagattgaaatagcgcctagtagagcactgtaaatgagttgatcttgcctttgccagtgcttgaaggcaggattgaccgtaactgcaccatttgcagtgatggttgcaggtgggacgacaatggagccgtcaatgtagcaggtgagatcgtagccagtgagtagagcttgaacttgacgccgtcacatgagaaagttagaggacgtgaatttggt

SEQ ID NO: 18502 - DNA, 1029 bp, Arabidopsis thaliana
caaaacacggtcatagatgggacaaagagaacaattgatatgctgtaagaacctgaagagaagcagtgggatctctacacctggaaatattgttctttccattgtgacaccttgctttgtaaagaaagtcatgtactgcgcgaaaggtatcgcgtaagccaaagttgtaagccatactggaataagcctgacaagagctgtagcatcttcgacatctctagacttgcatgccacttctccttcatcagaatcatttgggacaagcaatgctttgttgagaaaactgtcacaagaaagtagaatcttataatcatacaacaagactttgaagttcgaaccacaacctatatgttaaacatacctcagctcctctggagattcttgagatcgatttgcctctattagctcaactttgcacaagtctgatgaattcaatctctggttcttgaatgctacaaagaagactctacctattctcgtaaacgggtttgtttcctcttcttgtcttgttttactaaacctataactctttctccctaaaacgaaaagaacaagagagatcaccatgaacacacatgggattccaaacccaagtgcccagcttacattttcttggatgtacacaaccactaaaatcgctaggccgattcctgcacacatactaaggtaccaccagttgaagaaagagcttctatcactattctcttgcgggttcttctcatcaaactgatctgcaccaaaagcctgaacacaaggcttgtgtccactttgtccaatagccaccaaataaagagagaagaagaagagtgcattgagaaaagaagaaggtgacgaggtcacttcagtattgttgggaatcagaaacgcagataaagtcagaaacgccagtccctgacatcaaattcaaatattctcaactcaatttctacttcttctatatcagagaaaccgaatccaaatcaaaccgaaaaggaataaaactgatctaaacccgaagtttctttgaaaattaaaaattttatttgactt

SEQ ID NO: 18503 - DNA, 441 bp, Arabidopsis thaliana
catgtgcaatctcaatttcaggtttatgaaacacatgctagattagctttggaggcaggggatttacctgagtataatcaggttggtacgctagcatagattgatagatcaatcagaatttctagttcaaattcggtatcaagcacttttgtctttttcgtaatttaaagagtatcaaccactgctagaatttcactggtctctcattttctaaaaaataaaaaagcaacataaagtgttgaatcagagagaaactttgcaaaagggagcatagttctgatgactggttactatggattgtggcttttgtttgcattgattctgcaatataatgataccgttccatcaagtcttgtaaaatacatgtgttgtctattcctgaggagactataactgttagggtatgtatagccttgctaaattgatttctatttttttttt

SEQ ID NO: 18504 - DNA, 574 bp, Arabidopsis thaliana columbia
tttttacaagtaggaatgtaatggagctgggagagtaacttgtctaagctcaaaacttcactaacctacgatcgcagagaacaagactaccaccatcgaagcaaacaaagcaaacatcttcatcttctcttctcttcctcgaaatcggaggcgaagaagctttagctaaaattctcggcggacgaccacgtctacctctcttcttcaaagaatcggaatcttcttcgtctaacttcacatccgaatctaacggaacaccaccaccatcgaagaatcccggaggagaagaagaagaatcatctaatttaacatcggaaacacaatgatcgactctcataagatcgatttccggcatcgattcgttgttggctcctcgtgaagccaaagaacactttttttttgcttctcagctcaacaaaaagacaagaacgaggaagcggaagatctgaggttttaaaaaaagaagggaaggtgaagcaatcgtggaaacctaaccctagggtttggaggagaattgggaattggagaagggagggaggaggaggtggaggagatggtggcgtgtaaggagaga

SEQ ID NO: 18505 - DNA, 557 bp, Arabidopsis thaliana
  unsure (1)..(557): unsure at all n locations
nnnnnnnnnnnnnnnnnnnnctaaagtgacagagtacgcgtactaaccaaatcgcgcaacggaaggcgacctgggtcatgctgaagcgagacaccaggagacacaaagcgaaactgatgctaaaacagtcaggatgctacagtaatacattgatgtactgcatgtatgcaaaggacgtcacattaccgtgcagtacagttgatagccccttcccaggtagcgggaagcatatttcggcaatccagagacagcggcgttatctggctctggagaaagcttataacagaggataaccgcgcatggtgcttggcaaaccgcaaacagacccgactctcgaatggttcttgtctcatagccacattcataagtacccatccaagagcacgcttattcaccagggtgaaaaagcggaaacgctgtactacatcgttaaaggctctgtggcagtgctgatcaaagacgaagagggtaaagaaatgatcctctcctatctgaatcagggtgattttattggcgaactgggcctgtttgaagagggccaggaacgtagcgcatgg

SEQ ID NO: 18506 - DNA, 530 bp, Arabidopsis thaliana
  unsure (1)..(530): unsure at all n locations
agtaacttccgccagtgtgctttaaagttgcgggttttttaaaacggaaaatgaatcagctcaacgtcatccgccgtgactttcaccattgaaccttccgtatgccaggcacccagtaccacgcgaaaagcaggttgctgattggcgataagttcatgcaccgccgggcgatgggtatgcccgtggatcagccattgcacctgatgtttttccatcgcactgaccaccgcgttttggttaacgtccatgatcgccagcgatttactgctgttggcttctttgctgttcgcgcgcattcgcgncnannatgcgtttgcgcacaaacaacggcagggcgaggaatagcgtctgcagccagggtttgtggaccttggcgcgaaaagcctgataacccgcgtcatcggtgcacagcgtgtcgccatgcataatcaacacccggcgaccataaagttcgagcaccttttcttccggcaataacgtcatgccactttcacgggcaaagcgtttgccgctttagagnnnnnnnnnnn

SEQ ID NO: 18507 - DNA, 1561 bp, Arabidopsis thaliana
tccggtaccggtgggtacagaaggtaaatgaatggtcaagttttctagtttgggattggaggtctcataagtgatcacaggttgatggtcgctgcttctgtacgaaagatagaattttaatccatcacgtaaaaatccgacagtcatcgcctcaatgacctccttctcgagtttcttgtccttaatagtgacttttgttgcctttccctttgaagaatcgtcgtcgtatactattacgcgaccatccgaagaagaattttggatgttagtgatgtattcaatcaataaaaacgggtaggctggttcagacgacaagagttgagtcactttagtctcgtcatccgaatcccacccgcttgtgtgagaagttgtagatgagaacatacgaacaacatttttgtgtctctgccatatatatgttcaagtagtcagagacgatatcaataacaagaagaagttaaagaaaaatgaatttattacttagaagcttaagaggaagtttttgcagacagagggtttaaagactcggctgattataagctgtgccattgttgaacttctttaagtgttttcgtctcttgtataatctgtgtcattattgtacttaatactaataagaatatccttgctcagcaagtacaagacataaatgagaatatttagaaattccataaatagctcgttaaaatcttattataatttttgtttttttctgtggaatttgttgttcaatatttgttcccaaaaattgttttattcataaaatctaaaatcatttcctaaaatcaatgcatacaaattactctatattctacccttttggttttaatttttcgatatgtttttaattgaaacagaaaacttttcatgcaaccacgttcgattttttttttttttctttagcttaatgggcttatgggcttctacgttctagaaatttcctactacacaaaatatctttcgttttatccaaattccaaaacagtaataagattataagaacaataaatatcttatccagtaactaacgaacgtatatcccaattattgtgaacatcaccaccgtcagatcacgcccttatcattcatgaccgtcagatcctcatattttacatcacacgtggccgtgactctttaccggataaccggattgtctcttctttaaaaccgtgcccaagcgactcgtgagtgagactcgctctaagacccagtttgactcgttgatcaacgaaaggtaacgacaaaactctgatttccgatttcattactatgaatcgattcgaatttctgagtttctgactttgtttcagtgtgagtttgaggtgaaagatgacggcgacgatagatcggaggttatcaacgctgaatccaaacgcgccggtgtttgatccggtggaatttcgtgaggtggaggatttttcaccgaaatggtgggatctagtaacgacttcgaaatggttccgtgacttttggctcagtgctaactctgagaatgagttcctcggcggcgacgatttctcagttatggaagaagagttcgaggagatgatcgcatcgtctg

SEQ ID NO: 18508 - DNA, 532 bp, Arabidopsis thaliana
tttgtatacatatattcaatttgtatatgtatatacatacaatgctggtctaatatgtccgcgtttgaacatatatatatctaaacgtctgagaaaagaaacaacacaaacatagcttcaagtatggacctcaagctaaggcctagcttcttcatctcttttctgattctcattttacttctcaaaaatcttaattacggatctgcagctagtccgaaatgcatatccaccgagcggcaagctcttctcaccttcagagcagcactaactgatctttcgagtaggctcttttcttggtccggacctgactgctgcaactggcccggtgttctttgtgatgctcggaccagccacgttgtcaagattgatctcagaaacccgagtcaagatgttcgctctgatgagtataaaagaggttccttgcgagggaagatacatccgtctttgactcaactcaagttcttgagctatctggacttgagttcaaatgatttcaatgaactagagattcctgagtttattggcaaattgt

SEQ ID NO: 18509 - DNA, 622 bp, Arabidopsis thaliana
gtgcttaatttcaactatatctggatgccttaggagtctaagaagtttaatctcacgtagaatcctcgcagcatcagaaatatgctcaaaaatatcatgaattttctttatcgcgactttctcacccgtaagagtgtctatagctgagcaaacaactccataactgccttttccaataacttcttgaactttaaatctattggcatcgccatagtcagaaaagaactccatctccagattattctgttacaaataccattacttccaagtcagaaacattacaatagagataacactatacaagaatcagatgcagaaggttctctactgatgctacaaaggacgcctaatgaaggatcaatgcaattgaatgtcaatttgctgatgaagaaataaaaaaaatgtctcaacaacacatcatcttgtcttgaatgatgacaattatgcgttgtttgtttgatgacacttgtaacgttcattgatcataaacagagttgtccaaaacggcaaaaagattaaagacagtaacaggaaacaaacaagattaccggaaacacacaccataaatacctcagacagaacagatagtatcggatggaatacttggaaaaaaggcagagtt

SEQ ID NO: 18510 - DNA, 781 bp, Arabidopsis thaliana
tccgctccttacatagcgatcgcactcacacagccgtcgaaggagagccaggataagcccgatggcgagatctgcgacgtcttcggtgagaacgtcgggggtgttggtgacgcggatccctttttctttgcatttccccaaatcgatcttgtcgagcccgacgctgaagctggatacaatctcaaggttgggcagatcgctgatgagctgagcatcggcgccggcagaagcattcccaacgacggcgcggatggagttccgatgagtttctaggaggacggatttctccggagaagtccagaagcgaagaaggttgaagcgcttctcaagctcgttctcgaggtaggaggacatggggcacatcataaggactccgattgattccatatctccttttctctgttttttttttttatttttcttctgcaaatgattgagtcagtgagaggtctgtgtataatttatcggaggttgacgataaagatgggcctatttttgggcccataattgatattatccgctttttatgggccactaaatgacccttttcaagttttcctcttggttccgaaatcatgacttatgtttaaagacaacattgcacgtttgatgatattcatgcaaattgttgtaggattcatgaacatgatacaaacacaagaagacatacactgtatgtgtatggaaacgtagcagattccccgttgacattgcatgtttagggaatccagtgacaagggtgtaacacattttagtatgtactatatgatacgatttataa

SEQ ID NO: 18511 - DNA, 581 bp, Arabidopsis thaliana columbia
ggttttttttggcacaatataaataaaaccaacattattataaaataatttaaatatatgtatttaccaaagtgaagaaggatctgagatcaccaccatggatctcaaccctaggcttggaggaaacagaagaaggaaagagctcatggccattggagacttgcttcttgttataactaacattcatcttagttgttggagtgaagaaatcaagaacatctcctaccactctccccattatcaatggctctatcactctagttcccatattctccattttcttttgttaacttagaggaaaagagagatttgtagtgatttgggagacaaagagacgaccgagacatctatttataggggttttcgtcttagagagagagagaaagataaaagaatcaatagacattaattcccaattatgtgtactaacctctttctcttttttttttctttttctttttctttttgtttgctttctcaaacatgtacaccaactatattaaagtaaatttggggggttttaataagtaacttattttaggtgatttaaactataattatatttaattgaattaagaaat

SEQ ID NO: 18512 - DNA, 536 bp, Arabidopsis thaliana columbia
gttcctttgcaagagatagctcttgtcgaagaaacatagaccgagaaatatcaccagaacgatctgaaagcagagaagattttgatttgaacgtttcacaaatctccctagaacgtgaagctgatggtactgatactgtcatggcagacgttgtacagaacagtgagagctcttgtgccgagcagtcctctgttcaagtggatgtggaaaagcagtgtaagcctcaggagttgcaagtaaccgcggatctccttcctgaacggaggcagagtacaaggacccgacccttgactacaaaggcactggaagcttttgcttttgggtaccttggtaactcgaataaggagagaaaggcttcagaggagtcgagaacaaagtctaataagaagagaaaggcttcagaggagtcaagaacaaagtctacaaagcgcatccatcgtcacttacctgtgtcctccaagttcagaaacggaactgtagaggatggttcaacactgacgagactgaatagactagcttcgatctgaaattgacat

SEQ ID NO: 18513 - DNA, 571 bp, Arabidopsis thaliana columbia
ctgctagatcctacacgaagagcagatccaccatctaagttccgatcgcgtgaaatcctcatcggaggactgttaccagatgaaattggaccgtgaagcaccgagacagggctttgatgatctcgttttaggtatgaagaaccaatgaatttgctcggagaataacagaaggatccgcttaaggtccgatcctcgctacgatcatggcgtattgaagctaattcctctcctacggatggatgcgatgaggaagaagaggaagatgatttgacggaagcgccggagaaaagcaaagagagacctccgatagtcggcgaactcgtggaagaagacgccgatgaagatctagagttcagatcgaggtcacatgagatatgagcgttgatttggtgagctgtggaacatacagtgctcgctggactcgcgtaaagcgctatggtcgttgctaccaccattgaaactctctggtaagaattcaaaatgaaaacctaaagaattttttttctgtttttttttaattctggaatttgaatccaaagcttcgtccaattttctggagaatcaaagaact

SEQ ID NO: 18514 - DNA, 507 bp, Arabidopsis thaliana columbia
tgactttgggtgtgtaagaatctcttatcaatacccgatcgtctgacttgactttgtacttcttcaggatcatatggaatttgagatgcaattgatgtttattgtgctgcgcagatataaagcattaggtattagactggattcaggtgatttagcttatctatctagagaggccagaaatttcttctgcacggtagagagagaactaaaagtgcctggttttgggaagatggtcgtcactgctagtaatgatctaaatgaagagacgattgacgctttaaataaacaggtgactccctaacccactctcaaatgccatgcccccgaaagattgattattattaagcagtgttttttctttcatctctatagggacatgaggtggatgcttttggcatcgggacctacttggtcacttgctattcacaagcggccttaggttgcgttttcaaacttgtggagataaacaatcagcctcggattaactttctgaagatgttacaaagg

SEQ ID NO: 18515 - DNA, 813 bp, Arabidopsis thaliana
gaaggaaggtgtgtctcggcataacttagcgacgttccataaataaacatgagaacacatgttagcctaattttctttggaattgtagtattcaaaattgaaaccggagatgcaaaatccggcaagagtgagaacggtgaggagcagcaagggtcagggaaaacaagtctattggctgctccagctaagaagcgacatagaggctgttcgttctgcattttggacattgagaatactcccatacctgattttcctaccaatgaggaggttgtaggagttatcaccatggaggatgttatcgaagagcttcttcaggtaactcaaaccgaagcatgagcatctgctttagttattagcattagagaagtaaagaatcataggcattctttttttgctctgatttttcaggaagagatccttgacgaaaccgatgagtatgtgaacatccacaacaggataagagtcaacatgcatgcttctccagagaatctaccaagcgtgataacctcaatcacgcaatcatcatcgggttccactagtcccaaccaaacatctcatatggccacaccagattcaagtcctacaacaaaaccatcaaattcaagtcctacaagaaaaccttcagtatcgagtcctacgagagagccttcagattcttcacactccatggctccaaaacatgaagagtccacccaaactttatgatgatcatatatgagtgaagatagattagctatgtatccttaaaagatgacttctttaacagaatcgtttgtgtgtttgagattaagactggttaatagtttctttgta

SEQ ID NO: 18516 - DNA, 649 bp, Arabidopsis thaliana columbia
cggctccagttttctgcatcaagttcaaactcctcacatacattgttattcagcgtttgaaatgtcattgccacattcatacatacggtccgagcgtaacaatctttagcaacaacaaatttccacactcccttctctgaacagtcccaacctccagctataacacagaccgctacgtctcccccctgttcaattgtttcacaaactgtaaatcagatcacttgtaccaaagtacaagtcacaaactatactacaagccacaaactatactagaagcaccaaattacatgccacacactatactaccagccacaaactatactacaagccacaaattacaagtcacaaactagtcagtaaggcacaaactataaggcacaaactataatagaagccataaattacatgtcacacactatactacaatgacaaatctgattccaaattacttacatgtgggctcatagcagcagcgtttggtcgtcggaatctttactattcgtcgtctactgacttcttctgtgcaatcaccttctgccgtcgacgatttctctagggtttggaaaaatcatcacaataatgtaccgcacacaacaacccttaaatataccagcaatataaggccttaatcgtcgtcacaagttgggtt

SEQ ID NO: 18517 - DNA, 581 bp, Arabidopsis thaliana
cctatccaagaacatacgatttcattcacgctagtggtgtcttcagcttgtatcagcacaggtaatgattataaaccctaacttaaccttaaagctccacactttctgagaatcaaagcaaccctttatttagccctaaagctacaaactttctgagacttagcaacgttgaagtgaaacccaaagctatgaactttctgagaattagtaaacacttgttttaaccttaaagctatgaactttctgagaattaccaaccattgatctaaaccctaaagctacaaactttttgagaactagtgatgaatttttcaattctgtactagggttgtttaagtaatgggtcaatttcatgttggcagctgcaaacttgaggatattcttcttgaaactgatcggattttacgaccggaagggattgtgattttccgggatgaggttgatgttttgaatgatgtgaggaagatcgttgatggaatgagatgggatactaagttaatggatcatgaagacggtcctctcgtgccggagaagattcttgtcgccacgaagcagtattgggtaccggcgacgatggaaac

SEQ ID NO: 18518 - DNA, 556 bp, Arabidopsis thaliana columbia
tacatgactgttgtgggatcaaaagattccctcagatctcctgcaggagatactgtcccgtcttgagttaagagccaacatacaagcttccgctgtctgcaagtcatggtgtgaagcagctgcttctgtcaggaagttacagcctcgtccttggctgctttatccactaaaacgctcatctcgcggatttactgatcccaacactccttgtgaaacctacattctttttgacccattacgaaatcaatcatataagcaagagtttccagggttagggtgccataaattccttagttataaaaatggttggctgcttgtgtcaaaatatgattaccccggggcattattctttcttaacccttttacccgtgagcgcgtctacttaccgctgttggtaccctgttgcggggctttctcagccgctcctacatcaactagttgtttggttgcttgtgtcaactactattttgagatcatgacttggcgtcttggtgaaacagtttggaccaccaattgcttcgggaacacatacgcggtcgcaaatgggacaaatgtg

SEQ ID NO: 18519 - DNA, 561 bp, Arabidopsis thaliana
tgagtgaagcaatggctccaagtgctgtactgcctgccacatgaaccgggagcatgaatacatgagccacctctccattgaacaccacaaaagtcacgtagactacaacaatctgcccaaaggcaatccgtttagtcagcagactcgtggacacggggaaagccactatgaatgaagctagagccacagcaactggagccaccaagccattccctagtgaagctggtccaaccaccaagacactcactagcgcaatggctattgtctgaaaagtggcgtaagagacatcaagacagcacttgagaacttcgccgtatgttggttcagcatcggagagccagatcaagattgtggtcaggtaagaaaaggctggaaacgttgtgaagtgtcttagtggtttgggaccgtcaaagtggttaactcacgatgagacaagccatggcggttcgcagagccaggccaagtcgctcgagccatgttgtgtcgcgcatcttttacaggattgttgttttagtgatttgtatgtaggaatcttgttagataagatgatgagatgaaggt

SEQ ID NO: 18520 - DNA, 298 bp, Arabidopsis thaliana
ctttagtgataaatgggaaagtgactatacgggtaacttaacgattaatgaaaggcccagtgcacgatggggaagctggatcactataacggtcaatcaggacgttattttccagacttttttatttccgttgaaaagagacttcgagaaaactgtcgtctttgcactgattcaaactgaagaagcactaaatcgtcgccagataaatcaggcgttattaagtacgggcgatttggcgcatgatgaattctaaataaaaaattgttcggaggctgcaatgcgtgtcaaacatgcagta

SEQ ID NO: 18521 - DNA, 501 bp, Arabidopsis thaliana
tttactttttataatggcattagtattaccacactaagttttactttataagaatatgaaaaaaaaattagaaaaaaaaatattgatcatcactcgtcagaatcgatccgttttccaaaattgaactggtaacgagctcgagtttaaataaggttggctattgggtggaccaaccaccaaatattgcaaatattgcgttaaattaaaattaatatccaaattataactttatattagctttaagagcaattacctaatcagaaagctccacttttctgtttttgatatctttcttacagttcacctagcatcataacatcaaattgctatccccggcccaaaccgattctcagcccatattggaatgttcaaacgctgttcaagtcttccgtgtagtaaggcgagagtttcccacggttttagatcgtttagatgtgtttggactgctacaaggaacagcaccagagacttcttgaagcatgatcacaacttttctcatgg

SEQ ID NO: 18522 - DNA, 486 bp, Arabidopsis thaliana columbia
aaacccatatcatctctcacgcacacacatacatacatatagctagctacagttatcagaaatcctttgttttagtgtcagaaacagcatgcatttccagggagtttaccggtactacggataacaccggccttctccttcaccttgaactctttgctctgtctgtctttctccgcctgagctctggctccagcagcaatctgttcaatgtattctgtgtcttctctaaatctctgcaaacctctctttctcctctgttctagttcgctctgctgttcatgtaccaacatgttagagaataatgaactcaagttatcatccagttataatataatgattatgagattagattatacaaagtcattatattatcaacctcagatatgtccagcttccttcgagctttttcccttttcttcgcttcccacaaatctatctttctgtttaacttctcatacctgcttgtgtaatacatatgtgagtgta

SEQ ID NO: 18523 - DNA, 506 bp, Arabidopsis thaliana
  unsure (1)..(506): unsure at all n locations
gggtaccgatatatacatagacaatgtgcgcaccctttaactttgcttctgaatctcactgattcacgtatttcctgatgatatctcacactcttgatcctttgcaggatgcacaaacatatgctcaggaaaacggtcttttcttcatggaaacttcagcaaaaaccgctactaatgtcaaagagatattctatgaaatcggtgagctttccttacactttgataaccagttcacacaatttttgtctctcgtatattaaaccctatcatacttattcttttggctggtacagcaagaaggctaccgcgagtacagccaacagaaaacccaacaggaatggttctgccagacagggccatggatagggcagtgagctcatcttgttgtgcttagttatattgtgtaatggcacacacttctcttaaaaagagatcttttggtcactttaaagttatggacttctgtgtttgcgtctctttgctttgtnttacgtatttgagatttg

SEQ ID NO: 18524 - DNA, 551 bp, Arabidopsis thaliana
  unsure (1)..(551): unsure at all n locations
tggagctaagacctgcttattatatgatatggtttctagagcaaagtttagaggtgctccagatgaagcaccacttgatcatttggaaatcttagaagacttagtttcctccatcaaagcagacggtccagctgattatctactttgccagctatttacccactctttaatgggtaaaggagcatcgtggctccgacagctaagcactgattcattgacaaattggacgaacatgcaccacttcttcgatgaatccatgatagaagcaatgcggctgctgatttcttcattttcttaagatccaacagaaggtttaaaggcagcatggatcagattcaaatcttatcttagggactgtccacaacatggtttccaagaaagccagctcatcagcatctttttcgatgaatagatgtgatgtatcagaagtcattaaacgcaacaagttcttgcaacttcatgacaagatctccaacaaaacattggtactaatcaataacgttgtgacgagcncacaacaaagagccaaagacagtaagcgcatgaaattg

SEQ ID NO: 18525 - DNA, 545 bp, Arabidopsis thaliana columbia
ccccaaatggcttggtcatgatggaccgctatgattgggattagaagctccgtgccacatgggattttgtaccctcctagcttcacatccgatttagcgcgtcgaatcgtagctactattggtggatacaaccttaaagactcgttcaagatcatactcaactgcaaatttgaaagaggtaaaacaaacatcaacatatcttctatgtacatatacccttttgcccttgaaacttgccttgatatggatgtagaattatagccatataaaatttatagattaggcgacaaaaagaccataattaacggtaacggaaactgtctatcaacaattcgccttttatctgtaattaatgatatatttccaaaattgaaagacaacaaagcaaagacagaaagagaaagcgcaccgttttaagcttaacgacatggtccttggtagggacatcatgtgagccgcagaccctgaggacctcatcacgtgctttggcctgcactccgggtgcatggatagcaagatggtcgtcccgtcagcagattagaagt

SEQ ID NO: 18526 - DNA, 579 bp, Arabidopsis thaliana
ccctggtggacgaaaaaaagttacagcctgctataacaaagtgatacaagtaaaaatttgggttttgaacctatctcatccacaggtgattgacttccaaacatggatattacaacatgaatagatgacaacacaaatgaagtaaagaagagaaactaagattatagaataaccccccataaataaaacagaatttgcaattaaaactcgactatgtaacaagctaaagtatccctacaaaagaatcggtaacagcgctgaagtggaattatttcatgaaggtgaggatgcaggacaaaggaattcattgcactgctaaaagattcatgtaaacataagctaagcatgtctaaaactagtataccatttttcttttggcgcgctccaggatttcttcttcaacacttttgctagtgacaaatctataaatgttcacgacctcttgttgcccaattctatgcgctcgactcatggcctgatataatagggttgggatccattatcacatttagtattaaagagtaataaccaaaggtagaaaaattttattggaggcaaacctgcaggtcattttgtgga

SEQ ID NO: 18527 - DNA, 620 bp, Arabidopsis thaliana columbia
tccaataccagcatatcaacaaagtggtagatctagagaactaggaatgacagtacggttaacaaaaacgacattctagatgacgatatcacgttataatcaccatgatcacgtatgtatgcgtttgctctcaaaaccatcccactctctcttatactttctccatcgagtctatggccaatatgtatgcgtttgctctcaaaacgttgttcctcgtgacaatatcaggctctatattcttatgcttcatatcacatagaagtatattgaccacacttagtttcccttgcccactgtagagagatatcaacgagttgaatggggaaagtttggattgtaaacctagctctctcatcttctcgaaaacggcttcagctttactttgagtgttgctagatcttgcataacagcttaagagtgtatcgtagacagagtaatctttcatattctccgggatgctgctttcgaaaaagttctctgcttcctccaaacccaacactttctcagtcagatgaagccttgttgcataatcttctgaaaagagattaacacctttttttgcacaccatgttgatgctcaagtgctttggacactgatttgaacacgtagatcttgatga

SEQ ID NO: 18528 - DNA, 520 bp, Arabidopsis thaliana columbia
  unsure (1)..(520): unsure at all n locations
ggtcttaaaataaaataaaataaatcatttgtatacactgaaaatattgtccgttttcaccgcactgaatagtaaatttaattcttgacgaatcttgacaaatagtatgacctaactagtcaatttagaagagatatatttatttttatgcaatatgtaccattctttctaattttgatcacaaccacattcatatagatcacagaggtagagacataaacacacaaaaagttcccatattcggcaacaagctatctccaactataaagttcgagacagtgaaccaaacaggttcagtttcattaatcacatgataattctgaaccaggtccggtatttttgaactccgcataatacaatgtcttcaaagcaaaatcacccatccattcaaaataaaaaaataaaaaaatgagaaagagtggacaaaaaaaggaaagtgtaatgaatgacctctaagtcctaatcagggttgatgtntcaagtttacttcgagatgtttgtataattgtatgtgtattta

SEQ ID NO: 18529 - DNA, 578 bp, Arabidopsis thaliana
gctttgtagattttcaattgattatatatagtaacagttaaaacactcaaagaacaactttagcttcttccatttaaattgactatatatagtaacagtaagccagatggtgactcagggcatgtgggagcgggcctctatgcttcggcagctccctcacttcacaaaggacttggccaagagctggttgtgggcgacaccaagacaaactagttgctggcaatcaaacgtgtctcattgcaacagaaagctaaggtaaaacttgatttcacagtaccgagtgaaccaggagagaagtcatacacactatactttatgtgtgactcttacttgggctgtgaccaagagtactctttctcggttgatgacaaaggatctggcgttggagatcacatggaagaatgatttgttgttatcagaaacagaaataatcaattctaaaacagaaagaatcggaacttaatcgatatcgaacaaaaatatttaaggtcccaaaaatacctgaaatacaattatatattaaaaatatattcaatttcagaaaccaaatagtcaaaaatacttgaaaattatattaa

SEQ ID NO: 18530 - DNA, 1354 bp, Arabidopsis thaliana
gaggatcatccccttatttcattattacaatgcagaatctactaatcaaatgttgtactacaaaaggtaagatcaactacggtagctaaatgcgaaaattatgaccagaagaacaaagaaagactcgaaaactaagcagaaaacataaattattcttccatgtgatctgcagcgtcagaatctttgatatcaccagtaagactactcctggtcacaaccaaagtaagaatcacacatgaagtagagtgtatacgacttctctcctggttcagttggtactgcaaactccagctacgatgcagaatctagtaagcaaatgttgatattacaaaaggtaagatcgaccacagtagctaaatgcgaaaattatgaccagaaaacaaagaaagacgcgaaaactaaccagaaaacataaatcattcttccatgtgatctgcggcatcagaatctttgacatcaacagtgaaagaatactcctggtcacaacccaagtaagaatcgcacatgaagtagagtgtatacgacttctctcctgtttcagttggtactgcaaactccagcttcacctgcgccttccgttgcagggagattctcttgatggccatcaactggttcgtcttggcttctccaacgactagccaccaaccttcttctttagtcttaggatatcttggcgcgtccacaggtcccacctcggtccttccctccatgtctctctccagtaatacctgcaatgtgatatcttttccagggcttacctcgttacttcccacaatctcatatgtaaggtcaatgttggggaagcggttgcagaatctggcaatgtcaagaagctgagcgtctgacatttggagaagctcgtggcgtttgtcatcttccatttccacaagatcacatatggtttcaatgttattccccggattctcatggcaccttttggctaagtcctttgtgaagtgaggaagctgcagaagcatggagtctcgatcccacatgccttgagtcaccatctggcttacttccatagctaaaagagcaagattcagacagccattgctcgatatcacatcgaccattgcttgaagaagccttgttgctgataaaaggacctcacactgatccattacaaggttcccgctgattttttgccatgagaaatgcgcctgaagaagtgcgcttgtcttcacacgagggtctgtgcatcttgggttttgaaaagagaacctctggtgattgatgagtctccgaactgcgtcctcttcaccaggacgtataggaatcaagtcatactccgaagctgaagtcaagatctcaagaagacccttcatcttggtcttggaagccaagagaggga

SEQ ID NO: 18531 - DNA, 560 bp, Arabidopsis thaliana columbia
gagccgaggcataggaggacacataacaggcggtgcgtacggttccatgatgcggaaatatggtctaggtgcagacaatgttctagacgcaaagattgttgatgccaacggtaaattactcgatagagccgcgatgggtgaggatacattttgggctattagaggaggcgctggagggagttttgggataattctagcatggaagatcaagcttgttcctgttcctaagaccgtgaccgtctttaccgtcaccaaaacgttacaacaagacgtgggtaacaagattatctcaaagtggcaaagagttgcggacaagcttgttgaagagctattcatcagagtgctcttcaacgtagctggaaccggtgggaacaagactgtgacgacgtcgtacaatgctctgtttcttggcgggaaaggaacgctgatgaacgttatgaagaagagtttcccgagctagggctaacatttaaagattgtatcgaaatgagctggcttgaatccattgcttacatttctggattccgacccacacgcttactaatgttttgctcaaggga

SEQ ID NO: 18532 - DNA, 600 bp, Arabidopsis thaliana
caagtcagtcacatcttcttacttctccttagacatcttgtcgaaaactattgtataaccgcggtttttttttttatcataggataattggcagtcagtgatgtttgcaatggctggaggaatagttcttagccttggaaacttagcaacacaatatgcttgggcttatgttggtttatcagttactgaagtcatcacagctagtatcactgttgttatcggtacactcttctttcttcaactactcttaactgattttttcctctgtttcttctctgttcttatgaccatttctgttttctagtacaggcacaactttgaactatttcttggatgatagaatcaacagagctgaggtccttttcccgggggtcgcttgtttcttgatcgctgtttgtttcggttccgctgttcataaatccaatgctgctgataacaaaaccaaactccaaaatttcaaaaggtttgaaaaagattcatatctattgttgtttccgtttggtttggtttggtactaatcttgatcttgttcaggttagagctacttcttccttcgaatggaacaatttctgcaagcaacgggttaacaaagggaagcga

SEQ ID NO: 18533 - DNA, 853 bp, Arabidopsis thaliana
tcacaatactaggtatatatataccatgagcatacctgtattctaatacctagataagtaaatcaatgctcaagagtaaaacctaatacatagctcatgcaaaaagaaaacagacgaaacagaaaaatagcagattgatgaacaaattactcaaacaatagatgaaagcgagttggtcaatgcacatagcagaatctagtaaagccaagttcgtaacacaaaaactacaaccatgtacagaatctaaatccgaaaactatgaccagaaaactgtggaactaacctgaataacaaatcattcttccatgcgatctccagcgccggatcctttgacatcaacagagaacgagtactcttggtcacaccccaagtaagagtcacacatgaagtatagtgtgtatgacttctctcctggttcactcggtgctgtgaaatccagcttcaccttcactttccgttgcaatgagacacgcttgattgccagcaactggtttgtcttggtgtcgcccacgaccagccaccatccttcttctttggtcttgggatacctcagtgaatccacaggtcccacttctgtcctcccctccatgtctctctcaagcatcacttgcaatgtaacctctttccctgggttcacctcttcactgcccacaatctcgtaagtaaggtcgatgtttgggaagcggttgcagaatctggcaatgtctagaagctgagcgtctgacatcttgagaagctcttggcgttcttcatcctccatctccacaagatcgaatacggtttcaatgtttttccctggattctcctggcacctcttggccaagtcttttgtgaagtgagggagctgcagaag

SEQ ID NO: 18534 - DNA, 478 bp, Arabidopsis thaliana columbia
taaagagatacaagctgattactttaccctgctaaaccaagaaagaagagtgaaaagaagatgcttctattcataggaggtctgatcgttctacaagaaattaaaagagcaaatctttatcaaaagacaaatccaagtcacacaaaattgcaatccatcattaaacaatagaaccagaattaacaaagaaaaacaaccctaattccaattccagagagatcaaactatttgtctgattttgccgcatataaactcatcaaaacaatcagaaacagagacttcagagactttagcaattcaagcaaaaggataaagaaacagagagattttgagaagaagataaaaagggacctttcacggaaaaaagcgagaggtgcgagaatggagagagcaagaagatcgcgaaagacacgagaaacgagctgaatttcaccgacgttaagagctactttcgtaaccacatggtgtctccgtttat

SEQ ID NO: 18535 - DNA, 1242 bp, Arabidopsis thaliana
ccgctgcctgagccaccatcgcctccggaatcgttactgatgcatcatcaacacccagattgatgtcttgaacaacccgtatcagattatcagccattttcagaagtgttaagtagaagcgaaaaggatatagaagagtaagagggattgtcgaaattgcttgtggattgaatggatatccagattttccattatatagaaggaagggattcataaccgccaaaggagcatcgcgttgggatcgagggatcaacgtggagatacccgctaggatagtggctttctaacgacccacttcgccggcgaaatcgagaacaaccgtcacccaagtgacgagtaaccgcttaaaagcatttgtagtcgccattcttcacgtcttttgtttaatttattaatatatttttcttttttttcacctatttctaattttattcacatgaaaattcataaataaagaactactcctttttgttcaaaataaaataagataactactccttaaatttatctagatgtcatgaaatttagtaatttacaaaagactgaaaaaaacccacgcatagagctatcaagcgagccagaagtcttcgggctcagcccaaatagtaccatatcagagcgggattggacatcatttgttaggcctataaaatagcggaccttgcagacatgctcaatcgagttgtaggttttaacgggttttgttaatggatttgcggaccggtctgcagactacaaatatttaataaaaataaatctaaaatattaataaataaacacttttatataatttttaaaataaaaatataaaaaatgtgatagtgcaattaggtgtgatatatagaattataagatttacaataataataataataataaaaaattcaaatttcataattgttaatttaaattttagttacttataaaaataaaagataaacttgcgggccggcctgctaacctgttgacgatagcagagcggatctaaacatattatttttgcgtgtagcctaacggaccgatccgttgcgatcttacaaaaataagtgcccattgtagatcggtccaagtagacacgagccggcttacttgacacctctacccaggcacaaaacggcctaggttgttgtctttttgtctcgaactttgagctagagactagtgagtagcgaggttttagactttccgaacccaaaaccctacttataatattccgaacctaaagaccactctactttctcc

SEQ ID NO: 18536 - DNA, 502 bp, Arabidopsis thaliana columbia
ggtaaaaaagttataactcatatagtcttcgtgagctgccaagttcttgaagcagctttgtgaaaagaaacttgagcgccggcttaaccatcggtctctttcatttacattttggagccgccggtaaggtaaacttgacactgaatcacggtgcacccgattttaaacccgggaaccactgtgaatcctactttggctcgagtaggactcatcgaaaacttcttatcttgttttctttttaagacattctccatgaaaacaatcgaaaattccactccgctttcaacttggaaaatctcaactgcaggatcaaaggacaaggctaacttgtgaagggtccaaatcgagctagccatcgtgacaaacgattcatagaatgtgctcaaagatctccaagaactcaacacagcttcgttttcatccatgttactgaatatcgaagatgccatgttcggatgaatcagctcgtgatacttcttatcgcaaaatctagagaatgcac

SEQ ID NO: 18537 - DNA, 467 bp, Arabidopsis thaliana columbia
ttactctgatctaggagtgtagcttttaccatttacttgtgtctgtttttggtgctgttgtttgatctgtaatgcatacttcaattttcttttcttgtagattgatttcaagaacaagtcatgctaactctttccaagtttcatgtgatactaatcccaatactcttcttcattacgcttctttcgccattgttctccattgctctacctatcaacatttggccaaagccgagatttctctcatggcctcaacataaagccattgcactctctccaaatttcactatccttgcccctgaacaccaatacctttcggcctctgtaacacggtatcacaacctgatccgttctgagaattactcgcctctcattagctatcctgtcaaacttatgaaaagatacaccttgaggaaccttgtagtcactgttaccgatttttctcttccgcttcaccacggtgttgatga

SEQ ID NO: 18538 - DNA, 429 bp, Arabidopsis thaliana columbia
ggtagagttggatcgaccgacgactctaggcgtgagattgcagcgttctttgctcatgtcacacatgaaacaggacgtaagtatatatagtaacatgtttcactttactcttttcttatgatgcatacatgcatgttctctattaaataccaaacaaaaacaaaatatgaaaacgttagaacttgtttttgttttctaaaaatcattagactaaataacatgttttactagattagtaatatcttttcatcaaacgcatatagcataatcacttttcaaaatcatagaaacttgactagaaatactttgaatatgttgcagcattcgatctaataatttcggtttttgttttagatttctgctacatagaagagatagacggagcctcaaaggattacgtgcgacgagaatgcaacacaatatccatgc

SEQ ID NO: 18539 - DNA, 1017 bp, Arabidopsis thaliana
cataccattgacgcaacaaccttagtttccatgtaaaaaacaatccagaacatacctgatcaaccattctgttcttaagtattgtactcttagccataattttgatggctacattatcaccagtgtctgtgttcctcgcaaacttaaccttagcaaaggttccttcacctattgtgcgaccaacctcgtacttgcccactcttctcattttctttgtcattctttacaaacttttatctgatccattgaccacaagctatcaatcagattattcagagacttagtaaaaacctctttccttaaacgtttatgatttcgatttcaattactttacgtattgtttgctaattttagctcctacacatccatatatacaaaattactctgtatccataattttgatttcgcagcataaatcaacataaattcgatcaaggaaacgacgaaaaggtaaggatcaagatcataatcaatatataaaattcgtacggctggaattgcgattgggcgtagtcgaaagagaatcgtgaaataccagaattggattcgcagagaagggttgatgaaagaggcgtaggagagaaggaaggctcgtgatgcgattcgcgaaagccgtgaatcgtcgatgcgaacgtccgtgcagatccgttgagcatttcgggtcgggttatttgactgtacccgtatacgacctgaattagtcgttcgggtcaattatccgtttgggtgattaaacttttaaaaactaacattgcattttgaatctttcaatttaataattgtgaggtttcaaaatttaaaaaagagaaaaaaaactaatctaatatcacttatcaatttagtaaattatttttaaaaaataaacatatagtattttcaaaatttattttaatttttttcaaattatctagactatgattaatcgaactcaaattagtaaaattttctatttttaactacaaatttttaacttcatttaagtcaagcaaggttcaaaaagaccaagagaacaaggat

SEQ ID NO: 18540 - DNA, 528 bp, Arabidopsis thaliana columbia
caatgatggattagataagagttaagatgtagaattggaaattgaaaaccggacaccgtgtgtgttgttgcaggcagaacaaagaatgtttgggaatctccaaaaggttgtcttatgtattcgtttacattagaaatggaagatggtcgagtagtgcctttgatacagtatgtggtgtctcttgctgttactgaggcagtgaaagatgtttgtgacaagaaggtatgttcttgaaaataacctttttgttgtgtgttttgatcccttgtatcagaaatttgaagttcatttgttttcagggtttgtcgtataatgatgttaaaataaagtggccaaatgatctatacttgaatggccttaagattggaggcattttgtgtacctctacatatagatcaaggaagttccttgtcagtgttggtaataagcattactctttagaagtttgtaataagtatcttttagaagtagcactgctcttagtcttattgaagctggtgtccttcttgcaggtgtgggattgaatgt

SEQ ID NO: 18541 - DNA, 580 bp, Arabidopsis thaliana
gggttatgtgtgaaaattagatattaggttatgagaaacaaaccagtggcgacgaatatcatgaacatgatgagaacagctgagatcaaacgcatagagagcttcattgcaagagagataaagagagagttcgaaagtagtgttcaagtgtgttgctgctagtgaggaaaatggcactatataaagagagtaaagaggtattaaaacgttcaagataattcacattttacgcgtttgttagatatttttggataaatatcatttactttatttttggagtattcactttggatttgaataagagtggtgtgagtttctcgattttatttgctttaccgacactttcataggtgtaaattgtggtccgtaacgtaaggtgacaagacacgcagatgttgtggagtccatctaccgtttcgagaagtcattcatgcaccaaattttgtatcagaaaaaaacaaataaacgtatagaaaagtaaataattgagtttgcggatgttgtggagtcccaatgataatggctatgtaaacaaaaactaaaagtaacacaagtggaatagtcacgggatagagtattt

SEQ ID NO: 18542 - DNA, 439 bp, Arabidopsis thaliana columbia
gattacacaagttttcgtctttcctcccaatgattctctcaagagcctcgtcaatttgctatctctgaaaattcaaaagcaatagctgagtatactctaatgtcaaaccaatactgaagacaccaagaacaaggagattacttattatcgttttctatcaagtgatcacttgtacctgtaaggaatatgaccagagtgctccacaagcgcgttaatgacacggccaagagtaagtaaactcttgttgatctctccagcttctctggctcgtccctgcaataacagttgtcaaaatgcttagcactagcttccatgactgcctggaagacactgacctcagagacgatgataataagataaagtatacctctcgtgcaccagaacgtgagatattctcggaaccagcaaggtcaacaagatttagtttccacatttgatc

SEQ ID NO: 18543 - DNA, 1088 bp, Arabidopsis thaliana columbia
aagtatattatacacaaaatttaatcgcttattataaaaatgttgacaataatttttctttttgttgttgcaaaaaaattaacattccaatgaaaaggttaatcttcataatccggaaacatccaataaaatgtgatcattacttaatcatcaagttaaaccaaaaattaaaaaaaagtgttagaaatttaggaaaaagtatgaaacttttgataaaaacttacccaaaaatctgactttgttgtatgagagagattaaaaaagcttcctttctttataatcctataaagtttcacttttgcgtctccggcgaagttaccaactcctcctccaccggcccaatcccgccggcaatcataaccgtcatctctaaaacgtgaaaagtcgaaaataccctcagacacctctttacaattcccaaaacttccccatctactagacccaccaaccaatctctcttctttctccggcgccggcgcgacagctcctctcaacttcctaataacagccgctgatctcggaagcgacagtgaacgacgacgtaaatcgtaaggaccatcaagaacagtagtcggagaaggctcattcaccgtcgttgattctccgggtaaaactaacctcggaggaagctcaagacttctcacgacacctttctgattcaacctcgccggttttttaacacgacgaggctttcccggagcttcttcccaaagaaaaggaacagatccagcgatgttaaccggaggtgtagctaatcccggagtagtttcatatgcaatgttattcattggatatgaaaacagaggaagctgcttacgtgtagaagaacagaaccgatcttgatgatcattaacaaaaaccattttttttcgttttcttggagatgagttaatgaagacctaataatgttttttttgacgttatatgaaatgggtttgggttaaataggagagaaaaattaaagaaagctttataggaattggattcatttgaacgagaaaaaggaaaagttaaggacgatgtatagtgggaggagaggttagagaagacatgaaggagaagaaaagataataaattaatgaattgaa

SEQ ID NO: 18544 - DNA, 686 bp, Arabidopsis thaliana columbia
taaataaaacacaagttgaatttgtgaggaaaccctataaacttactgtccttctcgttctccaacaaccaaaaagtttatgagatttttaaaagaggcgtagcactctctaaccgcacaagtcatgtaactgtcgacactcaatctcttggtcagttcacgatcttttccattgctatcttttgccatatccaaagctattgggatctaccacatttagcaataaataattaaaataacaccaaaaagccaacctatcatagttaagacaaagataaaaatactcaccttactagccagcagaaaaggtggccagcggataagatccagatcacggtcagcccaatatggcacaagcaggagttccatttccctgcatagtaatgaatgttttcactgaactcttctccgattaaaaggatttcaaaatcatctaaattaaaataaagatgaatattcaaaggcacactcaacctatcgctaatcaaatcctcctctcggaaactactgattattttgttccacatctgagcaaatcgtgcggcctccttgtctttactagatggaacctgcaattaccaaaatatgacacaactttaaatggagctctctccgaaaaaaatgattaggagaccaaacgtttgttatcttaatattgttccgtgtcatttgtattattactggta

SEQ ID NO: 18545 - DNA, 696 bp, Arabidopsis thaliana
gataatggtcttttcttgaaaacaatatccacatctgtttttagtttgacgatttaattagtttagtagctcttattaaaaagctttagttttaaagtaagtatcatccacatattggggagagaacatagatgatatctctgtcataaatattaacaccaacttgcaagagatttcatcccattccgaaacatcaaaatagtgtgttcagatcaaacagattcacaatctcaactattgttgttaccattaattccatacacatatattcatgtttttcaagcatcctgtttccaaatcctgatagttttatccaaatgattacccgatgaagatatctcgttctgaaccggatggcaactcactgagatcactgcgtctgtgtggccttctagtctctgcagtatatttctcgcttgaagatcccacagatacacacaattatcctctgatccactcacaatgtacttcccattcgttacagaaaacgccgatgtgatacagaacactttgttagtatgtcctgtatacactttcaaaaacttccccgtcgcatagttcgacagcttctgttaaaatacacaaagataaaatcaatccatttagtctcatcttctacatcaatatgatctcaagatcgacaagaatacacaaatgcaagaacccatccaagactatacgaaagtcaacacttta

SEQ ID NO: 18546 - DNA, 844 bp, Arabidopsis thaliana
ttcaataaaactgttcagaactataataggatttaaaaatgttaagaaaattcgtatttttttccttcattagtagtgtttataatagaaaaaaatcaatcaatatttctaaagttgaaaataaaataacagtgctacgatatattttaaatacattttattaaaatatttgatctaaacagaagaaattgtgtggggaaaatcgacgagagcttatcaattcatctcacactcttcttcactctcttctctctacacacacacacacacacacacacaaaatggattcttcgaatgttgaagaaaacctaaacccagaaacaaaatccgcagaagaacaaaacccacttgccattttccattcttctctaccaatcgcatctctttctctgaccttgttcccatcctcgactcaatttctcaaattgtttgctcatcatccaaacaaggttaagatccctacgcaggcttcttctctcactcatctctctctttcttctgtctctccttttccttcttccagaatctctttcaaatccaccatcgctgctaaccctcttcaatcccctctctccatcgtccctcgtcgtcccgttgatccttcctccgccgccgctctccgccgtgctgctgtcgtctggttccgcaatgacctccgtgtccacgacaacgagtgtctcaactccgccaacgacgagtgcgtctccgttttgcccgtttactgcttcgaccctagagattacggcaagtcctcttccggcttcgacaaaacggggccttttcgtgcccagtttctgattgagtccgtttcggagctccggaagaatctcctaagcctagaggg

SEQ ID NO: 18547 - DNA, 460 bp, Arabidopsis thaliana columbia
tccccatgatcctcacaagccaccactacatcaagatggttgcgataaggcggtaactcgactttcgcaacatcccgagcgagatccacaaccttcttgtccatcctctccttgtgccttgtgaacatactgttgaacagaagacagcttccacaagagatgctgtatgcgctaagccctttgtcctccagccactgcaacacctcacgaagagttgggtttcccttgagaacccatctgtcccaaactgtccaagccatgtcacggtgcttcaccacctttggtggaagtggttcagccatggagaatagtggaagtgccaggttggcaaatgtgtttctgtaagcttccactttatgtcctccatcaaggaccttgtacagctcgaggcagaccagcccagtagccatggctgttgaagtcgcaatggctgggatgattcccctgctatgaactttgc

SEQ ID NO: 18548 - DNA, 614 bp, Arabidopsis thaliana columbia
gacatactgaagcagaagaacaaactggtaaagcggttcggatgtaaccaaacccaagtaatgcgctcctcgtactatgaaaactcctaatattggcagcaacaagtaacgcacaaccaccacacccattatgactgacttgtttattcctgaacctctcagacctgtgattattataagagagagaacagagatttaaggttttgtcttaggaaaaaaagtttctgcagccatttgttattgtttatctaccattgagaaggtttcctccaacaatcagagtcagaacaggaatcgccccgtcccttcaagaaaattaagctactcaagtaagcattgttaattatcactgacaagtgagatttttaatatgttgtagaatacccaatagagatactgagtcctcaatcactcgaagtggagctgtgttaccgactagtagcttccgtagtaaaggatttaaccaaccgcaagcgcgataagctgaagagaaagaggattagttgcttaactagtaagaacatacagaagctagatagcagtcgtttagttcaagggaacattgaaacaaacagctgcaatagttgaaggagcaaatattgttcggtagatga

SEQ ID NO: 18549 - DNA, 794 bp, Arabidopsis thaliana
ggatccccgcttattgacaaatttggatgtcaaaggcttgacgagtcactgattgatcgtgttcagagactgacttctcgtcaaccacacgtgttcctccgccgtagtgtcttcttcgcccaccggttagacattcactgttttaattaattgtgtagaaatttctcgtcttgcttgttttaattgtgaggttttaacagggatttcaatgagattttggacgcttatgagagaggagacaagttctatctctacactggaagaggaccttcatcagaagcattgcatttggggcatttgattcctttcatgtttaccaagtaagtgagatcctggagctagtattgtcttaccatgtttacggatttggtagattgtgcttgctctttatacttgaaatggtttgcagatacttgcaagaagctttcaaggttccccttgttatacagctcacggatgatgagaaaagtatatggaagaacttatcggtggaggaaagtcaaagacttgccagagaaaatgcgaaagatattattgcttgtggattcgatgtaacaaagaccttcattttctcggacttcgactatgttggcgggtaagtcgcattcgaatcttctatggaaataactagcaccgctcttgctttgtagaaaatattgcttgaagagctcttggtagtacatatagtctacatgcatgtagctcaattttttattttttttttggcgaagatttgtaagatcatatattgtccttcgtttttttttttttttttgattgatgtatcacagtat

SEQ ID NO: 18550 - DNA, 270 bp, Arabidopsis thaliana columbia
caagtataagtacctgtcagtttctgctgctattcttcctattttgatttttacaggcatgttgaattcatcatgacttatatgtagttgtatgattgatgcatagaacttttcaaattgttattagtattctggtctaaatttcggattaaaactctcggtttcttgattacaatcaggcaacaacagagtgatgagaccccaatggtgtgggagatacttctatacatgtacatcctttactcaccagattggcattaccgaagtaca

SEQ ID NO: 18551 - DNA, 650 bp, Arabidopsis thaliana
gctgttgcaatccatattccaacatgcaaacaatctgttctaccttcaaatgacaaatgcaaactctctagaaccggagctttatgtaaagacaaagtcttgtaaacattctctgaaaacatagtgggatctatgttatcatcatcaaacacaggattgaaattggaatcaaacttgagttttggcaacatagtccaaagagatctccaacgtttagacaaaacactcgtggctatggcgttttctgtcggaagtgaagacaatatctgtagaagcaaagcatcaggcaagtcactgattctgtcctcattcatagaatcggttttgctgtcaaaaatcaaaggaaaaaaaaaaagttagggttcaaagagttagggttggatctttataacagctaagaaaaacataaacgaaccaaagatacttacaatttctgttccattgaaattaatagaggtaacaattcgctaagaaactttcagattttttttgcataaggaacagctccaaacaagaacccggctaaagctaagcaatgatggaatcctttgggcaaaattcagggttttgtgaataatgggtacagagtaactgcatgaagagaaagatgttgtatcagaagtggaggagattgatcagaacaagagaat

SEQ ID NO: 18552 - DNA, 521 bp, Arabidopsis thaliana columbia
aggcatcttgaaacaagtcatagcatatacaggcaaatccatacaaatggactttaagagaacctctttgccaccttgtgataaattctttgcataccaacctgttaatcttgactgtaatttgtctttaggaaaaccaaataattccttcttagatccacttaagcattcaggtaaacccaaatacttacccagaccaccttctgtatgaatcccagaactcattttaacccatgccttggtttggtcatcaattctggctccaaatgtcaaagctgatttatccacatttatcacttggcctgacaactccccatactttgataagcaagctaataattcttcacaatcttctggagttgctttacaaaccagtaaagtatcatcagcaaaaagcaagtgattcacagacaccccatccggttgaaacttaaaacccgtaatcttgccttcacttttagccttattcaagatgtgaactagaggtacagtgcataaaacaaataaagatggtgacaaag

SEQ ID NO: 18553 - DNA, 635 bp, Arabidopsis thaliana
tgttagggtttccactttggtttataacacaagtcattacttttgaagctgaagtcgtactgcgataccgatagcactgggaaggcattaaatctgaaggattattagagactagagagtttttttttaaatctctattaacaacaatggaacagcaattgtatatatcttttgtttcgttaatgttttctttagctgaaagatccaaccctaattttttcaaccctaaatttcttatatatattttttcctttgatttttgacagaaaaactgatggtttaaatttgagtattcgagatgccgtgaaggaggaccgaatcagtgagttgcctgaagatttgcttctacagatattgtctgatattccaacagaaaatgtcatagccacgagtgttttgtctaaacgttggagatctctttggaagatggtgccaaatctcacgtttgattttacgtttgatccaaagtatcaccaaacattttcagagaatctttacaggtctttgacttcacatgaagcttcggttctagaaagtttgcaattgaatttccacgtggaattgatggtttgaatattggaatgtggatttgcactgcatatgtacgtcatgttcgtaaattggtattggttagt

SEQ ID NO: 18554 - DNA, 780 bp, Arabidopsis thaliana
tgttttaataattgatttctttacccctacgattaaagcccaagttaagtgtatctttcccccaaatagtttaattggaagccctaatttaggaaggaaatttctgcttttgctttagacgcaaggagctgtttagggttttggtggggaaacaagatttgtccagatgttaagaggaaataatgtgcatatgaactaggtcataacttatacgatcattttagagacagtgctagtgaaatatgagctcatagtgaatgtcgcggtctaaggaaaatatatttgtaactgtgaaagagggcatgtaagcctctccttatttaaagagactcagttttgttaagcaacccattgtgatcatgtaattatgggtattatccaatttaggaagcatatattatattttgaacccctagctacttcaaaaaccaaaacaatagagaaagctacaacaacttgaatcagatgctcatatgatcctcccttggcaagctctgaatcgtatccgaccatctcccaggcgaatgatcactgctgttaaatgagaaaagagctgcttcagcccttgcatctttcaccatcttcaatacctctctcatcgcaggacggttttcggcttaacagcacgcaagctgtcgcgatggtcaaaagagcttgaagttctcctcagaagcattcagctcctcacttacttcagtctcttcctctctcaccgcacgcaccgatgtggagatatcagccagtatttatgacaaggtcttgaatgaagtctacctgtag

SEQ ID NO: 18555 - DNA, 534 bp, Arabidopsis thaliana columbia
tctagagcacgtgtatcatctaccacctgtggagaagcaatcgaatgaattcccaccactgcctgtgaaaaatcatgctccaaacccttctgatcttcgctatttccaacttgtttttcaggtgtttttactccaaaggtagctgattccaaagcaacagacccattaacaatagaagatgaaaaggattcatctattaaggtatgtgccgtggcaactgtggtcacactagcaacagcaaactgagaatcctcagctgaaactgaatcataatccatcacagcaacttcatggatttgatgagccttttcttcctccaaaagattcacactttcttcctctacctttctgaaacctacatttatttccacaggattgccttcatgaatatctccatgaatttcccgccgattctcagcactattttttccgccatgaaccgttgcaacctgaaaagcttagctagtcagaaccagaattcttatcgaattttacaaaaagtcagcaactttatgcactctaatgaaacaaaac

SEQ ID NO: 18556 - DNA, 373 bp, Arabidopsis thaliana
aggatccccgatgaaaacataacaaaggctaaattgttacaaactcactttcacaaaaagaataaactctttaacgagatgagtaaatatataccaatgcatgttttagctgcgcattctcttctttcaactggttaagttcagcttccaattccactgtatatgccttcccaaaacaacaacaacaaacattagatttttttcaacaagaaacatcataaaaggaatgaagaaggtctctatttacttgtattcttgctctagatctagcagcagactctgcggttcttgatcatcctgctctggcttctctccactactttctccactggaccatccactactcttttccttcgccttagcactcccatat

SEQ ID NO: 18557 - DNA, 1225 bp, Arabidopsis thaliana
atgcctagaaaattttaaataaatagaataaaccaacctgaaaatagggcagaaaataggaaacgtgtaccaaacatctcgaaaaaattgccaagtgaatgaatgatcattagaattaagacgcaaaacaacgtcctagatccaattttaacgccacacatacttcgctaagcaactacgtttttttctttcttgtctctttatgaactaaacaataacaaattcacattaactaattaataaattacttaaatatcctcaaacatacagggatattatcggtaattcagataatgtccactcctgtctcctacgtgaaaaacggcggcaaacaaaaccgcgagccagacatcggcgaggaatacaataatcaccggcgacggagacggcttcaatgggccttaagcatctccttgtacctcagaatcgaatcgagtctctgtaatttcagctgctgtttgaatttgttgatgaaatctgaagctttcgcgtcgacgccatcttcgccgtcgccgaaagacgtcgatctttcgactctcgttgtatctggtcttctccgttcgagggattccaccgtctccggcgcttccgcatggcttcctgcgaaaccaaaacctgatttctcgctagccgattttgtcatcttcgttaaagctttcttcttcttcttcaccggttttttcgattccgatttgcttcgtacatgcttgtgctcctcgtgaagaaccggatccggattttgtttttgatccaaatccgggtcggatctgtagaaggaggatagcttaatggatttgacccgttctaagatagacggagctcgagttaaaccgggcgggttaatttgactgttcactccggttccggttggttgatcttcttccgggattctgaattttgagatatcaatcgggtcaacccgacccatccgggtcggaatactttcgaatcgggtcggttctgtgtgatgagcataatcattctcctccgggttatactgctggaatttgaagtatgacatgttgatggatttgacccgatccagaagagaaggagctcgttgtaacggtgccggagccggatccgggtgtaaatctaggtgggagtgggagtgggagtgaggatccgacccggttacgtcagtgtgggaacttgaaataagacatgttgatagatttgagccgatccaacagagaaggagcacgttgtaacggagccggatttg

SEQ ID NO: 18558 - DNA, 516 bp, Arabidopsis thaliana
tagcccccaaagctctgaatatccaatccacaagaacttcatcattttccggtactcggaatcggtggaatgatcggagccggagtcttcgtcaccaccggccgtgctagtcgtctctacgctggtccatcaatcgtcgtctcttacgcaatcgccggactctgtgctctactctccgccttctgttacaccgagttcgccgttcacctccccgtcgccggcggtgctttcagctacatccgtatcacattcggtcagtaacattctcccgccaaaatcaaaactcccaaatcgcagagaaattcaaatttcattttttcctctccgatcattcatttttttccgttacaggcgagtttccggcgtttataaccggagcaaatctgataatggactacgtactgtcaaacgccgccgtttcaagaggattcaccgcttatctcggatctgcattcggaatctcaacatcggagtggagatcatcgtctccggtctccaaacggattcacgaaatcg

SEQ ID NO: 18559 - DNA, 1518 bp, Arabidopsis thaliana
cccttaagtatcgtcataattacatctttgtccctatccttctctttttcacttttcctaatctctaatataaaaccaactcttgtcaaattcaacaaaattctcacacaaaccgacccgacccgaatctggccggtgagaaaatggaggtccaaagcagcagcaacaatggtggtcactcttctttctccagtctccgcgtctacctcaactctctttccgcgacgccttctcgcttaatcccgccgcggtatttccgtctccacctcttccgacgagatgagtcgcgtccgcgccgtctccggcgaacagatgcgccgtactctccggtggtacgatctcattggactcggaatcgggggaatggtcggcgccggtgtctttgtcaccaccggccgtgctagtcgtctcgacgccggtccttcaattgtcgtctcttacgccatcgccgggctctgcgctctcctctccgctttctgttacaccgaattcgccgtccatctcccggtcgccggcggtgccttcagctacatccgtatcacattcggttagtctcccgcgaaaatcatcactactcctccgatctgttcacggttttctgaaaattttaatttcaaaatcaaaaaccgtaactgatttcttttctgttacatttccgttcaggtgaatttccagcatttttcaccggagcaaatcttgtaatggattacgtaatgtcaaacgcggccgtttcgagaagcttcaccgcttatttaggaacagctttcgggatctcaacttccaagtggcgattcgtcgtctccggtttaccgaaaggattcaacgagattgatccagtcgcagttctcgtcgtcctcgtaatcacagtcatcatctgttgcagtacaagagagagttccaaagtgaacatgataatgactgcatttcacatcgcattcatattcttcgtgatcgtgatgggattcataaaaggagattcaaagaatctatcctcaccggcgaatccagagcacccctcgggattttttccgttcggcgcggcgggagttttcaacggagctgccatggtttacttaagctacataggatacgacgccgtttcaaccatggcggaagaagttgaaaatccggtcaaagatatccccgtcggtgtttccggctccgtcgcaatcgtcaccgttctttactgtctcatggcagtctctatgtcaatgcttctgccatacgatctggtccgtacttcaaatttattattttcttattgtatatttccgttttcataaagacggcacgtagtctgagtctaaagctgaaaacggcggggcatgtgttgttgtaacgcagatagatccggagcgccgttttccgcggcgttcagaggatcgaacggctgggaatgggtgacgaaagtggtggggataggagcaagctttgggatattacatcacttttggtggcaatgttaggtcaggctcgctacatgtgtgtcatcggacggtccagagtggtcccttttgg

SEQ ID NO: 18560 - DNA, 696 bp, Arabidopsis thaliana
ccgattcgcagtggaagtacttggccttttcctggccgttgtggtaatcagggccgttgtaccttctgttgaaggcttgaacctttggtagtgcatgaaggaagagactgctcgtggaactagatcacctagttttactccctaaagtaagaagactacctagaagaagaggaacgttttaaatttgtattacttgggagttttttcttatgttctagttaagtttttgacccaatgttaatgttaactcaattttgagttcttttggttttaaataagatgaaaaaaattcttgaagttaattttctagataagtttattgtttcttaaaagatttaaaagaagaggttaaaagacaggtcgtgagtacttttgttaagagcatatgtaaaactcagtagtagtttgatatgaaacaactagcgagcatcacggaaccaaccagtcgttttattccacaagtccaaagaaacgaaatttcattacttcctctaataacaaagccaacaatatcatcataggacgtgaagagctttagaagaaacaaacacacaaagcttatttatcattgctcttcaaatactccttgagaacatccataactgaaccaaactttgccttaaccttcactggtggattcgcaatctacaagccatctcctttatgttcttagaatgataatcaatcttactttgt

SEQ ID NO: 18561 - DNA, 1082 bp, Arabidopsis thaliana
cagcttcagatcagtactgtgaatcccaatccagctcaatctcgattttcccgccctcgatccctccgtgttctctcactctccgccgatccatcggcaaatcggaatcctaaatcagccgttgacgcacacgcgccgccactggtggttgtgggatctgcgaacgccgatatctatgtggagatcgagagattacccaaggaaggggaaacgatttcggccaagacagggcaaacgctcgccggaggaaaaggcgcgaatcaggcggcgtgtggagcgaagctaatgtatccgacttacttcgttggtcgtttgggagaggacgcgcacgggaagctaatagctgaggcgttgggcgatgatgggtgtggggttcacttggactacgtgagatctgtgaataatgagccgacgggacacgcggtggtgatgcttcagtcggacggtcagaattcgatcattatcgttggtggtgcaaatatgaaagcttggcctgagattatgagcgatgatgatcttgagattgtgaggaatgctggtattgtgcttctgcaaagggagatcccagattccatcaatattcaagttgctaaggtccatttttttactttcttgagttagttacttcagtgagagttggtttagggtttagggaagctctgttgaatggatgcagctgctttaggttttgaaaactatgagaggttttggaatagggttatagagttgattatgtttgaaatatcatgttcgaagaaacttaggctgctggtgggttttattgcaggctgtgaagaaagcaggtgttccagtcatccttgatgtgggaggaatggatacgcctataccaaatgagctattggattccattgatatcttgagccccaatgaaactgagctcagtcgcttgacaggaatgccaactgaaacttttgaacagattagccaagctgttgcaaagtgccataagttggtaagtccctttcttgcacattattaactccaaattttggctaatccttgctgctactggactctttgaaaatgctggtttagtggcttttgggtttaaaaggtttagg

SEQ ID NO: 18562 - DNA, 655 bp, Arabidopsis thaliana
cccctaaacccttgatccctaggtagatccatggccttcttcatgggagcgtccaaattagttgttgccttaatcgcccttccatcatccgcatccttatgagacctaattggatcgaatccagtttcttttgccatcctcgatgaatcgtagctatctttagttgccttcaagtcattagcagtatatcgatcttccacaaaatccactgtggccatttttggtgtctttaactcctttgcattgtcggctgcctttaactcatcatgtccaaccatcctaggctcttttacaatctcaccctcctagaaaaataaattttgagaataaacaaataactacaagaaaatccctattgcacccaataactgtgattataagctaagctaaaatgaacttgctggaacataactacactcactgcttggcaaattactcttcatcttactaacaaatcataaaagttgttgcgaaaaggggtaaatactcttcttacatattgtggcggacgtagggtctctgactggctatataaacgatccttgaggatggaatcttcaaatactgctccctgcttcggtgtattgattggagatagtcaggtgagtcagagggcggtacgagcgtgaccctgagtttgtcccctctatgtgtt

SEQ ID NO: 18563 - DNA, 813 bp, Arabidopsis thaliana
gaaatagaaacttttattggagggaagagagtgcatggaacttgtgttcttggagacgttggcgagaacacatattttcactaaggagcctggaaagcttgaaatccttgagactttgtatgagtccttgcactgatccggctgcagcaacgagggacacaatgaaacaagtccaactcaagatttttaaccaagtccaagtgaaagagaatttcggtatcttcttctgagcaatatgcatctcaatgggaaagtaaacagtcaaaggccagaaggaagctgctccaataagacccaagaaatcgttgaagaaagggaagatcatggctacaaccgcggtgaccacaacatatgaagtcctccataccaatctgaggaagttgatactaaaatcaccacagcaagggacatggattttgtattctcctgtaataaacttgttatcaggccaacgtttcgcgctctggctctctacgaactgaaaaattggttgacaaaagacttggtaggcgccgataaggtgcacggcgatgcagacattggcaaagtcgattagccagaatggctcatagaaaccaaaaccagttaggaaatttccaggagcatcatttccaaaggcagcgtaaccaacacaaccgcataacatgtagaagaaggttgttgtggagacacccacaaggcttgctcttttcatggctttgttctccgatggaggacctgctttcaaggtgtcctgccatggtttagagaaatatacaattgttaatagtttagtagagatagacaaacaaaacaatagaagctaaaccaaac

SEQ ID NO: 18564 - DNA, 863 bp, Arabidopsis thaliana
ccggagaagcacaagttgagctatttgatgctttaattgatggttgtaaggaatctgttgaaacaggaaattttgaaccaaaggtaaaacttgaaatataaacatctgaaatgaaggctcttttgttttccttgttgttcacttggatatttccaatcttcctgttttctattctctgcagggtcctgtgttggatttctttggtgtgccagttaaagcaaacgaactattaaaacgtgtgcaaggactgcagctcctatcaaagcgtattagtcgatataacgatccaatttcacaattccgggtgttgtcataccttaaaccttcaaattggtccaagggttgcggttggaatcagagtatgtacaacctaaattcaatattatcatatcagcatctgtcttatgttttttatcctaagtctttttatcatttggtgttctcagtcgatgatgcgagattgcttctgggaattctttatcatggttttgggaattgggaaaagatacgattagatgagagccttggacttacaaagaagattgctccggttgaacttcaacaccatgagacttttctacctcgtgctccaaacttaaaggagcgtgccactgcacttctggaaatggtgcagcatattacttgctaagatttctcttggtaattaattttcgtaataaccttccttgaagaaatgattgacagtatgaaatttacttttcacaggaacttgctgcagcaggagggaaaaatacaaatgccaaagcatcccgtaaaaattcaaaaaggtcaaggataatcttattaatcaatttaaagctcctgcagagaccggagaggaaaatctggtcctgcaatgtaag

SEQ ID NO: 18565 - DNA, 1413 bp, Arabidopsis thaliana
ctgtaggcttgtgattccttgaggcttttttgtgagccttcttgttaaaggaacaaagactctctcgttaagggaagtgaagaggagaattgtgagtatgaggaaagcagagtaagagcctgcaggaacagtgaaagatccgagttttcggtccataaacgtcgcttgttcgaccgtgaaagtcgtcatttgggagtaaatcgtccagaaaagaatgttcgttgcccaaatcggtaccaatttcatcacgagtttcacttcttcgacttgtgtaacagtcgaaacgatccacggatccttctcttcgaagtccttcgagctaggagagctctcgttcttggaaattgcggctttgtctaaacacttaagcatctctgtgtgtggaaccgtggtgttgtcataaccgttcaaaagacttggatgcgcagggtaactctcctttcttttcttccaagccaagaaaccaaccctccatattgttgtaaaagggcttcctttaggtttcttgaaacggtaccgtttcgttccgcagagtaaaacaatggctgcaaccaccatagtcgcggcagagatcccgtaaccccagcctctcccgacgttgtcctgaacgtaaacaagagcaatcacggcgaagagagagccgacgctgatggagaaatagaatctgttgaagaagaaaatcatctgtttctcttctttaggatcactagtatcgaactggtcagacccaaaaccagagacgttggatttgattcctcctccgcctagagctatggtatagagagcaacatagagaagagccaactggtgtccgtttgcttctatgcactgatgatgaagtctcctgaaatcgtcacatattggtggtctcatgcttgagatagttgtagccaccgtcaaaagcaacactccctgttttcacagaaacaaggaattagagctagaaagtctcaagccaatcgagctacaagtacgtggtttaagagcttaccagagctgtgacagaagctgagattgcaaccatcttgtagcgaccgagtttagcgtcacgcaaaaaaccaccgagaagccctagaaggttaagagttcccatgaagttggtgactatggtcgctgatttagctgatgagatgtgtaaatctccaacaaggtacgtcactagattcattgatatgcccatcacgcatattctctctgatagctcgctcccttcacattaagaagatacagaggagtgttagaaacagaggagtcactcttttttcacattaagaattaagactttacctaaaattaaaccggcgcctaaccatccaccggttttagacttatctggtgggttcctctgtaatcataggcttcttcagagccatctttggctccatgagatgatgcacatgaacctttagagac

SEQ ID NO: 18566 - DNA, 1931 bp, Arabidopsis thaliana
ggcgctttggctcttctgttttaccttctgcactgaaacgcgaatttgttgaaggattgcgtacgttagtaaggtctggtgatatccgtcgagctgtttccttattctattctgcgccggtcgagcttcagtctcaacaggcttacgcagctctgttccaagcatgtgcagagcaacgcaatctcctcgatggaatcaacttgcaccaccacatgctctcacatccctattgttattcacagaacgttatacttgctaatttcctcattaatatgtatgccaaatgtgggaatatcttatacgcacgacaggtgtttgatacaatgcctgagaggaatgttgtttcatggactgcattgatcacaggctatgtacaggctgggaatgagcaagagggattctgtcttttctcgtctatgttatcccattgtttccctaacgagtttacgctgtcaagcgtgttaacttcatgtcgatatgagcctggaaagcaggtacatggacttgctctgaaacttggtttacattgttcgatctatgtggcgaatgcagttatctctatgtacggtaggtgtcatgatggtgccgcagcatatgaagcttggactgtgtttgaagccataaagtttaagaatttggttacttggaactcaatgattgctgcttttcagtgctgcaatcttgggaaaaaggccattggcgtttttatgcggatgcatagtgatggagtgggatttgatcgtgccacgttgcttaatatatgttcttccttgtacaaaagctctgacttagttcctaatgaggtttcaaagtgttgtcttcaactgcattctctgactgtaaaatccgggttggtgactcagactgaagtggctactgcattgattaaagtttattcagaaatgttagaagactatactgactgctacaagctttttatggaaatgagtcactgcagggacattgttgcttggaatgggattataacagcgtttgcagtgtatgatccggagagagctattcatctctttggtcagttacgtcaggagaagctaagccctgactggtatactttctcaagtgtactaaaagcttgtgcaggacttgtcactgctcgccatgctttgtctatacacgctcaagtgatcaagggtggttttttggctgacacggtgctgaacaactcattaatccatgcgtatgccaagtgtggctctcttgacttgtgtatgcgtgtatgtgacgatatggattcgcgggatgttgtttcctggaactcaatgctcaaggcttactcattacatggccaagtagactcaattctaccagtctttcagaaaatggacatcaaccccgattcagcgactttcatagcccttctctcggcttgcagccacgcaggacgagtagaagaaggattgagaatattcagatccatgtttgagaaacctgaaactcttcctcagctaaatcactacgcttgtgtgatcgatatgctaagccgagctgagcgttttgctgaggcagaagaggttatcaagcagatgccaatggacccagatgctgtagtttggattgcattattgggatcatgtagaaagcacggtaacacccggttgggtaagttagcggcagataaacttaaagagctagtcgaacccacaaactcaatgagttacatccagatgtcaaacatatacaacgcagaaggtagctttaacgaagccaatcttagcataaaggagatggaaacatggagagtacggaaagaaccagacttaagctggacagagataggaaacaaggttcacgaattcgcatcgggaggaagacaccgtccggacaaggaagccgtatacagagaattgaagagactgattagttggttaaaggagatgggttacgttccagaaatgaggtcagcttcacaa

SEQ ID NO: 18567 - DNA, 535 bp, Arabidopsis thaliana columbia
ttctgataccttttgtagcaactgtgtgtccatggtggtggaccagtctgaacgagaaccggccacaatagacaccacagcgatttcagcaccagtggacaaagttcctttataaatggtgccgtctgagaaagatcctatgacattactgaaatcttcgcaggctgcttgtagctcagatagctgcagcctcggaacatctgctccaatacaaaactataaatttagagaaattccatatgaagagagacaaaagagagatgaagactgaagagtgtgtttgcctgtgataagatcatcgcgaagctggccactgttggtccaaggcttgattggaatctttcgagtgaggataagaaagatgatgattaatgctaccgagactgtgaataccccaccgactatgccaacgatcatatgaactttgggagacttctttgtagttcctggagacacaggaggagatggagacggagctggagccagtggtacaggcaggggagtgatagcaggtggggtctctggtgtttgtgtt

SEQ ID NO: 18568 - DNA, 599 bp, Arabidopsis thaliana
gaacatttccaccgtcgacgacgacgacgaaatcccctccgcaaccgctcagttaccacatcggtcacaccaaaaccaccaccagacttcatcatcatcatcaattccccagtctccggctacttcagaagtcaacccttacaacatcagcccatttcaaagcccgttaccggcgggagtagctccatctccggcgagaactccgggaagaaaattcaaatggccattcccgcctccttcacctgcgaaaccgattatggcggctttaagacggcgacgaggtacagcaccacatcctcgggatggtccgatccctgaggatagtgaagccggcggaacggcggccggaatcggagaaaggttagataaaaatttcggatttgcgaagaattttgaaggtaagtatgagcttgggagagaagtaggtcgagggcattttggtcatacttgttgggctaaagctaagaaagggaagatcaaaggtcaaacagttgcagtcaaaatcatctctaaatctaaggtttgttacaatgtgattggttcaagattattggacatagaaatggtactgtttcatcgaaagatttgtctttgtgttg

SEQ ID NO: 18569 - DNA, 746 bp, Arabidopsis thaliana
taccagaaagagagccttcaacaccagtgacaggggctcggctttgctcttctaactgttggaggagtttcagggacaaagatctaccagtaccttcatagctttggcaaagaaggtaaaacaaacaaaaatcagcagcctgactgaccctatatataatcaagccatgcatatatctttcaatatcatgggaatataagcattttactcctgtttcacatacccactgacagtagatgataagaaaactaggtaagggccaagtagagacttcacaactggcaaaggaatagctgccgcttcatcaataaccaacagctccacttgtgagagcttttcatgttcatgcggttgtatatactgcatgaaaaaagaagaagaataaagcaatttatcgatcgacacaaactacggcttcttacaaaaattcagggttggacagacctggatagtttgcctgtgctgcttgaagatattgatccgtacgatggctttattaaattcaggattcacacttctcacgacatcatattcaagatgttccttcaaatatatagttgaagatagagttcagaaaattatatggtaatcctgaattaacatgcaaaacaaagtaacatttttcttcttccaggagatagtgcagatttcaaatctatgacaccccaacaaaatggaagaagtccagcagtttctagaaaattgcttcatatgtgtgatgcagaagaagctcatattaccttata

SEQ ID NO: 18570 - DNA, 759 bp, Arabidopsis thaliana
ctactatggtcgacttcaataaaagtttctctaccttaaagtctttattcttctccttgggaatcttcctgatccggaaagcgttccaccagttccaacaccggcaaccaatatgtctacttcccctgcagagtctctccatatctctggacccgtggttcgataatgagtctgcagaataatcaatttagattgataaatatagatagagagagaagaagagcaaatgtaatgtgaaaggagagtccatacttgcgggtttgaaggatttttgaactgttctagcatgatactatctggatttttgctacatatctcttcagctttgtcgattattccttgaacgcctttactaggatctgtgaggtgaacctccgcacctaatgctaaaagaatgatttttctctcaaggctcattgatgagggcattgtgaggaccactttgtaacctttagctgcaccgatgaaggctaaaccaatcccggtgttaccagaggtagcctcaatcagtgtgctctgagtaaaaccaccaggatccaagtatcagtttgatttttaatggcgaaaacgaaaaaacacgaatgtatgatataatctgatctaccttcccaggagtaatcaatcccttgtcttctgcatctttaatcataccataagcaattctagcaagcgaaggatcaatcaaaagacacaagatatttctcagaacacacacaaaaagacaaacattgcttggagcagaccaaagagttagagaga

SEQ ID NO: 18571 - DNA, 983 bp, Arabidopsis thaliana columbia
tatatatatatatatattgagtatttaatttcttatttttaattccaaaaatcattattttagatcaatagtttttattgatttttttgtaaactattgaataatagagaattttaaattttcctagatccctaattccaacatacttatttctctgttgattctttttatctccaaaatcgactttaaaagattgatattcaatagttttaatcaaacagtttctattttaaaaatcgttgaaaccaaatctcgtggatttctagatctataactattaattcaagaagatttagatattgaacttttgtttcggaaagaaatagatataaaattatttcttcgaggacatatagatcgtgctcacaaatcagattctatctagtatgatgtgtcgaggaaatagactgttttccggaagagatagtcgaaattcgtatatgggccaatctttataagaaaataacctttagaaaagttacactagaagaaagtccggcccatctttataagaaaactattatgggccaaaataaaggtaggcccattaacccagggaaataatatatcagtgataaatccttcttctgtccccttcctccttaaaccctaatctctgtactctctcttcctcaatccctcccatgaccaccgcagtttcgccgccgccgccgcaggagcagcaacttgttcacgcttcgcagacttcaagagtgagtcccaagacagtggagagcgccctcaatggtcttatcaattggagaagcgacaaatcaaagacagagaagcctcaacttctcgaagaagacgagctcgtctaccttttcgttactttgaagaagattccacagaagacccgtacgaatgcttaccgtatccctttacctcatcctcttatcaacccgacggtcgattcgcggagatttgtctcacatcgacgacagacctaaaagtggtctcacaaagatgatgcgatgaagaag

SEQ ID NO: 18572 - DNA, 2213 bp, Arabidopsis thaliana
gtcgagttgctcggccgagtacctctccgaatttctctgctcggcctagggagcgttccttctcttggtcttcaccttctttcggtgcttagtagtggctgcctcccgtggctcataagaggaggctcggctaggctcaaatgacggtgcttggctaggctcaaccgggttctcacttcgctcaaatctatccgccatgctcgtagaatcactccgacggacagctcggtctctttcacttgaagggggaggagacttgtgcttcctttggagatctttgatttggagtcccatctccttcaccgcgtgcgtgagagattctactttcttcgagaggcctttaaaaaccttcccgtggaactttgccaacccttgaagcattctgaccctttggtgagccgctctctcgctccttgattgcctagtcgcgacatatgggtcaaagtagaaccgcttcgggaagtactcgctagcttcatcttgcggttgctcatcggtctcgtcgtaaccgggatgtggaggctcttggcgaggtggcggtatgttctccggagcatcgtagagtgcatggataggagggtagaaatcaatattctcaccgttcctaatggtggtgtagttggtgcaaggtaggagcagcctagaactcccctcatcggggtggttgaacaagtagatatgcacaccggaggaggttgtcttgtccaaaatgttcttcttcttcaaataggcaatgtcaatccattccggtgatttatccggtcctcctaaatcaatgcccgcagctactagcataggtgtaatcatacctccaatcccgattaatcccttgcgtttcattttttggaattgagccgcatagtcctttaaccccatcaagtaatccaagaacaacaccgtaagagacgtgttagcccgatctccttccatcactctcccatttttggtcttccttagaaccaacttgagagcttcatccatcatttggagctcgctatcgttgataggacccgtcaccttcttcgcgtaaaaagtatgagctatgcattggtggaagtaccttagcaccgggctgcgaatggatgagctcttgcaccgtgatgagttgaaatcgcccggtgccgctattgtgttccaaaactgcgtaagctcaagcttgtcaaaatctggttcaagaccgtccttggatgggaaaccgtagaggttgtctagctccttgatggtgagagagtagtctcgtcctcccacggtgaaagtggcgtaaccgaaacctctacccgcctcttcttctccttgagccgaaaagaagtgaacctccaagggttctagaagctcacatgtgtagtcttggtagctctcgaaagcgtaggtcatgtatcttgttaagccgcacatatcaaataagaactccacgtcttctcggattcccaaagcatccatagtctcaccatgcagatgcttagttctttcaaagcttagctccttgaggtattggatgaacttcttggtagatggagtcttcttccccttcttagaaacaactttcgggattggaacatcctcctcttccatcatctcctcctccacaacttgttcttcttcaaccgactcctcatacataggttcatccgcttgaacctcttcttcttccaccacagcacatttcccacgagctatctcagctcttctccgatcacgcgcttcgttttggtgatgttcctccatactcggctctggtactcggcgtgctgatcgagtatgagctgctcgctctgctctttgcctgctcgagcggcgaatgagaggcggagggtcttcggaggtctgctgagtcaactcgggcgagttgtggtgatgctcgtccgagtcttgctgttcttcagcttccatgggcgcgggttcatttcggaatgaatttcggtaagctaacgcaaagcttgtgcacaaagctttgccttgcgtctcctctcttcatccgccatgggtgatcttggaaacatgatcacagaacaataaagagcttaaagagagtttgatccaaaaacagaatgaatatcaaacttgaaaaccaaatgagagctttgttttgttgttttaaagatgaaatgagaaagataaagcttgagaacttagagcaaaattgaaacgggagcaaaggagagtaaaatgaagcttaaaattgttgagaatgaagtgtgagagagaagaggaag

SEQ ID NO: 18573 - DNA, 755 bp, Arabidopsis thaliana
gaggaacacgatccccgtattacttgcattaaaacatcacattatagaatattttgcaagacttaaggaatcatgttctcattgacctgctccatagtacatgtctatagacggtatcccggcatgatgaagaaaaccggaaaaatcagaatctactctacttagcctctgaatctgcagttcattaaaacattacatagttttacattacaaagacaatgtatgagctcttttgaatagtctactcacaatgttattttgagacttaaatgtctcttccactgtcaagcctactgcatcaggatcctgtacctgaccacgcatagatgaatacgagagactaagacatttcctacgagtataagttttcaacaacgcttgagaatgccccggttattagtattcttaccagcttcaagacatcgacaagaagaccgtctaattgaggagttgcaccagcaaaaaaaccagagccttggactgcacaatctacattaagataagcaacagcacttgcacctaagttaagaacattttcttcaatccattcagttgatccaatctatacaacaaaaaagagaacacaagtaatttagtgaagcatcatatatagattcaacttttcgaagttactaatttactaaccattccaaattcttctgcatcccaactacaaaggagaatggtcctacgtggtctccaaccagatttaagccaaagagcaaatcgtcgactaatgtcaagtaaagcagaag

SEQ ID NO: 18574 - DNA, 787 bp, Arabidopsis thaliana
cctcgaaccattgcctaaaaatatatcatcaaacttagtttaacccaatgtaccttggaatctaatatgattccattgtctcctacctacagcgtagagtttggaactgaatgcgaatgcaaagccgcgccaaacagggcgatttggacaatgcataagactccattggttagttttcgggttgtatacttccgcgttggaaaggctataagtatctgtggaatagcctctaatcacatacaaaagaccgttcacttcagcaaatgcaaagttgtaacgtggtatgttcattcccgcaagttttctccagctgcaaatatatttcgacatagtatcagaatacaaccaaactggacagttctaataccaattatggtttcagagaagcttaggtcttttcttagttatagaatcccaaactgaataagaatttcattcttgaattgctttgtctaacaatcatgcagaaacttaaaaattaaaaagaatcttcactcactcattcattcattgattcctcaaaattcaaaaaaaaaataaaaatcatcatggaatgccacatttgaccagattgtatgagaattaatgacagagagattgagattgagacctgttattagcaggatcaaactcgtaaacatcagcagaggcagagacagtggtgctattgatgccagagccttccacctccgtatatcctccgaagaacacgatcttcccgccatcaagcactgcaacgccgaaaccgcgcttcaagggcccagggacaggagggatctggcctaac

SEQ ID NO: 18575 - DNA, 757 bp, Arabidopsis thaliana columbia
cgcaaagtacccatcttaatttgatctgattcagtttagacttttagctattcagttaaaatgactataaaatcacttttcaaaagtcaacaaacagttacacacacagataggaacataaaatgcttatcatatgaccataccaatagctaaaagttacatacacttggacgtcgtcaccaccgtcacctacaacagcttgactcggctacacactcttgtaagtgtctttcatgcccacgatcacataagcacatattagcaacggtcaaagtggctagcatccagtaaaagcggtccatgcagctgctattaaggtctttcccgaaccagcccttccctcgcgcccctcaaaggcttgcaccctaatatcttttcaactcaacatttttctcatgaagctttttgagagtttagatttttacttgttgccttattcttctccttcagtataagtgaatcttgatttcaactgtgtgatgcttatgttacatacacgttgtcgagtatctaagtcttttgacaagattagatccgataatatagtctgtgcatgtttcctgtaagatgtataacatcatcgtactaagctggttcgttgggttgctcaaagtcccaaatcataatggtaaaacagaggtattgtaccattatgattaattacctctgttttgaaaatacgtatatcataatttaagaactatcttgtatataaatttggacttggaattcaggtctgtaagatgtagtacatacg

SEQ ID NO: 18576 - DNA, 896 bp, Arabidopsis thaliana
agagattattgccaaagactgattctcataattacaaaatctcgtttttggatatttgactttgtcatatatagactatagttgatgtaagcaattgcgaatcaaaaattttaaccggaaatggaaacaaattcagaatagaagaaattaatcaagaacatatacaatatatttaacttatatttcgttcataaaaattcatttatagaaaaaaatcaaatttttttatttataattattgtatcataaaagataatatttctctgtgaattgaaagattaatattccattaaaacaaaactaattaaaatctttatttattatttttttagcctctggtaactacaatttgctggatcagccatcaacaaggggcctattacaattttgaatcatgtcatttggttcaatgggctttagtgcacccatcagatttgaaaacatgggtttttgattcagcccaaagttaacttgttagcccaatgttaaaattagccccagctgatgaaatgacaaaactacccttatcgcctccgtcatctaaatcagccctaccactggcgagtttctgaaaatcggcaaatccccggcgacttggcaaacacttttccggcgtggcttcgcctccgcgagcattgtgatgacgtctctaatcgatggtctatccttcggtagcttcgcggtgcagagaagagcgattcgcagtgccaggagcatctcttcgatcacgtgtttacaatctccggcgatgctcgcgtcgatcacttcttccaagctctcgttcttcttcaccttcctccgaatccactcaaccacgtcaatcgaatcctcaaacgaaggatctatcggcattttccagtcaccaattccagaagcacaacgcctagactgtatat

SEQ ID NO: 18577 - DNA, 672 bp, Arabidopsis thaliana
atttatgaggactttgattgttagtaacagtggaatactgtacagatgtcacagttgagcggtaaaatgatcgaaagcaagccactctatgtggctattgcacagcggaaggaagacagaagggtcagactacaggtttgcttctcttggaatcacctcgtcttgtgatacacttactactcctactttgcctgttggagtttcaactctaaacaattggacccatcatgtacaagtcttagaatgtcccactgcgtataattatcaatactgatgctgattcttctttataatcaagtgcaacaatatataaagcataaacaacatatgtcctagtatttttgtatcacagaaaaatctcttttttctcctgctgctgagtatttgcattgatgtgaataggctcagttttcccaagtgaggccagttgcaatgcagccgtctgttggtccccgcatgccagtgtatcccccgggtggtcctggtattggacaacaaatgttctatggtcaggcccctcctgccatgattcctccccaggtaatcttcatgttactctactttaagtagccgtgtacgattttacacaaagatatgcacatgtttattttctaccttgggtataatgaattacaagctgacagatgcttttaagtcacatgaaaagttttt

SEQ ID NO: 18578 - DNA, 471 bp, Arabidopsis thaliana
cccctgagctttggcgggacatgaataagaccatgaccttgagtgctatatggttagctcctcaattcctagtcttaggagttgcggatgcttttacccttgtcggtcttcaagaatatttctacgaccaagtcccagattctatgagaagcttaggcatagcgttttacctcagcgtgcttggagcggctagctttgtcaacaatcttttgataacggttagtgatcatttagccgaggaaatttccgggaagggctggtttgggaaagaccttaatagcagccgcttggaccgcttttactggatgctagccgccttgaccgctgcaaatatatgctgctttgtgatcgtggccatgagatacacttacaagactgtgcagccgagtctggctgttgttgctgacggcggtgatgacgttgagacagccacggggacgaataacacgtccaagtttacgtaacttagct

SEQ ID NO: 18579 - DNA, 675 bp, Arabidopsis thaliana
acttaataactaaaagtctaaactgaatcagatcaaattaagatggttaactttgcggagtaagtttttccatgaaaatatttatattacatgatgtgtttaactatttaacaaattaacattttaaatatctcctctggttttaaatcaagaaactattcgtatccatcgagcaatgctaggaactccctggttaacagcgaaggccatataatacccaggcggagaaacggcgccgttaggtggagccgtacactgaatcctataacgacctactccgtcaggcacagacggagcaacggtcaacttaacgagccgttgaccttgagaaaacgaatgagtcgcaaaaggcgcacttccccaattcatctgaattatccccaccaccggcaacggcacggtcacgaacacgtcgaaaacctctccgtaccgtatgatctgcgggatttcttggatctctggtcggagattagctcgatccggtgacagatactccggtgaaaacgcttcgatccgtagctccgttgggaattcggcgttgaatttgtagaaatagtgaggattgcttccggcgagaagaattctaccgtccggtaaaagattcgccgtggaatggtacattctcggtacagttcctgggttcaacgtcatgaatcgtaaacaattggttgatcg

SEQ ID NO: 18580 - DNA, 586 bp, Arabidopsis thaliana
gtttgtggagatgttggtttgccgactgaggtcagagtcatgttatggggcataacaggttgacgcgtcaccgtttggtgattcaatgtaaaaatcctcagttaaggtggtgtttctcatgccaatcacttctcccttttgataatgaagagaatggtgagaaaaaagatttgttgctggaagttgtgaaattgattagagaaagatctccaaacacgtactctgcttcatttgaaactgaattttcatgttcaggaagtatctatggtggtatagaagcaagagatggttatgctgtaagaggtttagttaaccttgggaacacatgtctctctcattctgtaatgcagaaccttctctctttggcataattacgtgagcacttcttgaaagaggatctatctgttagcgggcctctcgtttcttccctgaaggaactatttgctgaatcaaattcagaggcaagcgtttttaggaatgagataaatccaagagaccttttcttttctgtctgttctcaggctcccaatttaggggatatcagagcatgacagtcatgagttgctaagatgtttgttggatggtt

SEQ ID NO: 18581 - DNA, 605 bp, Arabidopsis thaliana
tttcgcgtaatccaaagtcgcgttcgctttttttaacagagattcagcttccattcgcatcacatccttaggagcaattcctccgtctcctccttctccttctgcttgtttctgtagatccgggagaatcgcggcgatgcattcgttgttgtagtctgtgtttttgcagagatctttcgccgtcgtgtcgattttcattgacgagaaatcgaatttgtttatatgttcaaatttaggagctagatcagctatgtttgtgacagagtcgaagttgatgtctatgtcttcttgggatggtccgggtgcggagactgccgccgtgggagctaaattagatccggtgttaatgtcttcagaggtgggggatggtgcggaggctgggacgaccgagattgatgatacgggtggttcgatgagcgaagggtcaggtgaggaagcagggacttgggatgtctcttctactgaacggccggtggcgtggacgttggatacccggagaatgtatacaacaaacagtaactccgatgaggataattgctttgtatggctccattttcttaacaaaagtttttttaattaactggtgatgattaagaatttaaagg

SEQ ID NO: 18582 - DNA, 582 bp, Arabidopsis thaliana
agtaaaatgataatgatattaaataatctgtcaaatataatgatattattttcctaacaactacttactctattttttttttttttttaacatctgactttattaatttgtaaagggatagtacaaatagagttgtagccatcttggtggtacatgaaaggtttcataccaagaagacattgagtttgcatactttgtgagtttgtccgctgccaagtttctctcccgattgacataaccaattgatgagaagggtaacttagtcatccaaaaccgaatgtcataaagcagtgtttcaaggagatgatgatcttcagtcttgttaattaggttcgttagctccagattgtcgccttcaaaccacacataacagtatccacgtatccaaaccatttgtagggcatgtaagaatcccaaggcttctgcttgtagggctgagtatgattgttgcagtttcgacaacctgaatgtagtacacgtccattgcagtcacggagtatcaacctgtgcttgtataatccctccctgaacatagccactgcaaagttacatttgagaaatcctccggtggtgacaccattg

SEQ ID NO: 18583 - DNA, 1005 bp, Arabidopsis thaliana
gcattgaataaagctatgaaaaaagaataaagaaaaggaaatgaatacgctttagagcaatatagagaaggaaaaatgttatgattatgagggaaaaagagatatctggagaggggacaatgtttgagtggagtatttctcaatccatcctcgaggagatagcgtttgaagtgctgcatcaagatgctggatgctttgtagtcaaggctcattagctgcgttggtgagaagcagctgtttgatggtaacataaaattaagcttggcataaagtttatgctcggtacacagcgtaagggatcttttcaactcaaaggctgctcaagtatactaaattccactttgctttcctattgttctgctttaccttgcacatatatttatgttggtgtgtgtgtaatgaaggatagtaaaagaggaatgtctttgctacgttttcttgtttagctgaactaattaatttgatggattactctttgtgtgctcggtgaaggactccatgggtttatgctagtttgttatatactataactgcatatttgactgtgcaggttgattacgcctggcacacctgaagaagttcagcagcatttccaaacatgcggcactgtccatcgggtgaccattctgacagacaaattcgggcagccaaagggatttgcatatgtagaattcgtcgaagtggaagctgttcaagaggctctacaactgaatgaatcagagctacatggtcgtcaattaaaggtacacatcttactataccatcaaacaaaacactttttaccatgaaaaaaccccttatgattccatcgttttctcatctggcttaaaataatttcaggtcttgcagaagagaacaaccgttcctggattgaaacagttccgtggtagacgattcaatccatacatgggttaccggttccgcagacctttcatgtctccttatatgtatccccatatggatacgggtaagttggttttacatcaagacatatatgttgattgt

SEQ ID NO: 18584 - DNA, 790 bp, Arabidopsis thaliana
ctaaagaccagcaaatccacgcgaccaaagatttcatctaccccacgagagagcgccagaacgctttgctcgctagtggcgtcaaccaaaaccgtacgccatactttcaccatattcggcgttaatttcttgtgccacatttgcggctttgtcgctctgaatatcgacaaccgcgacgcgatacccctcggcagccagaccgtggcacaggaacgcgcctaaggtttgcccaccaccgatgacaacggcaacctgattcattttttactccttaacagattcaaacttcaaaaccgatcccggcgcgatatcgtcggggacagggcctgccacatggacagtgcccggaaattccgcttcgtttaaaccatcgaagcgcagggtgacatgacccagttcgcgaaggttgtcttccgccacgctgccaacagcggtcaccggatagcgatgctgcccgagtgaaaattgcaaaccgggatggagtgcacctttcaactcgccgtggcaatgaatgaagcaatactcttcgaggtccgcaggcgcgccttcacgaaaggtgatgagcatctggtcactgagggcgtcaatggcactcgcgccgatacgggtgatggtggtctgataaataacggtcatgtttcagcctctattgatagataaaaccggagacaaaccaggcgatcagtacagtcggcgcgccggttaaaaagcggctcaccagtacagaagggacactgacgcgaaccgtgtcctgacgggcttccgccagcgacaaactgaccgggatgaa

SEQ ID NO: 18585 - DNA, 774 bp, Arabidopsis thaliana
cccctggtcgacaaatcctcggacccggtcgacgatgagttggagtcgcatctggcagcccactcaactggaaggaaaacaattatgagtctgaatatgttctggtttttaccgacccacggtgacgggcattatctgggaacggaagaaggttcacgcccggttgatcacggttatctgcaacaaattgcgcaacggcggatcgtcttggctataccggtgtgctaattccaacggggcgctcctgcgaagatgcgtggctggttgccgcatcgatgatcccggtgacgcagcggctgaagtttcttgtcgccctgcgtcccagcgtaacctcacctaccgttgccgcccgccaggccgccacgcttgaccgtctctcaaatggacgtgcgttgtttaacctggtcacaggcagcgatccacaagagctggcaggcgacggagtgttccttgatcatagcgagcgctacgaagcctcggcggaatttacccaggtctggcggcgtttattgcagagagaaaccgtcgatttcaacggtaaacatattcatgtgcgcggagaaaactgctcttcccggcgattcaacagccgtatccgccactttactttggcggatcgtcagatgtcgcccaggagctggcggcagaacaggttgatctctacctcacctggggcgaaccgcggaactggttaaagagaaaatcgaacaagtgcgggcgaaagtgccgcgcatggacgcaaaattcgtttcggtattcgtctgcatgtgattg

SEQ ID NO: 18586 - DNA, 778 bp, Arabidopsis thaliana
taaaataaatggcaccaactcaaaacacaatctgttcgaaacacgtggcagtgattggagccggagctgccggtctcgtaacggctagggaacttcgtcgtgaaggtcacactgtcgttgtctttgaccgggaaaaacaagtgggaggtctctggaactactcatctaaagctgactctgacccgcttagcctcgacacaacccgaaccatagtccacacgagcatctacgagtctctccgaaccaacctcccgagagaatgtatgggttttacggactttcctttcgtgccacgcattcatgacatctcgagagactcgagacggtatccgagtcacagagaagttcttgcgtatcttcaagactttgctagagagtttaaaatagaggagatggtccggttcgagacagaggtggtttgtgttgagccggttaacgggaaatggagtgtccggtccaagaattccgttggtttcgccgcccatgaaatctttgatgccgtcgttgtttgtagtggtcactttacagaacctaacgttgctcatattcctggtaaagatccatttctctatacttatttcaaataacttggtttctttgttcttagtctctgggtctaaaattttttaggatcacctcagttataaaggaagaagtataatatatgtactttcgaaaagaaaagaaaaattattttataaacttaactttatggcttttcacttcaaaatggtttaaatgaaattgagaaatagttgcactaaacaaaacctagtaa

SEQ ID NO: 18587 - DNA, 1023 bp, Arabidopsis thaliana
tttgtgtcattatcaagaaaataagaaatgatgccattctaccaactctgaacttgaaagccgaagaatcgtcacagatagtttttgtcgtagatgtgtcataacgagagaaactacggatcatttgttctttacgtgtccacacgctcgccaaatatggagagcttcgaacattccccttccgagtctatcaaatccccaggtgcattatgaaacaaaaattaaagagatttatgaatttcataaaaatgcaggacaacatacaatgcaagggcagctacctatctcgatcctttggagaatatggaaaagccgtaataagctagtgttccaacgaaaacagaacgattggtggagagatatcagagatgctacaaatgaagcggaagaatggatcacaaatggcttatgtgcgcaagttcccactccgagtacgactaatggcacaactaggcagtttcagagtcagtggcaaaaaccacatatgggatggattaagtgtaattacgatggcagctttgtgaatcgagttcgtggctctacggcagcttggataattagagatgataacggcgtgttcaaaggggctgctcaagcgacaggtgcgaccgtttcctcagcctttgaagcagaatgtcaaagcctaattcttaccatgcaacaattatggataagaggctttagaaaagtaatacttgaaggcgactgcaagctcctagtcaatgttctgaatggaagaggctcaagatttgatgctatcaattggatccatgaaatcaaagtttggagaaataagtttgacgcaatcaagttcacgtggtcacacagatcaataaatcaacctgctgatattttagcgaaaaaccagaaacatgctctgtcttcatacatagttcatagctttatcccattgtgtatctcaaatgctctgttttcagactacgtttcctaagtaataaaaatgaagttcgtgttaaaaaaaaaaaaaaaaaaatgatgccattaactcatatcataagttca

SEQ ID NO: 18588 - DNA, 2346 bp, Arabidopsis thaliana
tggacaaacagaataaacgagaatggtaaccgcatccaactgaggctaaatttggctatgttcaagttcgattgccatgagacaaatccaaaccaaagctctcaatggaagtgttggcaaagagcaagacaaactttcaagttctttagcatttttatctattcggcgggtctcattctttcgttggtcacctgagtgcgtctgcgtttagctccatcgtctcctaaacgtagtccaacacataaatccccatcgcagctaccatttgtaaagccggcaacaagatcctctctagcagtctcaggccaagcagaagcggaacattgaccgctgaaggtgggcatgaactggtgttcgacacttggagcacctccttttgtttctattctctcttcaagatcaatatgttggacctgaagaggtcctaatgatgcctctaacttttcttctgggcttctcttctctttcttgagattcacatacggaggtgatgagtctgcaaccattgagctcatccccgttgttgaggccgctctttgtcttgcactgccgctaaacaagtacaacaacaacaacaacatgtataagtcttgttcttttatatgctcaagtgtctgaacacctaaaggaaaaactgagtgaattattaccttttaacccttcatcggtggtgatgagatcaagctggagatgtgtaagaagccttcccagatctacaccagtggtccagctctctgacactcccctaccttcagtttcagcctcccgcggcttccagtgcctccccatatgatcccaatgggtcttgccttctcctctcctttcatcactatgaggcgttccgctgtctccctcaagatcaaacggactgcgatggttctccccgacaacaagaaaatcagtgaggaagcagactcctctctcgtcattgtactccagtgcataagccagcacagttcctgtagtcaagccagagcttctcccgactttcaccacctgtttacccactaaactaccaactggagactgcagctctatggctttgacctctccaatctctcctactccacctttgacagacgttgtgactcgtgacaggtcatagtcgtctgcaaaggggatgaatgcaccgtctgctctcacaaacgtctctgcagaatacgttaaagttattgcggagttccttcctctctaatggtaaaactaaaaaacctatgatgtttccaaacctggattggtgccagcaaaaatgccaaaccagagatcgtctgtgatgaaggaagtggctctctcaactgctccaaggtagacaccaggaccaagggcaggagggagaggatgaaacatcttctggctagggtaatctaagttaacagcaacatggcggttagtcacaaacccaacttgtctacctccagtctgactcctaactattgcccccaaagtcccacaagtctcttggcttgccacctgattgaagttagcagcaagacaacacaagattatcgactttgcgactatttccataacaccagattacaatgagtgattatacctgagagcctgatccaatgaaaggatctgacccttggagatgatcaacaatatcagtagtgaatgtttgtttaggtgtgggctgatgatcaggttctccaaaatacgaaaactccaccacatccacatcacaccaaatccctcctgctccctgattcaaccaccaaatcaacacattcaccaattacacacaacttcgattccaatcccatcaaacttttaagttcaatatacctcaagagcagtaggaagacactgaagaggacttagccattgcttatgcactttccgagacacaaacacaataatcgctgggatatcagtaagaacccctctccgaatcctgaaccctatagctgttccaagactataacaccgcaacatcttgctgtggaaggctcttatggtcatgagctcaagtaaagtagtggctcgttgccctttaggctctgtggagactggttcaggagaaacctcatcatcatcatcctcctctttctgcaagtttgagaaatagttagctctttcctccgcggcgttgcttagcctgcttgaagtcggccacgagaagtaagacgccgccgtgaactcgcagtgttgacccgttgacccatactgaggcattattacgccagagtaatcacaaaatcacgccttttgttttcagcttattgggtaatccatctacacaagtaatcagagaaactaagcaagagtaattcgaaaatttgatccgagagacgaacactaacttagagtgcccatactgaccgaagaaaagatgttccttga

SEQ ID NO: 18589 - DNA, 730 bp, Arabidopsis thaliana
  unsure (1)..(730): unsure at all n locations
cgaacaatgttttagtacaaggtcaaacatttattcttcgtcaacgcatatgagtatcttcccagaagcaacatatgcatatgttgcttcatatatataacacatagagatctattccaaagcatatcgatcaattcttgctacaacacatcacaactttatcatcatcatcatcatcacctcaaaaattatccgaccgataaactcagaaatggagaacgcattggtcaaaactccactgagaaagctaagaagaagaagaactaaacgggtctggagattgaagcagaagctaaagcttgcatggaaatctatcaagatccgggtcaagtcacatcttccgggtttcttgtcaaccaagaaacacctcttccacattaaatcacgaaaggaagaacaagatttgtctcaagtggcccagaggatctgcaaaatctccaatgactcgaccaaatcactggcgtttctacttcagcttccaaaatactcagccgacgattttcttgaccgcggcgatctgatgactccagctgcgtctccaagggaaaaaatatccaaaatgtggcgtgacgttcacggtagcaacaattgggagaatcttcttgatcctctgcatccatggcttaggagagaagtaaccanatatggagaattcgtggaatccgtttatgattcacttgatttcgatcctttatccgaattctgtggaagctctagatacaacaggaac

SEQ ID NO: 18590 - DNA, 1870 bp, Arabidopsis thaliana
atcacaaatgaatattgtatgtatagttttcaccaaacaaaaggttgaattttaatttgcttctcaatattattatataaagtacttatttaatgaatatctgatgatagtctgatagaccttattaaaactatcacaaataaggaaaattgcatgtaatccgtgtaaaaagattttcttattgcaccaaaagaaagcaattctagagatggtaacaaattttcaataaacaattttcttctaatatgctttctcaaaaaaaaaaaaacgtggaccaagagacaatttaaataacacatttgttaaaactacaccagctcaaacaaatataagtcttaaacaattccatccatttcaatataaatacgtgagtttactaaacttctctacatcaaaatgagttgtcctgcaatgaaccaaccaagacataatcttagaaattttatcttactgtccggcaattgaaaaattcagatttctaaacaaagattactataaacgaatgtcagaatcttatgaacctgaatctctttagaaccaattctatctttggagtttttctccaatatcaaggatctcattcaactttttattctacttatgtcctcagttctgagaacagtcatcataagtctaaagtctcgctcgatttattaccgttagcgaaggtaaagatcgaagtttgtgacccaagtcatgggattttgctttgtgttgatcctaagtgcgatggaagaacaacgtatattgttcgagtgggatgtattgaaattaacctttattgtatgctatttatgatatggtaaaaatagatttgaatattttcggtgttttattgatgaatttgtgtatactaggattttgtgatcagtaaagtttagttttacaatattattttttgtaaaagattgaagtgtaatcatttagattttagaattttggggaaagaaaaacagtacttaaatgaaatatcaaagatgattgtggagaaaaaccggtttagtacaccctataaccaagaaccgtttgtatccggtttaacatccaccaacttcttttgccgcttctcataaattcgaattagcccctaaaacttactagttataagcagagccgttgtgcggtggctcttttttcacgagccgttgtgcggtgggctctgttgtcactggccgggcaactaaatcatcatacgacttcgaggagggaacatttttggaactgcgaaacttcttgccaacggagactcccggaagcggattaaaatcagcagcgtaaactccaagaaaactctctgtgttgtagaatttatttacatactgcaagtgatcaatgttcagcctcctgaaaaccgctatcacgtgcgaacacggatatctgtaaagttgccatatcccacatgtgcaagcccgatcgctgcgatgaacaaagaatttcatgtttccaacttgcatcacttccgtgacctgaaacctctgtccagactggtctaatggcaggacatcgtgtgttatagactcttcaagctttgtcatgacatgtttagcatagacctctcttctgtttttcattgattcctggagaagaccatgtcgcagtttgaaaagctctgccaggtgatcaaagattagcaagatacaagttgcctaagacagaattagacaaatgccttccctctgcgttactttctttctgatgcacgaaaagaaccaacgccaagtatcagctgacaaatcttcttgggtagtaatggcaaacgcaagtgggaaaaggctgttttcggcatctaatcccgctgcaaccaacaattttccagggtatttaccactcaagtctactgtatctactaaaatgagaggtctgcagtgag

SEQ ID NO: 18591 - DNA, 719 bp, Arabidopsis thaliana columbia
taaaaaaccagaggctcaaagttcgtcaattctaagtacgcaaagtactgtagattctgtagcaaatgcaacaaaaacacagaatgagccactgccggtgaaaagtgaaatttcaaacccagggactacagtaacccctgtcagttcatctgggttcctgtctggattttcatcaggaacacagtctagtcttgcaagcatggcggctccttcattcagttggccagggagttctcagccacaacagctatcttctacacctgcccctttccctgcatcctcaccaacttcagcaagtccatttggtgagaaaaaagatattgtagatacacaggaagatgaaatggacgaagaagctccagaggctagtcagacaactgaacttagtatgggaagttttggaggtttcgggcttgggtcaactccaaacccgggtgcccccaaaacaaatccatttggtggtccctttggtaatgctacaacaacaacaagtaatccattcaatatgacagttcctagtggcgagctattcaaacctgcctcgttcaattttcaaaatcctcaaccatctcaaccagcaggttttggttcgttctctgtaacaccttctcagacacctgctcagagtggatttggccaaccgtcacagattggtgggggacagcaagctctagggtcggatcttggctcctttgggcagtcgagacagattggtgctg

SEQ ID NO: 18592 - DNA, 885 bp, Arabidopsis thaliana
tgactttttgactttcccagtggagaaaaataaatactatcaaatagagaggcgctgattggctcccattcctaatcgttttttttattactttcaccgatttaatttccaccactcatattcttttaatattcacaattactccttttaacgttacgtgttttttatttttacgctttcatttttgaattttgaatctaataaataggacatgcaagttgagatcgtgtggggaaaaaaaaaaatcaatggttattataaggccgagtataatataactaaatgggttaacttaaggcaaattactaaagtccacaatgatgtttagtctgaacgcaacccgtagagctatatatatatataagcccaataaaattagcagtaatttaaagcccatcttggcccaatagatagtaaaatattcgtaatcggtcaacgcttgccggcgatttgccatacaagtacaactttacgtagccatacagattcacctttaaagtttacagaagtaaccctctctctctgtcttcttcgtccttgggctttattatatataagtcatcgaatcagttgacgctaaaatcaaaaacagaaagcgcgacgtgcccaatcatttcttctgatccgatctgactctgcacccacccatcaatggcctccagatctctcaatggcgattccgacattgtgaagccgaggaagattgcactggtcaccggaatcactggccaagatggatcttacctgaccgagttcctgctcgagaaaggctacgaagttcacggcctcatccgacgatcctccaattttaacactcagcgactcaaccatatctacgttgatcccacaacgtcaacaaagctctcatgaagctccactacggtg

SEQ ID NO: 18593 - DNA, 933 bp, Arabidopsis thaliana columbia
gattgtagctttcactgtcctctacactaacatctggaagcagaagaggcaagacaggcagtggtccaatgccgcgacgactaagatataccaattcctttacgctgtgggggccttcttggtgcccgaaatcctggctttggctttgtttattatcccatggatgagaaacttcctggaagagaccaattggaaaatattctttgctctaacttggtggtttcaaggcaaaagctttgtgggtcgaggtttgagagagggtttagtggacaacatcaagtactcgactttctggatctttgtcctagctacaaagtttacatttagttacttcctgcaggttaagccaatgattaaaccctcaaagctgctatggaacttaaaggatgtcgattatgagtggcatcagttttatggagacagcaataggttttctgtcgcattgttatggttgccagttgtgttgatatatctgatggatatccaaatttggtacgcaatctattcttcgattgttggtgctgttgttgggctgtttgatcatctgggggagatcagggacatgggacagctgaggctaaggtttcaattctttgctagtgctattcaattcaacctaatgcctgaggaacaactcctgaatgctagaggctttggtaacaagttcaaggacggcattcataggtagtccgtggaagcatgctactaatattcctaaataattttctgtacaacgcttgacttgactgtacaagctgtgaaattttacttttgttaacgcagatgctgcatataattaaatttttcaatattgtaataacttgaggttgtgtactgtatgcagattgaagctaaggtatggatttgggaggccgtttaagaaacttgagtcgaatcaggtcgaggccaacaagtttcactcgaaaagaaaaa

SEQ ID NO: 18594 - DNA, 513 bp, Arabidopsis thaliana
gtacgcgcgatgtgctgaggcatgaaacttttatgattccatgtgtgagagtgttcctccaggagactttaacgctgttcaaatccacaaaaggaaggctgattatgatcaagtagccttcttcgtcctcatagatcgtttttgcagcagtaacaggtccataaacgtttttcatggccccagtaaactcgtttgaccaagtaggtagctcattctggtgagcttcgataacaggaggttgtgggtttacagttaagcaacactcctcctcatgaatcccatttgagaacaagtccttcctcttcttgtggctcgaaggagataaatcggttgcttcaccattagaatggttggatggttgagtcgagagattgagccccgagccattgagtagtttcttagagtggtttgcagtaggattcttcaaagaaggtgtaggcctctcaagctcaaagtcagtgttgggaaggtttctccaagaaccaaagtcactagcttcaggtggaatggtga

SEQ ID NO: 18595 - DNA, 606 bp, Arabidopsis thaliana
gaaacgacagctttttacagcatcaactattatatgcattgcctctcccacattcacagtttcaagagtaaaaacttcgagggttaagatcttgtaaacagatgacaaagcaacgccagtaatcggagcaccagtttcatcagacaatataacatccaaaaagggctgtatgtacaatctagggtcaacatattgccaattgctttgccatgaaaatatctgcttacgcaattctttcaaagaatggataagagaatgctctaactgatcatcatctgctatatatcgaacaccccaccgtacatttctcctcatcacagccaaaactgcaccaatttcagaattaatcatggacgccaccgcacctttagacggtttggagtgacatctcttgaactctccatggaacgagttacttcccgaaggatgattctgataccccatactcgccccaacttcttggctcaatcacaagaacacactccaagcatgcaagctgcaaatagtcaaagctttttcaataacaggattcagattagagattcctcttactttttcatttcaccaaattcggatatatacagtaacttatacgatctatgtaac

SEQ ID NO: 18596 - DNA, 536 bp, Arabidopsis thaliana
tgtcagcttcaagtgaaggaatcgttaacacccctacatctttcgcctcctcggacgagcttgactcggtggctactgatcctaaacacacaattgtaagcgcattagagaacattcattacatgcaatgttttgtctaaagtcggatactttctataagaaaatctatctaaaaccaagctgaactacaggattcaatcctatatatacaagctttcaagttaccggcaaagcaaggcataaagaagaaaacccaattgagaatccaattaaagttaccatcttgcacgacaacagaactctgaacggacctcctctgcgatctaacaacacagagctcagctagattaagcccctgaggagaagcgtagtggaaggagagtgagcggcgtgggtcaacaacattgatcagcgaagaatgatgatgattcgacaagaaaggagacgaagacgaagtgcgggacgggtaggtagggcaggagagagacgacatttttcgaatttgagacgagtgtgagttatgaattggatttgga

SEQ ID NO: 18597 - DNA, 606 bp, Arabidopsis thaliana
gactctagactttctatcagatatatattggattttggaacacatattgatggtatggtaaaaacaaaaacttatcatctgtttgttgtattttctcaacgtagatgtctcataagaacaattattatgttgttttggcagggcacattgttgattctgcttttacagttgcgttcaatcctatgtttgatcctcttttagcagcctcgcgtgacgcaacatatactggtatcaaggtgctcattctgtttctgttgctacttgtgggattcttctgttcttggatatggtgaatgcagccattcattctgtagtgacttcttctttgaagtttgcattgttttcttataaccatattgagcttcttttttggatctttatcgttcaatccaactgaataagtccattgtgttattaattttgttggtttaggaagccggggtagatgtccggctctgtgatgttggtgctgcagttcaggaggtcatggagtcttatgaggttgaaatcaatggaaaagtctaccaaggtaattgattacgtttgtggcagcattttttggtggtttctatttggattattagaaaactaaaacaatgttgtgtc

SEQ ID NO: 18598 - DNA, 1238 bp, Arabidopsis thaliana
tgatttgtggtggtcttgggtgtacatttatatagacatacatacatatacatattggaattatgtttcattcaaagattcatgaattcattatctgccatatgttgggattatgtttcattcaaaagacatccaaatttagtttatttaactaggtaaattaataaatttcgtaagtgcatgaattctcttaaaacccaacccggcctaccaacctggttcgcggttaaataccggttaaagacagagatccaccacggcgtcaataaaaatagtcaacgttttgtccgttgactgacatcgtcttctttgctgcttctagggttctactattggttctctaacattgtcgttatgatgtccaacggtggtgattcgtcggaaattgtccgggaactggaagagttaaagctcaagaaggcagaaatagagcaccgtatttcgaccctcgaagctaagctccaggatacggcggcagttgaactgtacgacgccgtatccaacggtgactcttatctgacggcaccggagcttgaacatgggttatctccagatcagatttaccgttatagtcgtcaactgttacttccttcgtttgctgttgaaggtacttttgctcaaacactcaaatgcaaactcttttcacgtttgtatttagccaataggaagataatctgagatggatgattctgagttttgtgatgatatagctgaaagattgaaactttatattggatttcttctgtttccatttaattgttttgattcagtttagtgatgtcggagaaatttgaattctggattacttgttttctctgctagtgtcttccacaaattaattcttctgttctgttatatgtgtgtatgattatagggcagtcaaatcttttgaagtcttcggtattagttattggagcaggaggactaggttcacctgccttattgtatcttgcagcatgtggtgttggtatggtttcagactcttaccttaagtttatcttcagatatcgatagagtagtttctatataccgttctttctccagaaactattggttctgctcccttcattattatgttctgtttcatcttttgttgtattcgtttaggtcagttgggtattatcgatcatgatgttgtagagctcaacaatatgcataggcaggtacgacttggaacactctgcgttggcaactctttctttttcttggctctaatctgtggtcaatggctgaatgga

SEQ ID NO: 18599 - DNA, 510 bp, Arabidopsis thaliana
tggcttttatggtttcttgtttgatgattttataaataaatggttatagtttagtatatgttcgatttttacggtttctgatttcgtttaggactaacaattttttttttaattacgatctttaatcaccacaaataaaaatgatgtaataaaaaaaatgtaatcaagaaagaaagaaaaaagaagacattgacctgtaacaagtctcctacattgacgcagaaagctgaagggtcaggggagacagaaacccacatgccatctgaattggacacttggagccctcctacaccgttagatctaagaactgttaaaatctgagggtcggtgtgttctccgaagccaactcttgtcagtgacacagattggtcagaaagattggcttcaccaaagaattgatcggacggtggataatgattcactctcagaacggagtcactatcgacggagctgattaacctactgaaactgtgaggtgggacatgaagtcctcagccgtcagatctaaga

SEQ ID NO: 18600 - DNA, 623 bp, Arabidopsis thaliana
  unsure (1)..(623): unsure at all n locations
ctgccatcaatagctccaacacagtcctaacataaattaaaaactgtttatataagacttcaagaaatattattcacacaaaaagatatgtaccttgaagtaaggataaaatcttgtggttttgcttatttttgagggcactgtatttgtaaccttggccatcaatgttggtgcaagcatgtttaaagctctgagaaccttgtggaaattaatacttgttgaaaattttgatctcttgaaagtgtccattgtgtgacaatatcttgaattttggcccactgttatcaaaaaggtagcaaccatctcctcgacacatacatgtggtgtacctttcaaacctgttttcatttggagaagatgacataattccgcaaaaacctcaggattcatacgatatagttgacgaaaatgaataggatcatctttcaaagccttttgtatataagcgtgtcccttttttgtgatttgtcgtcgcatcggacgtgggatttgactttcataagcatcaacggatccaaccaccatcaataacataatatctacatctgaatcatcttntcacaaagagttcgtccattataaacgtacaataaaaatatatataatagtatgatcaaagtgat

SEQ ID NO: 18601 - DNA, 445 bp, Arabidopsis thaliana
cgctcccaccacggtctcctactttcctcatccgccgcgttatcaccggaatatccctccaacttcaccggactcttacgaagatacttgtctatcaatgcgtctacatggccaaatctgtagatcctatcgcatttagagaacgttatgacggcgatttttgcgcccgtgagaacgctcaattcagcggatttcttgaacagcccacgacggcgtttcgagaacgttacttgtctcttggtctcttcctcgattttcttgatctctatcttctgtcttcctcgtgtcgttttaggggtttgtgttgttgtctccttttgtggttgtctaaccaacatgttacggctttgaacagaatccttgggcgtcaagcaagtcatcgatgaagtttctctttctgcttccatgaacaaatctttcatgactaaccgagaggggagagatg

SEQ ID NO: 18602 - DNA, 662 bp, Arabidopsis thaliana
tcttatacttcataattgaatcgttttatctaatatcacttccttaatatagtgggtatcacatttcacctcaacaaagttaaggtacacattacaaaactttcaactcctagttctaggtacacagatctaacatgtctacgtttagcttaaacttttttaagggaacatagttagacgaaaacatttcatagatattactaaaaagctttgccataaacctgaatactagtccttacatgtacgaaacatgtctaaacggctatcctcaagtcgtagagagtacgcacgtttcttgtactcgccccaagtaaatgtttggtacaaccgtggctgattcatcgtcataaccatcgccgaaagaggcccaatcttcgcctgaagcggtggtccggcaaagtacgccgtggatagccggctttcttctccgtaggtcaatgctctatgccttacacttataaatctcccgttcgtcatcaccttaaaatccaagaaccaattaatataaggtccacaacattgataaatgacagaaaaaatgttaaagtaatatcttgtgaccaaaagaaagataaaaacatgtttaatgtttagtttaggtttggcttttatggtttcttgtttgatgattttataaataaatggttatagtttagtatatg

SEQ ID NO: 18603 - DNA, 1097 bp, Arabidopsis thaliana
atgatccctatacaaaatcgaagactagattgcaacgaacctcttgatctcctccggttcgaggaacggttcctgtgaggcagagaaggaatctcagaaatcaatcgaaagcaaaggagaaagagaagacgagaatgaacctttggttaggtggagtgtatcgtttccgggcggaggttgaatccaccagtgaagatgatgagttcgggttctgcatctccttccaatggagatctctctgcgtctcgaggtcgtcgaatagcctctgctcttcacgcgctagtctttcagcgcgtgcatttcttatcaccttacttgttaagcggaaaccgaataaaaaaccgaccgaaccggaaatttggttgttaggatttgaaatgttgtgataccgaataacatgttggattattggtatcagtttctagagaacatgatgtattactgattatctttttgttactcgctgatctttctaattttatttcaccagttcacttaaaaagcaactgatcgcacgtaaatacatgaaataaattttcaagatcaatgtttactagatattgggtggggctattcagccactaagatcaggctgtgatcaaagccagcgactgcttgaagaacacaaccctctacatcctctaacaacatcggttcaggctcatcgctcgagcttcctaaaccgagcctaccattcttcccacaaccccaaacccaagcttctcctttctctgttacacacaaggaatgcacacgccctgctgatactgaagctggactttccccatcgaaaccttctacttctcttggcaggttttccggttttcccctaccaagctgccggcttcggttccaaccccatgagagaatatttctttcacccctgttgcagatagctagtgaatgaccaagaccagctgctatagagatcggagattcagttatatcaacaggtttcattcctagatcttgtttagaccgacccaactgaccatagatgttgctccagcgctcaaaagtgtgcatcatctgaaataagcaaaacctatcagacaaaactaatcctctttttgtctaatatatactctcccatagtg

SEQ ID NO: 18604 - DNA, 500 bp, Arabidopsis thaliana
gactacctcgaacgcactgtcccatttcttatccacaatcccgaactcgctcttgttcaagctcgatggaaatttggtatgactatttgcggttgatacaaacaatacactttcaatttattgtcaattggttttgagataaattatttgtttactcatagtcatatgatctaagaaaacctattgcttggtatagtgaacgcaaagaagtgcttgatgactaggatgcaggagatgtccctcaattaccatttcacggcagagcaagaatccggatccactagacatgccttctttggctttaatggtagatgcacccttatcaacatttattaaaatactttatcctatggtcgaaaacttcatattttatttcttagatcctctaattttatattatgtgtagcttcaatttctaacttttattcttgaataaaaatatccaaaccaattgataatgattatccagtaagtttttccaataacaataaaatatatac

SEQ ID NO: 18605 - DNA, 564 bp, Arabidopsis thaliana
tatatacattcaaatctatcttgtaatcttcaaaatctctcctttcaaatatattttggtacgttactctaaaatatagtttagactttaaacaatataattggacgttcgcagggactgcgggtgtatggagactggcggcgatggaagttgctggtggttggaaagaccggaccaccgtagaggacatggacttggccgttcgtgtaggtctacacggctggaaatttgtctttgtcaacgatgtttcggtacttccaattcttttggactataactaataaatgtgtgtccaaatctttacatcgtataaaaccagtccaaatcctaattaatattcgtcacatgtgttgttgttgctgtgcacacactttatgcacatgatttcaattgacaatatataatatgatttgtatttttacgtgtggatatcaaataaacaaacttttaataatttgtaggtgaaaagtgagctaccaagccaatttaaggcattcagatccagcaacatcgatggtcatgcggtccagctaatctcttcagaaagatgactatggaaattat

SEQ ID NO: 18606 - DNA, 746 bp, Arabidopsis thaliana
tacaaaagcagaaaacgtttttgacagatattaaagaggtgatctatatcgtaaaaacaaagatgtttatttgctagaggtgatatgaatacaacctcgattgaacacttcaagtcagaaattgaattcctcagataatcaagccagtcaacatctttgtttacaaccatttcccaccttggctgcctttcgcgggagatgaggcttaggccatcagagggcaggctgtaaaatacaattctagtaagcacgaacacattttcttataggattccatttgtaaagttgctgaaaaacttaaaatcaaacgtcacttacgcttgttggaagaaaaccgcttcagaggaaggcggattgacatgcacttgagtaacatcaaaggaatttgatagagtccttacacctagtataatagagccgtatattaatagcaattcattgaaccataagagaggaagccgagaatgaattagatatacctttggaagatttgattttcacaaatctgagaatgcaaatcaccattccacgattagaattttgacatgccctaaaaatctgttcagcaaatgtaccccacaaagtaccgtcaatcctctcatcactatgggacgtaaaaaaattgattggtgagatgaagtttaatatacggcttagagttatggttaatgtagagaatatgaacgctgaaaacaaacgtttcatcacgaatttcaaattcgagtttggttgtgtgtttgttattt

SEQ ID NO: 18607 - DNA, 573 bp, Arabidopsis thaliana
aaatccttttttgtgtgcataactctgttttcttgtgttagatagtgtaagaaactcttaaacgaaaattttgagaagaatgcatatatgcttttgcaaaaacaaatttctaaactttaaacaaatgcataaccacgagagagaaagagggagaaatcatatgaattgaatcttgcattttgatgaaactctggggagagccattacattagctaccaagtagttactctttttgctgccctctttaacgccaactttcacagtttcgagacatttcaacttccccaaaaaatgcctcatttgtttcagctctctaaaacttcctccgtaccctaaaatcttaagcaccttcactcgacacctcgacaaacaggatactatctccctgtccttcatacggatgcaagcgcacgcgtctccacaacaatatgtaactctgtgcacaagaccctgaaaccacaccaccatttgacatgtataatgacaagaaggaacagaatttatgtgtgttttcttgaaaagatgataataccttgacgactaaagtttgtagatttggggacttgttgagca

SEQ ID NO: 18608 - DNA, 487 bp, Arabidopsis thaliana
ctccaatgatatagtgccacgtcagcgaaccttactcacccaaaaataccttatttaaggttcgcaccttggttaattagacaattttaatttatttttttgcttcttttcattaggattctcttaagaaacttgtaaggtctctgcaatggacatgctcttaggaaacactattaatcgaaaagccatgtgatacataattatacttcgataaccatacactttcaatgcagcaacaataaaactaaacgttagagtttcaaatatttcacgtttgagttcatggtcctctatcttttgcagataattgctttctacaaacgttatggtatacgaaaatcacctcccactggagagtagagaataagcaacagaagatccactggtaaacatgcccgactcattagacccgttgtgggttccaacatgatcccactcccacgcaagtcaacggcgacagatctggtaacattgcatctccccttag

SEQ ID NO: 18609 - DNA, 588 bp, Arabidopsis thaliana
tttcactttctgttgggtatgtggaagtaattgattttatttatttttgttgctctgtgaagtgtggccaaggaagtacagatgatgaactaagtcctacatgtgtgtcgtctttgttgggaatccgaatagaagaagtggctgcaggtctatggcacacgacctgcgcttcatcggatggtgatgtttatgcgtttggtggaaaccaatttggccagttaggtactggttgtgatcaagctgaggtaaaaaatcttgaactatattgtttccctggctattctagtaaatgctaatctgattatttctagaggccctgccactaaacttgaagtcatttgatctttcagactcttccaaaactattggaggctccaaatttggaaaacgtaaacgtcaaaaccatctcctgcggggctcgccacacagctgtaatcacaggtaacccatttaaccaaagactagattcagtttcatgttagctaggaaagtgattcatcttaaaacttaaaaaaactgctctgtgtttttgtttgttgtagatgaagggagagtattctgctggggatggaacaaatacggacaggt

SEQ ID NO: 18610 - DNA, 726 bp, Arabidopsis thaliana columbia
gatgatgagattgtgtcggggaaagacgaagaaacaatcgctgccccacctactctaagtgatgcggttagacctgatactctgtattgttagtttgtatgatgtcatcttaccacatatttatgttgtgggtttgatgtttgtttttttgttttccagtttcaggcagatgagaatagcaatgataaatctaccccacacccacaagatgatgagattgtgtcagggaaagacgaagaaacaatcgttgccccacctactctaagtgatgcggttagatctgagtctctgtattgttagtttgtatgatgtcatcttaccacatatttatgttgtgggtttgatgtaggctaatttatccaaaccagagggtggaagcattgtttctgacagagatgcacatagaatagcagatactcctgctttaaatgatgaggtaagagctgaattacataaaaaacattagatgcgctataatgtatcacattttaatgtttcccccacgttgtaggccaatttatccagctcggtgatacaaaattcttcggtcgcaggctccccgccaactgaattagtggcccgcgatgacaaggttgctatgaatgagttagagtcttagtagatatgaatttcataggttcttaggggcatcattgttagactcagtttatctggttatggttttgttttaaaatacggattttatttcacaacgtctatattcta

SEQ ID NO: 18611 - DNA, 528 bp, Arabidopsis thaliana
tgccacgtggcagatacgtctcgtctcccaaaccggcccggttcgagattctttgctggaactgaaccgtgtcatcggtgaatgatccattttcctcagtcatcgtcaagaacgaatctactgatattttacgctcgtcttccggtttgtagcaggagaaatccactaggtaaaccggtttagaccggttagccacgtagagggtcaaaacgaaggagaggaaaaccaagcaggtaagtctcgtcgccgtgtcgagttgaaccgcctggttagaccaaagctcagagaacgtatcgaacgttagaccggttagctgaaccagcacggttccggttaaaggaagaataattaagaagaagagaatggtggtcacgttgcaagagttgtgaagtccaagcttcacgtatttgagcttaacggacgttaataaatccggcaaacgtcttcgaattcttataacggccgatgatgaatctcgaaacgccatctcctgccgttaatctctctcgatccatctcaatgctgttt

SEQ ID NO: 18612 - DNA, 525 bp, Arabidopsis thaliana
accaacatggaagatggcaagcaaggatcggccgagtcgccggaaacaaagacctctacttgggaacttttagtaagtatcagttattagatcttgactgcgtttggtaccataagaattgattcaaacgatttaaatattagtacacaattttaaatcaaagaggttactttagtagagaaaaatagaaagaaccttacgcatatacatgccaaaatcaaaacataacttcagaaccagcctgtataagtgtacggtcctgcaaaccattatcttacgttatcaatatggtttatcttgttcaggcactgaggaagaagcagcagaagcttacgatatagctgcaataaagtttagaggacttaatgcagtgaccaacttcgagatcaaccggtacgacgtgaaagccattctagagagtagcactcttcccatcggaggaggcgccgtaaacggctcaaagaagctcaagctcttgagtcttcaaggaaacgcgaggcggagatgatagcccttggttcaagt

SEQ ID NO: 18613 - DNA, 868 bp, Arabidopsis thaliana columbia
agtaaaaaccttttcattcgattcacacttacaaaatagaatatattttggcagctctttcgactaaaaacgaatcaaccacgatctcaaagtactaacactgatcatatgacgagtgaggaagtagacgatccgtaccaaacactgctgggaaacaaaaggaacttcacgctccactgcgtcgtcgttgtgctttccttcttcttcttcggtgtgatacctcctctctgctacgccttctcttacagaataaccgacaagggacactacaaagctgcggttgttcttgctgcatctctggtctgcgtcatctctctctcctttgccaaagcctacgctttccgcatgcaaaaactcaggaccatggctgaatacaccggaatggcgtttggggcatctgccttttcattcattgccagccgaatcgtcagtgatatctttgaaaagtttggctttcatgagcttgcagctgagtaccgaaaagactgatttcaagattctgcaagtatgtttaagataaacaacaaagctaccaaaagagttgttctttagctgcatggtcttaatttgttttgtcctgtttccatgtaagcaaaaagattcgattttttaatcaagatttatcagtttgatcttaacttacttcatttatataaataaataaaaagtcaagttagttgggattatattaaagaacgtggaactcgtgaaattaaaatattcagatcaagagagtaaccataaattgtgatagcatggttctgcatctcaactttgcttgtctccgatggatcccacatgaaccaacgtccactccaagctccgcggcaacagtgtctcacagatgaattgaccaccttccccggag

SEQ ID NO: 18614 - DNA, 939 bp, Arabidopsis thaliana
ggtttgcatacatttgttctttatttgggtccccatattgctttatttaccataaaagtaatgcagtgcgggcgagtcgatttaaagagtgctatatatgatacaattcagttgaagagaagcccttcatggcttgataaaccatgccacgagtttggctccccagttttttcttctggagttcctcttagcagtatactaccacaggttcagatagaagccatcctatggggtctaggaacagcgttgggagaacttcctccttactttatctccagagccggtgactattcactctgccgaccttttttattgacaactcaatgtgtatggttagtgttaagatatctactttgaggcccagttttagaagcttcttgatgtttgagctatatctaagtgactaagtgggaatgaattaaatggttttagaggtgtcgagtttaaatctagtacatgaacaggagatgaaacagtttttgcatcaagattgattattaatgctctgactttatacagcaagtctttccggtggcaaaatgaaagaattggagacatgttctggtgacgataacggattcattgctaaacgcgtaaatcagatcaaaagctggttattgtcgcattcacaatatctcaacttcttcacaatcctgattcttgcttcggtatgttctagatgagtcgcccgtacaatcccttgcaacttgcatagactttttgtgtgtgtttaaggttccgggaaacttatgatgtgcttattacaattacgttctgccttacattcaggttcctaacccattattcgaccttgctggaatcatgtgtggacaattcgagaaaccgttttgggagttttccttgcaaccttgattggaaaggcaatcacaagacacatatacaggttttgtgagcgttctgtaataccctattgtttga

SEQ ID NO: 18615 - DNA, 845 bp, Arabidopsis thaliana
agacaactgtagagctaaaatcttcggtggagaagttccatgacctgcttgtcggagaccacaccatatgtccaatgcaactccatccaacattcagagcgctgagcttcaagaaggcgagatgggccaagttggcgccgtcatcctctggaattacgttcatggcaagtcaactttatatttctttctttatataaatatttatcaagattcatcggcttccaagatgcatataatgttttaatatagattaccttagatcctctcttattttggaaacctataaaatatatgtgaaatgataattttggtgcagatggggaggcaaagtcggcgaaacaaaggatcgagtcattggatccggagaaaaatcggatcacgtacagggtggtagagggtgatttattgaaagagtacacgagtttcgtgacgaccttccaagtgacacctaaggaaggagaacctggaagtgttgcacattggcactttgagtatgagaaaattaacgaggaggtggctcaccctgaaactctcctccagttggcaaccgaagtctctaaagatatggatgaacatctcttatccgaggaatagaggaagattcaatatgtatctattctatatatgtgtgtgtgtgtgacgtcttaagcacgtctgcttaactaagtttttgaaactgcaataaacactgagccgcacgtgcccgagctcgtgtaagagatatctgttggtgtgtgtcatcgtacgtgtattcatcgtctacgtttgaagtaattaatttgaccttaatttgaagcgaggattatttttttctcacaagaattttgtccaaaaaaggtttggtt

SEQ ID NO: 18616 - DNA, 565 bp, Arabidopsis thaliana
cctaattaaaaaaaatacacatagcacaagaaaaaccaccgcccaagcttctctagaacctctccatcgttctcactatcactccccccccccccaaatataaaccctaattttcacaatcacagtaccaaaaaaaaatggcagccgccgcaccgccaccgccaccaacagcagcaccggaaccaaacatggtagcaccactaatttcaccaatcggccacccaatgttctcccggatccgtctggcaacaccgtccgatgtcccattcatccacaaactaattcaccaaatggcagtcttcgaacgtctcacgcatctcttctccgccaccgaatcaggtctcgcttcaacactcttcacctctcgtcctttccaatcattcacagtcttcctcttagaagtctctcgttctccatttccagcaaccatcacttcatcaccatctcccgatttcacaccgtttttcaaaacacataaccttgatctcccgattgatgatccggagagttacaatttctcgccggatatgttgaacgacgtcgttgtagctgggtttgtctgttt

SEQ ID NO: 18617 - DNA, 1248 bp, Arabidopsis thaliana
gtttatttggttataattagaattgtattgtggtctctgtatagtcttgggctttatatgttggctaaatattgttaatcccacaaaaaacaaaaaatccgacctgccggaatcgaaccagcgacctaaagatttgctgtcacagactacagtcttccgctctaccaactgagctaaggtcggatgctgcaatacattcgctttgtttactttattaacaaatgtttacaactaagaataagctacatgtctacaacaatgcaaaagaattgacattatagacattctcattggtttggttctcactgttcacatttcatttagcttcaacatctacatggccagttcctaactagattattgatttttgggcttatttggttattttcggtttgctcaatccaatttggtttcgtttgggtcagcggcaagactacaagctctatttctaactcgatgcaaaaaattatgtttcaaggaattgaaccaaaacttacctgattatattcggttttggtatgttttacaaatttatacagattgatttcgcaggcaggagtattgccacactgatattctatatataaataactcgtttttacatattctattaaacgttgttaaggatgtgacttcttctcttgatcttcaccttaagcccaccagccatatgagccgttaaaagaggaacaaaaaccggccggtctttgttaaccggcacaatctcaaaccgactcaaaacagaaccaacgacgtatttcatctgcataaatgccatctctttccctacacaaaccctcggcccggcttgaaaaaccggaaatttgtagggactaataggtttcaaaaccggtcgtgtactccccggttcagaatcaaaccaccggttcgggttaaactcttctgaatccgtaccccatagcgtctccatcctccccataccgtatgggaaataggtcactttgtctcctctcttgacacgtgtcccatcaggcaaaacgtcgtcgtttgcagcatgtttagagtcccacgaaactggaggatatagcctcatggcttcacatagacaagccttcgtgtaagccatctctttcaaatcctcaaaccctaaccctaaactcaccaacgggtccacttcttctaaaatcttccgctccacgtcatcgttctcagtcaacaaccaaaacagccacgtcatcgctgctgacgttgtatctcttccgccatgataaaactaataaccatgtc

SEQ ID NO: 18618 - DNA, 1051 bp, Arabidopsis thaliana
tgaggtcactgtaagaaaagcaatgtaataaagcatcaatacagattcattcagaataattagataaatctgttccgaaaacaaaaaaaattaagagccttgagccaataaaaactaagaaaattgactcaaaaacaaataaaaaaaatgaaattcccgatttcatataagagctccattgtagaattcgggcctaatgattaatcaagaagcgatgggaacgacggaacccatgaatatagaggattctattgaaaaataaatcttagtaattcattggacaggatggcggaataaaccagattattatctattcttatttttattcagagatctcctgggataaacaacaaacttaatatagatattgaaagagtaaatattcgccggcgaatactttttttttaataaaagtaataaaaaacaaaaattaaaaagataaaagaaaataaggatttgttagaatattctaacaaaaacgacattcgagatgatgatattacgttacgttatttttaaataaatagaattaatcttggattccatttcgaaaaagacatacacaaatttagaagagatcagatgaaattgaatatcatgattaatagaattaatcattaactatatcttaatacaagcttttttagtccttttattcgcgaggagctggatgagaagaaactctcacgttcagttctgtagtagagatggaatttctaatttagaaccatcaactataacccaaaaagaaccagatttcgtaaacaacatcgaggaagactaaaaggaatatcttctcgtgggaatcgtatttgttttggcagatatgctcttcaaacacttgaacccgcttggatcacatctagacaaatagaagcagggcgacgcgcaatgacacgaaatgtacgacgtggtggaaaaatttgggtacgtatatttccagacaaaccagttacagtaagacctgcggaaacgcgtatgggttctgggaaaggatcccctgagtattgggtagctgtggttaaaccaggtaaaatcctttatgaaatgg

SEQ ID NO: 18619 - DNA, 896 bp, Arabidopsis thaliana
ggttcgctgtggtctgaacagaactggcattggagccaatgcaattggttatcaacttgtattccttgcatccttagtttgaacctgtaaaacaataagcgtttagcaatagcccaaagtactttgttcgtatagcagccaacaaaatctgataagcgcaactggaaattcatgatcttagcaaaaaaaaattccctgcaagtctcaatcaaatccctttctgcatttttagatgttttgaacttttgacactaatgaatgcatagagacagtacccagatttatcgaatttgatagaaaatcagtatggcgaattggtgatatatggtggcccttacatttgtaaaatagagctacaccttaagaacctgataaactcacctgctaagtccagagcccaagccggttgaatatgccacaaagaggttttgcactgacatgtacagtatttcctcaggagcatggtcgattacggagattccaagttcagcaagctcaacaataacatgaaactcagaatcttctgaggccaaaagatgagattgctgagactcatttccagataattctgacagggatgatgctggaagtcttctgcttatgcttgaagtaggctcaattgctggcatccagtcactgattctgacaatattctttttgtcttcctttaaaatagtaactcgtatgggtctggtaggtccacttccacttcgtggatggataatcacctatcttatcaatatcgaacttttctgaattagaaggatcgtttccatcaacaagaagttcaaatagatgtcgtctaccaagattttcccaataaaacgaagcagccgcattaggaggaagaaattgccaagactcgctgacaccttccacttggcgatagcgaatag

SEQ ID NO: 18620 - DNA, 631 bp, Arabidopsis thaliana
gaagtgtattttacggaaaacagatcgttttcggagattctcaagacgagagcttcagaagatcatcagctatcacagctcaggtagactttaatgttttgtgttttcgtttttgtttatctgaaatattataatccattacatgcgagatctaattagaaagatcctgagagctaattgttgaaagaatagttttttagggttttgctttaattttgttgtgaattattggcttgaagagtagattttggtttagggttcatgtgttttcaatttgatgtgttggttttatggatctgtgaaaatatgatatctgacatgtgtaaatttgcagacaactttgaggattgggacagctcagaagtggtgggagaaaggtctgaaagataacatgagagagatctcttcagctcaagagctcgttgattctcttactaacgctggtgataagcttgttgttgttgatttcttctcacctggctgtggtggctgcaaggctctccatcctaaggtatcaatccacttcttggattgtttggtacagtattgatgaaatgaacaagttttctaacaatgatggtttatgattgttgcagatatgtcagtttgcagagatgacccggatgtgcag

SEQ ID NO: 18621 - DNA, 891 bp, Arabidopsis thaliana
  unsure (1)..(891): unsure at all n locations
gcaacaatttgacattagtgccaaataaccttggtgtgaaaaaaaaaaaactatgaacgattgttttattggacaaccatgatttttttttatgtctatgacaaagtggcaccacctttggacaacataaataagtaaataaccatcacccgccaaatattaacaacaaagaaggtcaacgtcgcatacttttgaaaagtcaaatcttttcgtttcgggttgtataatgaaaacgccggctcgtcgatcgaagcgggttaatcaggaggaatcggagacaaatgttacaacccgaagtatctacggacacgaaagaccaactgttccaagacacgagcggctcgggtcagacccgattacccactgacccgcaccacctccgagtccgagatgaagttaatgcctccggagttctttcagatcgacgcacttgatcttgcgccacgtttgcttggcaagttcatgaggagagacaatgttgtgcttcgaattacagaggtcagactcagacacacgtttctgtntttttccagagaaaggatttagggttttaatttgggactgtttgatactctgattagatcattggtgcttactaagctaatgcaaaattaatggtattggtgcatcttgaaatactatgattgtaatatgcaacgatttaaccttgttcctcctttggtaggtagaagcttatagaccaaatgattcagcttgccatggacgatttggtgttacccacggaccgcaccagttgtgagtttcttctttttacttgttagcatttagttacatacatacaagttgtgacttcctctgaaatgtggtttctttttttagtttggaccaggaggacatgcttatgtttatctatgttatggtctcatatga

SEQ ID NO: 18622 - DNA, 680 bp, Arabidopsis thaliana
aggaggacatgcttatgtttatctatgttatggtcttcatatgatgctcaatattgttgctgataaagaaggagtcggagctgctgttttgatacggtcttgttctcctgtttccggtaaataatctgctcacatcggcaccggaactctgctcattatactctgtcttgtttgaggctcaaagttgtttgggttgttggcctatcgcaagtgttgaattttcatatcttttgcatgtttttactttatttattcatcaatggcattgcaggaatggagactatacaggagcgtcgtggcctgaaaaccgacaaacctgttcttttaaatggaccaggaaaggttagagcttcacaatgcatttcatatgttctttaatagttaaggaaaaaagttgaaagtatctccgatggttagatcttgaaataaacaatgagtattcttggtcaatcctcttgcattatcagctttttatctgtgcctctcgcaggttggtcaagcgcttggactctcaacagagtggtctcatcatccactttattctcctggttagtaggtcacagaccagaatagttaatgaagtaagaccatgtctctctcaaacaggcgtataagccatcgtccgagaactatatggacacaggaggactggagcctctggatggaggagaagatgtgga

SEQ ID NO: 18623 - DNA, 508 bp, Arabidopsis thaliana
ctgagttcagcaaattcatgaggttagaaagacttaacctctcacggtcttcattttcaggtcatatttcaatcaaacttcttcagctaaccaatttggtgtctcttgatctttcttcttcttttccgtattctccaagttctttgtccattgaaaaaccattatttctccatctacttgcactgaacttcatgaaccttagagagctagatatgagctccgtagacatttcttcagcaatccccattgagttttcatacatgtggtctctaagatcacttactcttaagggctgcaacctcttaggaagatttccaaacagtgttcttctcataccaaacctagaatccattagcttggaccacaatctgaatctagaaggcagtcttcccaattttcttagaaacaactctttgctaaagttgagcatttacaacacttctttttcaggtactatacctaactctatcagcaacctcaaacatttgacttctttaaaacttcaaca

SEQ ID NO: 18624 - DNA, 674 bp, Arabidopsis thaliana
acacacgaattcctatagcatttggtttcttcagaaattctaacacattcaacaaattactcctgcacaagtaatgttactccagttagatcaactcaatacagatacgaaatcacaattctttcatctgatacatatcaccattgatgcaaatgcacaaatagctctcagataaatgctacgtacacagttaatattcttaataacatcagtctactttcttagccactttcaaacttttgtttagctactcaaaagtatctgaaaatgaacttaataatgatgttgttccagtttattgttcttttctattgtcaaactttcatctactaaaatggatatgacaaagagccagtgggaaagaaactaactttacctgctagcataattctgagtaatagcaatcgattcctccaggttaatcaccagatgccaccatccattaggtacaaacatcacctccccggctttgcatatacactcaataggtttcttctcccaatccttagtatcatcataaaagttcatgaaccattctattatggaaacaggacaggccacttctgctccatcaggacttggatgcacacccggagaaccacatcaggtgggaacaaaaccatttcttcgacctgtgatcacgcattcaagctgatgttgagttaggacaatat

SEQ ID NO: 18625 - DNA, 530 bp, Arabidopsis thaliana
tgatcaatcgaagagaaaatgtacaacaaacttggtacatgtacctcgagtaaatgtactaatgttatctacaaaaaaaatccactcggaggacttggacttctaatgtttttgaagtgctatagaaaggcaacaacgtatgctctaggtgaaacccaagatatacaaaaagattcctctctttctgactttaccaaggtttcaggtcagcaaccggaccagcagtccagttcagtgccttctcacctgtcttcaagtatatgcttttgtcgtggggtaacttccgagctagcccgttaagtatctgatggaatgcatcccctggttgtgcaggttgagggaaaagcatggctcgtttcatcgaaggatttgcgaggagtctctgttttctgaggatcacttctgttggtattgaggttaggatcgtgtctagttcagggacgtctttttccgcaacaaagactcctatttcttcccaggggatggcgtctgcgaaaggcagtactatgtcgtctgctatgataactgga

SEQ ID NO: 18626 - DNA, 1933 bp, Arabidopsis thaliana
catctatgcgatcgacacccatatttggcaaagggaattttcatgattcactaagtgtttggaagccccataaattttccttatttgcaaaatagaccctgtacgtttttaagtaacctatatacataattttatggtcattgtttagacctaagcttatttttattgagagatacacttttggagagaagaatctaatccttgcagagaggattctgacctcccttttactcatcttcatattataattcaatgcaatttaatcagattttgataatttttcagtaatcaccttattgggtttagggagtctcactagggatttaattggattagtagattgataaccccttaggattattcttagagttcttcatctataaagggttctgactgctagttttagattgatcacttagaacttgattttagacaatagatatacccgccataggtatctgttatcagaactattatagatgagcctggtttataggtgtgtaataagaatcggcctatctacttaggtgaactaatcaaacttgtttagcatgcaagtttaggaataggtttcacggcacgtcaccgggaatcttatctctaggaatagtgagtttcacggaatgccaccggttattttgatattagagtttgagttcaataacggttcaataacaatcattttcatagctagatctacaatttatctatttcctgaaaccatccctagacctaccactttaatctcctgaatctacaactcaatttactgttttattatcttttacttttacctactttttttggcataatattaatcaccataagtctattgtgtccacatcgagagctcagtggaattcgacccttatttgctaacaacgatctcttatttgagggagtaagcttaagaatatttgagctatatcaaatttggcgccgttaccgaagttttctttagttcaccattagagtaggtgtcaatttaagtctagacttttcttacacttcaatctcctcacgtgtttctccttcttttggtctcttgtgtttcaggtacccaaagaatattatccacgtttctatggcagaattcttcgacagtgtcgatcgagaccatctgcagaaccaaccggctactataggcgactttaatagagctgatctcttctacacaaaccgatcagcaatcgagccacgcactttcgaaagagaagactttgctattcaccctgcctactatgatcttgtttcacgaggaaagtttcgaggtgctcctgatgaatcaccactcgatcatctggaagtcttcgaagacttagtgtcctcaatcaaagcaaatggtgtagcagctgattattttctttgcaaactcttccccctctctataacgggaagaggaacatcatgactgcgacctctcgaagcgggttcattgacatattggacagacacaaagaacacattcatgaatcacttcttcgatgaatctgtgactgaagcactacgattgaagattttttctatcactcaggctccgggagaatccctaaaagcagcgtggctaagattcaaatcctattagagggactatccacaccatggtttccaggaaagctaactcatcaatattttttccgaggaatagatgagccgtatcaaatgtaattagacgatgcgagttcatgtaacttcatgacaagatccaccagcgaagaacttatcctaatcaacgatgtcgtcacaagtctcacaacaaagagcatatacagtagacaaagaaaattggttgaagcttcaaccgttagcacataggataatgggtctacacacattccttctccagctgtcacttcttccatccaaccccacctaccacctgttggtaagagtacaacagaagcaatgttagaggaattactcagacagatca

SEQ ID NO: 18627 - DNA, 1960 bp, Arabidopsis thaliana
ctaatagatagagaatgacatcagattagcgagtttcgaatcaaagtagtatagtcaagttgtaaattcaaagcagggtgcagttttactttagagaaacaatcagttatgcaacagagaactaacaacctgggcattgaacttacttcgctgaatctaaacatgcttaacgggtttgaaatcatcattatcccctatgcaaatgagcaatcctaaatgcaagcactctatatacaatcccaaaataaaatgcaatctacatgacactctgtttttgtgaagtcattttctgaaaaattttaaaattttatgggttttttatgccttagatgatgcaaaatttgaaataagtaaagagaacaaaatgtcaaacatgtcttgaaccctccccccaaacttaaattacacagtcccttgtgtaataaaaatctgaaaaagaattcaagactaaaacacaaaacacaaagaaaaataaaaagctatggtataaacaatggtggtggtggtgttacctcagcgatcaggtgaagtaggcgaagacaaggtcatccatactctcctttatgtagctccagggagcgggttgtgctggacttggattggttggatgctctaccctttgctcgggttgttgatcgagtggcttgcccagcatccgatttccttgtctttctgcgcttctttaacttactcctcctctccttctccctaggttcaaagtctgattgcctcggtggtgaaggtgcagcatggtgttctctcggctcatatgaagactgtcttggtggcgaaggcggatcatattgcataggttcatgtcaagtggatccgcttctcctaaaaggcatgtcttgtggcatcgccgtagtagaagaaaacagctgaacttgagttggagagtgttaaacttcttgttgagtgctgcgaaagctttgtcttgaagtttacactagattcggaggaaaccaaggcgcttgcaaatttcctttgagtctttactttgccttggcgcggagtacttctcaaagtaaaattgttgtgatgcataagactcgtccataggttctgcctcattatctgaatgtcgaattggagtttcatcatcattcactccttccattggcacaacttcatcacctgaaccatagaggttctctattggtgggcaaaactcgatgttgctgccatctctaatcgaagtggaagcgggatttgggaggagaaaaatagattatcctgcttcagggcgatcgaactgatatttatataggtcattcttctgttgcgaccaaaagttcttggaattgataaggtgctgcatatcaatccatctcggagcaattggatttaaatgcagaggtacattgcatgctctcaaaattggggtcataactcctcccacaaccattcttcctggtttcttaagtcccttagcccatcctttgtagctcagcagatgttcgattaggtagaatgaaactgaagcgtctgtctgatctcttgctagaacggtaccatctgatgctaaaccaagcagctcctgcagcgctggctccatcaactctagctctccattgacaaaggtcccattcccctctcttgcaaatagtgcactggccaaagacctatgaaagtatttaacaaccagactccttatttcctttcttttggttctagaggaggaaaatccatgtttaaacccaagcgtggcccagaatgactggagctctttcttgtcaaaacgatgattcgtgtccttttcgcttggaaatccatacatcagctctagatgcttgattggaagccgatattctaggtcatacacacagaactccaagtatcccaaacttccgtctggcctgactccgtcgtcctcttactcttcatatatgaataattcgacagatgaaagaaactggatggtctcttcttcatatccctccattggtcgaaatatgtg

SEQ ID NO: 18628 - DNA, 614 bp, Arabidopsis thaliana
gggtaccgagctcgggatgagttgttggagattgtcaagtgcaaggaagctatgggacaaatagtgatgacggtcttctacggagtagatccatctgatgtgcggaaacaaacaggagaattcgggaggtctttcaatgaaacgtgttctcgaagtacgaaagagaagaggcgaaaatggagtcaagctttgaaccatgtgggaaacatagctggagaacacttccaaaactggtttgtttgttttcttttaattaattttgtgattattcttttttcttaaactgatatgtattatcaatttcacattgtgattctccattctcacttgtcagggacaatgaatcacagatgattgacaagatttcaagagatatttcacacaaactaaattctacaatctctagagattttgacgatatggttggacttgaagcacacttggaggaaatgaagtacttgttagatttagattataaggatggagctatgatagttggcatttgtggtcctgcaggcattggtaagactactattgctagagctttatatagtttacttttaagtagtttcgaggttagttgttttgtggagaacttagtggaaggatataga

SEQ ID NO: 18629 - DNA, 2309 bp, Arabidopsis thaliana
gctgcaatatgtgctaactactgcacattttcggcattccctactgcacctgcgctccctgctgcacctgagctccttgccaccggctgtactactgccactgccatccgctgcaacttaggacaattcagcctgagaggtcccctgtccttgcagtggtagcactctctcctctcagcttgttgcgtgcaatcgctaccttgtggtcaaggctcccaaaagaaaaacatcccgcacgaccactgataagtgtgtattttgcatgttttgagcatctatttgtcatcattttagcatcatatcatcaccgttttataccatttcacatcatttgcatcactttgcatgtttagtatagttttgcatgcatgttgcatatttgcgttgatttcaggtgatttggagctgttgacgagctatatggaagaagcggacctgatcatgacaaaccactcgaccaagaggtcgagtaggagcttcaagatctcaagagaccactcgacccccaggtcgagcagaggacatcaccacttcacttcaccacttgaccacgaggtcaagtgccctcatctccatcaccaaaccatcactcgatcacatcactcgaccatgaggtcgagtgtcttcacctccatcatcagaccaccactcgacctcgtcactcaacctggaagtcgagtatcttctgacaccactcgatcacatcactcgacccccaggccgagtgacttcatcccattgctagatctctactcgacctcatcactctacctggatgtcgagtatcaccatcactcgactgcatactcgtgacaagctttagagccttcttcattccgcactcaaccagacactcgagcacaaggaagaaaaaaagactccagctattcactcgacctctcactcgaccacgtgggtcgagtacagttcttaacccgtcccaatacttcgtcgttttgagtattagggtttcgggatatttggctataagtagcatgtacttctcattttcgcagagaggaagtttttatctagttttatttccgcagaccttgtgtgctagactttttgtaatccggatttctctttatctattcagtattcagtattcagtttctgttcttgatttcgtttactgttgttcattctgttatcatcctgctgttacactgttgttatcatgttttcaacttgttcaacgtttatgctttctgttatgatgtctgagtagtgaataggtttctgaggatgggttagagtagtgtagaattctcagtatgctaggtgattgagtattggttgatagatcccttctggattagttgttcttaatgcctattgctttctgattaactggaatttgagcccagacatttccgcgcccaaaaggtgttcgatgaaatgtctgaaccactaattccagagattcgtgaccctgtaccaaggtattagttgcagggagcgttttggctttaacttattgattcgtaatgcttgttaggttagctctcgtcaatggtgattgagtctgggactaggttaatttgagagtctctgttgcggtggcacttagatttggttaatgaacttgttgtgtagggttaatttattgagcatgtcaatcacctgtaaactgaggaaacgaaactactcaattaccccatccttaggaattctttatcgattgattttattgtttactctactgttgattactgcatctggtcatttgttccttagtttctgcatttctttcctgttagtcgacctgatactcgaccacccagttatcgagtatccctgtttcactttctgcctgttactcgacctgtcactcgacctcatccagtgctctacacagagctgtgttggtcgagtgttttgctgtttctgtttgattttctgttttctgcatgttcacttagaactgctagaacacaccaaaaccggtaatggctggcttgacttagtgacttctgatcacatcctgaatgttagcatcacaccatttggattgacaacctaaaatactacaacgatatgattggtgttttaggataattgactaaaaacctattatcaataagcgcacgattgcaacccttggacctttaggtagcaaccctctaagagcaataggcagaagctgttgcattaacacgtgataatcgtgtgacttaagccccgtgaccttacactcatctaatgagacgcctcttgatatgtttgagcagtacccatttggacctttgaagtcatacagccgcttacaaaagatctacttctctgtcttctgtagagtaaaagtt

SEQ ID NO: 18630 - DNA, 2039 bp, Arabidopsis thaliana
tcaatcaatatagtttaattccaactataaagattacatagtgagggacgatatagtttgtaaatgaagacgaaaggaaatttgatttgacgtcgtataacccatatctagaagatttcgctccatattaattacttgctgtcaaatacactctagaagtgacctctatcacactctcattaatatctctattagacgtaaacggttcccgagcaacgtactcaattgatttggcagataaaataagtaagttaatgtttatttgaaaagattgttagtaaatgcgttgacccctaatatagcactatacatgaagccatattgttccacttatatgcaatacaaacagacgtcatctcaaccttctgtcaaaaaacgtaatgagtattttatagacgtacacggcgcgattatgagaggtacacaatagtttgtttaatttaaaagttactaatatgatgcactaaatatacatccacgtcacccacccacttacattgatgcttattctcctctttaaaactcatgtcaaacacacttagttgaatacacaaatccgtctaaacctcctcgtttgaaaaacaatgcctttcctacctccgctaacccctccaaccgagttgtacgtaggaatccaattgccaaaccccataagcatacttgtcaactacctccccgtcagacagactcccatagagacgctaaggaacttagtctacagttgtgacatcaacacccttgcaatcgatgaattcatgacgtggccgtcgttactccaaccggagtctaccttccggccatactttgagctgcttgtagaacgtggatccttgaaggtgttcgccaagcgagcaacttcgtgacagtagctcagggcttttcagtcatgacaacggtcgctttttagtcttcgtgtaagtacactatatagtacattaaacttggtttatcgtacattgagaaattgcgtacacaacataagtataaatctaatagtttttgatgttgaaggcacccaaactaatatacgtacacgatagcgtacagcagaaactatacgtacattgcgagaggatttgaacaataaaacaaggcacgtacataaaacaacaaattagattaacatttaaacggaaacaggaaacaacaacgactgaaatgtagtttagttcttatggaaacaacaacaacaactgggaaagaaaacttaattgaaatgtagtcttatattatattagaacgcagaataatggttcattccctctagctaaaaaaccaccatcgcgatatccgcaacttcgggtctgtccggattggcaaccacctttgaaatagcaccatggctctcaagcttcgggttagacagttcggttaaacgcgaaaagctgagtgcaacaacaaaatttcccttacccaaactctgaaagtaaccatccaagtactccgcctgttgattgcgggcttcgactccaagacttcattgctacgttagaaataaggacagttagcgtttagagtgatattgtaaataaaacaatgaaaagaacacttactatctatcttttatcttgaaactcagtttgagaccctaatagtctgtagtcaatccgccaacatcaaccaacgctccaacgacatctagatgatggagaaacaaagataataaaaaaaaatttcaaaaatgtaataaatgaagcatcggagttattcctcctcaccgactaaaacgttcttgtaagcagatttctccaaaatgtagtcgaagggagtgaaatcgaaatctggaactggtggtgatctcggtggggcctgaacgacgacggtccgatccataaacagtatgccgtattcatgctttgttgctctgactgagtcagttgacttacggaccaagaaagaggtgattgtcttccactcattttcaacgaatcggtcttcgtaaaacggagcaaggcgacgatcaacggtggcatcaatacggttattctttacatacagaacatgatagtagacagttttaatatcaagttaagcgaatg

SEQ ID NO: 18631 - DNA, 2144 bp, Arabidopsis thaliana
ttacagaatacgacaaagtgtgcaagataagcagtaggtgccaagtcacgcagatagtggcaatgatagatagaaggtttaaagaagaagcaaaatgatttcgaaaacacccacagttcaagcgtatattccacatgtctcaggagcctaaccaccaaatgcaaggcatgtgggtgcttatgcttcgcacagtgaagacagatttgctctaggaggcttggtttgttgtaaatagagtacctattaggtattccattaaagagcatgcgttgttaagtgagtttgattgccgtagttacccaaaataactcaagacaatggggaatacttagtttgtgaagaggatcttcaaaaaagaaactgggataaaggtttcaaaagttcttactaagtacgagaagatacgcagcggtacagataggttgaagttagtgctgttgtacttcctggtcaaggtagtaaaagcaaactcaaagaatgatggaaacatagaagagattcttttaaggattgttggcggtttggatgagtacgagacgtttctgtggggccgttaatacttcttggaatgtttggatgggataacgaaaatgatgaagaacgtggatggtttcgtgaaaccaaaagctcaaccttgctacagtggattcattgtgcctctcgagataagtaatttatgatcattatatgagtataaggtgtaatgtacaggttttatgatattaaacattgttttgttatttgtagattctggcttatgaggctattctacagcttcaactgaaatttagagtccctgtacgtgcagagaaggactgtccaaggatgtgcaagcataagtttaaagaatgtagcatgaaaggtgtcccgttggaagttatatataaagagcttgggaatagtgaggttagagtttctgtatttacttgattgtctgtatatcatgagattgcttgattgctaaatgagtttcttttcacaggatattgctagccatttggtacctgagtatcatgagaaatatctgttggacagtctcttagaagatgatgttgatgatgacctcgatcttatagatattgttattgacaattggaaagggcgactatttgtagagaagaagaagatatggtggaaaggaatgtgtgagctggacatttcttcttgatgtattgttaatgatcttgatgatgatgttgtccatgagattgagaatgaggtcccgagaaagatgtccttccgactgatgtccccgagaaagatgttcctccgactgctgtccctcctcgagtccctgaattagatgcagttgtggcatctataaactcactaacgcagatgatgaccaaaggctttgaggaaacaagagataagattgatgccattgatgggagagtgaagtctattgagttatttgtggcagatctgaaggaaaagaaacatggaaagcaaacagaggaggaaagtcaacatgggaagcaaacagaggaggaagtgttttatgcgtcgccagagggttgtgtgaccataaaaaggcaacaaccactggatatagtggtttatagagaaccttctccagaggttgcaaaaaatagtaagtacaataattaatgtcagttggttataaaaatatgaatataggacttaggttttgttttaaatgtctacaggtaataaggagacaaagatgacggataaaaggtgaaaggaaaagtgaagaagtagggcgggggcaagaagaagcaggatgtgccacatgtaatagaaacataaaagaagcgaacaaggaaagcatcccgccttattaagacaccgtttgtgggggtggatgtgaagcgaaagagaatgcggaagtctgattgattaactagttgtgtaacacttggtttattgaaaaacatttggcttgttttgcattgtaatgatgtttacttttacaaaatggttaaaaactcggttggtttaactggtttttaggtacatctatgtgtattttatgatcggtcaaattgcataacaggttcaactgtttattttggtatgtctaatctagttaatctggttcaacaacgaagttccaaatggttcaacggacatagttcatccagttcgactgattagttcaaatggttcacctacatagt

SEQ ID NO: 18632 - DNA, 1240 bp, Arabidopsis thaliana
catatcgaactgcatagtaagatcgccaacattcagccctatccttccttgtcgaacatctataattgccccagctatgtgcaagaaagatctcccaaggattaatggatccttaggttctttttcataagataagactacaaagtctgtaggaatcatgctcttcccaatcatcacaagaacatcgctaagaatcccatctggaattcgggtacaacgatctgccaacacaagagtgataaaggtaggctcaagattggaatacccaagacgcatagcaacttaacaaggcttcagattcacactagaaccgagattgcataaggcccttgggaagtaattgtggttgatggtgacacttagtacaaaggttccagggtcaggtagctttcttggaatttgttcctgaatgatatcgctgccttgctctgaaatcatcataacactacattctttcgtcaaattcttagtgaccattgtcttgacataccttcttattgtgggagagagatgaattgcttcaactagaggcatctcaacaatcagcttatcaatcacaggcttgcatctgacatcatgtaaggcttgtcttaactttttaggactcttggggaaaggaattcgccgatttgctgacttggtttcagctggaatttgcacattgtctgaatgagctgggtgtcgatcgacagggggtgtgtgtcgatcgacactatcgggaataatttcctcctccttcgcgaaattgtcgatttcactcgacaaaggcaaaacagagtcgtcaagagtaattggtgtcgatcgacaccctgatgtatcgatcgatgatatatccctatttttacctattttatctatgatttaggattgtttttatagagtctctagagtgctttatagttcttttggagtgtttttggtgtatttacaggtctcgtacgttctgggggttatcaagcgattatgggacactttggagcaaaaacggagcagaaaaccagtcttgaatgtagtttcgatcgataacagatttgtgtcggtcgacacgggttcgccacgagttttgcacgaagtttgcacgaaactgtacgaaatgtgcacgggctcagtttcgccccaaaaaggcctagaagttaatatttaggcccaagacgtgttttagacaattaattaggttttaaggtcattgttagacttaggttttgttaagttttgttttggtgattgatatacattttga

SEQ ID NO: 18633 - DNA, 625 bp, Arabidopsis thaliana columbia
agagcagaacagaaccttgaatagagttctaataaagaaaaaggatagtggaaatagctctttagcttaaacaggagtaaccagacctgatcaaacttgcgagagaaggtcgccctaaatctctttttctttgtatcatcgctgttatcttgtggtaccaagcaatcattaaaggcccctggtatggactgaaatctcgacctcaacattccaagtgttcggatctgaagtgaaacaaagttcttttaagaaactatccacttggaaactaaagaagtgagtgtatgccactccgtaatgtaaaagtaatcatatttgcttctgatggaaaaggaagacaacaataaacctctccaagacgtcgaaaagctccatttaaacctcccaccagagttgaaactatagcataccatatttgagtgtccatgaaataaacctgcatatgaaagttagcatagataggggaaagaataaaaaggaagcatacggcaagaaagatgtgccgactcacaagaataacaggtgaccagagagcgatcaccacacccatattactcttggctgaaaaaaagaagcaaaaccaactagattattcagtaagaactcattatgcaatgagataata

SEQ ID NO: 18634 - DNA, 623 bp, Arabidopsis thaliana
ttagcatttatcagtgaatctgcagttttaccggttatgttgtcttcgaaattactaccggagatggaaactgatgacaatgccaagagagagcagttgcttcaaggtgttcagagtttgcctataccaatgcaaatcgaaaggcttaaggttagttttgtaatgtatttttgttgtgatttgtttgctggtttttgaaatggtatctgttattacaggcgaggatggatatgattgcagcagcttgtgaaaatgcagaaagagtattagctgatactcgtaaagcttacggatttggcactcgtcaaggcccgtctatgcttcctactatggataaaggtcaagctgcaaagattcaggagcaggagaaaatgctacgagatgctgtaaatgacggtaaaggtaagagggttttagaatttattgagtcatttgatagtgtacgaaactgcagttttctgttttgctgaattccttctcatgttcttttacaatggttgtttctaggaacacaactgcctccagaccagagacagataaccactgcacttccaccacatctggcagatgtgctaattatcaatgatgcaggtaacgattcattgatctgtctggtagagtaa

SEQ ID NO: 18635 - DNA, 977 bp, Arabidopsis thaliana
cgatatcatgctgtaatgttctctataaggtgatatcgaagattcttgcaaacagactcaaaatcattcttcccaagttcatctcttcaaatcaatctgcctttgtgaaagatagactattaatgaaaaatctcctcctagcaacagagattataaaggattaccacaaggaaacagtttctcctcgatgtgccatgaaaattgacatatcaaaagcttttgactcagtccaatgggggtttctcaccacaactctacaagctctagattttccggagtctacattaattggataaaggtatgcatctctacagcgtctttctcggtacaagtgaacggtgaactcgcaggctattttggtagtgagagaggattcagacagggctgctctcttagtccctattgttcgtcatatgcatgaatgttttgtccaagaaaatagacaaggctgcaagtgataaaagaatagactaccacccgaattgtaagacgttaaacttaactcacctctgttttgctgatgatttaatggtgtttgttgagggaaacaaaaaatccattgagaatactttagaagtgtttgaagactttgctattcactcggggctaaagataagtcttcaaaagtccaccttatatatggctggtttacaagagcaccagagagatgagatcctacaacaattccctttcgagtatggctctcttccagttcgctacttagggctcccgctttggttacaatgtcgacatgggtggagttctcattaccgacgattctcaggggactttactggttctctattgtaagacaatggcgctttctttctttatactgctgtgtaatcatttgcgactttactcattgtagaagtctatgtttttaaacttttcatcttaataagcagagggtcattctgaataatttttctttaattgtatggaagctctctgaatacgatttgtggatagtgaga

SEQ ID NO: 18636 - DNA, 1622 bp, Arabidopsis thaliana
caccaatcaccaccgtccaaaccctagtccaaacatcccatcctcacctggttcaacatgaccgagtcacaatcaaactaaacaccaaaccacacaacaacaacagtaacaacaatagcaatatgagctcaagaagcaacagcattgagagcacgtcctctaatccctctaagccacacacaggtggtgacattaggtgggatgctgtgaacacgttgacctccaaaggagtccagctcggtatcagcgatttccggcttcttaaacggctcggttatggagacattgggagtgtttacctagtcgagctcagaggaaccatcacctatttcgccatgaaagtgatggacaaggcttccttagctagcaggaacaagcttttgcgagctcaaacagagagagagatcttgtctcagcttgatcacccgttcttgcccactctatactcacactttgaaacagataagttttattgcttggtcatggagttttgtggcggtggtaatctctattccttgcgacagaagcaaccaaacaagtgtttcacagaagacgcggcaaggttagggaaatcaaatttactgcactaagtaacacaatagacaattatatttgtagaattcaactgacaatttttttttcatttgttcttacagattctttgcttctgaagtgctattggcattggagtacttgcacatgctaggaattgtataccgtgacttgaagccagaaaatgttctagtcagagatgacggacacattatgctctccgatttcgatttatccctccgatgctccgtcagtccaactctcgtcaaatcatcctctgttcatgcggccggcggcggaagcggaagtagtcgacctgtaggtctcatcgacgaggacgcggcggtgcaaggttgtatccaaccgtccacattcttcccacgcatcttgcagtcatccaagaagaatcgaaaggcgaaatcagatttcggactcttcgtcaacggatccatgccggaactcatggcagaccaacgaacgttaagtcaatgtcattcgttggaacacacgagtatttagcaccggagattatccgtggagaaggacatggaagcgccgtagattggtggacattcggaattttcatttacgagcttctctatggagcgacgccgtttaaaggacaaggaaaccgtgcaacgcttcacaacgtgataggacaagctttaagattccctgaggttcctcatgtgagctcggcggcgagagatctcatcaaaggattattagttaaagagccgcaaaaacgaatcgcttacaaacgtggagcgacggagattaagcagcatccgtttttcgaaggtgtgaattgggcgctaattcggagtgcaacgccgccgcatgtaccggaaccggtggatttttcgtgttacgcaagcaaggataaagagtctatggcggctgttgacggtggcggaaagaagaacaataacggtgctggaggtggttgcagtaccggcggtggtgatacaaacctaacggcgattgcaatgatcctgattacattgactttgaatacttttagcaactgactatataaatgactacaatcttcaaacaatttatgtata

SEQ ID NO: 18637 - DNA, 1373 bp, Arabidopsis thaliana
attcgtgtgaatgagttagatgggccattgatcattggtggtgactttaatactatcttacgggtggatgagagaacatgaggtaatgggcagttgtcttctgactctttggcatttggagagtggataaatgatctctctctgatagacatggggtttaaagggaatcgtttcacttggcgtagggggttggtggaaagtacctttgtggctaagcgtttagatcgggttctcttttgtgctcacgcaaggttgaagtggcaagaggctttggtttctcatcttccatttctctcttctgaccatgctcctttgtatcttcagctgtgtcctgctcagaatgtagatgcaagacgacgtccgttccgatttgaggcagcctggttgagtcatgagggttttaaggagttgttgacagcttcatgggatacgggtttgtccactccggtggccttaaataggttacgatggcagctaaagaaatggaacaaggaggtctttggcaatattcatgtgcgtaaggagaaagtggtgtcagatcttaaagcagtgcaggatttgttagaggtagtgcaaaccgatgacctgttaatgaaagaggacaccttgctgaaagagtttgatgtgttgttgcaccaggaggagacactgtggtttcaaaaatccagggaaaagcttcttgcgttaggagatagaaacacgactttttttcatacttctacggttattcggagacggaggaaccgaatagagatgttgaaagattcagaggatcgatgggttacagagaaagaggccttggagaagttagcgatggactattatagaaagttgtactctctagaggatgtaagtgtggtgagagggactttgcctacagagggatttccgaggctgactagagaggaaaagaataatttgaacaggccgtttacaagggatgaggtagtagtggcagttcgcagcatggggaggtttaaagcgcctggtccagatgggtatcaaccggtgttttatcagcagtgttgggaaacggtaggagaatctgtttccaagtttgtgatggagttctttgaatccggggttctgcctaagtcaacaaatgacgtgttgttggtgttgttggcgaaggtggctaaaccagagaggataacacaatttcggccggtgagcttatgtaatgtgttgttcaagataatcacgaagatgatggtgattagacttaagaatgttatttctaagcttattggacccgctcaagctagtttcattccgggcagactgagttttgataacatagtcgtggtacaagaagcagtccactctatgaggaggaagaaaggccggaaaggttggatgctgcttaagttgga

SEQ ID NO: 18638 - DNA, 1639 bp, Arabidopsis thaliana
tgaaatgtttcagttttctctatgagcaggtgaatgatactgttggagccttgtcgcttggatattatcacgatccagatacggttgttgcggttgtatttggaacaggtagtaatgcatgttacttggaaagaaccgatgccataatcaagtgtcagggtctgcttacaacttctggaagcatggtactaagaatcattgcatggtctatttttagaaaccagctttagacccaaaagaaacatgtttaagattgattccctcttatgtttcaggtggtaaatatggagtggggaaatttttggtcctctcatttgcctagaacttcgtatgacattgacttggatgcagagagttcaaatgcaaatgatatggtaatctttgccatacttccctgtttttccgatttggtattgcgttattagtttttaaccaattaacatcaacatcatttggggtttcttacatagggatttgagaagatgatatcaggaatgtatctgggtgacattgttcgtagagtaattctccgcatgtcagaagattctgatatctttggacccatctcgcccgtgttatctgagccttacgttctaaggtgcttatcctctttttatctcttgctagaaatttgattattttcttattggatgcttggtctgacatcatgtattttctgcatcaacttcttactgaacatggacactcttttatcttttgtatcaactatctagttagcattgtgtatttattttgttatcaaaacaacaactgtttctacttcaacctctcagaacaaattcagtctcagccatacatgaagatgacacacctgagttacaagaagtagcaagaatcttgaaagacataggggtaagtttaaaagcccactattattgaacttaaaggttgaaaatgttatgaaacttgtaacgaatgctgcacgatacaggtatcagatgtaccactgaaggtgagaaaactagtggtgaaaatatgcgatgtggttacacgaagagcagggaggcttgcagcagcaggaatagcaggaatcttgaagaagataggccgagatggaagcgggggaatcacgagcgggagaagcagaagtgaaatccaaatgcagaaaagaacagttgttgcggtagaaggaggtttgtacatgaattacaccatgtttagggaatacatggaagaagctctcgtagagatactaggagaagaagtgagtcaatacgtggtggttaaagccatggaagatggttctagcattggctctgctctcctcgttgcctctttacagtcatgaatcatcatcgtcgtcgttcgtattaaatggtgatataattggttatgttcgtccttgtgtgtgtatatagattattcaatatttgtttgttgttaattataattattattattctatatagcttttgtgtaaatgcttaggaaggttttatgtattctttgtttcttctattcgtatgatgtgtactggaaaataggtactgggtttttaagaaaatgatttacactgtcactatgtaaaggtgatgatgataaatggaatgtcaatttctgttctcttttcttccttcttctttttgttgctttttagtgtgcctaaaacaacaaaaga

SEQ ID NO: 18639 - DNA, 2111 bp, Arabidopsis thaliana
ttagtttgttttttcccttctttcaatattagatttcttcctcgtagttctaatactcgagcagatagtttagctaaaaaagcttggccttgaaacagtcttttctcccatgtaagcacatcggttcctgaatggctctctctagcggagagtctcttcccgataacttaatataaatggtgtttgtggaaaaataaaaaaacacccaaacctatcatctgccatatcacacgcttcaagactcacagagattcggctaaaggtttaaggttagcaacgatctcaacatcttatgacttcctaactatgatcccaactcaacttcccttggctcatctcaacttcattcatcttgatttaacgactcttcattataataatagccttcaatcttgacggttaactcaaaatcaacccttataaatagtttctagacgaaaactaaatcatgggaatgattcaaagaaaacagactatcagatttctcgatcatttcttgattatgcttgacgttcctcaatcagaattcttggatattgctcacgatcacaacaattcctccgtagcagcctttcagtgttttccctctcttccttttaaatgacacgggattaatcgagtgtttataggcatatttaccttgcgctccaaggtattagatattggcgagtgttgacacctcacgggacaactgtcaagcatggcgaacggtggcgacacatttctccgacgactttggctcaaagcaacaagaaatttggctccaactctctaaactttggctccaagtttctcagtcaacgacttggtcaagggtcgatgtttggtcaatggttgatcaaaggttgcggcttgtataatgtggtatggtcgttgtcgctcggattggtaatactttaatcatcgttcgcctgaatcactattatctcaccaaaccattgttcttttcaaaattctcccgatccaaactaattttgactcgtccaacttacttattatctatccttaatggtttttagattctttttaagttcatcttggtctcctcttgatcatcccttgtacggccatttacccttaagcaagggtcactacagtggatgtcaatgaatcacacatcaatgatcctccatatggttatctcctggaaacacattcatggtaatgatatcgatgtatatatgcagccactaatcaaagacttgaagcagttatgtgattatggaattaaaacgctagatgcttccacaaagcaaacatttaacatgcgagtagctatcatgtggataatgtttacgacatgaaaaaactgtttaattggtcatcgacgttttcttcctcgagatcatagctttcgtcaaaacatggtacatttcgacggaaaagtagaaacaagatctccgccagtaacattgacaggttctactattattcatcaactagaacaagttaatgttactcttggtaagaaaaatggtttagttggagttgggaaaaaaaagaaagcaacgtgatgcaggaagatgtggtacttattagtggaagaaaaaaagtattctctaaagttgtctttttgagtattctttcgtgagctaggtatacgttctgacttgtggcctgatgataatgagaaatatcaagcaacatatttttctttgaacaatcaagcgaaagacacttttttaagtgtcttccagaatgttaaactccggatgattatgcttctaatttatcaagttgtgttgatgtcaatggtcgaaagctatcatgcttaaaaagccacgattttcatgtaataatgagaaatctattttcacttgcgatttgaaatctgttaccaacaaacatgacatcaacaattgttgagctttgtcgtttttgagagatatatctgcaaaggtgcttgataccgatgagatagataaattacaatacattattttagtaactttatgtcgtatggaggttttttcctcaatcatttttcacggtgatggtgcatttagtagtacatctcaccgaagaggcaaaatacggtggaccgttccattttgttggatgtaccgaccgagaggtgaggttttccattttatgtttatatatatatatat

SEQ ID NO: 18640 - DNA, 2027 bp, Arabidopsis thaliana columbia
actcaaccctctaccctattcccctagagggaagcactagagcagtactcaaccagttattcattgccccagaggggaaccagaggattctattggcccataggggagcaacagagcagctactcgacaatttattcatatgcccagaggggaaccagaggagaagcagttattctattgccttagaggggaaccagaggaagcagcagacaatcactcgaccctctactcgacatttcactcgatcaaggcgaacggattctacctaacttgttgatcgatcaaagcgcattcagattctcctcatttccccactcaaccagacagctgggcataagaagagaagtggaagaagcaactactcgaccaattgatcactctgagcatcgaggcaacggtgtagtctttgtagcaccctgatacttgttccccaaggtcgagtattcatccaaaccgcctcaagtctcttgtcttctagtgaattgttttcgagattttagtataaatatgtcactttggggtttttccaaggaacaaatcatttattctgtagtttttctttgtgttttagaatcttgaaaccttaattactcttaatctatttcgtttatgcatttagttctttgagtaaagttgtttatcttgtttagatatacattttgatatgtttagagtaatttatgggtttgtgttctagattatgttgcttgagtagtgattagggttcttgagtatggattagataagggtaatctctaggttagtcaggtggttaagattaggttagatcccttctggattcgttggcccatatgcggttttcgttggctaatgtggaaattcgaccataggtatccagcgtccaaaagactatcaatggttgcatgatctacgaattccagatatttgtagactatagaccaagagattagctagactacttattgactttggtagattgttacttaaagcttgccttgctatgtttgatcatcgagagttgagattaggaagtggtagaggttatgaggatctctgtcacgagagtggattgatctggtttttgaatctatcgtctagggtatttgaatttcgtatgttagccacctgatgaaccctagagttgcccttatcaatgaatccatccttaggacttctattcctcttagatttatttgtattcaccccctgattgcacttttatttacctgttatttgtgtcatcttgctgagttaccttttattgcattttggttcttaaatttgtcacctgttggttctactccacccaatgatcgagtagggctcttaagttctcattttgttgtttgaatcctgcctatgggatcgttacttgaaaccaaaccatccttattaatctcgctggacttagttgcttctatacacaatcttgattgctagtaataacagtggactagattgacaccccctatagctgcatcgacatgttagtgtttaaggggaattgaactgaacctcacattcagcaaaataagtaggcctaagaacctacttatcaaataatcggtggtgttccgtgaaattcactatgcctagagctaagattcccgttgaagctgtgaaatcttatacttaaacatacattattatcattagttcacctaagtatataaacccgagcccttctatgagcctacctgttttttcttaaatactaaggcttatctatgatagttttggtaacaagtacctatggtgggtatacctattatctaaaataaagttctaggtgatcaatctagaattagcattaagaacaatcaagatgaagaatcctacagatcaccgagctagggagcaacctactaaatcatctaaatccctgatgagaaaccctaaccctaacaagaaagctactcaaacatgatcatataacacaaatcatagtctgagtaagaaatcaatagtcaatatatcaagaaaaagagtaagaaagatcttgtctaaagggagtctccacaggggctatactcaatctgcggaag

SEQ ID NO: 18641 - DNA, 1186 bp, Arabidopsis thaliana
ttccccaaacaccttacgtgcactaaacaaatccttacatttaccataaaaatcaacaaaacttgtacccacaacaacatctttatcaaacccaattctcaaaactaacccatgaaccgatgaaccaacacgaacctgtccattgttagaacaaactttcataaccaaaggaaaagtatactcatcaggtctagctaaacctgttctcatcatccgcattagaatcgaaacagtctcaaagaagagaaacttattcgagtaccctttaatcaaatgattccagagataagttccaggagaaggaacacgttcaaaaacagaggaagagtaagagagagacgaagaagacgaagaagacgaagagatgaagattgagatgagattctggtcttgttcaagacctttgcggatgattcgggcatggatttgattaagatgaatctcggatttgcagagcttgaagagggtttcgagtgagagcaaagaaggatgagataatctctggatcattcgggatcaaatggggctattaggaaacatatgtttgtatgtaaatttgtatgcttttgtcataacatgaatcttggtggattctaatttgttaaagttttcgatgagaatcgattttttgtagaagaattttgtaaaagatgaaaccttggagaagggtttaagggtttacagatggcagcttgaggtttttattgggttttcaaaattgattgttaattttgtaaattcgagattgtttatttaggaattgacaaataccatttctctgtttgaaactgtaacacccaatttcaaaaatataatggtgcatgcggaaaggtttaaaagaattgatttaaccacctatatcatcaaagtgcacatatcttttcagttaaacatcccgatagaatttcagaattaaatgtgtttgggcttgagtagttcaagatgggtgaacttccggaaaacaattgtcggaaccatgcgagtgaacccaaagtatggggaaagatcatgtggtgatttgtagttttggtaacaagtctttaaagcctcttggacatgacgcatcgaccgtcagacagaggtggtgcccataagcccgaaagagaacgtggggcccactggtaggggcggtcgtgacgttacagaaatttttagttatcgaggggtttttagtgtagcggatcct

SEQ ID NO: 18642 - DNA, 1736 bp, Arabidopsis thaliana
atctccgaatcacaaaccttgagagagattcttcctctcttcacatcaaacctagcgccacgtgttggtaggaatgctcttccaaggataaggggatccttgggttccttgggttccttctcgtagtctaggaccacaatatcagcacggataacagagttacaaaccttaacaggaacatcttcaaggattcctttaaggaatcgcttggaacgatcagtgaagagaagagtgatgcgagtaggcctgtagtgagtcatgcctagtctctcagcagcagatttaaaggcatgaggttgatgcttgatcccaggtcacacaaagagaggctgaatctgcttgtggagatagagcaatcaaggacaaagctacctggatctggaagcttctcagtggtctgaccaggagtaatggtgcgaatgtactcagctatgtctactctctgtgccttttccttcttggccttagttagcatgattgcactaatgtctctggtaatcagcttagcttcatttgagctaattcctttgtcaacaagtcgcttgacatacctgttgagtgaggtagaagatgtctcagaagcatccttaggaagagtatggaggatcttctccattatggttgtgcacttagcagcatgaatctcttgcttagaccgacgcctcctcggatacgggacagaaggagtgtagacagactcgggctgcatatgtacttgcacctcacaaggtacagtgtagatccaatgtcgatctacactggatgggtatcgatcgacaccgtcgtattgagtcgtctttgagaaaagggtcacgtatggtgtcgatcgacactggagggtgtcggtcgacaccatctctgcaactgcaagctccaactcgtcttcaatgtccaattcctcccacacatcatttccttctctgatcaagatggcattgcagctctttcttgggttagcgtcgggattaccaggaagaaaaccctcttgtctcttgataggttgtgcagtttgagctacctgtacatctagcttcttcaagtgagagctcagattgtcgatcttcccattaagatctgtgtagacagcatcaaacttgccattaaactccacaacaagctttgtttggctctccagaatctgctcaagcatcgattccattcttgtctctgttgagggtggaggggggggggggcttggtaagttgaatttctataggtcctctgaaagttgttttgaggaaaagtcctctggaaagcaggctttggagtgtagttggaggaaccctggttccctgtaaacctgttaccactgaagttgccctgtggctgcccaaacttcctgtatccctgaccatctatgtaaaaaactctttcctctgactcaggctcaatagtctcttcttcagctgcaaagtggacatgcttcttccctgtgagcaagttatgaactgaatccagcttagcattcacctctgccatctaatttcctgaaatagctccagcaatcttcttcctctcaaaatcagcattcttggtgttgttgctgcaagcaaggttctctatcagggctgtagcatcagctgggtaacgtgtgttgaagttaccatttcttgctgcatctagagccatctggtatctccaatcaactcctctgaagaaggtgcctagaagttgtcctcactgaaaccacgatgtgggaactcgttggtacccttgaaacgaccaagcaccttgaa

SEQ ID NO: 18643 - DNA, 877 bp, Arabidopsis thaliana
actgatcaacatattacatcgcttgttgtgttacccatcttgtgaaaccaaagattaattcccataccagcaacgcagcaattttaaaaccttctaagaaactctcgatcaattcatctttctctcggctcaacgtcgttttgacacatacatctccacatccacaaaaaaataataaggaccgtatgcgagtgacctaagatcatctcagcctcatctaaacttaattcagttttttattatcaatttcacgaaactgcaaatgtaatcgaaccaaacacattatgaaacatatgttgtgtattgtactattcatattcatttatcacattacaatcatcaaccaaaccaaaaacacaaacataacaacaagggacaagaagaacaaacattgatccatacctaaagtttcataattcgaacatcaaaaacatattttttaattatcataagtacgacactcatcagtctcaggattatcattgcaatactcttccaaaggatcggagccaccagctttcttcttgtccctagcatgactcgccgccgcactcagctcctccacctcgtcccaagccgctacacactccccgctcaccggatcatcagcgcatgtctccttagcttcttgtatactcttctccaccttctccgatatctctccttccgatgtagccttaaccacaaccatccgcttcatcgaaccgaatttccacgggtaattcaaccggaccggacctaatacacgagccacaggtcgaacgaccactcgtggagtcgcgacgttgaggccagctgcagctatggttgtcatcgtcggaggattttgatggaggagaaaagttttttgatgtgaagagatgaagaagataaaata

SEQ ID NO: 18644 - DNA, 2003 bp, Arabidopsis thaliana
taacttaaaggaccactctaaaaaagataaaaccactaaatacacaagaatatctaaaaactgcctgtaggaaacctcaacctgtccgctcgtatgtagatggtagggagtagcaacttgatgttgaactccatactgaataagcaattttgcaagaatcttgttatttaaatgcttacccctgttactgataacaatgcctgacactcgaagacgagggaagatgatagacttaaaaagttttatgacaactgttaaatcattctttgggctagctatagcctctactcacttggagacataatcgacagctactaggatgtagagactcttgttggaaggtgggaagggtcccatgaaatctataccccaacaatcgaagacttccacttcgaggataaatttctaaggcatctcagtacgcttgctgatctttccccttctctgaaaaggatcacactgcgatatgaacttctgagcatcccgaaacattgtaagccaccaaaagcctgcttgaagaactttggatactgtcttgaaggttgcaaaatgaccatcatagctagagctgtgacaatgcgataatatatgaggaacctctgttgcagcaatgcatctcctataaactccatcagaacaatgcttataaagataaggtttatcccaataatatcgcctaatctctcttaggaatctcttcttgtagtaatctgtgaaattataggttccacatatgcagctaggtaattaacaacaacagcataccatgggtagtccttctcgaccgctgtgacggcgcaattctcagttggtgaccaattttttgttgattcagaagggtgtcgatcgacagttccagtgtcgatcaacaccatcgcgcaactacgaatgtcaacttcctctgaaatgtgagtgtcgatcgacatagaaggggtgtcgatcgacactgaaactcgattctgcaactcatcacatttgtagtcatcttcttcaactgtatctatcatgtatatgttctcttcaggtaagaaatcgttaatagggacatcatcatcgatcctaatgcgtgacaaatgatgtgctacaccattctcaactcctttcttttctctaacctcgatgtcaaattcctgaagtagcaaaatccatctgaaaagtcttggcttagcatccttcttttgcatcaaatacttcacggcagcatgatctgtgtacaatacccttggatccaacgagataagatctgaatttctcgaaagcaaacaccacagctaacaactccttctctgtagtttcataattcctttgagcatcatcaagagttctacttgcatagtagatggcatgaagtttcttatccttcctttgtcctagaacaactccaactgcaaaatcactcgcatcacacattacctcaaaaggtagatcccaatctggtggctgaacaattggtgcagctgatcaaggcttgtcttatctgttgaaatgcatcatgacactcttgcgtaaactcgaatttgatgaatctcatgtagaaaccaacatggccaaggaaactcctcactgctttaacattatcaagcgcttgaagacttgtcataacttcaatcttagctctatcaacttctatagcatgctcagaaatcctgtgtccgagaactatcccatcctgcaccataaagtgacctttcttccaattcaaaactaaaggtttctcctcacatcttgctaacactctatagagattctctaagcaatcctcaaatgatgatcgacaaactgaaaaattatccatgaaaacttccatgatatcctcaatcatgtctgtgaagatgataagaaggtttttttggtctgcttatatgctgaatgctgtgtgagttcagttcaattcccctaaaatacaaacatgtcgatgcagttatagggggtgtcaatccagtccattgtattgttagcaatcaagatgtgtacagaaactactaagtcaagccagattataa

SEQ ID NO: 18645 - DNA, 1539 bp, Arabidopsis thaliana
cagttctggcattggagaagaactttgatagaaaagcctttttgcaatcatcccaggtggtgattgagtcatggggcagattcttctcccacatgtgtgctttgtcgcccaaggagaaaggaaacaaacgaagcttgaatccgtcttcactaacaccattgatcttcgttaggttgtagagcctattgaattcatcaaggtggtcgagtggatcctccattggcagaccatggaatttgttcccctgaatcatcgagatgagaccactcttaatctcgaagttgttgttctggatagcaggaggtgcaattcccttcctctgacggtgatcacgtggtgcatctccaacaccaatgttggcagggccattttgttgattctgttcttcagccatttggagtggttgctgaggtacagggttgactgtggttctcctttttctgagttcgcgagctgtgcggttgatgttgttgttgaaaaggaggttctggttgcctgttgatcgagttcgcatagagcagaggtgtacctggatcaagaagacaacaagaaaaacacacagttagtaactgaaaagaaaattgaaaaagaaattgatctaagcaagtctgaaatctcaaatgtaacaaacaaacacccaattggcaacgacgccaaattgataataggttttaagatcaattaatcctaaagcactatcatgtcattgtagtactgaaggttgtcaatccaaatgggtgtgatgctaacaatcaagatgtgatcagaagtcactaagtcaagccaagcaataacaggttttggtgcgttctagcagtcctaagtgaacatgcagaaaacagaaaatcgaagcagaaacaaataaacactcgaccaacacagctcgttgcctagcattgggtgtggtcgagtgacaggtcgagtaacagacagaaaatgtaacagggatactgtgagagtcgaaattcacacaatagaaattgtactaagggtttcttcaaagaacggacttttgtgagattctcaaagaacaacagagttgttggttaccgcggacagtgttcttgattatattattgagataatgatgatttgatcgtacaagtgtttagagatatgaaatataagtgttttgccttcaaaatcagagcgtttttgatagcctgaagttgagagcgttttagtgcgtatcctctttttgtttgtccttagaggtgctttatatagggctttggcagatcgcttctcacgatattctcggaagatttctgtttatcttagagtcggcgaaggagattgtctttatcttccgaagattgtgggagcttctatattcgataatatcctcggagattctctaatatctttttcgagcttttcggaaatggtatgtcgatcttgtattgattaagtcctttcttcgggtgaaggttttctgacccgatccgaagtttcttccgagccgggttgagctgaccctcagatcatggttgagcggctcggatcgcaataggcgaatgatgcgtcccgaggtatctt

SEQ ID NO: 18646 - DNA, 1579 bp, Arabidopsis thaliana columbia
catcggcccggagtacgcgtcttgaaacgactcccgagccaaatatacccgacagatgtttccgaggcgttcttggagtttgtttagttggctcggttcctacgagaccaaatccgaccccaacagtttgccccccagctcgttgtcttcgtttacgagcgacgagtttcgtgcggttaaataaccgagccggcagtatatcttttcagttcacgatccttggcgcttcgacttcccggacggtcaaacttccattcatgcgtggccgccttctttcttgagaagtggaagcgtcttgcttattcccgaggtttgcgcgcgtgttttctcctaccgagctcacgcgctgttgaagtgttttaatttctccgtcagacccgacgcgcctttatgtctctatatatatcgagctgctcctcaggattcatttatctgaagttgccgaagaaaatttttgaggtttgcttctttttctctgatcttgatttctttgcatcgtttttctttttccggtagtcttccgacgttgtttgttagtattttgattttttcggctagaaatcttccaaatccttgtttcgttagttgattccgagccgaagatgaattttccacgaaacagcgtatctctcttggtttccagtgggctcgccgactctagcgattccaatcatagagatgatcttccccggatttacaagcgtcggatggtttggacttcatccgagggctccgaagctgatgcagcttcgtcttcgaacgcatccgaggcgactccctttgtggctcgggaggacgctactgctgatattgctcgcaaattagatttgcctgaggattctgagccgtcccttgttcgtaagctccgtgtcccagctgttgatgagaccagtgcttcgaattgccaggacgtgacctagccattttatcccgaagttaaaatcgaagagcatctgtttttcgggcctgatgagacggagaaccttgttcgagcgttcgagcaaaccgctttttgagaaagccgagagaaagaagaggaagaaaaacaaaaaggtggttcagtcaaaccctcgaggctcaactttatccaccgagcagtcgttgtttgacttaagggctcggttcggttttggcaacgtcacccttcgcgttcctagcccaaatgaacgagccgacgatcctcccgagggctttcttactctgtatgaaggatttttctacctttcttttctctggttgcctgttccgaggttgattttggactacgtgacctcgtatcaaattgccctctcacaaattactgcccgatcgcttagacatctcatcgggaacgcttgctcacctctgaaattatttggaaattcggcgagttccaaaatccgaggcggatagatactacgtttctccggctaagaacatgaagattatcgagggttttccgagcaaggatgatgcctacactgattacttcttctttgtggctctggaagacgctttccttgaagatctcgtcgggaaagttctgacgaaatggggaattttgggtagtttagatattccgtgaattgacttgtttgtg

SEQ ID NO: 18647 - DNA, 1047 bp, Arabidopsis thaliana
tattactgttttcttgatggctatagaggtttctttcaaattgcaattcgccctaatgataaaaaaaaaaccactttcacctgtccctatggaacctttgcttataagagaatgccttttggtttatgtaatgctcctgggactttccagagaagcatgacttcgatattctcggattttattgaggagataatggaggtattcgtggacgatttttcagtctatagatcctctttctcctcatgtttgttaaacttgtgcagggttctagaaatgtgtgaggaaaccaatttggtactcaactgggagaagtgtcacttcatcgttcaggaaggaattgtgctagggcataagatttctggtaaaggaattgaagttgacaaggcaaaaatcgatgtcatgattcagctgcaaccccctaagacagttaaggatatcaggagcttcctcggccatgcaggattttacaggaggttcataaaagatttttcaaagactgctcgacccctaaatagactgctgtgcaaggaaactgagttcaactttgatgaagattgtctcaaagctttccatttgataaaggaagcattggtgtccgcccctatcgttcgagcacccaactgggaccacccatttgaaatcatatgtgacgcatccgattatgcagttggagctgtcctaggccaaaggattgatggcaaacttcacgtcatctactacgcgagtagaacgatggacgaagttcaaacaagatatgcaaccacagaaaaggagctattagctgttgttttcgcctttgagaaatttagaagttatttggttggttccaaagtgaaggtctacacagaccatgcaacactaaggcacatctatgccaagaaggaaaccaagccaagacttctaaggtggatattgttgcttcaagagtttgacatgtaaatcattgacaagaaaggtgttgagaatggagttgcagaccatctctccaggatgagaattgaagattcggtcccgatagacgacactatgcctgaagaacagcttatg

SEQ ID NO: 18648 - DNA, 1412 bp, Arabidopsis thaliana
gtggtgggacatttgatgtatctgttttggagatttctaatggggtattcgaggtaattatctcccatgtgatcttatgtttgtcaggtcttctgttgctttttctttgagaatcgttcttattattaaattgcttttttcaggtgaaagccaccaatggtgataccttcttgggaggtgaggatttcgacaatgctctgctagacttcttggttaatgagttcaagaccactgagggaatagacctagccaaagacagacttgctctgcagaggcttagagaagccgctgagaaagcgaagattgaactgtcatctacttctcaaactgaaattaatctcccatttatcacagccgatgcatctggagcaaagcatttcaacatcaccctaacaaggtcaaggtttgaaactcttgtgaatcacttgattgagaggacccgcgatccttgcaagaactgtctcaaggatgctggtataagtgctaaggaagttgatgaggttcttctagttggaggaatgacgcgtgtccccaaggttcagtctattgttgcggagatctttggaaagagtccaagcaaaggtgtcaatcctgatgaggctgttgctatgggagctgcacttcaaggtggtatcctccgcggtgatgtcaaagaattgttgcttctggatgtcacacctctatcgctcggtattgaaacacttggtggtgtctttacgagactgatcacccgaaatacaaccatccccacaaagaagagtcaggtatgcccgtcaagatttgatcttttgatggaaaatcacttagtaactaggaaggaatcctgacgattacattggcgttaggcaaaactagggtagtatgaggcatgcgttatagtttgagttactcctcttggcattgattcctacatgattccaatcttttattttaaggggtcatgaaagcacattcctgtgatatatactaatttatgagccatccaaagctaccattgtttttgtcaagtttttactaaaatgttgattgtctcgtttcattctcttgaaggtgttctcaactgcagccgataatcagactcaagttgggatcagggtgcttcaaggtgagcgtgaaatggcaacagacaacaagctcttgggagaatttgatctagttggcattccaccatctccaagaggagtccctcagatcgaagtgacatttgacattgatgccaatggcattgtcactgtttccgccaaggacaagacgactggtaaagtacaacagatcacaatccgatcctctggtgggctctcagaggatgatatccagaagatggtgagagaagcagagttgcatgctcagaaagacaaagaaagaaaagaattgatcgacaccaagaacacagctgacacaacaatttacag

SEQ ID NO: 18649 - DNA, 696 bp, Arabidopsis thaliana
gtataaccaaagccactgatcacgtttttatacagtacataccattacaagcttactgtcaagaccaacagcatcagctagaactttaaagaggattgctcgtgcacgacaagaaccatgcttgatttgtcctagcagggtaaacccttgaacgtcaaaatattgcagcgttcttgccggactctgcagagtttttcttttatatatatttgccacctgccataagaaggaaaaatccaattcagatttcccgataatctaaaagaatataatgaggttgctgaaataatgtgatgtgccttaagagtctaataaatgggattacagttatttgttttcttattcagaaccaaatatttattgcatgcagcgataagataaagtaacaaaatgacatgcattgtcgccaaagttagttcactagaaaatgagatgataaaaagatgctcgcccattcttaccagtccagcaattttcttaataactttatcggagtccaatcctgtgacaagtttgatgacaaactcctttatcaaaacaagctgtatatcgttcttaagatctacaaaaatcgcatcagccttaagacgatctcccccagcgcattaatttcttccaatgtaggaatgcttttaaaatgcatcaatctctcaacctgttgaaaaattcaacaacataataagataagaaaatgat

SEQ ID NO: 18650 - DNA, 745 bp, Arabidopsis thaliana
attcttatcacgagaaaaatgctataatatgtctttaatagctttttcatgaacgctattttagggcactgttattataagtaccccacattcagtagcgtgagttcagtatgctatgttatagttttataacatagctataaagaacagttgtattatcacgtttaattttcttaaaaaaattatataatatttgactttttgtgctatgttatatatctctaatatagctgttgcgaaatgttgttttatcgtggtttgccttttttcaattggaaaataattagtcaaattatgtgctatgttatgctcttatatcaatttataagctacgaaagatgattaaaacatagcattagtgatatgttaaatattctattacctgtattcttatagcatttgctgagatgtgattatagtacacatgacacataacctgctttataaaatctcatacgattgacctttgattaaacataagtttagatccacgatacaccagataagtctcgaagcacaaagtaaagcaatacaggagctcagtgcatgggttcaggtacttagcattacacaagagaaccatcagtttaagacataatgaccttgttctctagctaagcactgcaggagctaagtgcatcttccataatcgctatctcatctgatggcctccaaacttttacattggccaactccacaatagctatccacactttaactgcattagaacctaagggagtgtggt

SEQ ID NO: 18651 - DNA, 629 bp, Arabidopsis thaliana
taattgagagtaaccttctcattcttgaagcatgtacgaatgtttccgagctccttatcaactcgtagtctctccgcttccttgttctgacaattacgaacgtcgctgataaatacggagagacctctcattccggtcatggtggaacagagtcctcagatccaccgtcctccaccgcctcacacggcgcagatccgaactcgcgaaaccggatctaactatgacagaaagcgcagaccacagctgaaggattagcaattcgcgagactgagatcgaaaccctaatctagaaacggaaaatgacacctccaatggacgaaattcaaaaaggagagagtgatctttggagaagagagagacaagcctgcgggaagagacgagggacgacttttattatttacaactttgactattcaattttgtgttattcagtttcgtctgttttgatttttgaacacatgcgaatttggaaaattcgaaattgactcgtccaaaaacagaattcacgagtttacaaaaaaaaacaaaaattaaaacgagctaaacagacgaatttaagattacaagttcgagaaatcaaaaaataaacgagtaattcgaaaataacatggaataactaattttatata

SEQ ID NO: 18652 - DNA, 890 bp, Arabidopsis thaliana columbia
taaacctaaagatctcttaagcttaattttgcaagatcatggaccaaagcaattctcttcttagctggacttacttctctcatggaaaggtagagactttttttatctctaacattttggcttcctctgtttttcttaacatttgtgatgggttcactattctgcttagatctatgcataatgtgtgtctaaaaaacataaatttcttgtgtcttcttcttcgtttatgttataaacccctaagtttgactcaatttctgatttttatatcaaatttgttgaaatcacttatactctgtttctgagcttaattttgcttaatgggtgttcttaatcttaaaattttagtttaaatttcacattttgtatgtaaattagctggaaaagacaagactttggggacatttgttctgtttgaccaaaaaccctaattttgatatgaatgctcaaatttaggggtttctctgtttctttgtatgttactgggggatttgttgtgtgtttatgaccaaaaccctaattttgttatgaatctgcaaagaaatgctcaatggtttctcagtgtctagctgattgtttttgtgttttttgtacctgttgaattgttcagacaacggaagagctaagacagactctcgtgtacacaacaatggagttagaacaaacaaagcttgtggctcacgaggagctaaggaagagagatgaacaactgatccacctagaagatgttttaaccaaaaccctcaaagaaagagacgaagctctagagaaatataatcatctcctcttaaataatctcttacttcaacagaagcagcaacagaatcagaatcagaaacaagaacttgtcactcctcctttatcaggagcttcaagtatgattgaagacg

SEQ ID NO: 18653 - DNA, 1635 bp, Arabidopsis thaliana columbia
aaagtcatagtcgtgatctgttcgtcaccttcatatgttagctcatcaaattcatagacgtagccgtcttttaataatagcatccacgtgaaggggtaaacagatctctctccaacgatttttggtttttatttgattatctttgatctgtttttatttttcctctataggttgaaactactaaacccacgttgagttcatgaactctaatatattttttcctcttagatggagcctctcgtcgtcagcattattgatcttaagcttcattaaatttctatctcaattcagcactattattgtgtggttagagttatcgatcaaatctaagtggagaactcgtcacaagcagtaacgtcccgccataatcatcatctaagatctttgattctttatctgaaccatccactctgtaacatgttataagtcagacttgaataagctcctagaagaatgcacatcaatgcatttttgtgcatcaataaacacacataactatcataaacttagaaaatttgccttaggttgaagttttgtgagctagtactcaagtcaaaccaagcaagattatatcaaatctaattctcaatgcagattcacagaaatttcactccaaggacatgaaaactagtcacgaaaaggaaatgatcgatgttataagtatctcaagagcttgtttgtaacgccgagttcactcatttggaaatgagatgatgactttatacatgtataagaaaaatattttatatttccgacagatttgcgagggtaaaagtttcacagttggaaaagcatcgggcaccaaactttaccctccaaaacaaaaaaattatgcggcaattgatttttttttccaaatcagttttacgcttatttttttcaaaactcaattttcctttcatttctctcacatctcaactctccctcaatctctttgaaatctctctcaacctctccaccgtctccttctatctctttgaaatctctctcaatctacaagaaaacaggcgatttgcgaaggaaatttgagatggcataaatccctcgcaaattgctatagacttgcgagcactttgtgccggaaaaccaatacgtcgttaatcagtcgcaaaatttgcgagggagaattcccacacaatattgcgtggcaaatgcgagaaaattgcaacgaccgaagaattcctcgcaaagtcatcgcaaattgcgagggatttgctgtacgataagagcctcgcaaactgcggtaaacttgcggcgtacaaactttctatagcaaattttgcgtcggagttgcgagtcccttgcaggttacgtcagcacgttttaaataatcttcctggtttggttggtagttgaacttctctcgcaaattcgtagcaaaatagcgctgttcctcgcaacttcctcgcaaatccctcgcaatatgttttcggacatctataaataaccaacgtaacatgtacaaaatcttcatgttcaaaatacaacaggacacacctcgtcagaaccacctaagctaagagatacattctataccccaaaatctaacataaacatatttaaaaaaaacttacatgttttcagaaattgtagagagaagtaagaagaattgcaaaataattgagagagtggaag

SEQ ID NO: 18654 - DNA, 1156 bp, Arabidopsis thaliana
cataaatgacctccctactaacactgagtctagctcgttagggaggtcatctttgttttgcttaactcagttttttatacgaagagtaaaccgagctcagctcgtaattcggaaaataaactagctaattcaattaaaataaacggtcccagtgacctccaaaatcaagtacttaaaaacaaaaaggcctccgtgcccaacgtaaagttaagtacttcgaacaaaaggccttcgtggccaaataaagcaaattcgagttttaaaagaaaacaagtgggggtccacttcggtccaaaacaaccccattattccgcctgctcggactctttttcaacatcgaccgggaacatagccacgattccagcctccgaggtcgaacccttgttggaacccctttcgttgatgctatcgcttcatcttgagtagcgttttccgcagtcatctccgggggagtgtcagctaggagcaaggtaagctcaacagggtcaggtcggggagtcttctgttcggcagctcgttgcacgaactttgcttcgtcagcacgaaccgactcaagctccacatcgatgtcggggatttcccccttctgaatctcctcgagcaattcccggtttgctctggtctctgtacgcggacctttagcgttttaacctcttcggactgccggaagaagttcccatacttcgatgagaactcgtgaaatcgagctttgaccttcttcctttcttccttcctggcgacgtcaattttcccggcctgctcctcttcaagtttccttagcttctcctcgcaaacgttgagttcagctcaggcctggttctcgttgtcggctgcagcaagataggcatttttacctacctctagtttcgccatgaggtcaatgttgttcacctcgagttcctggatccggggttcaacgtctttcatacgcttcaacactctgctggccctctccaccgtatgagcgttctcgtcttcacttcgcctgaagttgtcgagttcgctatctttgtcagaaagctgatcttcatgactgtagaagacggagttgaattccaggattagctgcaaaatcaaagggtgatattagtctcggttttacgtcggatttccttgtaaaccagatgaagcttttaccttgccgagtttcccagcg

SEQ ID NO: 18655 - DNA, 1220 bp, Arabidopsis thaliana
ttctccggctactccatcttctccggtcactccgtcttctccggttactccgtcttctccggttagtccgtcttctccggttactccgtcttctccggtcactcctctatcttcaactacaacctcagctgcgatagacaccattgaggatattaccactgatcttgaggattcaacctctatggatttttttcctgatgatgaagatgagttttctcccactgctacagaatctcctgcttcatcgtcatctcctgtacaccctccagcagttcaactagagcttctcggtaaaggtcatcgtccaaagagacctcctgttaaacttgctgactacgtcacgactcttcttcatcaaccattcccttccgcgactccgtatcctttggacaactacatctctagttcacgtttctcagataattatcaagcatatattctcgctattacatctggaaatgagcctcgaaactataacgaagctatgcttgatgatcattggaagggtgcggtttcacatgaaattggttcgcttgaaaatcttggtacttggacagtcgaagacttgcctccagggaagaaagctcttggttgtaaatgggtgtttcgtctaaaatacaaatctgacggcacacttgaacgacacaaagcacgtttggttgttcttggtaacaatcaaaccgaaggtcttgattacacagaaacttttgctccggttgcgaaaatggtcacagtccgcgcttttcttcagcaagttgtttcacttgactgggaggttcatcaaatggatgttcacaacgcgtttctccatggtgatcttgacgaagaggtatacatgcaatttcctccgggatttcgtactggtgacaagacaaaagtatgtcgtttacgcaaatctttgtatggtctcaaacaagctcctcgttgttggttcgcaaagctcacatcggcattgaagaactacggttttattcaagatatttcagattactctttgtttatctttcacaaaaacggagttcgacttcatgttttagtatacgtggacgatttgatcatcacgggtactactattgctgtgattacagagtttaaacattacttaagctcttgtttctatatgaaggatcttggaattttgcggtacttcttgggaattgaggttgctcggagtcctgaaggtatctacttatgccaacgaaagtacgcacttgacatta

SEQ ID NO: 18656 - DNA, 1504 bp, Arabidopsis thaliana
tcacccaccaatagggaccgcgagctgggcctagaccgtcgtgagcaggttagttgtaggaagacctgatagtagaggtgtcagacgggccggcccgcgcccatctagcccgccccgcagtggctttcttttttcgggctgcggcgggttggcccgtttaggaccgcagacaaaattatcagtgtccaagcccggcccgcaaagcccagcagatatacgggtcggcccgcgggcatttctctgctacgcatcaaggattcttgagctgtggcattgtctgtacaaggcaatatctcgtccatagccgtattgcttgatggtctctcaacccattcgctcattgccacacatgtgtctgcagtacaaatcgaagaaactgcagcaaaagaaatgataacaagcatgacgattgaaactacgataagcgccactctcctgcgagtacagaaatgactattatacatttgtttttcaaaatccaaagattctgtaacagatagactgttaggaggagtttgtacacagaatccaggaaatgtcttatgtgattggagttactagtcgatttctcagtgatagtagctacagaaaaatccagtttcgctccgatctgatcaatttcagtttgtacatttgcaggtaaaagaacctgaagaactgcagcctgcttggctgaagcaaaataatctgagatagctctaagctgcgaaatcgtgctatcagaaccttaacttaaactcaaatccaaaatatcccaaaaggaacaatgtcgtgtctcatcttgcaactcatttgtaaaccttaatctgaacttaaactcatattcaaaccttaattgtaacaagttaaactcaaatgtgaaacaaaaaatgaacttaagtcaagagaaagacctgcaacttcttaaacgcaaacatgataactgaaacatgaactaaaactcaaatccaaacatgaatatcaaacttaaaataaaatctgcaactcaacatccatctgcatcatccacaagcgactggaaggaaggtagagtctcatcttcagcatcaaatttttcatactcctctacaaatatcatacaaactaacaatgttaattcatagactaagactgtgtgactataaaacttatgaaaacaacttacttaccattttcataagattcaaaaccttttaaccaattgcgattgcatattaatgcttgaacatttctcggtaaaagacgacttctatacttgcttagaactcgagttccgatgctaaacaatgattcggacgcaactgttgaaataggaatgcttagaatgtcacaagccatggaagccaattttccaaaccgtggaccgttatctttccaataattgagaatatctaacctctcaaacccttttacgttcattgccggttcatccaagtacatatccaacgtcgactttccattggcaacaacgtttgctttgcgaaaagcatagaaatcttataacaaagataagaaatcaaaataa

SEQ ID NO: 18657 - DNA, 1219 bp, Arabidopsis thaliana columbia
aagttggtactggtgtcgtacgaatctaaagatctccaaattgaagaacggactcttttgctcgccccggagcgtaacgacgtcactcgctaggggatgggattcattcacttgcattcctgctagcactacaaaaagctccggtcttaacgcccttactactgctgtgagactttcctcgggttctcagaatcgtcactttcctcaatcttcactaactcatactcactttccactgaagcagcatgccagaagtagtgaggctgctttcattccatctagggataggtcactctaagatcctcttttgaccttcgagaatatgttccttcaatgattcgatcttgcttctaggtgcaggtggagggggggggggcttggtaagaagcaagatcatagtttcttgtgaagctgaaactattgctattctgaagcggttgctagaattgagaattctgagtgtagctcgttggaccattcccataggaacctatgtagccttgttggtgatcaaatctctgattcggaaaatctctgctatgaacataatcgacatcctccacaagttgattgtggatcgcgttcagcttagccatgatcccagcaatcttactctcgttcatgtttctcgtttggtcctggttctgtgattagacaaacacctgaaacacacaagaaaaagaaaagagaaagactaagtaaataaaaagaaaaaataaaaaataaaagctacgacaaatttctaatcctaatctaatggtgaatcgtagagacttcggcaacggcgccaaattagatgtaggtcaaattgccttaagaccactctctcaaataagaaatcgattgtagtacttaagggtcaaattccacaaacctcttggatcacacaatagactatggttttagtcttcaaatttccttttgcaacataagttctctgttttcctccggaatgctccattatctccaaatgcattccaaacatgtaaagacctgaaaaagactagatagactctagaaataacaaatagactctaaaacctatacctgaatcatagctaaaaccggtaaaaatagggatatatcaattaaccttaaagaattcatttaagctctgacggtgatctaatacaataatgtaataattctaaaagtggtgatgtaatcattgaaaaaaaagaatttataagtctggtgttgttgaggtatgtctatctgg

SEQ ID NO: 18658 - DNA, 1584 bp, Arabidopsis thaliana
tcaaattccaagtatttcagttaatccaacgatgtgactgagttatactggtaatgttgtggctgagttaatccaacgcaatgactaagttattataatgttgtgtctgagttaagctattgatacaactgagttattataatgttgtggttgagttaatcaattgatatggctgagttatttttgagttacgcttgaattatgataaaatttaacaagtgacatcaagcgataacaactgattttattgagaaggcgatcgtagataataggagatataaaaccattaccaaaaaaaaaaaaagagtaaaatactgagttcataggaatgagataaagggaagacaagtaagagatacaaaagcattcaagacatgaaaccgacatcatctgggccaaattcagtaaacatgtccaccaaatcattccaaactgttgtcgtcatccacctcggcttatctaaaccacgcgcccatccccgtttcagcgcccgcatattgtcccggtacaacgttctagccaccaaattaaactgcgtccacaccgtcagcgtgtgccttgaatcccaggtgtgcacacgctacaaagagagcaaatagtaagaatttggtctacggtttacaggaagtgctttatataaaaactcgatgcttaccgtggggaggaaaaaccaccttgccttgaaaacaacaggaatcatccggtacgtcggccacgcatggtgaaagttgcgctggagtatatcaccaatcgcgacagctagttcgtgattgaatttgaaccacgtaacagtggttttgtcgacccatgtacccaatccagggtttagaactgggagatctgcacgatcaggagcggtgagcacggcttcaacatctcttagaaactgtccgtcgatatgaggcaccatgtcgttaagatgtgaggatgagacgtctaaatgatgagttcaagtaactgatttatagaaaagaaaagacaggtaaaggaatgcgagaggttcgtgtctgttcgtttggcgggaaaaatttccgtactacggctgagtttggcggcaaaatatattgttacggctgagttatacccaagatatataactattatacggctgagttgtcaagaaaaaaggacaggtaaaggaatgcgagaggttccgtgttttggcgggaaaatatttcagtactacggctgagtttggcggcaaaatatattgttacggctgagttatacccaagccatgtaactattatacggctgagttgtcaagaattattaaaaaggacaggtgaaggaatgcgagaggttccgtgttttggcgggaaaatatttccgtactacggctgagtttggcggcaaaatatattgttacggctgagttatacccaagacatgtaactattatacggctgagttgtcaagaattattaaaaatacaagtcaaggaatacgaaaggttgcgtgttacggctgagtttggtgataaatcgtccttgttacggctgattgaaatgacattacggctgagttgtgaattaaatgacatgaagttcgatacgatttactgactaaccgaggtacggttat

SEQ ID NO: 18659 - DNA, 1057 bp, Arabidopsis thaliana
tgcttaatgaaagcagtggagagttgcttaaagttatcgatcgaaccctcttctaactgggtgaaccaggtaagtgcgggacctgacaaactttctgagaatagcttgcagagccctgcatcttcttcatgtggctcaagcgggactcgacctgcgatgacctggaaaaaagtcagatattcttttggatctcccttgccgttgtaaccggggagtttgaaatctcggaaatcgcgaatacgaagctttgagattctcgaagtgaaaggtgtcctccttgttgcttcaataactttttccacttcgggggccgacgtggtagcctgatgaacctttgcgttcattgcccacatttgatcttgaaggttctgcagctccgagttgactgtgctcggctctggtcggggattagaattcgggagtctgatggcgggatccagtggagccggcgcccgagctattgtctcatctgagactgcagcaagacctgctgacggagattggatgactggattttgtgtcgatgttgctctgacgtcaaccggaggtgaaggagattgctgaccagaagcttcctgcgaattctggacgcttgggctcgcggcgcgctgaaagttgagtcgtgttcgaacacctgtagtccatgccgttcctgcagagaatcaacccgctcggcatatgcattgtgtgttgacctgatctcggaatggtttacagctaaagcggcgagctggccattgcaacgctcttggaaagatacgaacttatcggagagtgtcgttacggcgagctgctgtctgtcggttttctcggatagctgctgaagcagctgcttgatgttgtcgagggtggaggcttggccgccggaactctgatcgtcggtgttgctcatggtggattgatcgttgctctgaagtaaaagactttattcccctccttctagcgccaaattgtggatgtcggaatccgcaattagaatcttgtggttgtttttacgaggatctttagtcttgttaaacgaacaatgatcgaatcgagaagagaagaatgtgtttgt

SEQ ID NO: 18660 - DNA, 1664 bp, Arabidopsis thaliana
taacaaaagactctaaaaactatacctaattcatagctaaaagcagtgaaaatcgaggtatatcaactcccccagacttagtttttgcttgccctcaagcaaaacacaaaagccgaacccgtggaagaggtttgaaaacacagaaactcccaatctctctagcttattatcccgatcatacaaaccaaatccatgcactaaatagttctagtcaaatcttgaccactatgtaattctccgctagcccacacaatatcctagattccataccaaagcactcaactatatccattataaagatttagaaactgtaaattgtttcttgtatttactttgatgcatattaaatgtcttttataggctatagaagagatcatagaaaatcctaaattataatcaatgcataatcacaattgatcaatcgtatacagattgtatcaaaaacagagcaacttccttatatggttacgtgatcgtcgggatcatgacttggtccgccaactccgttgagtcgttaataccctcccgcaagttggatcgtgcaaatcttgtatgcccaacttgatacataaccgatcaaattcctgcttccccaacggcattgtaaagatatctgcaagttgtttttgactttgtacatgtaacaggcatatgtttttggatagtacttcgttgcgtacaaaataacaatcaacttcgacgtgcttggtgcgttcgtgaaagactgaatttgtcgctatatgaattgctgccttactatcacaccaaacagacattgactgattgtcagtatgaccatttggagaatttagcaacccattttaaacgagtacacattattgagcataactttagggctgtgcgaagttgactaatgactaatattgaaagaaacttcttacatgtgaattcacgagaagcatgtatgttgcggcctttatggataagttttcctaaaatgatagtatcaatcaactgaaattaaattgaaaaacataacagtaataaattaaggctcgagggatatcaagtttcacaattttcaagtatgtttgatatttattatttcaacatcagattgatgtttgataaggaaaacaaatgcacaaaaataataactaaaaaaaacagtaatctcaggggaaaagagagtcagagaaaaacgagaaacaaaaaggtaaggccaagtgtgagtctgatgtcaaaaaaaaaaaaaaaagaaggtaaggcctaatatgagtcactagaggccatagtcggcaatgatccgtccacgtcctcaaggagcgtcatttacgttgtaggaaggaattttagagcacctttagtcaattccaaaagcttatgccacttgaatttttggtttatatagttacaaaaaaatagtaggtatattaacagttttgtaacaaatatagatttgctacggataagcatcaaattgaaagatgtaactatgtccttgtcgcaaaaaaactatgtgtggcaaacggtaagaaatttgccacaaggttaccacaaaaaaacttgttataaaggcttacaaaaaacgactaaaaactcatggcaaatttgttacaaatagtgtggacaaacattgacactctttattaccacttaccacaaataactgaagcaaaatagtagcatttatcttcagaaac

SEQ ID NO: 18661 - DNA, 1059 bp, Arabidopsis thaliana
tgggtcatctgcagttgttcgttctgatggtgtaccgtcctctccgaaaagagctcggacccagacggaggtgaatcctgcggctgagttggtcgtgaacttcagggggtcgccactcccagagaggagaggatggaacctacggctgctattccggagcagctgcctccgcggataggcgatcctcgggcaggtcccatggcggaggacgaggctccaggggtgggggcaggtcttcaaaccggtctcaggaagtgaggcagacgtccaactccggcggaggatccgcgggaagaaggcctttccactggtcttacactcacgaccgtgatcacctgatcgttgaggacgaggctgggttggcgaacctgctttggcacatcaaagggaggaactgccaggttcctggagtgaagaacatggccgaggtggcggcctatgctgacatgatggcgaaggagggctaggtaatagtcgataattgtctccttctaattctattcttatgctagtcgtaactttctgttttgccttcggtaggcgatagctgccacaaacaagctggtcgctctctatgagcagcgtctgagctaggtcccctcggtgagtgagctcgaagaaggaaagaccctcaaccgggagctggcgttgagtgtgaaggctggtcaggatcgcgaagtctcgttccaggtacacctcggttttgacttgtttgtatataattcatcgatgattcgatgattctgacctaattgttatttcaggcagagatcgagaggctgaaaatggagttgtccacttcaaaagacctcgagaaaggttatgctgagaagatcgggctcatggagatggagatcggggggttgcaagccgacaagcagacggcgaggaagcagattcatcgcttggagcagaggagggaagagctctccaaagaggtgatggacctgacttcgactgcactaggggcaaagaaggcagttcatgatgctaaggttgagttggctgctgcgtattcgaagctgctggctgggatcaaggagaagtgggtcgcaaaaa

SEQ ID NO: 18662 - DNA, 2028 bp, Arabidopsis thaliana
aagaaggatgttatttttgtgttggtcaccggagtgcgaggagggtttcgttagcctgaaggagatgttgatgagtaaactagtgttagcattgccagagcatgggaagccttacatggtgtataccgatgcctcgagagtaggtttgggttgggttccgatgcagcgtggaaaggttattgcctatgcatcgcgacagttgaagaagcatgatttggacatggttgcggtgatctttgccttgaagatttgaaggtcttatctttatggcggaaaagtgcaggtgttcacggatcataagagtttgaaatatatcttcactcaaccagagctgaacctgaggcaaaggcgatggatggagctggtggctgattatgatctggagatagtcacatttccaccaacatactcgatcaccagtagcagagatggaagcagtcagctcagtagtccatccagacacttatactcgatcgcagaggagaggaggcagtccattttacagttctactcgatcgcagaggcgaccaagcagtcctactttgccagtccaccagttctactcgatcgtagaggagaagaactagtccatcctgacagctgacacacatactcggtcacagaggccaagaagcagccagaccattctgtcaacaaacctactcgaccaccacctcgaccctctgatcaatctgcactcaaccagacaacctgagcaacggaaagagaagagaaggcacattcaaagcccgttcgaagcccatcaggaagcccactttgagccgacactcttgatcacgtcgtccaagggtcgttaaatgggctggaagcccgctttcttatcttagtataaataagtgtttaagggtttcgccgtgagacatgcacttttgagacacgaattttgcactattattcaaaagccgcttttcattcgtgcaactttgtatttcgatttttcttctaagttatttagattttgctttcatttgcttgttcatctttgtttcattccctttaatatcttaagtatggaatcttcaatcgtttctatgttattgtcttaacgcatgttgtcagagtagtgattaggatttttgaggatgggatagagtagttgtagaacccctgttcgaatccgttggttaagtgtagatttactgcttattcctttctgatcaactggaatccgatcccccaacgctcaaaaggcatttaatggaacgttggatctactaattccagtgataatcgtctctatcccaagggcttggccgtttagagcggttattggctttaacagtcagtcttattgcctgctaagttagagatcgctaatgggaattaggtcagtgtctagctatgcttgaggatttctatcacgggaatgaattaatctgttgttgaacttgttgtctagggatagcttaattgagatttgataaccaactgaattgatcagggagaccacactattcgatttccccatccttaggaatttctcatccatttgatttctctgtttacttacctgcttcattcacttgctattgaattttagtatttttctgttttcaaccattctagtcgatcacaccagtctactaacagtgagactgtgtgatagagtaaactggtccatttctgcatttttactctctgtcatcctgttgtactcgatcacagggtcccttctggcagtcgaccctgcgatcgagtatatcagtcatttctttcatttttactgttctctacatcaacactaggactgttagaaaaccaaccaagttctgcctggcttgacttagcaacttctgctcatatctcatatgtctgcatcacacccattttgattgacacctaagatactacaacgacaggatagtgttttaggattaattgagtaaaaacctactatcaatgtcattatgtccttggtagattatttcgcgctgatacctgactctcacaagtacgggaaagacctgatcacagaaaggatcgctgaagtccacactggcggccgtt

SEQ ID NO: 18663 - DNA, 582 bp, Arabidopsis thaliana
aatgtcgaacgggaaggagtgcttgacagggtacataacacgtagaccagacaagaaaggactatggagaacaagtgctcggagacgtggaagacgagaagcaagctcaagcgacggtccacttccaacggattgtccatacaaaatgatacgttcatcttttgtaccgtaggtctgtcttagccaattgtaagctgcttctatgtctgcgtacgtatcttgctcgcttggctttcaaaattacgatccaaatcacacacaaatcatacactcaacaatgaatgtgatcttcttaattacaatatggagctgatagtatttttctttttgcattttgtggtttatatatgatacacgaatgtatataaaatggacgtgctaattagtcccaaaagaaaagaataaaaaagaagaagaaaacaagcgtgatttgaaataatcgacttaccttaccagaagattgcccatatcctgaataatcgtatctgcaattatcatcacacaaaaccatatattatttatctaaaaagaaaataatatttaaatgaaattctgtgtcttgcatttaaaaaaaaaaagaga

SEQ ID NO: 18664 - DNA, 543 bp, Arabidopsis thaliana
gtctttttttattcgtttgtggaaatagagttgtgcaaaattgggcatgaagagcagagtgattggtacttctttagccataaagacaagaagtatcccacagggactcgaaccaatagagcaacaaaagcagggttttggaaagccaccggaagagataaggctatctatttgaggcatagtctaattggcatgaggaaaacacttgtgttttacaagggaagagccccaaatggacaaaagtctgattggatcatgcacgaataccgcttagaaaccgatgaaaacggaactcctcaggtattaatataacaaccctaaaacattacttctctataaaagttagttgcatgtttatactaaacaatctcattatatgatagttgcatatatgatctcctaaaatctatttgaggtaatctcattaaatgatatttgggttgtaggaagtaggatgggttgtgtgtagggttttcaagaagagattggctgcagttagacgaatgggagattacgactcatccccttcacattggtacgatg

SEQ ID NO: 18665 - DNA, 1308 bp, Arabidopsis thaliana
  unsure (1)..(1308): unsure at all n locations
cctcaagtctctccttcaacttcaagttctcttcatttttaagctcaaaagatgactgccaaatattaaaagaataaaaaaccatcagctcaataaaatttgaattttggagtgtgtacttgaaattcaaaaaggagactttatatttaccttcctcttcttcaatctcttggagaaacaactggtgatttcgtttgtgggaaaaacctgcaaaacaaaaacgcatttgattagtcaactattaaatggctgaagataacgacaactgttttacttttataatcaatacccaagatcttattttaacataccggtaaaaagtttcttttcccacaacagaaatttcaaacaagtaagaaaaatatatcgaagaaaccaaatagagcataaaattaaaaaatctcaaatatataattgggaaagaatttttatagtgaggatttgatgccacatcatgattattccgtgtcatgggcattgtcatctatcgtcatcactcttttaaagatcacgtgataccaatctctccgacaagatcattttactcgtttcaactttcaacccacaaaacgctaccgtctcgagcatcaaaacgttcaataaaacgcggacgcgtttgaccaactagctgttaagctgtactacccccaaaatctaaaaggagctttaattattcctcaagacaaaattaaagttgaccgatttctaaaaatccacatctaaccggccacgcaagatccggttcaatgcgtaccgagaaaaacaggtctcttattaagctttgttacagaagattagtagagttttctaattacaaaaaatgagcagaaaacaaggaaattaagcttaaagtggctttgactttttggagattagatgaatttaacctagaagcaggatggctccggccgacggtgtcatcggcgaatcacggcggaggaattttttccggtgaatttgttagaagttgaagaaaacagactaaatacgttctagtgagaattgaagcgtgcgagagatgacgtcaggctaaactttatggattttaggaaaaaaaatgaagaaaaacagagagacggccaaggatcttctcaattacgaacggctaaatccagatttatcggccagatcggaatcggattatccagcgagatgacggatttgccatctctccggagctaccggattcgtaattgagagaaagacgatagagagagaagactaaatcgagaggcaaaagttgaaaatcacgatagggnaaagagaaagttccttagatccagatcctgtagatgtagagcagctagc

SEQ ID NO: 18666 - DNA, 538 bp, Arabidopsis thaliana
ctcttgtaggatgatttgattattgactccttggtttttacaggttcaggttggtaattcacccatgtacaagttagatagaaagctaggcaaaggtggttttggacaagtttatgttggtcgaaagatgggcacgagtacttctaatgctagatttggcccgggagctttggaggtatgctgtttgtgtttgcaagtttacttgctttcttttggttttctgtgatctgtaatgtgattttgatgtgtccacttttgtaggtggctttgaagtttgagcatagaaccagcaaaggatgtaactatgggccaccgtatgagtggcaagtttacaagtgagcgttatggtctcttgtctttggctctaggattcatcttctgcttgttcaaatagtttgtttataaaaggatgagataactaatgatgctttatcatctgttcgtccagtgcacttggtggcagtcatggtgtgccacgagttcattttaagggtcggcagggcgatttttacgtgatggtatgtggaatttagtcagg

SEQ ID NO: 18667 - DNA, 1004 bp, Arabidopsis thaliana
ccgtaagtgcacgccttgtgaatatgtgtccattataggggcataatcgtcatcataaccaaagagtttcggtccaaattctccagcgccgggagagtaagtacaagatgatgtagtttcgtggtcgtttatgaagagaagcatgttttggtgataccagatctgagccttcaagaacttgacgtagctaatggcttcgtcaagcatagatacagtgtccatcttcgcaccaccagggaccatgctttgtaaaatcttgaaacggtcgctaattcggtgccgtctgtcgcgagccgccacgctctgagggtccgtcgataacgtggacgttgaccttgaccgttttgtgtttccggtttcgctcttgtgacggtggaaagaggaagaggatgaggaagtggtggatgatgaattagggttttcgctacgaagattgaaatcatccattgtgattgtcgtggtttataactgttacatgatatggttatacatatatatagacatagttacatacgaactggttaatttagtggtaaaaagatctcaagagcacgtgaggctccgggtttcacgtagtagtggggttcggtgaaaacattggactgaagtgcagacgaaatacaaaccctaatcatttcttacagctcaaactctacgtactgtcttctcaaacaactaccttcatagcacattacccacgtttatgtatagtacttgtcccaatccatgtcttcgttcttctctcattgttcaatacaaattctataatcgattcacgagatatatatgctcaaaagcctcaaatcagtaaatgaattgcacatacaggtgaaatatagttttaaaacaaatagatataaattgaattaactagccaaattgcaaaattgatagtttttttttccttttgagtaaaacaattgtggatttatacaagtaagaaaaataggaagtacgttgctttgaaaagaccggataacaacaacaacaacaactactactac

SEQ ID NO: 18668 - DNA, 1555 bp, Arabidopsis thaliana
ttaaaggcatgctcacacattggagcgttaaagtggggaaagtatttcattgccttgtgatccgtagttgtagtttttcccatgatattgacaatgttcggaattcgttgatcacaatgtactcaagatgcagtgatcttaggcacgcgtttatagtgtttcagcaggttgaagcaaatagtttgagtacatggaattctatcatttccggttttgcatacaacgagagatcagaagaaacctctttcctgctcaaggagatgttgctctctggatttcacccaaatcacattacgcttgctagcattctccctctttttgctcgggtgggaaacctgcaacatgggaaagagtttcactgctacatcctgagacgccaaagctacaaggactgtttaatcctgtggaactcccttgtcgatatgtatgcaaaatccggtgaaatcatagctgcaaagcgagtatttgattcgatgaggaagagggacaaagtgacatacacttctttgatcgatggatatggcaggctgggtaaaggagaagtcgcattggcatggttcaaggatatggacagatcccgtatcaaacctgatcatgtaactatgattgcagttttatcagcttgcagccattccaatttagtgcgtgaaggacactggttgtttacgaagatggagcatgtgtttggtatacgccttcgccttgaacactattcttgtatggttgatctttattgcagagcaggttacctggataaagccagagatatattccatacaataccttacgagccatcaagtgctatgtgtgctactctactgaaagcgtgcctcatccacggaacacaaacattggggagtgggctgcagataagttactactagaaacaaagccagaacacttaggtcactatatgttgcttgcagatatgtatgcagtaactggttcttggagcaagcttgtaacggtgaagactttactgagtgacttgggcgtgcaaaaggctcatgagtttgctttgatggaaacagattcggagttagatggagagaataataagccgatgaacgatgattctgtcatcaatcaggagcaaagttcagatgaagaacgtcttgtagaagtaggataaagaatcaaattctgatagaaatattttatcaaactggagaatcaatttgtacataaatcttatatacaacaagttttaattgcatgatttcctgtaaacataagtttacatgaactaggggatggtccttcgcaagtatgagtaacaagcataaacagcattatatatgaaataaatatgagcccacctaaacccattaagggcccattaagattggagatactgcttttttaagagaggtcactttttccacagtgaaaccgtaaggaaacttcggcaagctccagagaaacgagagttccgtaatcattttctcttgttgttcctgatcgcgtagtcaagcgaaaaaaatggcgtcgtttgatgaagcacaccaggaaacgccaaggccggtgagaagacttcaggacaagtgtctcagtg

SEQ ID NO: 18669 - DNA, 532 bp, Arabidopsis thaliana
gctgcgttatccgggtaaggttactaattgtgggaaaacattgaccagaaaagccattaaaagaaagagataagacctctaatttgttgagattgccaaatttggaaggaagtgaggaactaatgttattgaaagccagattcaggtaacggagggagtgcaactcaaagaggctattgttgggattcagagttccagagaagtgattatccgaaaggtctaaaactgcgagcttgcctagatttcgcaccagcgggaaactacccatgagatcattatgggaaagatctaaataggaaagctgactttagttattaaatgaggaaggaacgtgacctataaagccattagagaaaagagacaagagctttaatttgttgagattgcagaactctgaagggagcgacgagatcgtgaagttgtttagattgagagcaagataacggagctgatgaaacccgaagaggctactgtttgacttcagagtccactgagacagtcctgagttgtagcctgtgccgcaccgtggagt

SEQ ID NO: 18670 - DNA, 1299 bp, Arabidopsis thaliana
gacatttcatcgaacaccttttgggcgcggaaatgtctgggctcaaattccagttgattagaaagcaataggcattaagaacaactaatccagaagggatctatcaaccaatactcaatcacctagcatactgagaattctacactactctaacccatcctcggaaatctattcactactcagacatcataacagaaagcataaacattgaacaagttgaaaacatgataacatcagtgtaacagcaggatgataacagaatgaacaacagtagaacgaaatcaagaacaaaagctgaatacggaatactgaatagataaagagaaatctggattacaaaaagtctagaacacaaggtctacggaataaaactagataaaaactttttctgcgaaaatgtgaagtacatgctacttatagcgaaatatttctgaaacccttatactcaaaacgatgaagtattgggacggattaagaattgtactcgacccaggtggtcaagtgggaggtcgagtgaatagctggagtcttcttttcttccttatgctcgagtgtctggttgagtgcggaatgaagaagactctaaagcttgccatcgagtatgtagtcgagtggtggtgatggtgatactcgacttccaagtagagtggtgtgatcgagtggtgatctggtgatagagatgaaaacactcgaccttggggtcgagtgaggtgatcgagtggtggtcagatgatggagatgaagacactcgacatcggggtcgagtgtgataagtgtgtattttgcatgttttgagcatccatttttcatcattttagcatcatatcatcactgttttataccatttcacatcatttatcatcactttgcatggttaggatagttttgcatgcatgttgcatatttgtgttgttttcaggtgatttggagctgtcgacgagctaactggaagaagcggacctgatcatgacaaaccactcgaccctgaggttcagtaggagcttcaagatctcaagagaccactcgacccccaggtcgagtagaagacaccaccactcgatcacatcacttgacccccagatcgagtgacttcatctccatcttctgaccaccactcgatcacatcactcgacccccaggtcgagtgacttcatctccatcttctgaccaccactcgatcacatgactcgaccacgaggtcgagtgtcttcacctccattaccagaccacttctcgaccacaccactcaaccttgaagtcgaatatcaccattaccacctctcgactacatactcgatt

SEQ ID NO: 18671 - DNA, 1796 bp, Arabidopsis thaliana
tgaggacaatatgattcaagaagggggggattcaactcaaattgatgcacttgtcatccaacaattcatctggactatagagcacacacctttactgaatactcatcactctgaaaaacatttcaaaagagaaaaactcaagaaggatcagaatcaagagatgattagtagagtcatcactcaagaagcttacaagaagaaagtcatccaaaaaaagcttggtgatcctggttcattcactctgacatgctctctaggatcattgacattcaataggtgcctttgtgatttgtgagcatttgttagccttatgccccactctacaactaaaaggctagggatcatggaatacaagttctgcaacttagccttactcttagctgatggttctgttgcacatgcacatggtcgaatagaaaatctgtctgtcaagattggaaatgttgaaatacctacagattttgtggtattggacatagatgaagagggaaaggatcccctgatcctaggcagaccattcttagcttcagctggagcagtcatagatgttaggaatggaaagattgatctaagccttgaaaagagtatcaagatgagatttgacattagcaaagctttagggaatcaacaaaaggaggtcagaattttgggattcagaacatggatgttgatgaagaaacagaagctggaaccccaccaagagttagctatacttctcaactcagcaagttgaagagaacttttgaccacaagaagagagcaattgaaaggttagcttagactgaagatcttacagaagatgactggtatgagatgagaaaaatatttaaatggcaaagcagagtcatagagggattatcttcaagggtgatgaagctgaaagatcaactatggatgtttgaaaaaagagttaataagtattcaatgagtattgatccagagaatatggaaactgcactagctatcaaagaggacgaagatttcacaacagaatggtttgcaccagaagattagaaaggagttcacttagaggaaagaagcttagagagcaagttgttgagtgagaaggaaattcctattccgatatattctctaggagtgcctaaactgcccaccaacccctctgttgaagaagaacactagattcttgattatgttgctgaagaactcctagagttttggattggatataaagctcaggaggatacaattggaaagttaactcataagatggaagagttaaacaacaccattctagaacttcaagaaatggttaaaggctacaccagttttgaaattgaggattggtcaaaggagcctggttcagaagaagaagactactctaatgttcagaaaaaagcttattttgaagaaagatcaaatgagtactcatccttccatatgtcaagagaggatgcagagtatgattcaggcactgaaaattcaaccactgaagatgaggatttctttgttcctctcttcaaccttttttcaaactaagctctgtaagagtcaagcttagtgacttaaaacaagctcgcaattctctatctctcacaaccctctgcttcacctccgccactcgaggcacaactaaagcctgcattggtaccacaccttgtaaccgctccaacaactgtctcagtaggtccgccaagccaacctctggaacctgggctcctccggctgcggcacccatcactcctgggccctcagcaccaacaacatgcacaccggcaccgacatcagctccaccaacccccactccggctgcaccagctatatcggcaccaaga

SEQ ID NO: 18672 - DNA, 841 bp, Arabidopsis thaliana
tgtatcaataccaaaatgttcaatacattaaaagttaaaacccattatggagaaagttattaggtcttgtgcaacgaatacctcaagccattcatcatgcgaacatctttagttgcggttccaacttcaacttttggtgctctctttgttttctgcgcaaagcattttcacagtaaccattctcaaagttagtaccatggaatgaaagtgcgataagatagcgaaataggatgtaccttggtcatatgcttcaaaacattttggatatagatggcgagaaaagcgataacaaagattaaaagaccactaaggaagactgactccattctgaagagaggaccatcttcaacaacttcaatagttccattataaaagatgctttggtatggcttaccatctatctcatagatgatggtgccaacaaaatcaaaagcacccgcctgcacgagcaaatggttacctcggattctattctatattttaatgtcatcttggagactagaagaactatatgattaacaaacatacctgcaggaacttgctgacagcaaaagcatatggcaaggtagcttgagcggaagttggcacagacgcgttgctgaaactctacatttagatgattcgacaaaatgaccaaatcgtaagtagcaaacttaaagagcaaaggccagaaaaggaaaagaggagaaaactctatattcagcaaaagccattgtaagattctatatctagaaatgaaatggaatatagctagagccaaagcaagtatctggtatcaaaacataaatgataaagattaaaggctagagagagacttcttgcatttagatcagggatgtac

SEQ ID NO: 18673 - DNA, 1871 bp, Arabidopsis thaliana
gcttcggttgatcaatatgctgctcaaactcgatttgctgctcatagtcagcttgagtaaaatactcctgttgcacatagtcagcttgactatattcttgttcatcttctcgagctcctccaatgttgatgttcaaggcagaggcagatggcatgaaatttatgttgcgccttgtcttcaccgaagtccggttctcgcatggtaggggtaacagagaaggtccaagctccagatggttgaacttgaagagatagcgatccgctggaattgttttctcaagaaaatccttccccatgagatagtcgaggtcaataaacttgggcaacacgtcagggttccgaattccatacccacaactcctagtattggcgttaagagaccaccaacacaagacttccgcgaattcccgagcgatggatagttgcagcatactctctgtagctcaataggtgatccaagagaacaacactcagcgaagtgtctgctctatcacccgccatcttcctcccatcttttgtctctctcaaaatgaagaccaaagattggtctatcatgcatagctcctcttcaccaataaatccggtggtcttctttggaaagaaggtattggcgatgcattggtggagatatctaatcacgggatttcggattgaagaactcttgctcttggttggcgagaagggcttcggaccagcgattgttttccaaagagatttcgactcttcttgatcatagtcttagcggattccttctccacttggaaacctgaaaatggtatcaagatggcgaatatgaagtgtatactcgacatccctaaccttgaaagttatgtaaccaggacctcctctctcttctttctctgaatcgtcaacatagaaatcaaccttgagggttgcaaggagttggcagctctcctctttatatccccacattggcagctcgtgaatgttgcaagattgtccaattccatcaagtattccacatcaccacaaataccaagctcttacatcgtttccttatgagggtgtctagttccctcaaacttcaactccttcaagtattgatagtactcgctcggggttggctctctcttcctccttggccggtttcttctctctcccaacaggggctggtgtatcatccccgatgatctcaacctcttcctcagaagccgcttctttgaagggtgcctcttcatggtgttcttcttcagcctcaacgaccctctttccccgagctacttcttctctttgcatggctgagcggcttgagcttccaccttgaatcaagcttgatatttgagcacgacgagctttgagaatttggcgttcagtcgtgccactcatgtcaaacgcctcaacctcttctttatcaacggaggatcttctagctcgagatgaactctttcttcttgaatccatagagattggtggtgagcttcaacaagtcaaacaagaacaactttccaagaggtatcaaaggggaagggaatcggtttctttggtgaagaaattttgagcttgaaaccgattgaatgcttgaagatagacttgggagtgatcgagcaactttggtgaagtattggtgaaggggaatggattcttaaggagtgatagggagcgtttggggaagggtttggaatgaagacttcaaagctttgtgagagaattccgaaaacgagatgatgaaagagagagtttcaaggagggtttgtcgaattcactgggtggaggagattggtctttggtttgtttttggaagagatagaaaagttgattggaaatggtgaggggcatgggtaattgctttgtccattgagtaacggagtgttgggggaacaagtggggtcacgcaagttatgctttggtctc

SEQ ID NO: 18674 - DNA, 1972 bp, Arabidopsis thaliana
tgagctttgtattctatcctgagttccacaagttcttcagtaacagaatcaagtgtcaagtgttcctcttcagcagaggggttggtgggctgtttaggcactcctagagaataagtcaaaataggagtttcctcctcactcaacaacttgctccctaagcttctttcctctaagtgaactcctttctgatcttctggtgcaaaccattctgttgtgaaattttcgtccttcttgatagctagtgcagtttccatcttctctgggtcaataccatctgaaaactttttaactcttttttcaaatatccaaagttgatctttcagcttcatcacccttgaagacaatccgtctatgactctgctttgccatttaaatttttttctcatctcataccagtcatcttcttcaggatcttcagtctgagatagcctttctgtttctctcttcttgtggtcaaaagttctcttcagcttgctgagttgagaagtatagttgacttttggtgaggtttcagcttctgtttcttcatcaacatccatatctttaattccaaaaatctgacctcctgttgttgatttctttgaagcttctctgatgtcaaacttcatcttgatacctttttcaaggttcagattaatttttccattcctaacatctatgactgctccagctgaagctaagaatgggtctgcctaggatcagggatcctttccttcttcatctacgtccaataccacaaaatatgtaggtatctcaacatttccaatcttgacaagcagattttctattagaccatgaggatgtgcaacagaaccatcagctaagagcaaagctaagtttcagaacttgtattccatgatccctagccttttagctgtagagagaggcttaaggctaacagatgctcccaaatcacaaaggcacctattgaatgtcaatagtcctagagagcatggtagaatgaatgaaccgggatcatcaagcttttcttggatgactttcttctcgtatgtttcttgggtggaggcactgctaatcatctcttgattctgatccttcttgagtttttcaattttgaacttttttccagaatggtgagtattcagcaaaggtgtgtgctctatagtccggatgaattgcttggtggcacgtgcatcaatttgatttgaatcccccctttcttgaatcatactgtccttagtattgagagtctgattacttggtggagactcatcttcttggtggatggtgatagcattagtagtagcatagtccttaggattttggactgctttccatggaagttgctgaggatgcttcggagtagaggttgatgcaaattgactctccacatacttgattttggaattcagagcttcgaacttgacatttagatcgttgtaagaacaatcgatctagttgtgtaattcagctatcttcttgtcaaaagccatagcgccaatagcttatccttgaatgatttgttgaatgagttgcttaatttcaggatcttgagttgctggggcttgttgtggttgttgagtgaacctggtggtggattctagtgttggtaactccattaaactgttgtttagggacataaccttagttgtactgaacaaaaggcttagactgattctgttatggtagatacacttgatcttgggggttagctacattagtgcttctataggagaggtttgggttgggcgtgtagttgttgtagcccttgttaaaccctccttggttctgaatgtagcacagctcttcagtttgatcattccccccttcttgcatttggaagtgctcctcatcagtgatgtagtgtatctgcttctgctgagccatcagcagcttgtctaaattctcattcagagccttgatatccttgccctgtttgtcctcacttcctccagttcctctcattgagcgatcatagtcttcattgtagccccatcagattgtgctagat

SEQ ID NO: 18675 - DNA, 2075 bp, Arabidopsis thaliana
aaaggcaaaatatattattgatatttacaatgtcttgtatggaactcctgagttagaacttctgctccagtctccgcttgggtcaatttttttgcttcctatcaggcagtgttctttgtctagtcagcttctgcaccagttactacgtaggcagctgtttacatctgaagttgatgcaacctggtttgtgtttgcaggacagccattacggttttctttgcaagagtttgaggaagtcacaggtttgtgttgttctaaatatccgtcagctgctgaagtacgttctactacttcatatgatgatggcgaatctccttacttgtacaaactcattgagggccaactcggtttgacgactgtgaaatcattggttagccgtctcaaatctgattgtgccatgtcttcttggcgtaaattccaaatatctcttgttgttattgttgaaggtgtctgatataggttaaattaatcctaagaccactctctcaaataaagaggtcagttgcagcactgagggatcgaattcacaaagttctcggatcacgcaatagattaaggttttgaattaagctaagtaaaacattaatgaaaataaagagaaacaaaagtaaacaatagcaatcgattggatggttgtgaaacaagataataaatgcgtcaggcttaaggtattctcaggagataaatgatagtagatctagaaatagctaagttgttatcgaaccgttcttgaaaacaaactatgattttacagtaaccggtagtgttccgcgaaactctctatacttagagctaagataaccggagaagccaagaaatcctatactaaagcatgcattattatcaactttgattagttcacctagtatctaaactagagcccttctatgagcctacctattctttcttaaatgcctaggctcatctataatggttcaaacaacaagtacctatggtgggcatacctattatctaatatcaagttctagttagctactctagaactagcattaataacaatcaagatgaagaatcttacagataacctagcaagggggcaatctactaaatcatctaaatccctaatgagaaaccctaaacctaacaagaaagctactcaagcatgatgaatgaagcaaaccacatgattgaataagaaatcaatgaataaaacaagaagagattaatgtttagaaagatcttctttaaagggagtctccacacggttttgctcccaatgtacaaaagagataagaagattagcctctccaagcttaggtctaaacaatgacctgacgggcgagatatataacctgaaacgtgatgggccttctttagatataaggaaaagttttcggccgaatttggaaatcttcaatacttaaataagttgtgtctttgaattgtcgtcaagtattggtgtggctcgacaccaagggtagtctcaatcgacacctacgcgatttttagtctctagatttcttttgcagcataagttctctgttttcctccagaatgctcaattatctccaaatgaatcccaaacattgaaaaacctaaaaatgactagaaaagactctacaaataataaatagactctaaaacctatacctaaatcatagctaaaacagtaaaaatagggatatatcatttattaatacacgtcagcgattactgacttgacgacgcggtttttgctgacatggcaatgacattccttgtaattacgttttttcctgtaacgtttagtagagacacgatgggtatataaaatagggccaaaatatgatagtaataaaaaatgttttgtatggttcttgtaaatacacctaatttctataacatccgagtaactctccctaaaagatatggttattattattagaacggaagaaaaaaaaaaccttggcgtgaagcacgcactcctctcttttctctctttagtttcaaagaagcaaagtagatatacggaaaacgttgtattgcctctccggtatgctgtttccggtgccggagagggctcctttttttacttctcagctgtctttcctcccctttggtaggctttgagtttg

SEQ ID NO: 18676 - DNA, 1009 bp, Arabidopsis thaliana
tctaattataaaaaaatcttaataaaccgcctaaaatcataatcatatcaaatgtttttttttaataaaaaataatctaaatttttatgccaaaaagaagaatttagcgtaatggtatctattggaaagacgacccaaatccaaagaccaaaccaggttacttccacaaatgttcacggagtcatctccagcaatggatccggatttacccgaatccgaaacccgacccgaattcaatccctcctccactgattccaccgccatggcagagtcaaccgatgcaggggaaccgacggcattcgaattagcctcatcccaagtcacatccgtcgccgatctaccaccggaacgattcaattcgctcgacgaattaacacacgatctcggctcgctccacgagctttcgacccgtggctcatggcaagcgatcctcgagaagatatctcaagccagagctctcttcctcctcacaaagcctcacgagcatctcacttatctcacttaccaagttatggctctcgcgaagcttcgtcgctccgatgaagcttctcatgagcttaattccttgcacgatttcgacgggacgcattacaggtacgaatcgttccctgagatttaccctaatcggagaggatctatggttcctttctctttacgatggctctacgctttgatcccgactaagcttggtaatcgtcaggaagggttagatcgtttatatgttttgcttgactttgttcgagatcgaatcagagagaaagaatctcagagtttagagagttctgtggaattgtggaagaaaagagagacatttgtgatgaattgcttgctagggtttcatttaggtcacaaggaatttggggtgtctttggatttgatgaaggaattgatcaatcgtgatccgttagacccggttttgatttcgaactagggtctgtcagatgcagtttggtgatgtagaggagctaaactacgtttgatagagttgagaagatgttgaatgaaggaa

SEQ ID NO: 18677 - DNA, 1719 bp, Arabidopsis thaliana
tactggtcgtcgtagactatgtatccaactgggtcgaagctattgctagtcctaccaacgatgcaaaagttttgctaaagctgttcaagaccataatcttcccaagatttggagttcccagggtagtaatcagtgatggcggaaagcatttcatcaacaagggttttgagaacctcttgaagaagcatggagtaaagcacaaggtcgccactccctatcatccacaaacaagggggcaggttgagatctccaacagggagataaaaacaattctggaaaagactgttgggattacaaggaaaaattggtctgcaaagctagatgatgcgttatgggcttacagaacagccttcaagacccccattggtacaactcctttcaatcttctctatggaaaatctacaaggagagaaccaagcttttccgtgacaagaagatcatcactaaggatttccaggttggtgatcaggtgctgctattcaactctcgcttgaaactcttcccaggaaaacttaaatccagatggtctggccccttctgtatcactaaggtccgtccttatggagcagtcactctagctggtaagagtggagacttcacagtaaatggtcaaaggctcaagaaatacttagcagatcaaatccttccagaggtgacatcggttcatctccaggaacttcttgatgattaaaggagtaaaggagtcaagctaatgactttaaataagctcacttgggaggaagtcccatgactatctctgtaaataaatttttattttcttgttattttttatttgtcttggttatgtttgtggttctcaggaacaaaggaacaatgtggagagagagtaaaaattcaaaacttttactctacagaagacctggagatcgagtgtacaacacgttggagtacaaaattttgaaaatcttctgttgcacctagagaccttgcactcgagtacattggtatagtatgtgtgatgtttaaaacccaaaaacttttaaatcatcattttactcgaccaacaggagctatagagtcttacagagagttcatcaagtctacagaaaattgcgggatttcctggagttttcctagtgaacagagaatacaaagaagagacaagtagacattgtgggacccgccgctgacgcccatgtcctccatgcaacagaccaaaggacaagaaatctcttttcatctcttctcccccactcgacgtcaacaccatcactcgacccccatcccacttaactcgacctcatcacctcgttttctcctccactacctcataaactcgacccatcactctcattcatcaccaccaacaaaccgaacccccattcactcgacctctccgccttatccttccttaaaaaccactcgacctctcccttacattttcatcccaacaccaatcgactctcacttcactcatcaactctcactctcaagctcaacaaactctcgttctccgtcaccatacttctcgctcaaaaccactcgaatactcctcgccaatcccacaaccatcactcggccaaagctctcatcacctctccagtaccactcgatctcttcaccaccatcttcatagccgagtcactcgattcaacaaacgcactcgaccgtttcaccaccttctcattcatagccacttcactcgattcaacggatctctctcatcatcgctcactccaattctcatcaagtactcga

SEQ ID NO: 18678 - DNA, 559 bp, Arabidopsis thaliana columbia
  unsure (1)..(559): unsure at all n locations
tnnnnnnnnnnnnnnnnnnnnnnnctaaagccggagaatatcgaaaatcgcgtcaatatttgttacttcgcgctttcaccggaagacgaagcgcgcgatgcagccggtcatattcgtgaccagggtaaacaagcgccgctggtgctgatcccacgcagttcattgggcgatcgcgtacgcaatgcgtttgcgcaagagtggcagaaactgggcggcggcaccgttctgcaacaaaaatttggttccaccagcgaattacgcgcgggtgttaacggcggttctggtattgctttaacgggtagcccgattactctcagagcgacaaccgactccggcatgacgaccaacaatccaacgctgcaaaccacgccaaccgatgaccagttcaccaataatggcggtcgtgtcgatgcggtgtacattgtggcaacgccgggtgaaatcgcttttatcaaaccgatgatcgccatgcgtaacggtagccagagcggtgcaacgctgtacgccagctcccgcagtgcgcaagggaccgctggcccggatttcgactggagatgga

SEQ ID NO: 18679 - DNA, 601 bp, Arabidopsis thaliana
taacggccgccagtgtgctctaaaggaacgttgattccaacctggccggcttcaatatccttctggaatctggaggctgtagggccggagcgggtgaagatcgcggcaccgttgccatattcgttcttattgatgagctcgatcgcgtcatctagggtctcaacttcaaggcagacaaggacggggccgaaaatctcctgcttgtagcacttcatccctggggtgacgccggtgataatggtgggaccaatgaaattgccattggggtacttttcaggcttgtaacctcttccatctaggaggatggtggcgccctcctcttctgcactagcgatcagatcctcgatacgcttcttgctctcaggactgatgacggggccgaggtcagcgccctcttcgaagcctccattgacattcagcgccttggcacgctctgccatctctggcagccactctttggtttcacaactgtgaccagtgtgctcagagccatgcagcgctgacctgcagccgcgaaagcagctccaacaatagcattgatggtctggttcttgtttgcgtcgggaagcacggcagcgtgattcttggccccaaggttggc

SEQ ID NO: 18680 - DNA, 2043 bp, Arabidopsis thaliana
tgaagaagttgaggcttttgacatgagtggcatgactgaacgccaaattcgccatgctcgccgtgctaaaagatcaagctcgattcaaggaggaagctcaagccgctcaaccatgcaaagagaagaagtagctcggggaaagagggtcgttgaagctgaagaacaacaccatgaagaggcaccctttgaagaagcggtttctgaggaagaggttgagatcatcggggatgatacaccaacccctgttgggagaagaaaccggccaaggaggaagagagagccaatcctgagcgagtactatcaatacttgaaggagttgaagtttgagggaactagataccctcataaggaaacgatgcaagagcttggtatttgtggtgatatggaatacttgatggaattggccaatcttgcaacattcatgagctgccaatgtgggggatacaaataggagagctgccaactccttgcaaccctcaaggttcatttttgtgttgatgattcggagaaagaggagataggaggtcttggttacataactttcaaagttagggatgtcgagtatactcttgatattcgccatcttgattccatttttgggtttccaagtggagaaggaatccgccaagactatgattaagaagagctgaaatctctttggaatacaatagccggtccaaaacccttcatgccaaccaagagcaagagttcttcaatccgtaatcccgtgattagatacctccaccaatgcatcgccaacaccctctttccaaagaaggccaccggatttgttagtgaagaggagttatgcatgatagaccaatctttggtcttcattttgagggagacaagagatggaaggaagatggcgggtgatagagcagacacttcgttgagtgttgttctcttggatcacttattgagttacaaagagtatgctgcagccatccatagctcgggaattcacgggagtctttgtgttggtagtctcttaatgccaatactaggagccgtgggtatggaacttggagcccctgacgtgttacccaagttcattgacctagactatctcaaggggaaggattttctagagaaaacaactccggcggatcgctatctcttcaagttcaaccactcggagcttggaccttctcttctacccctaccatgcgagaaccggacttcggtaaagacaaggcgcaacatcaatttcatgccatctccctctgccttgaacatcgacattggaggagctcgggaagatgaaccagagcatagtccagctgactatgagcaacatgaatacttcactcaagctgtttatgaggagcaaatcgagtttgagcagcatgttgatcaaccggagcatggggacaacgaacaagaacaagctcactatgaagaaggtgctaaccaaggaggagataagttggctgaagatcacaagaagcccggtgtacttgaagagcttggaaaccttcacagcaagacaatgaaggatttcaagaagaagatgagaacaatgaagaagtcgctcaagagtatggccgctcaactctaggacttctagagcaagccaaggccaccatctccaaccgccgaagtaagaaggagcggttcaacgagctcagctgcaaggagagctaaaaggatcgatcaaccccgagcttcatcttttgagcctcgggaagtgatctccgagttgagagagccaaggaggaggcagaggcgagcttccacacgctcgaccggacagaacgagcaacaccctcccgcctcaacttcagcccctgcctatacctaagagagtatggatgactatgtctccatctacttcacctgatcactgaggtaacaccacctcactcattgtacataccattagcatttttatttttcttgtgtgttgtttgttttggtcttgaattctctttcaaatttttattacacaagggactgtgtaatttaagttttggggagggttcaagacatgtttaacattgtgttctcttttcttatttcaaattttgcatcatttaaggc

SEQ ID NO: 18681 - DNA, 647 bp, Arabidopsis thaliana columbia
tagaaccattccgttggatctaatcctttctcgcatacttcgcaccagtacttgtcatccacgccactttctccataagaaagagtgagagaatgctcatcgaatttgtagtgtatctcattaggaattgtggcgcattcgtaacataaaacgaattcgcacaaactacagtgtagatgataattataaactctcttcttgcaaccctggcagagagcttcgttttcttcgctataggatggggagatgaatacatgatgttctgcatgacttttatgggtgaaatactcaggaactaaaacgcagttgagatctagctgaaactgctcgtaacctacgcattcttcttctctgcatctgtacatgagaccactcgacttccggaaacaaactgaacacgctaagttaccgcaatcgtgatcgtatagaggatacgggtctatgaaaagagggtggtgatgcaatgcatgctctagtttccgtggaagattggcacatacttcatggagaaagaagtcacattccatacagttgtagaaatcttgagagctgataggacgcatgcatggttgacattgctttgctgagtcacgtacacggtcgtatttctcaagctttagaatatgaagatggtgcaaaaatgttgt

SEQ ID NO: 18682 - DNA, 621 bp, Arabidopsis thaliana columbia
acttgctgtttctaattgtaatttgaaagaaaagagaggtaaagcttagataggatttggaaggaagttagtttcttcttatgagttaacaacagcttcattttgttcttcttgtgaacaagtcgagattgtttcattttcactagtttcaagcatctttgatgtagataattgggaaaagccagtcatgttggatgctcccgtctctggaggtgttcttgctgcagaagctggtacacttactttcatggtatgttgacgactctcttatcttctacattatttgaatcacatcctttatataacatcaagtttgaagattatgtgtgcttgtatacctacaagagcacaatggcattgatacaactgcacgttctgtaggttggaggtcccgaagatgcttacttagccgctagaccaatacttcagtcaatgggcagaactccatctactgtggtggttcaggaaatggatctgtaagttcgctttataccatgtttccgtaactctgttacagtatctctattatcttgatctttggtatatttgtctctacaattcttaaggataatagactggagaacgacatgttttgttttaacttaggcgcaaagattgtac

SEQ ID NO: 18683 - DNA, 445 bp, Arabidopsis thaliana columbia
cgccagtgtgctctaaagaaaatatacaaacgcgaaggagatgtaaagcattagcagatattatgagtaatgacccagtgtaaattgggccattgatgtatggaattaagcggtaatatattcgaagtccggattgtttagtagcgctaaaatattttccagtaaacgtggagcaatattattagtcgtcgcttcgggtttccattgtgatattttagccatttccattccggcatacccacaaggattaatacgtggaaatggtgacagatccatattgacgtttaatgccagaccgtggaatgaacaaccgcgtcgaatacgtgatcccagtgagcaaattttctttccccaacatagacacctggtgcgtcagccgaggatgcgcttctatcccagttcatgcagggtattcagcactgtttgctctagcaaggtcaccagt

SEQ ID NO: 18684 - DNA, 552 bp, Arabidopsis thaliana columbia
gagaatcgccggaagccgcgacgtcggaggctgtgaaatccactgaaaacgcgaggagaggaacgaatccgattcgaagaaaggaaggtcgcttgagttgtgacagggtttagtgaaggagagttgaagattatagccaaaccagaagcaaaagcagccattgatgattgatttcaaactcactcactcagacaaagtatcactacggggataagggaaagagacgaatacaaatcgttataatgggcctgggtcaggccattagtttaaagtttttttttttttgaagttttaaaattgcgttttttctggggtcatctaaatttcgtgtgattttctaagacttgagtaatcttgttttccgaaattttctcaccaagctcgaacacaaagatcggccatggctacgctcttcaccgtcgctcgtccttcttcactcctctatgtttcctccataaatccaagcaagaccttctctccttctatctccctaaaacttaactctctctctttctcttttggttatcgcccaagccactccggttttctaaa

SEQ ID NO: 18685 - DNA, 2061 bp, Arabidopsis thaliana
aacagctacaagaagttcataacatcggcgtataaatcaagcattcaacaaggtttctccaccggtttaggacttggagtaatgttctttgtatttttcagcagctatgctttggctatttggtttggtgggaagatgatactcgaaaaaggttataccggtggcgctgtgatcaacgtgatcatcattgtagttgcgggttcaatgtaagtaaaagcctagacaatcaactttatatatttgatgtgagattaatcctaacaggtatgtctactttcttcttgtttaggtcgcttgggcaaacatctccatgtgtaaccgcatttgcagcgggtcaagctgcagcatataagatgtttgagacgatcaaaagaaagcccttgattgatgcttatgatgttaatggaaaggttcttgaagatatccgaggagacattgaactgaaagatgtgcatttcagttaccccgcgaggccagacgaggagatattcgacggattctctctgtttattccgagtggtgcaacagcagcattagtaggagaaagtggaagtggaaatctaccgtgatcagtttgattgagaggttttatgatccaaaatctggcgcagtgctcattgatggagtgaatctcaaggagtttcagttgaaatggattagaagcaaaataggattggtcagccaagaacctgttctgttttcgtcgagcatcatggagaatatcgcctacggaaaagaaaatgcaacagttgaagagattaaagctgcaacagagctagctaatgcggcgaagttcattgataagttacctcaggggttagatacaatggtaggcgagcacggtactcagctctcgggaggtcagaaacagaggatagctattgcgagagctattcttaaagatccgcggattttgcttctggatgaagcaacaagcgcgctcgatgcggagtccgaaagagtggttcaagaggctttagatagagtgatggttaaccggactacagttatagtcgctcatcgattaagtactgtccgaaatgcggatatgattgcggtaattcaccgcggaaaaatggtggaaaaaggttctcattctgagttgttgaaagattctgagggagcttattcgcagctcattcgattacaagagataaacaaggatgttaaaacatcagagctatcttcgggatcgtcgttccggaattcaaatttgaaaaagtcaatggagggaacttcgtcggttggtaatagtagccgtcatcattctttgaatgttcttggtttaaccacaggactagacctcggcagccatagccagcgagcaggccaagacgaaactggaacggcgagtcaagaaccactcccaaaagtatcactcacccgaatcgcggctctaaacaaacccgagatcccggttcttcttctaggaaccgtagcagcagcaataaacggcgctattttcccgctttttgggattctgatctctagagtcatcgaagcgttcttcaaaccagctcatgagttaaagagagattcaagattttgggcgatcatatttgtagctcttggagtaacttcgttgatcgtctcaccgactcaaatgtatctgtttgcagtagctggaggaaaactgattcgacgaattcggtcaatgtgctttgagaaagcggttcacatggaagttgcctggttcgatgagccacagaattcgagtggtacaatgggagcaaggctctcggctgatgcaactttgattagggctctagttggagatgcattgtctttagccgttcaaaatgttgcatctgctgcgtctggattgattatagcgttcactgcgagttgggaactagctcttataatcttagtgatgcttcctcttattggtatcaatggttttgttcaagtcaagttcatgaaaggattcagcgccgacgcaaaggttcgtacatcaaccggtttggttccattttttttaggctctgcaaaaatcctttgttttttttcttgtgaatcgaggaacttactctggttttggattactatgcagaatttgac

SEQ ID NO: 18686 - DNA, 552 bp, Arabidopsis thaliana columbia
gattgacatttaaagacagataaggaatccattttcggtgtacagtggatgattagaaaatatctattcactcaatctgacttgagtacttttatgcagcaagaaagagatacattgagtccaagcttcaggccttaaaacaggaatcagttaccattgatgcttatcccaaatttgttggagtcggctaaggacaaaagagatgaccgtaaacggtttgtggttaaaactggcgactgtttccataccccaccccctgtatgtttgcgtgaattccaatatattcttctcttgcactgaaaagcatagttctgtttctggtctgtgtttgcagcgaatataacatggcaaatggtatgcgtcagatgtttgaaccttttgagaaacgagcacgtcaagagcattcttgtccttgctgcgagcgctcttttacagctgatgaagaggctagctttattaagaaggttacacaatcttctcctgtttttgccttaacgattcaaattattttctgcttctgaaataacggaatgtctctttatttgagtacgt

SEQ ID NO: 18687 - DNA, 1215 bp, Arabidopsis thaliana columbia
caatcgcgtggttcgtattgctcggactctttctcatctgctcatgcctctgttgttgctgttgtggctgtggcgccgcaactacggctactctcgcgtctgctacactctttctctcgtcttcctcctcctcttcaccatagccgccgtgtaacccatcattaaattacttaagaacttcaaataatcttataagattactaatttgtgacgcgatgtcgtttatcttcaggattgggtctgcaatgctgtacacggggcaaaacgagttctacggtagcgtggagaggacgtttatgtacattgtgaaacaagcaactggagttttgactaagctaacgagcttatgggactcgattcaatctgctaaagacattcagctcgatggacacaacctgtttcctcccgagtttagaggcaacatcgatcatttcaacaacatgatcaagatgtctaacatcacttaccccgaccgtgtcgctaaccagacaatccgttatctcaccggagcactaaaccctgtgtaagtaataagtattcgcttgatatgtttcttgcctcacaagctaaatatatatagaagctctgtttgagtatttgactcaaatgcgttttcctcaggagatatgtgttaaatgtgatcgctggtgtaatgctcgcagtcgcatatcctcggcctttgtaagtcacaaatcaaaacatatctattttgatctgaagatacagaataatctcattatttttgtttctgtttttcttcttctttcgaaacagtgttttcgttctgtggattgcgagttcttgtctacctgtgagttacacttagactacgttgttatattatcatatcatatccaaatcaaatgtttataatcagtgtttcaattatatcagattggtaattcttggttggattctcgtcacagccactatcctcctcagcgccgttttccttgtattccacaagtaaatgatatttcgtcgtcacttgatctaattcaagattcaatttgtttttatcaaactaatgatgttacttaataaacagtgtggttgcggacacgtgtatggctatggaccaatgggtgcatgaccagcggcagactcagcattgagtcaacttcttccgtgtttagatcctaaaaccattggagagacattggatataacgaagacgatgactgcgacggccgttgacatgaccaatgcgtacac

SEQ ID NO: 18688 - DNA, 1229 bp, Arabidopsis thaliana
ggatctcttgggaaatatggaacagagagacttatgaaacctttgactcggtctggtctaaacaagcatagacaccaacctatgattgctccccagtcatgcccagccacaaaagcctaccacagtaaaaatgtaaactttcttctccacaaatctatctatctaaatctaaacgctggattctcaagaagatcatttttcacctgagtagtgccgtagtgatcgagtaaaccgatgacatcagcgactaggtgactcacagtgtaagactcgtggctcggtagagaatcggagtcaccgtagcctctgagatctggagcgaccacgtggtaaccatggctagacaagaaatcgatctggtgacgccaagagtaccatgtctcagggaaaccatggagtaacagaaccaaaggcccttcttcgtctcctttctcagcaacgtttaaccaaatcccgttggtcttgatcttcttctctctaacagagctcgtcatgattcttgttggtgatagttgtgagagagaggaggaaaatcagcgaccaaggtgaagactttatcacaagagttgagaaatggatgcacacatgacgtggcggaatatgaaatcaggcctctagttagattacacgtggcggtaactggtcctgattcagtttcatgggttgccgtaagtaaaagaatgtcagccaaattcatgaaacaagaaacacatgactggatataaagaacacaaacgtcaagtaactctcagttcttcagacaacatagcgagttaactctcaagagaacatgccaaacacaacaaagaagagtaattctctaactcaagacaagaaaagagattgtcatttaggattatttctatgtttgatctcaagaagacattgatttcttcttctcttcttccagctgttgaagctcaatcagtctttcagcccatgctcggtccctagcgacagcagccatcttacgttccacttgcttaattctcttcttcctcttcgcctcttgcaccagcgcttgcctcttcttcttctcagactgcgaaaaaaatatatacacgagaactccatcttattagtaaactaaaaaagaacattgcagattgttttgtaaatggaaacagaacggagaagctaagagagatacagccttttatcatcccataggttacttatgatttctcagctttcaaacttatttctcatttgtacaatctattgattca

SEQ ID NO: 18689 - DNA, 716 bp, Arabidopsis thaliana
tgggtttcctttcttaactatgatcgttgacaagcacaatgttgtgacaaagagtaatagtgtattgctcatcaatctgcagaataattttggtgaccagtacaagcttttccttctcacgaatcctgaggatgataaacctgtggccgttgttgttccaagaaggtccttagaacccgagacaacaggtatattgctatacacttccatgttaataaggatatctctctcagattattaagttttagctggatactacatataatttgcagctgttcctgaatggtttgctgctggttcttttggattggtggcattgtttacattgtttctccgtaatgtgcctgccttgcaatccgacttactgtaagaacatcttgaacatgttttctctagaatatgttatgcttccaaaacatctaactgaataaaaaatttccctcccatatatgaatttaattgcagatcggcctttgacaaccttgaactgttaaaagatggcttaccaggagctcttgtcaccgctcttgtccttggagtacatgaactgggacacattttagttgcaaatagcttaggaataaagcttggtgttccattctttgttccaagttggcaggtgaagatgcgatgttctatttgaaagaaaaggaaaaactttcagctgaaatttggtttttttagacatttaatgaacatgttttagatggcagata

SEQ ID NO: 18690 - DNA, 790 bp, Arabidopsis thaliana
cactctagactcgatcctaaatgtattgcaactacatgaacactgtttttgtgaaatcattttctgaaatttttcaaatttttttttttggtttttctatgccttagatgaatgcggactcaagaatatatacaatgcaacacacacttcctgagccctcccccaaacttaaatcacacagtccactctgactaaacttggaagagaatactcaggacaaaacaaatcacagaaataaaataaaaacaaatcacaagagatgatataatacaatggtgaagttaggcgcttacctcagacgaagaataaacggagttggtcgtgaatggctgtctgtgattgctcccaggccatagacgagtcgccatattctgtattagctccagcatgtgggtactcgacctcatcagctctctggcagccagcaccgctctgaggatactcgacctctctccttctgctgcgccaacaccgcggtcgagtgatctcctcgagtgaataaggtgtgatctgctgctagagcgaacaagtgtagccttctttctccttttgtgttttcgggactcgaatgacgaatatctaccagggacatgtgaaactctcttctcactaggctcaggcctgtactgacttggctcaggctcttcaatggcatgtccagaggaggttttccatgtggaatagctgtagtggaataactgcctgtgagcaacttatatatcaaaaacttatatagctgtagctcaccttatatatcaaaaacttgatagtcttgaagcacttggcgagt

SEQ ID NO: 18691 - DNA, 1588 bp, Arabidopsis thaliana
ttttctttgttcttgacagtaacttgttttggagcagttggtgatgttgctgggaaggttggtcaagtagtaggtcgagtaacgtggtcgagtggcttctcaagtggttgctcgagtgtctggtcgagtggctgctcgacttgtttatcaactcgatctttactgagactaaaatcctccccatcttgatcttcactgtcctcagtgactgtctttggttcctctctagttggaagtgattttccactacgcagagtgatagcgtgagcatattcttttggattctgaattgcttttccttgaagttggcttatctgttttggagctgaagtagatgcagaatgtccctctaagtattggactttggtattcagtgtttccaccttgacatttagatgattgtagctacagtccagcttattgtgtaactcagatattttctttgccatttccatggagcagaggcttgcccttgaagcaactattatagcatttgtttcatgtcagcgttaggagcagcatgaccttggttttgctgaggtgccaacctaggtggtggttgcggctggtagttcccctgaactttctgtttgggaacaaaaccttggttgtagggaacaaaaggtttgttctgaccttgttgttgctgtggaggatacacttggtcctgtgggttagcaacgttggtgctgcggtaagagaggttggggttgttggtcttgaagttgttataccctttgtagccaccgtggttgttgttgatgtagctaacagggaagaagcatgtccactttgcagctgaggaagagactattgagcctgagcctgagtcagaggaaggagtcttctacatagatggtcagggatacaggaagtttgggcagccacatggcaacttcagtggcaacaggtttacagggaaccagggttcctccaactaacctccaaagcgtgctttccagaagacttttcctcagagcagctttcagaggaactatggtaattcaacttaccaagccccccccctccaccctcatcatagacaagaatggaatcgatgcttgagcagattctagaaagccaaacaaagcttgttgtagagtttaatggcaagtttgatgctatctacacagatcttactgggaagatcgacaatctgagctctcacttgaagaagctagatgtataggtagctcaaactgcacaatctatcaagagacaagaggattttcttcctagttatcctgatgctaacccaaagaagagctgcaatgccattttgatcagagaaggagatgatgtgtgggaggaattggacactgaagacgattgaagctcgcaatagcagagatggtgtcgaccggcaccctcctgtgttgatcgacaccatacgagactcttttctcagagacgacttaatacgacggtgtcgatcgatacccatccagtgtcgatcaacactggatctggactacaccttgtgaggtgtaagtacctatgcagccccagcccgtttacactcctcatgtcccctatccgaggaggcgtcgttctaagcaggagattcacgctgctaagtgcacaacca

SEQ ID NO: 18692 - DNA, 1454 bp, Arabidopsis thaliana
gactctagatgccatcctacagataacctagcaagggggcaatctactaaatcatctaaatccctaatgagaaaccctaaacctaacaagaaaactattaagacatgatcaaagaaacacaaatcatagtctgaataagaaatcaataatcaatataacaagagaaagagtaagaaagatcttctctaaagggagtctccacagggttgtgctctcaaagtacaaaagagatagagaatagcctctccaaggttaggatctaaaacaatgacctaaaactatatatatatatatatgtattaaaaacgtgttgggccttaattaaatagaggagaaagttttgggccgaatttggaaatcttcaaaacatcaataagttgcgtctcgaaattgccgtcaggtattggtgtcgctcgacaccaggtgtggtgtcgtttgacacctacgtgcattttcgtctccgggttgcttctgcagcttaagttgtctgttaatctccagaatgctccataatctccaaatgcatctcaaacatgtatagacctgaaaaggattagaaaagactctagaaataacaattagactctaaaacctatacctaaaacatagttaaaaacagtaaaaatagggatatatcacttcctgtatcaactaaaactcgctcgacgttgaaagccccgatagtcaatgtaatgaccaaggggtcgttgtgcggctgatccaagcagttaatgttgctctcatggaaagtgactttgtcatctggtccgttgaatggtcgtgtcaagttacgatttgagtgataagctttgattgatgtcgttgtgtcatgacaaaagaccgaatctcctagaattgtgaagattcttccccgagcagcttccgattcatcgtcatatgcctcgcggttgcctctacctctcttgggtccttcggggtttgccgtaggggctgtctgctcggggttcaccacaatatttacctgctcggttttggctttctccgcttctaaatctttgatggtcaagcctccaccgatttcaccagctaagaacttggccgccaatttcgccccgagactacgacacctagaggtatgatgaccctagcttttgtgcaatttgcagtattcctgctcgtttcctgcagggtggtccttcgtcaaagttaaggattctcgtccactacctcggccgtggcctcgccctcgatctcggggcatgtcggcttgataattgtgggctctggagaagtttcgcccctcgtgatgtacgaacgtcccgccttggcgcgctttttatggctcggagcgctagggtggaatttttttgccgtgggatgcttgttttgacggctcgtgcgttttcgacagcagctccatttcttcctcatgggaaacataatccgaggctcggtgcagactgtcgcagattgtttggggcttggacagattt

SEQ ID NO: 18693 - DNA, 1806 bp, Arabidopsis thaliana
ttaactttttgtcaatcccgttgttttctgtacgtacttttgttaaacgttttcatttgtacgtacactgggtacatctaattatacagagttgacggttacatttttttgctataccgttacatcgatttgggaccaatcatcgcgtctttctaaaatctatttaagaaactggtgataacacccttaattcattcaaacaaacgtccaatcccatcacacacataaaacagaaagtcggttattctggtttttgttgttgtcatcatggatgatggatatcatgccatttccgaactttgtcccatgatcaccggatggagtatacgcgcttttgtggtcagggtgtttcaaaaatgcgtgggaataaatgagttcgacctgggtctcatcttggcagataatcgagtaatatttcgccaatgtctttataacgtttttactttcacataccgtacatgtcactaatcatgatgatttgttgtagggaatgcgttcccgcatagaggctaccattaatcgtcgccttgcttcattttactctgaccgtatccgagaaaatgagtggatagttatcaatactttctcagttcgtctccacaacagaccattgttaccaaagtttcaggattgcctgcaataccgtattatgattttactccttttgactacatcatcgagaggacagtttctaccggagtgttagtcggttagtatatttgactgtctattcatttttgtaaatatgtacgtacacataatgcttttatcttccattacgtacaccagatgttattggtgcgctcattgaggttggcaatttgaccaaagactaccgtgggcggaagcttccttttaaaataatggataaacagtaagttgtttatttttaatgtttttggctatatgtttgttatatcctgtgtataatatatattctctgtagcaaggaagttcttcaatgtgaagcaccaaaatgatcaagctttcgaatttcaaagattcttccagcggctaactggtcctcaaaacattatcgcactcgtatcttggcgtctaaccgggatccataaactgaaggttgtgaccaatggccctatctccaaagtcattgctaatccggatataccggaagtggaagaaatcagagtcgttgtctattagtttatttcttgtttcttttattctaaataactacagatttgtaaccgaatttaaacatatccctacttttatgctacagttttatcttctaattgctacagtttacttattacaaatacagcctaattgtaatgaccttccatggacgtacatttatgtttgtgtacgttcaaataggtgtactctatgtataatgtaaacaaacttagttccattcataccccgcacatatgaatatgatggcgcagacgatggttgcatcagctcggacgggtgcatgacgctgcatgagcttaagtgctccattgatgtcagtttcatgaattagaacacgtattgcttcgttatacacagccgtcggattgttagcgagaaggcaccttttgaaaaatggtcgattgcggccttctccttggggtccggttggattatggccacctcctacttggaagtcatcgggaacacggcacaagctgtagatgttagcgtctttaaggacatccggtcggtagacaatgtctcttccacgagtgccggatcgtatcagtggcttaaggtccaaccagcttttgtctgccactttcttagctatcatagcgaacaagtcgtcggaaatagtgggattgccatcttagtaatgag

SEQ ID NO: 18694 - DNA, 595 bp, Arabidopsis thaliana
tcaatttaatacttacccatcgttacatttaacgtcttttgtttcatttcatgtgtatatatatagaaggaaaaaaaaaaggacaatcaaaatagtaaaaaagagtaataactacgacaaagctagctaagcgacctctttgtctaaccttagtgactcgagcctctcttccttaaccttctttataaacgcttcaattcttcgattcaggtcctctagactcggcaacatctctttctccatcttcaccggaggcgtcaccgtcagagacgactggtgatagtaattagtcacgtctctaaaagtctctgatttcctcaaagaatcaccaccggcgccaagtccgaatatatccggtctctggtaatgactagtactcaacggtcttgacgttccctcctccgatatcgtcttccacttattatctcgcttcgggttcacactttcaacgccttctttctaatatcatcgcctgcaaaataataatcccctccgaagttacataaatagtgtccaaaattcgaataaaaacgtatccgttgtcttgaatgacgtcactttttcgttaacatttggaagtgatagtccttttgga

SEQ ID NO: 18695 - DNA, 1517 bp, Arabidopsis thaliana
tgcaactcatcttaaaactgtgtatggtgggatgttggttattgcaacagcacaagattctaatcatcatcattatccacttgcgtttggaatcattgatagcgagaaggatgtaagttggatttggttcttagaaaagctgaaaactgtatattcggatgttccctgattggtctttattagtgataggcatcaaagcataaagaaggctgtcaagacggtgtacccgaatgcgcttcatgcagcttgtatatggcatttgtgtcaaaacatgagagatcatgtgaaaattgacaaggatggagctgctgacaagttcagggattgtgctcatgcatatactgagagtgagttcgagaaagagtttggtcattttacaagtttatggcctaaagctgctgactttcttgtgaaagtagggtttgaaaaatggtcgaggtgccattttaaaggagacaagtataacattgacactagtaattctgcggagtccattaatggtgtgtttaaaaaagcgagaaaatatcacttgttaccaatgattgatgtgatgatttctaagttttctgaatggttcaacgagcataggcaagattcaggttcttgtccaatcacagtacaagttgtgcctactgtggagaacatattgcacattagatgtccagttgcagccaaattaactgtgtttgagcttaacagttacaaccaagaatacaacgtgattgatctcaactcggtaagttttctggtggatttgaaaatgaaaagttgttcatgcaaatgttttgatatagacaagatcccgtgtgtccatgctatggccgcagcaaggcacctcgccctcaagaaagggagaaatgcgaatacaaccatctacggactctgctttatgtattacttgatagatagttggtcattggcctattaccggacgttgtatgtagtcccacatgagtcggattgggttcttcctgcccatattaaagagttagttgcctttccgccggaatacacaccaaaaggaccaggatgaaatcaagataagcggtttccatcagctggtgaagcgcgaaagaggagaaaatcgcaacctagaataaacttggaggcttggctgcagcctgaggaagactaagtctgatgcagaaagggttcaaccggaacaacctggccaactgcataaagggttcaaccaatacaactgagttcatttgtatttgtattatattatttgcaagtgtgatgtactattttaaacttcgacaactgttttatgttttcgtatttgtattgaatatgtgcaagtttattgaattctttgcaagtttattgaattcttagcaagtttaatgtattcttttaagttcaactgagacaactgatatatgtatctttattttagggttaacaaaatgataaaataattctcaatattttcagctattatcaacaactagacattgaataaatccagaatatgatattacacattgttatactaacttgatcataactgg

SEQ ID NO: 18696 - DNA, 1889 bp, Arabidopsis thaliana
gtttcttgcgggtttaaacatagatattcaagacagattggagactcaatactatgttgaaatagaagagatgttacacaaggcgattttgtttgagcagcaagttaagaggaagagttcttcacgatctagttatggttcaggaaccattgctaagcctacttaccaaagagaggagagaaccagcagctataagccgattgtcaattcaagggctgaaagtaaatcatatgctgcagttaaagatcacataggaaaagctgaaatttctacatttagagttcgtgatgttaggtgttacaaatgtcaagggaaaggacattatgctaatgaatgtccaaataagagagtcatgattctcttggataatggagaaatagagcccgaggaggagaattacctcggggttggtaagctgaattaccataggtcctctggaagttgctctgaggaaatgacttcagaaaggcaggctttggagtgtagttcgatgaactatggttccctgtaaaccgattgtgatatgatcatggacaacattaagaatagggagcatgaaccgaagcttgaacgtgagcttgtagccgaggaaggagctaagcttgtagctgaggataagcttgtagctgaggagaagcttgtagcagaggatgttcttgtcacaccgatcgttccaatgactcgttctagagctaagctattcaaccaagccatttgcgggatgcttaaccacatttgggacggaccaaatgacttgagccaagtcactaccccttttggttttgattcaagctcaaggacctcatcaagatggataagtgattcatgagtgctctttttttttgcctttggttttgtcccgccgggttttccaaaggaaggtttttaatgaggcttatgttttcacttcatataatccattttgatgattcaagaccaaaacccactaaaataaagagacaattttgtggcttttgaagttgaagggtttattttgaatttcaaactatgtttttaatttctgttgtgttctaggcagccttggttggagtatgttccaagacttgcctcttcatcttcccctctccttctctttatatactcttgtattctcttttgagaacttatctttcttttaatcaaaaaccttttataagaagatcatcttgttagtgtgtatatccagcaaaattcgtagtctcttttggtgcgcatatccaaaggatctaagtctcgatatcttgaagcccttccgcaagcttctgtgatatccatcgattcattcaaatctatccatcatcacggcttcacagccaccactatcctttgctcaacttaagagtgtcgagtccttgggaggatctcatcatgtggtatcagagcacactctgaaagttgagttctctatctctatcattttgtgtctttcatcttcagaattgtgtccgtctgtcaccttgatttaatttttataattatttcgtacatacgaaaattgcgaaatcaactgtcacgggtttgaaacagagtctagtattttgtaaaactgtttctggaatgtttggaaacgttttgataatttttagcatccaaacaagtgaaactgtcgtaattagggttctagggcatctgaagggtcatttcgtgtttgtttcaaaagaactagtaactggtgttgttttgttgtctctattgcagaaagaatggcttaatctgaggaggaagagactagccacaatcgaaacaacaaacttttggttgaagcctttgagaaattgatggataccaaactgaatgcttttcgccaagagtttcatgagaaactagagttggggcagacacgtcctggagaacgaaggagatttaatgagccgctttagcaaagagat

SEQ ID NO: 18697 - DNA, 1673 bp, Arabidopsis thaliana
gaggattttgagatgaatacgagtaaaattctttaagtttctggaaagatggagtagacaaggaaagaatcgagttttatatagagggtaaggaaatttggagccgaatccattcgggcaagccatgcaagtcccatccgagtaaacttggtgaccaagttagctcgcgtggagccaaagggaacaaaacgtggttcccacgccctttggtcggatgccatgcaatgcgttcgccacttgtcgatgccacgcgtccaagtcctgctgcatgagcgagtgcctagaaacgcgccctgccaagtgttgcccgaatcaagccaagtgtcatcggacactagctttcgcccatggccggatcctctatataaacagctcccaatcatttctgaacattcctcttggataatccagaaaatacttagaagtttttgggagtttgtggtgaagtttccgagagtttagtgagctttgagagagttcgtgcgagcttttagaggaagctaagagaggcttcaaggagaaggcggagggagatcttgaggagaaagtcgagttatccaagatcaccggtgaagcattccgacccttaacctctcattccgtctctaatgtgagtcgcttccaccttttcttgttgcattatcatgctagggttttcatgcattctcgaatatggacttgagtataagctacgaccttaatgcatatagagcacctagtaacctcttccattcattagctctcgtcaatggtgattgagtcttggactggtttaacttgagggtttgttgcgctggcacttagatttggttatcgaacttgttgtctagggataatttattgagcatgtcaatcacctgtaaactgagaaaacgaaactactcaattacctcatcctcgagaattctttatctaattgatttctttgttttctcttttgttgtttattgcatcttgttacctgttgcgtagtttttgcatttttctcttcttactcgacctgttacttgaccacccagttgtctggcaacagactgtacagtcgagtatccctgttacattttctgtctattactcgaccacacctagggctttacaacgagttgtgttggtcgagtgttttattgtttctgcttgattttctattttctgcatgttcacttaggattgctagaacacaccaaaacctgttattgcttggcttgacttagtgacttctaatcacagcttgattgttagcatcacacccatttggattgacaacctaaaatactacaatgatatgattggtgttttaggataattgaataaaaaacctattatcaatttggcgccgttgccaattgggtgtttgtttgttacatttgagatttcagacttgcttagatcaagttcattttcaattttcttttcagttactaactgtgtgtttttcttgttgtcttcttggtccaggtacacctctactgtatgcaaactcgatcaacaggcaaccagaacctctttttcaacaataacatcaaccgcgcagcttgcgaactcagaaaaaggagaaccacagtcaaccatgtacctcaggaaccactcgaaatggctgacgaccagaatcaccaaaatggccctgccaacattggtgctggagatgcaccacgtgatcaccgtcagaggaaggg

SEQ ID NO: 18698 - DNA, 468 bp, Arabidopsis thaliana
ccatgcatcaccagattgtaatctttatacctctcccatggaagctcaaaagccatatctgtaaacatagcatcactatccatccaccaaagaaactcaatctcaggatgtgacaacaaaagcttcctaatcaatggaagctttgcccaaaaaccagccatctctgcatcgagaagagccatgttgtagaagatctcgatcccatgtaacctacagtaatcgatcttgttcttgatcgatttcaagaggtaatgatcaccgacaggattctcacatggttttggcgccgaaccagtcaccaggagtacacgtggcttgttaggtccgatgaaattagggaagctagggttcttagctaaccaatcagatctctgctcatcccaatctgatatcttgggtccgagagtgtaaggtttattcgggtcgggtttctcttcttcaccttcgtcaacgaaaatcttgttgatg

SEQ ID NO: 18699 - DNA, 608 bp, Arabidopsis thaliana
gttctcaccgtcatcgtcttacgtggcacaatcggagccggtaagtttggtacgccggagaaagatatcgaggagatccgtgagcatttcttctacacgcgtaaacgcggcgagcctcaccgtgtcctcgtcgaggtctcttccaaaacgacgtcgtccgaagacggaggaaatggtggtaacagctacgagaccttcgatatcaacaagctattcgttgatgaaggagacgaagagaaatctcgagaccggactaataaaccttattctcttggtcccaagatctctgattgggatgagcagagacgtgattggctcaaacaaaaccctagcttccctaatttcgtggcgccaaacaagcctagggttcttcttgtcacaggttcagctcctaaaccgtgtgagaatcctgtaggagaccattacctcttgaaatcgattaagaacaaaatcgattactgtagaatacacggaatcgagatcttctacaacatggcgttgctcgatgctgagatggctggattctgggctaagcttccgttgattaggaagttactcttgtcacatcctgagattgagtttctatggtggatggatagtgatgcatg

SEQ ID NO: 18700 - DNA, 546 bp, Arabidopsis thaliana columbia
cttggattgggttaatattatagcctatgatttttacggaccggtgtcgtcctccaaatttaccgttccaaccgccggtctgcacgtttcttctaacaacgaaggtataattaagcatatatagttgtagtatatcatttaagaagggatacttcggtgatcaattttttttttttttgtttaacttggaactatatattggtactttggttgataggtccaagcggcgactctggtttgaaacagtggattaaggacggacttcccgagaagaaagcagtcttgggattctcctacgttggctgggcctggactctccaaaacgataaagataccggttataatgcggccgctgccggccgtagcaaatcgtgaggatgacgtatctgaggacggttctataaactatgctcagataaacaagttcataagggatgaggaatcagcaaaggtttatgaccccaaggttgtcggacattattgtttcccaagaagatttggattgggtacgaagatactcagagcgtcgaggccaaagtgtgatac

SEQ ID NO: 18701 - DNA, 525 bp, Arabidopsis thaliana columbia
aatcctgacagtgcattggagcgacaacattagatgaataccgaaagcacattgagaaagaccctgccttggaaagaagattccagccagtgaaagtacctgaacctaccgtggatgaaactattcagatccttaagggtctgcgagacgcatatgaaattcaccacaagcttcgttacacagacgaatctttagtagcagctgcacagttgtcataccagtatataaggtggctgatctctcagattacttgttaatagtttaagtaagggtgtcataaatgttacttacacgtgattgtcctttgattccagtgatcgtttccttcctgacaaggcaattgacttgattgatgaagctggttctcgtgttcgacttcgtcatgcacaggtttggtggagtcatataccaggtttatgtcagttaccattttcattttgtgatcattgttgaacttgctcgtttatgcaggtccctgaggaagctagggagcttgagaaggaccttaggcagataacagaggag

SEQ ID NO: 18702 - DNA, 610 bp, Arabidopsis thaliana columbia
tgcctcaaaattaatttgaaaaaaaaaactgaaaaaggaaggaaatttggtgagaagaaacatacagtgggagggtgaacaaagaatgggcgcgacgcggagaggaagacgactgagaaagatactccggtacccggaacggcggagagcaaacagatgacgagctgaatgggcggagaaaccggtggcttcgccagatccgtcgcgcgatcattgttatgaacggttggtctttggtaaaaaacaaaaaacagtacaagggagaagaaatagacaaacagattgagttgatggaagatgtttctaagaagagagcttaaaaagataaatgttacgtacccgtgtgtttgtttctgttcgagtatccggattaagactaaggtactgattagtattaataactatttggattagtaccaaaagaaaaagagaaaaaaaactatcggattggcttatctatgccacatcagcaatatcacggagaggatcaacggtacacgcgtatcctcatgtacatcacttttttttttccttcagatggtgggctatatatatcgacttcaaaaaaagccttttacaagcagatcgactaaagcggaaaagaaaaatg

SEQ ID NO: 18703 - DNA, 609 bp, Arabidopsis thaliana columbia
  unsure (1)..(609): unsure at all n locations
tnnnnnnnnnnnnnnnnnnnnnnnctaaagtaggatgtcactgatgatgttaatcacactgaccttacagaatgggccttatgaacgcatttgattcgcaaaccgaagattcttcacctgcaattggtcgcaacttgcgtagcgcccgctggcgcgtaaaaaactctccgaaatggtggaagaagagctggaacagatgatccgccgtcgtgaatttggcgaaggtgaacaattaccgtctgaacgcgaactgatggcgttctttaacgtcgggcgtccttcggtgcgtgaacgctggcagcgttaaaacgcaaaggtctggtgcaaataaacaacggcgaacgcgctcgcgtctcgcgtccttctgcggacactatcatcggtgagctttccggcatggcgaaagatttcctttctcatcccggtgggattgcccatttcgaacaattacgtctgttctttgaatccagtctggtgcgctatcggctgaacatgccaccgatgagcaaatggatttgctggcaaaagcactggaaatcaacagtcagtcgctggatacaacgcggcattcattcgttcagacgttgatttccacgcgtgctggcggag

SEQ ID NO: 18704 - DNA, 490 bp, Arabidopsis thaliana columbia
gtgaagttgatgagaaaactttgaccggtgaagcattctccgtgcctaaactgaaagattcgacggtttgggctggaaccatcaatctaaatggtataaaaaaggctcaagcgttacacttttttcttatgacctttaccttcaatgtttgatatttccagctcctctgtttttcaaggttacatgactgtgaacaccactgctctagctgaggattgcgtggttgcgaagatggcagaacttgtagaagaagctcagaacagcacaaccgaaactcagagatttatagataaatgttccaagtactatactccaggttagtatcagcacctgactttttttcttcattacaacttattttgttcttgattgagaccttaaatctttatgcttgtatgcagcgatcatcctgatatcaatctgttttgtggctacccatttgcattgaaggttccaatctgaaacattggggtcacttagcactagttgt

SEQ ID NO: 18705 - DNA, 580 bp, Arabidopsis thaliana columbia
gaggtaatccgtctactttaagtgttatggcttttcttatataacaaattcatatgctattctggtttgcattgattcttgttgcaggtacatgaaagtattgaaagactttgttaggaatacagcaagaccatagggttgcatagctgaatcatatttagcagaagaatgcatggagttttgcagtgcttttttgaaaaagacaacaagtgtagaagagaaagctgacaaaaacacaaagtatgaaaatgcctcaatcctagagggtcgtccaatatctgcagcaacttcagttagtctcagtgaaattgagaagaagatagctcatcttgctgtcattcagaatacggccttattttatccatatgtgaagtaagttcaatacaaactcatctcctgtttatccacttaaataaagctgaagtttgaacactgacacttttttaaattccatcatgcacctataatttctacaagactgtaatgttaaatgcaggcgtgatgatagtgttttatggacaatgcgtacacaaaaaatttcagattagttaaagaaaaaggcatttcagattagttaaag

SEQ ID NO: 18706 - DNA, 1447 bp, Arabidopsis thaliana
ctgttatttcactttaacgtacaaaaaaaaacacacacagagagaaagagagagagaaaagtttccgcattaatggtggcttcacctaccagttgtctagtggtgagagattaatgtgacgacgacgacgacacagaacaagagatagagggagaacaaaccaaaaccaaatctacactgcaatctcttccctcatcttctccaattatcatctctctctgattctgttgcgccgccgcggagaatgtggaactcggcggagaacgcattctcgcgttcgacgtcgtttaaagacgaaatcgaagacgaagaagagcttcgttgggcagctttacaacgtcttccaacttattcacgaatccgccgcgggattttcagagatatggttggtgagcctaaagagatccaaattggtaacctagaagctagcgaacaacgtcttcttctcgaccgtcttgtgaattccgttgaaaatgatcctgaacagttcttcgctcgtgttaggaagagattcgacgcgtaaatctctcaattctctcttacaattttagttcaaaatcattcagttttggttgaattgagtgaattttttttgaacagtgtggatttgaaatttccgaagattgaagttcgatttcagactctgatggtagactcatttgttcatgttggaagcagagcattaccaacaattcccaatttcatcattaacatggcagaagtaattacaaacaattgactcattttttttcttcttcttaagttgttgtgagcaattatggtaattaagaagatttttgttacagggtttgttgaggaacattcatgtgattggtggaaaaaggaacaaattaacgattttagatggtatcagtggtgttattagaccttcaaggtaatttatatacatctaattttgctgctttttcattaatatttttactattttttgtctaaattctttgtgttgctctttagattgacactactactaggtcctccaagttcagggaagacaacattactcttagctttagctggacgtcttggaactaatcttcaggtacaccgtcggtgaccgaattcaattagtaaccattagaagattgttttgtttcttggttttgagttatttttggttactttgaagacatcagggaaaataacgtacaatggctacgatctcaaagagataatcgcgccaaggacgtccgcatatgtgagccaacaggattggcatgtggcggagatgacagtgaggcagactcttgagtttgctggtcgttgtcaaggtgttggatacaaatatggtaagtactaggaggcattatattagttttggttttgagttggtgtttgacatatacaacaaactgaaaacacagatatgcttttggagttagcaagaagggaaaagcttgcaggaattgtacctgatgaagatctt

SEQ ID NO: 18707 - DNA, 595 bp, Arabidopsis thaliana
cctatcttctgcctccttcgaataattttctgcaaaattctacctacgtaaaacagtacatgtaaagtacacagttataccaggagaagaattacctgttgagcgtctccaggcagtgtatggcatggaccttcccgaaccccttctggcctaggaagttgtgcatacacctccaaatttggaatgagctttacctgacaaaaacagagaaggatcatttccagaagcgtaaccagtaaattgactatgaacaaatatctggaatatttaccactagtccagtttgataggtggcaaatatgacaacaccttcttccaccgaagttgaatcctcattaaagagcttccaagtcgaaccaaccccaacaacacctcccatcatgctacttatactgctggatggaactgcagagttaccccccttagaagacaccaaggagcttccaaaattttcatcaggcaaaggtgatgccgagaggactgttccatttttttgtccatcgagaagacactgatgcaattaaaataaggtgtacaaacccattcctcaatgttagtaaggctgaacaagaaaccagtagaacacatacacaaa

SEQ ID NO: 18708 - DNA, 1432 bp, Arabidopsis thaliana
tgatccattagttgagccccaatgagtagagaaaaaccttgaatcaggagagaaagtcagtgctgtgaccaaaccaagatgcgctttcttgacgacttggatagtttgcattcttgtcgattcaagtattaaaacatctccttcaagggttcctctgcattaagaatatattatgactaccaaaaacagtatcatccttatctgttggtcccaaaagtgagaagacagatacacttacattgcaagaagcttcccatcagctgagacattaaaagctgatatagagttcttttttataggcttcgaccattttcttttccataattttgtatcacatgttataatactcccaccacgttctacgcaaaaaaatcaatcctcaatcgttagcagtgacaagaaggaaggatttatagttcaatattcttgtaatgtcagaatataagtttaccagtgtttgcagcaatgtaaagaacttcattgcctgcactgtctacagagaatctacaggaggcaaacatctcgtccttcattcaatattcaaactcatcagatccaatacaataatgttggaagtgtgtatgtaaagttgaaaagacactaagagccaattccaactgaccttctcttttgatagactggcaacagcagcagaagcattcacgtcccaaactcgacaaactggaccgccaagagatacaagaaattgaccactttcgctgcagacgaaaattatcattatcaggatatctgtttacaatcactgttcaaagatgattcctttgtcatccaagagaatgaaccacttttcggatagcaagtatttccgttatttgataagagaaagcaaacctgaaagtaaggcatttaactgaagaatgagcctgggactcattaagtaaagtattcatgctaggccatttaaaaaccctcaaagtcccatcctatactgcatcaaaacaaaatgcataagaaccactaaacgttttatgtctctgttattaaaaagagattgcatcaaagatcctttttttacctccgcaccagcagcaagaacagacccctccggattaaacgccagagccaactgttgtccaacatctcttaactctttaatcacttcctccgactcaccagcctgattatcctctcggctcataatgtcttcccaatgaaacagtctgtgtatcaagagaacatcacttattaccacatctcttgtaaatttctctctactccaaacccataaactcacagaacttctctctaaaatctcatgcactacgactttgtatacagaaacttcaagatcatatgctttcatttgaaatcgaattgagaattactcacttgcaactgttaggcaacgcgcaaataagaccaccttcccgaggatgaacagccatccgataaggcagatcagagccaactg

SEQ ID NO: 18709 - DNA, 2071 bp, Arabidopsis thaliana columbia
acttgattagtagacaagtggcagcctcccccgacttgcttcacaccgacccggtgtgaaaacatttcaaagaaaaggtgccacagagacccaagaaaatcaaaataaaaagaaaataaaaatgatatatgacaagggaagaaagggtggtactgtagtactcaacgatggtgggtggggctcttgctagagctatgtggcttgcctggctttctcctgctcctacctaagcgacggcctgggagtgctctggtggtggctgcgaggtagaagctccactaggtccagcagcagggaccaacctctctgcatgtcgatcctcaatagtcttagactggttctcacaggtttgcatcatccactcctcctctgcgagtacatacacaaggcctgatcctagaaatggctctccacatcttgtgcatcatactgttgttcttccttgtcaatgctatcatccatgccatctgctgtgagatatcgtcacctgctggtggtggtgaaacgcggtacggtgtggatcctcaggagcaacaaatatggctgagcgtgcgcgagagatgtgggataagcataatcctcataaatctcatcgttactgataacatgctcatctgtaggctgagcctctgcagtccggcgtcgtcgaggaacggtcttagaagggtcaggaacaaggtactgctcgttatgttcgaacactgggtttgtcgtggagagaagtgaagtaatatgctggttgggtatcccgcgaaataattgttatcgtctctgcccataaatggtacactcgacttcttggcttgagggagctggtatgatcaggtagtccaagtccattcgctctcatttaatggatgactcagccctagagaggtctagatcgcagccaaggaacaatggaataagtgcagtactagctaaaatgctctgcgcggatgatttagaaacaatattcttcatcttcaccaatgtgtcacacacaaccgcatctacattagtgtcaggagctggaagatcggagtaggtgcctagctatcgtgttcctgtagctatcgtgttccaaaagttgtcagcaaccgtaggagacaactttgaaaactcaaccgcttctcctttcgtaaatccatacatgtcgtagatctcaaacattgtcttgttgtaatgttttttgttgagaaagaatgtgagtgttccttgactcgcttttgggttctctggatttgcgtacgtgaggcgacatgtggcaatgaactccttcacaagtttaggatatacatcctcatctatttcccgataccatcccataccgtgtgtttgaaacaccgtcacgacatcattgtacaggccaagtacctgtagagaaggtctgcaagcaactcgcgttggcctcacatcaatatgtttcaaagctgccaatagctttgtgtcctccttatcccatatgtcggtaacaagaagttttgttaggatcttcttttggcagtgccccggaattgctcgtacgtgctcgagcagtgcctgcagagtcgtttgttcgtcccataccttgcaaaagagacgaagtgaagtcaagaaatcacttaaaaacaaatcaaagaaattaatcattgcattttagttaccaaaactaaacaatgcatcatgaataatcaagttcaaaggcccaaaactaaacaatgcatcatgaataatcaagttcaaaggcccatcccatttaaaagccgaccaatttaaccccaccccatttaaacttatttaattttaaggtctattaaggtttcccatttaaacctatagacccatttagatataaattctattttactaactttgaatacaaaacaaccatttaatcaacataaaaatgtgtctaaccttttataaaacaaactagaatcaatacttgccatcaaacttcaaattcttaccaatcaaaataaattagagaatttataataaatggctatggatttgaaaagaatgtacaaactaactatggccgtatagtacctgtcggaaacaactttaaattactccatctcctacaataggtttttgattgaggggc

SEQ ID NO: 18710 - DNA, 1794 bp, Arabidopsis thaliana
tattgaagttgattcattacaaatcgagacactatcatatctagatgcccaaccagaagatcttgatgatccagtagtagaagccgaagatggatcagatgctgaagatggaaattctgatatcgaattaactagtgacgaatccgaataattttttttttcatttggactttttacagctttttttgtattatcaaaaacattgtttccaaaactgaagaagtttttttatttaattttttgttcacaagtttttatttttgtattaaaattggtaacacttatgtcacaatctatgaccaaacgcaaaagtcactaaaacagtgacaaattgtgtcatcgtagttacaaaattctcgtaactatacatgacataaattcagtcacaattatcgtataatttagttaccatatttggtcgcaaatccgtacttatatttatgactatataatttgtaacaaattcgacataattagtaataaacattagttacattcaattaagtcataatattataacgaaatagtaacgtttttatgaccaaataaatacgtcacaattttgtatgaaaatggtcacaattttctgacgaaaataatggtcgcaatttttccgtaagaatattcagtttttttctgtagtgctcctccgcaaaattatcgattccactcgacaaagggaagacagagtagtcaagagttattggtgtcgatcgacaccctggtgtatcgatcaacactggttcgttttctgcaattggaaaagatgaaggctgagctgaccgttcgcgctgaagtattgggttgagctgctttccgctgcgtagtgtgactgcattgataaaagctgatgtaggtgagagattggagaactgagagtgtagattgtcaatcttgttattgatatatgtggagagagaatcatagttgctatcaagctttgtggagagagattcatatttgctatcaagctttgtggagagagattcatatttgctatcaagctttgttagctttgtggagagagattcatatctgcgcaaacatagactccattctggtctctgaagaggatgaaggggggggggcttggattggagcataaattgctgaaattcttcgttctttgtcgaatccttgcgtcgaaagacaagttaaagcattggtgatgagaagtaaagcttcactagtggttcttgttatgaagttacaggagcttgcttcatcaagttgattctggtatggcttgtctatttctttgtagaataggttgatgagttggctctcttggacgccatgttggggacattcacgctgataagacctgaatcggagccaagatgctctaagggattctgctggagcctgagtgaacgaagaaatttgcaaacgaattgcctctatcacggattcatcgaagaagtgaatcatgaatgctttctttgtatcagtccaactggttaaggaacctggttctagttgacgcaaccatgatgttcatctggtcgcaagagagtgggggaagagtttgcaaagaaggtaatcagccggtataccttctgctttaatagaggaaacaatgtcttcgaagacttccaaatgatccaatggtgattcatcgggagctcctctaaactttcctttagatacaagatcataataggcagggtgtatagcaaagtcatctctttcaaaaggaggtagcttgaatgctgatcggtttgtgtagaagagatcagttctgttaaaatcgcctattgtagccgtctggttctacagagggtgtcggtcgac

SEQ ID NO: 18711 - DNA, 2003 bp, Arabidopsis thaliana
gttttgtaggacatagtttctggagcttttttcaacacttgctatcctggatatatagtcccttcgtggttcgatcaccaagcagttggatcagtcttagagccaaggctggaaccacattggtataacactatgctttctgggatagctctatgtgcagttgtatcattccatgagaaccaagatccgatcatcggcagtttctcagtaaaatgcacattgcaatttgaaaacgaagatgggtctcttcgctttgattgtgatatcggatgtttgaacgaaccaggaatgattgaggcagaccatgtttttatcggctatgtcacttgctcacgtttgaaagatcaccactctatacctattcatcaccctacaactgtaaaaatgcagttccacttgactgatgcttgtaaaagtaaagtggtggattgtgggttccgtttgatgtacacccagagccgtggctgtttgttagaggaagaagtcaacgccaacttcactaaattatacttggttttattgtaaaagtaggcagtttttagaaaattatttgagaactagacagtttttttggaaatatgctgagagagtactttttattgggcttgtctaataggattcatgtgagatagaaaaaagtagcaaaaatccaaaagaggtgtcaaatacaatagtagccttgtgttttaaaaacacacattccggctgggttcgacgaaacaaattggattgggttttaaaactcattttaggcccgttaactccaattcgtattaagtgagcccaaatatttgagcccgatagtttcattacgttttttatccaaataacttctgagcccgtgtttattctgagattgagttactttactcttcttggtttttcacgaaccctagccacagtcggtgtacaacaaatcgagggtgaacgagttcgagaagagagacgtttgagagaaacccagtacaccaaatgggtacactataatagtacaccaagtgagaacactagaacagtacaccactagtacactagactagtacactagccaagatagaatataatagtagactagaatagtacaccaaatgggtacaccaattagtaaccaagtgaattaaaaacagtacaccactttggtgcactagactagtctactattatactaaaaacatttaggaaatgcaatggaattaaaaactataccctaaaactatacactaaaagacattattgaaatgtagtgaaattcaaaactatacactaaaagacaaagagagaagactaaacccaaggaaaaccatatatcatatggaatgaagtttaaaactataccctaaagccttagattactagaatttagaattccaagtaaataaataaattcctaattcaaagtcataaccctagattattattatgcttcataacacttgaattgaaatatattgtattataatttggattgatactttgacattctagaagtagactagatagttattgctatgatggtgatatgtgtaatggtccattttatgacccataagattatcctaaaggattttaatgggtctctcatgtcttaaattaggaggtttggtttaagctattcagttttcccggtttaagaattaaaaccgccaatgttgtttttgagtcaaattttggttaaagtgttttcagttttccggttcaagaacaataaccgccagtttcgaatacaagaaacaaatgtacttcgggttttctctttcccggatagttaaaccggatatcggattttaatgttttggactgtttgtgtgtgtgtttataggacgaagctgaagcaaacggaagtagactgtgaatatcttaagagatgttgcgagaatctaacggatgagaataggagattgcaaaaggaagtgagtgagcttagggctttaaagctttctccacacttatacatgcacatgaaacctcccactactctcacaatgtgtccttcttgcgagcga

SEQ ID NO: 18712 - DNA, 1849 bp, Arabidopsis thaliana
gaaactagtaaagagcaaaacccaacagaccttctcttttgatagactggcaatagcagcagaagcattcacatcccaaacccgacaaagtggagctccaagagatacaagaaacttaccactttcgctgcaaacagaaaaatatcactatcaagaaatttatttacaatcatttctccaaagatgatccctttctcacctgaaagttaggcttttaactgatgcatgtgtcttagactcattaagtaaagtcttcatgcttggccattcaaaaaccctcaaagtcccatcctgcactgcatcaaaaaccaaacacataagaagaaccaccaccaaagtttatttctttctcaagagaatgaatataagatccttcctacctctgcaccagtagctagaacagtcccatcctgattaaacgagagagacaactgttgtccaacatcttttaactctttaacaactttctctgactcttcctcattatcatcctctataatgtttcccaatcaaacagtctgcaactgttaggcaatgcacaaataagaccaccttgacgaggatgaatagccatacgataaggtagatcagtgccaatcacacgcctaccaatctgcgaaaaacattgagaatgttcagagaattgtgaatgattcatcataagagaaggagctttgttattcgcacttacaggttgttcagagagagaattggtgtggagatcaacacgacagattaagatgacattaggtattccacttcgtccttctcctcctccgccggataaaacgatgtacgacgacgacgacgatccatcatcatcatcatcatcctgatccttagtgattttggatctgacagcttcctctagaatccagtcgacggcgtaaattggtacaccgtaggtctgtagattcgacggtggttgttgattactcgccattctctcgacggagctcaatgccggagcggcggacgaagtctgtaagcgtgaccttgaagacgacaacggagatgggccttaagcccaataaagcccagtttatttattcacacagaaccaaataattcgaaattcactttggagatgtactggattaaagatttagaataatactgtactatgagtttgtttatatactaaagtccaatttctactactatttttgtaaccaacaaaaccattaaaattaactatgagagacccttgataatcgcataattttgttggacaaaaatattaacaatggtatcgttatcttaccattggaacaaatcttgttcaaaatgcggagataatatattataaacggttatttaatttgcatgtttttcgaaaaaagactagtgaaatgtttaaacaaaaagaccacaaaacatttgaaagtgtaatataacaagaactgtaagcttttttttcttaattagtgatataggtgttgaccactaattaagcaaacacatgttgttggttctttaaggtatggatagtctcaaaataccaagaaatcctcttggatttttgttatagttattcaaaaaatgctccatctgctcttcagttaaagacaactttatgtcaattgacatattattaccgtcatttttgtagtcctgaaaaataaacgcataaatagaaaaaacatacaaaaaatctatgatagtttatgatgcaaaagcattgattctgccttaataacactacgtttttccaatctctccaagaaccttaacttagacatacaactcggtgatgcgaatactattatctttgtcattcacatcgtacataccagttactgtgtattcatacttcccttgaagtttctataccaagggagcatcggag

SEQ ID NO: 18713 - DNA, 1474 bp, Arabidopsis thaliana
agggcgtagttctgctggctctaaccactttgtttgactctttaagaccccaagcctgcgaaacagcatcaaagttatgtcaagcccctacgaacatccagctcggtgtcctttacacagcaataactctaggctgtgtgggagcaggtgggctacggtttaccttggccaccgctggtgcgaaccagtacgaaaaaactaaagaccaaggcagctttttcaactggtttttcttcacatggtatttagctgcctctataagtgcaacagccattgtctacgccgaagaaaacattagctggagtttcgggtttggtctgtgtgtagctgctaatctgttaggcttgatagttttcatctcggggaaaaaattctacaagcatgacaagcctttgggaagtcccttcacaagtttacttcgtgtcatcttcgctgccatacgtaaaagaaaagctgtggtttccaccaacgagaaagactaccacagtgaatcaaagaaaacgcccacaaagagtttcaggtaaaaccacctcaaaaaccgccatttcagtctgatttttacaagaaagggactcgttgaggccatctaacgaatcctcgtgtatgcaggttctttaaccgcgcacatgtgaaacaggatgatgaggttaattcagacggcacaattcacaatcaatggagactatgcagcgttcaacaagtagaagatttcaaagcagtcataagaatcatccctcttgtgttagctatattattcttgagcactccaatcgcgatgcagctaggattaacagtacttcagggtctggtgatggaccggagacttggccctcacttcaagatccctgcaggctctctccaagtcataacacttctctccacttgcctatttatcatagtcaacgatcggtttctctacccattttaccaaaaactaaccgggaagttccccacaccgattcaaagggtgggaataggccacgttttcaacattctaagcatggctgtgactgccatagttgaagcaaagcgattgaagatagtacagaaaggtcattttctcggatcatcatctgttgctgacatgtcagtcttgtggttatccctcctctagtcatagtaggaatcggtaaggaattggatccagatcattttattcgactcagaagtgagttccatctatttatgttcttggttttgtcttttggttgcaggagaggccttccatttcccagggaatgtagctctgtgctatcaagagtttccagagtctatgcgaagtactgcgacatcaataacctcggtgttgattgggatatgtttctacacaagcactgctttgatcgacctgattcaaaagaccactgcatggttaccagatgatattaaccatggaagagttgacaatgtttactggattttagtcataggaggagtcttgaatcttggctatttccttgtgtgttcttggttt

SEQ ID NO: 18714 - DNA, 1367 bp, Arabidopsis thaliana
caagatcgtcgagctcttccgtctcctacgagcacatacatccaaagatcttaaagctcttccacggacgcctatctccaagatcgtcaggctctcctgctagcgcctatctcagaagatcttatagctctcccacgagcgactatctccaaactcatcaatttctcccatgagcacctctcttcatgatcgtcaagctctcccgcaagcgcctatcttcaaagatcttccagctctcccacgagcgcctatcatcgaagataatcaagctctcctacaatcatctatcttcgaagatcgtcgagctctcaaacgagcatatatctttccacctcttgcgattctccgactcttgcaaaaatccacacttgctcaaacaaagaatttttctttggttcgggccaaattggcatgtttccggtttcagaaaaatattcgccaatcgcaagaaaccttctctcgacgaactcgggggggactaattatgggatacgggctttgccctctatgcccaattcggcccaaacacaaatagaacaagtcaataaggctcctaacaaggaagaacggcccatcagaacaacggcccatcagaatgactgctcggcccatcacggctcggcccagcctgataaattcagaagggcaaaacggagatatcgcaagagagactaagagaaccctagatcagcttcttgcctataaataagaggagatccactactaagaagggattggagaacctaagtcaccacttagagaatttaagagagaattgttgcctagctctttatctcttactttttggttttccgttctgtattttcaggttttccgaccattaatattagttttccgacttgtactttcggttctccgttctgtacttacggttttccgttctgttaattactgtctttccgttcgtcattaataaagaagttactccgttctccccaaaccccttagttatttattgttacaacctcggtacaaacaagaggaaagacaatttagatttaatttcaccttatcattgattatcgtttttattataatcgcttcatatgctccaactttctaatgcattaccttgatgatgagtctttagatttgctgacttctttagcagaattggcagtaaaaccctgaagttgtttggaaagccaacagatagacgaaacagatttttaaacaccgagattacattacggaagacatctgaaaacataagagaaaatgtaaaactctgaacttaagtaagatgctctctggctttttctgttgatcaaaactcgaccatgggatcattggttcatgggtctattcaagcgtccaggtaattggttcagtttgtaagtgattga

SEQ ID NO: 18715 - DNA, 441 bp, Arabidopsis thaliana columbia
ccgagtgcacagaaatgaactagtctttagaggaagagagtttaatgctcaagaggtattgagaagagcagaagacgaccttgaggaatggagaattagaacagaggctgaaagctgtggcacaaagcctcaagtgaacagaagttcttgtggaagatggaggccaccgccacatcaatgggttaaatgcaacacggatgcgacttggaatcgggataatgagaggtgtggtataggatgggtcctccggaatgagaagggagaagtgaaatggatgggagctagagctttaccgaaactgaaatctgtattggaagcggaactagaagcgatgcgatgggcagtcctttctttaagtcggtttcaatacaattatgtcatctttgaatcagactcacaggttttgatagagatcttgaacaatgacgaaatttggccaag

SEQ ID NO: 18716 - DNA, 532 bp, Arabidopsis thaliana columbia
cccgtttgaatcttattttatggaatgtaatgtgaggaactttgtaaccatagagtagaagaggacatggatttaactcttgcctttagattgatacgaatgtggttggttctgcaatatactatattgataggaaacagttaacaatctacttaagaacacttaacaatcagaatagatgagaaggtgaatcttacataagctcagagataccctaaaaaacaaagattacacaccttcctcgattacacgatgttttgatttgtcatcagaaaatttatttacagaggaaaaacaagaaaaacaaaccaatcaatcgaataaacacacttctcttctgtcaaatcaaaccctagttaaagatcaattactgctgctaaagccaccacctttcatcatctgaagaaactctttgtaattgactctaccatcaccatctgcatcaacttgcataatcatcttcttacaaccatctagggtcttcccttgcttgagtccaaggaagcatcacagatttcactcctcacagtga

SEQ ID NO: 18717 - DNA, 513 bp, Arabidopsis thaliana columbia
ggaagtattaattggtatgtttacaaaattcaaaagttaaatttaccctactttgtggttgtagttttaaaaaaaaatgcatagtaaaaaaaagtagtgttccgaaaatatatatataggtaacatggagaaacccttaatgggcacgtaaagtagtgccatgaggatataaatttgaattgctaaaaatagtagtgatccagcgccagaaatagtaagagacaaaaaatgttgaaaccaaaagtgtgttaaatgagttgtaacaggacgaagatagcgatgagacagagagcttagagaaagtgagaggacaagaagaagaagataaagaagaggaagacaaggaacaatgtagccctgtctctgtacttgaccctcttgaggaggaggaggaggacgaggaccaccaccaacacgagcctgatcctcccaataacctctcttgcagctttgaaattgtacaacgtgagtatccaatcttccatcacatcaaataatgggccaaagtaattg

SEQ ID NO: 18718 - DNA, 557 bp, Arabidopsis thaliana columbia
aagtacactaggctttctctgatctactttatcagatacaacagttctagagattggccttatactagcttccttaagtattggaccttcctattcattttgaatacaataacaacattagcattgatcctactaaaaagcaagaatccaaatttctagattatctttacacaactctgcaacatactaagatattgaataagagaagaacactgaccccttgatgcagaccttgagaagccattaacatgagtttagctccacttcccacatcagattgtttcaaagtcgacgtttcaaccaaaaccttaccttcaagaaacaaaaatcagattttgaaaaatacccattataaggaatcagctcaatcagtgaaaagttattggaattttaaccatcaaacctttgaagatgagcttctggccacgaggaagaacgttggtgattggttgtaactgagacttaagatctttgactgtacaatctggtgatccgaaagtggtattgatttgccccgaatttgactgttagcttaatcgtggaatctgcattgttgg

SEQ ID NO: 18719 - DNA, 562 bp, Arabidopsis thaliana columbia
caaaggtaattggttgtgtatataattaatctttatataaatatgatgtgatgagtgagtgagcgtgaatgatgaatattgaacagctgctgtggcatggggagctggagagcctctagtaatggaagatgtaaaagtggatcctcctcaaagattggaagtgagaattcgaatcctcttcacttccatctgtcacactgatctcagcgcatggaaaggcgaggtactcactcttcatgttcttcttcttcttcttcttttaattatatctcttcttcctatctcatctctatcttttggtcagaacgaggctcagcgagcataccctcgaatccttggccatgaggcagcagggtaagtggtataaatctggtatatatggatctcatttttcatccctcaatataattgaatgatgaattacaggatagtggagagcgtaggggaaggtgtggaagagatgatggcaggagatcatgtgctccctattttcacaggagagtgtggagactgcagagtgtgcaagcgagacggagccaatctgtgcgagagattccgagtg

SEQ ID NO: 18720 - DNA, 222 bp, Arabidopsis thaliana columbia
caagccattggcaacatgtctcgtcagctaaaatgatattctggacatgtgatagaagcgatagaatagttagcaatctcagagcatgctttcgaatgtgcgcactagctgggactctgacactacatggatccagattatctgagattgaagattcaccaagattatctcgagtcctgtctcaagcctcaagggctcttgatatgtcataagcttctactg

SEQ ID NO: 18721 - DNA, 397 bp, Arabidopsis thaliana columbia
cacaaagagaacatacagcctctgctgcgtcctttgcagctctgaaacgtcgagaacgctgctgattcatctttgctctcggcgcaactccatctgcaacagtatatttaatcaaccacatctcacagagcaaaacagacagatgataaaaaggaaacacaagatcacctatagccaaataaagaatcttcctcggacgcactaaagtaaaaagatggtcaatgtactcaaacattgatttaaatacatcatcgtacgtggcaggtgcaggctgcattgtaatcaaagtacgattagctagtagaatctttaatggaaatcaagtatcaccataacacgtattgcgatgcaaactcacgcccttcgataatatctcctcaactatagtgaataacta

SEQ ID NO: 18722 - DNA, 836 bp, Arabidopsis thaliana
gcataataatccaatcttaaaaattaaagcatatttcagattatttgccttaaatatgctttaatttttattggtcttatagcaatgaaggaccttgaaatcgcacttgggggcaatcttgtccaaaaaagtcctacccgtggcctcttgactcaccttcacatctttcatctccaccagcaccacttcagtgatctcaatggaactctttgcctccgccacgagccacaaaatcaaccagtgcagcttctactggccctaaacttgggttatacgcaacagattcaatgtaccatcctttatacacttcccctccgcaaatcagcgcaactccagacggacacttgctgtacggcgcgtacgatttgttcgccgccgctagagccctgcacttggtatgggaacaatcctctggatcagagcatatctcttcgggatccgagaggacgaggctattatcgcgctgctcgagaaggagggaggcatcttccggaaggatactatcagggccgaatctttccggcatgaggctcttgaggctcatgaactcgtctatgccgtcttttggtcttttgatcaagatttcgatttcaggagcgttgcgcatttcttgataaaactggcggcagtggccacatggtgcaccgaagatggtgccggtgacggagacagctatatgagtgagctttttcatggagttgagagcgaggttggtgacgaggaactgctcggcgtggatggtgtggtgaagagggagatttgggaactcgacattgacgcctaagaagacttcgcccgatgatgtgagtccaactgctccgactttgaagttacta

SEQ ID NO: 18723 - DNA, 324 bp, Arabidopsis thaliana columbia
ctggatgaaacaatagacgacccacttcgataccgtcgtctagttgggcgcattatttaaatagcgactacaaggactgaataaacataagtaataaaaatacactcacagttcatgcataatcctaaaccggctcattgggaagctgctcttcgcgtcgtcagaaatctaaagtctagtcctggtcaaggtattctcctacgtgctaatacacctttagatctctctgcctggtgcgattcacactttggagcatgtcctcattcagatcgatctctcaccggttggattattcagttgggtggctctcctttatcttggaag

SEQ ID NO: 18724 - DNA, 882 bp, Arabidopsis thaliana columbia
tgctttcgtcgctgtgcttcatgttatgggcaagctctactttgtcaaatgatgacaaagataatagttgaagacaatgccaccctaagtgactgctagtgatccaaatattatacagtggtttcaagttaatgttttaattttgtggtttattaccagagtataaacgatctttcacaattccagtttctttacattcaaattttcaatattcttcacacatattataggcatgagctttttatacatctcacaaatgacaatgagtactattatcacctttttaactttaaaaaaattcaattgttgatagcataacacactcatagtcaatggtcttgagtgaaataactaatctattaaccataactaatctataaaagtctctggcgtttattgaacaattaagaaatagatgggaaatgttggagataaactaaacttttcagggtcttagttgtcaatctgaaacggggcccgattaaattatactcgggtcattcttttgtccaccgggtttttcttcagaacttgagcgaaggaggtcgcgatattggagagatcttttctaatggcagcgttgggagaatcatcatcctcagagatggacaacgcgaaatcgccggagattcaacaatcttcgccagtgcatccgccggagtatcagaagatcgcaacgacgacggtggaaaatgcggcttcctggatcgatgatgcgttgcgtcaggcgcttgtttaccagaagacgatcacggagacggtggattctaccattgacgcctccaaagctcgattgtctcagattcgagatacttctgtagctcacacgagccaaaccatcgtaagctaactacaacctcctaattttcattggaatccaaa

SEQ ID NO: 18725 - DNA, 1343 bp, Arabidopsis thaliana columbia
gtaaagagttttccgtaaatccaccacaaataaagcgttcgggcagaaacctaagtaaccacgtcgtccatgcacaatattcacggtggtatcaaaaccgggtatgtagtgagttctatccttggtcttaagaaccaatatcaccaccacgggcaggtttacaaagagaagttctcgtcaaattttcctctttctagattcccgtcttgtgaagtgaattcaacaaaacaagaatgctagaaattcagatacattagaattaaccaactatagtatccttgacgtaagcatcttacattcagaaataccattcaaactattttggtctctagcatcatgactaattccaaaacagattcttagaagactccttacttgactgcactatcgatgaaaacaaacaaacaaacacattttcgtaaggatcaatctataaataagccttctcttgaaaccaaaagccattcctaggctttatccatcaagatttcgaaatttttacataaagagagaagaacataatcaaatcctaaatatgatctcataatcgtttaaattatgttcattaattaccgtttaaagataaattaagtacttccaccgcttgatcttctcctgcctctgcttcttcttttcccattagacgaaaacaaagaacaaaagccacaaccaacggcagatattttaggtgaaggtggatccaacgctggagatagctcccccaatcttccaccatggccacatcctccgtctgatgcgctacgtttcactgttgcagtcgtagcagccattgatccgtcacgatgatcgttgcaccggtcttcttgtctttcgtcgttgcgaatttctccgctcaagaacctgtcgttccagatgagtcctgacgatccttgtctcctaaacgacgctgttgatctctgcaacgccatcttttctcttctctctttcaatggaattgtgaattttgtcaaggaagaaaacgtaaaacaagcatattaattgattatgggaaactatgtttttttcttcttgttattacttgttttcctttttggaagttttctttttattttggttttaattgttaagttggaagttttctttttaatttgtttactttttcttttcataattattttcttattatggtttcatatctgtagtttaaagttttaaactaacaatatttggtaaaatgagattgtttatcaaaaataggaatataggataaccaaaaataggaatataggataaaaagtagggattatttttgtgtaatacagaacgtttgatcaatgaaaaattgacacgtactcggatccaaaggtgggctaaaaaccaaa

SEQ ID NO: 18726 - DNA, 608 bp, Arabidopsis thaliana
tccagaagcagattcaattccttgtctgcatctaacttggttcggcggcggcttaaggcgtcgaccaccacgttggccttcccggggtgatattgaatttgtaaatcataatcggcaatgaattccatccatcttcattgtcgcaagtttagatcaggctgagtgaacaagtatttaagactttgatggtcagtaaatacaagaacctttttaccatacaaatacgatctctagattagtaatgcaaacactacagctgccatctccaggtcgtgagttggataattctcttccatgctttcaaaattgtcgggatgcataagcgattactttcccatcttgcattaatacgcaccctaacacgactcttgatgcattagtgtaaatagagtaaggattaccaggctcaagtaaggttaggattgtcgcggtggttaatgcttcgttcaccttctcaaacgcttcctcagcttccttgctccaagcaaatggtacgcttttactcgtgaggcgtgtcaaaggcttgttgatggaagagaacctttgacaaactttcgatagtattttggcaaacctaagaagcttttgacctcagtaacattggttgg

SEQ ID NO: 18727 - DNA, 514 bp, Arabidopsis thaliana
tcaatatcccgaagagaatttgggacataagttttccggtggccgccatgagcatattaaactacctaaagaacatgacatccgtcgtgtgtatgggacgactcggtagccttgagctcgcaggaggagccttagccatcggtttcaccaacatcaccggttactccgtcctctctggtttagccaccggtatggaaccattatgtggtcaagccatcggttctaaaaacccttcactcgcttccttaaccctcaagcgaaccatcttcctccttctcttagcttctcttcccatatcactcctttggctaaacctcgcgcctctaatgctgatgctccgccaacaacatgatatcactcgtgtcgcatctctctattgttccttctctttgcctgatcttctcgctaatagtttccttcatcctttacgtatttacttacgttgtaaaggcaccacttggcctttgatgtggtgcacgttagtctccgtccttcttcatcttcccattactgc

SEQ ID NO: 18728 - DNA, 221 bp, Arabidopsis thaliana
cccagaacctgagcgccgactggcagcgcttcatgcccgcgaagtggagcgccggagtttcgtgacctggtcaagcgcgtcgacagtttcctgacgcaaagcgccgaaggaaccgcaaggtcgccggccatctcaacgacatcctgttggcccaggactaccaagacctcaccggccaggtgatcaaacgggtgaccgcgctggtcaccgaagtcgaaagc

SEQ ID NO: 18729 - DNA, 850 bp, Arabidopsis thaliana columbia
taaatttttgtgtaaaaatccgagtcatctttctaaccaactttgatccccagtcgcaagtaaacctccaaacacatgaaacaatgaaagaaaaaaaacatgttacattagtgaaataactcaacagaaagaatagaccacaacatataaactgagatgactacagaacacagtctaagctagattatctaagcaagacaacacaatctaaccacttaagacaacacatgattgcaagtgaacacaagagagcaagccaccataacagaacacaagcggtactagacatgaccactatgttcacacaagatagcaagcgttcacaagagagcaagccaccacaacagaacaaaagatagcaagcgaacacaagagagcaagccaccacaatagaacacaagatagcaagccaccacaacagaacacaagcggttctagacatgaccactatgttcacacaagatagcaagccaccacaatctaacacaagctaatcaagacaaaatattacagaagctaatcaagacacaatctatgttcacacaagatagttcacacaagatagcaagcgaacacaagagagaaagaagctaatcaagacacagtctatgttcacacaaaatagttcacacaagatagcaagcgaacacaagagagcaagaagccaatccaatgacacaatctaatacaagcaaatcaagacacaatctatgttcacaacagattaacgaagtggacacaagagcaatccaccacaatctaacacaagctaatcaagacacaacctaacacaagctaatcaagacacaacctaacacaagctaaccaagacacaacctaacacaagata

SEQ ID NO: 18730 - DNA, 1826 bp, Arabidopsis thaliana columbia
atcatacgcctcagcttgccacctctgctctgaaatccatgtctgcaactcaagcgtcagatgggactcgatgcagcttactgaaatccatcaacattctgatcgtcatcagctgattgattgaactctgcatcttcagtctccccctttttgactgagtttgatactcaagcatctctcagttgatatgagaaactcaagtggggaacataacacacagccaatagacatattgtagaaacaccatctagcataattagtataacgcgattagtctaaagatgagcaatgtgttaaacaaataacaaagctcctccacaaattaatctcccccagcatcctcaaaatccaaaggaaccttatctccccgcttgagcagataacttagtcaaaaatcatgtaagcaaccagacatattcgacgcaagaaatgaagttctcacagaacacttacctgtatcgagagcagcctgcagaatttcgatggcaattttcattgccctgcggttggatgattccttgcgacctactactgcactctgcttcaccttcttctgcttggtcgacgctgcggaggcatgagggttgacgggaatctgaaccgggcgttgcgtctggataacttgatagatcaggctggggaacggtaggaagagtttggtgtctggtttcagagccagctgaagaatgtgatcaaaagccatccttccaaagtcaaatgacattttgtgcatgatcatgtatacaagcttgactcggtcaggctgcgcatatccatcattcgatgttggagaccaattggagcagcagagttgtgaaggcactcacctgaatcttgctcgaagaactgaatttcccaccagtcagaaaagtagccactcgagatgccacagattgctgagaaggagcagcctctggaccctttggttcaggcttctgaacccgatccgctgacgatggagtctcatcctcaatttcgattatcagcggtgtgggtctctgacaggtaccataccccaatcgggatccggcacagtgagctcttcatcggacatcacctcttgaactttcggttcactccgctatggaatatcttgcatcgagtcaccgggcggtgagactgacagatctgaagacgattcggactccgattgttgttgaacaagacgatgaacagccgagaaaatcgatttcgtgctctctctctcacctgaattctgaaggattcgccttgagtgcagtgggttgccttctcgacttccaaagatagttgatttgactcctcaaacccgaactcctctttttccctccaatactcgaacaaacatccttgaattcacatgggcttttgaaactcgaaatgggcttggacctaaactgttttgttattctgaaacacttaacaaacgcataagtgcttccttgccaagaaattcctcaatcaaacaaatgatttttgttaacatcaaatttcaaggaacacccagataaaaacttaacattcatatcctaaaccagtttagtgacccaaactgacaattgacacatgtgggtaatagctttccaacaatcatttcaaagcttacctcttccttgtactctgaggtgtgctttatgccaatcaattgctcaggactcagcatgaaattatcacaaccactcagatcgttgatgaatcaactcattattcagtggctagtctttcacactgtcatgccttcagttctcaataatcagagcaacgtgtaacaggcagctggaatttcctttgaatatagcattaccaaacagaagcatgatgatatgagtttttccgatggaacttgc

SEQ ID NO: 18731 - DNA, 823 bp, Arabidopsis thaliana
ttttcaaaaataataagttatgtcgagtactaaaacggtatctcttaaacagtttaataaacttttataaacttaagcagtcagaaacttaaaatttgtgatattttttgaattttttctgttgtgatatttttgaaacagcatcctacattgactcctagacagatttctaacattcgttttgtacttcttattgcataaaaatacatgtcaacatttctgatataactaaaagtctaaaaccaatatctaatgaataaatcgattcttaattagttatttatatttttttgtcgattgagggggcaatgccccctactatttattcaaaaaacttataaaaaattacaaacgaatattgcgtgggaacgaggttccaacagaatcctctaccataatcgaattgacagaagccggacaatcatccaataactgcaaaccaatcggtaaagtgaacgcatagtttgctaatccgtccgcgaggcgattagcttccctatacacatgtgtaacccggactaaccagtcccttgcgataaagccttggcacaaacgtaccaggaaagccagtggatgcgtatcccttatccctgactgtagaaacccgaccaccaacttcgactcaacctccaacaccacccgccggtacccctctctcccaagcagtcaccagcccataatatactccccacagttcagctaagggagctgaacacactccgatgttaagcgcaaaccctcccagccaactggcctccccatccctaaagacaccccttgccgtcgcgaaccccggatttccgtgtgagggcccgtcggtggt

SEQ ID NO: 18732 - DNA, 1382 bp, Arabidopsis thaliana
tgtgatgcaactacatgaacactctttttttgtgaaatcattttctgaaatttttcaatttttttttttttggtttttctatgccttagatgaatgcagactcaaaaatatacacaatgcaacacacactttctgagccctcccccaaacttaaatcacacagtccactgtgcgaataaacttggaagagagtactcaggacaaatccaatcacagaaacaaaaaatgaagaaacaaatcacaacagatggtataatacaatggtgaagtgaggcgcttaccttagtcaaagaatgaacgtagttgctcgtcaatggctgcctgtgattgctcccaggctatagacgaaccaccttgttctgtatcagctccagcaggtgggtactcgacctcatcagctctgtggcggccagcaccgctctgaggaaactcgacctctctccttctgctgcggccagcaccgcggtcgcgtaaactacgagactgcagaagtcgttcgctcctactgctagatcgagtgagtgtggtcctcctcttcctcccagatttacgaagctcgaatgatgaatacctcgcagggacatgcggaatctcctgctctctaggctgaggctgcgccgacttggctcgggcgcgtcatatctcctcgaaggcatgtcctgagggagatgtccctgcggaatagttgtagtggaagaggagcagctgagcttgttcttcataaacttgatagccctgaggcacttggcgagtaacttgtcctgtttcatgcaccacttctgcagcttgctgttgttcctgtgacgtcgctcaaactcctgctttccctcgcaggaggtatatgctcactgaaatgatacatgctcgtgtcaaactccgcctcatctatatcatccgtctcatcaatatcttctgttgtagctccttcggtatgactgatcacctcagttggcggactaccctcgaaataaagttcttcaagcgcaggcttgaagtcaatgttcctgccctcgagaatcctagtagcgtcaatgcaggggagaagaatgttggcgattttaatcgatgaatgctcgaacctgtagcggtgaaagtcgccagccatgtcaaactccaagaactcacatctgcgcaaatgatccaagtccatcatcctcggtgctaaccctggttccttgagccgtactccacaagcttccagaattggcgtcacaacgccacccacgcatagttctcctttttgtttttttttttcttctttttttcggtttgatgaactcgcggtcgagtgttaaagagatggtgaggcggtgtgtcttggcgaggtcgagtggctgtgaaaggcaggagaggagcggtcgagtgatgaatgtgagcatgaa

SEQ ID NO: 18733 - DNA, 1579 bp, Arabidopsis thaliana
ctcaacaagatactatcagatcaacactgaaagcaataatgaaaatgcgattaacagacgatttaaataaaacctcactcactaatcccatgttttcaaactcaacaacacataaccacaaaaataaaaattgaaaagataattaaattaaaaataaacaaagggagtggcagcctgcgtaattacgaaaggttttaagagcagagagacacggagacggctatggcggcgatcgtgaccaatgcggtgaacaacgacggtgtgtcacgccaaccgctgcgttagctgacttactgttcgctgaacctgttggcgagtctgaaggagcactttccggtgactcgtccgtcggaggtgccggtggtgaagctgcggtgggtgaaggtgcatccgctggagatggtgtcggtgcggtaactggctcaggcgccggtgccggagatggagatttagattttccgaatagctcagcagggagaaggacattatccacagtgaatatcacaaccggagtcgcgtcgagcacagtgtccgcgagtctcgacggagcaacgccggtgtggagaataacttcgtcgccggaggtagaggtcgttagatcgaattttccggcgccgttagtggctaacgtggagatattgttcttgttagtcttcaatgagcctttaggtttatactcagcgagggcgtgatactctaagagcgagactacctcagcttgtgtgagcttcgtcagatctggtacaccttcagctttaaaagcttcatcggacggtgcaaaaaccgtcaagcctttttcaacggcggattcgtaagtcttgagtactccacttgagacaagcaaattagcaaaggttttgcaaccggctttttcgagtaatccggtgatgtttgacaaggaggcggaaggagcaggagcggttaaaactccgggagcgatgatcggagcatcaatctcgaggattgagatgttgtaagggatttgtttaacggatttggtgtaagatgaatcgagtttggaacctgaagcgcggagccaaatccgactttgcctcctttaagatcggtgatgttgacgaatcctaggtttccgggagcgtttccggtggtttggtaaagtgtggtggagagagttgtgcctttggagatcttgtggagtttttgtggatcgtagtaatcgaggaggacgaggaggcttaaagcgcttttaataacggagagtggatgttttccggcgagagcagacattgcgccattgttaaggacgagaactgtaatcgtcgtgcggctgttgatctcgtcggcgagcttcgtctgagaaaggtagctgttgaaggaagagtaatctggagaatcagcgaggatttgagtgatgttgtggctactcacggtggaagcaaaggcgaggagggagaaagtgaaggcgaggagtgagaatgtctgtgacgccgccatgatgagacggttttgagttttttcaagtgtcagtgtggagcagaggaagtggagaagactgagtgagaagagagatgaagttaaaagagaaggatgattgttaaccacggttaaattttgatca

SEQ ID NO: 18734 - DNA, 1175 bp, Arabidopsis thaliana
gtcctcttcccccccccccctcataatcactttggtccccctattgcgattcccgaactcaacaacctcatctctccaactcccatcattctcgaatccttacaattctctctttatctccttcacttccctttcatatcaaaaactttttgcaatccatttgtttcctccatcattcaatctcctaacctacgaaattttgtttttgagtttctctcacttttgttctcaataatgaacaggagctcgcttttgttaaggattcggaacaaagctctctccccaccgaagaggtacccaacaccttcttcgcatgtagcagctcgaggaccttctgaaccgtcacctttggggtcgagcaggagagaacaagcaagttttgagctcgatgatagtgaatcaagcaaagaggaggaagtgatgcaggaagagaccttcagctctctagctggaaatactcgatcccgaaggtcgattaagtcctctgcaagggaattctcgagaaacaaggctgatatcactcaagggaagaagcccgtggggaggaggttggagctggtagatgaagactccgaggaagaaatggcttcgtcaaaggaagatgatcaaacagagaaaggaggagatgatgatttggaatcggagaagtgtgcaactcgaaactagtactacaagctgctgaagcgcaatgagtttttaggaactcgataccctcatcccgagaccatggagagactcggcatctatgatgatgtagactatatgtttaagcagtgcagcctgaatattcacatgttttggccaatggaggggaatgaggaagagacaatccagtttctttcatccgtggaattgttcttatatggagagtcagaggacgatgaaatcaggccagacagaagtttgggatacttggaattctgtgtatatgacgtggagtatcggcttccaatagagcatctcgagctaatgtatggatttcaaggtggaaaagatacgagtcatcgttttgacaagagagagcttcagtcattctgggccacacttgggtctaaacaaggatttttatcctctactctaggaccaagagcaacgaaataaggagtccggtggttaggtactttcataagtccttggctagtgcgctatttgcaagagagaggaatggaacttcg

SEQ ID NO: 18735 - DNA, 1691 bp, Arabidopsis thaliana
tgggccattgccaacaacagttgacatcgatgttgacttggaagtagcagagaatgagagaagtgattgtgaagggatttatgtttgaaatgtagaactttgttttaactttgagtgttgattgtctgtctgttgtgtttgttgattgtctgtcttttgtgtttaatttgttgattgtctgtctgtttttagtgttaattgtgtgtctgctttgagtgctgatttaattttatcattttttctcaggtgatttacaatgggacaacagaagaaaaagcgtggaagacaacctaaaaaagctgctgctaagaaatgcaatgatgaggtggagtatgtgggtacaattgagccaacagctgtagaacaaactgttgttccagcagaaaacattgaggaagttgaagacatcgatggagagacagaaaaagaagttgaagacatcgatgaagagacagaaaaagaagctgaagacatcaatggagagacataaaaagaagctgatgaagacatcaatggagagacagaaaacgaagctgaagacattaatggagagacagaaaacgaagctgaaagtgcaagcagcagaagaacctgaaggcgagcttgaattatctggagatgaagatgttgttcaacctaagaccaagaggcagcgtggaccaactaggatgaaagatattgctaagggtccaaatgccagagtgagagtggagtacaccatgatgggagagcctattggtaaaggctcagttaagttagcatcatatgcaggtgcattggtccgtgaacacgtccctatcacaattgatcactggacaaaaataggtgaagaaatcaggacacttctctggaaatctatccaggtaacacttcactttttatttttttgtaatatttgactatctttccttatcacaacaataatcactttttctgtaattgattgaaggcaaggtttgaactagatgaggagtatcaaaaggttgcagtgcttaagcaaatgggatgtttgtggagatcctggaaatcaaggcaagtaactaagtttagagaagcaaagacaaaccagtagaggatgaatctgagacctaaaaatgtttctccatttgagtggagaaaatttctgaagagcaaaactagccctgaatttaaggtatgttgagggagaagattaaactaagtatatttactatgtagaaagttactaattaacaatcattgttaggttataagcgataactacaaggagagaaggcggaaccagattcctcacacttgtagtcgtagagggatggttagacttgcagaagatatggtaatcttatgtgtctgttaggttatgttttttattgctttgaaattcttaaaacacttagcttgctactaatattggcatgttgtgtttttcagaaaattggtagtgcagacccaactgaagtgacgaggctaaaggtttgggttaagtcacggaccaagaaatatggaacaccagtgaatacaaatgcggctgaaaaaattatgagtatgttatagtttggaagttgtgacagtttggtttgtgatgattgttaggttagtgatggtttgttaaattggataggttagtgatggaccagaaattggactggtttgtgatggttttgaaatgaatgtataggcgataaatccagacattagccagtgattgtgtg

SEQ ID NO: 18736 - DNA, 1281 bp, Arabidopsis thaliana
caatctattaacatatagaaactgtcctttttataataactaagggcttgattggttctccctctgccacccgcaaacgcagcgtttgcgggtggtagcggttgttagcgattggcaccaatcataaaaaccgctagataccgctttggaccgctcgaaatcgtcagatctcaaaagctccttcccgcaagcgtttgcggttgcgggcggtacggttaagttacaacaaaaatttattttttataattaattaaaataattatatcttccacccaaaccctatatatcttattcttgttagaaaaccctaatcaatatattgtaactctattctctcaattatggcatccacccaaacggatgaaaattaaaatcaaaatcaggaatcaaacgtaagtatgatctatccgttcatccattcacgaccagtttggaaaaaaatttagttggagatgtgttaaccatcgtttggatatcttgaagaaactttattatatagaggcaatccggaaaacccgcgagttcaacgttatttacagtttatcacactacttgatgcaatttttggtgatgtaccaaatgcataaagtattaagctttttcttacaaaatttatttatttttgaatttaatgttttatttatggttttaattattaagcatgtttaatttttctaatattttcaatttatcataataatatattgtattttttcttttaatagtaatatattatatgcagccgagttatgtttgatttaattactattgcactcgctggtttaccagtcataaaactcccgcaaacgcacccattatcaaacgttcaaccagtcgttcaaaacgcttgataacgcttgaaaccgcaaccgcctgtttccgcaaactcccgcaaccgcaactgcacccgctgcgtttaaaccagtcaggccctaaaaccctactttatacttttttttttgtcatcaaaaatcctactttatacgtaaaataaatctttagattataaatagttagtgtggaaaatatattttgatatatttgtttttaatatgtgttaatggcaacaaattaactaaaattcttgggtgtccaagaaggctccttgcatgagttgcatactagcattgataagatatgacatcaatgctttgatgatgatgatttattggataagaccatcagagattgttttgagggtttgggtcgtcttcatgtgccaatatgacttttttttttaaatgtgattcctcatattgattcttgaaccgtgtatataaa

SEQ ID NO: 18737 - DNA, 609 bp, Arabidopsis thaliana
ttagctcgaaaacttcgtccatattttcaatcccatccaatcgaagtgttatcaaatcagccgcttcggactattctccatagcccaaaccagtccggtagattagcgaaatgggcggtggagttaagcgaatatgatatagagtacaagaaccaagtcgccatgaaggctcaggtcctagccaattttttaacagaattaccggtattcggagagcaggagcagccgcaaaatcaaacatggaagctacatgttgatggattgtcatcgaaaaatggatccggggtgggaatcaagttagaatctcccacttcggaaatccttgaacaatcatttcgcctgttattcaccgcccaaggagttggagccgatgaagtggtcgcctactgtgattcgcaactggttgttaaccaattcaatggtgattatgaagcaaaagactcacgaatggaggcatatcttgaggtggtcaaagacttggccaaaaagtttaggaaatccgaactcattcgcataccacggggagaaaacactaccgcagatgcgctcgcagccctgacatcaacatccgatcccgaagtcaaaagaatcattccaatagagtgtatt

SEQ ID NO: 18738 - DNA, 984 bp, Arabidopsis thaliana
aaacatatctccaatgacaccatggatctagctcggtaaggccacaaagccgatcgaagctgtcaagatgtcccagggggtcttccatacgtagaccatactacttggatcactgagatgagaccactcttgatctcaaagttgttccactgaactggtggtggcactatcccttgtctgtggtgatgattccttggggcatcaccagcaccaatgtttcctggctgatcaacattaggtgtgtcttcaatatcaactggtctgttctgttgatccatagcaggtggtctcttctgatcacaggctgcctttcctttggtttcttgtaactcacgagctattttgtcaattttgtctttgaatggtaataggtgtgcaaaacctttggatcgagtttgcatgcacaaagattagtacctgtaccacaaaaacaagcagacgaaatgatgagttcgtaacttgaaaaatgtaaaagaacttgatcttaaaagtttctgatatcttgaatgtaacaatacaacaatgaattggcaacggcgccaaattgataagcagctttttcaggtctgcttatggtgaatgtgtgtgagattcagttcaattcccctaaaacacaaacatgtcgatgcagttatagggggtgtcaatccagtccactgtattgctagcaatcaagatgtgtacagaaaatactaagtcaagctagattataatgatagtgggtttctagtaacaatcctaggtcaggattcaaacaagtaaaaatgagaactaaagagccctactcgatcattgggtcgagtagaaccaacaagtgacaaaattaagaactataatgcaatcaacagtggatgcaaatagaggatacaaataacaggtaaataacagtgcaatcaacaggggataaccataaacctaatagaagttctaaggatgaattcattgataagggtactctagggttcacaaatggctaataggcga

SEQ ID NO: 18739 - DNA, 1017 bp, Arabidopsis thaliana
gtttccttggccgagagttgtatttgatcgtcatatacctcttgtggtgtcaatggaatgagggtcgttttcttgcctttgaacatgaatgagtaccgaattgtgaagccatcatggatcactatctgatctgattgccatggtcagcctagaaggatatgtctggcgtcaatcagcaacacatcacaaagaatttgatcatggtagcttccgattgctaagggtacaaccacttgattcttcacactcatttctccatcatcgttaagccattgtaacttgtacgacttaggatgcttttactgcttcaaattgagctttcggaccattgtttcactcgccacatttgtatagcttcctccatcgatgatcaaactacaaactttctcattgacgatgcaccgcgaatgaaataggttatctctttgctcttcttctttggttcgggtttgaaggcttaaagtcctccttgccacgtaaagttctctgaactgttcttcatcctcatccggggatgaggtcatgtcttgttcctcttccaaatctttagaaactttccttgacatcaagagctttccattagctggcttagcaatacactcctcggtgacgaatcaggttttggcacgaactcgccttcggactacaactcgccattctcccttatgaccattactctcttgttggtacattcattagcatagtgcccacgcccatggcacttgaagcgtcgaagatcacgggtcctagtagtggtggcgctatcgggcttggtcttgtctcgctcttggatagtcggcattattttaggctcgctcttgggaatgaaggctggcttgacttctcttggatagcttggtcggtttgaatcataatttgcccgagaggaacccattctcttgacttgatgctccactaagatagctttatgtagcatcgcctctaactcttcgtaatgttgcatctcgacacggtcctgaatttctcgattcaatcctcccaagaaccttgacatag

SEQ ID NO: 18740 - DNA, 1399 bp, Arabidopsis thaliana
cgctgcagctgttgagactgttgagccaaccactgattcgtcgattgtggacaaatcggtcaactcgattaggtttttggctatcgatgcggtggagaaggccaaatcaggtcatcctggtcttcctatgggttgtgctccgatggctcacattttgtatgatgaggtcatgaggtataaccccaagaacccttattggttcaaccgtgaccgattcgttctatctgctggacatggatgtatgttgctctacgcgttgcttcatcttgccggctacgacagcgtccaggtctgtgatctcttctctgtttaattgctttcgatctgatcgtaattgatgaatgtagtaactttagtggatagattgaatgtgttttgatattcatctgatggctgcttgaagtagattcactgaaaaggtgtttggatttgtttattaggaggaagatttgaagcagttccgtcaatggggaagcaagacaccaggacatcctgagaatttcgagactcctggaattgaagccactactggtttgagatctcgcttcttgggtcgtatggttcatgtgaaatttcacagaaactatctataactgtatttacaattgtgctctctgctttggctgctatgcaggtcctcttggacaaggaatcgctaatgctgttggtttagctcttgctgagaagcatttggctgctagattcaacaaacctgatgctgaagtagtcgaccactacacgtaatatatataacccatagttatgttgtcgttcttggtttgtatatagctctgataatagaaatactgtttttgattgattgtctagatatgcgatccttggagatggttgtcagatggagggtatttctaatgaagcttgctctctagctggccattggggacttggaaagctcattgctttctacgatgacaatcacatttctatagatggagacacagaaattgccttcactgagaacgtggaccagcgatttgaagcccttggatggcatgttatctgggtgaagaatggaaacactgggtatgacgagatccgtgctgccattaaggaagctaaaactgttactgacaagcctactttgatcaaggtaactacacaatttcttaaccatcaaacatcggttggtctaaagacctttgatattgatttaccatattgcgtaatccaggtcactactaccattggttatgggtctcccaacaaggcgaactcatacagtgtccatggagctgcacttggcgagaaggaagttgaggctaccagaaataaccttggatggccgtatgagccgttccaggtacctgacgatgtaaaaaggttagtaaatccaaagcaggcttatgtttggttttattgctttgaagttgccttgatg

SEQ ID NO: 18741 - DNA, 1301 bp, Arabidopsis thaliana
atttattcccacttctttccctcgggctcttggccattcatgttcacacgatttggccgcctttctctgggctttgggacaagttttctcgcccgactctctataagtctcgtcccagcccttcccctcgattcaagttcgaatcggggatgttacaagtctcccccacctgagaaggattcgtccccgaatccggcccaagtcgttcctcgaccgttagacttttgtaccacttaggatagtcggcgaccattcgattctccgtttcccaagtgaactcatctcggccgataattgaccataggactttaaccattcggatgggtttcctccttgtgccttacagattctcgttagtaagtcggccttgtccgccgcacttaatctaacggttccgtattcgcctccaaggtgttgagactcattgccctgatcgttccaatcagttcctccttattcctttccgtgtctacctctgccattcttcggcttagagcatcggccacggtgttagcctttcctagatgataaacaatgtcgagatcttaatctgcgactagttccatccatctcctttgtcggaggttcaactccggctgcgtgaatatgtacttacgactcttgtggtcggtgaatatctgcaccttagagtcatagagataggatctccatattttaagtgcgaatatcaccgccgccatctccaagtcatgggttgggtaattgccctcgtgcttccgcaactgccgagaggcataggcaatcaccttttccctttgcatgagtacacaccccagcccggttattgaagcatctgtgtatactacatagggctcgtcggcttccggcagaaccagaaccggagcgctcgtaagcatattcttcaacttggcgaagctcttttcgcattccttggaccaagtgaattttgcttctttccgagtcaacttggtcatggcttgggctatcgtaaataactcgacttatacttgtttttcaccgtaacccgattgattcccctatagtcgatacatagacggaaactcccgtccttctttttgacgaataacaccggtgctccccacggcgaactgctcggttgtatgaaccctttctccaataggtcgtccagttgtttctttagctcggccatttctggcggacgatccgatatggagccttgaacggatccgaccggtctgggggtaccaagacaaggactggaacacgtccgcgaagtcttttgccaccggtatgtcctctaattccgaactcgttccaccatccgtggtagttattgt

SEQ ID NO: 18742 - DNA, 486 bp, Arabidopsis thaliana columbia
tagaggatagaggatcccctgccatttcctgataaagtcactgacaaaagcaacaactcctcccacaactcttttctgtgtgattgcctcattagcagcatagacaatagacacaacaaccgagtcatctgaatccggaaacatcacctcacaagtaaccatttgcaaagattttgcaatgattatcactctcacagtcggatgccaaactacccaaaatttggttatatccaagcttaagcagagaacctaagaactcggttcggcgccacatcatcttgaggtaatccgccgccatgaactgcgtctcgctggagaaatcaactccggtagtcctcagaaagaagcaacggcggtggaaaacttccaagcaccttgagtaggctttatcgtccatacacaccaccacaacgtggcggagtagccgctaggtcccttcgccgattcgaaagccttcaagaaacacatcaaacgtggaatttggtt

SEQ ID NO: 18743 - DNA, 877 bp, Arabidopsis thaliana
ttcgaagtcgaatgacgtctcagacttggattgtgattcagaatggattgaacccatcagaagctatatatccgaggggaaagtaccttgggataagtgggaagctggaaagtgaaactcaggctatgcgttttgttctggttgaagaaaaactcttcaagtggcgattatatgggcctttaatgacctccgtagaaaaagaagcagctcgcaaagttatgaaagaagtccacggaggctcgtgttgaaatcactccagaggaagagccctagccatcaagataaaacgccaagggtttttcaggccgataatgatcaaagacttcgaaaaattctcaaaacgatgcaaaaaatgccaaagacatgcacccacgatccatcaaccggccgagcttctttcatcaatcgcctcgccatatccattcatgcgttggtcgatggacatcatcggtcccatgcacgcctcgaagcagaaaaagttagtactcgtcctaactgactacttctctaaatggattgaggccgaatcatacgccagcatcaacgacgctcaagtcgataacttcgtatggaagcacattttatgtcgccacgggatcccttacgagatcgtcacggacaacggctcgcaaagtttctgcaataagtggggaatccagctaagcaagtcaacaccacggtctcaccaggggaacaaccaagccgaggcccaaacaaaacaatcctcgacggcctgaagaaacgactcaacgctaagaagggctcgtgggccgacgagcttgaaggagtactctggtcacatcgaacaacgtctcgtcgagccactggtgaaactccattcgcactagtctacggtacagagtgtgtaatccaagcc

SEQ ID NO: 18744 - DNA, 602 bp, Arabidopsis thaliana columbia
tgaaagctgctatagagggaggggccaccatcatacaactgaggtttgatcatgtttgctataactggaagcttcaactcttttttgtatctctctcttatgaaagcccaaatgacatctcagtgcttttgcagggagaaagaagccgaaacacgggagtttcttgaagaagcaaaagcatgcattgatatatgccggtcccatggagttagtttgctgataaacgacaggatcgacattgcccttgcttgtgatgctgatggagtccatgttggtcaatccgacatgccggttgatctagttcggtctcttcttggcccggacaagatcataggggtctcatgtaagacaccagaacaagctcatcaagcatggaaagatggtgcggactacattgggtcaggaggagtttttccacgaacactaaggccaacaatcgtaccataggacttgatgggctaaaagaagtatgtgaagcatcaaaattaccggttgttgcaatcggaggcatagggatccaaatgctgggtctgttatgcagatcgatgcaccgaacctagaaggtgtagcagttgtgtcagctttgttcgaccaagattgtg

SEQ ID NO: 18745 - DNA, 2199 bp, Arabidopsis thaliana
aactcgctttagcagttgtaatgtcagctcagaaattgcgaccctattttcaatcccattccatcgtagtaatgggatccatgccgctccgcgctatcctacacagtcaaagccagtcgggacgcctggctaaatgggcaatcgagctcagcgagtatgacatcgagtatcggaacaaaacatgtgcaaaatcccaggtcctagccgattttatcgtcgaattacccacaaaggaggtccgggagaatccgcttgatacaacttggctcttgcatgtagacggctcgtcatcaaagcaaggttcgggcgtgggcatccgtcttacctcgccaaacgggagaagttcttgaacaatcattcagattaaacttcgaggctaccaacaacgtggccgaatacgaagcgttcgtagtcggactcaatctagctcaggaactaaagatagaaaaaatccgagctttttgtgactctcagcttgtcgcaaatcaattcaacggagaatacacgactcgggacgaaagaatggaagcctatctggctcatgtacaaaatctggcaaagcatttcgacgaattagagttaacgagaatccctcgaggagaaaatacatcggccgacgctctagctgctctggcatctacatctgacccaagcccgagaagagtcattccagtggagttcatcgagaagtcaagtatcgagctcggcaaagaagaacaggttttccccattcaagttggcgcggattgcgacaacgctttggatgacagcccagacctaggttacaactcagaatggatagaacccatcaaaagctacatatctgaagggaaaatgccctcagataaatagggagctcggaaacttagagctcaggtcgcgcgctttgttctggtcgaggagaaactctacaagtgccgattatccggacccttaatgacttgcgtggaaaaagaagcggctcgcaaagtcatgaaagaagttcacggaggctcgtgtggaaatcattccgggggaagagccttaaccatcaagataaaactgccacggtttcttctagccgacgatgatcaaagattgcataaaattctccaaacgatgcgaaaaatgtcaaaggcacgcgccaacgatccatcaaccggccgagctcttgtcatcaatcgcctcgccatatccattcatgtgttggtcgatggacataatcggacctatgcatgcctcgaagcagaaaaagttagttctcgtcttaaccaattatttctctaagtcgatagaggccgaatcttatgccagcatcaaggacgctcaagtcgagagcttcgtgtggaaacatatcttatgtggccacgggataccttacgagattgttatagataacggctcaccatttatatcaacccacttccaaggcttctgcgataaatggggaattcgacttagcaaatcaacaccgcaatatccccaaggaaacagccaagccgaggccgcaaacaaaacaatcctcgatggtttgaagaaacggttcgccgctaaaaagggctcgtggtccgacgaactcgacggtgttctatggtcgcatctgacgataccgcgtcgagccacgggagaaaccccattcgccttagtctacggaacggaatgtgtaattccagccgaaatgacggtaccgagcctgctgcgaagcctatctcctgagcacgaaccagataatactcgaaggttactcgacgaactcgatctaatcaatgaacgaagagattcagccttggtgtgaatataaaattatcagaatgaaatggctcggtattacaattcgaacgtccgacagcgaattttcaagaaggggaccgagttctccgaaaagtcttccaaaacaccgctgaaccgaacgctgggaagctaggggcgaatcgggaaggaccatacttgatctctaagttcgtccgacccggagtatatgaacttgccgacttaacgcgcaaagccgttccaagatcctgggaacgcaatgcacctaaggaaatactacaactaaatccgaggtgactaaatttgaactacgaggtgtcttgatccctaaaaagagtatgtaggcagctcgtcctcggacgagtttagctaccccccccattaaaaaggggggagtgggtccgtatacccattctcccatttattattttgtaatttttaacttccgca

SEQ ID NO: 18746 - DNA, 469 bp, Arabidopsis thaliana columbia
gaaaccttcggaatcaacgttgaaaatctatgaatcggtaagaatttttgaccgaggaacagtccgttcaaaccctaagcgattctaaactaaaaattccggcacgattcctaacgtctaaagaatagaagcaaaagcagagagggaataaagagaatttacttggaaaaacttaaagacgagtcgctggaacttataaatgaaagtgaagaagacgaggggttgattcgattaaatagtggacgaatgagcgggaaaaggaaaaaccgtaggatcacgaaacgtcacactcttcccgatgaaatttggaaagtcacgggattttgtttcctattttacctcgagcatatgcggttaaggaaaaggaatcccgaactgatcccgtaattggtgggattgcgagatgaagtcaatttaagtattcgaattcatttctctttttcgaagacttggggggcaaattgtggat

SEQ ID NO: 18747 - DNA, 502 bp, Arabidopsis thaliana columbia
aacccatgcaggaaggaggatcctagtagcacagacagcttgaatctatggtcaatgaaaatccactacaaatgcagaaacagaatctatggctcacacagatattcaaacctcattgcacatggcttacttgatttaaattctctaaattactttctataatcttcctagatccattaattcaaagaggcacatagcaaatcaacaagagtgtacatattttgatagagtagaatcttaaaagaaatgattaaaatcactgaagtaatagaatcccttcttgctgacagagaagattagagtattcatttaggaaagactaagagaggctcaccatgttgtcattgaaactcaatatagaagcgacattcccacagcggtaacagtaattaggtgcagaccataccttcacaaacaaaacaaaattaacaatcactaagcagagtttcaaaacgcccactaataaaaaatatcaattcattagaagcagtgcactcacagt

SEQ ID NO: 18748 - DNA, 1821 bp, Arabidopsis thaliana
tgagacaaccattatctttgtcttgtcatcttaattctctggagcatcatctcgtagcatatcactctgaagagggggtgataacttatctatctcaaccggaggcaactgaagtagagtctcatccatgatacccatgcaatgcatctcaggaatctcatgcttagacactcaaggcagtagacaaggaacttgtggtgtgtagacttgtctagtgacaggtggagatgcaaggcatataggtggtgtctgagtccattgtcgatcgacactaggtgagtgtcgaacgacaccactgtctggaatcaatcatgctctgtcaaatgtcaacactggcctgtctgttttgtggttggtgtgatcgacatgaggtgggtgtcgttcgataccatcgagaattagtgcctcctctacgaaattatcgattccactcgacaaagtcaaaacagagtcgtcaagattaattggtgtcgatcgacaccctgatgtatcgattaacagtgagacatttcctacaactggaatagatgaagtccgagctgaactttcgcgctgaagtattggattgagttgctttccgctgcgtagtgtgactgcattgatagaggctaatggaggtgatagctcggagatatgagagcgtagattgtcaaacttgctatttatatatgtgtagagagaatcatgtttgctttcaagctttgtggagagagaatcatatttgctatcaacctttgtgaagcctgcaagaagctgcgtaaacatagactccattctggtctctgatgagggaggagggggggggggcttgggaaggagcagaaattgctgaaacaagagtctctttgcttgcggtgtcaaattcatgtgtcgaaagactagttaaagcattggtaatgaggagtaatgcttcactagtagttcttgtcatgaagttacagtagcttgctgcatcaagttgagtctggtatggcatgattatccctctttagaagatattgatgagttggctctcttggaaaccatgataaggacattctctctgataggatttgaatctgatccaagctgccttcaaaccttctgttggagcttgagaaaaagaagagatcttctcctgcagtaattttgtcactgaatcatcaaggaagtggatcatgaatgcattcttcgtgtcagtccaattggttagtgaacctggttctagctgtcgcagccataatgttcctctacccgcgagagaatgtgggaagagtttgcaaagaagataatcagctggtacacctgctgctttgattgaggacactaagtcttcgaagacttctagatgatctagtggtgattcattagaatgtcctcgaaactttcctcgtgaaacaagagtatagtaggcatggtgaatagcaaagtcttctcttgcaaaaggaggtagatggatcgctaattgattggagtagaaaagatcagctctattgaagtcgcctatggtagctggtctgttctacagatggtgtcgtttgacactgtcgttgaaatctgccagttggttgttgcgttccatcttgtagttcccttgtcacaggaaaaagaagaaagaaaacaagtgagtaacaaaataaagaaaaataaaagcttagtctaaattctacgcctagtctaatagtgtatcaaagagaacttcggcaacggcgccaaatttaatataggtcaaattaattctaagaccactctctcaaataaagaggtcagttgcagcacttagggatcgaattcacaaagttctcggatcacgcaatagactaatggcaaatcgaattatgc

SEQ ID NO: 18749 - DNA, 584 bp, Arabidopsis thaliana columbia
tgtggctgcttggacggcaatgatctctgcttatggtactcatggatatggccaacaagctgtagagctgtttaataaaatggaggatgattgcggtccaatcccaaataacgtaacatttgtagctgttttatcggcttgcgctcatgctggactcgttgaggaaggacgttcagtctacaagagaatgaccaagagctatagattgatcccaggagtggaacatcatgtttgtatggtagatatgcttgggcgggctggatttcttgacgaagcttataaattcatacatcagcttgatgctacagggaaagcaactgctccagcattgtggacagcgatgcttggagcatgcaagatgcacaggaactatgatctcggtgtagaaattgccaagcgtctcatagcccttgagccagataatcccggtcatcatgtcatgctctcaaatatctatgccttgagtggcaaacagatgaagtacacacataagagatggaatgatgaggaatacccttagaaaacaggttggctatagcgtaattgaagtggacaactaagcatatatgttcagtatgggtgat

SEQ ID NO: 18750 - DNA, 469 bp, Arabidopsis thaliana
atccaatgcactattaggtcacggtagtaagcgcatccagagtacttgtagaagtccaagatatgccaaaagcaagcaatcaccggacgtttgaccgtctcgtcaggctttaacagctcgtagcttaattgcaagacaggattgtagcggctgcgatctatagcgttcttggaagcagctgcttcatcctaatgacttggaagatagaatcagttctttaaagatcttcctctgcttcgcagacatcgacttaatgctgtttaaagacttgattaagacaacgatcgcagctggtaagcccttgctcttgcttaaaatgcaagacatcaaagtaggttctttgatctctttgttatcgcaaagtctctttagcagaacaggccaatcttcagaggtaaatgatgtaagtaagtcctcggcatcgtggagtaagtcaatgactccttttctgtaagcggaccgactttga

SEQ ID NO: 18751 - DNA, 555 bp, Arabidopsis thaliana columbia
tattaggcagagggcatcgaggtagaaatcacgacataggacaggtactgaagcccttcctggatctttgtgatagctgtggtttggtcagagcgaagactatcgttgaaggtgcttgctttttcctgcatggtcgatgttttcagaagatcatctttggaatcagcagctgcaactcctttaatcgcagctgagtatgtttcagatacatctgatattcctgcaatggggaaaagggtatttggaaactgtcacttttcttctagtgttatagagtttcacaaatcacaaacatatctatcttcttctgtcttaatcccagatgataactatgtactagactaaaaagaaggcaaggacaaaccccaaactaaagtgaagtggttaaggtgagctttgtaaaggtattgaaatgggattaagccagcttttacgtggagtgttcattaccgaagtacttatacgctaagtaccctttaccactccagctgttctagattccgttgttttctgactggagaaccagtagttcccagaactcccttcttcatagtt

SEQ ID NO: 18752 - DNA, 587 bp, Arabidopsis thaliana columbia
  unsure (1)..(587): unsure at all n locations
gactgtccctgacctccaccaccatcgcaagcctctcctcaatagctatagaacacaaaaacaagcttcgagtaagtgtcgctacatttttaaattaacttgaactgactcaaaatcaaacaaaaattcctcagacaaaatcaaagcttgaagaaattttcaaatccaaaatcaaagaaactaattctgagcaacaaacaaacaacccaacgacgaaatgaagagaaagagcagagaatgagtggtattacgtaggtcaggctccacgagacgacgagagtgttgctcaaaattctgaattggactcatggctataaaaaaagctgacccagacaagcgaaaacgctgtcttagggttccgtcacatagtaggaatagtaaacgttgcttcctcctcctcctttctaaaacccaaaccgcgacgatccctaacgctaagcccaaggtgctccactaggtcagacactaacaagggtttatcaaattaagctaatttaataagagtcggttatctggtatacaccaatagcctcgaggttaacgatggaagatgatgaattttccncnntcgattttttttttggtgt

SEQ ID NO: 18753 - DNA, 562 bp, Arabidopsis thaliana columbia
caagcttggacaaggcagtgttggaagctgaagctgttgagatgaaaaagtcgcaagcttcagagcctatggtggattcaaccatcgctcgatcttcttgattctcccaaaacttttgacccatttctcctgaaacgttcattgacatggaatatacaaaaattagggtatggaatcaaataaaattaaaggtatttggattgagatcgctgcttacaaatgagatagaagatgatgggtttcgtgaggaagaggaacgagaatcacgtgattcttgctgagacaccgaatttagggtttgttggtgaaaaagcaaaatcctttataaaggatataactctaatttatattgctgagaaaggaatgatcaaagagaagacaaaacctgagcttggttcacttcagatctgtagtgacttgttctgaaattgacgaagaaagaagaaaagaggaagagactatgcgagagagagaatatgggtttaatcgtaatttaataccaaggacatcatttccttcagttttttagctcaaactatacttttgcgttttcttacatacc

SEQ ID NO: 18754 - DNA, 766 bp, Arabidopsis thaliana columbia
gtcatctaggagaatggaagaagctatgatgtctgaaatataagtcagttgctactatctgatcatgtatgaggttcctggcagatattatcaaagcacatgaaaaaaacaaaaaaccttaccttaacattatattgtcactagcaggaaatgcatagctatactacagaaattactttacgcaaatggaacccttaaatgaatgtgaccatgcctacttaataatactcatagtatcataacatgctataacttgttatctagaaaaatacccggagagtgatattcatcatttgtttacgataacgtaacaatctaccataccagcacaaagcataacagaaaagaaatgtataaatcaagtaccatcgtagcattgcagcattggtgtcctttgggttcttggcatcaaggctcagatccgggcccaaaagtttgttcatacgcctcactaaacgataatagtaatgcctgacctgcaaatcacaagaagtttccacaaccatcagaaactaaaagcaaacaccagcaagtgcaagcgaaaagaaaacaaacacaaaactaaaacaaccaacctggtccttgtttttgctctgaacacgagaagttatcttctcaaaattctacaaaacaacacaaagagaaggttcacacacataacaggttaacaacatagagaagaagaacgtcaaggtgatacctttccaacttgacgaagagcagtgaagaaactttcctcttcttgatgtgtcaagcagccattgcc

SEQ ID NO: 18755 - DNA, 1290 bp, Arabidopsis thaliana
caggaaatacagcctttggtatcccagcatccttgttaagactgtcaacagcagatgtcatggatgatgtacatcgagataatgccaacgagaccaagccacacagagcgcccaataaaagatagagtggaagttctgaaaatcagtgaccagctctcataagtttggtttctggttcccttgcgtaaaaagcataagaatggcaatgcatattacctccaggagagcggaagtcatagtcaggaaccttaaacgcaggttcagagccgagaccgatttcggaaaccacagaagcagtaacagcactaagaataaccatagaagttgtgtttggaagtgaagttgatgaatcagttgatgaagaaggccacaaaacggattcaactgcaaagaagcatccagccacagctgcattgaaccctgtaacaacatataacaaagtcctcttaacgaatcaatcaagagttccatacgcaagagagaacaacattagcaaatatcagatgaacaaaccagaggaaatgccagcagctgagccagcggcaagaagtgagaagccagtctgaggacttttattgaacagagaattcacacctttagcgattgacgctccaatttcaacacttggaccttccggccccagcgaatttccagtcccaagcgtcacacatgcggcaacagtcttaaggaaaggacgcaacactgcctttacgcgatcgagactagaatgagaatctccagtagattttccagcagattctcgaagctgattgaggatgctcaccaccaaaccgccgatagtcggaacaaggataacacgcaaccaattggaaccgatcggtgcctctctaagccacgaagctccacgatcaggaatcccatcccaggaaaagtctcgaagcaagtgaacacagttgttgaatagaaccacactaactccagtgagaacaccaaccaaacaagccgacgctatcgcaagctcctgagacggctgctgatcaaatccaacctcatcctgatcagtctcctgcttcgccgccggtaaacgcgggaaaattctaccgccaatagcgacggaaccgaaaaacggtgaaaggacgacattgaactgaaaaggaacgtcggttttgtgaattggagcgaatctccgggaagagacgggagatcggagggcagcacagagtggaagcgtggctgccatgaacggctgcttccgtgaagtgacgcgtgtttatccattaacggataatttgatcttaaatcacaaatcttacgtggctgatcttatta

SEQ ID NO: 18756 - DNA, 759 bp, Arabidopsis thaliana
catcttcacgtggaattcgaagcgacacaatggacaattgtagcgaaccttaaaccattccataatacacttattgtcaaattcatgaccacaaagtaaagtagcaacttctcgtccggttttaaactcctgaaaacaaattgcgcatttgtactcaccactagaataggtctctcgttttctcatgtatcttgtgctcttgttagcaatagagctggtcttttgtttcctcttgtatattctcctgctcaaggctccgacccttaaattgctcgcgggtctatactcgctattcctctcatattcattcaaaggagccacatcaagagtcaaccacactgacaaagcataacgtggacagtattcaaacgaattagaagttaaatcacgtgcaagttgagtgagttttagtattaacgtgtaagcatcttgtgaatcaactgctgaatctgttaagaagtaatagagtctttgtttgtggggagaatcttcgtcgtcagttaattcattggcaggtaatgaacatgagaagttagaccgggttagtatcggcgacatgttggctgatccgacgaaacttacatagacttggattgtgccaatctttttgcgttcaggattgacatcaatatggtagttgaatacaggagtagcttccatgatgtgggtagacaaagagatttgtaatgtgtaaatcagagattcttatatttatactctattgaggcggtggaatagccacgtaggattattatttgg

SEQ ID NO: 18757 - DNA, 529 bp, Arabidopsis thaliana
tgactgcttcgatctctaggtgcagaacagcaagatgcaaagcagtttgaccttgtacggtctcgtcttctaaacaatcaacacagctcgctacaatctctctgatcacatcgattttccctctcatcgttgccacatgtagaggagtctttccatctctatcttttaagcggcaaagcttcttttcaacccccaaagttgccctcacagtctctacttgtccggctgccgcagctgcatgaagagggctaaacccgtttttgtccaagtcaaagactgaccgctgcctgagaatctttccggcgacgacatactcttcactccttgggttgaaggagttatagagaggatcagagacgatttcttcggtaaatgagtctcaaaagcattcattttggtgatgatgcagaagaaagagagagagaagatcgagttgaatatacaatgaaggtgtgtatcatcacgacgcttgtttgaaattttctattacaatactccctttgacatttgactttgtagcatatgaagt

SEQ ID NO: 18758 - DNA, 1861 bp, Arabidopsis thaliana columbia
tatggacttgatgaaatttcggtgtgtctgcaaaggtagcaaaatttatttttctgcaatttttgattacctatctgttgccgcaacaagtcatatagagggtgggtcagcttttgcgggtttcaaatttgttgtcctcattactgacgtattgttaatatagtacctagatatgttgcatctgtgtttttgaagcaacattttctatagtaggccatgtagatagaataatagtacgtatctttgggatagaagaggctgcataataatttcgataaatcaaacatagtattaaggtgaatcatgctattgtttcatgtgcttcgtaggatactgttgacagccaccacttcttggaagggttgggcaacagattatttgagtatttttggattacctggttgatgaagaagggatgacttttgcatattttagtgtgttttgtgagagtattctcgtttgcagtattcgttgttaataagtcttgatgaacctcctgaactaggctatggagattttggctcatactttggagagtgagtcaaatttaaagaggagggtggacttatttttccttgtggattctatcgctcagtgctccaaaggtctgaaaggtatgtcgtatgtgcaatgagttttgataagccgcatcagcaaagttctaaatgcggaattgaccttgaatactaccctatttttcaggtgatactggttgtgtttatctttcagccattcaagtaattttacctcgtctattggcggctgctgtacctgctggagctaccacacaagaaaatcggaaacagtgcttaaaggtatgcaataatatttgctagctctttcggatcgttattgtttctcaacctctctgctatttataggttttgaagctttggcttgaaagacggatcctgcctgaatctattgttcgtcaccatataagagaacttgattcacatagtatagttcctgcttgcctctattctcggcgctcagctcgaacagaaaggtcgttggatgatcctgtgagagatatggaggatatgctggtggatgaatatggaaggttagatttttcgttttttatttaatctatatatgtacccctgtctctagattcgttaaaactaattcatctttacttatcagtaactcaactctccagctccctggattttgcatgcccgcattgcttaaggatgaggagggagggagtgactcggagggagggtgtgactcggagggaggcagtgactcggatggaggggatttcgagtctgtcacccctgaacatgagtccagaatccttgaagaaaatgtctcgtcatccacggctgaaaggcatacgcttatattggaagatgttgatggtgagcttgaaatggaagatgtggctccgccttggggaactgaaaactgcacacacactgatcaagctgataatacaaaggtttccaattgtcagcttggacagcagcatcggcccgtctttggcacttcacatcagcatatgtccttgtcatctccaccactgccatcttcctcgccaccaccgccaccagctcccccttcacagcagggggagtgtgccatgcctgattcctacttgaatgggtttgaaaatggaggatatcgcaacgtgcatgtacgtttgtttgttgtaaaatcgttttacaagaaagatgatgatatatcttgatatggtcacttatcctattgttattggtaaatatgcagggagatcaacaggctggtcctcttaggatgaaccgccactgtctggaagcacaatgcattatcaaggtctggagtcgtcttatattcgtggtgtacacttacgaatagtattcacaggcagatg

SEQ ID NO: 18759 - DNA, 987 bp, Arabidopsis thaliana columbia
tggttccggaacttctccaactcacactactattgctcctaatcatcttcggatcaaacccgttcctcggttctacattccacgaccccgaaaacgttctatccacaccgcttcttctttcttcttcctcgtatttgttcccgttttttcgatgaagcaacccgaatatgttccaactccatcgagatttcttcgtcctcttcttgttgcattctatagtccctacattttctctaacacccatctcatagttgttctcaacagagcaacaatcgtctctcagtgaattcgaatgtgaaaccaagtctttagcctctctgtcttgagtcagctttagttcatcaatttcagccatgacagaggctgataacttcctagtggagctagaacggtcaaggctcttcctccttcgtgaagatgatgagtctaagtaatactctctggtctgtgcagatccaccaggaacaatctcatcaatcacagcttctgatacttgtggtgacttttccaccggaatgtgagtatctgaccggtgaacatgattccgaaccggagaatcttccactacagataacatcgacggcattcgcatcggagcagcagctcttccaatcaaatatccatcccacgaagcgcgtggctcctcaaaagagtaacgagggtcatcaaccgaaaccctaccagcatcaagcgagaatcttccagcgtcaattgagaatcttggatctgtatcacacgatctccttccgtaaccatactcagcgatttcagattgagtatctctaagttgtctcccgattgccttctccaccggtaaagcagaggatccggctccgagatttccggttctatgcttcttaagcttctgcttttgtctccatttctgcaatttcttgctgaatactgacgccgctgaccagaaactccctgcaatctctttgaagtctctgttcgtcttcttcgccgttgtctgtggattaaactcca

SEQ ID NO: 18760 - DNA, 582 bp, Arabidopsis thaliana
atcctttgaatattctttttcttaaagagttacattggtctcagtttcagtagtttcactattaaactaactgaataatggttcgacattatcaggagggtgcgagaggctgagcggtttaactgggctgctactagaggcgttaacgaagaattgctttttgagaatatgcctgatgatcttcaaagagatataagacgacacctcttcaaatttctcaagaaggtaaacatatgtgaaacttctgtatgcatagatcccaattccatatagtgttgcaaagagctagttctagaagctgtaactgcaagtaatagttagagaccacagattaaaccattgctgagaaatagtattgaaatttgaatgggtttgcaggtgagaatattttcgttgatggatgaaccaatcttagatgcaatctgtgagaggctgaaacagaggacatacatagggagtagcacagtgttgcaccgtggaggactagttgagaaaatggtattcatagtgagaggtgagatggagagcattggagaagatggttctgttctccattatatgaaggcgatgtttgtggtgaag

SEQ ID NO: 18761 - DNA, 629 bp, Arabidopsis thaliana
tgtagactaggaggatgcgtattccctatcgccataagattagcgtgaaggctatcggcgacgagacaagcataagtgttgtcttcacgtggatctccggtgagaacaccgtaacggagcacactcttgagatgtgggtcttcaatagtgagagggggtagttcgtaccgttgtgaagtgaaagggttgtataggaaagtttggtggtcttcgcgtgggattccgacaatggagtcggacataacaacccaacccaatgttgatcccaagaatcttgcctcttcaagattttggtcatacctcctattgtgtagcctctctctcacagggtcgtagaaacgggcctgtccggatcccctttcacggtacaacaaccaaggcctttcctcttgaaacctccttcaagtatgcttcggcaacgttaaggttaagcaaatctgtagatcttttgaagagatcttgaggcaaattttcacacgaatccctgcaagagaaacaaatttgagacaagtgagatgacagcataaactataagaattaacaaataaaaaatgggagataattaaattttttttaaagatgttccaaaatccttcaaaaaatgagatgatagcagaactatatattag

SEQ ID NO: 18762 - DNA, 706 bp, Arabidopsis thaliana columbia
gaactcctttttttcacttgttcgtgtaatcgaactctttttcaagatgaataaaacaaattcgattaatagttgaactcgtctccgagctgcttacgtacccatttcgggatcaagcctcactgtagttcatgtacaaacaatgcgtgttttttttttccttttcgttttaaacataaaatttcttcaagttcaccacattccaaggatgttagactggtctgtcctctacatctttcaatctgtaaacaccatttcggaccacttcggtaacaatataaggaccttcccaattaatgccaagttttcctgctccttcctctttcttgttatcgaacacacgtttcaaaacataaacgcccacaaagaaaggtctgcttttgacttttgaattgtaataccgagctgctgcatgttgataattttgaattcggatcaaggcctgatctcgcctctcgttgatgatatccagcgaatcgtcgagcattgcagaattctcgttttcatttaaaggagcttccgttcgacgaagtcctggtacattgagctcggctggtacaactgcctccatcccgtacaccaatggaaacgaggtttctccggtcgagcgcctaggagttgtgcgatatgcccataagactggctgaagttcatcataccagccccttttcaaatgacttagacgtttcttaagattgcttagaat

SEQ ID NO: 18763 - DNA, 1671 bp, Arabidopsis thaliana
caaatggtaagtgcaaatcccacgagtagccaacggttacacttcaccaattgctttccctattaactgatgtctgtccgagattattgccaggtccgttgcattaggaataacaacattgggttgcgtaaaaaaccaacacaaagattcatcattttcagtatcaactacaccgaaagctaacggaaaaaatctgaaaattaccatcctgaggtaggtctgttaagagcgtccctttgtagctaccatggagaaacgtaccgtcgacaacaacaactttgcgcatgaaaggaaacccagcgatactggcaccaaacgcaatgaacatatagttgaatcttccactctcatcaatttgaagacgcgcgattttacttgaatttgcccgtcttatcatgtataggtaagaaggcagttcttcaaaactactatcaggggtttccagagtgagcttccttgcatacttcagcgtcttgtatgactttcaataacccatctgttgacacaaatatattaattaataagtcaaccataatatatttataactcagtcaaactgtaacacaactcagccacaaagtgatgttaagtcagccgtagaagggtcataactcaaccggaatgtaattatatgtcagccataatatacccataagcaatcgtaatatttctataagtcagccatacaataataaataagtcagccgaaacattgtaattacctttactcgaaaatgcttattccgactgtttttggtttaacatccggaccaacgtcaccaagatagtccctgtaaagaactccaagtacatcatgtgttgcttgtcgggatcgattagaatgttgcgtcacagaacatgtgtgttccgaatcgtatatacggacataaaaataaggctcatccccttgtgtagatgcatgaactctccagcgacatctatcaacccaggactcgtaattcactgtagtcgtattagatagttgtacatcaaaatcaaatccatcccttatcgcaagaagtttgagtcgatgctccaactcgaatttgctactgtatcgctggcctgccgcgagtgttagcgtagacagctccaaccttaaatcagtcgagctcccaacagatccaatcatttcaatgttttgaatttgagttctcttctttggaggaagttttggtcaatcttcgtttttattctgaggctcgccgtatacagcaaagttatcatcatcagattgagaaggcaccattatagattgagaagactttcagatagtgtataagggtaggaatgtttcatatgaccccattattatacattatttggaacgatcaattacaaaggttggaaaaataccgagggtgtcgatccagtatgcgagttccccttgtttactctcttaaaataataagtctgggggagagaaagaaccccaaagaaaaaagagcacaatgagaaattttgaaactatggagcacaatgagaaattttgaaactatggagcacaatgagaaattttggaagcttttcagcaatgaagatcttgaaggacgttttagagaagctggtgtcgatcgacaccacacttgtgtcgaaagacattcttattgctgccaaaggagttttcatttactgaaaagtctttgagaagccctgaagtcttccttattt

SEQ ID NO: 18764 - DNA, 656 bp, Arabidopsis thaliana
ataactttccatttgtaataacaacgtttcttgttctgtctcacaggagaaatgtgttgccaaggactacaatctgaacaagttagccaaagatgcgtacagggcttatctctcagcatacaattcacactctttgaaagacatctttaatgttcaccgacttgacctcctggtaaaagaaacttaaaaaacaaatattcttccaaagatttttgttttcataatagctaatatctcgtgttttgacgttgagtatcacaggctgttgctgaatcgttctgcttctcttcgccgcctaaagtgaatctgaacatagaaagtggagctgggaaggtgaggaaggcgagaaagcagcaaggtcgcaatggcttcagtccttacagtccctatggcaagtccacacctacaaaggaggcataaagtgtcatttgtttacaaaattactattttgctccgtagttttgactaattaccaccaccaagttttgtttaaagagtaaacagtgcatttgatttacatgaaatgttccttggctactattaatatttcagttctatgggttataactgtttagaattgttgatatcgttgcttataataaactgatcatggaaatggaatagaaacataaagaaccataagagcttataagtga

SEQ ID NO: 18765 - DNA, 959 bp, Arabidopsis thaliana
gaatccttcaaagtgtacgttcgcagttccttcaggggagttccttgggtatattgtcactgaacgcggaataaaagcaaatccgaggcagataaacgcttttctgtcaatgacttcacctcgtagtataagggaagtacaaagattgacaggtcgagtggcagcgttgaacagatacatttccagatctacagacaaatgctgcgaagaagcattcaagcagttaaagcattacttatccgaacccccggtccttgcaaaacctgagttcggggaacagctttttttgtacatcgctatttcagagagtgcagtgagcggtgtactagtaagagtggagcgaagtgacgagcgtcctatcttctacgttagtaaatctttctccgacgcagagacaaggtaccctatgatggagaagctcgcgctagctgttgtctggcagcccgaaaacttcgaccgtacttccaatcacatccgatcgtcgttctaacgtctttacctcttcgcaccatcctccatagtccaactcaatttggacgattagcgaaatgggccatcgagctgagcgagtttgatcttgagttccgagctcgaacgagtttaaagtcccaagttttagcggatttccttattgaattacctttggctgcaccagagcagacggatcagactcaaccatggatacttcacgttgatggggcttcgtcaaagcatgggtctggagtagggattcgtctgacatctcccaccggtgaagtgctagaacagtctttccgcctagctttcaacgcctctaataatgaagcggagtacgaatcactgctggctggattacgacttgccgtcggggtcgttgtcagaaacttgcatgcccattgtgactcacagctcgtcgcaaatcaatactccggcgagtacgaagcaaaggatgcacgtatggaagcatacctgaatttagt

SEQ ID NO: 18766 - DNA, 1576 bp, Arabidopsis thaliana
atttgcctcagaagacttccctatttgcattattagtccctggatatttttagggtctttatattgtttttagacctagttttcttattatcaagtctttcatccagttttcattatcaagttttctacaaaaccctgttacgaagagacataagctattcatcgattgctttcagagttttattcagatcttaatacaatgaagatatcctttctttccgtgaatctatttgtcgtgtttatgttttcatactcaaatatgttgcttgcttcaaccaatatgtctgagtaatctgcttgttaggaatagggtttctcattagggaatcctatgatttagtagattgccccctttactaggttatctgtaggattcttcatctttaattatgcttaatgctagatctagagtaattaactagatcttgaatccagacaatagatatgcccgccataggtatctgtagttggatctattatttgatgagtctggtttataggtgtgtaataagaatcggcctatctactaagatgaacaattaaactcgttaagaatgcatatttaggttgatagtttctcggcttctccggttattattagctataaatatagggagtttcgcggcaccgccaccggttattccataattagagtttgagtttaagaatggttcgataacaacctagttttcaatagatctactaaccaatagtttcctgagaataccatgttcctagctctttattaaatcgttcgcaacacaatcatcttgctgttttcttactttgttttcttactatttcactcataccctcctaacttaatctcgacatttaactcactgtttgaacaaaagaactccgtgaatttgatcctaaaatactgtaattgatctcttatttgagatagtagttctaggtaatttgaaccatatcaaatttggcgccgttgccgaagttcttgggaatcatcattgagttttgtttagggatttcgtttagtttttacttctattttgttactcacgcgtttcttgttttcttcttttctgtgtttcaggtgtatgcctaggcaaacaaggagcacaaaacagaaggagcttatcaacttgtctgttcaggccttgggaaaacttgaacgcagcaaccgaaaaactcagaaattagcaatggctgacagagtcattagagctgatgcagaaggagttttaagagatgaagattggcaagcctacaatgaggctggtcagagattggatgatcatggactcatcctacctgaggacgccaatgaggatcaggcgcgcctcaatgcgcaaatagctgccagagacgcagcagggctcgctgtcgatcgacacaacagaggtgtcgatcgacaccatcgggagcagcacgacgacgcgattggtgtcgaccgacacaacagaggtgtcgaccgacaccaacaccagatttttgcagctattcgtccagctgcggaaccacgtcgtactcttggggatttcacaggcctgactttgtctatgctaatcgatcagtgattgtaccccaccattccaaaggacgactatga

SEQ ID NO: 18767 - DNA, 933 bp, Arabidopsis thaliana
cagggaaaaagactctaacaattatgtacgaagacaatgcagcatcatcgcacaactcaaagacgaatacatcaaaggcgatagaacaaagcatatcctaccaaaattcttcttcacacatgatctacaaaagagcgacgatgtacaagttctacagatccgttcgaatgataatctggctgacttattcaccaaggcgctaccaacttctacttattcatcgtatcggattacgccgtctcaaagatctcgacgaatatactcataagggggagtaattgtgtgttgcactctttttcccttaaccatggtttttcccattgggttttcctggtacggtttttaatgaggcaacatttcaaatactttacgagttatgatactataatggtcatcaagggggagtgttatgaataaagatggatgcccattataaggcccatcatctaagcccatcatctagatgtttctagggtttaccctttccttgtactcttatataaagaaccctttatctcaatggaatatcacactcatttcctctatctctttctctatttataacatgtttccttttttttgtatacttactaggatataaaaaagaaattttgttttctctaaaaacattaccattcgttgataataaaccctaagaaaaaaatcacgcaagttcaagatggccaacgacagcggcaccgactctgtaagagcccctactcacaggcacagctaccgtcgtcaaaaccatagccgcagccggataagcaaagaagcactagacctaataagctctttacctgatgtgatcctacaagatatactctcctttatgccgaccaagttcgccatcagaacttccctcttgtcaaacgatggaggcatgtatggtgcgaaacaccgtctctttcttttgagaattgtaatttggag

SEQ ID NO: 18768 - DNA, 2014 bp, Arabidopsis thaliana
cctttgtcaagcatctcctctaagtatctgcatgcctctctcgacttgccttcacctataagccctctgatcaaaaccgtgtaggagttatcgtcaggacaaatccctttcttgatcatctcttcccaaactgctctccccatctcatagtttctcgccatgaagtatgatttcattatcatgttgaatgtgtgtatcgatggctcaatttcgttctggatcatcttgttgtagatccttgtggcatgttccggcattttctggttcgccatcagtttgatcaacgcattatacgttttgccatccggagatgtcccttttcttgcatctccttgagcagttcgtaaacagtatccagcttcttctgagtcccaaaccccgtgatcagacacgtgtaaaccgctgcatcaggttgcaacccggaatcaaccatgtcatcaaagtattcaatggcagtttccatgctcgactgtttgcagaagtcacggatcatgatggtatagctacggacattagggcaaggtcccttggatttcataacatggaacaatttgatcgcatctgattttttcctactcctcaacaacccttcaagcattacgttgtgagctacaatgtcaggtttcaatccctgatcaatcatatcattccagattctagctgcttctatcaagttcctcaccctgcaccaaccattgagtagaacagtgtaagtcatcatattaggtgtaaacctctccttcagcttatcaaacagaacctgagcttcttttccaagcttagccctgccaagactatcaagcaagcaattaatggtttcaacaccaatcttaaacttgtacttcttcatcaactcaaagataccaacagctttcttcctctctttcgcagcagcgaaagctttcatcgcgatagtgaatgtctccatcgtcaatagacctttcgtacccatctcttcgagtaccgaaaccatcgtctcgaactgtctagtctttgctaaaatactcatcatggagttatatgttcttgaagcatgagcaaatccttgtctctctgcagcccaacagaagaacctaaatgcaggcttcctagcatgtcgaaaacgttctaaaacctcaacgatgagatcatgtgataaatctagtttcatttcatcaagaacagcttccatatttctatctaacgcaaacaattcatcaatcactttgcagactctctctacttcttccggattagtacttgattcaacacaactgaccccagtttcttcatcattatcgcattcagattcaacttcttcatcacatccatcactaacattagaactaccactagagaaacctctacacccaagactcgcatcaagcagttgtacagaggagtgtggcaatggaatttgacggtaaggatgataagtagaagaatgaatcatacgagagaagagagcaccggaaaatcgtacttcctcttctcctctcccgccgattacgcggctttgactggaaatgaattcatcggcatcgaatgaagaagagcaaatgaggaatcttcttaatgaagtctgagtggagcttcttctcctagagagatagagccatggagcagcagccatggaagctcgacggcgattagcaatggcgaagtcgtgaaaagccactgatttacggcggagagctcttcacgtatttgggcctttgtttgattagaagctttgagtgataataattttgacccattaaaggcccattgatctggtcacatataaccattgggtccaccaggagcattaaagctcaaacgcataaagaatttttattttttagttggaaggtatctgtatgcatcttatcttcgttttagggtcgtgatattttctcaagtttttcttaggggaccaatttatttttagatttatttgattctatcttacatttctcttagttcacgttgtctttgtatacgtgtttatggatattacataactgaaaatcaagatcagtcaatcagtgtaaca

SEQ ID NO: 18769 - DNA, 1627 bp, Arabidopsis thaliana
ccccccatcgccggcgaaaactccggcgaaatctggaggattaagaaacgaatctaaactaggtaagcaaactcttatttgttgtccctttgccggtgaatttgatgaaccttatttcttgtcaaggaacattttttttgatttgggtttttctgatatgaacaataggagatgagagatccagagatagtgaatttacaaacccgagcctcccttgccgtttgctgcatccagcggagttctcggatgggggacgccttaacatacactcaaagccggagtatttgggaattctggtggaattactggagggttcggaggcgtgggatgagcaggtgtcatcactctgcaaaactcattcatgggatgcttgcaagacagcttctgacgaagaacaaacatgaattgtggacagtgtatggagggttccactccgtttctctctacgagaattccaaatgacaacagggctgatttgtgataagcttccatctgaatctgaggtggaagatcaccacgacccagcatacctgtctgtttggaaccggctgtttggtgcgaaaagtatagtcacagtaatggatgtgatagatatgctaagggaggatgctaaagcggagactcggaagcgattctcaacatggaagaagctgagtcttgcattggtggtgctgattgatggggttgttgtatgcagcaataggaaacaacatcgggttacacgagactttgtagaaatgctgcatgatatagaattcttcttgtcttacccatgggggcgcgtttcttttgaatcaacaatggaacggtttggcccttctgctggagaagaagatccaattggggagctgaaggcccggctgtaacacccctatcccgctatataaatataaacgaaatagaagcgttacgttagacgcccgcagtcggccaacccaggtttccgaaacaaattcgtatgcccgagtcgtccaaccacaagagtctagcctcccgcccgtggcctaaggcttttcaacccgtaccgcagacgtgagttgtgttagtccggacaagactaataatatcagtgagtataaccatataactttagaaatccgaatcttatacttatatatatatatcatacgaaaaatggttaccaaaacatatatagttttcggatcctctttgaaaacatacataatatacttagtaagatcttacaaaaagccataaaatctacattggtttgtcctaagtcacgagcggcctctactaggtgggttaactaaggtttcccgcacaaaaagtagcatcataagtaatctagtattacttaatgagccccagatctagacagagctacgctagtacctctaccctaagcagcatcgacggatactaatactacgacctaagaagaataagatacgaataatgcaaataacacacagacaaagagaacacgcaacaagcaatgcaagcaagacataatacgcaaagaattatgcatgcagactcgatttcctaatatgtagtggacaactactgcaagtatgcttctaacagcctaggtaaggccttctacgaatccttgatctcccaggacatgcctccatctcttagacacaaagtctacaagaga

SEQ ID NO: 18770 - DNA, 1065 bp, Arabidopsis thaliana
atcgtaaatctgcaaagtatcatctagaactaaacttacacaatgacatacacgatacttggcctcacaatgctcattacccaactgaaccctaagatcaaaacacataacttaactacttgttctcgcaaacaacaagtagagactaacacaacacgactcttcaaacacattgcaatagattgtggctgcaaagtaacatctaaatatcaaagaccaaagaccaacacaacacgagacaaaaacgagaaacaattcaaacattttctcaatctaatcaatctcacaaagctcattacccaactaaaccctaagatcaaaacacaacttaaactacttgttctcgcaaacaacattataagaccaacacaacaagactctttaaacaacagaatagattgtggctgcaaagtaacaactataatatcaaagactttcagacttttagaccaacacaacacgaaacacgacagataaacaagtcagacattgtctcaatctaatcagtctcacaaggctcattactcaagtagaccgacattgaacacaacatgggatcacaaacaagagaagaagaagatcataccatgtcgtattcggtcgaggaatgggagagaggacggtgacgaacttatccctctccggcaacataagcagatcatttagggattgaagtgtgtcctcctggagatccggtgacagaggtggatattcttcgaagttgttgccttgagaggatgggtgactgtgagctcgagactcttgaactagagaaggcggagggtcttgctgagaaggcggagggtcttgttgaggagtcggaggaacctgctgagtagtcgcggcttgagtcgctggattgttctgcacttctactgaggcagtcctttgcacttcaggttgtcgactgccagagtgctgaaacaattgtagaggcggcggatagttctgaacaggagctgccgttgactgtaaaggaggaacggaggcttctgttgtaggcgtctctagcttaggagactgttctgctgctgcgtgaaatcgtactgagacggaagagaacga

SEQ ID NO: 18771 - DNA, 1851 bp, Arabidopsis thaliana
ctttgatctttataccaggtgttataagcttggcaaaaaactcgttgtccactttgcgaaacccgagaagagtatgaatcctgtaaatccagtaaaatatttgataacaagcttaagacttgcaaaaatgatgatggaataattactaatccaatataatagaatatacttacacatggtctcatttaatgattattggttaattcctctacttttgaagggtcaaccatgtccagggggttgtatgagacatttccagccttgataacaacctctgactgttgagttggtacatctgccaccaagactattgtttccttaaaacctccaggaagggcatcatcctgttcatagactagttgcttcttcacttttttgggacctttggggctgcttttttttctttttttgcttcgacaacaacatcattgtctgattcatcctgtaaacaattatgattgtcaacaacagttttattcgtttttctataatacgtccatggtaaaaataggtacatacattatttttatgaatagagacggttttgtctgcttcatctgaccctgggtttggatcctcatttcctccagacccctcgacaatgcccggctcttccatcactccctgtacaagttaacctacataagtctctataatgtacacatataatcctatgtatgctaataagtgattaggaattcaaacacacaaattgttacctccatatcattaggtgcacccaaatcaacggagccttgtgtatccaactcgcgtatcatctgcataatataaattttataaatttgaacagttcatagtaaattttattttcagctatagttaacttacattattaactacttgaaatggtgacgggggatcattgtgggtcttctcaggtatttccactttcatccctggcactaatttggattctgctgccgcctcaacctgtagaatttaacatcggatagctgctttttagttatgtatgaaacaatctatgtacacagacaatagtgacaaaaaatgtacgtacacttgtggcgggtatgtctttaatttcagactcacgagctgtatctccatcagaaggctcaaaagtttcttctgcctcgctaccattagcttcagtcacagcactggcatcacttgcttcttcctgaaacaaatatacatacacgtcttatatgcgtacacatatggaaaaacaacaagtgactattagctgaacacatacctgtgtagatgttaaaggtaaacctgatggattgtctaccatctctgtatcagcatttgcttttttatcggcctctgtatgggtaccaactaggacaggttcaacaccatctattggtccattatcctgaaacataggctaccatggagttaagcaatatataagtggacattttaatgtaatatatatgcgtatagtaatggaaaactgtatagaactattaccacaagatatacctctgaagctcttgcaagcacagtagatggaatttcttccatctcggtgtcaacactagcttcttccacaggcctcccttcctgtgtacaaacatagacagtcccagacattgaacctaaaatgacagtcttaccaacaactacatttcctctatcctgaaacatagtataactaactttttaagcctatatgtacgtacaccattaaaacagattggtaagagtattagtagacgacataccggatgggattgtgtggatccagcataaggaactatagcttatccagtgtcaacaatctcttcttctgcggacgaagaatccacttcatcttttccaataaaatcactttcattattggcttcatactgtacc

SEQ ID NO: 18772 - DNA, 812 bp, Arabidopsis thaliana
acgttttaaagacgaaatcatgatgaatcaacctctaggaacaaattgctatctttcatggacgcttttgccagatacaacgaaatcatgatgaaccccgaggaccaagagaaaactgcgttctacacatagcaaggtattttttgtcaccgagtgatgccattcagacttaaaaacgctggggcgacttatctgcgtttcgtcaacaagatcttcgcattacagatcgggaaaatgatgaaagtgtacatcgatgatatgttggtaaaatctatggaaaaggaagaacacatagcccatttacgcgagtgttttcggcagcttaacctctataaggtaaagcttaatccggccaaatgccgctttggagtaagattcgatgagttcctgggatatctagtcacgcaacgcggcatcaaggcaaatctgaagcagatcgaggcgttattgggaatggcatcgcctcaaaacaaacacaaagtgtagcgtctaactggaagatcacagcccttaactgatacatcactcgatctactaacaagtgcttggctttttacgacatgcttcggggaaacgaaaagttcgaatggacaacctgaagcgaggaggctttccaggtacccaagaagtacctggcaaccccaccaatcctcgcgaaacctgtaatcggagaaccactctatttgtatttcgccgtatcagatactgcggtcagcggagtttaagtccgggaatatagaggcgaacaaaagccgatcttttacgtctcacaaacatttaccggcgcagaatctcgctacccgcaaatggag

SEQ ID NO: 18773 - DNA, 1389 bp, Arabidopsis thaliana
ttctgaattacataaaacaagttgattaatctagtctaaaactactttaaactagctaacatggaccaaagttcttcattccctgcaataatcaacaatgtctcatttcagtttcatatataaaaccaaagtataaggatcactataatctagaaacttacccattggccatgcaatagatgaaccaagtgaatctctcatatactcgatttcatctgatgccctccaaactgctgcatcatctattttcactatatccacccaaactctagctgcattatctcccaagcgaacatggtgtaccttttggtctgggtagactgaatgcacacgtccttcagcaaccacctgcttccttccactgatatccattaacttacacttctgtttggccttgctaacttcagctacacctttacgctgccatgttacaatataaaccagttttaatgtatgtagaaaaataaccagattcaatagctaggtaataacaacaaacaaaataccggagatcttctcagagggagttgtgaatccagcagctgacttttcttgataggagaatttgaacctttagctgtggacttctcagctatggcctttgaaattattgcaacagattttgtaccttttgctgtagatatctcaggggatggcttataacctgctgctgcagtttgtgaacctgatgctgctgcagtttgtgaacctgatgctgctgctttcccggacgctactgctttctcggatcctgctaacttgcctactgatcttgctgacttgcctactgatgctgctgacttgcctactgatgctgctgctttcaatggtgattttcctcttgtagcagaagtctgaagtggagatttctggcatgttgcatctgcagggttgacaggccatgcaacaaaagacaattaacagtcctcaagataagtcacatccatcgttggcctccatataaacgtctctggttgaagaactgcatcgacaaatatcttcattgctgcaggtccgagaggaagcccattgactaatgcatttggttcttgtgtctgccaacatccttctgcaacaacaacatcatttgaagacaaatccaaaagctggtatttgttatttggtccctgtcaaaaacatagaaacccagaaatacattatgttaatagaagatcattacttgatatgtctataatttgcatgatttagtcattaattcttcactactttgtcattgtttcatccacatttcatctcattaggaatcgttttagtgtgtttacatacttaggacgattttgcattaggattgcatgtgcatggcatatttggttgttttaaggtactttggatgcttttggagttcaacagaggaaaaccagaccatga

SEQ ID NO: 18774 - DNA, 896 bp, Arabidopsis thaliana
gcaaccccgggcttttaagctgcgcgcgctatgagttcgttcattcgcgatctggcgataccacaagcccagcttccaaaattctggcaggtcccttgtgtgacctcacttcaacaggtccccgagataaaaacacgtaaacttacttaagtttgaacctacgaagagcataccatatcacatctgaaataacttggatttgcaataagtcctactataacccggaacaggaacaaaacgaagtgatcatacaccaaactcgacaaagtgtaaacacgcgtataagaaacgaaaagtacttgttaaaagggataaaagccttcccaggcatcaaagtacttaaaccgaacaaaggattaaagccttcccaagcaccaagttcaaaaggaaacaaacaaaaggttgaaagccttcccaggcactaagtccaatacaaaaacaaagaaaaactttaaacgaggagcgtaacgaatcactccttcgatcccccagctggcgtggcaaagacagtaccgggatcctctccgagacgtcctggatatctagcttgttgctcccaaactcatccaaaccgatcggcgttccctgctcatcgacatccatcagatgaaccactgacatctccgacacttgcgggatatccagcttgcttagagtgaagtgtgatacctccttcgctgcgcacttctcctcctggtcatcgagctctgctcgcagccgaggtctctctacggccaggtcgcagccttcgtgatttgatcaatcaaggccaagttcgattccacctcggccgcttgactttccagcacggtgaattcctacttggcgacccacttcttcttgatctcatctagcaactttgaatacgaagcagccagatcaaccttagcattgtg

SEQ ID NO: 18775 - DNA, 1841 bp, Arabidopsis thaliana
  unsure (1)..(1841): unsure at all n locations
tccctgcttctaactcgttttgtgtttcatttatgttctaggccaactatcaatggcaaaccgacctcatttgtattggacgccttgtgctgctcattgcatatacctcatgcttgaggatataggaaagatttcggaagtgaagactgttatcacacaatgcatcttcaagaatgattatatctatggtcacacttcccttgtgaatatgatgagaaaaattcacaagcgatggaaatctgcaaagatcggctgtaacacggtttgctacgtctttcacacaattgggcagtatcataagcagagaaaaaacttgaggaattctgcgacttctcaagaatgggcagattccaaatggcaaaaggaaataggagcaaggactgtgaagaggatcattatgcaagacagtttctggcacaaggatggttgacggagagaagaaaccagctacgagatacatctatgaagcaatggataaggctaaagtggccattgttaaaaccttcaatggtaaaaaagacaaatacaaagattcatttgaaattatcgataagcactgagattgtcaactccatcagcctttgcctgatggctacttcttgaatccgaaatttcagtataatccagagtctggagtgcattgtgaagaggttgggagaggtctatctacacatttgataggttggttcttgctgttgcaactcaagataggttaagcgacgaactagaatagtttaagagtgcttatggactctttgggattccaatggtaataagtcaaaagaaaaaagcaatcaccagctacgtggtggtctgcgtatggaggcacaacaccaacacttagagactttgcaatattcttcgtctcacgtgtagtgcgactggttttgagagaaattggagtgtgttttcacatctccataccaaggaaaggaatccaattggctcaagaactgcttaatgacattgtgtttacgctacaacaaatatccacattgatagcacaccaccaaagctcattttccgtaaatgttatgaaaaatgaaattttattttagatattgtataatagcattgaaacaacgctaagatataatttcactaaggggaaaactaaatcacttattccgccactacttagcccaaaatatttagttaagtgccaatacttgtgaaaaaaacacaataactttgagcgaagaaaaaaaagctctcgaggagcaactatcttcttctccatctatcaatgatgtctctaatctgctcctccaccgcctccgccgctatggctggaccatctccccaaacctcctccttcccctcagccacctcctccctccacctctaattttttcgaccaagctcacccaaaccctaaattacctgaacttttatcacttatgccacttttttgaaaaaactgatctggactgccatcagttaatctgaatgccaccgaaaatgtgatataccagttgtacccttaatgagttaattaaaaaaatgaaaaagaaattcaaaagctaaataaagaatcgagatcctccgttctctctcctcttcgtcgtcgtgttcttcttctttggtcgacgttcatcttcttcgtcggccaccatcgattccggccgccgccgancttgaaatccggcgtaaaagccaacgaattaggtcagtttcttctcatatttcctttgacattggtgtattgtgattttagattgggattttgaatctatataatcccagatcaatttgatagttgatgattggttgcaagtaagagtatcgatagaggtgcgaacgtattgagtgatagcaagatgtagtgatgtagtgattga

SEQ ID NO: 18776 - DNA, 1526 bp, Arabidopsis thaliana
aagttgttaatatttcagttcttattgtaaaactagttgctatgttttttgtaaaatatttcagttcttataattagttattgctgattttatatcctgattgtatcggaatcctctgcaataccgttttcttatccatatggattaaatctggtcatgaagggaaatctgcagctttctctgtcgagacactatcccgagttcgtttagataaaagccctgacttcatcaacatgtcttcacccgactctgttcacttctcattctactccaaatgtcttgcaaaaagaaacccttacgctatgtatctacagagcttgaggctagggttctgttctctcgacatgaaaggcgccatttcattactgaatgattgtaaagatgtcattcctatagccaagcttctttacattgcgctaaaccgctgcgcaggtaatgaagtattagacgcgtttaatactttcaaacgagagaacaagtgttttacagatgtagatatcatggccaagacactaattgaccacatttctgatttggaaccaaaacgattcggatcttacgctgagctctttcattatgaggattatccagactgttggctcatccatgaattttacaacgaatataatggtgagagatgttcacattgcatctacttcttcctcttcagagacatccttttgctttcctagtttatttaaaaacatcaattacccactttcagtatataactatctcttttgtttccctcttttatctagtttattaatgtaatcttattatgaagttgtatttctctcttgtatttaacgtataaactagtgaacatctttctcgtttatcatgacttatagggactctttcgattttggagcatgcataacaaaattttccgactatactaattccaaaaatactaaagattggttatatctgattggtctggggtgtgtggatagacatataaatattcatttcctatctacatgtaaatattcagagacatccatttcattaccaaggttttaaagatttttttattatttaaaactaagctatataatatgaaatcacatgtattagtcgatattctctattctatattatccgactcaataaatgtccacattttttattcaaaaccaacaaacttctaaccttacatgcacttttacattacgttgttttttagtagaaatttggcaattgcataagttttaaaaaagaatataatgggaaaagatgtttgtttacatggctgataggttctaattccattttttaaatctgagatgatctgaaaataatttgctcacaataactaatttttcaacatataactgattggggtatcttacaattattgaagcatgtaaatcgaactaatcttacaaatagatctatttgaatcaaacgattggatatgatctgatggtcaactatatttggatagaaaacagaaatatttgattttcatctacttgtaccttttctgcgacattcttgcgtgtccctggtgtaacata

SEQ ID NO: 18777 - DNA, 299 bp, Arabidopsis thaliana columbia
attatcatctccatcgaatgatttaagagctttatcagcgtaagacagaaccttttcaggatcttcaccttcacgatcgagatggagccctaatttcaaagcagataaacctaattcgttcccttcgaatgataactccatctccttgaacaaacgtagcatttcatcagtggtgttcgctgactcgaacgcatcttcgagatcgatttcttccttatcagatgacgaaatctcacggaggttcctcgacatgggtattcaaattccgatatggattgaccacataactgacgcttgat

SEQ ID NO: 18778 - DNA, 803 bp, Arabidopsis thaliana columbia
cctcctcgcctagcggcagttcgtccattgactgcatagtccacctatctcgtcgcccagctcgtctacaccagcaaacaactcggtttgtccaagtctctctaccacggttcatccagctcgtcgcacatttgccggctcgtcaactacctgccgacctacctccaatgacggcctagctcacttattctaatatgaactacgtgtggcttgatccctttctgagggtacgtaggcagccttttacaaggttcagctataaaacgaataaactctattcttcctcggatatcaagatcgttttccggcctcaagctcgtctttcatctacaatcggctcgttctttttccatttatgcttgttgaagaaatcatcctttgtaatccgtccaattcgcctaagtcgcgggctcgtcattaatagaacgattcttcttccttccctagagatcccattttcgtacttgtgtgattcgtgcatcaacggttggcgcgccaggtagggggatagctcgaagatatctctcaaaactacgacccagcgacgaagcaaagtgacaacaaacagactacatggagcattcgataccgactcgtcaggctctggaagtaaaacgacaacgtcgatccccgggagagccagtcactcgacctcttcattcgatatcgcagcatgttctccgacaagaaaaggacttcaaggaactatcgaccccatcatcctaggcgatgacacttccagccgggcagtcaggacaataacactgaccgacgaggaagtgccacgatcaaagaggaacatc

SEQ ID NO: 18779 - DNA, 618 bp, Arabidopsis thaliana
tcctttctctgttgatcatcttcctctagtgaaaccatttcttcctcagagtcttcatctaccaggtctaaccttctccccacgggcttctttcctcgagtggtatctgccttgttcctcgagaattcctttgcagaggactcactcgaccttcgggattgagtatttccaacgggagagctaaaagtctcttcttcttgcatcacttcatcctcttggctcgattcactgtgatcgatctcgaaactgtcttgttctctcctgctcgaccccaagggtgatggttcagaaggtcctcgagctgctgcatgcgaagaaggtgttgggtacctcttcgatggggagagagctttgttccgaatccttgaaaaaagcgagcgccagttcgtcatcaagaacaaaagtgggagaaattcaaaaccaaaattcagtaggttaggagattgaatgatggaggaaacaaatgaatttgtgaaaagtttttgacaagaaagggaagtgaaggagataaagagagaattgtaaggattcgagaatgctttggtatgggagagatgcggttgttgagttcgggaattgcaatggggggacgaatgctcctctcgtttggtcatccga

SEQ ID NO: 18780 - DNA, 355 bp, Arabidopsis thaliana columbia
ctagaagctgccgacagagtcctcgagagttcatgaaatacgagatttgaagccaagagtatagtcgcgttactatcacagaatagtagaatgggtcgtgtatgacacacagcaatactatgaaggcattcccggagccacttgatattctagagagtgtacgccctgacgcgatatacagcttccgccgaagagtaagaaacaatgtgttacttctgagtcgtccatgaaattggtgaggagccgaaaaagacagcatacgcacttagagatcgtcgagtaacaccaaccagagtcacagtacgcgattagtgaaatctcactatcagcccggagcatgattcctttagcagga

SEQ ID NO: 18781 - DNA, 507 bp, Arabidopsis thaliana columbia
atttgaatcgataattaacatccacttttcagaagcaaatactagtctggtttaactatatttttccccattttctctaagtgaaccgttttcgcttttatatttgactttcaggtagtggtaaaacctatactatgaagcctttgcctcttaaggcttcaagggacatcctgcggttgatgcaccacacatacagaaatcaagggtttcagttgtttgtcagcttctttgagatttatggaggaaagctatatgatctcctcagtgagaggaagtaagttgaaagacatcttatatggttatatatcttgactgcaatacttagtatgtagttgtattcaaacgttttttaccttgataggaagctgtgcatgagagaggatggtaagcagcaagtgtgcatcgttggtttacaagagtacagagtatctgatacagatgctattatggagcttattgagagaggaagtgcaacaagaagtactggaccactggtgcaaatgaaga

SEQ ID NO: 18782 - DNA, 462 bp, Arabidopsis thaliana columbia
aatcgagagctgataccagtgtccatgcactggtggaaagttgtagagtccaagcggtttatgcacatatacgatagagtggtccaatgggacgactcagctggtgaagacgcattcaagaacgctaaatctcgtttctgggcagagataaatggtttaacttgtgacttatctttgcctgatcctgatgtttacattgatgatgatgattgggatgctggagttgacaatgagttgatacttgaccttgaacgtggtccagaccctttaacagatgaacaagagcatgttgtgatactcgatgctttggtgttatctggacagtatggcgggcttggtagtcgaactggttgcggtgacgctgaagggattaacgaggagaatgttggaaagggtacgccagaaaactcatggggtgatcagaaatatgatggatggaatgaagattactgggggataaag

SEQ ID NO: 18783 - DNA, 520 bp, Arabidopsis thaliana columbia
gcagactctagaggagaggatcccctataatgaccaaggtgagagaataaatgcttttgtgatggtcttttaagagactgcttctcttctcagttagcttctttaatggcaagtttctgttctaagttggcatctttatagtctatactggttgtgaatctgtgaaacagataatagcaggagagtggattgctttatggaaatagttagttgtttgcataatttgagtatttctcatgtactttttatagatttatgactgatgctattattcatttttatccagtggatatgatgaaagaaggcagtgtagtgactctgcgtaatgcgaagatcgacatgtacaagggttctatgaggcttgcagttgatagatggggacgtgttgaagttgcagaggagcccacagacatcaccgtgaaggatgataacaatctttcgctgatcgagtatgagcttgtgagcgtcgaaacttgatatggttcaccacaaacgaaaacagagcgactcaaaaaaagac

SEQ ID NO: 18784 - DNA, 584 bp, Arabidopsis thaliana columbia
cttcttcgccttctctcatcttctcttcctctttggcaacactttcctcctgagaaatcaccattttaccctcgtgaccaccacacgtacactttttcatcgccggtgtcgccagatacctcggcaaatcttctccggccattatgacaagaaacttctcctcgtaagctccgttcgccgccttatctccagaccggctctctttctcttcatctacgttttgaccatcttcttcgccggaggaagacaggcgccagtaagagcaagcgaggatgagaagagcaaaggcgattagtcctagcatcgccgctaaaccgccgaagaggtaaggaaccggcgagtgccacggtgattgcggcgtcactccgtggtgattaacggaggttgacgttgccacatcttcaaacttcgattgtacgctcaatggtctcatttttgttgttgttgtgtgtaatctctttttgtttctctctggacttgtgtgttttggagataatttcttctacttttgttttctaacttgatgtggaaaaggaaagatgagtaggaacagaggagaaggtaagagatgtattataggtata

SEQ ID NO: 18785 - DNA, 312 bp, Arabidopsis thaliana columbia
  unsure (1)..(312): unsure at all n locations
nnnnnnnnnnnnnnnnnnnnnnnctaaagtagcctcatcgatcgctggtgcttcatccagactttcttgaatcgagatctagctatcgccatcatgtcgagcgaggatctgtggaatcgcatacgtccagtagagcacgatcaaaccgtcggtattcggcataccgagtttagtcgtgacaaccgcagtcggactcatgatgacttgcacaggtacgaagacgccgaggattacgatggcatacatcgcggtaaaggcgttgggccgtactcacattgcgagcgctggagtaggcagccatagggatgaaga

SEQ ID NO: 18786 - DNA, 470 bp, Arabidopsis thaliana columbia
gattgtcttctggagtggattgaaagaagcgatagatgcccaatatgtgataaggtgtgtttcccgcttgagctttctttggcagatcgattgtcttgatgatcaaagaattgcactttactgttgggaattcgtagttagatcaaccattgatggttgcgtaattagggtaaataagtgcacaatttggcaactaactaacattctgtcttctttaacacaggaagttgtgtttgatgatcgcttgaactagcatcattactatcccctggcttgaaagtttgaaggtgtggcgctttgtttggttagtctactacataattagcatacatctattttgtttcttcccacacactttaagtgttgggtctcacatttcccttagttttgcgtattggtatgttcgtttgccttgtgcgatcatatagatatacatacaatgtaatattacaagctctggtcgtcgttgt

SEQ ID NO: 18787 - DNA, 449 bp, Arabidopsis thaliana columbia
atatgaataaaaaaattgaaagtcagttgttgatgttcttactggggcgggtatggtaccttcattgccaaagctagtacgagctggaccaccaaaagtcatccatgttcttttagatggtcaagttgtaggcacgctatcttctaacctagtcacgaaagttgtctcttatatacggagactgaaagtggaggctccttcagtggtaaggcgtatttacttcttaacagtatttgttgacggcaacctatttcattagaaaataactatatatgcgaatgcttctttacagattcctgaagacctcgaagtgggatacgtacctacaagcatgggtggatctaccctggattgtatttggcatcatgtcccgcaagattcattaggcctgttaagaatatatctataccttctgataatattgacctgattggaccatttgaacaggt

SEQ ID NO: 18788 - DNA, 568 bp, Arabidopsis thaliana
gttaccttatttagaagtttttccagctttaactcacacatgatgcggcaaaaaaatccaagcacatgataattatctttgtggtttcacgggcacatggaaacatatacaattacttaatttttagtctagttaggttcatcaatatgcaaattaaaatgattttttttcctttttgtggcaaagagacttctgttttttcataccagcaaaacagtaaaccaatattttctatgtagtcggatatataatttactcggataaaactattgaagcacttgacattgtcacaaagtataaatttcatttataataaaagaaaaaaaaaacaaattaaaaatctacaattttccacattcagtgggaacaaacgacaccgtttctttctcaagatcatgaagtacattaaaattctgctgttgaacatttccgaaaatagacatcccattagaacttcccatggccaaacacaaaacgccggtgcttgaatccgccaccatgtagttctctccgggaagctccaaatcagcacctttaaaatgaaaaatcatcttaggaacagcaatat

SEQ ID NO: 18789 - DNA, 468 bp, Arabidopsis thaliana columbia
tcagggtataagatagcctgagccattggtggccacattccttttcttcattcgatttgttgaaggaattgccaccgttacgctggttaacgcctgctcttataccctggcgatgtccacttgccgcgaagtacgcgatggtgaagaaccacctctgctggtgcgtatcggttggtcaattctggttggcattatcggtattgttctgctggcgctcggcggcctgaaaccgattcaaaccgccattatcgccggaggatgcccgctgttcttcgtcaacattatggtgacgctctcctttattaaagacgcgaaacagaactggaaagattaattaacccccaaaatatcaagaggttgacagatggattttaatttaaatgatgagcaggaactgtttgtcgccggtatcgcgaactgatggccagcgaaaactgggaggccaattttgccgagtgcgaccgtgac

SEQ ID NO: 18790 - DNA, 587 bp, Arabidopsis thaliana
aggtctagcctgtgattgtcgtaaaaggctaccattaagcaacaatcttgccggacatttgaggtgtttttgccggaagtgaaaaatgataacaaaaaagacatgcatgtaaattagaagagtttcagaagatggaatcatacactctagaaccaaattcttttgtagttacataaatcgaggaggacacaatataatcccttaataaaaacaacaacaggacgatctatcaattaaagagtagcagcaaaaacatgcgttaagtcaaccatttcctcattagttgtaaacacaaggtcgaaccactcacgagtcccccagatctcctcttttttgcgtctttcaatcgtaattaccgcacaccaaatctttgtctcttgatgaagatgtttagcatacaccttctcgagccagaataccgccaattttccaccataattcacgcatttagtaggaacatactgattagtaacgataaacaatttctccaaacccttcaagctattccacaatttgttctcagagtcgtaccactcgaccatatagctccaagaacgatagagcacgttatcgatccacattgagat

SEQ ID NO: 18791 - DNA, 801 bp, Arabidopsis thaliana
tcaaaggaagcagtttggttactaggactcatgaatgaactcggttttgaacaggaaacaattgacatttacagtgactcacagagtgccattgcattggctaagaatgcagttcatcatgacaggactaagcatatagagatcaagtaccatttcattagggaattgatctacagtggtttaataagagtgaagaagattgtcacagagaccaatcctgcagatatattgacaaaggttgtaccagtgggaaaacttgaggaagctttggagtttctcagagttacagagaaataagaagagcgggttaagcctcaaaatataaagctgagtgggtttactcaggagatatgaagctcggtgggattactcaggagataagaagttgagtgagtttactcaattggtaaaagctgggttggtttaaccaggtccggaggtggagtccagaaagctaagtcatggcattagggtcaaggtggagaattgtgaataagtgacccaaatgcatattatccttaagtataggaaagcctctattcaagtgagaaggtcttcggttttgggttagtcaaagcttaacacgtgagagcacacgtgcgaacgactacaactgagaatcagctttataatccaagtctctattttcttctgttgtagagtttgttttgtaacagaaagagagagagagagagaagagagagattcttgtaatcaagcaatattatttgtggcttagtggattccggagcggttgttgtgtgtaggttgggacgttgcgtgctcttgggtgggtgggtg

SEQ ID NO: 18792 - DNA, 492 bp, Arabidopsis thaliana
tccctctgaagacgccagtgtgctctaaaggttgctggagctgaaggtgttttgcatcaattcgtcctccttacgttggcaatggtgttgcagaaagtgagattgttgatgttagatggagaagttcatcgatcaactcctttgatgagcagcagctcttcctcggcttcacatcgcgaagaagaagaagaagactcgcttgacgatttccaatgacataacacttaagcttgagactttcggatctatggatgtacaacacttgattttctctcatcatgttcacctcttgtttcaagtttcatcaattaaaaaaaaacactcatatggttcagtcttaaatccgaaaccattcttgtgcatggaaatcataaaggataggaagatgaatatatatacaaacactagaagtcttataaattcaaagtatgtctgagttttacaacattagagagaaagagaacaacacagaaacatttatagaaacatgat

SEQ ID NO: 18793 - DNA, 2118 bp, Arabidopsis thaliana
aaaagatttgtggtactgtaagggctcacttgtatgaggtaatctgcagatgattgctgaggttgaaatgtggccttatagctttgtggcatctgactactatccaaagtctgaagaacgtggcacagcctgtggtagattacttatccgtgacaggtatttgtgttttttacattctaatttttttttctttttcctgcatcttcctttattttatattgcttctgtaatatttcttagtgtatattaacatgttgaatttttgtataggttcataaacaatgatttgatttcagcaagaggtgcttatgttggtttggctccgcctggtgattctggttcttggcaaattgaatgcaaggtgatttcttccttctccattcttaattagttgcaacgagcaaaaatagaagtcagttcaaagatatcaagaaagagatttatgatggaattaccaacaaaataaatatttgtctgtaaagagtacaacattttgagcattggttacacactaaatctttgccaatcagggataccaattttgggctattgcggatgaggctggctatttctcgatagggaacgtgcgtcctggcgagtataatctctatgcttgggtccccagtttcattggagattatcacaacggcacaattgttagagtgacttcaggtaaattagttctatctaattttacaggttcctgcatatcagccaaattttgatgggcaaaacaacacaggttgcatgattgagatgggtgatatcgttcatgaacctccaagagatggacctacattatgggacatcggtatccctgaccgacaagcttctgagttctttatcccagatcctgatcccactcttgtaaacagggtgttagtccatcaccaagacaggtttattagctacacttttgtgaaccttactgcttggatgtgcgagaaactgaactcaacactgctttattatttatctgcaggttcaggcaatatgggttatggaagaaatacacagatatgtatccaaatgatgaccttgtttacactgtcggtgtgagtgattaccgcagagactggttctttgctcatgttcccaggaagaaaggagatgtgcatgaaggaacaacttggcagattatatttaatcttgaaaacattgatcaaaaggccaattacaaactgcgagtcgccatagcatctgcaaccttagccgagttgcaggtaaagatgaaacttcatttttctacagaaaagaatgagataagactgtaaagttttgttggtactttctatttgcagattcgaatcaatgatgcggaacaatccgccctctcttcacaaccggactcattgggagagacaactcaatagcgaggcacgggatccacggggtttacatgctgtatgcggtgaacataccgggtaaccggcttgtgcaaggtgataatactatattcctgaaacagccaagatgcaatggtccctttcaagggataatgtatgactacattcgtcttgaaggccctccttcttagcttagaatgatatgtgatatcattgtttatgtatagatatataataaaaccaaaagataatggtaacaactgaatcatattgatatgcaaactccccaaaccaaaattctgacaacattacaactgaacctaagacataataagtagaaaggagctactgaaatgttctcttaagcacaaatcaacacaagagacctgaatcgtgagtaaactacttaatgctacatcttccctgcaacttgctcagcagagcttttcttcatgagtcccttgttacaaagctcattaagcagctccaaagcttcctttgccataccttcataagctaagccttctatcagaatcgtgtatgatgtttcattcggtttacaccctctgttgatcataaaaaccaagaaatcgatggcacgatctgtttgccgactcttacagagtccaagcatgatagaattaaaggtgactgcatttggcctaatgcccatccgctcaaactcatggaaaaacttaatggcttcgtctacttttccttccctgcttaaacctccaacaagagaggaataggtgatagtgtcaggactaga

SEQ ID NO: 18794 - DNA, 1515 bp, Arabidopsis thaliana
tagtaacgttcgccagtgtgctttaaagtacatgaaagagaatagatggctttcatgcgatgtggaaaaaaagatgaaggcgggagtctcctagttcccactggacccttatgtggtggatggtttctttttaaaaatccataaaatgaatagtttgtgaaggactaatattaacgacccagtgtaaagcagtgacctcagtcagtgtagtagcacacacctacaacacacctacaacatacctacaacacacctacaacacacctacaacacacctacaacacacctacaacacacctacaacacacctacaagttgtggttacttgagagggttaggggagagagaccgagataaaagctcccgatcatgccgatacgcgaaaccacggatccggcgggcaaggaatcggctaagaaaccggcccaccgagagtggtgatctttggttcgcgggtcgttctgttttggccaggagtcggcaatagctttggcgaagaacccggtcttccatgatcgaagtaaacacattgacacacgctatcactacattagagagtgtgttagcaagaaggacgtgcaattggagtatgtgaagacacatgatcaagtagccgatttttttaccaagcctctcaagcgtgaaaactttatcaagatgaggagtttgcttggagtagcaaaatcaagtttaagagggggtgttgaaagttaaacttgattttgaatcaagtttaattattggatcaattatccaataattaattatggccaaatccaagttttagagttttctctagaaatatcatcatcttccacctccttaaacataaaaatctagatactctaatagaataatttagataatttgaataatgtaatctagatcttatgtaagaactctctagacttaggattaaaatattttagatattttgtagtttggaggctataaatacctcctccccctctcaaatgttgcaatgttgtgaagttgtattcaagtttaaagcaaagtaataaaagttctatttcctaaaaaactctctcaaaacacttaaacactttctccattacctctaaaagaattttactctaacacttgttgccgcctgaagaatccaaggaccatatcagttgggcaggaccgtttatctcagaaacgcacaagcgattatcgaggatgcacatggagtcgccaacagggtcacgttcacggaggaagggagcttcacataagacttgaaaagtttcagtgtgaagatggaaagataaaatcttggattctttaccctcggtgagccaatgaactgatccatcagaatacacgggatcttggtaatcatttatccgataaggagaagcagggtgaacgtacctccaagcattgttgctaaaatcgaaaacttcacaagttgtaacgtcgtcgaggcgaaactcggatgaattatataccatacctgcttatatgtgccattgagtttgtctttaccgaatgcaagtctaggagttggga

SEQ ID NO: 18795 - DNA, 619 bp, Arabidopsis thaliana
cgagaccatcaagttaccagtctgagctaaaggggtaacaaaaatcgtcgatttctctgttaccgaccagccgaccgtttgcaacgcaatcatcgacacaccatggttaaatcaattctaagctgtcgcttcgacatatcatctttgcctgaaatttcccacgagcaacggcgtgaaaaccatctggggaaatcagaaaaatgctcgaatctgcttcatggcagcacacaagctcaggaacccagtcactgaatcaacgtccgacgcgaatcataagaaggctaagcttggccgagctgaagagaaagcaatctccgagcagttatagctaaagatcgaggaggctcgggaatccacaaaaccaatccccgatccggtaatctctatctgccttgacgacaaaaaaacccgagcgatgcgtggaaatctgcgaagatctaggagaagaattaacagctgaactcaccacattcctcagagaaaacgtcaatacattcgcctggtccccagaagatctgctcggagtaagtgttgacatcgtatcacacgagctcaacatcgaccccgactccaaacctgttaggcagaagaggaggaaattgggttgagagcgagcaga

SEQ ID NO: 18796 - DNA, 1284 bp, Arabidopsis thaliana
ggaacatgatatcgaggttgacagggctaagatcaaggttatgacaagcgtttaggcgcctgttaacgtcaaagcagtgaggagtttccttggtcatgatggtttctacagaaaattcatcaaggatttttgcaaactcgctagaccattgatacctctactctacaaggaaatcaagtttgactttacagaagagtgtcatgatgctttccaccaaatcaaacaggcgttgatcagcgcactgatagttcaaccaccagactaggagttacccttcgaagtgatgtgtgatgcgagtgataatgttgaggaagacgattgcgaaattgttgagttggagaatcgagctacagtgtcgatcgacactgcatctatgttgatcgactctcactttgcagaaaggaatgaaaatagacattgctcgatggtgtcgactgacaccacttagggtgtcaatcaacaccttcctgatcagactaagagctagttaccgacagagaactgtgctgccactgcagttgagaaggattgcccatggtatgctgagatttatgcccgagattaggcgatacgattgggatgaaccttacctctataaacattgatctgatggagtctataggagatgtgatatatccctatttttaccgttttaactatgttttaggtataggttttagagtctaattgttatttctagagtcttttctagtccttttcagatatttacatgtttgggatgcatttagagattatgagcattctggagatcaacagacaacttaagctgcagaagcaatccggagacgaaaatgcacgtaggtgtcgagcgacaccaatacgtgatggcaattttgagacgcaacttattgatgttttgaagatttccaagttcggcccagaactttctcctatgtttagttaaggcccagtacgtttttaagacatttatatagtttttaggtcattgtttagacctaagcttggagagcctattttctatctcttttgtactttgggagcaaaaccctgtggaaactccctttggatctttcttactcttttctcttgttattttcatcattgatttcttattcagactatgatttgtgtttctttgatcatgtctgagtagtcttcttcttagggttagggtttctcattagggttataaatgatttagtagtttgcccccttgctaggttatctgtaggattcttcttcttgattgttcttaatgctagttgtagagtagctaactagaacttgagggatcagagtcga

SEQ ID NO: 18797 - DNA, 1328 bp, Arabidopsis thaliana
taaccatgttaacatataacagatcttgcgtaatagatggaaaacttacatgagatcaacaagcatcactatatggttcaacaaaaaaccggaagcctttacattacatgtattgaatagacagatagctgatcattagtacacggagaagaaccatacccaggataaaatctgagtttcactgtagaaaccaaaaccatcattagtacatacctcctcgtgatctttggttctcccttgtcgcttaaaaaatccaccactgtaccataagaaggtccattcagatcatcatttaggcaatgatatggtcttcttacatcattactccaaaatagcaaagggtcgaaaaacacttgccaagttcgacttacagctgagaatcgctcctgatagtgaacataaaggggaagaaaatctgatggctcactcggaacatcagctagacaaacggatgtgaagacaatctacaatgacaagtagacagattagataatgaaacaaagccgattaagagataagcatgtaacagaagctaaactgaagaatacaaactcgaggaactaagaaaaaaagttgaaagttttggaaattgaatgaaacagcacacttacagtttctccatctgtcaccgtgactgcagaacttgcttgtctccccatgagaccagtctcaactaaaatctacacagtagacaaaaagaaagaaaaagatgaaaaacttaagaagaagctaaaacaagttcaacacatacatctaaagcagcgagctttgcttctctactatagagcgaaaggtctcaaatcctaccaatcatctccgaattcaaatttgaccagatgaaacaaccaatgaaatcaaaagggtacagctttatgaagaaattacctctctatttccgaatggaattttgacagatacgtggttaggaacaagccagagacccatcgccgacggagcagcgtcatcggtatcatcaggcctaactagagctctgacactgaatttactggcgccacttccggagagaagagagagcgagcacaattttcctcctccgccgctgctgcgttcgccggagtgaaaacgagggaaattccgggaacggcaaagtctgctccggcgaactggccagaactgtggagtactactgtgaagtgcgttactgggactcgtcagcatcttcttcttcattgagagagagtgagaaagagagagactttatccgttccttgcagacgcgggacttctcctgtgactctgtgtgagagttccaggcgtacgtagtcttgtttccggtcaaattgaacgggtttaatttccaattgata

SEQ ID NO: 18798 - DNA, 805 bp, Arabidopsis thaliana
tatatatagaaagattttgaccttcttgcactgagctggagcagcatcagccaaaacacgacgttctaagtgttcggtagtctttggcttcttagactcaccacttggaccatcgtatggaccacaaaaggacatcgcatggccgtatcttgacgccacacacaaacttgctatgtagttttgtccaaatgttaataacaaagaaatgaatcccaaaaccataagctctgcaaaatcaataacacaaaaagttctaaaacttgtaacccacgaaaaaaaaaaaaaaaaaaatcaattggagggtttggtaccgttcttgatcttttgaagcgcttcgtacaaagctttcttccttctttcagtgaaaacctgcgaaagaacaatcaatgactggtgtaataagaaatcataaaatgtagagcaatctttgagaaattgtgttagtttttattacctctccgattttgtgaatcatgagctctagaacgatagagatcaagatgataacgccacaaacagtggagacggcccatgtcggtgtctgatcgagctctctaggaccttctccagaagtgctaccacctcctcctccagccattttttctttaacgaaattgtttttttcttatgtaccttgtcttatatgttttttttttatatacgactatcaatatttatatcttctacggccaagaaacggcggtaacatgcaaagaaggaagatgtctccgtcgttccgctagacggattccggtgatggtgattttctggttttttttttttttttttttttttttgggtttta

SEQ ID NO: 18799 - DNA, 2029 bp, Arabidopsis thaliana
tttaaagtttggggtctatggtttgacgtttagtgtttagtgataataggtttttaaatcaattaaacctaaagcactatcatgtcgttgtagtactgaaggttgtcaatccaaatggttgtgatgctaacaatcaagatgtgatcagcagtcactaagtcaagccaagcaataacaggttgtggtgtgttctagcagttctaagtgaacatgcagaaaaccgaaattcaagcagaaacagtaaaacactcgaccaacacagctctttgcagagcactaggtgaggtcgagtgacaggtcgagtaatagacagaaaataaaacacagatactcgattgcacagtctgttgccagacaactgggtggtcgagtaacaagaaagaactgtagaaattaagcgacagataacaagatgcagtaaacaacagtagaataaacaaagaattcaatcagataaagaattcccgagaggtgattgacatgctcaataaattaaccctagacaacaagttcattaaccaaatctaagtgccaccgcaacagagactctccagttaacctagtcccaaactcaatcaccattgacgagagctaacctaacaggcattacgaatcaacaagttaaagccaaaacgctccctgcaaccaataccttggtacatggtcacgaatctctagaattagtggttcagacatttcatcgaacaccttttgggcgcagaaatgtctgggctcaaattccagttgatcagaaagcaataggcattaagaacaactaatccagaagggatctatcaatcaatactcaatcacctagcatactgagaattctatactactctaacccatcctcagaaacctattcactactcagacatcataacagaaagcataaatgttgaacaggttgaagacatgataacagcagtgtaacagcaggatgataacagaatgaacaacagtaaacgaaaatcaagaacaaaagctgaatactgaatagataaagagaaatccggattacaaaaggtctagaacacaaagtctgcagaataaaactaaataaaaaacttatcgaaaatgtgaagtacatgctacttatagccaaatattcccaaaccctaatactcaaaacaacgaagtattgggacgggttaagaactgtactcgacccatgtggtcgagtgagaggttgaatgaatagctgtagtcttcttttcttccttgtgctcgagtgtctgggtgagtgcggaatgaagaaggctctgaagctcgtcatcgagtatgcagtcgagtggtggtgatggtgacactcaacatccaggtggaatgatgaggtcgagtgaatgtctcgcaatgggatgaagtcactcgaagagtggtggtcagaagatggagatgaagtcactcgacctgggggtcgagtgatgtgatcgagtggtggtcatgagatggagatgaagacactcgacctgggggtcgagtgttgtggtagagtggcggtgtcttctactcgacctgggggtcgagtggtctcttgagatcttgaagctcctactcgacctctgggtcgagtggtttgtcatgattaggtccgcttcttccagttagctcgtcgacaactccaaatcacctgaaaacaacacaaatatgcaacatgcatgcaaaattatcctaaacatgcaaagtgatgacaaatgatgtgaaatggtataaaacagtgatgatatgatgctaaaatgatgacaaatggatgctcaaaacatgcaaaatacacacttatcaactcccccaaacttagtctttgcttgccctcaagcaaacaatcaagaacaagctggaagtgaggtttgaaagcggggactcatagccgaagcaccagatagaccagatgaaatcaatgtccaagttgaaagttctaagctgcaagatcgaattctacttaaaaacgttagccatgcctcatcaatcaatcaatccgactcatatgctcgacttacacaagttttcaaatctaccaatccctttaaca

SEQ ID NO: 18800 - DNA, 1421 bp, Arabidopsis thaliana
caaaattttctatatcaatggactttactaattttgttccatgtttctatgctttgctgaattccttgttgcattaggatccgcctcttactcgtctttgttttagaccaaatatcttgatcgtctaatcttatctccaacagcttacctatgtgtctgatgaatctataatttctgtcctagcttctgagatatcaggagcgcatcagaaaactatccttgtctcaccttattatgcattggcgacgtagcagatgcatttcattttctgatgcatcaacacgccaaatggagacagctgcctgtctagtgaatgcagaccaacatgcctcatttcttgcgaataaagatggaacatctcccttgtatttggcagttgaagctggtaatgtatcacttgtgagagcgatgttgaaccgtcctggtaataaaatccaaggaaaaacctctaccttagcttcacaattggaagggagaaaatcgcttttacacgcagccctcaaggccaaaaatacaggtctgtctccaaatttagttgttcaaaagttctttgctagaagaaactaattgaaatactacttgtttgggcagatgttcttaatgttattcttaatgatgacccgagccttgtcaacgagcgagatgaagaagggcgaacttgtctttctgttggagcatccatggggtattacaaaggaatatgtaagctattagatcgatcaacaaagagtgtttatgaatgcgacaaagatggttcctttccaattcatatggctgtagagaaaggtcatttgaaagttgtgaaagagattctaaaacgttgtccagattcgaaagagctggttaacaaacaaggtcaaaacatgcttcacattgcagcaaagagtgcgaaagtgggatcttttcttttgggttatataaggagacttgatacggagaatcatctgatcgaggagcaagatgtggatgggaatgcacctttgcacctagccaccataaattggcgctgtcgaactgttgataaacttgctgcctttgcttctaccgaaacaaaaatcctgaatatacagaacaaagatggattgagacctctggatattgcagagttaaatctacagcctgactacgttttacgggaggtgtataacatttatttttccatgtattcctttttgttccaatgtcaaaccaaatagagctcattgcctttgtctctatcttacttgggataacagagattgacgttgatggtactgctgtgcgtttacgccccgaaaagtgttggttggctaccgacgagtggaatgacactaagaagcagatcagagcctctagacgctaaaaaatacaaagaccatatcaacgctcttctgctggtggaactcttgtaccactgttacatttgctgcaggttttcaata

SEQ ID NO: 18801 - DNA, 717 bp, Arabidopsis thaliana
ctgaactaccattcaaggaaaagtatcaatctctagtccctcagtactcaacacctcttcttcaagcttggcaacataacaagatcagtgagatttcagtacctgcagctccagtccaattgttttctaaaccgattgatcttaatacatatgcaggatctcaagttacagaacaactgacagatcctgaacctacctctaataatgaaggaagtgatgaagaagtgaatccagtagcagaagagattgctgcaaatcaagaacaagtaatcaattctcatgcaatgaccacaagatcaaaggcaggaattcaaaagccaaacacgaggtatgctctcatcacctctcgaatgaatactgctgaaccaaaaacccttgcatccgctatgaagcatcctggttggaatgaagcagtacatgaggagattaaccgggtccatatgttgcatacatggtcgttggttcctccaactgatgatatgaatattctaagctccaagtgggtttttaaaaccaaacttcacccggatggctcaatcgataaactgaaagctcgtctagtggctaagggcttcgatcaagaggaaggggtggactatctagaaacgttcagtcctgtggttcggacagcaacaattcgtcttgttcttgatgtctcaacatcaaaaggttggcctattaagcagcttgatgtctccaatgccttcttacacggtg

SEQ ID NO: 18802 - DNA, 1265 bp, Arabidopsis thaliana
cttgtcctgtttcatgcaccacttctgcagctggctgttgttcctgtgagtcgctcaaactcctgctttccctcgtaggaggtatatgctcactgaaatgatacatgctcgtgtcaaactccgcctcatctatatcatccgtctcaacaatatcttctgttgtagctccttcggtatgactgatctcctcagttggtggactgtcctcgaaataaagttcttcaagcgcaggcttgaagtcaatgttcctgccctcgagaatcctagtaatgtcaatgcaggggagaagaatgttggcgattttaatcgatgaatgctcgaacctgtagtggtgaaagtcgccagccatgtcaaactccaagaactcacatctgcgcaaatgatccaagtccatcatcctcggtgctaaccctggttccttgaacggtactccacaagcttgcagaattggcgtcacaacgccacccacgcatagtgctcctctcaccttcttctttccgttcgttaacgcccacttcctgtatccacacagatggatcaacagaggcattactggtggtgcgttgttgagatcgctctcaagacattctttcccttcgtccggtggagaatccctgtaagcgcataatctatcatctccatgtccgtgttagacacggtgcctgtagattccctggagtaaaagacgttggcaaccgatctctgaaagtagcggatcacaggactccggatttggttgctcttggaccgcgccgagtttagcggtagattgttccctatagtggcccacaaatccttgagctcttctctatcaaatctgggtttggttccctttccactagggaaaccaaacagttcttccaacttcttgatcgaaagctgataccgctgttcattcactgagaacgtcaagaagcctaaccccatggtatccagctcaaagtctgtgagcgcctcatacatctccacttgcagcgtggaaagaaactcgattttctcctccttataggcagggtaagggtaagacatgagtgtctccagatgacacttctcgaacagatgctgtacgtcctccggtaaccccagctgggctaaagtctcatagcacggatacctcgttccccagaagtcattcatctcaaagaacctgatatactcctccactgtaacctcgttaggtttgttcagcagcttcgtctccttgcgccatgactctggctcatactcagttgcgatatcctcacaatcagctcatatctacttga

SEQ ID NO: 18803 - DNA, 929 bp, Arabidopsis thaliana columbia
cacataattttccgccaaaaaacgtaaaacccgtaattttcctgtcagaaaaacgtaaacctgtaactttcccaccaaaaaagtaaactcgtaattttcctgccaaaaacgtaaatccgtaattttcccgccaaaaataaaaatccgtaattttcttatcctaaacgtaaatcagttaaccagtcataaagctctcaaaaacgcaccaatttttaactgctaaacgagttgttcaaaatgttttataacgcttgaatatgaaaccgtccaatcccgtaaattcatgcagtcgcaactgtaactgttgtgtttcaaccagtcagacctttagataaggttttttagtcatgggtattcggttatccattcagttttgattcgtatccatacggttatcggttctttcggttataaagtttagtatccattcaattattttaaaattttggttcggttttggttccgttccggttctttcggttttaaaatttaatatacattcagctatttttctttgaatattttcggatatttcagttatttttgatattttcatatgtttttggtattttgagtatttatactattaaataacttttaattatttagtttagaaataactaatatttttccagacatataaccccctctcagatattttcggttacctaaaatattttgatttgtatccattcggttttggttctttcggttatagaatttaatatccgttcgattatttttaaattttcagtttggttcagtttttttttgcatcggtttcggttcggtacattcggttcggtttatttgcctaggtctaagttttatatttaagaattttaggcccatgtttttatataaattttagttttgaaaatagtttggttgggttaggcctatatcaactttgaattgagtgaagttga

SEQ ID NO: 18804 - DNA, 777 bp, Arabidopsis thaliana
tgggtcatcagagaccatgaaggaagtgctaaagcttggggatcttcgactttagagcatgttaacacaccccttgaggcggaaacaaaggctctccttgtggcaatgcaacaaacctggatttgaggttataggcgcgttcattttgaaggtgactgtgaggtgcttattaacacaatcaatggcagaagatctcgtagtgatattgctaatctgctccatgatattgatttttgggcctcgaaattctcatcattagtttttactttcacaagccgacagtgtaatatccttgcacatcatttggcttctccattgtatcctcttgtgtttttcagtctgattctggtattcagccaatgtggcttcaaaaacttctttgtaatgatctacttccatgaataaaattcagtttgcagtaaaaattgacgatatacaattgcatgtaattgtaagtaaacctttctaagaaaatgatagatttatttacctgtctatgacaaataattgacccttgactgttcctctttggtgatgaagagggtaatctacagatttcacgaaatcataaggccagctttggacctcggaaaccatctacatatatatatatagtttctaaaacattttagttttacgtaaacaataatgatgatgatattaaagcgaatgaaagaatggggtcattgataggtaaaagacctgtcgtttagcatcggtccagagaagattacgagaagaagcagaattgagataaacaaagacaggaccaaacac

SEQ ID NO: 18805 - DNA, 646 bp, Arabidopsis thaliana
tctataaaaggagtcctcttgaaacttctggaattcagcatcaacaactaatatacaagcggggtgggggggggaagaggaggagaaaacatctcgtgaattatccttttgctcaaattgatgttatcaagagtgaacttttttgattaagtacatatagatgtggtaacagaataatcaataaacacataaggttgaaccagcagacctcaaaatcaaattcctcattctggtgctcagacagcgtgtgtgaatgagatggattctatgaggaaaataaagaacctaaggggtttcagattggataggtacctccaatgacttcttgcgctttgatctagaagaacatggaacaaaactgaaggagagttttctggaccgcttgaatatgatagcttttcttttctttttaagcttcattacacgatttgatagctcttccaccgtgttttgtagttcacgagcaacctagacttctcatcatgagatagctttagttatggattagtacgagttgaatacctatgccatgatttgacagggtcagacttcacccgtagtctcttcttacgatccacaatgtgctatttgtgtacaacagaatagcttcttctttgagattttcaattgatggcgaatgtgcatc

SEQ ID NO: 18806 - DNA, 1678 bp, Arabidopsis thaliana
cgagttgctcagctatctcgataactcgtacattttttaaaccaaagaaaatataacgaaactcgtacctacaggcagatcagcctcgagaaccggttcaatccgcgggacctctttgatcggatctagctatgctgctggagggacgattgcaagaactgctggagctacgggaactgctggagctatggcaagagcagctacgatgcgatctcttcttaaagtggaccagtcagtctgaccacgtcggagaagggttaacaggtcgagttccgtctccgagagagtaactttcttggtccttgctgcaaaccatcaaaaacaaacaattagtttcagtactaacgttcagcaaaaagcagtcaaggattcgacacaaacaacaaagaaaaatcaagaggctcaggtctccatctgacccaggttggtagaccaggtccttgttatcctcgcaggatcgaaattgccgattgaatgacgatctactctgaaaaagaagtacttggatcgccaattggtgtctcgacaagccttcaaaccgccgagaaccagagatctgggacgagcactaatgtagtacgtcccttggtcgctcctagcattggtcttgacctggtagagctgaagcaggtcatggcagctgaattctctgtttactttcctagcctgggtgaataacgccagcacattgcagacgaagttcggacacatctggggaaaggcgaggccgagacagtagagcatctcgagaatacacgccggaatcgggaaaaataggccacatttctcgaagaaattggcataagcgcagcaccacccgaccggcacgttctcaggatgcagcggcggccttaggagtatcatatgtacctccaccggaacctggcatctcctccggaggtcgaccaggtcgctgtttatcatcggcgtgcctcccccttgcttggcagcctttttcttcttcggcttgtcggctctggttgacgacatacgaattggatccattccgcccagggttatgacgcgtctttgtactcgcggcggtgacgcaccgacctcgtctcggacgaacttaaatcgtcgccgtaactgtggttgcttttgttctgggaatcttcgaagtcgcttatctttggttttcgacagagaaggacgagagagatgaaagaaaagagcaaagaaggcagatcgagaaagagggaatagcagaaaaacgaaggagatagcaaaaaaaataaaggcgagatttttctacgtctacaaaacaaagcgcagtaaataataaaggaggagagaagttaccttgagagttgtgtgagttgacgtgacgtcaagtggagagatgggaagttatttaaagccatcatcaccataattttcgagattccagagatctcttctccgcgtccgatctggaccgtcagatgcggtgcgctgaagagatgctccatctcagccgtccacatcagtagcgactcatctcgcgtatctcctcgaaatctttcggttggggggaatctgaaattaaatcgaaattgttgagtttatcctcaaaaccgactgatcttgtcacatttatctcctcatcaagaatattttcgcaatcttacctgacctatatgtccgcacatcgtgttcgcctactcactcaatgggctggagggcaaatgttggagct

SEQ ID NO: 18807 - DNA, 1379 bp, Arabidopsis thaliana
tcttgaagtcgggctaggacggcgtcggtcgagtgccgctacgagaccgggaagcgaggtcgagcagtttcttttgaaagagacggcggttgttgtggatgaattggtcgagtatatagaaggaatcgagtgaagtggtttggtcgggtgacggaggggatgagctggtgacggcggtgcgggggtcgagtgaagttctcaggatcgagtagctctttggaaggtgatttgtggtgtagagagattagagtgtcggcggtgaaatgaaaagaggaaggtcgagtggatttggagaggtcgagtggcgcttcaaaatgagtggtctaggttgagttttagattctctctccagcttatcctcagcgcgtggtccacacactgttgattgagaaaattttgcagaaaacctactgtaaactgtaggaaatttctgcaagtctctgtagcttctgttggtcgagtaaaatgatgatttaaaattttttgggttttaaacatcacacatacttgaccaatgtactcgagtgcaaggtctccaggtgcaacaaaagattttcaaaattttgtactccaacggggctgtacactcgatctccaggtcttctgtaaagtaaaagttttgaatttttactctatctccacgttgttctcttatctctgaaaaccacaaacacaactaaaacaaatcaaaaataacaagaaagtaaaaattatttacaaggatagtcatgggacttcctcccaagtgagcttgtttaaagtcattagcttgactcctcacacttatcaagaagaaaatgaactgtagagagggtcagcataatcctctctgataccatcatcatattcagcgtcctccctggagaggtctgcagcagaatactcaatccccctttcttcaaaataggcttccttctcttctggagggtaatctgcatcttgagaccatcttgaagtgaattcttttctcgcgatagtgttaatcccgcctttaggttgagcttccttctgcatctgattcagcttactcctaagttcctcaatagtgtgggctagcttctctatagtttcatcttgcttatcagacctctttttaagttctttcactctttcagtctcatatccttctcctgagatcgctctatcatttccagaggttcttccatcttctgttgacccttgtggagttctgctgatgttaaagtgcaacttgatgtgctttccaaggttgagacctattttcccttctctgacatctatcactgctcccactgaagctaagaatggtcttcccagtattaagggatccttatgctctacttccatatccagcaccacgaagtctgtaggcacttctactccattaatcatgactggta

SEQ ID NO: 18808 - DNA, 1113 bp, Arabidopsis thaliana
ctcagcctacccggatttgagtcaagtgattcaagccgtaatcatcgagcaccaacttcaaaatgcctgtcgtgcgttgtttccgcttctagcagcacaactctacaccctcttccgttgggcatatctgggtacagtcacacgtcttcaaattgatgagagtggaagattcaactatctattcattgcttttggtgccagtatcgatgggtttcctttcttgtgcaaagttattgttgttgaaggtacgtttctctatggtagttacaaagggacgcttctaacatccctagctcaagatggtaattttcagatttttccgttagctctcggtgtagttgacactgaaaatgatgaatcttggcgttggttttttacgcaactcaaagttgttaatcctgacgcaatggatctgatgataatctcggacagacataagtcaacagcgaaagcaattgatgaagtgtatccgttggcttctcatggaatttgcacttaccatttgtataagaacattttggtaaaattcaaaggaaaacaaatgttccctctggtgaaaaaagcggcaaggtgttttaggctgactgattttaatgacgcgttcagtgagattgatgagtgtgatcctaacctacatggatacctccaaagagcgggtgttaaaatgtgggtgggtgttcatttccccgatgataggtatagtttagtgactacgtatatagcggaatcaatgaacaaagcactgtcaaatgccagaaatctttccatagttcgactgttagaagcgatacggacaatgatgataagatggtttgctgaacggagagaggatgcgagcacgcaacaaactcagctcacatgtggtgttgaaaaacggataaatgtaactcagctgtaactgtgtacataagtcagtcgtaggatgctcataaaccagacattattagcctaactcaaccataacgtatttgtttttttattcttctctctaataggcccatgtcaccgcgtcaagacttatggatgtacaaacgattgatgctttctgcgtacaagtaacttatggaacatctttgcatgttgtaaatgtggatgcaaaaccatgcacatgcc

SEQ ID NO: 18809 - DNA, 537 bp, Arabidopsis thaliana columbia
tttataaataattttcataaaatatcacaagagtaataagttaacacaaattaaccatgctaataacttattttcaatgtaacaaaaatccatcagaaattagaacacactaaaagatatcagtacaaagacaaaacacaacaaccagacagaaacacatgaacatataaacatctcatgtttatctactaactgaatccatacatatatgtagatagtgaggaaagtatcgtaagcacaaacacaagaaactgataagagaaccactaatcactgagttgcagaaatcccaaactcgggaaggatccaaccattgtccatggcatgactagcatacagctcaaacttctctttcgcgttcggtatatcaagcgacaagtcatcgaggctgtcgttaacacgaccaaaccctttcgtcatttggttagttgtaatcaatccttcaccaaaacactcctcaagcagattcagtaaccgatcattctgcttctccattgccatcaccaaagctttcttcactacttcgtggttgaaaaa

SEQ ID NO: 18810 - DNA, 576 bp, Arabidopsis thaliana columbia
  unsure (1)..(576): unsure at all n locations
nnnnnnnnnnnnnnnnnnnnnnctaaaggttacccgattcaattttgtcgacatcaaggatttcaccaattaagccgaggagtgattgtccggtggcgtaggcaagtgaaatcgcctccacccgttgctccttgctaagaccagaacccgacagaagttccaggaagcccataatagagcttattggtgttcttatttcgtgactcatcgttgccagaaactgactttttgctacggtagcctttatcgctttatttttatctacctcgagtgcattaattagatcacgcgtttcagtaatatcttgccaaccacaaatatatactgcattgtcacttgcaggaagattgcataatgtatgccagtgattaatgcatcttttctcgatgccattatcaatttcaaatacctgtgtgtatattgttcgattttctttcgtttctgctgtgacttcatgcgcattagaaaaaacatctttaaagggtgagtcactgttttctaatggtaacattgcatttttgtagtaatcgcagtgaaataatgttcaaaagcactattatgactaatgacattacc

SEQ ID NO: 18811 - DNA, 362 bp, Arabidopsis thaliana columbia
ggtcgatagatcttctcaattggcagatccctatcccgctcccacacattccactcgaccgagcctcactctcattctattacaccgacgtaaagatatccacggactcgttccccctattcacatattcacgaccaagaagtactggattctctttaggataggtcctgacaggagaaggcaggctggcctgccgccacgctactatcatcgacttcacccgacacgatagtaccaatcttggtaaagcccatccagtgccaaagtcactgaatgggtaagtcaaaaatcactaaaacggagtatgtaatgtacttgaatctagcgggttacggggggcttttcaacagaggtttagattg

SEQ ID NO: 18812 - DNA, 277 bp, Arabidopsis thaliana columbia
gtttcggaaacttgtaataatgaactaaagaatggtgtaacgacattgctctgattattgttaacgttaagtcccatacccatgtcgagctgctgcgatgtaacatctgcttgctgcttattgtgatcactacccaacacatgaatcatctgattatgattatggtcttggcattgattctgaccgttttgtggttgagagcgatatagttgtaattgatcattgacagctttgagttcttcttcagcagaccaggtcacgtatagaagttgttgcg

SEQ ID NO: 18813 - DNA, 391 bp, Arabidopsis thaliana
atgtttagtttttttttgtgaggcacagggatttcttcctgttttttattaaaaataaaatgaaaaaattacacccgaacattccgagaaactgtagttcctcgtatgtcgtcatccacaatcaacgccacacacggcggacaagccttaaaagtatgagagtctagtggcatagaataagcatagttagctaactcatcgacaagacggttagactctctatacacgtgagaaatacggactatccagtcccttgagataaagctatggcacaaccgtaccaggaaagacgacgaatgagtatcacttatccgtgtctttagaaacccaaccaccaactccgagtccagctctaactccgaccgttccactcactatctccaagcaatat

SEQ ID NO: 18814 - DNA, 590 bp, Arabidopsis thaliana columbia
cagaagtcaagaattgccaaaacttaaattaaaatacgtaacaaaacttcctgttcgcctcattcgacattgaggtcttaccggggtttccttccccgaggtttcccagcaggcctttttcctttctggcctgctttaccagtgcccttctgcccgttcctaccgggctttcctcccccacgtttcctatcatcactcttcatcctcctatccactctcttctgtcccttaccaactttaaccccaactcctttcttagacacaaccagttctttccttggctttcttggctctgctgctttcttgtatagcttgtctatcatcttgtcctttgaacggtctgatatatctgctgtgtcagatattgtgtttgccttcttcctcactttctccaatcttttctgggcagctcgcttcttccgtgccttggcctctgccaccttcttggctggacgagcattgatctctttgaactgtgctttcattgcattaacttcatctttcgtaacaggtttcattggttgtctgtgctgcttctcgtcatccacaaaccattttggtaaacctcatctacaaacatgtgtttgtta

SEQ ID NO: 18815 - DNA, 537 bp, Arabidopsis thaliana columbia
ataacttagcacattccggttattactttcccaaattgaaaagagcaagtgatagatgataccttgactctcagagtttcaacatctgatttgagaactctgttatttgttccagcgctacgaaactgttgtgttgcgtctatgagctgcttgtacagtgttgagttatcgcctttcaaagaatcaaccttgaagaaaacacaaggtcaccattaaaacattactctctgatacaaatcatccaacaagctatttgttaaccttacctgagtctcaagatctaccaagtactcttgcttccttctcctcgacctctttgctgattccctgtttgagttcatcctgaattcacatcacagaaaaagattaagaagaattggtgattctctatctcagtgttttacatctaacttttttattggtacctaacataccttctaatacgtttcagatcattgggatcattagtcatttcagattgccctgcttctgtctcggcatcttcgtcatcagagtgtacatgagaagatcacttgt

SEQ ID NO: 18816 - DNA, 499 bp, Arabidopsis thaliana columbia
ggttcattaggcttgataagtaaaatactctggtgcgcgacgcggaggattacattggagagaaagggtttgtcatcagaggggaagaacgggaggttatgtgcccagagaaggcgctttggccccgcggcagatcgccatgaagaacatacagaacggaactgtatgagatcaaaggaagattctagacatttggagatcaggtctaagagatcctttggcagtgttgcccaatccatcatgggtgaaacgaaaagcttttttttttcttcaaatttgatcggttgactttaatagagttcaaaggtggacaaggtcaagcatgaaaaatcactttttgaagacaaatttttgaatgagaaaagcagacatccaagattctctcttgaataaaaatcttaagaagacaaaagagaaatcaataccattaatctgaagaaaccttatagggacaagaactttcacttatttgctatccaaatcaaaggactagagcaga

SEQ ID NO: 18817 - DNA, 531 bp, Arabidopsis thaliana columbia
ctcccaacttattgttcatatatgcaaaccaatctgcaatccatattttcactcggcaaccagcagaagtcaacttgttcacattcatgatcttcatcagtccctgccaaggtaatagcagagttaaacgcgccagatgaagcttctcacttaaagaagaaagaacataaaagaattccaaagcaagctatgtgaaacaagcatatgacaagtgtaacacacctgagcgatatgcatcctccctgatggttcaaaaccgtcgtagcaaaccggagcagccttcttagccagaagatccttcagctcatcatcatgtatgcattgctcaccaacacttctaactacattgtatcttttttcgacctccttacttattctgaatcaataaaagatctaatccggtaagctgacaagtgcaaatataaactggaagattcacaaataaagtatctatctttatttttctaaggtttctactgacaagtgatgcaaaagagggaaatacaaccaaatttcgatggtgaattggag

SEQ ID NO: 18818 - DNA, 624 bp, Arabidopsis thaliana
gtcgacaccacgttttttttgtctttactaaacatatacacataatgatatagatacacatctatacatcatagatagatacatagatatagagagaaagagaaatggtgtatagaaatatgggtgagactttaaattaaatttatgtaaaagagatgaatgaatatatgaaaacaggttgggtaggtgaagagaggctataagagggagagaaagaggtcgtaacccttttgccctattcacatttttatttatctttccatttagccattctgttccctgtctcttcctcctctctttttgacacatcacatcatcatcacatcatcattcaacatcaatcatcatcatatgcatacacatacatctgtgttctgcggatcgagttaattagttatggcttcttcgaatagacactggccaagcatgttcaagtccaaacctcatccccatcaatggcaacatgacatcaactctcctctcttgccttctgcttctcaccgatcttctcctttctcttcaggtccttctacttctacatattgtacaattcaaaactaaattttgttttaaagactcttatctgatgagattgtgaattttttaggatgtgaagtggagagg

SEQ ID NO: 18819 - DNA, 780 bp, Arabidopsis thaliana columbia
ctatcccccgcaccgcgatctgtaccttctccaaaactttttggaccctatgagccttctttgtggccctctcgtttacctttcccctagcttcacgggctttccaggagaccttctcttccacttcaagtgcctcacgtgcgaccgtcatttcaggcgtttcgtcggaaagatcactagccgttcgatctttgactctccctaacacagtccccagcttgtgcttacacttaccaattgcatcgcatataagttcccctggcgtcgcgtggtgttcacgctcctcttcttcgggaagagacgacgccgtttctctcttctcatttccaaacacttctccttcgtctctgctcttctgatctacttctttccccggaggtgaaatcaagactctagtgtttgtttcgccgtctctgtcgtactccaccacaacaacacggtggccgtctctcacgatgatgtcatcctcagaacccgtgcagtggcccactgtaaataacgcactcaacacaagagacaaggccaatagttttgtcattttttacatgttacttcgtgtcgctgactcgtttgatacttaactgactagttttgttaattaagctcatcaaatctttaacgaactttcagtgttttaccatgctgattaacacgtgtcgccacgtggatttatacgtgtcacccgaggaagaaaagtaaactcagcactgttcgctaggagcggtgcgcaaacttgataatgggcctagtttttcgcatgtaggcccaatatttctggat

SEQ ID NO: 18820 - DNA, 580 bp, Arabidopsis thaliana
ctgagtcactcctcaagagtgcatcttgttctattgggattcttgtggaccgtggacagttgtcgctgaaaggaacaagaaaatttaatatcgacgttggtgtgatcttcattggaggcaaagacgatcgggaggcactctcgttggtgaaaaagatgaagcaaaaccctagagtcaaaatcactgtgatccgactcatctctgaccgagaaacagagtcgactaattgggattacattcttgatcacgaggttttagaggatcttaaagatacagaggccacaaactctattgcatatacagagaggattgtgactggaggtccagaagtggccactaccgtccgatcactctctgaggattatgatcttatggtagttgggagagatcatggcatggcatcaccggacttcgatggactcatggagtgggtcgaactacccgagttaggtgtcattggagatttgctagcgtctagagaactcgactctagggtttctgttttggtagtccacaacaacaacaaacgtgaaaatgttctgtttgtttgtgtatacatatttattagaaggtgtcatat

SEQ ID NO: 18821 - DNA, 492 bp, Arabidopsis thaliana
cataaacatttccattaaaacagctaaaaactagagatagatgatcttactacatacacaaacattcaagaagcaaagcttgtgcattgagcaaaatcctagctgaaaatgtagatgctcttgctatacttttggaacataaacgaacattggagaaccgatgtttctgaaaaatgagagtcaccttggaaatggtgagggcagggctccattgttctttcaaaatgtcaaggcaaatgcttccgttgctgttgatattagggtgaaacaccttcgtcctaaatgcaacctgcaaataaaaacaaaacaaccaataaaagtgtcaagattaagccaagaaattgatttgatttgggggcaaatacaagttttaattaggtccaagaatttcaaggaactctactaaacctaaagttcgtggtaatctaagagttgttccaatattgaatacctttggtggtttgaatggatagtcaggagggaagtgaatgg

SEQ ID NO: 18822 - DNA, 2153 bp, Arabidopsis thaliana
atccataaagacttccatgaaattgtcaatcatgtctgtgagatcgacatcatacatctgtgaaatgtcgcacgagcattacaaagaccaaacggcattctgtgtaggcaaaagtaccataggacacgtgaatgtggtcttctcctgatcatctggatggattggtatttgaaagaatccagagtacccatcaagaaagcagtattacttgtgattagctaacctttccagcatttgatcaatgaatggtagaggaaaatgatccttccttgttgcagcgttcagcttcctgtagtcaatacacatcatgtgggcggtaacagttcgtgtaggaatcagctcattcttgtcattcttaaccactgtaacacctcctttcttaggaaccatatgcactggactaacccaatcactatctgaaataggatagatgataccagcttccaacaatttcatgatctccttcttaacagcatcattgagattcgggtttagtctcctctgatgctcaactaagggcttagactcatccttgaggtgaatcctatgcatacacaactctagagagatacctgtaatatcatcaagagaatagccaagagctttgcgatacttgcgcagcttgcttagcaataaagtgagctctgccttgtttaaagaagcattaacaatgacagggtaagtagagttttcaacaagaaatgcgtaccttagccctgctggaagcggttttagatcaattttaggagttttttctgggctttaatcgctaattgttgctgcttgggaagatgtgccaattaactcctcttgagcaaccatttgcatcacatgctcagtcctatccagcagcttactatacctgttgggaagtttgtcaattgagggaattagagcatgcttcaacggatcaacaggtgtcatcttcatgagaaattcgtcagccagagaagagatagtatccacatagaaagtctgcccatcgatggtaggcttcttaaccaccttattcatgtcaaactgcattgtaagatcacctacattcaatcgtattcttccctttcttacataaataatggcaccagttgtggctaagaaaggtcttcccaagattagaggatctttaggttctttctcataagataaaaccataaaatatgtaggaaagtagctagtaccgacttgtacagggacatcgcataggataccatcgggtctacagacagatcgatcagcaagaacaagagtgattttcgtaggctcaaaatcggtcaaaccaagccggagcgcaacggaacgtggcatcaagttgacactagaaccaagatcgcacaagcgtcgctcaaaactctcgttaaggataccacaattgagagcaaagctacctggatctggaagtttctttggaatcttgttctgaataatgtcgctaacctgtgtagacatcatcatcacagctttttcagtaagcaaatccttagtaaccatcctcttcacatactgtctaatcataggagaagacttcacaacatctataagtggtatctctacaatcaacttatccatcatagctttgcatctagcatcatcaagctcttgtttggacctcctaggactcttgggaaacggaaccttgggtttggtagccttttctgcaactaaaatcgggttttggagaattcgcatgtttgggctgggttggtgtcggtcgacactgtagcgttctgtagtgtatgccatggctggtgtcgatcgacacccagcagtggcggtcgacactggtgtctggtttgcaaaaactgcaacatcattttcttccaaattgacgattttggctgcaagaagctctcgttgaagcactggatttagctcttttccactccttaactcaatagcacaaacatcttctctatccatactcaactgctttatttgattgttaaatatttgaatcttccatacaaatcttcagataaagcaaccagtttgtgatcaatatcggttgtttgcttcatttgacctttgagaaactgttcgagcattgattcatcgtcttagtggtgtcgggtggagggtgggcttgggttgaagagcataatcttgaatgaagcttttagtttgctgacaaatgtctgatgtgtagatttgtgatg

SEQ ID NO: 18823 - DNA, 679 bp, Arabidopsis thaliana columbia
cgacatgaacagaatattgtaccgttctcacgaacaaatggttcgtttgtcgcttgatacatgaaaccgcgcagtccgtcgtaatactctctcgtcacctccccggtcgcttgatctctatgattatacatccaacttcgtaatgtgtaaatctcatgctctccgccccaagacattcttatttttgtaataagtttttttttaaaaaaaatatttttttttgtttgtaagtaaatgttgtgatttgagttatgatttcttacacatttcattggctatttatagatgtcccaaaaaaaaattgcgagggatttgcaaggcatttgcgagggatttgctaggattttgcttgaaatttgcgagggaatccacctaccaaccagactggtaagataattaaaaacatgttcacctaacccgccaagactcgctactctgtcgcaaaagttgcgacagaataatcgatcctcgcaaactcgtcgcaatttgcgagggattttggttactcgtaaatccctcgcaattttgcgatgagtttgcgaggattgatgctttccacgtatattactcgcaaacgtctcgcaatttgcgaggaattctgtttacccgtaactctcctcgcagattttgcgaccgagtttgctgggattggtgcggtccacgcagacttctcgcaaac

SEQ ID NO: 18824 - DNA, 800 bp, Arabidopsis thaliana
acctttttatgttcccaaatttcaaacatcgtccaacaaactctccgacacaacttatgccgtcgacaacacatatctcctcttctccgcctaccttgtctttgccatgcagttcaggtttcgctatgctttgtgctggatcagtccgagccaagaacactatgaacatcatgcttaccaatgtccttgatgctgccgctggagccatctcttactacctcttcggattcgcattcgcctttggtacaccttccaacggattcatcggtcgccaccatagcttcttcgctttaagctcttaccctgaacgccccggctccgacttcagctttttcctctaccaatgggcttttgccatagccgcggccggaatcactagcggttccatcgccgagcgaacgcaattcgttgcttaccttatctactctactttcttgaccggttttgtttacccgacagtctcgcactggttctggtcaagtgatggatgggctagcgcgtcccggtctgacaacaatctcttgtttggctcaggtgctattgatttcgcaggttcaggagttgttcacatggtaggtggaattgccggtttatgtggagcgttagttgaaggaccaagaataggtagatttgaccggtcaggccggtccgtggctttacgtggtcacagtgcatcccttgtcgtgcttggtaccttcttgttgtggtttggatggtatgggtttaacctggttcctttttaaccattcttaaaggctacgacaagtctcggccatattatggtcaatggagcgctgtag

SEQ ID NO: 18825 - DNA, 1894 bp, Arabidopsis thaliana
taatctcattctctaccaaattgctccaagaagtctctgcagctttttctgaaacatgtaaaggttgaactctatattgataatcatcaatcccttctcggctaatcattctcatcttattaagctttaatgccttcacgtctctgacggaaccttgcctaataccttgaagaagaacctttttatgtcctatatggaactgcatctctaacttcttaaaatcacaagttactagccccaaacatcctaacattcacttgagtatcagttctcaaaccttccaagtaaaaactaaccaagtaatcttcaccgaagttcactctagtgctaatcaactcaaatcgagcatgatactcctctattccttcagtctcctgcaattgtgtcaattttgcaattgaatcatcaacatgctcattatatctcacttgcaacaatagtttgtaactccaccaatcatgcctaacatgctcccacataactgaatgtgaaattgattggtgccaagcattagcgagcccatcaaaatggatagatactaaacatactttgaactcatctggtgtttgatatatctcaaagaattgctcaactagcaataaccactcttgaatcttatcaccgttaaaccgaggaaagtctaacttctcaggctgtgtagcatcagcataagtattagaaataacctgattgattctcaaaaaaatttggatctgaagagaaactagcagatgcttgtgaggatcgaaattgattatgcacatcgatgttatgagatggaccaaaccttaataacataggcatcgttgcaaatcgcttatgtatcttcaaattttgattctcaattttaacttccaatttctcaacacacgaagacagatcctcatccaccatccccgtgatctgatgctgctgcgcttgagctttagtcgccatacgtgagcttcgaggtttgtcttggctctgaatcgctggaaaagcagcaacatgtagattctccacctccgagttctctaattgttgatgttgatggccacgcagtcgaatcgcttccaacagtttagcaatcatcttgtccatctcttgattttgttcggcaatcatttgttcaaatcgtgatctagttcctgccattgattccgaggaaacgaatggctctgatacctttgctaaagaaaaattgtatctcactcaaattcaatcgaacaagttacatcaattgaatcgtcgttcataaaacgagaatccaaatctcatgtgataaagcttagaagtagaaacagctctatcaacaatgaaatatcaaaccttaagagttaacagagagaattgaagaagaagaaaaagattagacaaattaatattttctggttaattttctgcaaatgatcgataattctctatatagctccaactctctatctccacgttagctgccaacgcatcattcacgtctccaacaattatcttcctctattcttccacgtcacctactcttccattttcctgtatcatacacagactatcatgaaaagagatcaacataaggtaaggtttcctttccttacccaaaaacaatgagaacgaatcacgactccggtgaacgtagagatcgatggtgatgagtgatggctcacaacatgacaacaacaatgaacgagtgctgctgactcacaagtgatccacaacaaggaacgattgttgttgcttctctcaggttttgatatggatacaaggatgtgatggcataacgaagaagaggatataagcacctatatatatacatacgtatgcacacacactttcacgattaggtttttgatattagagaaattgggctgttattgggcctcattagagagatgggtctcacaattctccccactgaaagtga

SEQ ID NO: 18826 - DNA, 1066 bp, Arabidopsis thaliana
  unsure (1)..(1066): unsure at all n locations
taatacagtgaagagatcccttcttactctaatcttatttactgtatatatgctttcttactcaattatgttgtttgtttcattcaatatgtttgagtagtttgcttgttaggaacagggtttctcaatagggattcatatggtttagtatatcaccccctgttaggttatctgtagaattcttcatctttgattatacataatgctagatctgaagtaattaactagatcttgaatccacataatagagatgcccaccataggtatctgtagttggatctattatttgatgagcctggtttataggtatgtaataagaatcggcctgtctactaagatgaacaattgaactcgtttagaatgcatgtttaggttaatgatctctcggcttctccggttattcttagctatagacatagggaatttcgccgaacaccactggttattccataattagagtttgagtttaagaatggttcgatagcaacttagcttttattagatctactaaccaatagtttcctgggaatactatgttcctagctctttatttaatcgtttacaaccaatcaatctgctgtctttttactttgttctctttttatttcaatcattacctgctagcttaatctcgacattcaactcattgtttgaacaaaagaactttgtggaaatcgatccttaaatactgcaattgatctcttatttgagagagtagttcttagggtaatttgaaccttatcacccattcatctgcaatgctatctgtagctaccaagttctcttcagtggccatcgacagcattgcagggtcatgattcccactggacttagccaaacttgactctccattgtcagaaccctgctactttggtttgtttctttctaaccacttataacactgctcgttgaagtgcttttccttgccacaaatccaacacactcttttaccatccgcagacttagaccaagacctattcttgcctttattccctgattattgttcttacaactggtcttctgcgagcatagtgaccttcagctataagcctantattctgagaca

SEQ ID NO: 18827 - DNA, 1531 bp, Arabidopsis thaliana
aacgctaagtagcgattgttgtgaacagtttcttatataaacttctctagtttccacgaacactcatacttgaggagtttgggaaacgcgaaacaagtttctgcgaatgcttcttaagcgagtttgcaaaactaattcggtgaacagaatgactgatatcggtgaaatttgcaaaacaagtttctgcgaacgcatcttaagcgaattttttggttaatatactaatcagatctttttttttgtgaaccgaatgactgatatcaacaccaacagcaagatcgttggcaacaccacagttgttgagaccccggatgaggtagctttgcaccttgcgaaagagcttgaaaagacacagatcaccgattctggtatggataatgtgcgtcgaaatctgttcgctaatgattcaaccaacactaccataccatcctctgcttcccaagggatgatgccagacttgtttgatggtaaatctgggttcaaacgtggcaagaaaagatgcgctactatttggtcagcataaacatggaaaggtacctcacagaggatccaccaatagttccgcaaggtaccacatatgtgtatacggttggaggtatggatacctgggctcaaggtgactattgttgcaaaggtctgatcctgaaccgtttggtgaacgatctgtttgacctctacaacaaggccaagtcttccaaaacactgtggctaactttagagaacaagtataagactgatgagtctggaatgcaaagattctcaactgcaaagtttctgaatttcaagatggtggactccaaaccaatcatggaacaggtggaggctcttcaacgtatctctcaagagatagagttggaagggatgtcgatctgcaacgtcttcaagacgaattgcttgatcgagaagctaccaccgggctggttagatttcaagaattaccttaacttcaaacgtaaggcaatgacttttgatgatctcgtccgaaggttgatgattgaaggcaacaattatggggctcacgcgggtgctcagaatcaagggcatgatgttaatgtagctgagcataaggccaagctgaaaggcaagggaaaagggttctctattcctcagaagaacttgaaggtttcatcgacaacaaacttcaagaagagcaatcctgagcggaagttcaaaggaaagtgtcatcattgtggaaagattggacacaagggtgatgtttgcaagagcaaagccaaggatgtcaagagccaggcaaacctaactgaagaggatatggttgcagtggtcactgaatgtaacatggtggacgacaaccaagtggagtggtactacgacactggttgcaccacacacatctgcacagataggaccatgttctccacctatgtgaagaacaagtcaaacgaacaactcttcatgggcaacacagcgatgtctatgattgaaggtaagggcaaagtggttctgaagctaacttgggacgtgagcttactctgcaaaacgtgaagcatgtacctgacatgcggaagaa

SEQ ID NO: 18828 - DNA, 1167 bp, Arabidopsis thaliana
catcatacaggagagtgatataccagagaagctaggagaccctggttcattcactctaccatgctccttagattcattgacttttaataaatgcctttgtgacctaggagcatcagtaagtctcatgccactctcagtagctaagaggttggtttcaacaaatataaatattgcaatatctccttaatcttggatgatgggtcttttagacaacctcatgggttattagaagatttgcctatcaagattggaaatgtggaaggtgcctatagacttcatagtgctgaacatggatgaagaaccaaaagatccctttatcttaggaaggtcctttttggctacagctagagcaatcataggtgttaagcaaggaaagattgatcttaatatggggaaggattttaaaattaagtttgacatcaatgatgctatgaagaagccgacaatagaagcacagaccttcttagttggggaaaggatcggctagttgatgaactgctagtggaacttgaagaagcaaataactcaaaaactgttttaatcaagagtggtaaagctgggtatctccctaatgaaactttgaattctgaaaagtcattagactcacacaaggcagcagttggttcagaggtttacaagggcttgatgggggtctaaaccaaatgatatgagagctaatgaagtaagttcaacacatactcgaccaactgattccaccaacaactcgaagaagcctccaactttccctgagagctcatgcttgaccgaacagctcaaggcaagcactcgaacgtcagatgattggttagaactcaaggagagatctaaatggcaggacaaagccatacaagagctaacatatattgtgaaagagatgaaggatcgaatcaaggagctcaatggaaaagctaaccaagtaccactcaacatcaaggacgtcccagattatggagccactattctggtcagcaaagaaagatgtgaattcacgttggaatggtctagtggagaagactatcctgataaaaaagaagcttacttcgaggacatggccactaagttctcaattgcagacctgtcaagaaacactaatgagtacgatgataccctactcaagaaggagaggagactcatctcctctctgcaacccagcctaagccaaatgag

SEQ ID NO: 18829 - DNA, 827 bp, Arabidopsis thaliana
tatgtagtaaattggtttttgttctccccggtcttctcggattaagactccgctaaccgcatggttcgaaactgagacatatagatacagtttttcgtctacttccggtttggacaatacaggtggagaagttagatacgcctttagctgtccgaacgcttcctcacacttctcatcccaaagaaattccttgttaccctttaagatttgatagaagggtaaagatttatcggtcgatctcgaaataaaacgattcaatgctgcaattcgaccggtgaatcgttgtacttccttgaaattcttcggagatggcatgttgagaaaagcgctgatttgatttgggtttgcctcaattcctctttcgtgacaatgtagccgagaaattccccggatgggactccaaacgtgcacttcgccggattcaacttcatctgatattggttaagaatcgcgaaacattcttccagatgttttacgttgtcttccttttttaatgatatgactagcatatcatcgatgtagacttccattgtttttccgagatattcgttgaacatcttgttgaccagccgttgataagttgctcctgcgtttttcaaccccaatggcataactttgtaacaatagatgcccctattcttgataaatgacgttttctcttgatcttccggattcatcatgatttggttatatcccgagaagacatccataaaggacaacaactcatttccggcggttgattccacaagacgatctatgtgtgaaagtgggaaactatcttttggacaagctttgttgagatctgtaaagttaatgcacactctatc

SEQ ID NO: 18830 - DNA, 909 bp, Arabidopsis thaliana
aggatagcgaaacattcttctaaatgcttgacattatcttcctttttcaatgatttgactagcatatcatcaatatagacttccattgtctttccgaggtgctcgttgaacattttgttaactgataagtcgctctcgcgttctttaacccgaaaggcattaccttataacaataaatccctttgtccgtgatgaatgacgttttctcttgatcttctggattcatcatgatctggttgtaccccgaaaaggcatccatgaaagttagcaattcgtttccggcagttgattccacaagacgaaatatatgcggaagtgggaaactgtcttttggacaagctttgttaagatctgtaaaatcgatgcacactctatcctttccattcttctttttgaccacaacggtatttgccacccaatccggatactgcacttctctgatagatcctatttttaagagtttttccacttcgtcgtttactgcttttgctcgttccacattcaactcgtgacaaattatacttcggtctatgccgggcatatctgttgctgaccaagcaaatgatttcttgttccttcttaacagctcgattaaagcttcctttatttcgccagataaagtagctccaatccgaaatttctgatccggtttgtcttcttctagaattacttcgaccacgatatcgtccaccttccgcccactaggaaacctcgggactactcctttctttgcgcgcttcgataattgctattggattttcaatcagtggctagctaaataacaaattctcgaagcttcttggtctcccagaattgttccactccgtttggagttgggatttgaggcagtgatgatacgtagaggggaccgctttcatctggtagatcacggagtccaaggatgatgtt

SEQ ID NO: 18831 - DNA, 1730 bp, Arabidopsis thaliana
ctttacccatctccttgaatcactccggaaaattggccttcatcttattctcggttttccaagtgtattcttcacggcctccacaattccacaagacttttaacaaatcccttgattttccccgagtccctttcgtcatccggtccatgatccgtaccggccatgcttccaccgtcatgttctcctttaacccgggaggtatatcttccacgctttcttcttgatcacttaaacacttccgtaattgtgacacatggaagacgttgtgaaacgcatttagttttggaggaaggtcaagtttgtatgccaccgcccctactcgttcgatcgccttgtacgggccaacataccttgggcttaactttttccttgaggtgaatcgccctgcccctttgtaggtcatcgcctttaagtacaccaaatctcctacttggaattccaattcctttcgatgtttgttggcgtacttttctgtcgatcttgggcttcctttaacttgatttttaagaacttcattctctccgtggtttcatccacgatcgtaggtccaaacaaccgacgttcgcccacaggcgtctaacacaacggtgttctacaagctcgaccatacaacgccacatagggagacataccaatactagcttgaaaactattattgtatgcaaactctactaaccttagaaatttctccagtttcctccccaatccaagacgcatgcctcaacatgtcctcaagggtttgaatcgttcgtttggactgtccgtccgtctgtgggtggtaggcagtacttaggttcactcgagttcctaaggccttttggaaagcattccaaaactttgacgtgaaccttgtgtctcggtctgacactatactaaccggaatcccatgtaaccgcatgatctcgtctatatacttctcggcaatgatttctgctccatccttatccgagatcgccatgaagtgcgcagacttagtcaatcggtctaccacaacccataccgcattgtgtttggatttgatccccgttggcagtcgagtgacgaagtccatcgttatgtggtcccacttccattccgatataggtaggttttgtaacaacccacttggtacttgatcgtccgccttgaccagttgacaagtcgggcacttggccacccatctggccacgtctttcttcattcctacccaatggtagtaccttctaaggtcgcggtacatcttgttcgacccaggatagattgagaacttcgattgatgcgtctctcttaggatctcctcctttaatgccctatcgttcggcacacatactcgaccgttcaccacgattgtaccattgttcgaggtttggtactcggtcttgttgtttagtgcccatccttttatctcctcgtcccgttcctgagccagccggatcctactaagcaggtcggcctgatcggcggctcccaaccctaagggttcaatttctttagacaaggcattcacatgcaatgtccccatcatgttaaccaagtccacttggctccgttccgcctcaacttctgagcgcctcctactcagggcgtcaggaccttggttggccttgcccggatggtacgctatgtccaagtcataatccgccacaagttccatccaccttctttgccttagatcaactccggctaggtgaatatgtactttaggcttttgtggtcagtatagatttgaactttagcaccatacaagtatg

SEQ ID NO: 18832 - DNA, 1198 bp, Arabidopsis thaliana
tgcactgcgcatccaggccatccagttccgcttgcaaccgaggtctctccacggtcaaatcgatagcagccttcgtgatctggtcgatcaaagccaggttcgactccacctcgaccgcttgaccttccagcactgtgtactccttcttggcgacccacttttccttgatcccagccagcaacctcgaatatgcggtggccagtctaaccttagcatcgtgaaccgtcttcttcgctccttacgcagtcgaactcaggtccagcactgtgtactccttttctcgtcgtctgcttgttagcctgcaatccccaaatttccatctccatgagcccgatgttctcagcacaacctttctcgagatctttcaaagtggacagctccattttcaacctctcgatctccgcctgaaaccatagtcagttcagaatcaccgtatcatcgataaaatatatacaaaaaagtcataacagaggcatacctggaacgaaacctcacgctcttgaccagccttcacactcgttgtcagctcctggatgagggtcttcccttcttcgagctcgctcgccgagggaaccttgctcacacgttgctcatagagagcaacctgcttgttcgtggcagctatcgcctgccaaaagcaaaacagagattagaactggcataagaatggaatttgaaggaggcagttatcaattgttacctggccttccttcgccatcatgtcagcataagtcgcagcctcggccatgttcttcactccgggaatctggcagttcttccctttgatgtggcgaagcaggttcgccaacccagcctcgtcctcaacgatcggatgatcacagtcgtgagtgtaagaccagtggaaaggcctgcttcccgcagaccccccaccaaaattggacgactgtctcccttcttgagaccggttcggaccttggaaggacgaccagcccccacctcttgatactcggcatccggcttgggacctacccgaggaccgcatgtctgtggacatagctgcctccgggttagcagccgcatgttccaccctctcctctctaggaggggcgacctctgctaaaagtggccagtcggtctgaccacgtcggagaagggttaacagctcgagtttcttgctgtaaaccatcaaaagaaaaataacgttcgtatcgatactaacgctcaacaaaagcagtca

SEQ ID NO: 18833 - DNA, 1682 bp, Arabidopsis thaliana
tctctaaaactctactcgatcgaataaaaagaaatatgtaacatggcatataatcatataaatgtatatttatgttgagtttgtcaaaatatattgatcaaattaatatttgttttgaaaatcattaaaaactcctacagagttatcataagtaatacgatgacaataatgtatgataaaatatcactagataatgatatttataagtctatatgaaaaccatataattttgatcattaagattatggttattaattccaacgagatattgtatttgattgaaaatcatctcctgaagaagatgtttccgagggggagattgaatgatatacgtggatgtaccctttttccttatcatagtttttatcccacatgatttttctatgacaaggtttttaacgagacattaaagaacacgcaaataatacacttgatgaatattaagaaattctatcaatcatccaaatgaatattatacactaatgatatttagagaaataaataagatggtcaagatgaatcatctaaaagattcatgagcagaagaatggcgttgtactttatccagaaatttgtttaagagaagatttggcagacttattctcaaatactgtttattctctgccacatcttctaatcatgcagagattttaccaattcatgaagctagccgcaagtgtgtatggctaagatccatagttcaccatatacaagaagactgtggtatatatgcagggaaaaagactccaacaattatgtacgaagacaatgcagcatgcatcgcacaactcaaagacggatacatcaaaggcgatagaacaaagcacatcctaccaaaattcttctacacacacgatctacaaaagagcggcgatgtacgagttctacagatccgttcgaatgataatctggctgacttattcaccaaggcgctacctactgctactttcaagaagttagtctatcgtatcggattacgccgtctcaaagatctcgacgaatatactcataagggggagtaattgtatgttgcactctttttcccttaaccatggtttttcccattgggttttcctggtaaggtttttaatgaggcagcatttcaaatactttacgagttatgatactataatggtcatcagggggagtgttatgaataaagatggatgcccattataaggcccatcatctaagtccatcatctagatgtttctagggttttaccctttccttgtactcctatataaagaaccttttatctcaatggaataacacactcatttcttctatctctttctttgattataacaattttgtaattttgttgattttgttttactcttaacattaaataaatttgtataaatttaaacaataaaatgaatggatgttaataaatagttaagaaccatcaatctttctatattaattgaaagactgtttttactatgataatttttacaacataagtgtgaaagcacattattacatgaaatcttgggggatgtaggtgtatgaatctaaaaataacaacaatatccaaagttattgaataaaagttcatactaaatgtcattttagtacttaatttatttatttacaaagaaaacttcacactttttgtgaaacacaaatatgaagttgtttaatgagatttattatgaaatgatgaatattttaga

SEQ ID NO: 18834 - DNA, 958 bp, Arabidopsis thaliana
tttgaattatatcaaacttggcgccgttgccggaattcttgggaatcatcattgagttttgtttagagatttcgtctagtttttacttctattttgttactcatgcgtttcttgttttcttcttttctgtgtttcaggtgtatgcctaggcaaacaaggagcacaaaacagaacgagcttatcaacttgtttgttttggacttgggaaaacttgaacgcaccaaccgaaaaactcagaaattagcaatggctgacagagtcatcagagatgatgctgaaggagttttgagagatgaggatgggcaagcctacaatgaggctggtcagagattggatgatcatggactcatcctacctgaggacgccaatgaggatcaagcgcgcctcaatgcgcaattagctgttagagatgcagtagggctcggtgttgagcgacaccaactgggtgttgatcgacaccatcgggagtagaacgcggatgcaattggtgttgaacaacacaacagaggtgtcgttcgacaccaacaccagattcctgcagctattcctccatctgcagaaccacgtcgtactcttggggatttcaacaggctagacctgttctatgctaatcgatcagcgattgtacccccacaattccagagaaacgactatgagctaaagcctagctactttgctttagttggtcagcattctttccatggcttatctcatgagcagccaatggatcatattaagcgatttgaggaccttgttctgagcatcaaggctaatagtctcagaggactacctactgtgcaagctcttcccttattcacttggagaagcatcaagatagccttcttgaacaatttttacgatgatgctaagtctgaggagttgagaaacaagttgtctaccttcacacatggtccagttgaagctttcaaggctgcttgggttcgtttcaaggagtacc

SEQ ID NO: 18835 - DNA, 835 bp, Arabidopsis thaliana columbia
gttgttaaggatcggacaacacagattttactctgttttgtcttactctttatttctctgtttttgtaaaacgaaaaccacacatttttattagatatataaactgtatttaaaggtttacatgatacattttgactaagggacacgtctctagaaagacaacccaatgtagagacacatacacacatgtaactgttttgcaactaacgattctattcgtatctctttgatgtgtgatacgaatatacataaatcagttacttaactatataatatatgactcttataatataagacgatgacttgatcacttccaacactcctccttgatcatggcttcatcgttacgtctagttgttctcgtagaacttcgaaccttgatgtgattaagagctccgcctcggtcgttcattgagcaacgttcttctgcttgctagtattccaacaaaatgcaccttatccagaagtaaagacatagccacttgtacttttcttgtcctcaactgatcagctccaattgcttggtctctccaacacttgccacgtcttgttcttttctatcatcatcaactcttctctcatgtcttctatccacttcacgtctccattgctccctccaaattctgagtttttttggacgttataagacacatctcatgtatatgagccatctcttcaacttcatttgtttgacttcttgtgtccgactttctccatctcaatgggaaactcttatgtttccttttaatatccagtatccttcttccttgaggattgttgatgagacatcttttatcttcaaataagactctgtatccattggatatcatttgag

SEQ ID NO: 18836 - DNA, 1733 bp, Arabidopsis thaliana
gtgcagtttgagctacctgtacatctagcttcttcaagtgagagctcagattgtcgatcttcccattaagatttgtgtagacaccatcaaacttgccattaaactccacaacaagctttgtttggctttctagaatctgctcaagcatcgattccattcttgtctctgctgagggtggagggggggcttggtaagttgaattaccatagttcctctgaaagctgctctgaggaaaagtcttctggaaagcaggctttggagtgtagttggaggaaccctagttccttgtaaacctgttgccactgaagttgccatgtggctgcccaaacttcctgtatctcgaccaactatgtagaagactccttcctctgactcaggctcaggctcaatagtctcttcctcagctgcaaagtggacatgcttcttccctgtgagcaagttatgaactgaatccatcttagcattcacctctgccatctgatttcctgaaatagctccagcaatcttcttcctctcgaaatcagcattcttggtactgttgatgcaagcaaggttctctatcagggttgtagcatcagctgggacatgtgtattgaaattaccattgctcgctgcatctagagccatctagtatctccaatcaactcctctgaagaaggtacctagaagttgtacctcactgaaaccatgatgtggacaatctcgttggtactccttgaaacgaacccaagcagctttgaaagcttcagctggaccttgtgtgaaggtagacagcttgtttctcaattcctcagacttagcatcatcgtagaaattgttcaagaaggctatcttgatgcttctccaagtcttgagggaacctgctttaagttgtttcagccaagaatctgcttccccagcaagtgaataagggaagagcttgcacagtaggtagtcctcagagactccattagccttgatgctcaaaacaagatcctcgaatcgctcgatatgatccattggctgctcatgagataagccatggaaaggatgttggccaactaaagcaaagtagccaggctttagctcatagtcgttcctctggaatggtgggggtacaatcgctgatcgattagcatagaacaggtctggcctgttgaaatccccaagagtacgacgtggttccgtagctggaggaatagctgcaggaatctggtgttggtgtcgattgacacctctattgtgtcgttcgacaccaatcgcgtcgtcgtgctgctcccgatggtgtcgatcgacacctctgttatgtcgatcgacagcgagccctactgcgtctctggcagctatttgcgcattgaggcgcgcttgatcctcattggcgtcctcaggtaggatgagtccatgatcatccaatctctgaccagcctcattgtaggcttgcccatcctcaactctcaaaactccttctacatcagctctgatgactctgtcagtcattgctaatttctgagtttttcgtttggtgcgttcaagttttcccaagtctagaacagacaagttgataagctccttctgttttgtgctccttgtttgcataggcatacacctgaaacacagaaaagaagaaaacaagaaacgcgtgagtaacaaaatagaagtaaaaactagacgaaatctctaaacaaaattcaatgttgattcccaagaaccccggcaacggcgccaaatttgataaggttcaaattacctagaac

SEQ ID NO: 18837 - DNA, 510 bp, Arabidopsis thaliana
cctttcttatgatatgcaaagaagcactcaatgctccacacaactaagtaatctcggcttctttcatcgacccacaacaccgcattctctattacaactttggtgcttagaccagaagaataacttctatagccttcacgataagtgaatgtcttcaagaaatcagactcaccaaccctctcaaacttcatctgccatccatcgattgcttccaaagtcggaagacaaatcctctctcgagtaaacagattcaaaagataaaaatcggttctatgatctaacatcaacaaccagctaccagaagtagccaaacaacaactcctatggaaatcaaaccctaggtctcgtattacgtaggttttgtcatgaagaggatcaaacaacctacacgaaatatgtctatagtttgaaaagagaatgagccatggagttgggttttgtctgtagcataattccgcagtggaataccaatctaaagaaattgacatagctcgatgaaactccgcaaag

SEQ ID NO: 18838 - DNA, 481 bp, Arabidopsis thaliana columbia
tgcatcaagttcaaataacatcttttcagcttttctgtggttaaccaaggagatatcaaagtcttagggtcttgatcagtgttcttctcatgcctcagacatgaaattatgtggctacacggaatcccacttatcaaatacatcctacaagtacaagagaccacagcccgcaactgtacaataaagccatccattcgcatattggttttgtagttgaagtaggcaacctcatagtttcccaagccgcaacttaaaggacgacaattctttgctaaatctatttgctggttcagcaaagctctagatcttgaagtctaatctccttttgctttccctgcttcagcccctttcttctcattagagaccatcactctttttcttatctcttctagcatctccagtattggtttggttgcattgaatgactctcctagattgttttcacaacactacattttgagaactcggtgaagaacccctg

SEQ ID NO: 18839 - DNA, 956 bp, Arabidopsis thaliana
  unsure (1)..(956): unsure at all n locations
aaacaaatgtagaaatattaataaaccttatctagaccacgtgctccaatttttgtttattctctctcctaaaggcttttatcaggtgtggtcgaaactagacgacaaacccatgcacctaggcctggacctgacttgttacgccaagtcacattcaatgcacgcgagagagaactacgttacgtgttacttccacgtcgacacataacaatttgtatataaaacattatcctctacttcaaatcttcacgtccatttgatctgtcttctcaagtttttaacctttggatcttactcttggatcatatcgaacggctgtaaattaaagtcttatctatattcctgtcgcactcgataatttctctgaaccttgtgtgttttcttgacgatgttcattttccgcgtagaattctttcttcatcgtaaaatctggatttttcttggctttaatttgtttgtttttgttatcagatttttttattttaataatttcaaatgagaaatgtaaataatgaattattattctctagaacgtatatggaaaaaatcaagttaaaaatgacacgtggtctttttggtctagtttttatcgtgttcgcacaaatagacggcctccgacggcattatcgaaaccgatggcacgacacatgacggtgtctacaccggaagttgacggcgttaagttggtggtgcgtttgtaaggaccaagccaccgcgtctgcatataacgattcttcctccacggcggaacgtcacgccgcggttcctaagagaaatcctcgcggcgtcacacacgagacgcaagatccgcttcagatcatccccctttccgacgaaaaccgccggaagcgattgaagcacacgcgcgtactgtgaagttggcctcgcgatttgaaccgcgacgagaaatctanatcgacgatgaacgtacgtactgagacgaggcggaaggtgta

SEQ ID NO: 18840 - DNA, 483 bp, Arabidopsis thaliana columbia
actattgtttttggctaatcatatttttttttttccaactatgcaaaattttccaatgttataaatttttgtgatcttcaatcacggcaacaccaatttttttttatgaacatgaatatataaacaatgaaaagtaaaataaaaaggaaacgtacccgtcaagtaaatgaagcatagcttcaagattatgagcagtagaaacatcaacggaaggtttaagaaacggcgagttctgatgatccaacgccagctcctcccccacgtggctataacaccacggcaacccctccgctatcttcatcagcgcgtgaggtctactctcgttcaaaaacaatcccggcgacttgggaaccacgtcgtgaacattcactactctcatcactttcactcccaattcctccatcctctccctaaacctaacgttcccaactctcggtcctccgtatgtcaacaccgtcaccggaatcactttccctttcttac

SEQ ID NO: 18841 - DNA, 244 bp, Arabidopsis thaliana columbia
ggacctttcgattaaggaagagactgagtcctattgggttatgaggaatgatgttcgtagagagaagaagcttcctggttttatcgataaggaggtttataaaattgttgacggtggtgtgattcctccggcgataccggttctttcgcttggattggctccggcgtcagacaagggattgttgtctgcttttgttcggcgagtatgtcctgtgaagttggattctactccggtggctaaatcg

SEQ ID NO: 18842 - DNA, 582 bp, Arabidopsis thaliana
ggttcttgttataatgttaggactcgtcaccctgtaagcgaaagatcagttgaaatatacaagggtttggctgatggcatttagccatgataatcgtgtaaggttggtagttacagaaaatcttgaaaacagttcatagttgaatgattttttctactatctcattttcttatgattttgtttaggttcaaagatgaaggcaaaccattatcctctgaatatggttatggaagaaaagctagaccttctttagatagagttttcaagaatgtaaaatggggattcaagaagccattgagtttcccttcacataaggatcctgaccacaaggaaacatctagtgttactcggaagaacatcataaacccgcaggattcgtttctccagaactggaacaaaatatttttatttgcttgtgtggttgctttggcgattgatccattgtttttctacattcccattgtcgatagcgcaaggcactgtcttactttggactcaaagttggagatagctgcgagtttgcttcgtacgctcatcgatgccttttacattattcacatgtgtgtttcagttcaggacagc

SEQ ID NO: 18843 - DNA, 682 bp, Arabidopsis thaliana
attgacgactcgtactccaataaattatttaatgtgatagcttcatactaggggtacaagaatcgtaatttaaacggtatagtatattataatctgacgtggaataaattaatggcagatgatcatgtgggatacgaaaggtgtctcaaatttggccggagagatagctctggcggccggacttgtgatgtgggccaccacatatccgaagataaggagaagattcttcgaagtcttcttctacactcactatctctacatcgtcttcatgctcttctttgtcctccacgtcggcataagtttctccttcatcgctctccctggtttctacatcttcttagtcgatcgtttccttcggtttcttcagtcacgtgaaaatgttcgcttgctcgctgctcggattcttccttccgacactatggagctcactttctccaaaaactctagtgagtaccttttgtccaattggctaattgtatatgaaaagttcacccttactggatattgatctaattctaaactagtctttttgttttatagagttggtttatagcccgacgagcataatgtttgtgaacataccgagcatttcaaagctgcaatggcatccgtttacgataacttccagtagcaaactcgaaccagagaagctaagtattgttatcaagaaagaaaggcaaat

SEQ ID NO: 18844 - DNA, 420 bp, Arabidopsis thaliana
gtaacttcatcaggcctgttcaacagcttcgtctctctgtgccatgactcgggctcatacttgacgtcaatatcttcgtcgatcaactcatatctgatggtcattgctctctttcctctagcaatctcagctctcctctcattgcgtcgatctactgagcgttgggtctcagctctgaagctctcataagcttggcgctctctctcttgtacagttgaccaagattcagcctcatcgacgttgtaatccccatccatggaggattcgccgctgtagttactcacattgatttcccgaaaaagactgtaactcttagccaaatatccatatgttagtccgaataatacgctaacacctgaccggtcaagtacgcggtcgagtaaaacggtcgagtacagtgagattgtggcttcgagtata

SEQ ID NO: 18845 - DNA, 358 bp, Arabidopsis thaliana columbia
cgatcaaggttctcagctaaatctggttggcttttactagctagagccctgacaacgatcttcatcacaaatagcattacacttatgagccatgcatataatccttttgctctgaccttcatttagctttacagtaaaatgcccagtccaacctaaaacaacaaaaccatattaactaaacaacttcatttcaggatatcattaagaaaaggatgagactcacagttattgcaacagctgtggccacagtccatccttgtcagctgataacccggtacatcctctacgcagatatcacaactcatcatcgaagaagaaccagaagcggaagaatcagaactttggttttcaggaagtg

SEQ ID NO: 18846 - DNA, 521 bp, Arabidopsis thaliana
acgaagaagctcgaatcacataagtggattaatctgaccttaatatatagtcacaagctttatggatccaatgaacttaacctgcacttaataagagtcataaaagtgaagggtgccatttattgatgcatcttattgttccgtttctttcattgtttgtatgcaccattgcccttccaagctttaatattttcccatggagtatcatatgcttcaaataatttgcgtttgagtctagcaattactaccacctaatttgatttgattttagtgatatctctctaacctaagattcttcttaataccttatgctgcttaacatattaggtgcaagaacacaaccatcctcatatacttctgctacaaattggtaacacattctgcaaacttccaggtggacgcctgaagcctggtgaaaatggtatacagttaccaccctgttagtaatactttctacactgttatgagtttcttggctgcttaagttttgggtgtactatgttgtgtctgcagaagctgat

SEQ ID NO: 18847 - DNA, 804 bp, Arabidopsis thaliana columbia
  unsure (1)..(804): unsure at all n locations
ctagatttttcattagtcggattgatttgaatctgcggtacttaagcaatccaggcaataaactcgagagatagatcataatttcagacaaaagttttgactcataaaatgactatctaagttaaaatgacacaactgactcataaaaaaagaaaagatgaagttactaactgactcccccagacttagataacactgtcctcagagttattaagctagacgaatcgaaagagaaataatcaaaagttaaaagatagaaaacgtgagttgccacctgagagtggtgttgatcgacagtctggtcgtttcgctctgctttgtgaattcttctcattgttgtagagccttggttagtgttttcacatggatcctccagttagactgttaaatcaataaaacacacatcaatagttccaacaaagcataagaaaataagtgcaacaagtttcaaaacaaataaccaatagtctgaaataaagcagaaaaaaagtcagaaaacagaacaagagaaggaggatggctagtccttatgctccgagccggaggtaggtgcgggagagcgacgacgaggacgactgggagcaacacaaccgcaacgagaaagtatagctatggcgttccagacgctcttgaaactgtcgacaacgtactgctgaaagacctgtggctccatcgggataggtggaggagaaggcagctgatatggcttcactatatatcagaactttgatagaagcgccaagagagacaaagacatacttaaagcgctgcttatnctgtagttattgctcaaaacaaggtgat

SEQ ID NO: 18848 - DNA, 1431 bp, Arabidopsis thaliana
ggagagtgataatagtatggtggcggtggggacttcaccggtgggggaggagagtgataatagtacggtggcggtggggatttcaccggtgggggaggagagtgataatagtacggtgtaggagtgtgtgttggaggtggtggtgacttgtaaacataagtcggagtaggaggaggcggggacttgtagacatatgtcggagttggtggcggaggagacttgtatacataagtaggagtaggtggtgggggagacttgtagacataggtcggagtaggaggaggcggggacttgtagacatattttggagttggcggtggtggagacttgtaaacataagtcggggtaggaggaggcggggacttgtagacgtattttggagttggcggtggtggagacttgtaaacataagtcggggtaggaggaggcggagacttgtagacataggttggagtaggaggaggcggagacttgtagacgtatgttggagttggcggtggtggggacttgtaaacatatgttggagttggcggtggcggagacttgtagacataagtcggggttggtggtggaggagacttgtatacgtatgtgggagtgggaggaggaggtgacttgtagacataagttggggttggaggaggaggcgacttgtagacataagtcggagttggcggtggtggagatttgtagacataggttggaaccggtggtggtggtgacttgtagacataagttggggtcggtggtggaggagacttgtagacgtatgtgggagttggaggaggaggtgacttgtagacatatgttggggttggaggaggaggcgacttgtagacgtaagttggagttggcggtggtggagatttgtagacataggttggagccggtggtggtggtgacttgtagtagtaaaccggagacggtggtggtggagacttgtagtagtaaggaggatggtaaggagccggtttgtggcattctccgtaaggcttctttggtgcataagcaaaggacttagcatatagcacaacctcgtactttgtcttagatttcacgtgaagtttagcacccttattaccccaatgctaatctgtcggaatgttacatggcgagcccttaggcggcgcggtgaagcttggccgtgcaaacttcaccaccgtatttaagatagttgtatcccttaacggtgattgcgtatttaccgttgttcttggtctttccatatgccttaaccgtcttgtcaccggccttacaagtcacttccacaacagcacctaaatgacaaaaacggagtgatataagtgtgggaaattattcatgtccttatagttggtatctacaaaatcgattttgcttgttcgatctcttttttttttttttccacaacttgttcgatctctttggattgtttaagtcaataacagattc

SEQ ID NO: 18849 - DNA, 518 bp, Arabidopsis thaliana
cacgttattattattattttttttttggacaaaatttaaattcaaataaccactaaaccgggtccagtacaatcgttttaagagaacacttagcaatctcatcagcttcgccattgtgtttccgagagatgaaagaaaaactagattgcagaaaagtagaagataaactcaggatatcgtgtagaatcccgtggagttccaatggaggatcccccaaattgattgcgttgatcaactgcttggaatcggacgctattacaatgttttggatacccaaagtcgatgcatggcagagagcttcgtggatggcgagacttccgctaaaagaggtgatcgaacattccttcttgaattagatccaatcctacttgtttcagtgatggtgggattgaaaatccatcctaaaccaaccaatttatgttctttgttccaggcagcgtcggtttggcagatactagtgttgtttgagattgaaatgatttccctagggtttgctgcagaggtcggatatgggttgt

SEQ ID NO: 18850 - DNA, 923 bp, Arabidopsis thaliana
atctatagacacttgggatgattgcaagaaggctttcctagccaagttcttctctaactcaagaaaggctagattaaggagtgagatttcaggattcaatcagaagaattcagaatcattctctgaagcatgggagcgcttcaagggctacaccacccaatgcccgcaccacggtttcaagaaagcctccctcctcagtactctatactgaggtgcttgcccaagattcggatgctcttggatacagcttccaatggtaacatcctcaacaaggatgtagctgaaggttgggaacttgttgaaaacctagcacaatctcatcggaattacaatgaggactatgatcgcactaacagaggcactagcgattctgaggacaggcacaagaagaagatcaaagctctcaatgataagattgacaaattggtgcttgctcaacaaagaaatgtccactacattacagaagaagagcttacacaactccaagaaggggagaatcttactcttgaggaggtgagctacctacagaatcaaggtggctacaacaagggattcaacaactacaaaccccctcatcctaatctctcttacagaagcaacaatgtggcaaacccacaagatcaagtctaccccccacagaaccaaccacctcaagctaagccctttgtaccctataaccaaggctacaatcaaaagcagaactttggacctccaggcttcacccagcaactacagcaaacttcagcacaagactcagagatgaagaatctacttcatcagcttgtgcaaggacatgcctcatgctccatgaccatggataagaagctagctgaactcaccaccaggattgattgctcttataacgacctgaatataaagatagatgctcttaacactagagtcaagaccatggagggatacat

SEQ ID NO: 18851 - DNA, 883 bp, Arabidopsis thaliana columbia
tatttgaatatttgaattctgaaaattgattatttgatttaatatgattattctaaatatgattctaatgatgaaatatgttattctgctaagacaggtatcagcatgcgactctgatttagctagctatattgagcaatctatggcggccggcatagcaacagatgtattgtgtatcatgttagtctgttagtggtattgaggtcggttaatacagtggaccgtacttctttatcatctcgttagggccagcatccctatcgagtatattatgtaaatattctgttagtatatgtgatatatccttatttttactgtttttagctatgatttgggtagtagttttagagtctttttgttatttctagagtctttttgttatttttagagtcttttttagtctttttcaggtctttacatgtttgagattcatttagagataatggagcattctggaggaaaacatagaatttatgctgttgaagaaatccggagactaaaaaccgcgtaggtgtcgaacgacagcaatacgtgacggtaattcgacgacgcaacttattgaagttttgaagatttccaaattcggctcagaactttctcttatttctatatatatatatatatatagattttaaggtcattgtttagacctaagcttggagacgctattctccttatctcttttgttcttgggagcaaaaccatgtggagactccctttagagaagatctttctgactctattcttctcttgtttcttacattgatttcttattcaatcgtgttttgttcttctatgatcatgtttgagtagttttcttgttagggttagggtttctcattaggaatttagatgatttagtagattgccctcttgctaggtt

SEQ ID NO: 18852 - DNA, 682 bp, Arabidopsis thaliana
ctgtagttggaacggagtcaaatgccatccgaggacgaatcgagtcactgagttaaatctagatggcttctctctgtctggtcgaattggtcgtggcctacttcagcttcagtttcttcataagctctctctgtccaacaacaatctcacgggaatcattaaccctaatatgctgctgagccttgttaaccttaaggttgttgacttgagtagcaatggcttgtctggttcgcttcctgatgagtttttcaggcaatgtgggtcattaagagttttatctctggcgaagaacaaactaacggggaagattccggttagtataagctcgtgctcgtctcttgctgctttaaacttgtcttccaatggtttttctggttctatgcctttggggatttggtctttgaacactctaagatcacttgatttgtcgaggaatgagttagagggagagtttcagagaagatagatagattgaacaacttgcgtgcgcttgatttgagtagaaaccggttatctggtcctattcctagcgaaattgggagctgtatgctgctgaagactattgatcttagtgaaaactctctatcaggaagcttaccaaatacatttcagcagctcagtttgtgttatctctgaacttgggaaagaatgcgttagaaggtgaagtccaaagtgggataga

SEQ ID NO: 18853 - DNA, 656 bp, Arabidopsis thaliana
ctcctggaacaaagtcaatttggtgctcaatgcctctaatgggtggtaagcctactggattctcctctggaaacacatcagtataatcctgcaatagaaacttaattttgctaggaatagcctgctcaggattagttagactcataagagtctctttaaagacaaacaataacttagatgattgaaaaccacttcccttttgcttactctcgttgatcatgaggttagatggtttaacagtttgtttctttctcatcttcatgctcaactggtctaggtacacctcatgaggcgtcattggaaccaatatggtttttctgcccttgaactcaaagatttggcgattggtgaagccatcatgtgttaccttacggttcgattgccatggtcttccaagtagtatgtgactagcttccataggcagtatgtcacacaaaatttcgtcctcatacttgccaatagataatggtaccttcacttgtctgtccacgctcatctctccatcctcattcaaccattgcaacttgtatggccttggatgcttcataacctttagaccaagcttctccaccatggtttcactagcaacgttggtgcaacttccgccatctatgatcaagctacagaccttgtcattgaccatacatcttgaatga

SEQ ID NO: 18854 - DNA, 661 bp, Arabidopsis thaliana columbia
gacattctcttcgatctctcttcctctctttgattcatcattttcgatccttcttctcttcgattcctcaaatcttttcgattcaaactcacaaagtattttcgaaatcaaaacccataatctctcttcgatttcacactctcaatctctcttcgatttcatactcacaaactctctcagtctccggcgttgctttctctccgtctcacgatgtttgggcgaggaaaaaagaggaaaaccactcctaaccttgctcatagagccaccggatccacggttgctggacgaccgagtactcttccggctcagtacgacttcatgccggcagctcaacataaccctcagcttcagacgcctgaaacaccagcctcgttcctccagtataatcaacggcagctcatgtctggaactaccctccgctcaacaattattccagcactccgtgactcatcaacctcaaatgcaaaggacttcttctgtagaagtccagaatcaagccacgttgactcctcagctacccactccgactcctcagcttggccctccgacttctcaggttcacagtcacccatcctctcaaggcaacaacttcgatgatgatgctcctctgtcgccggatctccaggaggacacacttcagtctctaaatgacctgctgatg

SEQ ID NO: 18855 - DNA, 1077 bp, Arabidopsis thaliana
gacgaatggattccttttcgtacaacaaattgtttggtcaaaacatgatgttgcttacttcattcttatttaaaggaagattctgggctgtttgaggagaggctttggataagtccctaaaagcaccctgaaagtataaatgtcgtcctcatttagacagactaatcatcgaatcactagtgctacaaaatgagcaagataaagagagttgatcaaattaagaagcaagtattgtcttgccttgtttgcccacataagtccacatgcattgcaaagtgttcttggcccggcaggtccacgtcgcatcattggagttgacttctcgccaattccacagtgccgacatcttacaggtatcaagccattcagaggaagtaaaatcagatatgttcttaccaactaaagtaaggctatcaagaagaaaaactcaaatctacaaagacttaaacgacaattgtctattccaaagttattataaaaattctcagttccaggatacaatattagtcatcacaacctgtcttaaccaatcatctatcacagaagtcattttgcttcaggcatggaagagcttttatataatattttgtctgtattggtccttcaatgttaccaattcgtataggtccatgctcatgttaaatattacatatgcaatgtgtatgtcttgatattgaatcattgataggtttcagagttctagtacctctacaacgtttctgaaaccaaaaacaacatctaagatgcttaataaacctatcatctctacattaggatggttcagtttaataactaagtcagatgctacattaggttggaagcaaaaacaacttctaaagttgcttagcaaacccataataactacgttaagttggttcaagttaaaaagtatgtcaggaactcgcagtttactttcaaagcatttctaaacttacgagatctcttgatgctgagcctcactactttctatggcccaggtttgattcgacccccagctagatccagcagatgcagcttcatcattgtttgacttggcagatgtgaactgacctttattgcgttgcatcctgtatacca

SEQ ID NO: 18856 - DNA, 965 bp, Arabidopsis thaliana
gcttctcaattccccctcccgtcttgaggatattatcgcaatacgttgcaagaatttctgcactggacactccagccactgtcttgttacagaagacttcaaatgcctccttcaatgcctacaatatattcaaagaaactatggtcattaaataatatagtgtggaaaacaagatagacatgtgaacacacacacatacacacaccttatggaagaggctgtgtttctgaaaacactcatcgacgtagaccatgaatttatcgtgtaggtcaattaattgtctgataagcacctggtcctgcaccttcagtccactagtacttgcagcctggggaagtacgtaattctcagcaataaaaaaaggagtagactaacatctaatattcgaatgagcaaagaatataaaccttatcagtagctgcctcggtagcttgtttgataagggcacttccctctacagtaatatgttgcttgaataagtctgcaacaggatccagcccttgcggtattggatgataaagcctgtacatcctggcgagatcatccatctgaaagtatatccaaatgctcagtcaaagagtgaattttagaagagaactctttaagaattaaagaaaccaacacaagtcgattaccttgtcgtctcttaacaatgcacggcatcctgagtgctcattttctataagttgttttgcaaccactaccaacaattcattttgtactttctgcatccaaaacaaaaaacaaacaatcaaaacgcttaaacattccctcagtcaaaatatgattattccaaatatataattatatatttcagctaaccgcaactagtttcggctcagtggttgaatgaaggtagttggtgactctctccttctccagtcttagagactcctcagcctttatcatgtaatcaggacaagaattctcctggttcacattgaggcgttgcgagagtagtaaga

SEQ ID NO: 18857 - DNA, 523 bp, Arabidopsis thaliana columbia
tcattgacctctactgagttatttctccagagattcaatccttgaacgcatctcacctctggtttgacaaattaactaagttaatcagctccaagactgttttccagaagctagctttgagtgatgcccaagaaatattatttttaataaaacttgcaacatggaatgcactcagattgcatttaaacttaaacagaaaatttgctcaagtaaagtcaacatatcttaattatgttcactatattaccactaggctttttagtgacacgttgtaattaatttacaaaacaaattggtaccttaaaaataatcacctaacataattttgtgaacttagtacgtttatgaaacgtgataggtggttgtcgaaatgagaatgacaagttggttgttggagtgcaataaggtcggatttggaaaatgggaagatgtgagtgaatccctggatcaagataattggtgtagtctgcttctgatattgtccctggatataaaatcatcgataatctggtagatagagact

SEQ ID NO: 18858 - DNA, 575 bp, Arabidopsis thaliana columbia
ccgaggtagaaatgcttgccctgagcccagatggtgtagttaatgttggggtccaaaacttgttctcgccgactgtatacttcttggccgtcactcctggcatcggcgccgccattagaaaagctagcacaaccgccgtaatcagcaccgtgaatctcgccatttttttctctctaactaaactctctctctctctctctatagatgttgtaagttgcgcaatttgtgatttagagagatggactagtgggtttatttatgtttgtgaaaatattaatagcccatttttttatttcctttttcaacctctgtttagtgagagtactgaatatattaatcaataactttctaaaaatataacaaaactcaaaaattatgtttaaccgcgttttctttttccacggtggaaagacttttggtgcaaaacgtatttgaaaattaacacttatatatatttttcctattaacagagctatgtatgaatttgtatagcttagcttaaattaaataatttattttcaaacataataattctcagattatggaaaaatacagtcaaggttgagctgacaaaa

SEQ ID NO: 18859 - DNA, 486 bp, Arabidopsis thaliana columbia
tcaaaaatctccggtgaatcaggaactgtacgtcggagattgtgaaaacacggtggtcgaaaaagatggcgggacaatcacgaaaatggatgattctggtagcgacgatttggattcaagcattcaccggtacgaatttcgatttctcgacgtattcgtcgaatttgaaatcggttctagggatttcgcaagtacaattgaattatctcgccgtcgcttcggatcttggtaaagttttcggttggtcatcgggacttgcactcttgtatttccctctttggacggttcttttcgcggcggcgattatgggtttcgttggttatggtgttcaatggctcgtcatcactaacgtcatctctttgccttatattctggtaaaaattatgtttctcaacattttctctgtctctgtttctttgatcatgaatcaatttgtggaaaacacatcagaaatttcgaatgtatgtttaagatatcattagtatg

SEQ ID NO: 18860 - DNA, 552 bp, Arabidopsis thaliana columbia
gaaaatattaaatatatttatttatttgtatagaaagttaaaaacaatagaaatagagggagtagtatttatgattcgctccgtttttatcgaataattagtattgctatttagaattaggattatctagatttttcaaactgaaatggataaaagaattcaagtacaatctgattattattttcaaatcccagatgcactctttcgacaattaagtttttttttattattattgtgtaaaatctaaaattaagttaaacgaagattttttaaaattctctcgtagttcataatggagacgctcatttaaaattgtcaactttgacgactaattacaatatctaagagtaattaattaaagagaaaaagagtcttcattgataacagaagagagagagaagaagaagaagaagcttcacaatcgtaacaatggcggtgaagacgcatttctcaaacttctccctcttcttctccttctcctccacttccctttctcattctctaccatacctctcggctccgttatttacgcctccggttccaccagaactg

SEQ ID NO: 18861 - DNA, 527 bp, Arabidopsis thaliana columbia
cctgctctgcatgtggatgatgtttgtacacactccattcaagaaatcctgtgagtgggataccacaacaaggatgcgatcaaaattcttcaggctctcttctagccacacacaagcttccaaatctgttccaagagacaacaacaacatcagcgacacgatacttaaggaaaaccatctgaagcgagtacaaagaagagagattaccaacctaaatgattagtcggctcatcaagcaaaaggattgtcggcataatgaagagtgctcttgccaatgcaattctcatcctccaaccaccagagaaatcttttgtcttcttcgcctgcatttccttgtcgaaaccaagtccaaacagaatttcagcagcacgtttctcagcggtttctgcatccatggcgtctaacctctcatagatagattgaagacgctctccgcctccatcatcctgctgtacaagaatttcaacttctttctctaacctcaacctctcctcatcacagctaacaacagcctccagggaagacat

SEQ ID NO: 18862 - DNA, 606 bp, Arabidopsis thaliana
gagaccacggttcatgttttcgcattgtggattcaatcatggttagacaattgatggcttacatgacaaaaatacttcagttttgtatacacaatgaacaaattaatttgagtcttcggataaatacaattttaagcacaaaaattgtattattccatcacaacatattatacatgtacaaaccataaacacacaaacaaatcaccatagtcttgatagatgatcatttattgatattatagaaacacacacgtccttatatggacaagttttattcgtctgcgtaccacattttacttagtaaggccaacggccctataattaccaggtggataatagttgcaagtcacaaaggttccaccattgtcacactttactttggcacacccaacccactccgaggttcgccacacaacttgagtgtaatgaccacattgttttcatcactacaagtgttcgaagcgtagatatagtcagacttctcgttgacccacaatttcactgcctcagctccagacaaagcacctccgctccatgccaagttttcacgtaaagccatttgagttggagtgagtgagctacagtcatccttctttgttgacatag

SEQ ID NO: 18863 - DNA, 577 bp, Arabidopsis thaliana columbia
tggcagtaatgtttaacatcttgcggaaaaacaaacgtgtcaagattgagaatttggtgctcaataggaaatcatttgctcagacagcagagaatatgttcgcactttcattcctggtgaaagatggacgtgttgagataactgttgataacaatggttctcattttgttggtaagatttacctttccttccttgtgtctgattttggtagttgatttcaccctctaaccccaaaaaactggtttctttgtcttcagagccaaggaatgctcctgcagcaaacctggtgctgtcaggggaggtcgcttataaccattttgttcttagatttgattacaaagattgggaggtatagattagtgtttcattttattttagtaagtgtctagatggtatatgttagctaatgattttggggttttggtgattattgcatagccaatgagcaaaatggtggcagtgggagaggagctgatgccactcagggaaaccaaagttgctcaagattcaatagaactgtcgaggaacaaggttcggtgatcaagaggaacggtcgtcgaagttcttctacatggaa

SEQ ID NO: 18864 - DNA, 549 bp, Arabidopsis thaliana columbia
ggaaaatcttccctacctcatagccaaagatatcattcaacaatcggacttttgtaattactcctctaacgagtttgtctctagatttcaaccactcataagcttccggcttgcagacattttccatacccatcaaaatacctgcgaaggtaaaagatatagcgagctcgagtccagcaacatctaggtactcatcaaagctaggcaagtgacccgcttttacccatttagcgacttgaaggttgatcctcaacgatctcttgcactgcaataacggctcaaaagtgtaaacatttactatatagtgacctactactatatatgatcgtaaaaaaaaaatcattgagttttgctattagttctcttctccaacctttctttcaaactcttggaaggtattgaatacaaatttaactacagatttcaaataatctggtagtccatccatggcatgatcatcgggatccacctacattattaatatttatggacgtatggtcatcatcaatttttataaaatatcatatttacgttgagaaatttaaaaat

SEQ ID NO: 18865 - DNA, 947 bp, Arabidopsis thaliana
gagagtgagctttgaagtaaaggacacagaggcggagaagagcagcagcgagatactgagcggatctttgccgtcgacctaccgaaatccggcgatggaaaacgttggaaacgcggtggatgatggatcgagcgtgaagaacaatccgaaacttgatatgcagaaacagaacggtttggtgaagtggttcaagaagtgcttgacaatggtatctggagagagtaaggcacctcgattggaccggtcgaagtcaacggccggtcaggcttagaaagggctcaagatcatcagtaagaccgacggtaacgctgcctggaccgtcgtggagaagcggtacttgaagatcacggccaatactgatggattgctgcttcggtcgaaattcggtgaatgcataggtaaacattgtaaatttgaggaattgttaactaaataaatggtttggatctaacttggaatattgatgacatattgtagggatgaactcaaaagaatttgccttggaattgtttgacgccttagctagaaaaagtcacttgaaaggggatgtgattactgagaccgagttgaagaaattttgggaacaaataaatgataaaagctttgattcaaggcttatcacgttctttgacttgtaattttttctaatcatcacacattttggtcattcgtttcatttctttgggtctttacaagttttgtaaaatgaatgtacagtttgagccaaagggtttgtatcaaatgcaggatggataaagacacggatggtagacttacggaagacgaagttagagaggtataaagtttaccaataaggtcttgattatttcaaatgttgatttctgcgtttacatgcagaaaatttttcacatttttaacaaataaaagatttcattgtttatgtgtgtaaattttaaacacaaacgaaattttgctaaaagtttcaa

SEQ ID NO: 18866 - DNA, 528 bp, Arabidopsis thaliana
catcaacgtatcatcaacaacaagtaaacgaatcttcagatattaatagaaatggaggagacagaaaagaataagggcagcataagtatggttgaggctaatctacctcctggttttagattccatcctagagacgacgagctcgtctgtgactacttaatgagaagaaccgttcgcagcctctatcaaccagttgtcttgatcgacgtcgatcttaacaaatgcgagccttgggacattcctcgtaagtaattctgtgtttacacaacatctcgcaactctatatcatatagtttaaaccattccatcggtagctattaaatccataattcttgtttccaacatgatctggttattgtttcttctacaattcgagtatatgtggtgtttagaaaaaaaaaaaaaaaaaaagttcaacttgcaagccacctgcaaattagtattttgttccttactaatttctcgtgaaaagaccatttagctgcacaattataaatgcttagttcacattcattagacgcatatagt

SEQ ID NO: 18867 - DNA, 1410 bp, Arabidopsis thaliana
ctgacataacatcataggaaaacgataaaaaaagcatagatcttgaggtatctttttttttttttttctctctgaactgatatcttttcattgataacattttaagttcttacaaaaagttgatcagtggactttccacttaaacataaaaggcaacaagcctattccaaactgaaacataaactaagacaatgctgaatttaaagataagtaggagtatgtcctaaccaaaaaccatactcatctattatatcttgaagctgcttttcttgttgacctgcagtcttcaatccaaaaggagtatcttgaagctgcttccttgttaacctgcagacttcaatccaaaaaaaacagaagttggtagagtgtttagcgtttcttcggaggtttcagtatccctcctgatctttgcacatagttctgttgattgagattcccaatcctctctgaccctcttcttaaatcccgaacatcatgtcttcttgaggattgaccaggttcaaagtgtcttctatcagttaggtattgtggttcccttcttggagttatggagtttgaagctgaagacaagtcttgtctgaaattgcttgattctccctcacatctgatgtggtcattcctacctgagtccaagtgaggataagcagctacaaactcatcatgattcagtggtgggtgggatattcttggtggtggagtctggggaattggaaatgaactatcagtcatctgagactgagagttcatggaggaacgatgcacactatccctaaacagagctctttcccttgcaatgctgagaggtcttggtcggtatggacaataagctctgttgtgagtgaatctgaagcagctactgcagattctccggagacgttcatactgaaatcttattgttgcagtttccccggagtcaaagacaattcgctgaaagaaccttagcctgtccgtaataccaaagcgcactctcacccgtatgtaagcaatctgaatagatgttgtatcatggtagtctagcataagaacttcccccagatcttgagcaatctccataaccgtctcctcagaaacatatggcagagggattccacgaatctgcacccacagatcaattgtagtaacgaagttatgagccggtgccacctcccatcgagtagctgcaacaaaccaattgttaaaaagccaaggctccttgcgttgaaccatcattagatcaatttcattttgaaaaagaaactgaacataagtagcatcaagtattctgccatgaacttgatttgttaaccccatgttcttggtaatgctaccacaacagaattgaggttctggaccctctggttcagaggtctagctatcatactaagtctattggtagcttcaccatcacataagcctcatgagggataaaaa

SEQ ID NO: 18868 - DNA, 583 bp, Arabidopsis thaliana columbia
gagactgacttgttttagattctctgactataaagaaaggcaaagtaacaagtttcgttttctcctttgcactccatttttattctcgattctcttctctcccgataaagaagctctcgctttgtgttgtccgtccttcttccaggtctaattccaccatttctctttggttaaaccctaatttctttctctcccgaatcgtcctctgtttttgttttgcgcgattagtttccaccgcttaataatagggtttccgatcacttacgttttgtgttgttttgttcggtctctggttcttccactgtgatctgttttgttcttaagttgattgtcttaagttatatcctctgttcaataatattctggtcttgttgggggtttcacaggttttctcgtctctgacgcatggcttctaagaggatcttgaaggagctcaaggatctgcagaaggatcctccttcaaactgcagcgctggtaatctcccttttctaatctgattttaccaattacttacctggcactaatgactctgaattaggttccttactctctcactagattgatgtaggttagggtacaagt

SEQ ID NO: 18869 - DNA, 463 bp, Arabidopsis thaliana columbia
gaagataacggccgccagtgtgctctaaaggtaagaaaattgccgttttaatcactgatgaatttgaggattcagaatttacttcacccgcagacgagttccgtaaagccggacacgaagtgattaccattgaaaaacaagcgggtaaaacggtgaaaggcaaaaaaggagaagccagcgtgaccatcgataaatccatcgatgaagtgacgcctgcggagtttgatgccctgctgctaccgggcggccattcaccggattatctgcgtggggacaaccgttttgtcacctttacccgtgattttgtgaatagtggcaaaccggtgtttgccatctgtcacggcccgcagttgctgatcagcgccgatgtgattcgggggcgcaaactgaccgcagttaaaccgatcattattgatgttaaaatgcgggcgcggaattttacgatcaggaagtcgtggttgat

SEQ ID NO: 18870 - DNA, 872 bp, Arabidopsis thaliana
tctggcttctggtggatcattctcctccgagcttacactaagtctacaggagatcattctctagcagagagaccagagtgccaaaagggaatgagactcatactttctttgtgtctctctgagggttttgatacttttccgactttgctttgcgcagatggttgctcgatggtcgatcgtagaatggtaagcttgctctcatcctcttgactataaaattccataaatcaagaaaccaatactttttttggcatcgaacttttgacttttgaatatgaccgtctcaaagaacatataggcctcaattcatatacatatatatcctaagtgaaaatgaacctcttgaacgttctctttttgaaatgtactgtgcagggcatttacggctatccgattgagatccaagccctctttttcatggctcttcgatccgcactctcaatgctgaaacatgattctgagggtaaagagttcatggaaaagatagtgaagcggctgcacgcactaagcttccatatgagaagctacttttggctcgatttccagcagctcaatgacatttaccgttacaagacggaggagtactctcacaccgcggtaaacaagttcaacgtaatccctgactccatccctgattggatctttgacttcatgcctctccgaggtggctacttcgttggaaatgtcagtcccgcccgcatggacttcaggtggtttgcgttaggaaattgtatcgcaattctttcctcattggccacaccagagcagtccatggcgatcatggacctgattgaggcccggtgggaagaacttgtgggagagatgctgttgaagatatgttatctggcgatggagagtccgagtgggggatt

SEQ ID NO: 18871 - DNA, 553 bp, Arabidopsis thaliana columbia
caaatgggaagaagaagaccgagagtaggaggacgaactcaccagggacagagttcttgttgagagtaatagatgccatgtctaagattttctcaacccgcgcaccatccataccctaaccacaacaaaaatgttagactgacaccgcattatcataagtgattttctggtttaagaaaaaagttgatttattcaagccattaatacagtttgtaaacttaccatgggtctaagatcgacgagaaccaagtggttatcgctgccaccagaaactagcttaaacccgagttcaaccaatcggttagctagagctctacagttagacacaacctaaacaagcagcaaaagattcttgttagaagcaaaatttacaaactttatccggtgcagaagaacttaatgatcaagtaaaagggtgggtactcttttctggtacgccttgaattccggtgattgtgcgtgtttcaagcagactgctaatcctccaattgtgtggttatgagggccaccttcaaatatacaattcagacaacttttaatcacgtgggagaag

SEQ ID NO: 18872 - DNA, 615 bp, Arabidopsis thaliana
ctggtcccgaaactctcagattttgggttggccaaactatatgatgataagaagacccacataagtacccgagttgcagggacgatgtaaatatcctgaaaacctcacattggatgtggtttgtcaaatgggctaaaacttaccgttgttaaatgttatattgcagcggatatctgtcaccagagtacgtgatgcttggacatcttacggagaagacggatgtgtttgcctttggtatagtggccttggaaattgtcagcggaaggcctaactcctctccagaattagatgatgacaaacaataccttctcgaatgggtatatatctaacttttcctacaaacacatcctttttaattccaaatttggtgaataatttggtctttgcaggcatggagcctacaccaagagcagcgtgatatggaagtagtagatccggatctgacagaatttgacaaggaagaagtgaaacgtgtaataggagtagcgttcttgtgcacacaaacagatcatgcaatacgaccaactatgtcccgagtggtaggtatgttgaccggtgatgtggagatacggaagccaatgccaagccagggtacgtctctgagagacatttgag

SEQ ID NO: 18873 - DNA, 1051 bp, Arabidopsis thaliana columbia
gttggcaggagatatccgtcaacgagcgctgataacactgtattttacttattttaggcttgtatttatcatcatttagcttagtgatcactcattgtttcatatcatttgcatcacatttagcttattttgcacacttaggcatttaggatcatcttgcatacatattgcatgttttggtgtgttttcaggtgcaaaaggagcttacaaggattcaactcgaccctctactctacccaaccaggagggaagcagtagagcattctactcgaccagttcagtcgatccaggcagccatagaggaggaagcaattcactcgacccacttactcgatcaaggcagccttagagaaagcagcagatcgatttactcgcccctcctatcgatcctctactcgacccatttactcgaccaagggcgacctactctacaagacttgttgatctattgttgatctatcaaagcgtcttcggatcctcctcattccccactcaaccagacatctgagcatacgagtacgagaggaaaaagtatctacacgaccaattgatcactcggagcatggaggcaaaggcgcagactttgcagcaccctgtttactcgatccccaagatcgagcaatcgcccaaaccgcccaaaccgcccaaaccgcctcaagtcttttgtcttctagtgaatctagggttttcaacattttagtataaatagatcactttggggtttgtccaaaggatctagcttttaactcttagtttttgcttgtgttcttgaatcttcaaaacttaattactcttaatctattttgtttttgcatttagttctttgagtagagttgtttagcttttttagatctacattttggtatgatttcagtaatttctgggtttgtgttcttaattatgttgcttgagtagtgattagggttcttgaggatggattagattatggtaatctctatgttagtcaggtggttaagattaagttagatcccttctggattcgttggcccctatgcggttttagctggctaatgttgaaatttgaccatag

SEQ ID NO: 18874 - DNA, 533 bp, Arabidopsis thaliana
taaagtttcctcagcatttgtatcagcgggacttacacaagctgcaacattcagagatcataaattatgtgatccaatagatgggtgaaaacagttctgtctaatacttggatcataaatgaaatgtttgagaaaccataccaatcatcacagttttgctattgccaccaagagaatcctaaacaacagataattaccattagtttttctttttcataaccatatatttacaagggcatgtagttcaattgaaaatgtatttacgtgtataaacaaacacatagggaaccttgatacctgtagcaaacgagttaacttgctgtcacggtaaggaacgtgacctccttcctttctctttttctcatctccaagtgcacttataacatttccaagagctaatagacctttgttgatgtgaatacctgtgtaaatattgatgaaataaaccttatagtttagtcatagtctcttttaagaaaccagaaagaatatttatacacctttatacatcataaagataaacatgagataga

SEQ ID NO: 18875 - DNA, 604 bp, Arabidopsis thaliana
  unsure (1)..(604): unsure at all n locations
tggtgctcagttgcttggccagattaagcgtggttgctgtcgagctcgggcaattttgttcaaagttctagctgatactgtaggacttgaaagtcggctggtggtggtaagcctcagtttctcatatttcaatttttttctttacctacatttatgatctagatgattggatcttatgctatttgtctcttacaaatcaacttggtttcccttttgattcacatgtgcagggtttgcctagtgatgggactgtgaattgcatggactctaacaaacacatgtctgttatagttgtgctgaattccgttgaactactagtcgatcttattcggtttcctggtcagttggtaccgcgatcagccaaggcaattttcatgtcacacatctcgcctgctggagagagtgattctgcagaaaacgactgttgtgactcacctttggagccaaatagtcctttatatgagagaagagatcctgagaggtcggcttccgttgtgtgatttttctttctaaagcatattacagtaagatcattctaaaacaactcttgtgataagcgtccctagagtgatatcgtttntctgctacagtacagaaaaagatg

SEQ ID NO: 18876 - DNA, 812 bp, Arabidopsis thaliana
cacctattgagctatagagagtatgctgcaaccatccttcgctcatggattcgcggaagtctttgtgttggtggtatcttaacaccaatcctaggagctgcggggatacacttgggaacccctgacgtgtaccccaagttcctcgaccttgactatctcaagggaaaaggattatcttgacaagacgactccagcagatcactgcatcttcaagttcaaacatccggatcttggaccttctttgttatccctaccttgcgagaaccgaacttcagttaagacaaggcgcaacatcaacttcatgccatcttcctctgtcctgaacatcgacatcggaggagctagagaagatgaacaagagtatactcaagctgactatgagcaccaagagtattatcctgttgagtttgagcaacaagtcgaattcgagcaacatagcgaacaaccagagcaagagaccaatgaattcgagcaagctcactatgaagaagatgctgatcaaggaggagatgagatagctgaagttcacaagaatctcggtgtgcttgaagagcttgggaatcttcacagcaaaacaatgaaaggtttcaagaagaagatgagaaccatgaagaagtcgctgaagagtatggctgctcaaatcaaagacttccagagcaagccaaggcccccgtctcccaccctcgaagtaagaagaagcgttccacaaattctgctgcaagaagagctaacacgatcgatcaccccgagcttcatcatttgagtctcgggaaatgatctccgagttgagagagcgaggagtggcagagaag

SEQ ID NO: 18877 - DNA, 735 bp, Arabidopsis thaliana columbia
taacaagaaaacactacttaggcttttaagatccggttgcggttctaattctcatattcaatcatacacatgaaatcaagttatatttgactccaaaaaactaaataagcttcttcttccttctcaaagctttgatggtgtagctgaagtccgtatgagtgataataggtttttagtcaattatcgtaaaacaccaatcatgtcgttgtagtattttaggttgtcaatccaaataggtgtgatgtgataacactgtattttactcattttaggtgtatgtttatcatcatttagctttacatttgttcattgtatcatatcattttgcaccattttagcttgttttgcatacttagacatctaagatcatcttgcatatgcattgcatgttttggtgtgttttcaggtgcagaaggagctaaaaaggactctactcgatccattcactcgatccaggcagctatagaagaggcatcattctacactacctctttactcgatctaggatgctacaaaggaggcttcagtttactcgaccctcttactcgatcaaggcaacctcagatgaagtagcagattgatctactcgcccctcctactcgatcccctactcgaaccatttactcgaccaagggtgaccatctctacaagacttgttgagctatcaaagcgtcttcggatcctcctcattccccactcaaccagacatctgagcatacggatatgagaggatga

SEQ ID NO: 18878 - DNA, 630 bp, Arabidopsis thaliana columbia
tatcttagctctaagtatagagagtttacttgcttatttgtcacttggatctacaactcgtttacttgcttatttgtcttttacattcatttactttgtctagcttatttaaaaacatcataagtctattgtgtgaacataaagagctagctcagtggaattcgacccttaagtgctaacgacaatctcttatttgagggagtaagcttaaggcaatttgagagatatcaaatttggcgccgttgtcgaagttctcctttaggtcaccattagactaggtgtcgttttaagtctagatacttcttttttatcacctattcacgtgtttctttatcttttggtctcttgtttttcaggtaccttcagattgagaatcacgtttaaatgacagacaatcacgatagtgtcgagtgtcgaccgacaccatcaaggtgttgatcgacaccctctgcagaaccagacagctagaataggcgactttaacagaactgatcttttctacaccaaccaatcggcattcaagctacctccatttaaaagaaaagacattgctgtacacctgcctattatgatcttgtatgaagaggaaagtttagaggagtctcgatgaatcccattagatcatttgaa

SEQ ID NO: 18879 - DNA, 570 bp, Arabidopsis thaliana columbia
cctaacagataacctagcaagggggcaatctactaaatcatctaaatccctaatgagaaacgctaaacctaacaagaaagctacaacatgatcaaaggaacacaaattatagtctgaataagaaatcaataatgaaaataacaagagaaagagtaagaaagatcttctctaaagggagtctccacagggttttgctcccaagtacaaaagacataaggagattatcctctccaagcttaggtctaaacaataaccttaaaaactatatatatatatatatgacctaacacgtgatgggccttctttaaaaataagggaaagttctaggccgaatttagaaatcttcaaaatttcaataagttacgtcttcgaattgccatcaggtattggtgtcgctcgacacaaggggtggtgtcgttcgacacctacgcgatttttagtctccagatttcttctgcagcatagcataagttctctgttttcctccagaatgctccattatgtgcaattgaatcccaaacgtgtaaagacctgaaaatgactaaaaaagactttaaaaataacaaatta

SEQ ID NO: 18880 - DNA, 718 bp, Arabidopsis thaliana
tgactcaataaaacgactcataaagaaaaataaaaataagaataagactcaaaaagaaaaacatagtaagtaactgcctctcccagacttaaacgtcattgtcctaagtggcattcaaatccggagtaagcgagaaaaataaaagaaaaacgaaaaatagaagaaaaagaaaaagaaaccatactagtgggttgcctcccactaagcgcttgtttatagtcaatagcttgactttgatggagtatggggatcaagtggatcagatggtggtaataaatatcgcggagaaagacctctcatcatccatgctggcgtttaagcagttagcgcgtgaggtttatctaggaagagaggagcatcagcaaggtgggactcaggtatgggtggaatactcatttttcctgcacaatcatcaaaagaaagaacaagcgctcgacgagaaactcgtagcttgcttaaccgtaaaacagtatttttgatgaaatcaagaggtttaggaggaggagatgagtaccatagccgtttaggaggtagatgaagtatgagaggtgcaatgggtgacgtgacagtagaacttggacttaaagcattgatcccagctggaaaaatagctatcggagaggattctgcttcaaccagtgatgggtgtcaatcgacactcttggtggtgtcgatcgacaccgtcctacaacttgtcttcccttaccttgtcgacaag

SEQ ID NO: 18881 - DNA, 604 bp, Arabidopsis thaliana
atccccctcaccatcatctttcaattccttctctgattcttcctccacatgtttgatttcgtccattttaccagaagatgactttattggagatccagtctcagatttttcatctgtgttaacgcttattggaacagatactgctgtactactagacttgccaccaaaagaaagagaattatgaagactcgccgcatttgtactagttgctctatcattattccatccatttctagcagatggaacatccttaagatcatcagcctcttcggaaaaggactcgctgtaaagttcacttagcaggaaagctggctcagaatccatatcagaaataacaagaccatcttcacttttggatttgagtagctcaatttctccaagttccaacttcccttctagtaaattatggaggctatcaatcttcagtttacatcgttcaagctttttacgcattctatatggaccttcaataggacagagttgccatttaagatcttcaactccatgggaaatacgcattgggaatataccacgctcatgtacaagctgttggaggtgagttggcacacactctcggcatgaagtacaaaccatatttattttg

SEQ ID NO: 18882 - DNA, 899 bp, Arabidopsis thaliana
  unsure (1)..(899): unsure at all n locations
gatttctagtaacggtgtccgtggcttggcgcctctcaaacgagcgtctccggagcagagaagggtaaggatgaagcggtggtggcggcggctgttgttaaatcgactgctgttgttgtggagagtgttgaatcggaggagcctaagacgggtcatattaatctgttcgaagggattaggatttttgatccgattgagatcaagaagaatgataagcctgcggatgaggaagatcagagaaggaagaagatgaggaaagaagcggctgcaacggcgagagctctgcgaaagatgctgctgcgagactnggtgatcctgatgaggagaagtatagattgggatatggagttgctggtaaaggtgtgaagcgtccttggtaccttgagaaacgtaacgatgaaaatgatagtgttcgaggtgaggatgatgatggtggatgtggtggttatgaagctaagaagaagaagatgagtgggaagaagagcttaaaggagttgagggaagaaaggttgaagagggagagggttgagaaggaaagagagagagcccttttcatgaaacagagccagagagccggtggtttttcccggaggtgagttttgggattatattggtggctctggtttcacacttactgatgaaatcatacgttatttgcattgggtttgtacaagttagtagttaactgttacttgattcatatcccaagtattggtttattaacgctactcgatgcttgtactgtattagtgctgatagaaccatgtacataggttggagtttgatagatatttggccatttggggatctaggaatcaatagtttatcaggtcctatcctttagcatgttctaaagtttagtgaagcatggttgtctgttagtttgatggtagctttta

SEQ ID NO: 18883 - DNA, 591 bp, Arabidopsis thaliana columbia
tcgcaaaaatcgtttgcgtttcggcccgggagaccgcgcatacggtgttgagagtgattcggaggaatttcgcgggttatttgtggtatgttaagggtgatttgagtgttgtgttggatggaatgaaagttggttttgtgattagttctttgatgagagatgttagagataagaaagtgattgatttgatcaaatctgcgcttgttacacctgttgtaacgagtaaagttgaagatggtgagaagaagaagactaagaagagaaaatatcagaaaaaacgggttttggctgaggatgagcccaagcctgatccttattggttagagacgttctttggttttgctcctgaggaagctgggaagtctccgcagtggggacattgcgggattcttagtcctcttttggttaatgtatgtcttgacgagcttgatcgttggatggaaacgaaagtgaaagacttttaccgtccttcgaaaagcgatgttatatggaataacctgaaggagaagcggatcaaggaaacacttcttggccggaatttgttccacgagtggtcctgcaaaacgaggaaaatggattacgttagatatg

SEQ ID NO: 18884 - DNA, 461 bp, Arabidopsis thaliana columbia
atttggtttacactgggtgtggttctctggaaaatgtttcaaaaccactaacgattcctctcgtaaccgagaggatgcatactactttcatttttacggattgcttcaagctgaaccaagcggagaaggaagatattgtagctcaggcccaactcaagagtcagttactggcaaggacatctcgtcatcataatcataaggtccatttcaatttaactctattgttgtggtgatacctccttggtcataagctcatgcttaaatggttttctttgtaacccatttcagggactacttctggatcctctggttgccgtttgctttccaggacatgacataccctcatggttctcccatcaaaaaatgggatctttgatagaaaccgacctgcttccacactggtgtaacagtaagtttattggagcttcactatgtgttgttgtcacttcaaggatcatgaa

SEQ ID NO: 18885 - DNA, 574 bp, Arabidopsis thaliana
tgcactgttgaagaagttagggatacagtgagtcagatgcaaagggaagctattcaacctcaactcggcattgaagttataccaaagaagaagttcgtttcagaatggtgtgaagaagaagactacccacaagaaattaaagaagcttacaaggaaagggccattgagtgctcaattacagacatgtcaagagagcaagctaagtccgatgttgtatctgctaaggaagaagagaagatttcaattcttctctatcaccctccttaagtcttatgagtgtgaggagtcaagctagagacttaaaacaagctcacttgggaggaagtcccatgtctatcttcgtaaatatcttttatttttccttgttatttttaatacattctattagagttttcaggagataagaatgaagagctgagggaaatggattctggctttgagggaacaacaatacactcgaccacagagcaatcaaagacactcgacattgttctggcttctccacgctaggaaatcactcgaccacaccctacagggagcgaatgaagatgtgatcgagtatagcgaatgatgc

SEQ ID NO: 18886 - DNA, 254 bp, Arabidopsis thaliana columbia
taatgagtaacgacgtaaacacgattttaaaagtaacttttgaataatcacacggacacggcacatctatataaatagcgagagacttgagtccacttctcatctcatttccaatctcttaacacaaaatctcaaacacgatcccaaaatcacacagagacaatggcacaacagtacaagttcgttttcactgccgaacaagccgcatccgaaggtgtcaccgaccacaagaaacttccgaagctaatcagaaa

SEQ ID NO: 18887 - DNA, 486 bp, Arabidopsis thaliana columbia
  unsure (1)..(486): unsure at all n locations
nnnnnnnnnnnnnnnnnnnnnnctaaagtaggctcatacatctttgctgactcatgaagacttcctgcaatagacattttgatatcgcccatctacacgaaagagcgcgtctgtcgaactcgcctaggctcaacgtagagcaacattaaccgacaggtattcagcaaactgagtttactcatgacaaccgtcatgggaatcatgctgacttggaacagcgcangaagattcggcggatcaagaggcgtatcacatgatggtaaccgcttttctcttactcatattgcgagcgatcgagtcggntgctatagcgataaagattactagtgcaactcacgataagacagtgatgccgagagagttctaataataccctngaatcgnatcacctaagagacggntcaagtcgtncnctgtgaagttggttggcaagcgaaagaacttatntccaatactcttagtgggtttgaaggaactaacgagggt

SEQ ID NO: 18888 - DNA, 493 bp, Arabidopsis thaliana columbia
ggatcccctgattgataaagataagaactcggaattgatggatagagttaggttgttggaagtagctgttgagcaagagaaagtagctaaagctgctttaatggttgaattggaacaagaaagagcagcttcagcatcagcagctgatgaagctatggctatgattttaaggctacaagcggataaagcttcgcttgagatggaagggaagcaatatgagagaatgattgatgagaaatttgcttatgatgaggaagagatgaatattctcaaggagattctttttaaaagggagagagataagcattttcttgagaaagaacttgagacttacaagcacattgatgatgatcaagagacggaagacaacgagaagagagaatgcgatgaggatggagaaccgattgtgtatgatgttcatgtcattgaggataatagtcaggctacagtgagggatgctgatgtagcacgacacaaagagatgaacgaagaa

SEQ ID NO: 18889 - DNA, 521 bp, Arabidopsis thaliana columbia
tccaaaaagtagaatataaaaccaagccttattcaaaatctaaacaaaatggcctaaatcaaagacccacgaacgaagtcaccgttgatgtcctaagtctcattttcggcaatatcagcacctagacgtttaagcctctcacggactgacctgacctgcatgagggaaaattcttaggttaattagccaagattagcaaactatatctctaatcgcaacaaagacgagaaactgatagagacacgaaatcacttacggaatgtgtcttcctcacttttctcagaaccaataacttcatcaggattcgtggtcaaggcatcttgaacatcatctgaagccaagacctaaaaatgaaggccaaaacaatagttccataatgtaatgtttagtaacataattacaatgtttaagaaagaaataaagtatgaactaacctctaggtctgaaaactcaaaccaaggacaacaatccaatattgcacacacaagcacaagagtgtcacgcacaagagacccagcatc

SEQ ID NO: 18890 - DNA, 470 bp, Arabidopsis thaliana columbia
agattctaatttattaccttccaatctttgaaatctaatctaaacacaaaatggttataaatgacttcacccgacatcaccacgtttgcatcaggtgcatttctcggcactgaggacacattaggagatcaagtataagtgaaacgaattaaatatcaaaaccagacacaagagagtggacttgtgatcttactggcgaaatgagaaccacttttgtcgacaatgatctcaactcgtccatctttggccaagaaagatagagcaaacaaattctctacagtctgtgcaaatgaccgcctgttgagcaccaaattctcaagctgcacgcgcttctttgtccccaagatgtaaaacattattgtcatattcttgtctgtatcagtttcttcttcagattgtgaatcatctacctggttattattatgcgtatcaaatcagcttgtctattctcaataaaaccctactacata

SEQ ID NO: 18891 - DNA, 609 bp, Arabidopsis thaliana columbia
taaagcaatttttttttttttttgactccactagttatcgtgctacgaacctttcacattaaatactgaatgcaaaaatcaagaaataatatttaataatatcaccgcgtctgataactcgttgacattaaaacgtaccatgaggccatagacgagactgaagcagctgtttccgatggacgcggcggcgagctcatttttaccgagatgtccggcgaagatccgagcggaaatacccattccgctgttgactaaatagacaagtatcgccggaagtgccaaccggaaaagtagcttcatctctatgcatgcccctaagtacacgcgcctccggtacggaaggctacgctccgttaaaacactctctagtccgagtccgacgtctgccggaggtttacgctccgagacaaccggaaccaccaatggtcgccggagatcggctaaattcgtggttcactaggcacttccatagattgggaaaaaatttacaaagaaaagggttttgtctataatgataagactgaggaggaaatttggagatttaaggatctgtgtggttttttttgagataacaaaatgaagctctttagtgtgttataaatagagatt

SEQ ID NO: 18892 - DNA, 548 bp, Arabidopsis thaliana columbia
ctcgttatgtcactcgttaatttgattgtatgaaccttccaaaaaatcttagttaaatttatagtgatgttgaacatcacaatcttatcatggttttcatggaattgaatcgttaatgacttgtgtaggtgaaactattctaattccaagtgtttgtcacttttattcagaaagtaaagtaattgccgtttctgttttaacaaaacaagtatcaggccgttccaagcgttcactaacgacacgacgtttgtttatgaaccaaaaagacgaatttttcaaaacctcgtcggagaggtttaggcttaaagaaacaaattgttggaatctcaattctcgaatctgacatctcggagaagagatatggcgacagagtcatcggaatcggaagaagaaggaaagattagtggaggaaactataagctaatcatagacgacgatctaagagagatgggtaaaaacgcagcttggagcgttacgtcttgtaagccggcaatggcgtcacactctccgcgacgacaatctcgagacttattggcagttgagaaaac

SEQ ID NO: 18893 - DNA, 544 bp, Arabidopsis thaliana
cccgtggatcggttccagacaaagataagcaaacccaaccagttggtttaacaagctccacacttttaatctcctaaaacaatcaaaagagaaggagacacaacatgatatatcaatccttcacaagctaagagaatcctctcttcttcttcaaaggaaaaagatattacctttaagttatgaaaaccatcaccagctcgaatagagattttacttggtgtatagctctcatcaagcttaaagtcaacgtacaaaaccactaactttcaaaatcaaaacaagccaaaattcattaaccacaaaaaaagaaagatgaaaactttctcatgaaaatagaatcatacctgcagtttcactttcttctggaattgaatgttaatcaaatgtggttgtaaccatctgatctacaatttcagaaacaaaaaaaagtcgaatcctttaattgaatagagacaaagaatgagggaaagataagagctttagtttttttttcgttttctcaactgccaataagtctcgagattgtcgtcgcggagagtggtga

SEQ ID NO: 18894 - DNA, 420 bp, Arabidopsis thaliana columbia
tcgaatcaaagaatgtaattaagttgattattaaaaaagaaagaacgaatagaacagagttaaagccaaattcttattattgattataaaagatagacataaagggtagtcgaggtcgacactgacaaaatacttaaacacaagaccactcacatctaatctcacaaacataaaacttaaacgaggttgctatatataaattatgataaaattttatatatatagcttaacctttcactaaaacaataacaaaacgaaaataaaagttgcaaacagcctccacataaaaggattggttatgcggcggaaggggcaaggcttgttaggacatcgccaacaagtttcttggaagccaaggttgcagtgaccggattcagcttggactcagtctcgacgaaattcttgtagtctaaactcgaa

SEQ ID NO: 18895 - DNA, 557 bp, Arabidopsis thaliana columbia
ctcaaatagctatgatgaactaatcggctctttggaaggaaacgaaggctttggacgagcggattacttcctagttggcaaagactttcctagttacatcgaatgccaagaaaaagtcgacgaggcataccgagaccagaaagtaagtactaatgcattttctttgaacatcaagctaataatgttgactaaaatatgaaacttactcaaatatcaaaccttgaaattgctgttaaatgattacagagatggacgagaatgtcaataatgaacacagcaggttcattcaagtttagcagtgaccggacgatccacgaatacgccaaagacatatggaatattaagcaagtggaacttccatgagccttgagacaagtctaccttaagaactcttttgtacgtcccatgtttctaatgtaatcaaggtaataaggaaatcatgtaatgatgcaatacaatgaacgtaagaaataagattcacgagtcaatgtaatttacaagggccttcgctgccttagcggcgtgcttctgaccggctaaatgatcgttgtaacaat

SEQ ID NO: 18896 - DNA, 561 bp, Arabidopsis thaliana columbia
tccgtcccgatatcaaggtctcttattttattttattttcattttcttattttcataggagaaacaaaaacaaaatatcatcttcgatactttcaaattcattacatgatacattgagaatcttctaagagaatattaacaaacttttttcacacttgtcaacatgtatacggttttatttcatgcatgaatactttaaacttttgtttgtatatacatatatgtctatgacaattctttaaggcattttgtcttcttgttgcggacaaaacttcacaattggtaagacatttaaactaaagtcattgtcacttggattctctcatataattcaacaaacataaaagagaaaaaaacatataaaaaataaaaatatttgtttaatattgtatgtattatttacatataaagcatattttatgtggtatgttacagaaagatggatggactgaagaagaggatataatactgataaaagcccataaggagattgggaacagatgggctgagatagctcgaaaactcccgggacgcactgaaaatacgatcaagaaccattgg

SEQ ID NO: 18897 - DNA, 460 bp, Arabidopsis thaliana columbia
aagctaataatggacatagatgcacattggcatgatatattccaagatagacctaagcatcatatggtaatcatcatgtttgtccggaagtagttcatcgagaataagcacttggcggaatgcatcaaccacctttaactcctccgcgtcatgctcatcctcgaagatctccacggacatcaccttgctacttcttctcttcttcgtcaaggaacaactcaacttggagcaactcctctttttaaaagaacacacattgggtctctccaaaacacatacgtcaagatcttatcaagtaagatccaaaaattcacattcgtcaggaaaggtaataacaagacaaaaagattcctaacaaatcaatgggacaaaaaaaaaacacttaccaacgttgagagacatgatgtgttatataggcgagaagagcactctacaaaagagtgttcttataataaccaaa

SEQ ID NO: 18898 - DNA, 578 bp, Arabidopsis thaliana columbia
  unsure (1)..(578): unsure at all n locations
cggggcatccnnnnnnnnnnnnnnnnnnnnnnnctaaaggcagcaccgcaaaggcactgcgacccatttgcgtcaccatcagattgcgttcattcatcgcctgcatggcaatcgccgtacaggagagcgccacgtcatgccgatcaattccgcgacctgccagcgcagccaagtaacatgcagaacagccccagcaggccgccgcaaatcaccatctgcaatgcgccacagccgaacactgccgcacgcagcttccacagcctttgtggatcgagttcgaggccgataataaacagcatcagcaccaccccaatctcggcaaagtgcagaatagattcggcatcggtcaccagtcgcagcccccacgggccaataatgcagccggcgatcaggtagccaagtaccgatcccagaccaagacgtaccgcaatgggtacaatcagcgctgccgaaccgagataaatcagcgcctgaatcagcgtatggctatccatgatgggcctcctgccattccagcagacgttgcttatagtgacgcgcctgcccttcgagggtttcgtcgtcacaaataaaggtgc

SEQ ID NO: 18899 - DNA, 552 bp, Arabidopsis thaliana columbia
taaaataaatcataaatctggtcttttgaaacagccctttacaagacaagagaacaccgttattcagacttgtgtagttgcttcctcaggaattgcctttagcggtaatagaaacaagaacctcatctaaaagaactcaaaatttgaatcaagattggtgtttttttcttgatttctgactttttcttataaaaagacaaaatctttgaggtcatcttccttcacacataattcacctgacccttcttttctctcttttctgggttgtttattaaattaaactgcaataggaggatttgggacttacctatttgcaatgagccatcgaatagcagaccaatcaggagacgttgcccgtggcgttaaggatccttcattgggttggatgatagcttttctctttgttgtcagctttcttggcctcttctctgttgttcctcttagaaaggttttgattctgcctcttcttctcctgtggaacaccaaagagactttgagcaagctgatgcaatcttacagtacgaatttgtgtttgcagataatgataataga

SEQ ID NO: 18900 - DNA, 559 bp, Arabidopsis thaliana columbia
ctgacaacacaagtcgtaggacacaggcttagtaatctaattcgtgacacaagaagaagtcataatatcagaattgtctgaaaattacccgaaaggaatcttagaaatgtttccccaacaatacttcgtggtttcactgtaaaattgaagggtgtctattgttagtatacacaactagtaggatattgttactgaacctgagtatctcaaataagatactcaaaataagtactcaagactaatgcatatgcccagttataagattaagaaaacaaggagtggtaattgctatttaagctagttgttgcaagattgctgcctaatgcatgtaacaacagttcacaaaggaatatctatgtaatcatggaaataataaatgtggtagtactgcttcaaggtcaagcatctggatgagcatgaatgttatattgatgccagcaacagcaaaggggtattccacacagaacgatcgcaacctgtcttcgcagaaggccgtggaagattcctcaggaacaaataagtggcacaggaattgagagctggattgaatggattactg

SEQ ID NO: 18901 - DNA, 463 bp, Arabidopsis thaliana columbia
tagtaacgcccgccagtgtgctctaaagccataaagataggatccagaccggggatcagttcccagccaagcaggaatttcactaccgcagcggcaagaccgagggtgatcaatgcaacgaggaatttggcgaagatctggaagccgttgatcattttttccgggatgaatttcagccccagcgccaccagaatcgcaacaatgatcaccgggatcatgttcatcaggatcagggcgaaagtgaattccaccggctggccgttgatctgcacaccggagtacatagcaaccagaccaccagcgatacaaccaatcggaatggtcacaatgcccgccagcacgccgagcgccagataacgacggtcagaaggttcgataatgccgagcgccaccggaatggaaaacacaatcgttggccccatcatcgacccgagaattaacccagagtatagcacgcggctac

SEQ ID NO: 18902 - DNA, 918 bp, Arabidopsis thaliana columbia
tatccataactcttacctccattcatagagcaattcagagaagaagacaaggcacatagtcacaacttataaacgggtgtgagaagaagacaaggcaaattagtcacaaattcattaaggtagagaaacaagatccttcattactctgttttagtctcttcattaagaatcatatacaatttaaatcacaaaactttcaaggccacaatcttgattaacttggaaagacctgagtttcattcagatttaaacaacactgcagctctcaaaattcaaaatcgattgtataaagaaaacaagaacatctatcatcatcataatcactatccgattttacaacatatcaatacaaacaaaaacctcccagcttacacgaagaagaacatcattaccttattccttaactccgaacacatgttatttagattactctgttttagtctcttcattaagaatcccccaaaattctcaatgccacaatcctcattcagtggtaagactcgagtatcaacattcaaatttggataacagtgcagctcttaaattcaaaatccatttttacttttaaaaacaagaacatcatatctataatcatcacaatcactatccgattttacaacatatcaatacaaacaaaaaccttccaacttacaagaagaagaacaccattaccttattcctcatcatcatctattacacagaaaatctatgagaaacgtatatatctaacacatgttatctacttcacaaaagtcaaaataaagagggaaaattcgaagtttatatactcagaaagcaccgtaaggtatatgttgtggaagcctaaatcgaacctgtgaagccggagaccgaaccgcaacgccgtgccagcaaatccctcctttacaaatcgcacaccgtcgtgatggtgacggtggt

SEQ ID NO: 18903 - DNA, 374 bp, Arabidopsis thaliana columbia
taagagatcaaaaccaacacatgcatgtgtatttttcctaggactttccaattcggtactacatagacgtacgcggcaccagaagtacacatccggtgtaggcaggcgcgcacgccttatcgtaatttccgagtcagtacaaccgccgacacaagtagagttatacggacctagggggccagaaccgacacaagcccaagaattcacaatcctagtaagagaccaacgtctaaggacatcatcaagaagtctgctcacagagacctacccctatagtggaaatacacaagagaacaccaactggagaagctataatgggaggagaagcaatgcgtctgtgggatcagcatgcaccctggttagaaccctgaagg

SEQ ID NO: 18904 - DNA, 788 bp, Arabidopsis thaliana
tccagagatgtgcaattgcaatgataagagcctgaagttcactttctagggcgcatgttgtcgtgatgcctattgcctgacctgctcctttgtagattccttctgcatcccttattatccatcctgctttagattgtctttattgatggttgaaagagccatcgtagttgcatttcacccatccataaggcggtcgtttccacacaatgttttgctatgctgttggtatctcttctcgacattgttgggggttggaggctgtgaaggtagtcagtagaagtgttccactcttcctcatcattcctagcaagttggagtgtggtctgccatgatatactcttttgttggaaaatcaattggttcctactcttccaaagtcgccagacaatccaaattgcaaggtgagagaggtgtggatgtcgtctagcaaaggtgggtgaaagaatgatgttcatttttgtgtttacagaagctccaggcatcgtgatggtattatgcggaaaaccggctgctctccagacctgttgtgcataaaaacaatcaaaaaataaatgttgtgtagtttcctcttcttggcagcatcgtttgcagacaggttggttccggatgtgtcgtctcttcagtgttttaaggctccagatagaagtttccacagaaagtatcgtaattttgggactgttttaagtttccaaatccgtgtctttaaatctaagttccccgtggtggttatacgtttgagtctctgtaagttgatttgctaactagtaagcagatttaacagagtaaag

SEQ ID NO: 18905 - DNA, 543 bp, Arabidopsis thaliana columbia
tatcatcatgacaatactctaaagttgactattattgtcccatctttgcatcgtttgtcactctatataggttatacttgtgatgtagatgagtttgtcatagatactccttctttagagtatttcaaacttgaggatcgtaattatgatagtcacccatgtttgatcgagaatatgcctaagctaacggtagcatacgtcgatgttagatccactgatcttcagagtctcatcggatcaatcacttctgtcaagtatctaacaatatcctctaaggtaatcagtttcaatctatctttgatcttgctctttaaattctctgtttatactttttttttattcgttcgcaggctatgtttggtgacggttttattttcaaccaccttgagcatctgacgctacctgtatgggatgattatccgtggaatgtccttgtccaggtcctcaaagactctcctaacttacgtgaactaagctgcctctctgaaatgaatgtaagttccttcgtttaacttgttttcttttgtacattattttgttgtc

SEQ ID NO: 18906 - DNA, 507 bp, Arabidopsis thaliana columbia
tgtacagtcttcgatattacatcttttgccaccaccgtgtttgatgcagaggcccgacctgccacgggctgctttgtcacatccttcaaggaactcgcaacgtcttccaccaccatgagatatacagaaatctgttttaccttcggcgctcttcgtgcatcccaagtgttcacacctcttccctccaccatgggttttacaaaaagtggttttactctctgcacctttgttgcagcctggtttttggcatctctgtcctcctccatggctgatgcagagtcctgacgctcctcgagctcccttcacacatcccataaatttacacttcctcggattgcttgtcctctgctgtacatagaactctgtgtaaggtgatggttcttggctcacttgtgaatggataccggttccaaaatctttaagttgttgaatctgtgaagggtttttaacatttggatctaacaaaagcgatggcatgtatccactgatctcttagctgaagaagac

SEQ ID NO: 18907 - DNA, 1106 bp, Arabidopsis thaliana
ctaaagtatccagcaggccacagtgccggtggttgtcgatgctggcatcggcgttcccagccatgccgcgcaggcgctggaaatgggggccgacgcggtgttagtgaatacggcgattgcgtcgcggacgatcccgtcaacatggcgaaggcatttcgtctggcggtagaagcaggcctactggcacgtcagtccggaccgggcagccgcagttattttgctcatgccaccagcccgctgaccggatttctggaggcatcggcatgaaaaccttcagcgatcgctggcgacaactggactgggacgacatccgcctgcgtatcaacggcaaaacggctgctgacgtagagcgggcgctaaatgcctcgcaactcacccgcgacgacatgatggcgctgttatcgcctgccgccagtggctatctggaacaactggcccaacgggcgcagcgtctgacccgtcagcgatttggcaacacagttagtttctacgtcccgctttatctttccaatctttgcgctaacgactgcacgtactgtggattttccatgagtaatcgcatcaagcgcaaaacgctggatgaagcggatattgccagggaaagtgccgctatacgggagatgggctttgaacatctgctgttagtcactggtgaacatcaggcgaaagtggggatggattactttcgtcgtcatctccctgcccttcgtgaacagttctcttcactacagatggaagtgcaaccgctggcggagacggaatacgccgagttaaagcaacttggtctggatggcgtgatggtttatcaggagacatatcacgaggcgacttatgcccgccatcatctgaaaggcaaaaaacaggacttcttctggcggctggaaacgccggatcggctggggcgtgcggggattgataagataggcctcggcgcgctaattggcctttccgacaactggcgcgttgacagctatatggttgccgaacatttgctatggctgcaacagcattactggcaaagcggttactctgtctcctttccgcgcctgccgccgtgtactggcggcattgacctgcgtcgattatggatgaacgccagttagtgc

SEQ ID NO: 18908 - DNA, 956 bp, Arabidopsis thaliana
gatagagatatatgagcgtgtcatcacccagcggaaataagctaggataagattactccagtatacgtatgcggttatgtgtagcagatgttgcattggtagaacccgtaagtggatgtggatcatgtcacctcgccgactttagcagcaaactattctggttttaatatatgcatcaattgaagttaacaatacatgatatacactgaatcagaagagtttttgataccaatgctgtaagattaacaactgtttttggatagtaatagtcctgtgacctcccctctcacagtatggactggagctgctttatctcagaggattctaaatcatcacttcccgcatcttcttcagatgctgatctgtagacttccaccatagctttccctttatcaagcacttgagaaggaactgtttgtagaagactgtccagtgcggttaacgctgttccaagctgtgacttcatcaatacaacagttgcatttgaatctttcctcgacgcacgtagaaacaacgaatccagttcttccaatgctctatagaaggaaaagccaacataaattacacacgcaaaggtcatcatcattcattcaaacattgtcggtaccttaaacatcgatcaacatcatcagtggcggttttggagaaaccatcatctgaagcatactgagcaacctgaaagagtttgcattacacatttcatcatcaaacagaaaccaaatgagtgacatcaagtgagctttaaaaacttacagctcgaatgtttacacgaagagagctagcaggaccagaccgcaattggcgtctacacgcctcaaattcaggtttctcacattcaaaaatccctctccaacatcataaataaacatgagtgtaagttttatatagcaagagttttaagaacaaatgtgtacaaaaaaacagagaaattttaccgagatcctggatttgtactg

SEQ ID NO: 18909 - DNA, 521 bp, Arabidopsis thaliana
tttttttttaaacaacaagtgatgctgctactcactaaggtgaaggtagttgtctcttctttggtctctgctgatccttgattggtgagaaagattgaacatagtaaaggaatcatttcctgttcactttcttgcaactcttctggttttgtaataggaacactcgctgaagcaagccgtgatctacgaaaatatcagttaactggttagaaaagaatcaccacccccgctgtagggttaaagacaaaagagtgtgactagtttaacttgtattgactcaaccacatgatggtattaattttttactgcaatacagcaaactcaaaagggttatcataaaagctgagatttgtttctaccaacctgttcactccgtctctttcaaccaaatttaccagcaaacccaagatggcaacaagaaaatctaactcctgatcggtaaggtatttgtctttcttctgatgggacgatccgtcttttccactcactgaaaagctgagatctggtgaaagacggaaagt

SEQ ID NO: 18910 - DNA, 518 bp, Arabidopsis thaliana
tgagagcagaatgctctctctctgtatctcttgatatatacatagagtgtgccaatgtattgtttcatacaactcctgttggaatataaaatttgttgatacaagatcaaagttaaataagaagattcttttattattactttagattaacagagtttatctccaaggtcttaatcagatatcagattgtaaccacacattctcactcttagcaattatacaaagaaaggaaatagctttgcatacacatagtgacataactgtgcctgaagctacctatcaggccttggtgcatacgtttccttcacaaacccaaccatctttggactcgtcgccaccaactttcacagcctcatcgccgttttcttttgtgtcctcgtttaaagcacacttggcgtgaagatcaaagtcgcattcgtcgcaatggtaagaccatattgtcccttcttcctcacacttatcgcatgtgtaacctgaacacgagttagttctagctcatgttcttcatggagaacatg

SEQ ID NO: 18911 - DNA, 485 bp, Arabidopsis thaliana
  unsure (1)..(485): unsure at all n locations
agatgcatcggtttccacagtaaactgcttctgaaaatctggtagaatcaagacagggagttgagtgacagccttcttcaatgcctgaaacgaactagtggcagcctcattccacaagaagccatctacttaagagatctgtcaaaggtcttgcaataaggccatagttttttacaaatctgcggtagtaacccgttaagcctagaaatccgctcaattctgtaactgattttggttgaggccagcttagtaattttgatccgcagccactccttgtgaagaaatgatgtgtcctagataagatatcttggtacttccaaacacacacttcttctcattgacgtagaatttatgaaatttcagcagctgaagtaccgtctccaagtgcttcacgtgagtcttcatgtcggggctaaagactaagatgtcgtcaacccgaagcgnattactaagaattcgtaatggccttgatgggtttaaacgta

SEQ ID NO: 18912 - DNA, 621 bp, Arabidopsis thaliana
caacaaaataatcttaaagaagataatattaactgggtaatgacctcattccaaatacaatcacatattccagtttggatagatactaatgctctgacatttgaactggggagataaaaaacataatctgtagtaattctaagctgtttgaaatgtggtttggttcaggtaccctcagagagtatcgaaaatgaaagcttcagtcagatatatgttccacaaccccgaagacgtgaaatggttcaaggtaaaagagaaaaatagaatcgatggattgaataatatacgtattaatttttatgttaagctaaagctggcacaatgtttgtgtgtgcagcctgttgaagtatggtcaaaatgcgggcgtcgtggtcgcgtgaaggaaccagtaggcacacatggtaaggcattagtattaatagaagagattgccaagctagagttttgtttctggaattttccttatacatgtgagctgtgcaggggcaatgaaatgcatattcaatggagtggtcaacaacatgacgtagtgtgcatgaacttgtacaagcgcgcttatcccaagtggcctgacgtctgtaccacagcttctctgattcgaatttttaaatgagatgatga

SEQ ID NO: 18913 - DNA, 768 bp, Arabidopsis thaliana
gatcgtacaactgactttcacaaacatagtgttatctgcaggtgactgaataaagtttgctcccaagaagactgaagataatctcttataccactgtctagatgcttgttttaagccataaagagatttcaagagtcgacataccggtttagaaggcaaacttataccagttggtggagtataaccttgtggcagactcatgtagatttcctcatcaagctctccatgtaagaaggcattagaaacatccatctgcgttaagctccaaccagttgcagcagcaagtccaagtaacaatttcacactgccaaactttgccacaggtgaaaaagtctccatataatcaattccctcctgctgagtaaagccttgagcaaccaaccgtgctttatatcgttcaatacttccatcggggttatactttattgtgaaacccacttgcaacctacaacatttttaccctcagtcaaagattccacaatccaagtcttattctgctcaagagcatgaagctcttcattagccgctctagtccacttttcagatttcatggcttgagtaaaagcctttggctcagtttcaacattataagcacatatataagaatgaaaaagtggagtaagtttatcataggaaatggctgtggacataggatatggagtagtgatctttttaggtggaatagatgatgatggtgtttcaatggaagtagaagtagtaggtgaaagtgaagaaagaaaaggaaccgaattacagtgatactcagac

SEQ ID NO: 18914 - DNA, 409 bp, Arabidopsis thaliana
ctagaggatagaatttggagtagaaaaaaaacaatagaagaaatctattattcaaatgtccttagataaaattctaagattctgatctaaaacattttgtgttccataaaggttggatttgtgggacttgtcacagcgacagtgttcttgaaaactagattacacccaacaagcgaacaatttggcaatgagtatctatcttgccttttcttcgggctagtccacatgatgttcaacggtttctctgaactacctctcatgatatcgcgtctcccggttttttacaagcaaagggataactcctttcatcctgcttggtcatggtctattgccagctggctcttgcgtgtgccttactctgtccttgaagctgttgtctggagtggtgtagtatacttcactgtgggac

SEQ ID NO: 18915 - DNA, 853 bp, Arabidopsis thaliana
tgttgtaaaatattagaattgaacactacaaagaattattaaaaactgaaaaaaaaaattattacagtcatattttacatataatatttataatatatatatcactgaatttatataattattaatttatactattgatgagaccatatagttatataatattttcaaaatttttttttatcttattaatttatcgatttgtatcaatttttacattagtcctaattcgggattgaattttttcattaattgataaaggtaaatatatattttttgacaaagtcttctaaattttaattttttgacaattagtaataaatactaatatccaaaaatctaagaaaataatctgagattattctacgaagtgcaattggaaactaaacatttatagcaaaaatagtttcaaaatttttgtgacgaattgtgtcagcgttatactgtagtttctcagtaatacaatggattcttcgcctcaacgaacaatgttaagtcaagaaatatccaaacccaataacttgtacttgacccgacacacccgagggatcatcacaggagaactatgcttctgatctcggtttgttaagtttggtttgggagttacccgttcttgaattatgtctaaaagcttgtcttcctttcttgggtgcttctgactcaaccaactccttgagcttctctagagctgaaatgagaaatgacttcatcatcatcattaccaaaatatagttaacagattcaatggcctctaatgtctcctatgcactgacagggttccataaaactctaaatctacatttgtaaagtaatgctctaaatctaaattcacatgctcattaagaggtttacaact

SEQ ID NO: 18916 - DNA, 556 bp, Arabidopsis thaliana
atatgcaggcaagtgtattgagaggaggagtgtagtagtaagtaagacacacacccatccaaaagcaaagggaaggttgtttcctgtacccaaaggtacagtggcaattggaggaggatgtgacaatttaaggtcacatacaactccaaggagccacccagcagtgccatcacctcctgcaacctaataataatggatggcattagatgatgtttcattcaattggagagaaagaaacaaagaaaacaacattctcttacaatgatttttaatttctcccgaatctgacgagcgaaatcatcatctttgagcctctccaggttaagatagattctgcggacacctttatctggagtctcctggtcgagatcaaagacctgattgtgattgagaagagatcggtaggtgagaatgagttcgccacccaactgaccaccgcttttggagttgatgaagacaaggacggggctcgcaggtgtaggacgactctcctcctcctcctcctcttctgtttccgccgagaggacgtacgtagggatgtagactccttgagaaa

SEQ ID NO: 18917 - DNA, 648 bp, Arabidopsis thaliana
ctgtataataaacttatttttgtttttttttacagatgtaagaatatttttccgcgacctttgttcaagaaatttgaaagtcaatgatgttgttcgtatgaagagtaatattgtgctcacactttgtaatctagagaagatatttccaccatttgtttttgatgttatggagcacttgattattcacttaccaagagaagccgaactttgttggccggtgcagtttcgatggatgtatccattcaacgattcatgtttcatcttaagaaaaaggcgaataacaaagcaagtgttgaagggtcaattgtggagcaatttattaatgaagaaattacaaatttcagctctcaccactttaatcccgaatcgactattgtgtcgagtagtgctcagagacgacatgctagtggtttgcctcaacagtacatctactcgtacgacgacgtgccgacattaattagaaatgtcggaagtggaagtggaaaatcatattatgagtggttaaccgatgatgacaaccacatcgctcatacatatattttgctcaactgtgaagaattggcaccattcaaaaggtcattaataatttacatatatatatatatatatatatatatttataaacgtaaaatgaaattttaattcttg

SEQ ID NO: 18918 - DNA, 684 bp, Arabidopsis thaliana
caatcaatcagttttattaaacgtttgatgaaacttaaggaataataccatatgttcatgaatgacatatacatagtttcagtttatgctgtatgagaatataaaatttcattccaacgcaagattctatctttcagctacaggtttatgaatattatgattaaataggcaaacaagcaaagtgcatatgcatataggagaaatagttttatatgttatactattatatttcataataattgtactacttggaaacatatgcaagttccaactacaaaatgcctgtaattcaacaatgattagggtgctaaaattattttttattaatttcatgttgtcagtatgtaagtcactctttctcgttacaatttttattaaaccaatcacgttgtacacaattagtgaaactcaaaaatgaaacacaaacatacctaatgaagaacaactgcattgtatgttgggtctactcattgtcattggatccaacctctgtgttagcattctcatgtttactccatgctttctaataaggtacgggagcatgattgttatgtcttctatgtacttctccacctgctcgtctttcaacacttctcttttgcagtctaatacaagcacttcccaattcttcaaatctacgacaagcccaacccaatgctgcctctcgaccagcatcgagcagta

SEQ ID NO: 18919 - DNA, 1291 bp, Arabidopsis thaliana
tctagtacacagacgatactgctgaggtcagagataagaaaagagttgagaatggtgtcgcagatcatttgtcacgcattaggatcgatgatgatgtccctattaatgatttcttgccagaggagaacatatacatgattgatacaactgaagaaggtgactgcaaatgtgatacgttgcagaatcgagcttcagtgtcgatcgagactccttcaatgtcgatcgacactcacttttaagaggaagttgatattcgcagttgcgcgatggtgtcgatcgacaccactaaaactgtcgatcgacaccctccctatcagacaagaaattggtcaccaactgagaactgcgccaccacaacggttgagaaggactacccatggtatgctaacattgttaattcctagctgcagatgttgaaccggataatttcacagattacaacaagaagagattcctgagagagattaggcgatattattgggatgagccttatctctataagcattgttctgatggagtttataggagatgcattgctgcaacagaggttcctgatatactatcgcattgtcacagctctagctatggtggtcattttgcaaccttcaagacagtatccaaagttcttcaagcagacttttggtggcctacaatgtttcaggatgcttagaagttcatatcgcagtgtgatccttgttagggaaggggaaagatcaccaagcgtaatgagatgcctcagaaatttatcctcaaagttgaagtcttcgattgttggggtatagatttaatggggccttcccaccatccaacaagaatctgtacatcctagtagctgtcgattatgtctccaagtgggtactagcgtatcgctagtccaaggaatgattgagcagttgtcgtgaaacttttcaagtctatcatcttccctcgttttggagtgccatgtatagtcatcagtgaaagaggtaagcatttcattaataagattcttgcgaaattgcttcttcagtatggagttcagcatcaagttgctactccctaccaaccacaaacgagcggtcaggttggagtttccaacaggcagatcaaagagattcttgagaagacagtgggaatatcgaaaaaggggtggtcttataagttcgatgatgcactatgggctaacagaacaactttcaaaactcagcttggaaccacaccttttcattttctctatggtaaagcttgtcatctttgagtggaattagagcacaaagcagcttgggcagttaagatgatgaatttcacatca

SEQ ID NO: 18920 - DNA, 966 bp, Arabidopsis thaliana columbia
atccccgatgaagaacacttgacgtcgaagaagctgacctcaaagcctcagctaataggtcctcccatattgttgtggtgattccctccattgctccaccaattcatttgctccctctcattgttgttatttctcatgttctcttcttcttcttcattgcctgtggaaagttttagagaaacatctgaggacgtgttgttaccgggcatggagattgaaagatgacaagtggatgagctcattggactggaggtagagtctgatgatcgtggccaatcgtcaaagaaatgcctcaagatgtgaccatcgtctgatcttccattgctgaatccactgttagcttcatatggcctcttgttgttgttgctttcttgtttcatctctgaagaacaactgtgacagagaggaataaacataaacataaacattgtcaacaaaaagatccaacatttgaacaataataagtagactgatcaattcaacaaaatggttagagaaataatttaatcagtcaaatgtgtgtgttaataagaggaagtggttgcagaatctgagagctttattttgtttggcttctatgcaggtttggtcagctttcactgaggtcctaccatgtcattatttcaaatacaacataagtatacatatctctttaactttctctctcttttctatttctatgattgaaaagtctcacccaactagtaaataaaattagattctatcaaatccaactgttatcattatctctcaacaaaagaaagaataatgtttttatcacaaagtatgtatgataagtctctcttgtcaccctattgccaacattacccctttcttcacagcattacttcacagtgaaatcactatttccctaacaacaatatttgtaattaaccaaatctactaatgactttaattatacagagtgtttgtgtattcttattgtacctttgttgatgactaagg

SEQ ID NO: 18921 - DNA, 534 bp, Arabidopsis thaliana
gacagcgctgcaagagctgcttggtttaacatcagacggtacagttctagctggagatcagacagacgcttgggtctcattctacctaatcgagcacctgctaagttatagaggatgggctaagggacttaagaaaccaggaaggatggttgtgggaggagttgtgaccccaattttgagagcatgcaatgtacctctacattcaaagccaattcctccgagatggattgatatgcaacaccttatcaatttcaagagtttttggtcgcagcagaagaatggcctatacaagtataggatcgatcaccccacagaaagacaatctatttttctcctcccaaatcccgcttccactttgatcagagatggtggcaacattgagttttgcccaccagtggagaacctctatacttcaagtgatgaagctgtgccgatggaaggagtgaatgatgatgaggccccaatccatcattcagataatgaggcagaacctatggacgtgtcttcacgacacaacagttttactgcgaggag

SEQ ID NO: 18922 - DNA, 466 bp, Arabidopsis thaliana columbia
  unsure (1)..(466): unsure at all n locations
attctcatcaacctcacggtatgcaagtactagagtccttagacctgcatctgcatattggtttacatgttcttgggtttttgcctcgaattgacgaccgttctttgcaagtctttcgaacattacactacacagagaacaccaaactcaaagttagattttataatgaaccaaaatgtctanaaaatgtctaaactcgcttacttatcagctcccttagacaacagcaagagcttcccgtcatcgtctcttacaataacagacattctcttcctagtgctattgaattcaagaacgtttagtaacctataaaccctgcaagaacagaggaggttttgagttccgggaatcacagagactacatctgattgaaaagaaggctaaaaacgaacctttcaactttctctcgcgatacaagatccagttcacgaaaagagatcccattttgtgtccggttaaagactcg

SEQ ID NO: 18923 - DNA, 718 bp, Arabidopsis thaliana columbia
tccaggatcccctcgaatacaaaattaccagaatgaaacggctcgtcattacaattcaaatgttcggcaacgaagattccacgaaggagatcgggtcctctgaaaagttttccagaacactgccgaaccgaacgctggaaaactcgggacgaactgggaaggaccatacttaatttctacagtcatccgacccgaggtatatgagctcgctgacttaaacggtaaagccgttccaaaatcatggaacgcaatgcacctaaggaaatactacaactaaatccaaggtgactaaatttgaactacgaggtggcttgatccctgaaaagggtacgtaggcagctcgtcttcggacgagttcagctaccccccccattaaaaaaggggggagtgggtccgtatattcatactcccattttattatcttataggtttccgaaccgaaacaaataaaaaattcaactttttactcatctaatacaatgagcgacggctcggagtatctattacaccgcttcggttacagcgcacaatataaatattcaagataaggatctgctcggatgtttttccgagcaggctatgaattctatcttctgaaacccggttatacttaacaccaggtgcccagctcgtttctaaaagcatggtcaggagtgaatacgatcgggtcgcaaccgagagactcactctatacattttttttaaaaccaattcagaa

SEQ ID NO: 18924 - DNA, 544 bp, Arabidopsis thaliana columbia
gggtcgatgaagaacttatctcctggagaatacgaggtggctacaataccttccatcattttgatagaaaacaactgaagaagaatcaaaacagaattaatgtcagaaacctctagtttgcttacaactgaaagaagaatagagaacttacagattcattaattgggccaaagatttcatctactttcccaatctgagtcttgttctctaggtagatcggagcgttaaaatgaggaatcttctcctgtgagagtttggtcacagcatctccctcgcaagcatgaacgaaagttgcaacctctgtaaaccaaaagagagaaacctcatcacaaacgaacaaaaagaaaagcagtcagggaagtatatacatcaactagcattaaaaaccatatatactcaactcaaagctgaaactcggaataaaagacacacaaacccgtcaaaagcatcatacttgtaaactagctcaagggtaaaaaagtagcatgatacgattcgtcaatgagaaatcaatgataaaaaaagaaatgaactttagaacttg

SEQ ID NO: 18925 - DNA, 575 bp, Arabidopsis thaliana columbia
tagagaaacccggtttaagaacagacaagtcttgggcttgaaattagattcggagcccaattttgattttggattttaaattttagacccacgaaatttctcccgccttcccggtccacaacttcgattcaaatcgacttttctctttctctctctctctcggtgactgttgcagtactgatttgtgttccctctaacctaaaatggggcagagaggtgaatcaattgagttccgaagtttaaatcgttattgggtttgcttttaaatttcgatttctgtgtgtaaaggtttgtgcgtttgtggcagttgatctatggtctgaggtcattaaatctgaggaagaagacggagatatacctaagattgaagccgtttttcagagaagaaagaagcctgataaatcctcagaagctgtcaatttgtaatttttctgcttcttataccccaaaatttgaaatgtgtgtgtggttatttggctttgtatctgataagtttctttggctgtgtatctgagaaatagtggctggttggtgaaaggggctcgtactagttcggtcaatggaccaagagagat

SEQ ID NO: 18926 - DNA, 549 bp, Arabidopsis thaliana columbia
caagggtcaatgaaaaatccttaccaatataagcgattttagatttgggcagatctcaagaaaggttggcaacattttaaacctgtagtcgtagaactcaacatgcaagaaatatagattacggaatggggaggtagtggttcacatcttaagtaatcatagatgatctgcaagaataaaaagaaatatgaggaaaaaacttataagataaagttaagcattcaaatatccaattcaacataggttaccttaagaataatggaagagatggtcatatttttgacgctagagatcccaacaagaaaatcacgaatcatattcctcgaatcgaagccggaagacaagttaatatcaatatccaccgcaacaagggaaccaggattttttattatgaaacttgaagtctgatgatcactgagtttcagatactcaagcctgggagcatcaattacaattgatagatctttttcagccaaagcgtttcgcacagcatgagtaaagacaagcttgggcgcaacatgagtgaagctcagtagagactgagaagac

SEQ ID NO: 18927 - DNA, 527 bp, Arabidopsis thaliana columbia
tgaacgaactgatgccataatcaagtgtcaaaatccacgcacgacttctggaagcatggtaataactattaagaatcgttacatagttcatccttagaaaccagccatcaaagtttagattccacaggattcaatttaaaagacttgattttttcttctttatgatactttgttattttgtgttaggtggtcaatatggagtggggaaacttttggtcatctcgtctgccaagaacttcatatgaccttgagttggatgcagagagtatgaattcaaatgacatggtaatattttgcgaagtttcctttctcttgtttcgttttatcatgttttcaagttattttttatcaggtaatcaatttggtgggtattgttttatagggctttgagaagatgataggagggatgtatctgggcgacattgtccgcagagtaattcttcgaatgtcacaagagtccgacatctttggacctatctcatccattttatccacgcctttcgttctgaggtacatttccgttatgt

SEQ ID NO: 18928 - DNA, 386 bp, Arabidopsis thaliana columbia
ccatccccgaaaagttgctcgctaatgtaagccatggaccttaacatgggttcaagtgtgacgctagacagctgaaatttgacatccatgtctgctgagggaaactttctgtaatcgtgcaactgaaaacatcatgaaaaataatcctcagtatagcggtcaactactagtttgcaggaacgagcaagactattaatggcaacaactttgatgttcctacactatagccagtaacttttccgaaaaggcgaatgtcaattgttcaaatcttcaagatcattattcttacaaatctaatctcttttagataaagcatcccatcagaccaactttctgtaaaagttactgcaaaaccctacagaaaagatttactggttcatataatg

SEQ ID NO: 18929 - DNA, 549 bp, Arabidopsis thaliana columbia
ggtgatactggtttagatggggcattaagtgatactagtttagatgttagtttaagcggatcgttacgtaatgacatgttgaataggaagctagaagatgaagatcatcaaagtgggccttctactactcagaaggtgtcaccagaagagaagattaatggatctaaacagattcagccacttctgtttcggtatggtcgaatatcaggagaggtcatgagacgtaggaataggactattcatatgtcaccttttgaaagaatggcagatgaggcttggatacttggatccaaggcttgggaagatgttgataagtttgaggttgataagatcaacgagagtgcttctatattcgaaggaaaggtggagtcatgtccttctcagatctcaatgaatggagatgacttgaataaagccaataggatcatgttgcttccctgtggtcttgctgcaggatcttctattacaattcttggaactccacagtatgctcataaagaatctgttcctcagcgttcgagattgacaagaagctatggaatggttttg

SEQ ID NO: 18930 - DNA, 529 bp, Arabidopsis thaliana columbia
gaatcccagaaaatgaagaagctgtggaagcaacaatctgaatagggaaattgcattgtccctgagatatattctttgtggtaatggtggccaaaccttggaagatacaagcatcctcatcctggttctttacttgaaaatacatgttaaacgcatatgaagcgttcccatttgcatcaagagtattgcaagaagacccgtaaccaagcgcagtgcaatccgaaaaagtgcaggcgtaatctatgttagcagcgagttttgtcaaatctttggcttctgtattaaacatacaccacttcttaggttgatacgtcacgttctcggcaccaatcaacaacttgttctgtccttgacctgatagatctataggaaactttggttgcccgtcgaatttgaatattccccagtggcgttcaaactctcccggtgctatacttttcgcatcctcatcaagtaatccaaacaagtatacctcaatgtaggttggtctcagtggagtgcatctgttttcccaagccttggtaaaaga

SEQ ID NO: 18931 - DNA, 245 bp, Arabidopsis thaliana columbia
  unsure (1)..(245): unsure at all n locations
ccccgggatccgttgtgcttatcggtcgtgttgtgcctcgtcggtgcgtcgactctacgcgtgctgatgatggtggctccctccgcagcggtgcccctagtgtagaacaagcctttggcgtgagacatcggttgagtcccccagtgtactggccggtaaaatcttaccantanagccaggagcagncagagagcaagcaaatcgctctgaggcagcgagacnctcccttgggtgacgacgtcgtt

SEQ ID NO: 18932 - DNA, 502 bp, Arabidopsis thaliana columbia
gatatccatgcctatccaactaaaaacaaaagtagatcacttattcaatcattagtctacatactaataacggagatgataagaaaaagtttttccatctaagaaaagccaacattttcttgccacattcaatggtgtacgttggtctattaagaagcagcattgtatgatcacggaagaaactttttatataacatgaagcgagcagggaaggaaaaatcccaaaatctagggtgaaagaatattacagaggacataccgctgaaaccactccatacagcggacgaatgacatgatcaaggaatgatacaccatcatcagagccacgactatcgactggcatacaactctcagctgggcgagcaacctgctggcgtaagatctcatccatttctctaaccatctgtacaaaataatcagtatcagcgcaaaagaccaaacaaacggcatattatgatgaaaatgaaccagtagcaagtcagagcggtaagtacttaggaga

SEQ ID NO: 18933 - DNA, 491 bp, Arabidopsis thaliana columbia
caataaaatgaagaaaacaaaaaggatagacaaatgtgcatgccttctgctccacgaagagtagcaagttcatgttgtggtgaaataactctgtttagcagcattgaggcatcatcccatgaagcatatcccggcatgtcgccatttcgcgtagtagtaaaagacgtggaaacttgaagtggcatttgagctgcaagaaaatgtgagttaaaaactcaactctataaccaaactaagaagtattataaaatattcgaaccgttctttgatgccttttgaggatacggatgagctgctttgcgcttaggtcgaggaggtggcacatgagctaatgtcccgtttttctgaaccttgagaaagtatttttgagcatgactccttatctgcagtacaaagtcaaataagttgaaaacattgccacaaagtaactgcgaccaaaaatgcagagtaagctattttaaaacctgaatcacagtctttgaaccaacaaa

SEQ ID NO: 18934 - DNA, 580 bp, Arabidopsis thaliana columbia
  unsure (1)..(580): unsure at all n locations
tgtctgctcaaatgcagaaacaaggagttagaccgagtctcccgtctccccccagtctccccccggtttgccacacttcagcacgtctacaatatggtagacaggtctatgctcatttggtgagatgtcagtctgatgatgatgtctatcttgcctctctcttcctgangatgtatgtctaatgtggtgcagttgtaacacgatactagtattagacacgttttccttaaaggacattatcatgtggaattcaattatttctgggtatgagttgcatggtctaggagaggaagttgttaagatttttcaggagatgttattatttggtaatatgttaaagaaagtgagattagttgtaattctgatagaatgtagttatgttggaaaattgtaggaagggattgagatatttgaagtaatggaattaaagttttgtgtgaatgtaanggttgagcattattattggatggtggatatgattgggtgtggatgataggtagataaggtaatggagttgatggaaagtatgactattaaggtagatgctatagtttggggatgtctgttaggagagtgtaaa

SEQ ID NO: 18935 - DNA, 566 bp, Arabidopsis thaliana columbia
  unsure (1)..(566): unsure at all n locations
aggtcaagattggtgatctaggtttagctgcaattgtgngggaagaaccatttagctcactcgatcctcgggacaccagagttcatggctcctgagctgtacgaggagaactacactgagatggttgacatatactcgtatggaatgtgcgttttggagcttgtgtcactcgagattccttatagcgaatgtgacagcgtcgccaaaatatacaaaagggtgagcaaaggcctcaaaccagaggctctcaacaaagttaatgatccagaagctaaggcatttattgaaaaatgcatcgcgcacgcgagagctagaccttctgcagctgagctcctctgcgacccgttctttgatgggatattagatgatgatgacgaagacggtgaaaacaatgacaacaatggagctggtcgtattgttgtttcttgatgagtgtatacaatgaaccttggttaattagatgtttggttatcactgcacgctccatttcttccaagcctgcagttgttagtaaagttatatagtaatgttttctctaatagcttttgactatacagaagaagatg

SEQ ID NO: 18936 - DNA, 485 bp, Arabidopsis thaliana columbia
  unsure (1)..(485): unsure at all n locations
nnnnnnnnnnnnnnnnnnnnnnctaaagagcaactttgctatcgttcgtgagcttgagattgattttcatagcggcatgaccgtaataactggcgagaccggcgcgggtaaatctattgcaatagatgccctcggtctttgtctcggtggtcgcgctgaagccgacatggtgcgtaccggcgctgctcgcgctgacctgtgcgcccgtttttctctgaaagatacgccagcggctctgcgctggctggaagaaaaccagcttgaagacgggcatgaatgtttgcttcgtcgcgtgatcagcagcgatggtcgctcccgtggtttcatcaacggtacagctgttcctctgtcacaactgcgcgaactgggtcagttgctgattcagatccatggtcagcacgctcatcaattactcaccaaacctgagcaccaaaaattcctgcttgatggctatgcgaatgaaacctctctactgcaggaaatga

SEQ ID NO: 18937 - DNA, 547 bp, Arabidopsis thaliana columbia
ggaattttcttcacttgtttgctttccatatcatctctcactcgtcctacatctttccaccgtccctgcgcacataaacattcgatagcaacacaaaatcaccatcattgttaactcccatttcctttatttccctagaagcaatctcagccatttcaacatcactataaatctccgaagctccaagaaggctctgcacaaaacaggatccggaatcatcgacattgaacatatgatatcgtgagcttctctcaaccttcctgcacggcttaacagatcaaccacacaaccatagtgcttcatgttacgctcaacgcccttacaagccatattattgaatacagacaaaccatactccactaaccccgcatgtctacacgcagttaaagcagctaagtacgagacatcatcaggcttaataccattatcctccaacttgtcaaaaatctccaacgctctatgtgcttctccatgcactgcaaaccctgtaatcatagtgttccatgtacaacactcttcttaccagtgaattgttcaaacacttgat

SEQ ID NO: 18938 - DNA, 350 bp, Arabidopsis thaliana columbia
tttatccttgtggaggtgacacatctcattgggcgtaaagaaccccaatttacttttgggagccgtttcttttcccgtcccccaccccaacatatcgcttgacttctagtaattcggaagaatcaacttacctctatcttcttcattgatctagggaaagctaaacatcaagtaagtggttgatggaaataatgacactttcatatgtgtaataattagttatatgttcttaatattagtactattttgagtgctgcgtaacagaaatatttaccgctccccatgttgaatgggaggatagggtacttgctcaagggacctccagaatagagaggaacaggttgtgagtt

SEQ ID NO: 18939 - DNA, 553 bp, Arabidopsis thaliana
tgcatatctacaatcacaagacacaaggaactaaggaagatacacttaatgaccaaaagtctattaatcatacattagaaaacctaagttagccatcacacagagtatattggcatccattacttcaagatttatgccaaccatttgatgagtgcttaatttcaaggatccttttctttgcgatgattcgattgcgtatgacctctttggattcaacagcttcatcactgttactaagcaccatagcacatagctcatctaaagctagcattgaaaatggctcctctataagaacacccacctgcagacatttcaagcaccaacttaaagagtgataatgaggcaagaaaaaaaaaatgtgactaatctatgaacgagaaaaagttaggtacttcttcaatgcagaagagagaggcagcactgatgaaagtagcagggactacattccagtggcaatcatcccagagaataacagggagtgttagatgccataagactaagaacctcgacgttagtcgtgtgtaggaaagtggaatcggaattccattagttg

SEQ ID NO: 18940 - DNA, 820 bp, Arabidopsis thaliana
cctatgttttaagataaagaaggggaatgtacttgctacagtagcgatggctaggcctattccgatagacgcataagagaaggacataaccgcggcgatgatggataggaaagagagcttgtggaagttaggaagctggctcagaatgatctggacgatcccaaatgccgccatgtatggataattcgatacagaacatttcgctttatgtcccttgacatgataacaatttgatttcccaatcgctctaacgaagacgtacacaaacaccaatcagacaattattagtaattccatccagaacagcatgtcagtataaccataacagaatcatcgagataaatcagaatctttgacttacactaagcttatggaggcagtgatggtgtaaccaatagtgacccctacgagattcacgtactgtgccactccacatagctgaacctttttaccacctgcgttttatgttattaaagaagaaaaatgattactcttgtactactatcaaatactaccaatcttttggtcttatggcaaagtttctaaacatcccgcataattccaaattttcaacgaggggtcaacaatcgaatttataacattctttaacgggataaattgaattgactatgttaccaatcctaatcaatttaatttattaactaagttatgaaagaatgaagattatcttccttttttttatatagattttgataattaattcatatcttcccatgaaagagcatgcacacttggcaaaatcgtaaatcatttgtaactaacaaccatatttttttctttcattgttcacaacaataat

SEQ ID NO: 18941 - DNA, 520 bp, Arabidopsis thaliana
ctttcttccaaacagctcaggtaaacccagatattttccctgacctccctctttttggatactcaagtctcttttagctctctcttttatctcattctgagtttttgaggagaaggttatagaggacttatcttggttgatttttttccttgaggcttcttcatattttcccagtattgacatgagtttcttgcagctttgggtatcagaccggtagaagaacatcgtgttatctgcgaagaggagatggttgactctcgggctcccaagagccactttaattccaggtaagctgccatttggttgagctctgttgcataatcgagataaaacttcgctacagagaataaaaagatagggagaaagagggtctccctgtcaaatacccctctcaggaaccacatacaatttagcttgcccatttagtagataggaataggtgacacttgttatgcactacataacccaagtgatccatctgctatgaaatcccaatctttctaaaacagctttaataaag

SEQ ID NO: 18942 - DNA, 692 bp, Arabidopsis thaliana
tcccgggttagaaagatgatggaggggtggttaaagattctgccaggagccgaaatccgtcggcggcgctgatgactcgtgaccttcttggaaacggcagaggaggaggaggcgatcggtctttagagcttgacctcgaccttcaagtccccaccggttatgaagaacgcctcgacttgaaggttcgtgttgaattgatggatcctctttagtctttcctttagtggttttggctgattagatcgtatcattgttgttttttttaacagtcagggaaagtgtatttgcaacgatgcaattcaacgagctcgtcgtcaataacaaacgcagaccaaaccaatcaaacagtaccaacgtttcaggatttgaattttcctcctccgactttgaacaattctcctttgttgaacctcttcgacgatacaacgccggaactgaagctacttccgtcgtctcgttcttctcgtccgaacactagtaatttacagagtgtatgcacactggacaaggtgaaatcagctctagagagggcagagagagatcctgctatgttcaagaaacgtcaatcaccggatgatacggtttacgatcattataggacggagcatgtagcgtcaccggtggttgccggatgtcctggttgtttacagtacgtgttggtgatgatgaatacccgaaatgtccgaggtgtg

SEQ ID NO: 18943 - DNA, 608 bp, Arabidopsis thaliana columbia
tatgcataacatacctggataatgattcaacaagagtaacagctgatccattataatctgttggcaggtgttcaagctggaaaatcagaaatctttgtgtcaagcttctgcttcaaaatcatttatgatgctatatgagctagtacaaagttaccttaagatttccaagctcactgagggagtctgtgaaacttttagttagaggctttagctcatcatgctgttggaattcagaacttagtgtaatccaaacccagtagccagaattcaacaacttaaagtagatcactaaccggaaatgcataagtcatgtaattgtcatacgcatgatagaacctgtaaaaacgagatttgaagggttttcaatagttgctaaacaaattgggtcatgaagaattaatataaaaatcactgcttacatacatctcgcgtactttctctcgcatttgtttcttcttgacctcgatatgctgcgatgaagggtcgacgacgaagaaagtgagagaaataagcaagcagaggaagagacgcctaggatggataggacaagacatgatgacgaagctgtgtaagaagcaatcaaatgaaaagagaggaaaggagaagaa

SEQ ID NO: 18944 - DNA, 537 bp, Arabidopsis thaliana
caacagttgtttctatgataacttaattgtaggagattatggttagtatagtttcaggacaatgtatattgtgtagtttggaagagttgttatcccaattgcataatttgggagtgtaggtcatttgactaatcctctgatgttgagagtccaacttgtgatgactagaatctgaataaactgatttggacttttgatttacagatgttcagtgtgccttggggactatcaaccaaatgacaagcttcaacagatcccggtatgtaaacacacttttcacatggactgcattgatctttggctcacatcacataccacttgccctctttgccgcctcgctctaatcccgagtcgttcccgtcaaagccaagatgatcctgttccgagtctcgtaagccctgatgaagaagtgtcgagtcaaccagaatctgagccagtaaaccacagagtagtgtcgactcaaccagaatctgagccagtaaaccacagtggagtctcgagtcaaccagaatctcagccagtagtaaccacagagga

SEQ ID NO: 18945 - DNA, 1447 bp, Arabidopsis thaliana columbia
tatttcaaactgcaatctctacaacataactgcagaagaggaaaatgcatatggaagaataaatagatcaagaacgtgtacactcaatgccatgacaaatagccaaccaaacaccaagcagcgttaagcaaatagctatatcaatggcaagaacaatcttcacttgacgccgccacttcctctcaatgctctgagagccaccagatcgtccccttcttggaacatacgttgctgattcagatgaagcattagaacattctgttacgtttcctctatcatttgattttcggtgttcctctatctcaatacctcttagtgagtgcgcatgatctctccctttcttcttatcttgcttgttggatcttcctaaaagaggagctttggagttagatgcgtagctttgttcagcaccatcaatggaaggtgatgataatggaagacaagtgtgatcaaactctaatgaagctatgagtcttcggacaatttggtcttgaacattgctaaaactgatactaccagagaaacttcctctagaattcttcttattagcttcttttaactcatctctcagtttttcaagaaaatcaagaacgctagatttcttgaaaacatcatcaacaatggcgaaataaacgaagtcatctttcatcaagaatccaaaagtcttcttacccctcgtttcgaagtaccacttgtgaaaaggtggagtcttttccaagcataacgctgcaagactctcgttgttgcggtggtctccggcattgttgtaagcgtacataatctgattgtctcttgagacacaacagtagtgaactgtgttttggattgaaccatgttggaactttagataaggggcagcgatgagcaagagagtttcaaagaatatgtaagttatgaagtcaagtctctggtttaagatccttatctttgccaagaaacaacgaaaggaatcttgaaaaggactaaacagaagatcgaatgttagagaaagaaaaggtattaaagcagagagagaacaatacaagcttctcttacccaacctttgactctgctttatctttttctcttttctaataccttatcttcttgtttttgacttttttcagactaagaaatcgctaattcaggtaagctaagatcaaccctttttgaaccagttttgaatatttgattatctgctgattttgtagcagaccatactctttgtttttgcgcgcgagaaacgcaaatgataatgggacaagtttccctgagaagaagtatttgccttccaaaatgtttgtttctactatggatcaatctctcattttcactcctagaaaatgtactagtgttacaagttacaaatgcaagaaagcagcaagctttacgggatatggactgaacacaaacggttaagcttaaccagttctacaactacaacaagcactcgatgtcccgatgttgt

SEQ ID NO: 18946 - DNA, 542 bp, Arabidopsis thaliana columbia
ctaacatgttattccttttcgtaggtatgtcaaccgtgccttgtatcttttgcatctaacatgtggaccatcacatccaaatacagctgccacttatataaacgtagcaatgatggaagaaggtatgaagaatgcccatgtggctttaagataccttcatgaagcattgaaatgtaaccagagactacttggagctgatcatatccaggttggttttcttaagcaaggacattgattgattgcaattttatggcctctttcaaaccgatatccataaacttaaaaaaatcttctgcaatatcctaaccacggaaaacgaagactaaatagtaaaaatagttggttgaaagtcaaaccatatgaaggttatggatataggttttgacagtgaattcccattctatgaaggcttaggcttaataagtaaaatttaccatggaagctaaatgatacgctaaaacatgaattcactactgttatgtttcttttcagactgctgcaagctaccatgccattgctattgctctttctctgatggacgc

SEQ ID NO: 18947 - DNA, 463 bp, Arabidopsis thaliana
gcgcttattccagttttacctccgtagatggaatcaaaaaccacagaggcacgtgttcttggaggatcgagcgctatcaatggcggattttacagccgagctagcgatgagtttgtgaagaaagctggttgggacaaggatctggttcaagaatcttatacatgggttgagtctaaggttgtcttcatgccggagttgactcgatggcaatccattgtgcagttcggatttcttgaagcagggttttatccgtataacggatatagtttggagcacacgcaagggacaaagatcggtggaagcatatttgatcagtgtgggaaaagacatacatctgcagatcttttgggatatggtaaaccaaattgcatcactgttcttctaaacgcaacggtaaagagcataatctttgatgctaacaagactcgcgcagttggagttaggtttatggagagtgatggga

SEQ ID NO: 18948 - DNA, 624 bp, Arabidopsis thaliana
ccagcaaaccccatcttctaacataaactaaccaactagaactggggtttctgaaactagacaataatctcatcattttagactttctagttagtataaaatgatgcataaatcaaagatttgcaatgcatcaaactgcacataaaattaagacccaaagccaagcgttaatccaatattccattttactgaatcagatatgagactgtaaacactaatcatgcgaggaaaagatttcagaaatatagtcatgattgatttatgaatgaataaaaacagtttgagagatcatgccctcagagcataacttcatccatagaaaaaagtaatctaacaggatcaaagcaaaactggtaagaggaaaagaagaaaatttattactttgattaccagttacttcctaacttgaactcttatctttgctttcatttccaactgcatctttcaccaactccaacggtctttcatcaatcacttcatcgattattccaaacgccttagcctcttcaggagtcatgaaatgatccctatccatgttattcgcaaccacgtcaagaggttgacccgtgtgtttgacatacaattcatttaacgcatccacacacgaacaatctgttttgtatg

SEQ ID NO: 18949 - DNA, 733 bp, Arabidopsis thaliana columbia
ggcccttcctcctccgccgtccctccacaccgtcggcgcttctccaccgccgcaggtcacagcctttctcaaccgaaatccgaagctgcagcccctcaacctcctattcatcgatttccatggccaaagcatccaaaagagagaattccttctcaaagggtttggagaaagatatcaacagggaattcactaaaggtgactatatcaatcgccctttttctccagattgggatgattaagatactctgttctataacgcctggatgaatgtagaaattttggctactcggtttgtggatttcggtttgatgcagcgtttgcagatagagaaatcagttttaggactggaaaatgacataggtttgggaaccatttgttgtaggcagtacgatttgtatcctgagctggttaaacaattcatggcctctgttatggtaacttatttgcatgacaggaaacgcaacgctcaggaaggagctcttatcttcttcattcgcggtgttcgatacagtttaccactgcgagacttgtgtgacatatatgggtttgacaatgatctcactggagtttccatgcctggtccgtttaaggattctcagattttctgagcaagtttggtaatggaatctatgattccaaggacatagttcactcagagatccgcaccctgttctgcgatatttggttaggttgattagtacacactgttgtcaagatggagcctgcaagatga

SEQ ID NO: 18950 - DNA, 1416 bp, Arabidopsis thaliana
ctactcacaacggcacaatttttatttttcaaactaccttggagatgatcaagtattatttcttttagggctaaaattctacttgatcaaccttattatctcttacttttttggtcaaaatctttctcttagggttataacaagcgaaatagagtgtgaggaaggattaggtgtttctcgtctgtgcaagtggacatttgaggataacaaatggttgttcttcattgataatcgtagaggttgtcgaatctagaagtcaaccgatgttgtttttcaagcaactcagctgtgtgatacctgatgatgagagccttgccattatttctgataggcacaaatctatcgggagagcaatcaatgtggttattcaaaggctagtaggggtatatgtacataccatgtgtacaagaatattttggtggcaacgatgcgagccttgtaccgctcaacactgccatcaggtttccgcttaacccgataagaagacccgttgttggtgcaggaattagcacctccgtcaataccggtttaaacaaagggaaatgtgaatctaatcaagaattcgacataaccgggatatcccggtttgcctattaatgggcaaaagttgtgaggtcgccggaagacctaattcaatggatagagatcgcccagccgacttcctgaacttcggaaagagaagacttccattttgaaagaagaggatcttgtaaagaataaaagaaatgaagatttaaaccttagataattagaagtttatcatattctgatatcaaggaaacattgtataaatagaggggtttgtcctctattcaatggatccagaacctaatacaaaaacactacttttctcatagcaaaaaccctaacttctttttcaagcaactttgttcttcttttccgattactttagagctaagagagaagtgaatttatctaactccttagtataaattcattgtttgatttacaaaatcaacaattggcgtgccttgtaggggattataaacaaattttctctacgctctcgcaagaaaacatggttcaaacgatcatcgatcccgtcatccttccatttaacggtgacgatacgaaatctagcctccttaccggaggagatcctccctccgcggcagaattagctgccaagacggttgaagatcaattacctcgggaagcgaatcctaccgccccagccgtcgctccattgtccttatccttggaagacctcaaagccatcctcgcgaccgtgacaaaagatctgtcgcagagactaaccgccggctcgacgagttagcaaaaggaatctcgccacgtccgaactctgaagcaacaccgccaagaacgatccaaccgcgcggtcttagcgttgacttcacggacgcacagtccaacatggtcaactctaggttccag

SEQ ID NO: 18951 - DNA, 599 bp, Arabidopsis thaliana
taagccttcaatttttttgggtttttctatgcttcagatgaatgcagactcaagattatatacaatgcaacacacacttcctgagccctcccccaaacttaaatcacacagtccactgtgtgaccaaatttggaagagagtactcaggacaaaacacatcacaaaaacaaaataaaaacaggagatggtatattacaatggtggagataggtgcttacctcagtggaagaaggagcggagttggtcgtcaatagctgcttgtgattgctcccaggccatcgaagaatctccctgttgtgtcttagcttccccctgggggtactcgacctctgctccttcgtcgcggccagcagcgctctgatgatactcgacctctgttcttatgctgcggccatcaccgtggttgcgtaacgtacgggactggagaagtcgtgtactcctactgccagaccgagcgagtgcagccttcttctttctcccgagctcccgaggcttgaatgatgaatgccacacagggactggtgggactactcggtcactaggctcaggcctgtggtgacttagctcaggccagtggtgagttggctctggcgcgtcat

SEQ ID NO: 18952 - DNA, 859 bp, Arabidopsis thaliana
cattaactcagccgtaaccaagtaaaactcagccttaacacctaaataaatcagccattatctcctttaacttaggcagaacgacacgataactcagccataacgttagacaaactgagacagaatataacaataacttacatcataaatcagccattatctactttaactcagacagaacgacacgataactcagctataacattagacaaattcagacagaatataacaataacttacatcatcacccagccatccatgtttggggtctgcccagttctttctttcggccatgataacaaagtagaaatgcacctcgtctatcccactttccaaccattttttgctaacaaatagtaaagaaagttaatataaacaaatagtgtaaacatgtcgtatttaacaacttattaaggtataaagggccataccagtcgggacttgacaaataagccttaagattctgtagtttggccggatcaaccggtgccagaggatcatagattgctcgtgaaggcagacaacccttcctcatgcagctcagcccgttgtctccaatgactggaaaactgttagtggtcattagatcgggtttaatcaatgacctcccatccggggctagcttaacagtttttatcctcccatcttttactctctgcagcctctcggtttcctcctcatcttcatcagactcagaaaccatttgattatactcagatacaacctgatcagtgacatcaagtatagaatcatgtccttggcttcctcaaatttttccttagcttcctcagatgattttgggtttttaattgtaatctttggcacctttggaggcacctttttaggctcctttgcagca

SEQ ID NO: 18953 - DNA, 459 bp, Arabidopsis thaliana columbia
tgtgaatttccccattgctgaactgttaaaaaatgaggagaatacagtgaatgatcatccactccataaagaaaacttcgctaataataaaaatgatgcacaagaggaactaacattaagaagatctactcttttgaggagatttcttatttcctatgactgtgttttatcaagtagaatctgaagacctaaatataaagatctagtttcttattcactagtcattaaggatgttaattcttataaattgattgataccatgaaggatgaaatgaactcgatggctgaagagggagtctttaatgtagctcctattgcatgaaggacacgaagcagtcgggtataaatgggtctttaagactgaactcgactgtaatggcagtactgaacgacataaaagtaagacttgtagccaaaagctttaatcagaaagaaggtatcgattacaatgagaccttt

SEQ ID NO: 18954 - DNA, 557 bp, Arabidopsis thaliana
aaaagaaagaaaaccccaattaaacaattacaactttaataaatgacgctcttgaaaattagtttatgcaccattcgttattatgattcgatggccttaaaatagaactctggatttggtgaaaaacagatatgatgtaatcaaaatatataacaataaagaatgatagaacctcttatctttccccaaactaataattggacaataatattagtagattttccattatccagaattcagctataaatagaaactgaataaaacaaaggaaagaagagcatgggaccaactcttgaaaagaacttccaagtccgttcaacaatataataaaaacaaatcaccaaacctattatctttagactaattaaactctaatgagaaccagcagcaggtcgttgccgtagaggcatggcagcccacggactcatcggacccatcggagacgatgaatttacacaggaggagccaccgatgacgagatgacgtacagcgactcgctcgcaagaaggacacattgtgagagtagtgggaggttcatgtgcatgtatagtgtggag

SEQ ID NO: 18955 - DNA, 525 bp, Arabidopsis thaliana columbia
gcatatggacctgagatctagcgaattttctgagatctgaaggtttaaaggattggtcactgcaagatagttccttaacaccagaggtgagcatatagtcactgtagagtgtagctagaaatgcagaggacacagggtgttgcagggcattccattcacttacccatattagaccacctttaatatcaaaacaaaatcaaatgagataattaacaatgattcagtgaatggtgtaacgtgagatgtaaggaaagtaccatcggttctactagatgtagcagttggtgagcttggtataagcccacacatgacagcttctgctgtttctttaaaaccttgaagtcctttgcttcctgataacccttttttgaaaaaggttaatcttgataatagtatctgcaaatgtattagataagtcacaaaatgttataatcaaacaaacatgaatcatgatttgtaaagaagtgtcttgttctttatacatgtgttcctggaagcttgttgcccaactaaaccatgatggac

SEQ ID NO: 18956 - DNA, 909 bp, Arabidopsis thaliana
ttggttcccttatcacgcacacgaacttcatcacaatcaaactcaaaaatgtagggataatcttttgtaacttttgacacagaaagcaacgatttagtaatgagagggcataccaagacatccttaagatgaagcttacctgaagtagagacaagacttgttgagccagtgtgagtaatagggagaaagttcccattaccaaccataactgaatcagacccagcataagacttggtttgttgcaggtggcgtggtgaatttgttatgtgagcagtggcggcactgtcggtgacccattcgctgcctgagtgatccgtgatgtctgtgatttgcatcgccgttagagcttgtggcagatcatcaggttggtagctattactaaaccgatgccaacaggtgagagcattatgaccacgctcgccacagatttgacaagtagggcgtttggaagaagagttggaggaaccattgtaagagagttgttgatggaagccacggccttgagttgagaaggagtttgaaccacgagacccacgagatccacgatttccttgtcctctaccacgagtcgagtaaaagacagagtttgcttgaaccgtgttgaaggcaagatgcagactaacatcggaacttgttgcgtaaccctgaagtctgtcatcataaccagtgagacgcgatatgatttcatcaagcttaggtgtaggtggaatatcaatagaaccttcaatacttgttttaataggtttatattctctacctgaaccattcaaagcagcaaagatcttcattttctctggaaccgcactaccaacagaagctaactgatcacaaatagtctctaattccttaagataaacttgcataggcttatttttcttttctagagtttgtaaacgtcgttgaagttca

SEQ ID NO: 18957 - DNA, 437 bp, Arabidopsis thaliana columbia
tcaaaacatcttagtaattatgttcctctctaccgagtaagctagaaacggacctcttacccagcggtatctccaccttcagcagcggcggctttaaccggtttgagaatttctcttttctctcctccgttgatcgccgacgaatcgagaagaagaattggacgaagctgacgaccggagatcagatcggctccctctccgattcctccgattggtttaaccgagaacgaggaagacgatgcagtgctgaattgacggtggatcgctccgattggtcgtctcaatttcggaattccaacgacattcgcggtgggcgtaacagcacgcgtgactccattgaaatcgaaattcagagttttgatagtgagagcaaagagggacggacttatgaggatttcgagtaattcaagagatggtacttgttgatcggacggcta

SEQ ID NO: 18958 - DNA, 274 bp, Arabidopsis thaliana columbia
atactcacaacatgaccctgtgaatcccattggatacatgctctcaattactattgtaggcatatatagtggttgcatgtttctgggatttttatgggtttggacctctgattctcacatatatttttggtaaggactaatcctcatgtgtcatttcagttattcagcagagatgccttgggtcctaacccaagcagtgttctacctaggaattatactagtcacacgtctagcgcgtcccaacatgaccaagctatgttaccgacgttctgat

SEQ ID NO: 18959 - DNA, 522 bp, Arabidopsis thaliana columbia
gtgtatatctaagggacaatgcttataagttccataccttcaatgtgactgaaagtcgtgttgattgctgcaagccatttctccctttcaccatttatcttatctagaagcattcttctattctgctcctcagtgagtttagcttcatgagctcggccttcagcctcagccatagctttcacgcgaattgtttctcgctcaagttccgctctctctttctcagtctcgcgctgctgtgcttgaatctgttcttccgtggcaattcttgctttctctttccgtatagaagatgcttcttgcatcgaaaccaattcagcattatgccgtctctgagcttcattatctgtctgcaaaatttccaagtcaaagacttcttctcagtaaagaacctcacaagaccttaaaatgttacacataggttcacagtttctttctaaaaatgtacctgcattctcttcctggccaactcatcctcatatctaagattttgcgctttcgcttgggcctgttgctgcactaaat

SEQ ID NO: 18960 - DNA, 572 bp, Arabidopsis thaliana columbia
gatatactctgaatatccattttcacaaacatagagattccatgcaagccatatttaaaaactaggcaagttaaaagctgtctataatcaacacatacattactgttcaattgacattcagaaacagagaaattttgctccatggaaacttcgtcattcccacccgcaacaccagtcctcgtcgaagaattaactctgtcaccaccacagtctttacctttaccataaccagcgatttcccacttctccttgtgatcaagccaattatgttacttcttatcatcttcttcctcaacaaagctagatcttttcactttcgaatccataaaaaaaacagagtttgaagaagggatcgatttggttagtctcagaaatcttcatggcgaagaagagacactaatcaaagtttatcaatagactatggagtcgtctgaatttttgactttattatacttaggttagagaatgagtgggcttgggctagtaagtacattaatgaaaattcttaaattttggattgggtaatggactcatcactcatgggtataaacgttttataataaaactataaa

SEQ ID NO: 18961 - DNA, 791 bp, Arabidopsis thaliana
catgtttcaaactcccaggctctctctgcaaacggatccaatcagctctcaccagattttggtgggactcatcattaggaaaccagaaaatgagttggatagcatggtccaaactaactaaatcaaaaagagatggtggaatgggtttcagagatatacctaactttaatgacgttcttttggcgaaagtgagttggcaaatactcactaaaccatcgtgcatgcttgtaaagatcctcctgggcaaatactgccacacaacatccttcttagactacaaagtctccaactatgcttcacatggatggcgtggcatttgcattgaaagagacctgttaaagacgcagcttggcagaactattggtacaggctctgatactctgatctggcaagaaccgtggatctccctcactcaaccagtcactccaatggggccagcacctcaaaactctcagtacttatcagtggcaaatctcatttgtccaatctccaatacctggttgaaagagaaaatcagagtgctgttacctgcttatgaacaagagatcctagaaataagaccaagtcagagaggggcaaaaagacagatacctctggctgcttaccaagtccggcgagtacactgccaagtcaggctatcatgctgcatctcaaacggaggcgattacgatttcaagccctcctctcgatgatttcgcctggaccaaagagatctaaaatatcaaaacatctccaaaaatcaaatttttcctttggaaatctatgaagcaagctctccctacggggaaaaa

SEQ ID NO: 18962 - DNA, 570 bp, Arabidopsis thaliana columbia
caccgtagatcgattcaccaccggttccgttcttggcggtgaaatcacctccttgacacatgaatccgggaatcacacggtggaagatcgatcctttgaagtgaagtggcttacctagctttcccattcctttctcgccggtacagagagcacggaaattctccgccgtgtttggggttgtatcagcgaaaagctccatctcgatccgtccgatgggagtaccgctgagactcatgtcgaagaaaactctagggttcgacatcttttgggagatttggaagagagaaatcgatgaagaagattgtgaaagtgatgatgacaaattagggtttttggagaggttcttatagagaggatttaatttctaaaacggtgaatctgaaaatggagattatgttggtgaccgttgatttatgacacgtgtagagctgtgatgatatggaaattaaccgtggttgaatcggatctgactagggttgaagtcgcgtggatcctaggctcctttccataattgatttgattcttcttagatggaccgacagaattacggcgttggagtttaggtgggcc

SEQ ID NO: 18963 - DNA, 468 bp, Arabidopsis thaliana columbia
tctttttcctttttttttgtttggatcttggatcaagttttggttaatgtttgatttaatctaagtgcatattccttctacaatatcaaaattcctatgtttatgtataatttgcacgctcatactaacaaaaactaatcatatattaaagacttgaatgatctttttcctttttcccattttaaaatagataaaatcactcatagatctaattacattcgttaaattacgaaatgatcacatgtagagtgtatttatatacgatctctgtatttatcaaaggtgagacaggagaaacttggaggcagaatagcatctcttcaccagctagtatctccctttggcaaggtataattactgattagttccctttactaatcacttgtttaagattatctaatctatgaatcaaaattgcattatattagttcctgtttggttgactgatccttttatttcagactgaca

SEQ ID NO: 18964 - DNA, 428 bp, Arabidopsis thaliana columbia
tgtatttataccaatgtactatgattgtaaagattttgctattttgcatgcatttccatttgataaaatttctacttaattttcaaactactacacattttgagtgtgacgtttgtcatgattctcgacctgtaatgatggtttgactttaaacgcaaacgctccgagaatagcggccatcgtcgtaacggagagaaagccagacgctgcgaacacaccgtctttcacaaggtaacactcacggtttagccaccctttgccgtatatctgctctctattcatgcttgcaccaacgcttatcaacgtaaccgcaacggcaaaattaaccctgcaataaattcatgtattatataattatgtacttgcaaattcaatccggtgacaacactatagatcaccatatttacaagctatttcaaacttatttg

SEQ ID NO: 18965 - DNA, 504 bp, Arabidopsis thaliana columbia
taaaatatgagtcattatagttaaccatcaattgagagagtcataatagttatttatgttaagattagagttagtctgagcaaatctttctaataggattcataagttgttgattagcttaattagttttaaacttaattaaaactagctaacatggaacaaagttacttcattccccctccaagaagcaatattatatcagatttgtgatatcagcaacagatcgattagaaagcacaagcaaaaccatatacataccttagtttcttaaactgatcaaaagatgaccaacttatccattggccatactcgatttcatctgatggcctccaaaccgctgcgtcatctttcttcactatatcaaccatactctagctgcatgtgaacccaagcgaacacattggaccttaacttctaggtcgagtgaatgcacacgtccttcagcgacaacttgcttccttccactaatatccatcaacttgcattttttattttctttgatga

SEQ ID NO: 18966 - DNA, 540 bp, Arabidopsis thaliana
cttctatgcacaactccctccctggctagcactcgcgcatactcccacttctagtttcacgcactagagcatctacatcttgcccgactctcttcgagcgcctgaccaaaaataaaagtattcagtttcttacagagtgaacaaagggattcaagagtgattagtatgcaacactagtgagatcattaccttcacttgttcttgcaggtccttgatgtattgaaccgcaagatccaacatgtctgctgtgtttgtttgctgcatatcaattgaagatgataaatacattgagcaaagaacatgaaagtacgaatatgagagaggaagatcgcataatctaaccgtgtccatgtttggaacaaggtcttgcagcttcctcattctttcactgatcttggttcttctcacctgttccacaacattttggaaacatatataatcgttggagaaactgatattatatcatcatggaatcaatgccactgagagcataatagtaaggggaaagatttccctctcggctatgcttcgaggatgagt

SEQ ID NO: 18967 - DNA, 860 bp, Arabidopsis thaliana
actctggaagagagagaggcacataaaatttatgagcgtagaagacgagatataattaaagttacatgaaaaatgatttgatttctatcaagaatttgtcttcggtttatacattgaaataattgcacacatacttgcatatcttccttaccctctcttcctaaacgactcaacatttcaacagacgtaataaagctactgtctctggtagttagttctactcatttttgaaataccaaagcacagagtgatcacaaatggacaaaaaaaaatgaaaaggaaaaatgaaaagaacttatgaattacctctactttgaaacaagtttgatgtaagacgtcgtgaagtgggagaaaaataaataaacttccttggagtctgctggagaatggtaagaatgttggtggtttatcaaggaacttcatatctctctatgggtgaaaaattacaacccgaagatccttgaactgctccaatttactcacaatactgttttgttagttgctttgccaataatttgcagattgctggctagtcgctttcactactatgtctatctgaacattccaaaaatatattacaattagctttcataagaaatctatagacagattcttagtcgatttgcaaaataacgggatgtaataaagaaggatatataagtatagtgtgtacctcccgatgatcttttcccttccattgcgtctttcttatcttggcaacttgcacaaaggaatggaccatcccagggacgaagcttacggcaattatccgacccggcatggatcgagacaccttctccaggtttcacttctacttgacacacagcacacatgaacaacttaaacatattgcaaagcgg

SEQ ID NO: 18968 - DNA, 693 bp, Arabidopsis thaliana
tgtaacaaagatccggagcgtaatgcccagcttcatcagatctatatttgtgttgatacgtcaggaactgagtttatcgaatgtccagttttgcctagaggaagctgtccatctcaaatccagttttctaagttctaatttatatctttacgtgttttcagtttcgttgttatggtagatcttaattatgtatttttgctaaaagtcttaattatgtatttatgtgtctcttatcttgttatcttttgtaacttctcttctcctttttagagtccaaaccaaattcatggggattctaaaatctaaaattcaaataagataaaccttcgtatattggtaaaattcctaatgcatcatacgtttcataaaacttcagccctaatggctaatgcataagtttaacagaatttggtcagtcacggtacaatagttttttaataatgtgctaaagtattatttagtttagtattatagaaacaataatcggaatgtagtagaatcgtttaatctccttttgagggcattatcggatcccagttcaagccaatgttaccaagagcattgttgcatggcatttatctgttacacaagatcatccgaataagtttcacaaagagaattaatgacgcagcgtaatcattaaggttgcctatatttttttagacaagtggagaccaagttgagaataataaa

SEQ ID NO: 18969 - DNA, 593 bp, Arabidopsis thaliana columbia
tcggagattctgattctgtctatcggagactttgatcgtagaatttcccggtcgtcggagatggagagattgaatgagctttgcgacatcatagagcagaatccgaagcaatttttggataagcttccttggatatgccaacaatgtccacaatcgaagctgcttcgtgccgaatcgcctaggttttctcaaagtcatctcaatgcgatcttagccgtgactcgaatcctctccaaaatcgtcgacacgaccgatgaaaacgccaaattcgtagtgctagatttcctccagactgttccgaaatcgttccaccgttcgttttggccgtattcgttatcgttggagtcgatttcggcgttttattgcagtttcttaggttacgtttcgtgtctctctcagttgtatgttttaattttcaatagttgtgaaaattcatatatccaggggcttgatgttgtgtgatgtgttacttgacttgttctgtacttttactggttatatgaaattcaaaaggtttgctcatattttgaatgtacttactaacagaggatggttgaagggtacttcttagagctgccaaagaagtgacatat

SEQ ID NO: 18970 - DNA, 526 bp, Arabidopsis thaliana
  unsure (1)..(526): unsure at all n locations
gaatcagtttttgaagacttggatgatttcagtgccgatatagctcccgtaacaaccaaggtagatagttcatttctttaccaacttgattcttctttattaatgtctgtatctgtgaagtttacttgtttaggagaatttttgttccttaaacccttaatttctcttcatgatctgagagtatactgaattctaagagcagtgagatcgtatttttatttataggatctttatgatgaagttagttctggtggcaagaatgtgatagttgtgaggaagaggcagcttacgttgtatgctggacaaccatttgaagacgttgaaagagctttgcgaactctgattcaagaacgaagatgaaaaaagtaacaacattacttcggactgaaaaaactagagagcccagagatgatcaatgtggagatgacaggggcagtaagaacaatggttcccaacaacaatttttcatgaagcttaaagaaccactgagcttctgttgtantatggtagtagcattggaattgag

SEQ ID NO: 18971 - DNA, 580 bp, Arabidopsis thaliana
  unsure (1)..(580): unsure at all n locations
taaagaagataatactcagcagaacgaaaacagtagtagcgggttttatgctaacaacggtgctgctggtttggagtttggatttggtcagccgaatcaaaacagcatatcgttcaacgggaacaatagttctatgatcatgaatcaagcacctggtttaggcctcaaagttggtggaaccatgcagcagcagcagcagccacatcagcagcagttgcagcagccacatcagagactgcctccaactatctttccaaaacaagcgaatgtaacatttgcggcgcctgtaaatatggtcaacaggggtttatttgagactagcgcagatggtccagccaacagtaatatgggaggagcagggggtactgttacagctacttctcctgggacgagcagtgcagaaaacaatacttggtcatcaccagttccttacgtgtttggtcggggaagaagaagcaatacgggcctggagaaggttgttgagagaaggcaaaagagaatgatcaagaatcgggaatccgctgctagatcaagggctcgaaaacaggtaaagttacagttttgtcncaaaaactttgat

SEQ ID NO: 18972 - DNA, 539 bp, Arabidopsis thaliana
ccaagcagtagcttgtccatgtggttgcagatcagaactattccgcgaccgagattggtgatcattcaaatgagaaggatacaactgaggctttgttcttgatccggatgactttttcgcaagccgagcttggctggtaataatcattgacataagggtcgcttactgagtcaattagaatgctgcatcttgagaatactctctatcgcttctgaagtcatagtactttgatctaaactgcaatccgctttcgcttttctggctagctaaatctgatgtatgttgagagataccacctctgttctttcgacttcgatgagacgacttatgtttgtgttcgcttacttcagcaaccccagaaaagagctttatgtgatggagaaggataagaactatacagctgagattgtaatgcagcaagatgtgctaaagagtgtctctgctgaagagatatcgagtgttgtgaagtagaaccatttcgaggaggcagttgttggaaatgttgctgttgcattagactgcgtaacaacgcggaatga

SEQ ID NO: 18973 - DNA, 539 bp, Arabidopsis thaliana
aaagtaaaaagattcacaaatcatttatagaccctatattaatttataaacctcaaaaattacaagaagaaaagaaaacaagagataatattcttgtttctctggatagaagacagggacagacgaagaacaatctgagttgatcagatagaaccaaacaaccaacaacacttcggggatttctcttttttcatgaaaggttggttcttttcccttttcttgtgttaacttgcggttgaagcaagcaaacccgaggttgagaaaaatcgacacaaacacacacaccgaaaagacaaaaaaaaaagataattggctttttaaatgacaaatgtgtgtaaatttacacttttgtctgaatataatggaagatggttttgaattttggtggtggggtagtaactatgaggaacattgacgtcctctgcgacaaggtagagctccagcgtcggaagtaatgtgtccgaccaatgacgaagatttcgcggaaaggctggagcacgtgcgtactgccagacgcggcggctcctgaagaagtgaag

SEQ ID NO: 18974 - DNA, 577 bp, Arabidopsis thaliana
aaaacattattcgtaatcggcagtgagcaaataacaatgatcataatgctaaacaatttaaaacagcaaaaagatattgcaatggacaaattcgaatcaaattgtcgatgcaaaatccggcagtttttcacgattcggcaaatataacacttttgatgtacaaattacaaaatacacattgcctatttgtacggctcctaagaatggcagatagatcagcacatctgtatgttcacaacacacaaagatttgtccttttttttgtctctctctctatctctcttgtggaaatttactttacatgttttaacttaaatgtaaagaagaagagttacaaaagatgcaagaatgagacatgagttgatgaatgatgcttccttcttcaatcctgagtttcttactctctctgttccaaagatgaacagcgaatgtatttttgcgtaaatgcgtacgctcttccgcaaccaagcatcgctctcattcgtgggcgctctgtagaatcctttgattctagtccagtccaccggataaaatgcagatggtggaagacagagaacccaaatctgaagaggatgat

SEQ ID NO: 18975 - DNA, 569 bp, Arabidopsis thaliana
taattattcttttagaacttggagacataatataaataaacaaacctgacatttcgttgataatttttttttttttttaaaccctagttgaagataaacgacgtcagtaatcctctgcgttttactctgtttttgagcttgtctttgttccagttctctgtttcgatgttcttttatctttatttatcatcatcagctaaagaagttctcaagactcatgacctagagacatgcactcgacctaagatggtcacgaccggtttgttttcttacaacttcaaagacattggtttcactcaatatggagaggaatggggagagatgaaaaagcttatagggcttgagctctttagtccaaaaacgcaaaagtcttttaggtatatcagagaggaagagagtgacttgctggtcaagaaaatttcaaaatctgctcaaacacaaaccctagtggatttgggaaaaccccttttctccttcacttgcggtattatatttagacttgcgtttggacagaacttccgtaagtgcgattttatcgatagggagagagtcgaagagctggtggtaga

SEQ ID NO: 18976 - DNA, 592 bp, Arabidopsis thaliana
tatatcattatattacctacctgagcgcagattgtctctgtcacattaagaaatctctaaacacgtgtatgcagttatgtggatgcactatcaagatctctacatgtggaatataagcagtttggtattgatgtccagtgccaggtactttttcttcttttttttgtattcaaagactatccaatatatgtattatagcatatttttgtactccctcaggtaatacgtaaaagatttaatgttataatgcacgtacgtgtgtaaatcaaatggacaggttcccttatacgtgtcaacaaggatggtgtcagaagtggcagctatagacaaacctagcttatttgtaccgtcgcctgaagtctacgcaaaagcggcggtggcgcagatcggaattggatcacgttgctcgccgttttgggctcattctcttcagtggtttcttgttggacttgtaccggataaccttgttgatacttggcgtctctctatcggacttcgcagaagaagtttatcttaatgatcatattttcaagtttgtatttgctcctccacctttcgtggataaatatatggcccattgcggtgacagaaa

SEQ ID NO: 18977 - DNA, 535 bp, Arabidopsis thaliana
  unsure (1)..(535): unsure at all n locations
ccccgtgcttgcgtaattgccgtgacgtaagcgatcacactacccttttgcataaggacacaccctaatcccgttattgatgcgtccgtgtacacaatgtacggctcatctgcttctggcaaggttagcaccagagcacttgttagcatcaacttcaagtcggcgaacgtcttttcgcactcatccgaccattgtaacttagtgtcttttccggtgagtctagtcaagggttgagccatgctcgcaaaccctttcacaaatctctgatagtacccggccaaaccaaggaaactcctaatctcggtcgcactctttatccgaggccattcctttatggacttgactttctcaggatccacggagactccttgatcggagacaatgtgcccgagaaatccaactcgcctttgccaaaaggaacatttgcttagttttgcaaatagcttatgtcctcttagtctctccaaaaccgcccttagatgattttgatgggtccttcatcctttgaataaactagtatgtcacaatanagatg

SEQ ID NO: 18978 - DNA, 569 bp, Arabidopsis thaliana
cacaactaaaagaagaactcaaacgcaagacagaaagatcaatggcgagcaacggagttaccaactgtaacgcaaacgccaatgtttggcggttcaaaggaaacggtgcaacgagtgatgcggcggcggtgacgttgagaaagcttgcttttgggatgtttaaaaactgcaccatgaacagtggaaagaccattttgtttcccaactcccggcgagccctccgcccattccaacttcaggacttgcccggaagccgaggaagccgttgccgcagctgcacgctccggcatggctaactcttacgcacccagccctggagttttcaaggctagaaggtctgtttgaaaaatttcatttttctttttgaaaaactattaaaaataagttttacaataaccaatctttgaaaaaacaaccaaccaaacaaaattacatttttaaaaattgtttttataacgtaggaccgatcaacttttgtctaattagttatttgccgttttttatctcagggcggtggctgaatatttaaacggagaacttccgacgaagctgaaggccgaggatgtgta

SEQ ID NO: 18979 - DNA, 1103 bp, Arabidopsis thaliana
ctctagatcttgaggattccttcttctcacaatcacttcttctttaccaagattgtcgaagcatgcattataaccattataaccatgcatcttaaacacatcctcccctttttttccttttttgtcgatacctttttatgttcatttgaactttctctttatgttcatttgttctacaagtactattcttgtaaaacatgttatttgtttaattgtccctactcactagtcactacctattttactaaaatcacaatttctacttttagctaccatactattcataatcgtaacaactaacacacttacatgaccaaaaatagatttttgtaccatttaatcttaactattaatttgtaaacgatctcactactattgtaacgtttagtccgtccttactagtgtgctccacgttctttctcaggtctatggactcatccctgtccgacgatcggtccgccaaatctaagaggttttaaagacttgttaacgatcctacaaatcactatacgatatttcatcatgttttatcctcatttacatggttctgataatcatttctcggaaggtcacctatcttaaaactacttcgactcaaacacgtttaactgtggagttcccgcataaatcaattatcttattctctataacagttatagaaatggtctcgtcattgtactgattgacatcatcaactggagagacatcaactttgggagctgccaatctcagaagaagtctatctcctttacatcccgaggtggaagctctcctctgggcgatgaagtgtatgattggtgccgacaaccaagatgtagtttttcttacagactgttcagatctggtggagatggtgtcttcctcaactgaatggccggctttctcatcgtatttggaggagttacagagcgacaagaatgagttcacaaacttttctctatctttaatctctcgtagtactaatgttaaagcggattttttggcacgaaaagttcgtacccaaccgcttcatattacatttgtaaacaacattcctcaggattggcttgtttgagtcctaattaattttcggatgacaaaaaaaaaaaaagatttaaaatcta

SEQ ID NO: 18980 - DNA, 443 bp, Arabidopsis thaliana
tgatccctcccttcagatattatcaatgtggaacatagtgacattatatgattttaaataatactatcacttaaggcatgttttgttcattagacccactagttaactatacataagatactaacagtattgaatcttgtagaacgatattgatatatataagtattgttacccgaaagggtcttgagcaaggagaagagagtttctggatatttcatcaacaagcttctcatgttgctccccaaccgagtacgaaacgcagcgttgaagcacacaacatccatggcgagtagtcgcaatctctatgcagaacttagtagcagcctccaaaatgaactgtcacaagcaaaaatatcatcaagagttttaaaagaacattatcaagaacatgattgaactatttaaggaagagttttatgttataaacttgttatcattaggac

SEQ ID NO: 18981 - DNA, 1049 bp, Arabidopsis thaliana
aaatatagatgaaaatcctcaaaaccctaccattaaaaaaaaatattttaaacatagggacccaccaaaatctaacttgagttgataaatccagacatttatttcttgagttgatatacggtatgccagctggaattatgcggtatgccagctggaattatcaagctcatcagctggaattttacacatagttgtattgctgaactatcatacacatagatgtacttttcactgttttcatatattgcagctgaacttaatgtacatacttgataagtatgtcgaacccaacctaactgtgatttatttttcatattcaaagttttggcagaatcatatttgatataagaccatattcacgtaattcacttcatttgaggtgatctcatagtaactactccttatcatataagaggttgtttatgtgaacacatactacgatttcaatttttataaaaaaaatttatcaatgaaactttaatagtaatagtagattttttgttgagctactagtaaacttcaaacgtttctacatattataaaatcgttaaacacattttaataagtgattatagttgaacgagctgaacttgttgtactaggcttaccgattccgggaattacaaatgtacatagaaagacttgttattagttaaaataataaagtcagataacaaatttcttcgtttatacgaataatacaaagtacccaaatactaaaatactacattataaatttcatcaacttccggaatttccagattacctaacaccttcgacacggggccatgactcacaagcttcggtttagaatgaccgctcacacgccagcaaacgagtacagccacaattgccggattacaaagactccgaagtgagcttgaaagtccaaagcttgttgattgtgtgcttcacaatagagaacttcattgctccagttcatagaaattatttacttgatcagaaattatgaacatgaccatctgaaccaggtctgctgaagcatttgaactatagcaattgaccatctacatagccaagtgaacatg

SEQ ID NO: 18982 - DNA, 1237 bp, Arabidopsis thaliana
taacttgcgagatctcaaaaagaaatctgatgagcaagaagagaccatagagaagctagctcagacagttgaggaacttaagagtaaactggatcatatgcaagagatagctcaatccaaatgcgggaataacactatcccgagaaaaaagattacttcaagatggtctaaggagatagattatccaccagaagagaaagaggcctatttcgaggaaagaagaattgagtattctgctactcatctctcaagagaggatgctgaatatgatgatgagatcagagaggactatgaagatcctctctatcacccattttcttcttaatgagtgtgaggagtcaagctagagactttaaacaagctcacttgggaggaattccaagactgtttctgtaaataaaacttttattttcttgttatttttgatttgtttttggttgtgtttgtgattctcaggaacagagaaacagcgtggaggtagagtaaaaatttaaaaattttactatatagagcaacaggggatcgagtatgtcggaaattcaagagtttgaaaaacttttgttgcactaagaggccatgagctcgagtaagtttggtcgagtattagtgatgattttaaaaaaacccaaaattttgaaatcatatctatactcgaccaacagaagctacagagacttgcagggagtttaacaagtttacagaggattacagagggttctagtcaacagagaacagcgcttcaggacaaacagacagagcgtggccaaccacctctcacctttgttcccccacgcgtttttagagataacaaaatctcttccctctttcccaaccactcgatctcactctatccctatcctctcccaccgacatcatctctctccctctccaaacactcgaccaagaagattcactctacctcacgtttctcactcgaccaaacctcaccatctctcttcctctccaagcacttgaccgcaccatcacactcgacctcaccgttcactcgatctctcccctccggcttcaccatctctcgctgctttgtcaccctctcactcgaccaaacctcactcgtcatctctcgcaccgcctcccatttactcgattgcaacgccctcctctccatccgccgctttctcgacctcgtcgtcccagctctcactgctcacgcctccgccctctctctctcattcactcgacgacgggacaggtttcatcttcactcaaccgctac

SEQ ID NO: 18983 - DNA, 1316 bp, Arabidopsis thaliana
tctgttgtgtctttctagaagcatcctcgtcaagttttttgccctcaagtctcatctcttccatcttccgccttgcttcttctcccgcctcgtccatcttttcctattaattaaggacgaacatcatataatagccaacaaagcatatataaacacattgaatactctgctagttatattaccttggccgtgtctttggtctcaacggctttttgtttggtttcctctgtcttgcccgacaagaaacccatagctcttttagcagtgtccactgcactatccttcagttctccgatcttactcacacctgcatctttcgtttctgtcgccttctctgccgtgtagtctctatattctcccactttctcagctgtcttatcttttgcttccctcgccttatccgcagtttcctttgctttctccgccgtgtagtctttatattcgcccactttctcagctgtcttatcttttgtttcctcgccttatccgaggtgtattccgcggtttcctttgctttctctgccgtcttatccttagcttctttcgccttatccaccgtgtagtctttgtactcacccagcttctccgccgtcgtgtctttggcttcctttgccttctctgccgtgtaatctttatattcacccaacttatccgccgttttatctttagcttctcttgccttctccgccgtgtattctgccgtttccttagtcttgtctgccgttctatctttagcttctcttgccttctctgccgcgtaatctgcggtttccttagtcttgtccgcagtcttatctttagcttctcttgccttatcggccgtgtaatctgcagtttccttagtcttctgcgcagtactgtctctaacctctccggtggtgtctctcatccccgctgccttctccgatgcaatatcggctccctccctcgttgactcagccgtatcatgacttttaccgatgactgcgtctttagttccttgcaccgccttcatcaccgagcctatcaggccaggcctctcaggctcggtcgtcgttgtcctctccgttaatttgtacgtcacatcacctttgttgatatctttcaaatcttcagccgctagactcgctgcagcctcagctctctcggccttggcggacctctctgcctcccgttgtcctgatgccatgatttgtttcttgtttgcttggcttccaagtaaagatttaagatggattctttaaactttgccgaatactcgtcgtgttaatgaagcatttagagctgcttgttgtttttatagcaagtgttttggttccaatgagatgccacgtcat

SEQ ID NO: 18984 - DNA, 1368 bp, Arabidopsis thaliana
ctctttctatgtcaaaacgtctaggcatcaccaatttcaagccgtcaaggatctctttgattctagcagatcgctctgtgcgatttccagtgggtttggcggagaatgtgcatgttagagttggagatttttacattcccactgattttgttgtccttgaacttgataaggaaccacatgatcctctcactcttggtaggccattcctaaacacagttggagctataattgatgtgagaagaagcacaatcaacctgcagattggggactttgctttggagtttgatatgaaaggcacaaggaaaaatcccactattgaaggtcatgcattttctgtagacacaaatgatgagcctggtgctgaatgtgcaaaggattgcattgagttgagtgatgtcgaggaagtcctggatggagacacaaaagatgctcatgtaaccttgataccactacagcgtgtaggagacaccatcgagtataaggtgcagagtaagggtacctcgaaacctttttccaaagccaggagcattctcactttggagtggaaagagaaaggtagaaaagctgtgaaaagagttgttggtaaggttctaaggatgaagttgactgattggcgaccttgtttcggagcaagttcccgcactcgtgcccattgattcacaagaatccggtcaagctaacgaccttaagcaagcgcttcttgggaggcaacccacaaggtattgtacatactttcttttccttctttcattttctttgattttggtttgtttcgctcttatgtggagtttagacttatcgactcaacagtcgatagtctctgtatttgacgatggtgtgagattatttttgagtgcagaaacccgccaggttgggatcggtcgatcccagcattggatcgatccatccagaagcatacgtcggagctcaaaaatgtctgcagaatgggattgatcgatcccagcactggattgatcgatccagaagcatacttcggagctcaaaaatgtctgccataatgggatcggtcgatcccatcactagatcgatcgatccggtcgtgccgtcgaaaaaaaaaaaaaaaaaatcaaactgattcgattttctgctgctgaacctagtggagcttccacctcacagccaccactagagcactctccaggccatcgcttaggcaggagcaggagacagccgggagagaagagctctagcgagatccccacccaccaccgttgagtagcgctgtaactcacactgttcccttgttattcatctttattttgatttttattgtgtctgtgcggaagctttcctttgaactgttttcacaccgagtcggtgtgaagcaagtcggggggaggttgccac

SEQ ID NO: 18985 - DNA, 859 bp, Arabidopsis thaliana
taatgatttctccacatccacagacacttaagaggaaacaatcttagaggttctgttcctcaagcccttcaagatagagaaaagaatgatggtttaaaactattgtaagagtctgtttttcgatgatctagttttgattattatcgacacatttttatatagttaatatttcgtcaataacgttttcattttttagtgttgatccaaatataacgcggcgcgggaaacaccaaccaaaatcctggctggtggcgattgttgcatctatatcttgtgtggccgttactataatcgtgttggttctcatcttcattttcagaaggaggaagtcatcaacacgcaaaggtaagttaataaatatatgatcctaaatatataaatataaagaccctaggcgaaacttagaggtcgtcgattcgagtgacgcttgggacaaaacttattacatgttgtggtttcgggcctgagggattatcggcccagaacctcctagtattcaaaaaaaaaagaaaaagtatgaaacctaatggatagttaaatttattttctgcagttatacgtccatcattggaaatgaaaaatagaagatttaagtattcagaggttaaagaaatgactaataactttgaagttgttctcggtaaaggaggctttggtgttgtttatcatggttttctcaataatgaacaagtagccgtcaaagttctctctcaatcatcaactcaaggctacaaggaattcaaaacagaagtacttatttacactaaaatcttccacttaatttttggacaatcgtgagctcatgaattataccatattgttgatatattgttaggtcgaactacttctcgacaaatcc

SEQ ID NO: 18986 - DNA, 669 bp, Arabidopsis thaliana
tccctaaatagaggcaacaaatatgcttcatctctctctctctttttctctcacttccctttttgtctctgacctttaaacaaaacttagataccattctagatctgatgatagcaagataatcaacaattccccaaaataaaaacagagtcctctgttttgttcttcatctctcactaagagattctcatctgtcggcatcaagtaggttctgcatatttagagagaaatctctcttcctccacgttcttctcactgtctttggtacgcacaaaaagaacagagcgatgtcaaagctagacctggaggaggtgaactcgatgcagagaggcaaagttcatgggccattcttggtggaaaacatggtgtgccagaaaaaccacatgttgacctcaaagggtgttttcttgggcagtgaccctctcaaatacgcaatgccacttatgttgctgcaaatgtccgtcatcatcatcacctcaaggcttctctaccgcctcctcaagcccttgaagcaaggcatgatctctgcccaagtcttggtaataagttgtctatatttctttctttttctgtaatcgaggaatctcagaacaaaacttagactagtctatggagtctggagctcttttcatttctctctttttgcgaaatttttaaacgcaggctggg

SEQ ID NO: 18987 - DNA, 1117 bp, Arabidopsis thaliana
cattgatctttgataggttgcagagctatcgaattcatcaaggtggtcgagtggatcctccattggcagaccatggaatttgttcccctgaatcatcgagatgagaccactcttaatctcgaagttgttgttctagataacaggaggtgcaattcctttcctcagacggtgatcacgtggtgcatctccagcgccaatgttggcagggcagttttgttgattctgttcgtcagccatatcgagtggttgctgaggtacagggttgaatgtgtttctcctttctctgagttcgcgagcgatgcggtcgatgttgtcattgaaaaagaggttctgattgcctgttgatcgagtttgcatacagcagaggtgtacctggatcaagacgacaacaagaaaaaccaacagttagtaaccgaaaagaaaattgaaaaagaacttgatctaagcaagtctgaaatctcaaatgtaacaaacaaacacccaattggcaatggcgccaaattgataataggtttttcagtcaattatcctaaaacaccaattatgtcgttgtactattttagggtgtcaatccaaatgagtgtgatgctaacaatcaagatgtgataaaaagtcactaagtcaagccaagcaataacaggttttggtgtgttctaacagtcttaagtgaacatgtaaaaaacagaaaatcaagcagaaataagaaaacactcgaccaacacagctctttgtagagcactgggtgtggtgagcactgggtgtggtcgagtgacaagtcaagtaacagacaaaaaatataacagggatactcgactacacagtttgttactagacaactgggtggtcgagtatcatgtcgagtaacagtaaagaattgcagaaactaagcaacagatgacaagatgcagtaaataccagtagagtaaacaataaaatcaatcagataaagaattcctgaggatggggtaattgaatagtttcgtttcctcagtttacaggtgattgacatgctcaataaattatccctagacaacaagttcattaaccaaatttaattgccactgcaacagagacccttaagttaacctagtcccagactcaatcaccattgacgaga

SEQ ID NO: 18988 - DNA, 575 bp, Arabidopsis thaliana
atttcatcttattttaaaattcttctatttgtactcgaggtcatgaatatactatatgcattgcatattttaaaatttcgtattaccccacatacaatgttttaatttctaatccatgcacacatgcatatatatatatatatatatatatatatatatatatatatataacagattaaaatgggaaatggaaatccaaaaagaagtgattttattataaagtttacccacacgttacaaaataggtatcctatagtcatagtctatccttccaaaacttagatagacaacatacatgtatatgtgtttttgtttgtcatctttgattactttcattacattattattaccatgctacgttcataacgtaaatatccccttatcttgaaatcaaagccatagtgctccaaccctctttagcataggaaccagagagcgattgagatggagactcatgacttgattggctccaccaacaagctgccctccaataaacaccacaggcacggttgggctgcagccaagctgagccaatgcttgctctatctcctttcctctgttgatctcatctagct

SEQ ID NO: 18989 - DNA, 575 bp, Arabidopsis thaliana
ctaaagaatgcggcgagcattgatgcttatgcagccagcgatcctgctgaatgttttgccgtactttctgaatatttctttagcgccccagaactttttgctcctcgtttcccttcattgtggcaacgtttctgccaattttatcaacaagatcctttgcagagactgcatcacgctaatgatacagactcgttttcggcgacgaatgttcattaattaacaactttgcagattaattaaccaattgaaatgacttatgaaatttagtgttgacagacaaggtaccgctaagtaatattcgccccgttcacacgattcctctgtagttcagtcggtagaacggcggactgttaatccgtatgtcactggttcgagtccagtcagaggagccaaattcctgaaaagcccgcttttatagcgggatttttgctatatctgataatcaatttcctcttcactgctttccatcacctgccgcttgatatcctcaactgacagtcctgcattacaaagttccagaaagcgccagacatagttacgctgaagttgtcctcgcttcagtcccaactttagag

SEQ ID NO: 18990 - DNA, 514 bp, Arabidopsis thaliana columbia
tccctgaacatatccgcttgctggatgtctaatggccctgcaaactcagaaaattcaatttttagatttagatttcaactgaattatccaacgggttgttggttgacccaatgcattctgtaactcaccacgtgtaaagaatacgctccagtgatttctgcacctgttcttgctgaaagaaactgacatctggtacagtcctcggacagtcaacagcaatctgagaaagaattaatttgctaagagatttaccaacttttgaataattggttatagaagcactgagactacaagataaacctggcgaacgatattgatctcatcatcagaacgttcggaatctggaaggtcataaaattggccaacagattccagatattcaagacgttttcttctcagaacagcctcccttctatctgaattaggtggtgcatatccctgttgtcagtttatatttaaattcaaatagacataacaaaccaaaatccaaaatagttgccgtgttgatggaaag

SEQ ID NO: 18991 - DNA, 519 bp, Arabidopsis thaliana columbia
tcaaactttcagttacgaatctctttattaccatttaccatttgcagaatccatagaacaaatccgtaaactttcaattacatactttcgataagtctagctccgactttatcaagtttcttcacagaagcagtagatttcaagtttccgatcttcaagaacacttggaccattttctctccgatctcgtaacctttctccgccgtgtcaatcactgcaaccgcagttatggtgcgaccaaatgctccagcttctttcccattcaaagcagaaagtgatttattcacctataattcttgagcaattcagcgtctttcctcgcttcttctcctttcattgctcaaactctaaaccttgtagcctcgagctctgtgatttgtagcctcgagctctgtttctgcaatcacacaagctgctctatggtttggctacaatcagtcgctacacgtttcaaagctaatgccaaatatatcatccattgttttcttgcgaatcttggctaatgagggcacgtgcgag

SEQ ID NO: 18992 - DNA, 1375 bp, Arabidopsis thaliana
tgagttctagaagttcttcagtaacagaatcaagtgtcaagtgttcttcttcaacagaggggttggtgggctgtttaggcactcctggagaataagtcagaataggactttcctcctcactcaacaacttgctctctaggcttctttcctctaagtgaactcctttctgatcttctggtgcaaaccattatgttgtgaaattttcgtcctccttgatagttagtgcagtttccatcttctctcggttaataccatttgaaaactttttaactcttttttcaaacatccataattgatctttcagcttcatcactcttgaagataatccttctatgactctgctttgccatttaaatttttttctcatctcataccagtcatcttctgtaggatcttcagtctgagatcgcctttctgttgctctcttcttgtggtcaaaagtcctctttagcttgctgagttgagaagtatagttgacttttggtgaggttctagcttttgcttctttatcaatatccatgtcctgaatcccaaaattctgaactcctgttgttgatttcccagaagcttctctgatgtcaaacttcatcttgatgcctttttcaaggttcagattaatttttccattcctgacatccatgactgctccagctgaagctaggaatggtctgcctaggatcaggggattcttgccttcttcatctacgtccaataccacaaaatctgtaggtatctcaacatttccaatcttaacaggcagattctctatgagaccgtgaggatgtgcaacagaaccatcagctaagaataaagctaagttgcagaacttgaattctatgatccctagccttttagctgtagagagaggcataaggctaacagatgctcctaaatcacaaaggcacctattgaatgtcaatggtcctagagagcatggaagagtgaatgaaccgggagcgtcaagcttttcttggatgactttcttcttgtatgtttcctgagtggaggcactgctaatcatctctagattctgatccttcttgagtttttcaattttggacattttttcagaatgttgagtgttcagcaaaggtgtgtgctttatggtccagatgaattgctgggtggggtggcaggtgcaacaatttgagttgaatcccccccttcttgaattatactgtcctcagtattgagagtttgattacttggtggagactcatcttcttggtggatggtgatagcattagcagtagcatagtccttaggattctggactgcttttcctggtagttgctgaggatgcttcagagcagagattgatgcaaattttctctccacatatttgatttttgaattcagagcttcgaacttgaca

SEQ ID NO: 18993 - DNA, 549 bp, Arabidopsis thaliana columbia
  unsure (1)..(549): unsure at all n locations
agattgccgagtccacgagagaagctcggcccaagtgcagagaagccgttgacgagggcacaaccggagaaacaccatccgccagacctgagaagaaaagtcacaaagaagcagaagatggtcccttgtttcggtgtcaaaggagcaaagacagcactccgcagaactgactaggccccaagaaaccagcctttgcctggtagggagacgattcagctgggcagtccaaaagttaaaagcatgcttggggacagctcctttgaaccaaacggacttggcccaacgcttgacaggacgcctaggccttagaacctcccaagttttggccgcagagaaaccttgacaatcaacatcatcaacacaccaagagtaggagtcactaaccatgagaggcgatggaggagggagagaagctaagtgagataagatggaatcagcagtgagcgatctcgagagaggcagnctccaccccgaaccatcaatagcatccgccacctttgcagaaaatgggattcttagaggtcttgacccacgtccccaaatacttta

SEQ ID NO: 18994 - DNA, 594 bp, Arabidopsis thaliana columbia
taccgtttccacaagtgaggtcttgatgtaccatggcgccacgcaattggttctgatgttgtcgcttgcccactcgcaagctagatttcttgtaagctgattaagtgctcctgagaaaacaatcctaatgttacctactttaaccatcctttattttccgtttctttgaataatgaagaacatagactcacctttagttgcaccatagatagatccactgctaagatgcaccaggccagctacagaggagatgaacacaatgcttccgacaccagatgcttttagaagaggatgagcaatttgagataaatggaaagcggattctaagttggtcgacatgattttggcatattcctcgcttgagtattcaactgttggtttcctgacattagttccaacattgtttatctgaaaacagaacaaagttgagaaattttcagaagggcaaaaaatggacttataccctaacttgtgccggtgatgtttacatgttatatacagatcttgcataataggtggaacttacataagatcacaagcatcctatatgttcaacgataaaccgtagcttagattcttgtatggattgacaga

SEQ ID NO: 18995 - DNA, 511 bp, Arabidopsis thaliana columbia
  unsure (1)..(511): unsure at all n locations
nnnnnnnnnnnnnnnnnnnnnnctaaagcaacatgaacgccatgatcttcccgatgattgtcggcaagttgatcggcggcgtaacggcgattggcgtggcgatgatgctggtgccaaaagaagacgcgaccgcgactaaaaccgaagcggaggcacaatcgtgaacactcgccagctattgagcgtcggtatcgatatcggcaccaccaccacccaggtgattttctcccggctggagctggttaaccgtgcggcggtgtcgcaggtgccgcgctacgaattcattaaacgcgaaattagctggcaaagtccggtgttctttacccctgtcgataaacagggcggtttaaaagaagcggaactgaaaaccttaatactcgagcaatatcatgctgcgggtattgagccggaaagcgttgattctggtgccatcatcatcaccggtgaaagcgcgaaaacccgcaatgctcgcccggcggtgatggcgctctctcagtcgctgggcgatttt

SEQ ID NO: 18996 - DNA, 952 bp, Arabidopsis thaliana
gatcacacctgtgctcctgagtcacttaaccgggctttgtcgaagggagctatagaatatgaggattttcttgcaaccggagatccaaattatccgtggcagccaccagctgatgagtggcagagcatcgctcttggttatacctcgggaacaactgctagtccgaaaggagtggtgcttcatcatcgaggtgcgtatataatggctttgagcaatcctctcatttgggggatgcaagatggtgctgtttacttgtggactctccctatgtttcattgcaacggttggtgtttcccttggtcccttgctgtgctctctggtacaagcatctgtctccgtcaggtagtacttgagagagttacttttcacttaagaaaagaagttcacataaatcagaagaagagctgattaaattttggtttcaggttacggcgaaggaagtgtattcaatgatagccaaatacaaggtaactcatttctgtgcagctcctgtggtcctcaacgctattgtcaatgctcctaaagaagacactatccttcctcttccccatacagtccatgtcatgacagcaggagctgctcctccaccttctgttctcttctccatgaaccagaagggcttccgagtcgctcacacctatgggctttccgagacttatggtccttccaccgtatgcgcttggaaacccgagtgggattccctccctcctgagacgcaggccaagctcaatgctcgccaaggtgtccgctatactggcatggagcagcttgatgtcattgacactcagaccggaaaacctgttcctgcagatggaaaaaccgcaggagaaattgttttccgagggaatatggtgatgaaaggctatctaaagaatccggaagcgaacaaagagacatttgctggtgggtggttccactcgggggatattgcagtgtaacatctagtacatga

SEQ ID NO: 18997 - DNA, 503 bp, Arabidopsis thaliana columbia
aattctcttgcaagaagcttgaaaatcttttaactagcttaacatttttcttgtgcttctcgttctgctcaatcgttgcttcgatttcacttccatatattacaattttctgactaaagaaagaagcaaagcaaaaaggaaaggttttgctttatacatttcaaaaatccatctcctttaatacaaaatcaaacctaaaccatgtaataaacctgaataccaaaatgggatctccactgttttctaaaccataacctataaaatagctagtttcttccaaggaactatctctagtagcattacttatctgggacaagatcatgttggattctctaaggcttctctaagagaagaagctggtgatgaagaagagagacaagaccgcgcgactttgtctttgctatatgcttttgtaacgtcgttcttcagctcgttatatctcatcctcttctgtcgttctctctttcacagtgcctttctcgggatacgacatatcagggatt

SEQ ID NO: 18998 - DNA, 517 bp, Arabidopsis thaliana columbia
cagctcacagaggattatgctgtcaaagtatcagatttcagtttcggttcatctgagacagagactaacatcaacaacaacacagtcatagacacacacatctcagccttgaatccagaagacaacatttacagctttggtttactgttattcgaaatgataaccgggaaactcatagaatccgttaacaaacctgactcagtagatagctcgctggttgatttcttaagaggagagactctagccaaaatggtagatccaacactggaatcttatgatgccaagattgagaatataggtgaagtgatcaaatcatgccttaggactgacccgaaagagagacctacaatgcaagaagtcacaggatggttacgggagatcacgggattgtcaccgaacgatgctacaccgaaattgtcacctctttggtgggcagagttggaggttttgtcacggcgtaagagagccccttcactaataaaactgtatatattttgaagatgtgagttttgtaagt

SEQ ID NO: 18999 - DNA, 1419 bp, Arabidopsis thaliana
actttttctgttctgcagcggcagtgtgtgctgcggctgttgcttgcctgtcccggagtcatcttcatatctctctctctccatggcgaagaagaaatctgtgaagaagtctccgtcctcaatttcaaaagggaagaagtcgaattcaaagctggctcttcgttctgtctctagatctactattcccatggcttcggatctttcgaccaagctaagtacttcgccaaatttagttgagaattcaggcattgtcctgccatctccttattcgatgaacgccatcgacaaccaattgactgtcccctctatagtcttggttgctgactcagatctgattgttgataccactgttgtcgactcagagcttattattgtttcgccggaagatgttgacgccactgtgaaagttgtaattccaactgagccagtcgcgaccattgacgaggcaaaccagaaagatgatgaaccgattaaaatcaatcattccattcctgtgaatgttgcgtctttgccgaacacagagaccagaaagactgaaactaaggatggatctgacttatgggttaatctcgtaaaaggatcctccaaaccgttacagaaacaaggtacaactttcacgcttgattctggtgaagcctgcatcaatattccaaactatatcattgagcgaaacaaaaaagcgtgggattgctttgttctgggtcagttctattctgatcccccagctcagggcacaatccacaatattgtgaatggtatttggagcaagaattttagagatattgttgtgtcaaagatggcaggaaatgcgtttctctttcgcattccaaactcctcaactcgaagtcgagttttgaatcagcgcctttggcagatagatggccaaactatgttcgttgcaaaatgggatccaggagttgtacctgcaaaaccagaattgacgtcagctccgatctggcttgaactaagaaatgttccgcttcaagtttttcatgaagaagggcttcagcgcatagcgggtcttgtagggatcctaaattcttgcacccggctactgctaataaaactaatcttgaagtggccagagttttcactctcattgaccctcgtaagccgcttcctgaagcggtgaatgtccaattcgattcgggtgcggtgcagaggatcttagtttcaagtccatggatgccgcctgtttgtgggttctgcaaagcaattgggcatagcttgaggcactgcaaaacagcccctattacttgccaagagtgtctttcctcttctcactcttcgcttcaatgtccaaagcagaaaactaatggcccgaaaaagaaaagaagttctagcagaagacggtctagatcgccgaaaaaggcctctgttccgaagcaagatgctgctccagtccttgttcaagatacc

SEQ ID NO: 19000 - DNA, 514 bp, Arabidopsis thaliana columbia
cagccacttctctcatcttccttaccaattggtctctcctaatcttccgtttctgcaaaataaacccacattgaatcttaaccaacgaacttcaagaataatagaacagaacatacagtaaggaaactggattacatacccgaaaatcatcgtaagttcggatgatcaagttcattcttgaaggatccattgatgtagacaacattgacatcaaggaagcaaaactaacccacggcgagcttggtctcgaagcaaaaccacctctactcactgaaaaaaatacaccaaccaatcctttagcactatgtaatcaccaataccaagagaccttaaagaaagaaagtgtttataacctctcagtctaggagacctaaaactgacgatataactcggaagaatacacgaattcatgttacaactccaaatcacatagtttctaggattgtgtaaatcatccacaccagaatcaaactcagcagaactcggatacgattgtttagagccggagatgatt

SEQ ID NO: 19001 - DNA, 658 bp, Arabidopsis thaliana
cttctatagatattgctcaacaattagaaactctacatctcaattcaatgggatgtgccgtagaacggtgaaagcaatgccgagtgttacattcacttgtgcaaaaatagacaacactacaggtttctcttgcgctatctgccttgaagactacattgttggagacaagctcagggtcttaccttgcagtcacagttgagtatgttgtgatagtttaaactatctcagcttgacaacaaacttatgattctataattcttttggtgttttctcagagtttcatgtcgcttgcgtagactcgtggcttatatcatggagaacgttttgtccagtgtgtaaacgggatgcgagaacgaccgcagatgagccactagctacagagagcacaccgtttctcagttcttccattgcaacatcatctctagtgtgtatagactctcctcctttgggatcctcagtttctttctctccagcgcatgtgagctcgtccttcattcatcaatttgtcaggtcttcgccaatgaatggcagccgtatctcagagaatcttaggcgacaagctcaccattacagtcatcatcacagcgatcacacctctctatgaagtcttccattcactgggttattcgaccatgtcactctcaacgcgatgggcatg

SEQ ID NO: 19002 - DNA, 624 bp, Arabidopsis thaliana
cccacatattgtccgggcacgccagagttagttagggcagctgcggcacggtcggaaagtcattcaacggcgtctagcggcggtctcacgctggcagttgaagaaaacagccgcgacggggaggccaagatcgttctcatgagcaaactctcgagtgttgaattggtctctgtaagatggcacagacaccacacttcctctacgggtctgcttgaacaacaaatacacaaagcggtggatccctatgtttggccgaggcatctcgtacccgattatctctttacctgttttgtattctcatattaaaatctttgaacagaaaatatccgtatatgaaatgtgatttgttatatctaaggatatatgtataggacttaccaaatgatacatcagtcgtccccgggatatcggtaacaatcctgagattagtcattgcaagaaaatgttatgtatttttattatatgtctcttaacattttttatttgcttctttggtaaactctaacttaacaaaatttgaatggaacaaaatttaccagtgcaagtgctctctcagataaggatcactaggtccaggaacatcaggatcagtcataacatgtttgaaatattcgatatatgtga

SEQ ID NO: 19003 - DNA, 567 bp, Arabidopsis thaliana
caactatatccaaaaccgcggattttccactgccatcttcaatcatgttgtaatgtgtattactaaacagaagttgcggtggttaaatcaacaagagtgatccttccactttgggttcggtcaagcttgtcaaactggttacagatttgtataaagtcctcttgggttattttctccatctgctttagtttgtatattgcaaactctgctaaactgcaaaaagaaaaagcatagtagaaaactataatacactgatagaaccaagaggatcaatggactaaagatcacatgatattagtcaaagacattcagggaatataatagtccacaagcgttagttagataattagggtatgtgaatctactaaaatcttaagctattagaattgaatctaactagagaatggttcaatatcaacgaagcacctaattcaaaaactggaaagggccaatgaggaaaatttcaaaacttttgtaaaacataatctttgaatatatatttatgaaaacgctattgttgatatataataattcttctctcttgctaataatgtagatattttttgt

SEQ ID NO: 19004 - DNA, 587 bp, Arabidopsis thaliana
catgcagtcttattttggagcaaatgtgttacatcctcgcaccatcattcctgtgatgcgatataatattccgattgtgattagaaatattttcaatctctctgcaccgggaacaataatctgtcaacctcctgaagatgattatgaccttaaactgacaactcctgtcaaagggtttgcaactattgacaatttggccctcataaatgttgaagggtaagctactttctccgttgatgtgcgagtgttatttccattcttttaaataacaagctgcattcatacctatcctattgactgctctcttccaattcattctgatagtactggaatggctggtgtaccggtactgcaagtgacatttttggctgtgtaaaagatgttggagctaatgtgattatgatatcacaggtgccttagtttctaactttaccttagtattatagcaaattttttcattatagaggcagagtcttatgtcatggatatattcattgttcaggctagcagtgagcattctgtgtgctttgctgtgcctgagaaggaagtaaacgcagtctctgaggcattgcggtcgagatttagtg

SEQ ID NO: 19005 - DNA, 491 bp, Arabidopsis thaliana
tgatgcgaggatgtaacacatttgctccaaaataagactgcatgaagttaagagttttgatcagaagtttgtacttggcctcctgaatttaggataacaggaacgcaaagtttaccatttcccaggcctcttgataagaaagtgtctggagtatcactgcctcattaactgcagcaaaacttctagttatttgtaaaacggtttacaggcaaagaaaaaaaaaacaggacatacctttacgaggatccgcactgtatacaccatcaacatctgtccaaatggttacttgacgagctctcaataaagcacccataatagctgctgagaaatcactcccatctcttttcaaagttgttggaatattttgcggagtgctagcaataaacccagtcgcaataataattttcgacggatttaaggagaccatttatcgagtctcttctcagattcaccaaaatcaggatcaacatgattagagctggtgggattac

SEQ ID NO: 19006 - DNA, 953 bp, Arabidopsis thaliana
ccagtctcaaccatttacaccaaagatcatatccctggcgaaagagtttaaggaaggaaagatgccaagtgaggatgatgttgctgagtggaacggacaggaatgggagctgtacttggagaatcttcctaaatcatgtgaaccttctcaggtactctttactcctttcttcctctaagttaatgggagctgtacttggagctgtacttgctgagtgaatctttatttcttcctctaagataatgggaaatggcttgacttaggttgaactactcaataagcttacataaggaggagaaaaaggcctaactaactgtcagttaggttagctcaatagttactcttggattaatgtggggctagtgaataatgattgtggaaaaaccctcttggctttgggagagttcatgattgtggaaagtgtattggctttgcaagagttaggatcttatcttgtttgttaatgacaatgctagtcaacaaaggaaggattggtgatcaggttcaaacctatggctaacacccactttgctcattgatgaatcaggtcatggccttggacaagcggtacagactggcagaatcgaaagactatgaagtgaaggtctcgtttctgcaacttgcagtcacatccaagtgcagagagtaccatggggaagtgaagaaaacactaaaagaggtaggaaggatgaagtacctgcgtccactcttcactgctcttgcacaatctggtggaacagaagagaagcagctggcaaaacaggtgtttgcagaagctcgagaaacttatcaccccatagctcagggagttgttgaatctatcctctctaagtacatctaaacaagaccgttatgatagcttgagagcactccgaaaaacaacatttcaataaaactcagtcactgtaataacaattggtgcttgagagagtcataaccataaattgaattgc

SEQ ID NO: 19007 - DNA, 468 bp, Arabidopsis thaliana
tctttttctgcgttcttcttctcctgcgtacatatatggcttataagaatagttataagaacgtaaagattcttcgtcgtctgatgtttcgtcgtggtctgattgttcataatcttctaagttcgggtaagtatcttcatagatctttgacttgagtagctttgaatcgatgacgttaatatcttctacatggtctgctaaagcgtagaatctactacaatctttctcaaagacgttgtctacaaagacgcagactctactcctattgcccgacgcttcatggtattctccaaaacctcgaatttcaacacattgaagagtattcatttcagggttatagtagaaaatatagaagggttgcttagatgtataatcagccatcgacaaaacaatttcacccgtagcagtcactccaactaccgaaacataatgagccaaaaatatatcatcccacaacacgtaggcata

SEQ ID NO: 19008 - DNA, 1460 bp, Arabidopsis thaliana
tgatgaggaaacagaagctggaaccccaccaagagttaactatacttctcaacttagcaagctgaagagaacttttgaccacaagaaaagagcaatagaagggttagctcagactgaatatcctacaaaagataactggtatgagatgagaaaaaaaattaaatggcaaagcagagttatagagggattatcttcaagggtgatgaagctgaaagatcaactatggatgtttgaaaaaagagttaataagttttcaatgagtattgatccagagaagatggaaactgcactagctatcaaagaggacgaagatttcacggcagaatagtttgtgataagtaggttttaacgcttacttatgtgctgaatgtgaggttcagttcaattcctcttaaacactaacatgtcattgcagctatagggggtgtcaaccagtccaatgtattgctagcaatcaagatgtgtacagaagcaactaagtcaagccagattataatgatggtgggtttctagtaacaatcgtaggtcaggattcaaacaagtaaaaatgagaacttaagagccctactcgatcattgggtcgagtagaaccaacaggtgacaaaattaagaactaaaatgcaatcaacaggggatacaaataacaggtaaataaaagtgcaatcaatcggggatacaaataaatctaatagaagttcaaaggatggattcattgataagggcaactctagggttcatcagatggctaatcggctaaaggtagataccatgattatagattcaaaaaccaggtcaatccactcttgtgacagagaccccgaataacagtaccacttcctaatctcaactctcgttgatgaaacatagcagagcagggtttaagaaacaatctaccaaagccaatatgcagacaaaccaatctcttggtcgagtatacaaatctctagaattcgtaggtaagacatccatttgaacgtcttttggacgctggacgctatgatcgaatctccacattagccaccgaaaaccgcataggggccaagcgaatccagaagggatctaacctaatcttaaccacctgactaacctagacattaccctaatcttatccatcctcaagaaccctaatctctactcaagcatcataactaagaacacaaacccagaaattactgaaatcataccaaaatgcaatcaacagaacatgtaaataaaagtgcaatcaggggtgaatacaaataaatctaagaagattagaagtcctaaggatgaattcattgataagggcaactctagggttcattaggtggctaacaggcgaaaggcagataccttagacgatagattcaaaaaccgggtcaatccactctcgtgacagagaccaacaagctaaacaactttactcaaagaactaaatgcaaaaacaaaatagattaagagtaattaagttttgaatattc

SEQ ID NO: 19009 - DNA, 546 bp, Arabidopsis thaliana
taaaagcgttgatgaatgtgactacaggtatatactgcagcttcagatacaggaccatacagatcttacttgcgtcacagcattccaggaggctggtgaagagataatgggcatatctgctaaagatttgtattatgtgaagaatgaacacaaggatgaggaaaaattcgaagatatcatccgtaaggttgcttttaccaagtacaacttcaagctgaaggtaaaagaagaaacattcagcgacgaacagcgtgtgaaagcaacagttgtgaaagtggacaagctaaactattcagcagataccaggactatgttaggtgctatggataaactcaggaccagagatgcaaattctcttcccattaacccagaaggatccgattacaatgctgatgtggttaatactggtataggaagctcaggaaccagagatccctcatcggtccaaagaagggatttcggtttacatgcgcatcaatcgggtcaatctgggaatcactatagtggtggtggtgctctactagctgcaatgtctgtggaaacagt

SEQ ID NO: 19010 - DNA, 957 bp, Arabidopsis thaliana
ccaaaatgcttacaaggctatctcatcattatcccctatgcatatgcaatgatcctaaatgaaacactctagactcgatcctaaatgcaatgcaactacatgaacactgtgtttttgtgaaatcattttctgaaatttttcaattttttggttttttctatgccttagatgaatgcagactcaaaattatatacaatacaacacacacttcctgagccctcccctaaacttaaatcacacagtccactgtgtgaccaaatttggaagagagtactcaggacaaaacacatcacagaaacaaaataaaaaacaggagatggtatattacaatggtggagtgaggtgcttacctcagtggaagaaggagcggagttggtcgtcaatagccgcatgtgattgctcccaagccatcgaagaatctccctgttgtgtctcagcttccccttgggggtactcgacctctgctcattcgtcgcggccagcaccgcggtgatgatactcgacctctcttcttctgctgcggccagcaccgcggtcgagtgatttactgacatggagaagttgtgattgcatcattcgctatactcgatcacatcgtcattcggtctctatagggtgtggtcgagtgatttcccggggtggagaagccagaacaatgtcgagtgtccttgattgctccatggtcgagtgtattgctgtttcctcaaggccagaatctatttccctcagctcttcatacttatctcctgaaaacacttaacaagatgcgtcaaaaacaacaaggaaaattaaagatatgtacaaagataggcatgggacttcctcccaagtgagcttgttttaggtctctagcttgactcctcatactcattaagaagaaaatgggtgatagagaggattgcatagtcgctctgatctcatcatcatattcagcgcctctcttgagagatgagtagc

SEQ ID NO: 19011 - DNA, 1355 bp, Arabidopsis thaliana
gaagttttatggatgacttttctgtttatgggtcttcatttgaagcatgcttaggggaaccgcaaagttctagctagatgtgaagagaagaattagctttttaattgggagaaatgtcatttcatggttcaggaaggtatagttcttggtcacaaagtttcaggtgttggtattgaggttgataaagccaagataaaggttatgaaaagtttacaggcaccagatagcgtgaaatctgtgaggagttttcttggacatgttggattttacaggaggttcgtcaaggatttcagtaagattgccaggccactaacaactttgcttgctaaggatgtgaagtttgacttcaattctgagtgtcatgctgcttttaatgagattaagaatgctttagtgagtgctccaatagttcaagctccggactagaatttaccttttgagataatgtgtgatgcgagtgattttgcagttggagctgttttaggacaggggaaagacatcaacttcatgttattaactatacaagtagaacacttgatgatgcacaacagaattatgcgacaacagagaaagaattgttagctgtggtttttggttttgagaagttttacccttatctggttgggtccaaggtaattgtgcatacagatcattcagcactcaagtaccttatgcagaaaaaggatgctaagccaagattactacgattgattcttcttcttcaagagtttgacatcagtaagggataagaaatggattgagaatggagttgctgatcatttgtcaaggatcaaggttgaagatgacgttcccatcaattatttttctacctgaagaaagtatttacttggttgagacaagtttgcaggaaaatcttagcagtgtcaattcacgcgcagatgagagctgcaaagaatcagtgtcgatcgacaccacaccccctgtcgttcgacaccatcgcgcttcacagacagatggttctgcacctccttccccgcccacatctatttcagttccctgtgataggtacttctccatctcttctcctacttatccttcggttacttctttagaatctttgaagtgtgcttcactggtaaacgagcatcgggtttctcgagagcttgtttcctctgctgattttgcaggtaacaatgggagtatcgatcgacaccaccaccagtgtcgatcgacaccagatgctgcacatagccgatctgtttacacaccgcattggaaggcgagattgcagcataagtcccatgttcctccatccaagtcctgaactccgccaagttaagctattgactataaacaagcgcttagtaggaggcaacctcactggtatggttttc

SEQ ID NO: 19012 - DNA, 952 bp, Arabidopsis thaliana
ctcctgtggaacctggtagcatcatctttgatgcaataagtttctcaactccctaaaaaccaccaaatgataaacacttagcaagaccattcctttatcaaaaatctgcgtaaaatcttacaaaacccaaaactaacaacagattcacaacatatcgaacaggaaatgaaactaagggactgtaaaatgtgtcatcttgggtcaaaatttacacggtatatattacatcaaatctacaattctgataacaaaaatgtgaatacttcattccaaggttaaatcacagcacgagagactaaacccactgaagaaagtgacaaagtagtataaaaatcaatagaggaaggaggaagaatcaaaccataacaatcccatctttgcacttgattccaacaacagtcctgcgaagaaaaaaaaagggaaagacttttaacaaaccctaattcgtgtcgataaccaaaatctcaaagttttcagaagctaaatccgatctactaaagggcgaagatcgaagaagataaagccaactaacccactgttgtcgacagctttagcgacgtactcgatctggaaaacacggccatcgggagagaaagtggtgacggagagatcgtacccagttccaatgctactcatcttccttgattttttttttctctgactcttttctgatttcttcttcgtcgagtgatttaagctgagatcgaagaaaggggttttctttgttctcaagccagagacaagccaaatctttggagctccgtctgactccgggttggatattaaaacgattcgggttgttttgtcgggtgggtcgattcggttattaacgggctttattaatattatgatttggcccattctttggtaatcttttaacggtatcgtgaatatttttaagtgattttcctcttttgtataattttgaataatcagggatccggacgttact

SEQ ID NO: 19013 - DNA, 1063 bp, Arabidopsis thaliana columbia
gacataatgcataattccagccgagatgatagtgccgagcctacgacggagtctgtccctcgagaacacccctcataacactcaaaggctcctcgacgaactcgatctgatcgatgaacgagagattcaaccctggttcgtatacaaaattatcagaatgaaatggctcgtcattacaactcaaatgttcggcaacgaagattccatgaaggagatcgggtcctccagaaagttttccagaacactgccgaaccgaacaccggaaagctcgggacgaattgggaaggaccgtacttaatttctaaaatcgtccgacccgaggtgtatgagctcgctgacttaagcggcaaagccgttccaaggtcatggaacgcaatgcacctaaggaaatactactactaagtcagaggtgattaaacttgaactacgaggtggcttgatccctgaaaagggtaggtaggcagctcgtcttcggacgagttcagctaccccccattaaaaaaggagggagtgggtccgtatattcatactcctatttttattatcttgtagattttcgaaccgaaatatgaataaaaattcttcgcaaccttttattcagagcgacggctctgagtatctattacgcctattcggctacagcgcgctatacaaatacgaggtgaaatctatcatattatttctgataagaaattttcatcttcagaaacccggttatacttttaacattggtatcccagctcgttcctaaacgctggtcgggaagtgaatacgatcgggtcgcaaccgagagacttcactttaaaaaaaaaccaatcttatactggtaaaataaaatggttcggaactaataaaccaaaacttttggatttcaaaaaagaaacttaaaattggataaagtcgtccaggcacaggttctacataccatcggataaagctatccaggcataagtattataaccaaacaataagaaaatagagaaaaacaaaaaccgcctcgggtccctaatcaagatcttcagattggcggttaccttggcaggaaggagcgatccggcttgat

SEQ ID NO: 19014 - DNA, 743 bp, Arabidopsis thaliana
gaggatccccgtattgtctaatttcaaaaataaaatctataaacaaaaaattctgctttcaaatgataacaaaattctctacttaattttgtttttggctcagatacattccactgttccagatttcataatgaaatggctactcgaaaccaataaagcactatttgttttttgaatgtaatgttaaattaaactcgaaagaaaaaataacgtttttacaacttgtgcggcagaaaaaatagaaagaatttgatgtgtttaagagtattttaaaaaaaatttatgctgtcatgatctcactttgaaccaagcttgcatgcctttgtcgtaccgtcgatctcccgctctttggatgatggtgagttgatttctgacctgcttatcaatccagctgattaactgtgtcgaagtgttcgctgcttcttcgtggcgtcgtctgttcctctccctccaaattgtatgaaccgtgacttggaaaacgtacctgattaagaagccttctactcgattgaaggacttgtcggatatgtggtctagaatctgtggccatctcgtcgtgaaactagacttccatagctttttagctaccgcagtacagattaccgagatggaatcacaatgatacaggattaacgtgtggtgagctggtgagctgacgagctggcgagctggcaatgtgaagtcggatgttaggcaaagtacttgtgagctggcgagctggcgagctggcaatgcaatggacg

SEQ ID NO: 19015 - DNA, 592 bp, Arabidopsis thaliana columbia
gaaaggcagtgatttcatcaaaagacgaagactatcatcaatatggtctcgggaaagaggccaagacttatactacaatgccctccaagagctttaggttaagaccaaaaccttgcttgattcatgaaagtttaaccagaactataaagagctttacattttcaggttcttgaaccgtgcagcattaaagaacaaagaagatttaaacacgagtggtgactcaagtaataacatgtggaggctatgctctgttcaggaagtagaagacttcaaagccattctccgacttgtacctctctgggcagccgtcatgttcctcagcactcccgtggcagtacaaatgagcatgacggttctccaagctttggtcatggaccgcaaacttagcccgcacttcgaagtctctgccgggtctctacaagtcatagtactcgtctatggttgtgtctttatgatgctcaacaactggatcatctatcccatgtaccagaagctaatcggcaaaccactgacaccacttcaacaagttgggatcggtcacgttttcacgacctaagcatggcgatatcagctgttgtggaacaaagagact

SEQ ID NO: 19016 - DNA, 483 bp, Arabidopsis thaliana columbia
aatatatatgtactatgtctcgaaaatctttaaatttttaaccaacctaatcattcctcttttaatggaaaaaccatctcaaatgatgtaacattattctaaatcgtgaaaattctaaatatagctacttttgttttcacatgcaaaaatacaaacacttaagttagtgtttgaaacaataaagaccgtacttctacgactaagtacgtagagagtaacgttacatatacgtaaataattcaagttgggataatttgatatattgagagtgatgagaaaaagggtacctcgcaagtagccaagcgaggtagtgggacgagtagtgcaagaacgcaagctacaacaccaagcgcggtgctagccgcgacttgaagagggtgcataactggatcagtcttagctcctttgatataaccaataacatatataagaacgatttgtcctaacgcgattctcttagccaccaagtgagtcgaactgtta

SEQ ID NO: 19017 - DNA, 411 bp, Arabidopsis thaliana columbia
gtcagtatgagaagattattgagcttttgacaaccctttttccactttgggtacttatgctatacctttctttgatgaagtttgaaactttttgtgagtttgataactgatatggagcaatgtggtttttgtttgttgtgcaggttattttgggaacacttgttggcatcttcaagccatccttggtatgctttttatgcttctttgttattgtttatttactgtagcaatctatgtttttggggcttatagatttaagttttgtaggttacatggttggaaacagatctctttactctaggtcttggatttcttatgctttccatgggtttgactcttacgtttgaagatttcagaagatgtttacgtaatccatggacggtgagagccaatgaacactggtgtgttttt

SEQ ID NO: 19018 - DNA, 748 bp, Arabidopsis thaliana columbia
tcaactcaatcagcaatactacaagaacaagagatgacaaaatgtataatatacagtttcaaccacaacacataaccatacatgtgcttgcattttcgacatcgatacatcttttctccctcatacattttcacagccccggatcgaatcaccgtgcctttgaacatcatcagaatcccgcggtgctttactctaacccggccaatactcgggaatgtctctgtgtcaaaatcaaaatcagctaagagaagcagaacaaactcgaaaacaagagatacacacacacacaccagggcttcgttctagaggagatccactagtgtttatacgaacatgtataaatctcttctcaattccaatcttctcctcaaatttcttcatatgctccaaagcaattttctacacccaaagctaatcgaaatcaccatttcgtataatcaaattttggggaaaattgagtacatacgtgagctagaatggctgaatcgtcgaattgccgaagatagtgttcgggatctgagaaaacttgacgcgctagagacggattatcgtcaacgagttctgcgtactcgatgaagagagggtagtgaagtttgggatcagaagagagagagatttcgcggacgtgatcggggtagtgctttactagagactccgtcatggattctatgtgctcagacgtctgtgtcggcgattccattaacgctggcgaagaagaaggtggaggatttctcggggaaatgaatga

SEQ ID NO: 19019 - DNA, 504 bp, Arabidopsis thaliana columbia
  unsure (1)..(504): unsure at all n locations
cgtactgtaggtgatgagacacttgcccacttttattccgatgctgatggcccactcattaatgatcctcaacccatcacaatgatagatagagggaaaggtataatgatagaggatggtttaaccactaaagaggttggatcaggttcagataacacaagagtgttggagttacagagatatgcaatgttcgtgaaggagacaccggttgcaacggtcttgtatgaccgagatgcaccaccgtatttcgacgatccaggggaggaaggtaaatatttgaacaatatgctaataatatgttagtgtgactctaagtattgactatatctatataagcatgtcattattagatatatttaataatatgctaataatgatgttagcgtcacactaagtattgtatctaaaaccaataagtaattagttatctgtgtattgactatatctatataagcatgtcatttatcagatatnattacattgttcttacttggtttgcggact

SEQ ID NO: 19020 - DNA, 551 bp, Arabidopsis thaliana columbia
ggacatagacaggtaacgccctcttgtaagcttgaaggaaaaatgtaacaccatgcttaacacatgactcatttccatgtattatctgcaagtaacaacataagtattgcgtaaaaccatgcatgcagactcattgacgatacatcaactatcgacaaatgctttgttcgtcttaacaacccaaaaaagatagtatcatagaaaacttaccgtacaggggactttcatggtaggatccagtttgatatcaactccaacagacttgtaatatttctcaatcgctcttaaattagtgaacggttgcgcggttgcgatatcttttacgccttgtaagattgaaagatccttcccaccttgtttgttaaggaaagacttgtacgatgaaggaaggctttcttgtttcaaaatgtaagcagacctgaaaaaaaaacacaaaatcgctaatctaagaatctaataacaaccaagaacctagtaacaactagctgaaccacaaaatttaatatctttgtagagagaaagagaaagcatacaaaatctgtgaggaagag

SEQ ID NO: 19021 - DNA, 438 bp, Arabidopsis thaliana
gtgctatcactaaattggatgtaagtttataaattagcatagcttaccctctgacttgattatatttgaaaccctattttttaaattttataatttttatgtagtataatcgaattgatgcaactattcaagaaggcatcattcattggaagtacaaggatgtactaaaagaggggttttggtattacatgtccgactttcaagttgtggttaataccatgcctgttagatactcattatgttcaaaacatatcaagtttatgagacgaacaaacatgtggcatgttccttctctttcaataagtagattttttgagtttgtggctccgctcttattttctatttgagatcatacggtactctgttttctataacttatttttcaactttatatcttggttatctcttaacttacattatattaaacgtttcagatgc

SEQ ID NO: 19022 - DNA, 565 bp, Arabidopsis thaliana
taagcaatgttacacagtatctctcactaaacatattttctgggaaacaaaagattttcatcatgctctctgccatgcatctccttcttcatcacaccttccattgttctgactccaggttgcatttcactcattagcagcagcagccgcagcctgttttaacaataatccatccctattaatcaacacctctgcctactacttccagagacctttaggtgtgttaactgcaaacttatttgctacaaacgcaagatggattatcacttacctggttaagaggattatctggtgatttcttccacatcttccatatcaagtccttgtactgtgtgtgagttagacctggtttctcagacttgagccttggaagtaccacttcttcatatgcctaaatcacaatcatagaaacaactcagtatatagatccaccagaatttggctttgcgtatcatgatcaatctatcaaacaattatcatttcaacaacagaactctcctaatatataacttcaaaaattcatacaagaacaatccggattgtctgctaatatgatcactacaag

SEQ ID NO: 19023 - DNA, 1120 bp, Arabidopsis thaliana columbia
gatacattatctccttggttttcgtggtttcttcacagaacaacgtaaagaagctggaacctgcaatctaagctcatctctttactacggtggtcaagatgtttactctcaccccacacacaaccatacttaccctacagtgagttaacataactatcattttatcatccaccccttcatgttactttgattgttgattttttcatagaagagacaaaatcttttgactttacaaaacgttgaatcattcagattaacaaggatcagaacagagataacaacgatgccaattcgtctgacgcctctagaggaaactggtggcaaggtactatacatatcctaaccaaatgatgtttgttacaatattcacgtctttgtttgttttgcttataacatatgcctaatcttgatattttcgcaggttcactatattactagaagcttctctaagtgcgtctctgtagaagaatatcaagttgaaacagaacaatatttgattgtttgaacattttgtttgttcttaaaaaaactgtttcaatgatgtatacttgactgtctaatgttaaaccaaagattagatctctggctacagaactaatcgaatctgaaacctcaaatccatcagacaagagattgtagaaacccaaaaaagggttaatagataaatgcgtagagcacaaggaacacatagataataagtgcagaaggaacaagtacaacaagaggaacaatagctgcaagtgcatgaaagcttctcttacattccaaaggtccaagtttaatctgaacaagatccactaacgccattgtcaagaacccacatcccaaaaccgacgcaacacacgaagcaacaatcccaacccttaaagctgccaagttcacacgcccctctcccgcgttcaacacacgcgcctcctcctctaaacagttcccgtttgttgttgttgttgttgtcctaattgcttgcttgagagacatagcgatgagactggagaagaggaataaactgaaggagtaaacatggcttgatactagcctctccgctaatgcggaccttttgcagagatacatcggcggagatggtggtctcggaggctgatgaggaaccggggaagtgatg

SEQ ID NO: 19024 - DNA, 496 bp, Arabidopsis thaliana columbia
cccacagagtagtggaatgattgcaagtgatccaaattcccatcctgtgcttgtgaaatagcaaaccaaatccggcaagcttccaggaaccagccgaagtaataaaaacgttctgcaaatgaagttgtacataaaccaaaacagcttcaaggaagatgaacaagcattgactataaatttcgaaaagcaacctccggagatacagcacgatgaataagatgggcgttattatgaagaaagttcaatgtctctgcaatttggagaagaccatgcttcacctccaacaagctcatctcctacaacaattataagatacagtaaactatcttccatttgctcactcaattgctcaaattctaacgcaccatggacttaagatctttgggaacgttatcaacattttccacattcccaagcgcattagccacggatgcgaagagcggctccgtaagcatagccatagcattcttatgctcatcaagcgcctgaacaacat

SEQ ID NO: 19025 - DNA, 945 bp, Arabidopsis thaliana
gatagaggttatcaatctcaatggagaggatgaaccttttatctgacataggtgttcacatcactaaatggcgtgtctatgtggagattcttggtctctgtcatcataatccaccgcgagatggtgttgaaaccacgattatgctgatcgattcaaaggtaattgtataaattagcatatcttacactgtgacttgatggaatttgaaaccctaaatttctaaatttaataattttgaaatttttatgtagtataatcgaattgatgctactattcaagaaggcaccattctgtggaagtacaaggatgtactcaaagagggtttttggtattacatgtccgactttcgagttgtggttaatccatgcctgttagatactcattttgttcaaaacagatcaagtttctcagagaaacaactatgtggcatgttccttcactttcaacaagtagatttttttagtttgcggctccgagcgatgttaagaatgctgcaccgcaggatatggagtttgtgtctggtaatctcttattttctatttgagatcatcttgtggtctgttttctataagttattttcactgaattgttatatattcctgacaacttactctatattaaacgtttcagatgcaatgggtattattacaagggtttataacattaggagattcccatttgtatgtcgtcagagagagacaaattatgaagcaagatatgtgaaattcatgattgcggacaacgtgtaagtcttttcttaaggaaatatatcttagtctatttctactcttagaagataatcattgataatcttattagtgatgatattgagttttctgtaataggggaaaagagataatttgtattgctgttggtaggatatgtaagtgtgttgtgaacactggtcaaagagaatcagtttgattacttacaattatgaaccta

SEQ ID NO: 19026 - DNA, 613 bp, Arabidopsis thaliana columbia
tgcaaaatatatccaattaatatattttaaaattagtttcattcgacgattttttagtttgcaaattttcattctgcgaaatttttattctacaatttatgtcattatgctattatgcaattttagcaatcggaaccttaaggaaaaaaaccgacaagcgaaccgttctgtatgtatttcggttattttcagccagccctatttatttggttaagcttagattaaaaagtttcggtttggttcaatttgatatggtttggaggtcaacaacaaaatcaacgaactgaataaagcgatcgcgttggttctcttcttcaaaacaagctctctctgtccctctctgtctctctctttgggtaatcggaaaaatcagaaaaatgggaaccctaggacgagcgattcacactgtgggtaatcggattcgtggaactgcccaagcccaagctcgcgttggttctcttcttcaaggaagccaccacatcgagaaacatcgtaagcttccacttgcttcgctctattgaaccctagatccaattctgtatctctcatttgtatccaataattcgttttgattcgagaaatttgtagtttagattgaaaactttgatttgag

SEQ ID NO: 19027 - DNA, 603 bp, Arabidopsis thaliana
ttcattcaacaatctctcatcaaatttctctgcacaaaaaataaaagcaaaaacttattttttcgtttaacacacaaagcaaacaaaatgtcttctaacaagattgtgttgactagttccgatggcgagtctttccaagttgaggaagtggtggcacgaaaactgcagatcgtaaagcacctgctcgaagacgactgtgttattaacgaaatccctcttcaaaacgttacaggaaatattctctccatcgttctcgagtattgcaagaaacacgtcgacgatgtggtcgatgatgatgcatctgaggagccgaagaagaagaagcccgatgatgtggcgggccggttcctgaatcaactgaagaaggagatgatgcatctgaggaggcgacgagaatctcgatgcttgggacgcagagttcatgaaaaatattgatatggaaacaatcttcaagctcattctcgctgctaactatctcaacgtcgaaggtcttcttggtctcacttgccagactgttgcagattacatcacagataagacgccagaggaagttcgagaactctttaatatcgaggatgatttcacacatgaagaagaagaaga

SEQ ID NO: 19028 - DNA, 867 bp, Arabidopsis thaliana
acgacatacaaatggaaatctcctaatgttagaaacccattttataatacccattgcatctgaaacatttaatatagagtaagttgtcaggaatatatgacaataaaagtgtgtttcggcataagttacagaaaacagaacatcatatgatctcaaatataaaataatagattaccacaaagaaactccatatcctgcggtgcagcattctcaatatcagacggagccgcaaactcaaaaaccctacttcttgaaagtggaggaacatgccacatggttgtttgtctgagaaacttgatctgtttcgagcaaaatgagtatctaacagacattgtattaacgacaactcgaaagtcggacatgtaataccaaaaaccatcttttagtacatccttgtacttccacagaatggttccttcttgaatagtagcatcaattcgattatactacataaaaatattcaaaatcagtaaatttagaaatctagggtttcgaaatccaccaagtcacagtataaaatatgctaatatataaaattacctttgaatcgatcagcataagcgtggttacaacaccatctcttggtggattgtgatggcagattccaagaatcttcacatagacacgttatttggtgatgtgaacacctatgtcagataaaagatcatccgctccattgaaattgataacacctatcgcactctaagccagaagaagaatctaagaactgaaaagaagtctgtaaacaaacacacagaattgtctattttatagaagattgaagagttgcaatcattgagaaaacagttctagaacatccaaaaatcgagaaactgaaacgttaaatacattttaatattattaata

SEQ ID NO: 19029 - DNA, 507 bp, Arabidopsis thaliana
ttccatatttacctgaacatagttgcaagtgttgattgattgaataatattctaggcttgggggctttggagtaacgggcgaccattagaactcgtggatccagctattgtagaaaattgccaaaggaatgaagttgttcgatgtgtccatatcggtcttttatgtgttcaagaagatcctgctgagcgtccgacgttgtcaaccattgttctgatgctcactagtaacactgtgactttacccgtgccacggcaacccggtcttttctttcagagtagaattggaaaagacccgcttgatacagatacaacgagcaaatctcttctagggtctgttgacgatgcatccatcacagatatacatcctcgatgatgatgagtttttccttcatacctgattcctgaatctattggtgttgaaaataagttaaaaacttcttttgttatagaatgtttgtattgtaattgtaaccacaagcaagtataagatatataccatttacacgt

SEQ ID NO: 19030 - DNA, 1366 bp, Arabidopsis thaliana
caaaatgaatccacatgggtgaagaagctcatatgtttgttttaactctcaaattcatatactaaacttgttcgtaacagttggaaagtgcataataataacttgatactgtataatcaaaaatatgaattgttgaaaaaatcataagtactagttaagcaaattatgaccaagacatagcctagtgaattgtaatatttccggcattgtgttatcatttagatttatacaacacaatgcatgttttaaaaaaaaaaattatattgtgacaattgcatagttaacaacctagctaaacactaattacatgtgttacagaattaaatatcacttaaacgtccaaattgccgacaaaaaacgtccaaattagcggaatagtcatcacattgtgaatttattgtttgattgatcactttaaaattttcagttagctattttgcaataataataactcataatttagatgtgacacctactctttttgttctaacatagaagaaaaattcacaaaatttcatgatttgaaataattcacaacttataaacaaatcgagtcccaattactctggtataatctttgtatgctttctctctcaaaatctctccttctttctctgtctctctctatctttccttcaatggagcttgttcattctgcaacatttccatgtaaacaaaagctactcatcgcagtgaccattgctacatctcttttaaccatcatccctcttcactaccctttgcttgaagaccctaacttcttcctcaagcaacaacctccaagccaaagcagcatcatcaacctcgaaaacggtgttgtaacatcacatgacagctgcgacatattctcggacgagtgggttcctaaccctgaggcaccttactacaccaacacgacgtgctgggcgatacacgaacaccaaaattgcatgaagtttggaagacccgacacggatttcatcaaatggaaatggaaaccttacgggtgcgaagacggcttgccggtatttgacccggttaggtttcttgagatcgtgagaggtaaaaccatggcgtttgttggtgactcagttagcagaaaccacatgcagtctttgatctgccttctttctcaggtaacaccttttttcttacattagtttttcttgtttgtttttttgtttgccttttattgaatatctagaatgatatcttgataaccatcaacaaaaaaaaaacatttgtttgttaataatatttctcctttttttttatgaacatatatggcttttaattttttacaaattaaagttaatcttttcgtttgctagcataaatttcgattttctaaaataagaaatctaatatatgatgtaaacatatcgga

SEQ ID NO: 19031 - DNA, 486 bp, Arabidopsis thaliana columbia
caacaatattcttcaaaaaatatgccacaagtctctccttgttctgcgttcacatcaacgctgtttctgcctatgcttctcttgcaagtctaaaagcaaacttaacatcgttccgtgcaaccaaaacagcgtcaatacaggccattttttctaaaatgccttgaacttcttccacaagatggtcaatcttctttttagacttccctctaccaattatctgcaatgaaaatcagatatattctccttagactaagacaatatatcatcaccgtcaaagtcgtaatcatcattactcttctaagattctacaataattactagttttgatttgaaaaaaagctcaagttactagttgttaagtggtttttggtttttatctcattgaaaatatattttctcacccttcaagatattaaaacaattagaatttccaacgattttggaaaactagtattttatcttgaatggttctccatgttcaaagaa

SEQ ID NO: 19032 - DNA, 561 bp, Arabidopsis thaliana columbia
gtaataagaataagaataagaattcgagcgccggaaacttgatggactgttggaacgcggggttggagcttaagtcatgcaccgatgagattgtcaagtttttccttagtcaaaccggtacgagtgaaccgccggttaaaggtggaattgacaaagattgttgtggagccattgggttggttgtgaaagattgttggtccgttatgtttacttctttagggcttacgactatggaagggaataacttgagagagtattgtgagtttcaagctgagaagtcggaattatctccttcaccggcgccggaaactttggctttgtctccggttgagataacgtatcccggacttgattattgatagctttccctttatattttaagttaaataaaagttaccagtgaactatgtttcctttttatgtgtaacattttctgatttatctttgttaaattttgttaatcacggtctaaatcgatttaaaatcgttttggtcaattaccacggtttttacatagaaccaatcgccaaaccgaagctccaccaaaaactaatataataa

SEQ ID NO: 19033 - DNA, 1026 bp, Arabidopsis thaliana
tctctctctttcttatttctctactcggagccggagaggtaaagttgaaccaaatgtgcaatcttgtcccggtacagctgggtcttctttggtcagggcgttgtttttcatttgtatgattaaaataaaaattaaaaaacaatacaaaatcaaaatgttgtaaaatggaaggggaataatgtaaaaaaaaatagccaactttttaaatttaatttcgttatttttaatttattgcataagtaatctgcctgcaaacgaaagatgtctgacagtccaagaagagaatctgctaagaattttgtccaaaagaggcttgtaatcctgcttagtcatcttctttgaagtcaaaggcacccccaaattttgtccaaaagaggcttgtaatcctgcttagtcatcttctttgaagtcaaaggcacccccctaaccttccagccatatcactgttctcctgagtaattcctccatccaaaaacaaagctgtcttctcccgattaactcctaacccagtaccttgtttaaactcctccagaataaccagaatttcctgaattgacctctcctccccatcgaagaaaatcaacacgtcatcagcaaagctcaaatgggtgatcagcggaacattacaatcaggatgaagaccaaacctctgagaacgagcacccttgtccaatttctttgagagaacatccatagctagcacaaaaagaagagacaaaatcggatccccctgcctgagccctttcttcccttgcaaatagccaattagctccccattaaaagccacactaaagctcggagttgtaaaacactccttaatccaaccgataaactcagcaggtagattaatagcctgtaacacattcaagagaaacctccaatccaaattatcataagcctttgccaaatccacctgaaggcagcctctagaagtgactccatcaacatgaaaatcagaaaccaattctgaaggtagaagaacattctcacataagagccttccctgaacaaaccccacttggtttc

SEQ ID NO: 19034 - DNA, 1249 bp, Arabidopsis thaliana columbia
ctctcgtacactaccgcttctggccctaggaccaaaaaatatgcaagattctagttcatgtgttacttttacttgtcctcaatatctacttgagctttcgttctaaactacactatgtttgattgttttctaaaaactatagttttcttaagttttctaaaaagaccattgaaaaataatttcacattagtccatagaaaaatgcgtccatggaatattaaactgctgaccttatacacacttaagagattctctaccgttaagctacgataataatttaataatattcgtaacaaagtatatttatatactaacaaatatcactatttaagtaattaaaaacttatgcaataaattaaaaataacgaaattaaatttaaaaagttggctatttttttttacattattccccttccattttacaacattttgattttgtattgttttttaatttttattttaatcatacaaatgaaaaacaacgccctgaccaaagaagacccagctgtaccgggacaagattgcacatttggttcaactttaacctctccgtctccgagtagagaaataaagaaagagagagagactcatcaaaaacatttccaaaatcaaaatccatggccaagaaaggtatcccagagtggctcaacagttctctctggtcctcctctcctcccatcgacgatcgccacctccgcaatcctgccgccacttccatcacccctccatctcctccgatcgtcgagcgtcctcctttttcttcctctccctccgcgatttccaccgcaccagctcctcctcttcctgttcgtcctccttccaaatctgagattaacgatttgcagaatgggagtggtaacgatggtgctggaattgaaactcccgcagtttcttctgttgaagatgtttctcgaaaagcgcaggtcgtggctgaggttagttgcttaaaatcaacctcatgctctatgcattttgattgatttctctttgtgatatacttacatcttgattttttcagttatcgaagaaggtgatagacttgaaggaattgaggaagatagcttcacaaggtctacctgatgatgctggaattcgatccattgtttggaaggtaacgccattcgcatagtttcagtctagcttatggatcattattgttactgtgcttttagtaatgcaaatctattttgagttgttgaattttctttgaacttgcttgtggttttcggggatgagtcgacctccccga

SEQ ID NO: 19035 - DNA, 571 bp, Arabidopsis thaliana
tgtgattgttttggtttatgttgatgatattgctattgcgagtacaagtgaaggtgctgcaatacaattgactcaggatttacaacagcgattcaagttaagagatcttggggatttgaaatattttttgggtcttgagattgctagaactgaagctggtatttctatctgccagagaaagtatgctcttgagttattagcatctactggtatggttaactgtaaacctgtttcagttcccatgatcccgaatgtgaagatgatgaagactgatggtgatttgttggatgatagagaacaataccgtcgtattgtaggaaagctgatgtatttgacaattactagacttgacatcacctttgcagttaacaagttatgtcagttttcctctgctcctaggacgtctcatcttcaagctgcttatcgagttttacaatatatcaaaggcagtgttggccaaggtctgttctattctgcatctgcagatcttactcttaaaggttttgcagattcagattgggcttcctgtccagatagtaggagatcacaactggattcagcatgtttgtgg

SEQ ID NO: 19036 - DNA, 1089 bp, Arabidopsis thaliana
tatccccatccctggtcgcattaccttcttccaacatcccattctctacccattccaccaccttttgatgcacttctggtaaggaattcagtacttgcacctgcatccataaaacgtgaccttggtcatccattttcactcggacaattccattaacagataaatcatcactctccttccctctctctcaccagggcagtatcagcatagtttctgcggacccatacactcgcaagagcaagcgtgacgggcaatttggcagcagtatcgctctggagggcctggtcgtagtaacgtttagcaagatggagatcaaaaggaagaccttctccatgctcatgcatgtaaccgaggttgaacattgcttgcgcatttgattgagatttagcatacatgtacgcctctgctgcacgcacgaaatccctctctgtaccctgtgaacatgagtatgagcctcatagaatcagttaacgtctagatttcatgaatgagaaatatgttctcttggaaaaatcaaatgtgaatgggatgagataagtgacaattatatccattgtccgtatgttcacaattcataaacttcaagcgtaagtagacttacccgaccgtagtaatatgcatctccaataagcaatgcagcatgttcgtttccctgttcagaggcacgccaccacaaagaatgagcccgatcgtgcctctccttatctgtgcaaaacccatacactcccatgcacatgcttctttccccgtatttatcgacgatccaggcagcattactttgtgctacttcataaccgagctctgacattctcgaatacaatataaaagcctttcccacatcacctttcaagtaagcttcaagagcccatctagagagagaactccatggtcctctttctgctactagcttataaaaagttgtcgcctacaacaaggaatttgaagtacaaaatccatcaatgaagtattcatagtgctcagagcaaaactacaaacacaccttaaattgatggaaatagaaataaaagcatgacacagtgaaaacttaacagagatttctataattggttatacgttttagcaaattac

SEQ ID NO: 19037 - DNA, 853 bp, Arabidopsis thaliana columbia
tgtacaccatcatgtaaaccattatattaagtaataatatttggtttatacaatcattatatttgtaaaatattaaaaacaatattacttctatttatgaatatcggtatatacatacaccaatgaataatggttagtgtacaaaacgatctttgaaatgtttgtgtattaaattaatgacatataaatactctaaaagtcaacgtaattttttaagaaatttttttaagaaaactaaaataaaaattaaaaaaataaagacaaataaaataaagtataaatggtctctcatattatttttattctctctcaagataaagggtattatagtatttgatatatattttgttttttagtctattagacatattctctatctcacaaaaagtaagaaaaatgttatatctctaatttctaaaaaaactatctactttacaaattatttttgaaaaagtgttactttgccaataaaccctatattttttcatgtggatagagtatttgataccacaatatcatgagacgctaattttctttgtctcaagaaaacttgaccattccaaaatatcataacattatacaatgatcatccttgcaacacttgatcaacttcactcaattaaccgaccattggatcaagactcaaagttaacgattagtaacaagatattccaagaatgaatccacataacgatcttgtctatccatatctccaaacactcctttcatctccttcacattctctctataaacctttccttcttcttccaccattaccaatcttagcgaattcgcaacactttctttagtaaagaaaccttctgtctcgtctcgagggatcatatcccaattt

SEQ ID NO: 19038 - DNA, 541 bp, Arabidopsis thaliana columbia
agactctagagaatggtgtaagccagtccctatacaaagacgcagacaagtactgcaaggtgatcgctgggaaactctccagtggtggctgcatcaaaagtatagctaccactgctgcacttctagctgctactggttttgctggtgctgctgctctgtctgccaaccctgaggctatagcttacctaaagaacctggtggagtcattggacatcaacaaattcaccgagacagttatgacagcattgaagaactgaagtgaatacatatgagggagacgataagcaagagaagaaagtctctttatcgtcggtgtagagaagtcctccgccttttttatgctctctgattacaaacctgaccggcattagggggaggttaggaggctaatgagtgattagacagaatggtaaagttgtaatcatgtacttttgaggagtttttttcaaagctcaaaagttgttgtagttgagagagttgagactgtttctaatttaagatattctttgtcttgtttttctcttgaaaaattaagttatat

SEQ ID NO: 19039 - DNA, 546 bp, Arabidopsis thaliana columbia
tgtgataatcgtttgctatgtgaaaaggcagaggaagtcagagacagaaccaaaaccagataagttgaaactagctaagaagatgccaagtgagaaggaagtttctaaattaggaaaagagaagaatattgaagacatggaggataagagcgaaattaacaaagtaatgttctttgaaggaagtaatctggcttttaacttggaagacttgttgatagcttctgcagagtttctagggaagggcgtttttgggatgacgtataaggcggttctagaagattccaaggttatcgctgttaagcggttgaaagacatagtagtgtcccggaaggattttaaacatcaaatggagattgtaggaaacattaagcacgagaacgttgctcccttaagagcttacgtgtgttccaaggaagaaaagcttatggtgtatgattatgactctaacggcagtctctctcttcgtcttcatggtacgttctacatttttcatatttttgcaaaggcaaatactttctatacatataaaggcaaacaaacagttga

SEQ ID NO: 19040 - DNA, 466 bp, Arabidopsis thaliana columbia
ataggattccgtagagaatttcaaaatttgacttccgctgcaaatcggagaaggaaacaagactatggagaaaggtagaagaagaagaaacctttgtctttgaggaatttgcggcagtcttcgcgagtgagctgagaaatgtcctcttcagtgagtagcttcagaggtttcgcaagtatagacttcgccggtgaaactccgacatccatctcctcctcttcaccggaatcccggcgagagagcagtggcgtttcagtaataatcggaggttttgggggtaaaattaggaagaatgagagagagcggaacagtggcgagagagagtgaggtcgaatagtttttcctatgggggagtcaatttgggggaattgtcccggagcagggaaactccctagactgccacgtaagctccacgtctacataaattattatgagcctaatcatggctgctaaacttgctaagttt

SEQ ID NO: 19041 - DNA, 1408 bp, Arabidopsis thaliana
tgatagcatacaatattggtaaacaaagtgtacaaaacttggtgtacacttacagggaatgtataaattattatttcagttagtggtgtacgtcatctcgtacaccaattttagtacactgtctcatagatctttagaggtgtacgatcatgtacaccatattttcaatcatctatgtacatcattttgtatactattatactcactctatcacttcttacaataatattatatattgatttttacattattgtcgtacactaatatttgtacaccagtattaataatatcacgtacactgtcggctgggattaaataaaaaaatgctacatatttttgaaatatagcaaaattagtctttttagattcacataaaaaatttaaaagtcaatatgattatatggtaattttttatgaagaattattatcaaacaaagtaaaaatattaagtaaaaagaaaaataagaaaaagtaaaatttgacttgaattttgtctttatcttactacataacaaaataacaaaaggttatataagtcatttctaaaatctctattagacaaaaagttgtattagagagaaaagagaaaattgtttatttcttttatttctataaaaactacctactttgcaaattatttgttgaaaaagtgtctactttccgacttatctcttctataaataaacagacaacacacagagagacattcaacttcaagggacgattttcctctcatagcaacaaaacaaatcacctcaaagataaaaacttggaacatagaccaacgaaatggctccgtctaatgatcatttgcctttttctagtcctcacctccgcttcattcttctagaattcttcacctaagaaagctttcagagacgaggaaatatgaaatgtaccattttataccgtcctactaaatgtgtctgtctcttacagcaagagatccgttccgtagagaaaagactggtgagaggtggtacagttcaaaggctgagattaatctacgaagcctggagcgcacgctaggtgctcgacgaaatgccacactgagagtttggtcttttgaaaaacttattacgcaatgaagatcacgtgccttgcacatgaccgtctctttatctccctcaacagctgtatatcaacgcctcgactctgttttttcctcgtaaacagaaacagaaccaatacacttccaagaaaaagctttctcttttctttctcactctcccatttccttggaccttaaagaacccatcattttctcgagaaaactttgactacctgcgttcgaatgatgaagaatccagagaaaaaatatgacaaagaaacaaaaaaggagattgacgatgaatacaatctcgccaaagcgtactggaaaaaaggtaaccgtattgaagccttgatg

SEQ ID NO: 19042 - DNA, 518 bp, Arabidopsis thaliana
  unsure (1)..(518): unsure at all n locations
nnnnnnnnnnnnnnnnnnnnnnctaaagctctttaaagtaatcacatcattttcagtcagttaactttcctggagaatctctcatgacacaggcagaacgccgccatgaccggctggctgtcaggctgtcactgataatcagccgtctggttgcgggtgaaacgttgagcgtgcgcaaactggcggctgagtttggcgtgtcagtgcgcacgctgcggcgtgattttcgtgaacgactgatgtatctggacctggagtatcagtccggatactgccgcttacgcactgctggcagtgagatgcagatggtgcccgacgtgcttatctttgcccaccgcagcgggctggccgggcttttcccggccttgaccgccgtctggtgaatgcactgctgatgtgcgatgagtctcctgcgtgatagcacagccaatccggttccttcgccttcaggagcattgtctttctggagactgattcaggccattaccgggcgcaggcgggtgacgctgattgcagag

SEQ ID NO: 19043 - DNA, 850 bp, Arabidopsis thaliana
tggtggcaattgcagctaaaatgtgtttgaaatcgtgttaatggctaccaatccaaatatatattccgtggtagccatgtgagcttcaatgtttctgatactcaatctagatgtctcaaatggatgtgattgcctctcactgttctgcttatgatactgactctggttttttggttgatgaagttgggggagcttaaacttggagaattgctcgacacaccgcctcctggattggatgaagccatagccatttctaaggaattctgctattctatgtgatccttgtttcttcggtcttgatatgtactgtctcttactgatttgtcaagggtattcacaggtcattcaattcttggaatcaccagagtataacatgttcaccagaatcgtatttgatactgcaccaacggtgagcaagcttgattaaaatttcccttccctttttatattgcaaaatattaaagacagagtttgttactacttacagggtcatacgctaaggctactctctttacctgatttcttggatgcatccattggtaaaatcttgaaggtaagaaatgttgataaaccatttcctttaaactcttatgtttagtctgtttaccaaagtttcaatctctttctcagagtttgtcttcttaaatacattttcttcatcttcagcttagacagaaaataacctcggctacttcagcgatcaaatcagtttttgggaaagaagaaaaggggcctgatgctgtaagtctttgtacattggctgatatagtattcctgtgttcatttggttaaaattttctttatggatgtccaggccgacaaattggaaaaactaagagaaaggatggtt

SEQ ID NO: 19044 - DNA, 873 bp, Arabidopsis thaliana
ctaaagagactgtcggacaccccggttttgttcagaatgatgacgatgacaacaatggcgataatggcaatatccggactgatactccaggtccagatacatcagccgctcacgaaaatcacgccgcagcgtgcgcaccgacacaccaaactcagcggcaagcttacgcacactcagcgtttcccctgccaccagacggctgattatcagtgacagcctgacagccagccggtcatggcggcgttctgcctgtgtcatgagacgttctccgtgaaagttaactgactgaaaatgatgtgattactttaaagagggggtcggacagggtatggacaccacagaaactatttttcatttctgcaaaagccagaggagcgggggttacaggccttccctcggtgagtgaggaccgtcagcacggtgcgatgcggacaggtggtgtccgatattaacaaagcagcaacattaaacggtcactgcagttgcgtgacagggcttccgccatcacccacagtgcccggttaagtttcacgtccccgtcgataccgcgaacggcacgggtatgtgaccgtcctcctttggcattacggccactgagcccgcccttaatcaggttctcctgaatacgctggtacgtggtccacaggtcattgctctcatcctgccagcggcgaggggagaggatctgcgattcagtcaccggctggtggtcttcaccaaagcggtatgtgagggcggcttttgccagtgcctgctgtgccgggggtggcacagcaacgactgcatggcatccgtttctctcacccggtcaaaaatcccagcacctcatacgcgccttcaatcacctgactcaccacgtccccttgtgtggca

SEQ ID NO: 19045 - DNA, 579 bp, Arabidopsis thaliana
cgactctagagcggaaattaatgataaaaaaatgtgaaaaatacaaataaaaaacaactctgctgatactgaaacaagccttacttattatcacacaacacaattattcacccacacgtcgttctgtataaaaacaccaaatcaacaatcactaatttattgagttttcctcaaaggaaagatatatctttcatgtcctcctcttaagaccgatacgcgattataagactctgaacatcatcaatgtccctaacctcatatcgagcaaagccagcttctttaagaacaaagtcccattctttcaaagtccgttctttgcctgtgcttgtgtgagccatcatcaccatatcaagcatcaatctcacgtgctctaacttttcatctcgttcgtccactatcatcgtctttttattctctccgatcaccgattccactatcaacacttttccgatatttggagggaccgcttctttgcaattcttcaatatctttatgcaatctttgtctcccaatcgtgtaaacccactgcgccattcatttttacattttttgtattagcaaacaaatcctaaagtgaga

SEQ ID NO: 19046 - DNA, 1617 bp, Arabidopsis thaliana
gctcacattcccaatttgccaatcccaaagaacgacacgccgatcatcggaaccagatatcagaacatctccttcggcattgaaactcactgtgttacacaccctttgtgcttctctagcttcttgtatatctctaaacgcagaaccaaattctacatatacagaaccaatataagaattgtgaatcataacaataattagtcaattgaacgatacgactaaatccaccaatgagactcatagaagaaccacaaatttcgaaactttcgaatccaatagagaaaacacaaacctcggaggcggagaagcgattggagaaattacgagaggagattccaccgacctctcgtcgccaaaaatcaacaacagggtgatgtagtccattaaagtttgatcgacctctcctcgctttctcactcatcttcctatgaaataaaatttataataggagaaagtttttcacggtaatagaccagagagaagattctctaattgctctgtatctcgccgtgaaattactacttcagaagtcccacagagagaagacgaagaagcgtagtgtgtatttgtaatgcgtaactgcgtaacccatcgccgggagagagaagattgtttggcccatttaaaaggtgacgacgcgtgttaacatctaattagcattgggctttttgggcttcttatgaatcatcatcaccataatgggctaaaagttcatgaagtaaaaatgggaatttatcaaaagaaatgtgaaaattcaaataaacaagccttgatttaatttatcacgtaccattaaaccaagaatcacaaacttattgaggtttttctcaaaggaaaatttggtttagctcttcctcggttatgattcatttttcgtatatatgatccttttaagatcgatatgcgatgataagagactgaacatcatcaaagtctctaacctcatatcgagcaaagccagcttctgtaagaacaaagtcccattctttcaaagttcgttctttgcctgtgcttgtgtgaaccatcatcaccatgtcaagctgcaatctcacgtgctctaacttgtcatctctttcttccgctatcatcgtgtttttcttctctccgataacacactccactatcaacactttgccgatatttggtagaacagcttctttgcaattcttcaatatctttatgcaatctttgtctccccaatcgtgtaacacccactgcacccattcaagtatcacattttacgtattagaccacttacgtcaagtcctgaaatgactttatgagcatttctccatgtttttagtagtggttgctttatttcttgggtacttgatagtggttgtacacattaatttctatcaattgattcgctactttggtgtcgtatctaaattattcatgtttttttttcttgcaagctggtaggaaataaaagagaactgagatttgaacatccaacattttcaatgttttgttatacaccaaatcatttttcgtacgatactttattcatgttttttatgtgtgtgaaatatcataattattttaaagagtaattttatcgagtagagtctcgtatcagtttgtttttgacactaaatgaaagttgtaaaaaag

SEQ ID NO: 19047 - DNA, 637 bp, Arabidopsis thaliana
tgctctctattacagtgtgctctgctgaagaagtgggtcattgtgaagggtcatcacctatcacagaagaggctgtgctactccccctgcagctgattctaaggatactgctgctgaagaagaagatgatgatgatgttgaccttttcggggaggagaccgaagaggaaaagaaagctgctgaagagagagcagcttctgtgaaggcatctacaaagaagaaagaatgtaagtttgtgtttttgcctttacacctgtagtttacgatataatgatgtcttggatttctcatctggtttctttcttttcttaatcagccggaaagtcatcagttttgatggatatcaagccgtgggatgatgagacggacatgaagaagctagaggaagctgtaagatccattcagatggaaggattgttttggggagcatcaaagcttgtacccgttggttacggtatcaagaagttgcacatcatgtgcaccattgttgatgaccttgtatctatcgacaccatgatcgaagagcaactcactgttgaaccgatcaatgaatatgtccagagttgtgacattgttgccttcaacaagatatgtaagtacacgaacctttactcaactacttagaatgctgagattg

SEQ ID NO: 19048 - DNA, 578 bp, Arabidopsis thaliana
tccccgggtacgagctcgaatctgataaatcatatagatagataaatattggatagatacaaacgcgcataggatcagccgaagaaagaaaaatattcaaagaaaataatagaaagaagagaaaaataatgaatcatcatctctctcacaaaactctaatatatctaaaataaataaataaaatcaaagaagcttcattgatcggaacaacctagataaccaaaacggcagcagttaacataaccgccacagatccgaaactggcgaatttgttcgaaacggcgccgccctgagcaggaccaggagcttcagtcggagaatcggagatcgcagatggagacaaagccggggagtcagcggtaggagaatcagctagaggcggcgatggtggtgaagcataggattctggagtcaatgcggctgccggagaaggagaaggagaaacttcaggtgcaggagcaggagcagtcatcttcttaggtgaaggagccggtgagatccgtctacctccgacgttagatggagctggagccggagattgagccactgcggaagaaatcagaagagcagcgagaaga

SEQ ID NO: 19049 - DNA, 533 bp, Arabidopsis thaliana columbia
tttaaaagcatgttgtccctgcgggtgatgcatcatcggattcattcctgccatcttgctcatcgctagttgcctctcgtaagccaagagatcactcgctgagaatcccgggattggtgcaggagctggtggaggaagcgggtttgaagctgttcctgctggagttggcttgcttccccaagaacactgtaggaacaacgaacacaacaattttagcattcccaaaccaaaaagaatggtgagtcccacaaaagaacagtttaagttagttagttttaccttcatttgcctgccactaaggtaggaatgtgtgtttccatctgaatagcgagggctgcctctacatgagtagagtatctcacaaatccgaaacctttgtctctttgaacacggacttcctctatgaccccagcaccaagggaatggaagtggcggtgaagatcaacctgggacacctggataacgaaaatatctttgattcaaaaaaggtatggatgatggttgagttaagtcacagaatacctataacagtt

SEQ ID NO: 19050 - DNA, 549 bp, Arabidopsis thaliana
ggataaccctgagaacacagttgtattcagcagctgagtatttcgaactatcctacacaaacgatgaacaaaaacagatgtgagtgagtttattcctctccctaattgtgattgttctcttttcttggagttttgtaagtttttacttgtgtatgtagagtcgtggagacactgaaagattatgcaataaaggctctggtgaatacagttgaccatttggggtctgttacatataaagtaaatgactttgtagatgaaaaagtcgatgaagtagcaggaaccgaactgcgagtatcttgcattgaacaggtatccattattcttcaaatggacagatatttctgctttagttttattcagttggcatttttgagaatgattcttgtttgtattactgaactttcttatatgtgtatagaggctacggatgtgccaagagtacatggatcatgaaggtcgtcccagcaatcacttgtgatcgacactccaaagctccacaagcggtacttcttgccttgtaagtttcgactctccaaagttccctatatg

SEQ ID NO: 19051 - DNA, 2146 bp, Arabidopsis thaliana
cccagaacgaacactgaaatcgatactaagaatcagcctgcaattttaactgagggagtattgaatgaagaagaggaagaagactcctttgaagaaacagaaacagaatctctgaatgaagaaacacacactcaaaatgatgaagcagaggttacagtagaagaagaagtacaacaaagaaccagaaaacactcacccaatgacaacaaggtctaaagccgggattcataaatcaaacacacgatatgcacttcttacctcaaaattttcagttgaggaaccaaaatcgattgatgaagccttaaatcaccctggttggaacaatgcggtgaatgatgaaatgagaacaattcacatgttgcatacatggtcattggttcagcccacagaagatatgaatattttgggatgcaggtgggtgttcaaaactaaactcaaaccagatgggtctgtggataagctaaaagctacgcttgttgccaaaggatttcaccaagaggaaggtctagactatcttgaaaccttcagtccggtggtcagaacagccactatccgtcttgttctcgatgttgctactgctaaaggatggaacataaagcaacttgatgtgtctaatgcgtttcttcacggtgaattaaaggaacctgtctacatgcttcagcctcctggttttgtggatcaagaaaaaccttcatatgtgtgccgtctcaccaaagctttgtatggcttaaaacaggctcctagagcttggtttgacacgattagtaactatcttcttgactttggtttttcttgcagcaaatcagatccttctctattcacatatcacaagaatgggaagactttggtgttacttctatatgtagatgacattcttctcaccgggagtgatcacaatctacttcaagagcttctcatgtctctcaacaaacgtttttcaatgaaggatctgggcgctccaagttatttccttggtgtggaaattgagtcatcaccagaaggtctcttcctccatcaaactgcctacgctaaagacattcttcaccaagccgcaatgtcaaactgcaactctatgcctactccactacctcaacacattgagaacctgaattcagacctcttccctgaacctacttacttcagaagtttagctggaaagcttcaatatttaaccatcacccgacccgacatacagtttgctgttaacttcatttgccaaaggatgcattctcctactacagcagattttggtttgctcaaacggattctgagatatgtgaaaggaactattcacttgggcttacacatcaagaaaaaccagaacttgtccctcgtagcttacagtgatagcgactgggctgggtgtaaggaaacaagacgctcgacaaccgggttctgtacactacttggatgcaacctcatttcgtggtcagccaagagacaagaaacagtgtcaaaatctagcacagaagcagagtatcgagctcttacggcagtagctcaagagcttacttggctgtcttttctgcttagggatattggagttacacaaacccatccaaccttggtgaaatgtgacaatctatcagcagtttatctaagcgccaatcctgctcttcataacaggtctaagcactttgacacagattatcattacatcagagaacaagttgctttgggtcttgtggagacaaaacacatatctgcaacgctgcaacttgcagacattttcacaaaaccgctaccaagacgagccttcattgatctcagaatcaaacttggtgtagctgaaccagccaccacaagtttgagggggaatgtgagtgagatgtctgaagctaaggagatgggccaaacccataacaaatcaagtccaactataaagcctggtcaacaaatacagaagatgacaaagatcaaaagctgtctctcatccgtacatgtacctgcaggaaacattgaaagagaaaggaagacgctcctctaaaactagttcaatcctctttcatccttatctaataaccaaaaattacatacatctgtatagtgtcgagagtgttctagatccttctccctcaatctctataaaaagaagaatgtaatctcattgtaattattattgaaaacagagtaatattattaaaag

SEQ ID NO: 19052 - DNA, 1214 bp, Arabidopsis thaliana
tatcattttgtaattagaaatatacaagaaacttatctcacaatttgtttataaaaggccaaattgttacagtatatatgatttgaatgattcagagaataaacaggtcaatcaattttattaattaatattttttttgagtttcctaatgaatattgactaactcaatttttagacccacaaatatagtttcatccctgcaaatatgtattcaattaattaataataagccaaagtgttaattgaatctacatgattattataaactatatgttatatttcgcgatacatacaaaattaacgttaatcgcaagaaaatctatctataaaaacttacaagttatctccgtcggttggaagtgattgaggagtgatggtgacaaaggtatggtaaaagtaattggctaagctccaaagaagaagagccatgaacatcatcaagaacataacctcggtcactgtcactatccctaatccggccttcactaacattggtcttttcaatgcaccaaacttgtctatcttcttcctatccattctacttttagttaacagaaaaaacatataatatcgatattaaaaagcggttaattaactagagaataatcagttggttagtttaagtgttgaattacctattaaattggtttactctcgtttgtttcttcaagtgaaggtaaatagatccaagagaagccagtagaatcattgggaacatgtaaaccaaaaggtttactcctaataaatttagaaaaccagcacttatgtataaatgatgtttgtataaactaatagaaaactagattagatctatgacgacttataaagaaaattgatgtgaatttacctggtttcccaaaataaatcgatttgccgagcttggcacgcatggatttcaaccaaatcttcttgtaagtagacgttggcatcatgatccaaatcaccacagtgcccatcaaaatcaccatcgttaagagcttaatcacattcttgatcactttcttattcgtttctcctaataccatattgcaagagatgagattgcacctttatcagaaaaaaaaatgagagagatgaaattgcaagaaataagaaagaacaaaatagagggaaatggacttttcaatgagtattttctgattatagatgaaaagcttctgttccacgcgccaccacgagtctacacgcgccgccatgagcaaaccacgttgaat

SEQ ID NO: 19053 - DNA, 617 bp, Arabidopsis thaliana
ctacggtatggttaatgtgccttcgcctcagcatcaaatccagcaacaacagtttcaacagcagcagcaaaggtcaaaattaatgcagttgcctcaacatcagcagcagcaactacttgcacaacaacaacaacagctcaggcaatcttctatgcagggattgggtcaagtaggctttgacattttgcagacgtagcaatttgactgttttttcctaccatactgctttattgagcaacatgctaattctttgtgtagagtcagataccagcacttcatgatatgcatgggcaagctcagcaaaagtttcagacggtaagataaatagaactacaacatagttaggggatagatgtgtgaagtgaaaaggatcagacactaccttggtcaattatttgtatcattatgcagtagttatggccataaatgaagatgactagacgtatttatacaagtttacatataccaagtgaatgattcatactcttgaaaagttatcctagatcttgggacttggcagaagcttttatataaaagtacctgtgacagttcgtaagttcaaacagtagaatcaaatgaaattatgaaacaagcttttgtcttttaagtgtgagttt

SEQ ID NO: 19054 - DNA, 514 bp, Arabidopsis thaliana
cctgcaatatctcacactcatcaaatcaagaaactggtttagtgggatgagagatcttctagataaagcaaaaagtaactcactttcatctcttttcacaccaggaagcgatacacggaagagataagcgtcatcacattcaccaatgtccatcagtcccaccattagtccaccatgagcttcagatttcacctcaggttttgcagcaacatcactttcttcaccgctagtgcaagtacccgcattatcctctttcacaggttccacgctctcatcaatctcaaccttaacctcattagctgcaacaacgccgttacttttagttacatcaacactaaggctcaaagcaaagctatccaatcccgtaagccgcttaaaccgcgcaacacattcttctctcatacaagaagtatctggatcattaatgaacacaatgctccggataaacttaaacttatgcctaacatgggtttcagggtgcaattttcgcggaaaaagatcacgaaaagagggt

SEQ ID NO: 19055 - DNA, 680 bp, Arabidopsis thaliana
gagaaagagaagagtagtatatggaacagtgtttttgagcgtgctgagaagatggctgggatagagagaggaagcattagagcaactgtgcttatcgagaccctcccggctgtcttccagatgaatgagatactctatgaactacgtgatcactcagtcggtttaaactgtggaagatgggattatatcttcagctatgtcaaaaccttccaagctcaccctgaccggctcttaccagaccgtgtcctagttggcatgggccagcatttcatgagaagttactctgatcttctcatccgtacttgtcataagcgcggtgtccacgccatgggtggcatggttagtcccctcttaacactagttcactatatgtctctttcaaactacatgaatgctctgtgaaaacattataaataaagttgaaaatgttttgatttgttcggtggtatgatgatcaggcggctcagattccgataagagatgacccaaaagcgaatgagatggcattggatctagtgaggaaagacaagctgagagaggtaagagcagggcatgatggaacatgggcggctcatccaggactcatcccaatctgcatggaagcattcactggtcacatgggaaaaagtccaaaccaaatcaaatcagtgaagcgcgaggacgcagccgcaataacagag

SEQ ID NO: 19056 - DNA, 519 bp, Arabidopsis thaliana
taggtatcaagccttgtctcaacatctcattcctcaactcggtcgccttccccatttctcccgccacacaacaaccgtgtattagggtgttatacgctactctatctggccttatacccttttccgtcatcgagttccataactcaatcgctttcttcacatcgtttctcctacaaagctcattgatcattgttgtgtaggttatacaatcaggggaaactccatcgcctatcatccttgtgatgagctcagaagcttcttctattctcccttgtctacaaaaaccgcggatcaacatattatatgtagcggtgtttgctaaaagccctttcaagattgcattatggagctccacagctttctgcatgtctacttctcctttggtgagaatgtcgagaaaacaaccatacgttacttggttaggaaccgaactgacaggctgcatttttgaacaaagaacctcggcttcattaacaaacccggctttgcataatccgttgatacagcagtgtacgtgac

SEQ ID NO: 19057 - DNA, 568 bp, Arabidopsis thaliana
gttacagagagtagtcactttagaagatgatcaagaaatagtactagaagggctcatatatttaaagaagcagagactttggagccttcttttgtttgaaggcctagttttgttccaaggccatcctttgtgtccactttactccgagcgagatccacctccacgacgggcacgcttcccagcaccgggggattaaatatattacctgcgcagagattattcacatatatcttatcataagaaatgtcacaatgtaacagaaaaagagtcatgtggtttcatcactagtactagcttatattgaatgtcacaaaatcagagctcaataattacctatcccactgaagaaaatgccgtaatccattccattgaacacggttggtatcactatcgaataagggcattgtgtggagaaccaatcttttctccgttagagtgtttaatagatttgcttagcttgtttacgcaacgtttgaactgcttgtggcagttaacgtaagtcatacctaataaaaaccaaatattaactcaagaatggttttcatgcatagattatgttgttgattgg

SEQ ID NO: 19058 - DNA, 508 bp, Arabidopsis thaliana columbia
gtgagctataaattaaaacaaccgaaacaaaaaaaaaaaactaaaaatcaaaaatctcatcaccttccttgctctgtattttttctctctcactaaatcctccatggatccttctctctctgcaaccaatgatcctcatcatcctcctcctcctcagttcacatctttccctcctttcaccaacaccaaccccttcgcctctccaaaccaccccttcttcaccggacccaccgccgtcgcgccgccaaacaacatccatctctatcaagcagctcctccgcagcagccacaaacatctccagttcctcctcatccatctatttcccaccctccttactctgacgtaagctcttcttagctcattcttacattttgactttaaagttagggtttttaatttccactcacttttttttttcgttgattagatgatttgcacggcgattgcagcgttaaacgaaccagatgggtcaagcaagcaagctatttcgaggtacatagagagaat

SEQ ID NO: 19059 - DNA, 548 bp, Arabidopsis thaliana columbia
atgaggatgataaagtggtaaagcacctcctaacttctccaccatatgtcccatgctcataatgtcatcaatagtatttgagccatatgcggtcccaatcagtgacatactattgacttgcccgtcatcaattgcattactagttgaaggtagaggaatacaacctctgctagtagatgtggtatcagcttcgttgatatcattagtaccagaatcagataagaattcagagtctctgccttcttctgtagcatttactaagttgggaagattggatgcaaatatttctggatagttatcaatcttttgcttcttatcaacaacagccagccattgaccatgtagactaatataatcattgtgaacaagacaagtcatggctttgggtcccaccataaatcatgtatagccgaaaatgtacgagtaacagcgacgattgccaaatctgtgcctctgaagaataatcataggccgcgaaactggtacttttgcaaggctgccgagcaataccatacacccgcatctcaatctgtgtgcaactccaagta

SEQ ID NO: 19060 - DNA, 455 bp, Arabidopsis thaliana columbia
gccagtgtgctctaaaagataaaaagcaaaaacactataggtaaaattgtccttttcgaaaaagagacaaaatagttggaacatatccaaccaaaaaaataaaataataaacagatttgttgattgcacattcttgactgtttcaaaagatagaagacttttacctctcggagacgagactcaaccggagactattactagtcgccggaatagtaagagtagtgagacaccagagagattcaagcgagggttgaccagacttgcatctcacgtaagtctgtgaagtcgcaagacccattaaccaaaaccttccatgatctcccatgactaacccacaagccaacttcccaatctccattatcatatgctccacaacacagtagctatcgttgttgttatacagtgaagacctctggttcttgactctacgaaccagtttagatctcccagattta

SEQ ID NO: 19061 - DNA, 569 bp, Arabidopsis thaliana columbia
gcatataagaaggcaatcaaagatggtgctgatgtaatcgattgctcggtccaattgtccagcgatggtacacccttttgcttaagttcgatcgatctcgggaacagcacgacggtctccctaactgctttcagaaaccgttcaacaactgttcctgagttgggctcacttggtgcaatatacactttcagtctcacatgggctgagatccagaccttgactcgtaagtttgtcttcaagctatctacttgctttctgataaatgttggtctgttttgtacactcttcttcctgctatttctagtaacttaaaagagattacatatatagatgcaaatgtctgggtcaaaaatacaggctcctttagaggatacataacttaagagttacaataactattctccaatctttttttgtttgcagctgctatttcaaacccctacagagtaaccagcctgtttaggaaccaaaacagaaaaatgctgggaagcttttctcactttctgatttcctaagcttggcaaaaaactccacctctctctcctggtgttttgatcagtgtagaggtg

SEQ ID NO: 19062 - DNA, 1336 bp, Arabidopsis thaliana
taatgatgtaaatttattaacatgaaataattttaaaggaattcgttctaaatatttaaacgaatacaattttctcataccaaatgtttggatcaaacacaatttctaaaactgtccggattgatgttgatattgtgtgaaaataatgtggctatttcaaacctaacccgatccggtccgacacagaatttatccgacatcatgatctcatgtacaaaatacatatatgtgtactaatagatatttatgtaccggaaaaaaggaaactctgtatggagtaaaaacgattccggttttcagaatttgtgttgacgagtaggatgaacaacaataagcccctgcacaattgaacgtcatccaaatttattgaaaccaaacataccaaaaagagaaagattcttaagagatttcttgaaactcggaccgattaatacatacctctgaatagcgaacatgatcatggtgtgaatacgatgttttcacaatcgtctcccattttttagactgagagtcagtctttttctccatattcttcttaaaacgggctgcttgaccggagacgactacggcgaattgaccagagacgacggaggaggtggtcgagcttctcggaagtgtccggcaaagccaagactctgaaggagttttaggcaatggaggttgagaaacagagagattctctgacctgtttttgtttctgttgctccttctctttacttcttccacaagaaacctaatctcttgtctctgattctgatcggttgtttgttgcaacctcgaatgatttctcgggatctggagtgtttctctggatttaggtagagaaatcctggaaatatcgtttgaaaatcttggcgttgcatcgatttcttgagacttactcataaccttgcttgatttgaagattctcggtgatgttgatttcgttttgtaaacagaatctatcgatttagggtttatgatattttccgattttactccaacatcctgacatgtcttgatccgagagagaaccggggtaagaacatccactgagttcttggaacagaaccatggcaagaaccctaactgacctttcttggagtcatttgagtaaactaatgcatcaataccatccacatgattatgatcacaatgctcctcatcatcaacgtcgttgttcaaatcttgattaattgccatggagactctctgtagagcaatgctctgtttcttcttcttctccgctttaactcgagaagcttctttcttcattttcaaggagattgttccgcggctggtaaaaatctcgacatgatgagatcacagtattcaaggatggcgcaaaaagagttgg

SEQ ID NO: 19063 - DNA, 492 bp, Arabidopsis thaliana columbia
ttctccactgcttctcagggctcaggatgtctagtcctttaaaaacgtttaccaccgcaagaatgatcactgaatagcctacagtgtggtgataaatgttccagtagactctgtacttgtgctctggtttgggtctcaaaaacattgcaaacacctaacgtgtgaaacaagcaacttagtaattgcaacatattcatgacaagtgtaatactctctgtactgttaactaaaacctacctgaattgttgcgaggcagaagagagcgatcccaacagcacggtgaaaggtaaactgaatcccggctgattcgttgcccagtttgagaccggtcgcccaaccggcaacaccaatgatgtaagcagaagactggcagaaaacatgaaggtagaagcaagcaggatctgctgattttgagactttcaagtagcgagcaatgattgctcctattggcatcattataccccagctcacaccgttcaatatgccatgtat

SEQ ID NO: 19064 - DNA, 435 bp, Arabidopsis thaliana
tcagatacgaagacacaaacaggtctacaaaatatataatcacacaaatatcaagagttacctgtattcaagagttgaacaagaacatcaacaatcttagataaaatatctggcgtatccttacaaaacagcgggacccacggatggcttgaacacgtacctacacgcaaaaagaaacacatgtttaactcaaaccaaacgtttttagtataatccagtaagaagctagctttgaactggttcaaggtacataccccaagatctccatcatcgatacagtccatatgcgcatcgaaagcctcagtagagagactagggaagaacttgaagtagcgaggaattagctgcgacgcaagctgctttgacttcatactagtcttggacatcttaatgatccgctgcatgtcctcaacattctacacacgagacagcaaa

SEQ ID NO: 19065 - DNA, 543 bp, Arabidopsis thaliana
ctcgctgtcagctggaatactggtgtacatggctctggtggacctcatcgcagctgattttctgagtaagaggatgagttgtaatttgaggcttcaagttgtgtcttatgtaatgttgttccttggagctggacttatgtctgctctcgccatttgggcttagctcttagattacatattatctactgtagaatcaaataatatactgctctcgcaacttcatatttttgccttgattcatatgaatataatagacaagggagcctattagaaataacgtgtggaaaataattgacattagatttcaaaaaaacaaccaaaatgaagaacaaaacattgaaatttgttattattgattgatcttataaaaggatgagccaaattagggcaacattagcgaagtaacaagagagatgacttaaacatcaagtaatttctcttttgatgaaattcatcaaaaagctttaaaattttacataatggcttcgctttgtgggttcgatgacgacatcagaagtcggataaccacacaggtcaagacat

SEQ ID NO: 19066 - DNA, 768 bp, Arabidopsis thaliana
aaatatcagtagattttgtattttcttggtactctgcagattgcagtagtggttggcttgaaggacccaacaaagtttatataccattcttggcatgtggtgacttaaccggttatgactcagaccggtcttacccactccctagagaagcagatggatcatcataccagagtttggacccgattcaacctccgatcgcaccgccttataaacgagctcttgagctcaagaaagcttcagcacaaagcttcaactcttgaagaaggtgataccaaaaaagaaaaaggaacaaacttttcattggattctgtagcctgtcgtaatgatatattcagggacctacaatttctataacgcttaatgtttttgttatgatgaggttatattttttatagaataagagattatattattacttttgtttaatactgctaggaagaaatcaaatattgggtcaacaaaagaagaagctttttcagtcttatggtcctttgatttcgacccttctttttgaattctaaattggcccacttcgtttttcgtttttagtttgtaacgaaacttgaaaaaaaaaaatggattaagatttgaggaattataacttttagtagtcactagctagttgaataattgaatcgataaacataagactttaatcaactgatcacctatgcaactctcagtgtcaactcttttacattacaaaggaaacaataaaaatcgtttagcgagaccaggtagagatcgagtttgatatcgacaaagaag

SEQ ID NO: 19067 - DNA, 555 bp, Arabidopsis thaliana
ccattttgctgttgagagatgttatgtctttgatatttgagttgttcacgaatgcaaatcccatactctataaaatatttcaagtttattaaaagacttgttactttaataaaatgtgtatagtaaataatgattgaatagtacttttttattattgtataagtatcatatcacacattttgtaataagctttaaatgtaaataataatataagtgaaaaaagtttaagcaatgttactatagctagtttaggacagttggggtttttgtggcagtcattgagtggccaagactgttttccttggccgtctagtgtaccggaaccagagatagaaagattgttgatgtacctaaagttgatccaagtgtcttgcttaatgtcgttaggatttgcaggcgctaataatgttccatcgataatgaattcaataggatttttgcatggacccacgaactctacaccaccctaggtaaaatgtccattttggtacatagattttactacttccacttatccttttgcatgcacggctccatatacttgtgaatgcctaa

SEQ ID NO: 19068 - DNA, 552 bp, Arabidopsis thaliana
ctcgagcctttgcaacctgtttgcatataaaatcatgttattgtaacacagcggcaacagatacaggaatcatcatatcaaaacataaagccaaacctcttgtacaagaccatgcctccagccaagtctgtagcaaccgggcatagctccaataggcgtgtcttcctcacctgccacactccaaaaccttataatgtttcttaaagacaagagagagagccattgaatgtcagaatacaaaagaaaataacaaccttcatgaatgaaaagtggatatacaaaatttgcaggggagatatcagtttcctgaaaggcagctctagtaacaggggaagcgcggttacgacgtgggcgtcggcttagattctgaaagcattcagtaacaataagccacttataagcttcaaccttacagctaaacattagattctgaaagcatgaagtaacagtaagccatttaaaagtttcaaccttgcagctaaacatcagattatgaaagcataagtaacagtaagccatttaaaagttttaacttgcagctaaacattagat

SEQ ID NO: 19069 - DNA, 670 bp, Arabidopsis thaliana
gggaatatcctcatcctcatcatctcattcaacttcaaggcaagtaccatcttaatctcaaaatctgaataaaaatattcattgtaagttgggataaaggccatatgtattctgtttatatgtgaatgacagggatatacaaagtaatttgctattacaagttgggttctctgatttgtcttcttccacaaatcttatcttgaagttagaaagcttttactctttccaccagctaagaaatgtcaaatatgagagtcttaccaaatactaatacctaatctatagttgttatgttataggaagctagaaggtaaagtagcactcatcactggaggagcaagtgggattggcaaagcaacagccggaaaattcatcagtcatggagccaaagttatcattgccgatatccaaccgcagattgggcgagaaaccgagcaagaactcggtcccagttgtgcttacttcccatgcgatgtgaccaaagaatcagacattgctaacgcagttgacttcgctgtctcgctccatacaaagctcgacattatgtacaacaatgctggtattcctgcaaaacgcctcctagtatcgttgatcttgatctcaatgttttcgacaaggtaatgatccataagaacatgtgaaagaacaaatgtgtggagcatttggtttt

SEQ ID NO: 19070 - DNA, 619 bp, Arabidopsis thaliana
caaatcccatagtctattaaaaaaaatcaagtttatgataatagtttttagtttctcaaatgaaaaaaaaaagactagaaaatttcatataagtttttgtataaaaataacatgtgcattttgaaatacgttttaaataaataataatcattttttcaaaatgaagcaataagtgaaaaagttgaagaaatgttaccatagctaatttaggacaattgggatttttatggcagtcattgagtggccaagactgtttcccttgcccatcaagtgtaccggaaccagagatagagagatcattgatgtacttaaatttgatccacgtatcttgcttaatgttgttaggatttgcaggagccaataaagttccatcgatgagaaactcaataggatttttgcatggacccacgaactctacaccaccaaggtagaatgttccttttggtacataaattttactacttccacttttccttctacatgcacggttccatacacttgtaaatacctattcgtatacgttaaaatgacataggttatattcatagattttcatctgaaaagtaattagtggtaaaaaaataaaattaggttagttcttgtgtacatacattggtgt

SEQ ID NO: 19071 - DNA, 614 bp, Arabidopsis thaliana
cccttttttagggttttcgtaagaacagagcaaaaaacatgtttggaagaggaccttcaaggaagagcgataacacaaagttctacgagatccttggtgttcctaagaccgcagcaccagaagatctcaagaaagcttataagaaagccgctatcaaaaaccatcctgataagggtggtgatcccgaaaaggtttctcttttcgattctcgcttagattctctgtaaattcaattcgttaatctagtagtttgatttgaattctccgattgatataggcttagatcttcgtattagtattacgaatgttcgattcgatctgaaatctgcgagttttaggtcaactattgatggttgtttttgtcttgtgatagttaaaagttgttagattgtttgttgttgggattacgaatattcagatagccaaatttcttcttttggaacttttgagacaagaatttattgctttggaggttatgatgatttgagtttatagttaacggtttaattcttgtttctgcagtttaaagagttagcacaggcttatgaagttttaagtgatcctgagaagcgtgagatctatgatcaatatggggaagatcactcaaggaagga

SEQ ID NO: 19072 - DNA, 566 bp, Arabidopsis thaliana
tgaagttagaaactacgagttttgaagccgaagattcccaagtcttgatccgaataccatcgcttgtgccgttgaaaactgtgtctcttaccgttaagtgctttacgtctttctcgtctttgttcttccctaagcttccaacactgatcccatgtccaggaccacacttgacgttagagatatcaaggttagtggtcccagagagaatggcaatacaatcatctccggtaccgatgtttgtgtttgagatgtgaatgttgctacaagaacccattttgataccgtcagtatttgggctatcaccgggagctgttatagtgacgccggtaatgttgaagcgatggacagagaagaagttaaagtgtcccattttgctgttgagtgatgttatgtctttgattcttgagttgttcacgaatgcaaatcccatagtctgtaaacatttcaaattttatcatatcactagaaacaaagagtagatacttcaattcatttgtgtataaaaaatatatatgcgtcaaaaataaatgatcaaaatgtacttgttaccattgtataatacagtt

SEQ ID NO: 19073 - DNA, 647 bp, Arabidopsis thaliana
ccgttaagtgcttaacgtctttctcgtctttgttctttcctaagcttccaacactgatcccatgtacagaaccacacttgacgttagagatatcaaggttagtggtcccagagagaatgacaatacaatcatctctagtaccgatgtttgtgtttgagatgtgaatgttgctacaagaacccattttgatactgtcagtatttgggctatcaccggagctgttatagtgacgccggtaatgttgaagtgatggacagagaagaagttaaagtatcccattttgctgttgagtgatgttatgtctttgattcttgagttgttcacgaatgcaaatcccatagtctgtaaacatttcaaattttatcataccactagaaataaagagtagatacttcaattcatttgtgtataataaatatatatggttcaaaaataaatgatcaaattatacttgttaccattgtataatatattttcaatgtaaacaatatataatcatattttccaaagaagaaatatattatagagagaaaagcgtaagaagaaatggtccatagctaatttaggaacattggtgtatttgtggcagtcattgagtggcataagtatttccttggcgtcaattgtaaggaacgaagatagagaga

SEQ ID NO: 19074 - DNA, 586 bp, Arabidopsis thaliana
gccagtgtgctctaaaggcggatcatctttacgcaacatacaaccgtaggcctcctgagactgcggcttgccgacgatttcccagttgtctggtttcttcgctttcgcacgttcaccggccagcagagcgtcatccatcataaaggcaacggcacgaccgctttccagggtgcggaaagagtcaccgtgatctttggcgctgatgatgcgcatattcattttttgctcttcattcagtttgttgagcaaaacttcagaggtagtgccggaagtgacgactacggctttgtctttcaggttggcaaaatctttgatatcgccaccctttttggtcaacaggcgcgtaccgaccacgaaaatagtgtcagagaaagccgcctgtttttggcgttcgacgttgttggtggtagaccacattcaaaatcgaaagtgccgttttgcagcagtggaatacggttttgtgaggtaatcggaatcagttttactgcaagtccggtttgttgagtttcttttcactgctcaacaatggcgttggagtaacctgcgagtacccaccactttttgctgattgtcgtaataagagaaa

SEQ ID NO: 19075 - DNA, 607 bp, Arabidopsis thaliana
cgtgtaaaattaaagtttttcacgtctttctcgtctttgttcttccctaaacttccaacactgatcccatgtccgggaccacatttaacattagagatatcgaggttagtggttccagagagaatggcaatacaatcgtctccggtaccgatgtttgtgttggagatgtgcatgttgctacatgaacccatcttgataccgtcggtgttaggactatcaccggaagctgttatagtgacgccggtaatattaaagtgatggacggagaagaagttgaaatgtcccattttgctgttgagtgatgttatgtctttgatatttgagttgttcacgaatgcaaatcccatagtctataaaaaaattcaagtttattataagacttgttaatttctcaaatgaaaaagaccaaaaattctaataaagttgtgtataaatatcacatgtacgttttgtaatacgctttaaatgtaaataagtgaaaaagtttaagatatgttaccatagctagtttaggacaattgagatttttgtggcagtcattgagtggccaagattgttttcattggccgtcaagtgtactggaccggagatagaaagattgttgatg

SEQ ID NO: 19076 - DNA, 595 bp, Arabidopsis thaliana
taacgtccgccagtgtgctctaaagtctcacttccaccacccgaaatggaaaatgcaaaaacattgcatgccataatagagaccaataaaaataagctgaaaagtattaagtttactttcatagaaagttatcctgaaaatggttcactgagaacctacgatgttatggctgtatttacatttaattaatcagtatttacatcgatataataaatgacatctctttgtggtatataagaatagttctctgcgacaggaagcatattcctacaattgtaagactaaaatacttcttgcgataataactacaactgtaagataaccctttcaaaatgaccgttgctctctgatttctcatttcatgctcacccaatatgatggcggcgttttctaaaactgttaaagaatgaggtaagtatgaaacgtttaattatggccacgatggtcacagcaattctggcatcttcaactgtatgggctgctgataatgctccggtagcggcacaacagcaaactcagcaagttcagcaaacccagaaaacggcagcggcacgagagcgtatctctgaacaaggtttatatgcgatgcgtgacg

SEQ ID NO: 19077 - DNA, 499 bp, Arabidopsis thaliana
ttagacaatgttgaggaaacattttaccgcgagcaaaaccatcaacattctcgcacaccgaagtggaagaaccatctttgactccattctgttttatattaatgtcaattagctccacatttttgcatggaaagattttgctacattgcagattcattgctactttgttcttcgatgttccatatatgttctttaacttgaggttttggatttgaacgtgagactctccctggaaaaaagtaaaaacaagttgtctttagtttttttgtttttgtgataaaataaaataaaataaaatggagcttgttttcgcataggaggttaacctttctttcatgttcacaaggtgggtgaggacaatacttctgatcaatgttgattggttttcgcaacatcaatcatctgaatattctcgtacacgaagttcgaaacgaggatcttcgaagctgaagatcccaagttttgatccgcataccatcgcttgtaccgttgaaatgac

SEQ ID NO: 19078 - DNA, 1142 bp, Arabidopsis thaliana
ccctggattctttgtctcctcagccatcgttgaaaccgcatcaaatccaatataggcaaagaaaagaaccgcggcggatttaaacactcctctaacgccgtaaggtgtgaaatcgctgtagtttttcacatcggctttagtaaatccggcgatgataacaaagagaatcacgaccatgtggattatagaagcaatgtaattgaatcttgaggagccttttgtgccaacgacagctaaaacacaaatgatggcgcaaacgccgacggctattggatctaagtggctatagtcttcgccgagtttgtgaactatgatgcggaagtcttcaggtttatggtttaagagagtggcgaagtaagaggtccacgatcgagccacggcagctccaccgacaacgtattcgaggattatgtttcccgcggcgatgaaggccatgaagtcgccgagctccactcttaagtaggcaaaagaaccgcctaaacattgactcaatggttatgtaaattaaatagtaaatatgaaagaaattacataatgtttttacaaataattgtgggcgaagtaatgtatgcgtttgagtttctatttacgataatattcaatttgagttcgaaacaacttggaagtaaaaaataattttgaaaatgactccactttctactttctaggacccaaacataatctctagtgggattcactacaagttatttcgaaaatgaaaaatatatttttgagtagtaatactatattaaattaatttacttttgaactgtcaataaaggcaatttacaagcttgacttatatagttgggacttacgtatataaggtcattgacgtaagtaatcatctgtttagcttaatttctttgtctgtatgtaaaagtcttctaggtagaccccatgactaaaattgtgaaattacaaagttttaaatacaattttaaaagtagctaacaatctaataaatggcaacaaatattttgcaactctaagataataatcaaatcattcgattgtttaatttgtgatttgatagtattgtagctactatcaaatttaaaaggaaaaaaacggaggataaatagtagattgatactagatagtgtgaacgaccctcataagtcagatgtcaactagttgac

SEQ ID NO: 19079 - DNA, 1015 bp, Arabidopsis thaliana
aacttccaacactaatcccatgtccaggaccacaattgacgttagagatattgaggttagtggttccagagagaattgcaatacaatcgtctcctgtaccgatgtttgtgtcagagatttgaatgttactacatgaacccatcttgataccgtcggtgttgggactatcgccgggagctgttatagtgacaccggtaatgttaaagtgatggacggagaagaagttgaaatgtcccattttgctattgagagatgttatgtctttgatatttgagttgttcacgaatgcaaatcccatagtctataaaacatttcaagtttattaaacgacttgttactttctcaaataaaaaacaaaaaaaagacaagataatttaataagttatgtatgataaataatgattgaatatcactttttattattgtataagtatcatatcaaacattttgtaatacgctttaaatgtaaataataataatataagtgaaaactcgatgaaaaatcttaccatagctagtttaggacaattggggtttgtgtggcagtcattgtgtggccaagactgttttccttggccgtcaagtgtaccagaaccagagatagaaagattgttgatgtacctaaagttgatccacgtgtcttgcttaatgtcgcttggatttgcaggagctaataaagttccatcgatgatgaattcaataggatttttgcatggacccacaaactctacaccaccgaggtaaaatgttccttttggtacatagattttactacttccacttatccttttgcaagcacggctccatatactcgtgaatgcctaatttcatatgcgttaagaatgacactggttaattactaaacaaaataaataaacaaatattagaaaaattgtatttatgtttcgtgtttgtatattggtgatcatatatgtttataggtgtgtgaataatattcaaatgtttttatcttaaaacttattggtggtaaaaatagaaataggacaatatttgt

SEQ ID NO: 19080 - DNA, 529 bp, Arabidopsis thaliana
ccatcgtccatagctaaaatttttataatacgtagtcttaaggtgactaggtttgtttgtaggctgatcttactcaaaatacggtcttattctggtgcagattgtctccatccgagctcaaaatgctgtgtagatatgtcatgcagatgagggttatgaattcgggtccctcactaattggtatgatggaaaagctaattctcatggaagaagacacaggattggaatgtgtttccctggctccttttgtagaaatggacatgagcaaaactgggcatgcttctgttcaggtgtccctgggtgaaagatcttggcctcctgctgctggttattcatttgtttgctgggtccagtttcgtaactttttgacaacccaagaattagaatcagaagtttataaagctggtggttcgtcaaagacgcccattttgagtgggcagcaaagcgaacaaaatattttccggatattttctgttaatgctataagtaatggaagtccacctatgcagaactttaatttcaagaagat

SEQ ID NO: 19081 - DNA, 469 bp, Arabidopsis thaliana
gtgtgctctaaagtactcaatacgctactggtttctgcattgtgtattgtgttcgcttctgttttgggcttctttatcggtctggcgagactttcggataactggctgctacgaaagctttccacaatttatattgagatcttccgtaatattcccccgctgctgcaaatcttcttctggtactttgccgtgttgcgcaatttgcccggaccacgccaggctgtgagcgcgtttgatctggcctttttgagcaatcgttggctttatactgcgtcaccgcagctgggagacggattcattgcgtgtgacctggctgttgttatggctatagtcctttctgcttggctatactggtttgataatgcataccagataaagaccggtcgactgcgctgcacctgagcgatcgtcgcagtgttgatcacgggttctgctttacaggcgcaatggcattttggcgctgacatac

SEQ ID NO: 19082 - DNA, 431 bp, Arabidopsis thaliana columbia
tgggaagaataatcaacaacaaacttagttgccttattaattgcttatacttttcttttctctttttagatttcattttcacattttttaatctataaaacattaatatgattatcttccatttcacacacacactcacacttcaattctcttcttatagattctgctctcacctccagactaaaatataaaaaatggatggatcaacggctgcgatcatccttaccctcatcgtaacctacattatatggttcgtttctttacgtcgttcatataaaggtccacgtgtctggcccttagtgggcagtcttccagcactcataacaaatgctcaccgcatgcacgacttcatcgccgataacctccgcatgtgcgctggtacgtagcaaacgtgcatattcccgatccagttcttggctaagaaacaaggt

SEQ ID NO: 19083 - DNA, 575 bp, Arabidopsis thaliana columbia
tagagtattcagttaccttagatgtgatgcttgacattgagatgttgatgaagttcgcatcagcttcctttgccactgcttttgcaagcatggtctttccagttccaggaggtccaaataaaagaattcctttacaaggctgcataaagacgaacaagagcggactgattaagaagccaccaatgcataacgttaactaccaaattttaggagagaagaattattgaggaaagccaaattagcagctagtctcgcaaataaaaggtatttccttcatacatctgtgataaatccgaggcaggacctcaaaaaattatgggagttttctgaaacataatgcagagaagagaaccacctttgttaatcccccttgcagaaaagttcaggccgttgtaaaggaagcataaccagttcctttaagatatctttgactttctcaagtgccccaatgtcatcaaatgtaacatcaatgtcactgggcagaattacatcacttagaagcctcttctcaaacacattttctaccacaatgtcctgaaagccacagagaaaattaacagttcttacataatagg

SEQ ID NO: 19084 - DNA, 508 bp, Arabidopsis thaliana columbia
aaatcagttatgtttttattctctagacctgaatcttgtgatctttgaggaacggatgatcaaaagctggttgctttgagattggaacacagtcaatcacatcaccatctgaactctgttcaacaacaaagtaacattaacatttcaagtcaaaatccttaattatgaccataacttttatggaatcgttaataaaataaaagtaaatcgaatcattatgtgtagcaggaaggagagagaaataagtgaatcataagattatgataatgttctaaagatctctcatttgtctatcaaaaaccaatccaaatagaagaaaccaaaacactaaaaaaaaaatatatatacctgaatgcttttgacagcaggtttgttcagcctgttcaaatgtttcttcacttcaaacttctgctttgatacgccggaccttgcggcgtatgatagcgagaaaaaccccaaagacataaacacactaagaaacctctagctaacttcgccgtgctaagat

SEQ ID NO: 19085 - DNA, 1003 bp, Arabidopsis thaliana
caaccacaaactcttctgccaccggtttcggtttgttgcagtcgttgcgacaaattgacggtcggcctgaaattacctcagaggaagttggagagcccaaggaatgtatgcatcggctgaccagaacaagcttggtctgcttatggcttttaacttggttttcacgaagggtaaattttccgacagcaccgtggcgatgtatggccggaatcctgtattgtcgaaggtgaggaaatgccgatcattggaggtacgggagctttcaggttcggaagaggatatgcattggccaagactttggtgttcaatattaccagtggagatgctgtggtcgaatataatgtctatatttggcattaattattgtcattgattactgcttttagttattaaaaaaatcaataaactggtctttttttttttttgaattaatattgtgattttttgtgtaatttattgaaactgtggaaaaaacatatactttatgtgatgatttttttttctacataccatgagctgaatttgcctacgtacttagacgtaaatgttcatttccattccaaaaagttatcatgtcaaaccgcatttgtttgttaaatccacgtgtttgagcatgtatcttcttattcactgattgaactcagtaataatgtagatttacaaaacaaaaaatgggatactttatatgatttgtgtttacatgtttgtatctacttctcactatttgctcatggtactgaatgtaatataatatccagttatgaagagttacatacgtccttttatttagagtagatttaatgatcattgatcaatacacgcagactaagaaaaatattaattcaaccacaaacagaaataaatgcattgatgcataatcatatacgtaaccttaaagcctggaactaacgttgttaccaccgcgtccttgaactttcttggaacgggtatcgtcctcatcgacaaccaaacctttagcgatatctctcagactcagattagg

SEQ ID NO: 19086 - DNA, 540 bp, Arabidopsis thaliana columbia
catgttacaagatgggaaattcccatgagcccatccaaacaagagtctctttgccatatatgagtaaagcagaagagaaaacttattttaagaataagagacctaccgattttcgattctttttcatcatggcgcacaagctcatcttcttcttcttttgtttctgttttaactgggggtcctccaaagctcatgtggttgtattccaacaaagaactcttgtcaaactcgtatccaggctctgtacaaaccgaacaatatgcattgaagttatatcacaagcagttaaatcacgaagaatcaagcaaatgatccacagaagttacaatgagattcctacattcatgactgtgttgcagatggaaacagaacatgataacaaaaaatacgtttggttgatacttacctcttcttgcgtttattctcttctcaaagagacgaattgggtcagagccttctaagcatgcggcataaagtattcactgtcaatatcatccagcgacatgatcagagagggtagatcatcattcatattgatag

SEQ ID NO: 19087 - DNA, 569 bp, Arabidopsis thaliana columbia
tagatggagttatctcgttgtgaataatacaataaaagaagcccagaatggaccaataattaaagtggataatataagaagcccaataggcccaataatattttccaggagctaacgtcgtttgcaacttgcaagtagcaccgaagagttttgggggttggagagtgacgattacagagtagttttgtagcggaggagagaattgttcacgacggcgcgtgtcacaaacccacgaagaaagctttcaaatttgagcaatttgatttcacgagtcgaaagttgtgaaaatggtgttggtttctcgtcccctcttcatttgatgcatctgggtctctagggttcgaacggaaatgttcactccgcaaaggaatcgttggccggagacagaccggaagggaaaggccatagctttttccgacgaaatcattacacctcctccacaaagggtgcttctccgagaggatgatgattggcagaagttcaaagaggttggcttgcttgatgaagcttctctagaaagaaaagatcgtgatgctcttatagagaaaatcttgaagcttgaaaaagag

SEQ ID NO: 19088 - DNA, 533 bp, Arabidopsis thaliana columbia
gggcttttctcacattattaactcgacaccaagcaccaattaactttccatacatgctcttctcaggttcgactccaagtttccacattctatccagtaagtcttgagctttgctgatataatctttctcggcgcaaagactagtgaatagagtaaaatacacactcttgggcagaggaaattccagtctaatgaatcgttcaaaggcatgatctagacagccagcggcacaaaaacccttcagcatacttgcatcggtttcccgagatttatgttccaaactctcatagagagcttcagacttgtctagttcacctgcatcaatcaggccttcaatgaccatgttgtgtgtaacataagtgggttttacaccccgatttccatcattttcagagtttcgaatgcctcttgtgcaagaccattcgtagccaatccaccagcaagtacgttatatataacaatatcaggtgtttacctgttccgtccatttcaatcatcaaatcacaggcatcagaacatttaccttgtagaca

SEQ ID NO: 19089 - DNA, 737 bp, Arabidopsis thaliana columbia
caattattctttctacctaaataacataaacaaattagctcagaggaggaataatctaataaaaattgcaaaagcaatagatgtaaacagcagcagatgagacgtgaaatgagattgcaaatttgatggaacgaaaacactaacctgactattctgcttaatgatgtccagatccatttctttgctcacatcgttgacctcaatctaaaaggttaaaaaatatatcaagtgaaagaatttcagatttatataccataacaacaactctggcagatctatttgatatattccaatgcatactatggcagcacatgttcaatatgataatgcctaaatataaacaaaaagttagtatcttacgtggtaaacatggtttcacaagctaaataagaaatataaccatgttgtgaaccatcagagtagcatctcatggcattcttccttgtacatataaggataataaaaagcagaaaatcttccagacattcaaacattacctcctctcgcgagagtgctgtcctgtacctaatctcctccgtcactttctttgtatagttaagaaccttcttgaatccactaagctgtaagaacacacaacataggtaaagaaacaataaaaattagcattatctaaaatatatgcaatacattgatcaaaattaaaattaaaaaaggagtccaaaggacgtacattttggagatcactcaacgttttccactgacaatgcaagtgtgat

SEQ ID NO: 19090 - DNA, 305 bp, Arabidopsis thaliana columbia
tgattaaacagagagacctgaactggtcgtccaaattataatcactggaatcgagaatgtgatatagccaacatagacgattctacgatccgaagttacaccatgacgtgcttgaagcttcccacatccttgtgtaaacgcatccaatcggctcagatcagattctgttgggatgccaatactaagagaaaagaaatggcgtggaactcttggaaaagaatgactagatctgtgactggtggggatttgggtttccaggacttacacagtttcaatgatcgtcttgttggcgaatgtcagctgtc

SEQ ID NO: 19091 - DNA, 599 bp, Arabidopsis thaliana
  unsure (1)..(599): unsure at all n locations
ggtatttgaatggatcattatggaacttccggtacttcggtagctgaagtacgcaggtacatgttcaccaggtaagacatcagctatgtatgaggactggtggatgtaaactgaccggtggatcttttcttgggctctctgacctagctttaaacagttaatgaaattcaggtggatacttttgtttcgaaagtggccatgtagtatttgaagtgactcgcagtttacagctgttaaggcggatactgagcctggaagcttcggtagcgatataatattgatgcaataggagatgtcaatcatctgcagccgagggagatatttgaggtatcgcggaatagtctccaattctttattttccctcaaacatagcttttctaaaacataaggaacatgaaccaatctcttgaccttagccctctccatacaaatttcatcaattttactccaatattttactgatggaggcacctcagtgatcgcagtgcctattaaattgagaagacgaatattggttgaaatctctggaaaggtttgcaatcgtgtgcaatacgtanagtggaggactctagataccgagttgagacattgtagaatag

SEQ ID NO: 19092 - DNA, 557 bp, Arabidopsis thaliana
tgaactggagattaagaaatttaccagctacaatggattttcttattgaatccaactcattcgcgtttgagctaacgtctatttcaactctctcgagaagaccctccaactgatcacggatatctctggctcttttcatactccgaacctatacacataggattcaaaaacccattctataactataaccagaaaaataagaacagaggatgatgccatatacatacctgaatatagttctcgtagcaccattgtgttgagtagttcgtttccttccacgaattgtaaatctttcagaaaacaaagaagacatattaataaacagtaagactgcaaagaaaaacaaagtaggggagaaatgtacagaccttcaggaaagcaatgtgatcaccgacatttccaacgtgaaaattcttcattgcattgtcagcgtgaacttgcttgtccttggggcggtaaaagatagaaggcccgatggacaacatagcagcaattgatataatctcatcggagcatttgtatttgtcagaaacaacaatcatcttcgacaacattgg

SEQ ID NO: 19093 - DNA, 910 bp, Arabidopsis thaliana
ccctgggcgatgaaaatagcttgggtatggtgaagtataattaccttccaccacacatatccgtagcctatcaccccaacgataatgatcaaaccatagtttctaccacctgtacattgaaggaaagtgttaactgttttcttccgaatttagatcaacagtaaacaaagaatggtgttactctaagtctctaatgtaatgccttcctaaatgctacaaagaaaagccacttatcagaacaaagtatgtcttgtttgatgcgagaaaagtagcaaaagagaataaaacctgaaatataatttcaaaatacaatgtctagaaatctaagtgtgcaaatcctttattcaagtttcatatcaaaccaattttgacatttctagtgcagaacagaaaacaaaacttcaatataaaaaaatataaaaactccagaggacctgatcctgaaggtgaaacaatggtgataggtctgtttgaccccagcaactgtatctcatgcctaagactgttaacctacaaaaataaatagagctcaggcaagaaactattgattcacgataaatctatgtcctcagcaagtctatattatccagctccatccgatagcttatcatcgccaatagattaatgtgaaacttacctgggccacaagtacatcatcgtggggtttgctagctgatttgctaggttcgtcttgtttcagttgcctgaataccatctgtccacataaacaaaacccattgcctcattttgccaaaccgcatcatacacatgtgaagtcgccaaagcttttgcacaatatagaaattagaataccttaaaagcaccagaaaccaaattggagacatctggtaagccccttctttagaaatgctgatcaataagacctaaagtacatttgcaaaacacagta

SEQ ID NO: 19094 - DNA, 502 bp, Arabidopsis thaliana columbia
tttttatgaaactcatatatagtccagctcattaaaagatgtatagtttagtctttgggcatatacacatggtcgattcacacaatctcttaccctgcctaaattgaaggggaaaaaacctctttgttttctccttttctcatcttttgttgagtgtggaataagggatgcattgaaagctgaaggtaaagtatgaaaccggcctctcaacatgcctaaagttcgaatctgataagaaatagaggaacatgttaactctggaaacagcacacctggcaggaaaatgcaaaaaatgacaactcacgcatagcagaaacatgtgcttacctcaccaaggtggtgcagaacaccatacagtccaccaaagatcgtacagtaaactgaataccatatttgtgtatccatgacatagacctgaaagtttagcatttgtctcagaattgaaggtatgcatggggatggaaattcacctactgagaactcacaccattattggcgccat

SEQ ID NO: 19095 - DNA, 577 bp, Arabidopsis thaliana columbia
tggtctgactttgaatgttgtttgattagacccaatagtgaagtttctgatggagcaaatggagaaatctgggtgtagagttggtgataatttcgttaaggctgttgtttgtactggacctgtagctggaggttacactaaaggaagaggggtaaaaccatttccatgtttccttttttcgagctctttgatgattgtcccttgatgctgaaatcttgctttgtatccttttgttttctatgtttcaagataactgtctgcagtaactatctgaccattcaagatgaagtgaaccaagtagttatacatgagttgattcatgcttatgacgagtgccgagccaagaatttggattggactaattgtgctcatcatgcttgcagcgaggtgattacaatattagatcaaacctttgatatactcttgtcaaagtacttgataggttttggtgtgtgtgtcttctttaacagattcgtgcaggtcatctaagcggtgattgccatgttaagagagaacttttgcgcggtttcattaaattaagagggcatgacaagtaagcactttaaggataagagtt

SEQ ID NO: 19096 - DNA, 550 bp, Arabidopsis thaliana columbia
cttcaaagattcatagcactcttttactgcgtagtacatgtactcgtctttccgaatccttcgatagagaacctcatccttcccgacaaaatcttttgcaatgctcagagctgttgaaaactagtaagatggggcagctatatttaccaacaaaccgaagttccaccaaaacaattgtgtagaaaatattttaaaatgtaccttatttgcaaggaggaaaatgggccaacggatgattcctgataatacctccgatgacagcggcatcgtcatcaaatctaattccctgaagataaaaatatacacttattagctatgtttatatgtcagaagtttctgactcagaactttacatgcaagcaatacagaagggagcaatttacttgttacttatcagatcttctgttctgaaactgttaatgacttggttccagaccaagacaaacttggccgatctatttttctggccatcagacccctgcaaagctaagtacacgacttttttatgaaactcatatatagtccagctcattaaaagatgtatagttta

SEQ ID NO: 19097 - DNA, 520 bp, Arabidopsis thaliana columbia
ccagcgaaacaaaataacagtgatctaactaaaatggagcttacatttgaccctgttaagcattttcaatagaaggttgtgatcatagctgcttaaatctagtcattttaaaccataaagctaaaagagagtaaattttcaatagtgctatcatcttataaaagaacggagaattataaggagagacatgtcaagattaggacactgattcataagatgcgtttaccttgccgtgtttctcagatagaccgcgaacttcctcggcgatctctgatctgatggtatgagcaatcgccttgccgtcgattatcttcgccgtgtgatcagatgatgacgccatgagccactaggaatttgcctcgtgtcggaaatatctaattctctctctggatccactcacactcgaagatgacgaagaagacttaatctgaatccatccgcggataggacactcatacttctgcaaccaaacgttctacaatggcaaatatgtaatttccgcgtgacctaactagaaacg

SEQ ID NO: 19098 - DNA, 526 bp, Arabidopsis thaliana columbia
cacagcagagattactgccggaggtggttctaagaagcgacggagaaggaatctgccggtgtgtattaaggtttgtgacagcaaaggagccatcttgggaaatagaaagtagagagagatagagatagatgcaatctgaaggttgtgctgatgatgactgtcgactgaggaagacgatgctggtgaaacgggtaccaactgagatccgtatttctaactcggactagatccgacccgtagaatgcaaatgcaataaccaaaaaaaccataattatttaaaatagcggttctcgatccgttccgacccgaattaaaactgtaccgaatggtcgattattaattgaaaccagtcccgataaaccgggaaatattttgattaaacttgaattatgaaaataaaccgaatctaaagcaacgcaaaatcaaccgaatatcattaaaccaaactggataagacaacccttatttaaccgaaatcaaaccaacgattcctttattggcaattctacccttctctgttgttttt

SEQ ID NO: 19099 - DNA, 396 bp, Arabidopsis thaliana columbia
gttttgctgaattttgttcaggttacttactggttcgattctagctcatgagatgatgcatgcgtggatgaggctcaaaggtgaatttcttactactcctcttaacgtcttatattactgcttctttctgttgatcacattgttgaaaccttgtttagtgttggtcttaaagaggataccgatcactgagccaagatgttgatgaaggtatatgtcaactgatagctcataaatgcttagatgctgagatagctgctggttcaacaaatagcaatgctgcatcatcatccatcctcttctcaaggactgaaatagggaccgagatctcagtacgagagacagcttggtgagtttttcaagcaccaaatcgagtctgatgcttctccggtttatgga

SEQ ID NO: 19100 - DNA, 534 bp, Arabidopsis thaliana columbia
tattcggacttgcgactctccaacttccttcaacacctttcgtcttccccacgtctctaacctcaaactcatcaattggagtcttactccaaaaatatggatgaatcaagattatccctgatattaaagaatcacaaagcttctcttttttcgctcgcatcgttagatgatgagatatgtttccaccggcgctatctccggcgagaaacacttttccgaaatcgccgtgtttgtttatccaagtttccggtccggttcctgtgatatgagttaacacccatttgagtgaatcccatgaatcttcgtacggaataggtaccggaaactccggtgcacggcgatagtttactgatattgctaagcagttagcggccgcgacggcggatgtgaggaaagtgtggtagggtggagaaaaagctgtttctatgatgaaaccacaccgtggaagtagatgaggattgggagctttttaacagtgactttctccggtaggtagatgcggagggagaggtttttctccggtgaatggatgat

SEQ ID NO: 19101 - DNA, 787 bp, Arabidopsis thaliana
cattgattaatagaatctgagtacagagcacgtgaaagacatgatggaattaaattatgaaaagtaaagagtgtttgtgaaagtcgctgatgccgtgcaagcttgtctgcaggtgcgtttgctgttcttggaacccatgcgtattcgacttcttcaaagcgtgcttgccagtgctttatctccttaagccagttgaataagtcaaagcgcatagaattggactgaagaactgatacaagaattttgctgtctccttcaaagatgatacgtctgtaaccttttgtccatagatgctgcatcgcagtaatgagactttgacattccgcctccaccgccgacgtgaccatgaaaccagtagattgagctgagcccttgtagtcaccgtcatcatcccggagaacccaccccgttgtaacgctctgttcgctgttgagaaagccgccatcgtagttgcattttaccaatccggcccgcggtctcttccaggtcttcgatgtgacaacccgcgtctgatgacccgtatgtgtcgtatgtcgattgtgagatgagggcagcaggagagatgaccattctgttgcatcctgtttcgcctctcgtaagtctttttgccaattacttgaacgctgttggaaggtgaggatgttcctgcttcgccaaagcttccataagatccataaaggtaaatgtgtaagatgattagaagtatctttttgattgttaaagtcgagaattgccctgattttagctccaaggaaacacaggataaaaatgctcgaataggtcatga

SEQ ID NO: 19102 - DNA, 557 bp, Arabidopsis thaliana columbia
tgcccaaatataatctccttgctttgtgtctacaggtgagaaccttatatttggaggatgtgctctctattctgaaatcaggtggagataatcatctaagctctaccaacttgagtatatcagaccacaagcttgatttgacggatgaggataaacttgctttagatgaagcaatcatcttggcttggacaaatgacgagtttgatgccctcttagatctagtttcttctagaggaagtcatgagatctacaattatcagcaccaatcaacctggctaacaccactaatggtctttgctggaaagggcaggatcagtgatgtctgcatgctcctctcctttggtgcagattggagcttaaagtctaaagatggtatgactgcattagaattggctgaagcagagaatcaactagaagctgctcaaataatcagggagcatgcagacaattcccagtctaattctcagcaaggacaacagttacttgataaatacatggcgacaatcacccagagcaggtcgatgtgagtcttatacacagttaatgaggaaatatgt

SEQ ID NO: 19103 - DNA, 528 bp, Arabidopsis thaliana columbia
ggaagctgttgttttgagtggtgtagggtttcttgttctttaagttgctaaaatagtttgtttcaggaagaccttaaaagttgtttcttatagatagtacagcaatttgatattggtttcacagttcatacacttgaagtccttggctttcacagatttgtgatgtttttgcaggtcttgaatgataagagtctgctaaagattgagtccccatcaaagtactttaactgtggaacctctcctgccttaaggaacaagaatgtggttaagcctggatcacctatatccatggctagttctccgaaagatggtatcaagtcacctatatcaaagcaccttaactgcgaaacccctgctttaagaagcagatatgtggtcaagcctgcatcacctatatccgtgactaggtctcctaaagatggtatcaagtccttgtcaaaggcagtgactcctccggttgcgctttttaaggtgccttcaagtcacatgacttggtctgatcaaagaatgtcatggagtggactccaa

SEQ ID NO: 19104 - DNA, 758 bp, Arabidopsis thaliana columbia
acactccaatgctgcacaacctatttgagccgtgaacatattgtatttctgaaataaatacacatgcacccatcaacacatgttattaacaattaatagctagcattttattgcttcatttttcgcaattattcatttcaatcgcctgtaaaaaaagcatttaggaaattacccgagcagcaggagcagaaggagtggtgaagagaatggcagagacagcaccaagtggtgcaaccgacattgagatccctttagggtttagcatttgatctattcttcccattatcgccatcgccgcaaaggctccttttctcattcccaatattgacaataattcggttagagattcatggttaataaaccgagtgattcaattattttgcatgatgttttcgaataaatgaaatgataacacgacttctactatagatagatgtttcctttacaattgacaaatttctaaccaaatattagataataaatttatatatatgtgcctccattcaaagatatatatatgatcgacgatgactttttcgaatgtgtatataaatattatgaagctcacaatgaatttaacaaataaatattagtaatcgtgattcttactaaattcaagaattggtcaacctcgaacagttagattcatgtataccctaagatcaatagctatctggtcgttagaagagacacaatctctctgtctctctctctctcttccctagtgttcggacaaagaaaactgctgtctaatgaag

SEQ ID NO: 19105 - DNA, 623 bp, Arabidopsis thaliana
acaatacactattggaggacagagacatattgaccctctgtggccatctgaccataatgatcagcttctaagaagtcatcctgggatccaacgttcgcgatcctctacaggatttagacaactagactttcatcaacagcagcagaggccacccttcgaggatcagtttggtcaacttgagcggaaccttttatatcagcaacagcttcgacaagaattattcgagcagggtctgccatttgagcgatcagcatccttacctgtaagtgtatcggggatgaatctggatccagtaaatggtcttggactctctcaaggtctggagttgcgggatgctactacccacatgcagattgggaattctactctgggttttaatcatcagaatccccgtataccaataggtgaacctcatttttcacagttggaatcaatggaaggacgttggtctggagctgacacacaggttgttggtgactgggccgaatctcaacttcatagatcaaatattgatgctgaacatcataaaatgaggtcagaaagtaggagaatgggtgaagattccaactcatggatgttaggtgggactacagaagacaggtcaaaacagctatttatggagt

SEQ ID NO: 19106 - DNA, 1378 bp, Arabidopsis thaliana
cctctcaatatcgctctaacgcaacaacaatcctcgtatgtctttcgaattcctctgagggttgtgcagtagagtacaatcttgtcttctgttcctggtaatctcggtttggctggtgatgaaatcaattgactagaggatacagattttggttcttcgcttattaagatggatggatttgatgatgggctacaagagagagactttgtgggtctatgagggtttctagtattactatgattgcttaatagcttagaagacaaagctttcttgtaggatgagacaatgctgggatctaaatcagagagaaatgattcttcagacaaatgcttccacaaaggttgcttaggtttataagtcaaaggaacccaatctccatcgtcttcttcgattctcacaatctcgtaagattcatccaatttcaacgaagacccatttaaactcacattccgattcgggtcgggtttagagcaaaaatccgaatttagacgcttacccggtttgggaatttcgaattcgaattcatcgtccaagccatccataagctcccaagtgtttatgactgaatcaggagagaccggatctggtgtgttcttcccggagattgagatacgaggcagcgtttgttggtcggaagaggagtttttggatccatcgagatcaaggaggagaagagaaccgtacgatgtagatgtaagggaaacaaggtgatgagagtcgccttttctcgccggaggatggtgaaccaacggcgtcggaaacgaaaaagctctctgcaccgccggtgaagatgaatcggagctgaatttggtcggcggtggagaaaacgcagatgaggaagaagcagaagaaacggaagaagcggtctttgaagcagaagaacccattacgaaatcgaatttaaaaacactgactttaatgaataatagtttttagtttctttgctctttctggtttcttctgagattgtttggttatctctgggaatgatagagaacagagagagaaaagagaaaggtggagaatagctgtctagggcagttgaaggtggaagatggtgaaatttaatggcagaagaaagaaacgatgttgatgttgattttcggacacaacaacagttctcgatttgattttgattgtgtaaccaaagcttatgtatagaagaagaaccaaattccaagaactttccttcactgtctataaattgagccaaacgtttttaaaataatgaagaaaaataaaatattaaagaaaaatgtcattatcttcataactgcaatctttaattctttatgatatttttattagaactaaacgaagattggaggagaaaaaaggttgatcaatcaaacaaatattgacatgtcagttccaaaac

SEQ ID NO: 19107 - DNA, 524 bp, Arabidopsis thaliana columbia
gattgatgagcttgagaagaatctgcagctttcgcagactcatgtcgaggcatccagaatgacactgcacagatttggaaacacttcttcgagctcgatttggtatgaactggcttacatagaggctaaaggtaggatgaagaaaggaaaccgggtttggcagattgcttttggaagtgggtttaagtgtaacagtgcagtttgggtggctctaaacaatgtcaagccttcggttagtagtccgtgggaacactgcatcgaccgatatccggttaagctcgacttctgatttaatgaaaaaccatttgtttggttagtcctagtcttactagactctgccttgtttatttttcttcttttctggttaagctcttgtactcttaatgtgacgcttcttgattattactctcgcgttttattctatggcatctttatccatattaaagattggttcgttattataatcatctcaaatcaaaattgacaatgaaacaaagtaatattttgagaataaataaaaaagc

SEQ ID NO: 19108 - DNA, 999 bp, Arabidopsis thaliana columbia
ttagctaataatgatgttaaatatcaagtctaacataaaaaagtgcctaccttcggggtgtcattgagtttagttatcggagatgaagccgtctaggaaaaaaggaaactaaattagcatcaataggtacaatcaatttaaagtaaaacgccataatagtgattttagtatgtaacactgaaattagcttcataagtaaaaatgggtggggtggggaaaaaatcataacctttaatgcctgggtcgggagagcgctgggatgggttggttgagatgaaccaatctgtgaagagaacatcgcaaaatcctgggattcctaaaaaaataccgtatacatacacaattggtggataaggaagaatttatcaattaaatataagatatttaaaaatcctccatctacctcaggagggttgggtgcaacaactgatgtagcgacaacaacgacagatggtaggggatccaacggagcgacggggtttaatggatcaggggcaacatcgggtccgagagcagtattctgaattgaatacaaacacgacacaataactggtgatgaattataaatatttaaaaacataagtctggatacaattagcattagcaaactaacctctgttgtaacagacttcggagggctaactgtggaggaactggggtgggccacaccatcagacggcatgttgacatcctggacaaaatatacattagtgaacagccatgcgtaatgtcgaaaaaaggtcataaaaagaaataaaattgttatcggatacctattgtattatacgacaacagcttagttacaaacaatgtaatcgaacttagggaataactatatagtgcacgacaagcatgtacttgttcagccattgccgcattaatatcatcgaccatctcaacgtcggcctacaaagccaaaccatgttaaaaacgttaagtagttaatacttaattacagatcatttaaattgcgcggctacaggtatagtgtacaatata

SEQ ID NO: 19109 - DNA, 462 bp, Arabidopsis thaliana columbia
tctatctgtatcaatcttgaccgagcttgtggatccttccgggattggtttatatccatagatgttctgagcaagcatccctactataggaggagcaaaagaagctagaatcgactcgaatgatctgtctaacgcgtagatgctcgttcgtgctctctcaggaactatctctgcaaatattggactgtataaaaccatttcaagtagatgcttccggaagtaaagaaaagccaaaatattttgaatatgattgaaatatataagtattaaacttacccgtttgtagctgcaccgttccatgagatgcataatcccatgatgacaagaaccagaccgtggctaaaggccgtggagggatcatcaggtaatccgataagcgaaatcgcagctaaaggaattgccgagccagagcttacctgagagaggaaaatcgtacgccatttgggaacttcttggcgagag

SEQ ID NO: 19110 - DNA, 840 bp, Arabidopsis thaliana
tcgactcttgactatcacatctcgttacaatcaaatatccgcttatcgacacttccattctccatatactcgtaaatcaatatcagactctctcctcctttcttagaccaaccttttagtccaactatattcttgtgtctcaacctccctaagctcgagacctcagctaagaactcactcgtcgcgccaacgctctctcgaggactcatcattattctcttaaccgcaacttctttaccttccaacactcccctgtacactttagaattccctccgtatccgatcatgttctcatcggaaaacccttttgttgcttccaaaacatctttgtattgcactctgtgaggccaatactctgtttcccaatcttccacgtctccttctagtctctgccttcgacgccttacaacgtagaaacagaggagcccaataacagagactaacaacacaacaccactagagaccccagcaatgaagcctttagacttcaaaacagagtcacctgacaatttaaacgaaggtagattcctagtgatcaaagcatcaccaatggagaaattggagttactaaaactccatgagagaatcctatggctctgcactagttgtcctgtggaggcagtgaatccaacgaacatatcatcaagtaagactccagtgagatttaatggaatgcttatgagtggtcttatgggctttctagagctagctctagccatcgtgacattgatcgctgacccattaaactcgatccacgcctgataattctcgccactgttaagcttcagctccgtgaatctctggccgtctctgcctccatagaaacctgcagtttcagat

SEQ ID NO: 19111 - DNA, 3106 bp, Arabidopsis thaliana
tagtcagttgtgaaacaaacttggaaccaagcacatctacccttagcttctcaccatcaatatcgtcagtccttaaaagatgcctactaaatttaataagagcgtccatgaccttgctggtgaactgttttttcctctcaataatgtcaaagatctttttggctgatagggaaacttcaccaacaatgctaatgaaactgcaaaaccatgaaatttttaaaaaaacataccagtaacagccacacatcttaccttgtacaattgaaaataatgtaccatttatttgataacaagcttaaaatgtaatattgttaccttttccctctgattttagacagagaacgttgataacgttcttctggatcggtaacaacctcaccgacgctcagcaaaggggacgggtgaccaacaagcagcttggttttcttgtcaaagtggaaccgcccatctaatttgctagacagagtcctaggtatttaacttttccttcctttgttcacctcaacatcgggtacagtcccaatggctgcttttgtagcagacgggtttgaaggtgggggtgttgtaaagtcctaaaacatgattaaaaacaaaataaaaatgttaacatgtagtaggtagtttacatccagcagaggacaagaaaatgtacctcatcagaatcccgatgagtaggtgacaaactagtctctctagcagcgacatcaccaatctgtaagaaatttaaattggtgactagatgcccaacatccaattaccgttaactatatgtttatcgtagcaaaaatatacttatagggtaatatacatttggctttatagttatagatacaaattacttgactcgaggctactttagacacatctgcaaggggctgcataaaaaacacacacatttaaataacgagtacagaaaaatttgaaaatgaccataaatattccaatcgtgtgctaacaaaataataaactgctaaccaacctcctcgctggcacgagactgtagttgggaggaatgcaaggggaaatcgtcgttaccctgaaaggtaccattgagatagtttattattttgcatataacgatagaactaacaactaagattaacagttgggtaaaaatgctcacctttacctggcctctttgaggagttggttcaacaccaacgagaagttcctcaattgttaaacaaagcgccaaaaacctgtgaggtggggcttaataggcaaataattaaccaattagaacataaaacaactaacctcaattgaaacatacgacaacggatggacatttgagtcttctggggtgtgttctaacacacgagttgcggagggacggttcatatcctaaataaaaatttgattgccgagaaaaatatatgttagcgccctaatctgaagaatacgttatagtaatctatcaactgataaccaatatgttatcgcctcatattttgttattaatgttatcggataagttatttaccaaataacaaatatacatccaaatttcaattgaggactaaaatgagcagcggtaaaaaagattaattaaacaaaaaagagagcgatggtcaccaccgactgtggtagtgtcgtctcccatttcaatgtcgccctacaacgcatacgaatattgcaaaatggtaacagtaaatttttaaaataaatatagggtcacacacaaaacagttatttgtacacatataaggagacttttaccagttaacaatatatttgcgccataatatactcgcatatgcagcagatcgggcttaaaaaaattatttaaaaaacataactcacctaggcgtccacgactgtggcggtgttgtatgcgatctccgcgtcggcctacaacgaagacgtgaataagaaaaattggaattcggctgttaaaatttaggaggggtaaactacaaattatgtctccccagcaccgaaaagtaaaacataaataactgataaatatacaccctaacaaaacaattatcggattatggctccacaaaaaagttcttacgataagtttaaaataaaaaaagataaaggtacatgataacaaaacaattattataataacttatcagttatcaagttaacaaaacaatatattgacacaaacaagcagttatttgtacacaggtaaggagacttataatagttaacaatatatttaaaccataacatattagcctacccagcacatcggtcttatatatttattatcaaaacagaactaacctggacatccacgagtgtggcggtgttgtctgcaatctccgcgtcagactacaacaaagacgagaataagataaattgacagttaacaatatattttgcgccataacatatgactcccccaacaaccaagcgtaaacaataaataatgttaaagctaaacactaacaaaagagttatcttatatatttattaccaaaacagaactaacctggacatccacgactgtggcggtgttgtctgcaatctccgcgtcagattacaacaaagacgagaataagataaattgacagttaacaatatattttgcgccataacatatgactcccccaacaatctagcgtaaacaataaataatgttaaagctaaacactaacaaaatagttatcttatatatttattaccaaaacagaactaacctggacatccacgactgtggcggtgttgtctgcaatctccgcgtcagactacaacaaagacgagaataagataaattgacagttaacaatatattttgcgccataacatatgactcccccaacaatctagcgtaaacaataaataatgttaaagctaaacactaacaaaatagttatcttatatatttattaccaaaacagaactaacctggacatccacgactgtggcggtgttgtctgcaatctccgcgtcagactacaacaaagacgagaataagataaattgacagttaacaatatattttgcgccataacatatgactcccccaacaacctagcgtaaacaataaataatgttgaagctgaacattaacaaaacagttatcgagttgacttaccatagtttgcccgacagtctattacacatattatcgaataagtatatggtt

SEQ ID NO: 19112 - DNA, 589 bp, Arabidopsis thaliana columbia
agtgtacaatttttttttaaaaacacatacaattttatgaaccgaaagaagttgtttttcaagattccgctatggttcttttttttctttttttttgtagtatcatttttttatgaaataattgatttgagagggaattggatttgtgggtgtagtatgcattcgatgtggcgatcatgtcagcgttcggggacaaagaggagcccactacgattgatgttattaagcttctctatcaacgtctcgaaaggggttacaactccatgcctctcgacctaccgggcacactttttcataagtccatgaaggtatattatatagtttatgaactatatatttataacgtattatatatgaaactcatgattgatatacttggagatgaaatctctaaaggaatttgtacgtagaacgtgacaagtccatgtagaattgtaaaataccacatagaatattggaaaaacaaaaaattgtacagtttgattttttagggaccacatgtgtgcgatattatttgacatacgttagattctttcacaaaaaacgtagagcgaaatcattttcaagcatagatgtttgatgtgatgaa

SEQ ID NO: 19113 - DNA, 831 bp, Arabidopsis thaliana
gcaatatgtgtaaaatggtctcctcccctcccttatacacttgacatattgtagaatcacagagatggcgtcgatatctttcagcatttgacataatagcttggtttcctaccagccacaagaagattttcaccctctctggacccaaactactccacacacatgtccagaacctttccatgttaggtcgtgactcacaattgcaggttaatagtgagtatgcagatttgacggtgaaggctccatcaacactcactccccatgacaaatgatctcttgctaaccttatcaaccaccaaaacccccaatcttaaacttgcattttctgtgatatatggcagaatacgccccagctcccagcctctaccatcccaccacaaatcactaaaatggggcaaagtgctttcacttcatgtggatttataattacttttagccaaacacataattatctctatctccggttacttttgttaatatgttttggaaaaccaagaatttctagacttgtttatagtattaccatgttagtatttgatatacactaaaacctgagtaaattaataatgtagagacagtgaaactttattaatttatagaagtattgcggttgcggatggtggtgccgactgccgagaatggcaaggattgagtctgatgaacaagtatttcatatttggctgtttcataacaaaccaatctggttcaataacattagacttctttttaattcttgaggtcttgcttcagttcagttatataaacgtcttgaacgaggaggacagaagcaagaaatctagcacttttgggagaaggtattcaaagaagagt

SEQ ID NO: 19114 - DNA, 1097 bp, Arabidopsis thaliana
tgatttatatgcataatatgtatctatatgtcgactcaatgtctctcaagatctgccacacgatcttggtcaggacaagaatggttgatcctgttcgaagatctttccctcgtcaagattttcctaaacgaatttaatcgcgaagcggcggatacaactgttttgttatctgaggaagaagaggatgcggcttctacagtcaagttcagcctggtttccaccaacaactgcggtgcagtaccgactggtccttcccttggctcaggctcaagtctcggtcttggctcaacttcagtccgacaaacaggacaagtggagcaagtggtgagccacgtgtcaacacagtcgacgtggaagatgtgcttgcagttgggcaactctctcgccttgtcttgctcctttaacacgcttagacacactgcgcattcagtagcggaggcagccacgccatcagtggctccaacagtgaaagtagggagagaagcgatgactgtgggattgaggccacgcttaggcatctcaaaagggtggcggaaaatgacggggaggccacggaaagcttctctacggcgtcggagaacgaatcttgcgtaaagatgaagagcgaagacgatgaggataactccagataaagaagccactgcggcaagcatgatcttgctgttaagatcgtaagtagacggattaggccagaatgagtggtggtcagagttgaacctgcgatgatctctgtcgttggagctcattgtgaagctggtttttcttcggtggatgcaaaagaaaagtgaacaaaagagtttactgacttatggtgtattatataaggaataaaggacttatagaatttcttattttgattgtttttccaaggcttatactttagttggtgggtggagataaatgtgaagtagatagaattagaaactttgggagataggtagactttcacgagggtttagaaatttcaccattgttgactaaatggtagattgtagattatttataggtgataggtttgaagattatagactgtatatataaagagtggaaaatatcaaaatcctacgtaaaaaatttgtggactgagatcttctaga

SEQ ID NO: 19115 - DNA, 3211 bp, Arabidopsis thaliana
gttttactttgcttctgttttagaatggagcaaactcgtttcagccagcgagtagtatgaacatggattcatctataaactcgaacaaggaacagcctccaaacatccatgctccagctactgtcaatgctcatcatggatcaagtgaaagacatcattccccagagaactcttatgcaaatggtggaagatcttcaagccgtagtaataatgttacttctgggaaggctgatgactactatcattcgaaagcgagaccttctcgtaagcggttttcttctgctatttctgtattttttttatattatgagtcatttaacggagtttttatgtttgacaggatctaggcctgatgaaggagaatgtagaaatccaaatcatggctatgagaattcatcttcaagaaataagcagaaatgggaaccagaatttgttgattcccagacgctgcacgtgctgctgctgaagctgctgaaagagcaagtttcgctgctagagcagctgccgaactttcgaacaaagaaaggatgacgaggcaggattccacacagtcgcatatatcctctgcatctgtaaatctcagaaacgagccttcacatcgacgtgacagatcgaatgcacaaagagaaagtttttctgaagatcatgtttcgcctcgacgaaatgttaggatgcagtatgaagatatggacagaaccaggcaagacagatatgatagggcagaacagattcctcctgtagatcagccatcaggaagacattccgtggataactcgagaaataacggttcctttggtagagagaagcagccaagccaggatgagacggatataaatgttggttactcagaagatgttcacctcaggaagcagtcaagtcgggtttcatcacattcacattcaagcaattattctgatgagaatgaccttggctcagattttatgaagtcaccaagcatcgtggaggaaaacatatttgccactgaatatgatcaccaatctcagagcagctttaaagatatagattcccatgatcatggacatgatgatgatgctgcagctactgataattatgatgactatagttcatttttttatcaacctaaatttcatgcggaagataatcattatcaagatgaaattgatcatggtgtaggattctcattgcttggcagcaaaacatctgcttcagctgcttcgtggagcttcaaaggagatcatagtaagtcccatggaaaacacagcagctcgagctcacaagttttccaagagaacccaagttcccgattaatttgatgatgtctctacaagtcctccggcttcttaccatgagcctgacccacatgccaagtttgacaattatggtccaaactcagaaagcgatggtgatcagcctatagacaaagtttctggagatgtacatgagagggggaatctgacatctgatcgatctcacaaatttaaagtctctgattctgctggacacgaagttttccctttagacacagaagaacacacagataattcaaggacacgggaagaatcagattcagactcagagcctcagcttggtctgaggcttggagctttggccggtggatttaggaacaaaaagacactccctacctacaggatgagttcggcatcgtccaaggctgtaaaggaatatatccaaatcgatgattttggtcagtctagcagaaaagatcttcacagtaagaaagcaagcaacaccgagacaagaccaagtcttatgcctcctcatccatcttctagtgatgaagacgactcagacatgcaacatccaggaagaacagaaacaaaatcagattccttatatagtcattcccgtgtcaaccatgatgactcggaggaagaaaaactcccaacacggtcttcttcaagaattcaagagaggagtcataagccatcaacaggaataagggttcagaagagaacgaacttcaagatgccagtttcagcatcgtctgagagatgatgaagaagtcgaaagagaggctgcacgcatcaatgccaagccaaataaaacaaccgggtatgggttctctctaaggacaaagggccaatcgaaagctaatgagaaacattcattaccagtgacaacgaagaaaaccgacaaagagtctcatgatcagccatctccaaggacagtaacttccagccatgttccacaaactgtaaaatcacccgatccagacaccccatccagggagagggagagagctagtcatgttcaccccaacctcccagaatatgacgatatctttgcaaggctcggagcgcttcgtgctcccagtcgacgctgaatctgctcatcttgtccttctgttcatatatatattctttcacacggaaaacagttcccctcattctttactctgactgaatttgatattcttacacgttatacagattgaagtagtggtgtgattctgcttggtcttgattggttttccttgtcttttttttttttgtgtggataaacagaatagaaaataactatttgcgaagagaaagattttataataccattcgaaatgttgtcataatagaaataaattttgttctctaattctccatcttgctgaaactgcagtgcaagaaaacaaacaaacaaacaaacaatgtcgaaaaagccagacaaatgacatgttatggcagggtttgacatatcaaagtccctccatcagagtttctttccgtattgcagttcaatgaaagaaaccaagaacctgaccacccacattccgtttaatagcttcttcatgatccaaaatgccatcgggagttgtaatcactatataaccccactgcatataacaaattaaagaaggtttaagttacgattagttgcatattcagaactagtgtagaaccgaacctggcgcgttggaagtgtgcgttctgtgtattgcccgatctcatttgccttaacgtcctgcctataagtgagagctttgcaatcattaacccttccttgtagatcaacagttattcttccaactctgtgtggatcatggacttggaagttcttgatgtaccctatacataatacatcaacatacattttgtaaagtaatagacaaaaaactagctgattctgcggtttgagcatagaaatggtatctttatacttcagtcacaaactatcaactttgaaaagaactacttcaaattcctaactaaaaaca

SEQ ID NO: 19116 - DNA, 1158 bp, Arabidopsis thaliana
tgtcgcaatagttaagttttaaacttaatttattttgttcattagtaataccttttaactgtaagataattttattaaaaatgaattattcgtttgtgttatgaaatataaatgcttaaatattatcaaaagtcatactttttaattattattttccaaatgataagcttatataataagtttaatggaccaacccaaaattgtaaggaagtgactttagtggaatagatacgcgatagactttgacaagaaaaaaaaaaaaaaaaagatacgcaacagagttcaataataaaataaaataaaaactttcaaagaatcaaattccgttccgaattgattcacataacaacatgcatggaagcttaataacgtggacaaatcaacattccacattttattcttttcgtagataagaacgaataatatcattctctttataaactcatcactcaaatgcatttgttgcaattgcaaaaagaaaaccaaaacaaagctcaatcatggctagtcggagagaagtacggtgccggtgcggcagacggatgtgggttcaaccagacgcccgtaccgtccaatgctcaacctgccacatcgtcacgcagctctactcgctagtggacatagctcgcggtgcaaacccgataattcatgggtttcaacagctacttagacaacaccaaccgcaacatcatgaacaacaacaacaacaaatgatggctcaaccgccaccacggctgcttgagcctcttccctcgccgtttgggaagaagagagcagttttatgcggcgtgaactataagggaaaaagttatagcttgaaaggttgcatcagtgatgctaagtccatgagatctttattggttcaacaaatgggtttccctattgactctattctcatgctcacaggtttttcgttttttgtttgttttccatttctctaattaaaactctctgtttctttcttcctgatgatgagtgttgtgttattgttgcagaagatgaagccagcccgcagagaataccgacgaagagaaacattaggaaggcgatgagatggttagttgaagggaacagagcaagggactcactagtgttccatttctctggtcatggatctcacagaatgactcaacggagacgagatcgatggtcaagatg

SEQ ID NO: 19117 - DNA, 1320 bp, Arabidopsis thaliana
tgccttgctcagtgtgaccttgtcgtgttctgaacgagagctacggctgcctgctccagaccggtcatgattgatcgaagagtaatcaacaaagttttcgtgagcttcagctagtggcttagcggttagactgtctgagcttagctctccctcggaaaggctggcggaatgagaatgaacgtgttgcatatcttgagacttgtctgaaatcaatcccggaagatctcttggttcatcatccaacgagtgaaatacataaccaagaagatcatagtcatcagaagtgtaatcagcagctacacgggcttctccttgtctcgttgaagctgtgtttgtcgagagaacgaatttgttattaacaacagataaatctatcaaacaggaacatgctccacaccgcactttctgttgtttctttgtaccagcctctggtttctttggcaattgtagaagctcaaagcagttttgacaggttataaacggtgcaccacctgccaaagggcggatatgacgagatccgcctgataatacaactttaggaggacgaatccgagaaagagcatccatttgagcatcactgaagttactaggccatcttccatgaggctgtagaccacgagaaccataagttctaggattatgcggtggagcaaaacccataacgctctcatgaggataaaaaccagcattatagggtgcatcagggaccaccggtgctgaacctcgccagtatttattatcataacagtggtaacaagagcaagatgagtgatgaaaatgcccgttttgctgcgggtatgcgtcaaagagatcatgaccgttgttattattacaacatattgtccgagaagtagggatgaggacctcttccgtgtatcgggaacctatgagggtctccataagagggatgcatcagactgtggtgcataggggcttcattgatgttgttgttgttgtaaggaaactgtggttgatggtaataagaaggacctccaacagcgtgatttcctgtactgtgaaaccgcattggaggcgccttgttcaaccccgaggcggacgaagaactaggagcctgttctttagacttgtcagttgccacattgcaagactgaacaagctgttctttgatcttttctaactgtctcagaagtccagctcggtcttgctcaattgcttcgttgctctgatctttcaagtgtttctggaattcaaggagtgaatctggaaagtagtttgctgaagaagaagtgccttcatcacaaggatgcctagaagtggataatctgttgatgacactttgagaatcacatctcttggttg

SEQ ID NO: 19118 - DNA, 766 bp, Arabidopsis thaliana columbia
gggtaccgagctcgaagatacacacaagaacgggagtgccgtttaccgcgatgctcttcttcgatgatgaagaccgaaacattaaatcagttaaacacaaactactacttgagcgtacattgcatagtgtggattaatttctttactttgtgcactaagattgaatcttttatgtgtgatcaattaaacaggtttcgaaaatgggagtgacaagcatccttgttggtgatggggttacgcttggagcatttagacaagggcttactgaatttactcaaaatcataatagtatcgagaagaataaacaggtttggcgtgacaagtattctggaaagcctacatcatcggagacagacaaagattaacattcatttgtgagagttatgatccattggtggacacaaaacattctcgagtgttgtatcaccatttttaactacaagtaatttactcggatatgttaagatttgtattgaacaagaaagattaatctagactaaaaacatgctcttctcgagaaaatgcagaaaacattggattgacttctattttttttttgttaacaaacacacttcaaattggtttttctctctcttctctctctcgcatatttgagagagagaaaccgtttgatgttctgccgtccggtagaaatccggtttattttcgacatccatcggctctttcatcgttggttggttggctttgtgtctagcattgtccgtatcttttgcggtgatgactagctttcttccggcataggtgg

SEQ ID NO: 19119 - DNA, 847 bp, Arabidopsis thaliana
actatcaatctatcgctttaatgatcgccgaccagctttataagtcccatgacccagaaggctaaaccttgcagcacttccttaaaattatgtatggcaacgacccaatttaagggaccttctaccaactaaagattggtcatatgaatgaacaagaaacaaaaaaaaacaatgtagtttttttgtgggtgaaatgaatgagagaggttaaagtaaacaaacacaggttgtaaagtggagagtcaaagtcaaatctgtttctgtctgctgcctctgcttttcttttgactcataatttttgtttactttgctaacaaactctaaagtatggcggagacttacgttctaagaaaaaggataaaccaaggataaacctaggaaggaaggattagagagatagtataagggaagaagtaccttgatgacgtcgtcgaattcatcggaaggggagataggaggactgtctgtctccgtaaaagaaccgccgccgttgagtgggccgctgctgtgtgatagcctccccgacgttaacggtgacacctccttcatttttcaaaacagaataaactcatcatcaagatacaaaaacagagtgtgtcggtcggtccataactatgtaaccgtaccgattgagacattatgcgctcaagaacaagctgtgaagtggccgaggcagcgaacgagaactggctactaacactagtactgttctccggcggacattcttctttctcagggtttagcgtttcttccggtatcggagtgttaatggatgagggaggcctgttggtggctgaagctgatttggcggtgtggagagctctggagacttccaaggcagagacac

SEQ ID NO: 19120 - DNA, 658 bp, Arabidopsis thaliana
accttagtttcaagtatgaaataggcttttggaaatcattgcttagcacaagaaagtacgtgagtaaaatatgacctcagaatctcttgagccaagcaaactccggtcgttaatattggcagatccaatcaatgcagcacggtcatcaactatcatgattttactgtgaacatacacctgcattgagagaaaaaaatagcattcacatttttaatactcactaccactgcattcaagcacatgtataacagggcatcctatatgattccgtgatcacaaaaaaaaaggcagcaatgcacaaatctaaaccctggatgattgagttgttacctgactagtggcgacaggtccatcctcagaaagtttaccatatgccctaaggccatagaaggaaatataatcatgagcctttacgccaatagtattgtaaagattagtcaatattgagttatgtcctctgtatatggttcgatactgccaatgcattatggctctaacagatgctgcaccactgtcgtcaatacctccctggcagacacatacgttggtttaaaaagttgcattgcaggagcaaatctttttaaacagaatacacttttctagccgaaactaacctggaaaccggggaggagaggtataacaacaacaaccctgaaaa

SEQ ID NO: 19121 - DNA, 955 bp, Arabidopsis thaliana
ccaacaatattcgcataatttagtaaacactcaccatattcacatatcttggaacatgtcggtctattttgcttttgatttcttattctttaggtaacaacaacaataccaaatcaaacaaacataaaaaagttaagaaaatagaaaactctaaaacacaaatattcatcaaatagttatgcatacaagaacaccatcatggttatggaagaggattaagctaatgatggaatcattcccatcatcctcgcataagcaaaaataccaccagcatcaataaccggtccagcatcaccgatcgacttcagcttatagtttttaccggtcgtgtgattagtcaataaaccaccactatcactcagctcgatcgtcaccgtatctcctgtcttacactcctcacagactctaacctctgactcgagcggaaacacctctcctgtagcaaccgagttacggaaaaagattcttgcgtaagactcagcaactatggctttagctccagctgctccaagacagaccggagcatgttcacgtgacgatccgcaaccaaagttttcgccgccgattatgattgagtactttgatctgttctctcctggctcaatgaaccgtgttttgtggaagtctggtagaccagagagagcgtgagactgatctcatcacgctcttgctggttcgatgggaaggtgcaagcggctcctgctgggatgatctggtcggtgtctatgttgtctttcaagacatagcagaggccgtggaaggttgtgttggctagggcttcgttagagtcggattctgaggcggcacgacgtgggatgatggtcggggaggatgtgccacgtgaagtgatggagatagaggaggggattaaggaagtggaaccattgaatcttaagaaaggagatcggaaggtagccaaggaggaagaagttttggttgacgagcaaggtaaggc

SEQ ID NO: 19122 - DNA, 865 bp, Arabidopsis thaliana
tagactatcccccagaaaacaattactgttacaaaagaattaactatcatttcaccgaaataacgaaggagagtggcattttggtaaataagaacaaagtctctatttataatcgcattttggttgacttgcttcaatcttgaccacagcaaagagaaacaaacaatggcggcttctctgcaatcagcaaaccctacattgtcacgaaccctagcttctccgaacaaaccttcctccttcgccaccttccgatctccatttctcagattcaattcaacatccgtcgcttccaatttcaaacccctagtttctcgagaagcatcctcatcgttcgtcactcgctccgccgccgagccacaagaaagaaaaaccttccatggactgtgctatgtcgtcggcgacaacatcgacactgaccaaatcattcccgcggagtttctcactctcgtcccttcgaatccagaggaatacgagaaactcggttcttacgctttagttggtcttccagcttcttacaaggaacgattcgttcagccaggtgagatgaagacgaagtactcaatcatcattggcggtgaaaactttggatgtggatcgtcacgtgaacatgctccggtttgtttaggagcagcgggactaaagcagtggtggctcagtcttatgctagaatctttttcaggaactctgttgctactggtgaggtttacctttggattctgaagttagggtttgtgatgagtgtcaactggtgatgttgcgactgttgagttgagggaaggagatagtattttgatcaatcatacgactgggaaagagtacaagcttaagccgattggtgatgctggaccagtgattgatgctggtg

SEQ ID NO: 19123 - DNA, 591 bp, Arabidopsis thaliana columbia
ataaattctgtttggttgctgctatctggtttttatttagtcccgttcttccggcttaatataatgacaatggtggtgagcaaacgaaagcaatttacttcgtattccaaaccggataaatttacagagacttgcacgattctgtgccacactcatcttcaagtgtttaataaataaaatcaccctcgaatcatacaaaacacaagagaagggaaaggttacaacactcattagatgaatttacctagcagggcctcaaatttttgggcgacactaatcgattgtaagctaagaagacgacaagaaaaacaagtgatctggctattgactctggagatctggcctaattacaagtctagtgatgaacggggacatggctgcaagaagcgccttgggacactcctcatgtggtaaatgcccacatcctgagattgctactagtctctgttgatgacacgaatgaatgtcagttgctatcttgacatgaaaacaaaccgtagctgggataagagagcttgagtttgaaagagggacttacagagttaaggagtttagaagccattccttgggaggacttcaatggcacaaggg

SEQ ID NO: 19124 - DNA, 945 bp, Arabidopsis thaliana
gtggcaagcttcattggaataccttggcactcaattgacgccgattgtcttcctttactatctccatgagagcaatctccaattcttcagctctaccacaaaatcagaagtttgggagacattacatattgaggtatgataaggaaagatataaaacttctaccatttagtgccagttttaggttgagaaaagaaactaacctaagtagagctgatcgtttctcctcaagcaacttgcagagttcagccttcaaccacagaacctgaaaaagttgtcagtcaactttcagagggggtttcatgactgtaggtatcaagtgattttttctaccgttcaccagacataatcatccaccattcaagcgtactaagggcgtagaggagtatcttcaagccaacaagaaggacaaaaaattacctgcgcttgaagatcttgaacagaatctacctccccatccccagttaggctaaccaacacttcatctgcattacttgatcctgactcagatcgagacaaactcccatttgacaatgaggctttgctatccaccaaaacagattttgggtcttgcttaaaattatataatttggaggcaagtcccttagaatctctccacgcttgaagcccctttgacctttcctcaagtgcagcgatcacagctggcctatgcttgcttcgcaattcttgcaatctaatttcatgtacattttggtaacccatgcaagcagttaaaactagctggctgctatcaaatgttgatccagtcagtgattgtagcaaagtaacagcgtctccagcatccttcgtagtaactaatgcaggacctgaagtgaattaaaccataagttagagcagtctcgatgatgacgccactgcgttcagaaggtccacaaaccatctcagttaaattgaaagaccagcagtttcaatcaagtaccatatag

SEQ ID NO: 19125 - DNA, 841 bp, Arabidopsis thaliana columbia
taaacagttatactatttacacttcatttttactaaccaaaaagaaaaggatttcaatagttatgattattgattcacatttattagagacagtaggatcattatttacaacacaaaaattaagttgtatgggaactacaatgcgatagaactaatactgatttgttttttagtcggttgatataattcattttaatgtaaaaaactaacaattgattagaattatatttccataaatagaagaagtagttgagaaataaaaggtataaattatcttgaattggtcttatctaatcatctattgtagatttttctcattgtttcaatgtactatatactttgtgaatttttttttgtcattttagaattatataaaaagataagagagaaatgaaaacttgaatacaaatgtgaaagtgatagaacaaaggagtgcattacacaatttgctagtgacttgagagacaaacacacaaagtaagccacaacatctataaaatggtcacacacatgttgctgaatttttggccacgatgttttagacgacggaggttgtggtggcggtggtggagaagtttttagaattgattaagaggcgggaaatagagacggcggacacgaggagcattagaatgactccggcgaatcatgcgatgattgctcctgcgccgtgatcacagtaagtggtgaacctgtcgcagactttgttccacttggcgtgcttgtttccgttcttccctagctctgccacgaacaccgccgcgtttgcagccgcagatactagtgttgcgtttactttttttcaacgtttttttagattacaagaaacgtttagcttttt

SEQ ID NO: 19126 - DNA, 852 bp, Arabidopsis thaliana
catgggaaacgagcaattgaccaggttgagagagatatgggccgattaaagctgtcactgtctctgttatgacagaactaagttcacgtttacgtgatttaaatttttattgatagaggagatgattgtgtttacaatcactgaattgttactgattttactgtgaattgcatatcaattggtaaacctgtaaaattgtcttatcattttgtggattaccaatcatatttatgagaaatctcaattccatttacataaatatttaaaagacaattacagaataatttagctatgacgctccgacataatcaacaaacaaaacaatattttgcatctgtatatatatatatacaaaattttgttacacatacacataattttgaggaagaaaccaaaattattatttggttgcaattttagactgttttataattaaccgagtaatattgatcattctcaaccacttaatcaattgattcttttttttttttttttttgcttgatataaaaaaagttacggtaaaattggaaatcgttactacctaagattggggtcaacaatccgtaaaagaagatggaatcacacactgtaataccaatacttttctataaggaatcaaatctataaatagcatactaactagcactataaaaacattatgaatcctcctatgagcaaatcacttttaaatttgttaacactcttttaaaagaccaaaaaaagcaaaaaaaaaataaagatattatcaccatggctaacgcaaaaattttggtcgccaaggcaaacaatattaacgtaggttcattgattctaatggccttggtgtttggtccttgcgtggctaatggtga

SEQ ID NO: 19127 - DNA, 845 bp, Arabidopsis thaliana
atctcaaggacgagattgttcccgcgatatactagagctatcaatccaatagcgttgaaaatgtgaacgaaacttttatccattgtagcgtacgagacactgacttgagtcctttgtgagtcactagctacaggtaaaatccatatcacggtgcaatacgcaattcccataaaagcaccgatcaacgagactccaaagagagaatttagattcggaaactgagacatgatcatcgcaatgcaactaaaaaccaagaagcattgcactgaagtaagtggcgctgtattgtcgtcagacataatttgtaacagttgttgtattgattcccctccggttataaccagaatcgtacaagctcctcctgagagatacatcacagggaatattccgagaagtttcccaagcttcacacctaattatattgtttcattacaacaacatcagaaacggtatcgtttaacgaaactgaagttcttaataaattccaaaactcaaaaaacgacaaatcaagagagaattaggatttttgttaaatagttacatagcaaaagaagcaattgcgagtctcatgtatctgctgatacgaattcccggaaccgcttcgtggagttgaacaagaagccacgtcgtgtagagcttccatacaaaccctattgttaagattatcgttccccataccctagaaaaatagagagataaaataatcaaaacggtactcagagcagagatttcacgaatcggacaagatagagaaactaaagagaattatggatagggtgattaccatccgagtgctgcgaaagtgcaggaagaagaatcacttggagaccagttcccgaacagag

SEQ ID NO: 19128 - DNA, 660 bp, Arabidopsis thaliana
tctagagaaggagaaaggagagagatgagacttggaaacagaagaagaaagcttgagagcgtttgctgtagaagaagcccacattcttagtgccatttttgctttctctcccttctttctaattcttgttctgtgttttgtcttctccaaataaagaggagatctcaaagatattctgtttctttgctttatttgtgtgtgtgttctatcttttgatatgtaaggcagaaattgaaggcctcatcctatgcatatggtgtgtatgaaaagtgtaacccaaaccttctttttgacgcagaagctcttacaattgcttttccaatgttttggagttttttatactctctgaaacctttggggttaaaagtggaattaaaaacatatgtaaggacagatatgaaaatattgaaaactcaagtcgactctccgtcatcggagaagtagcaagtgagaaaacaaactctgtttttttcaattcccaaattcgaaaccctaatcctcaatttctcattgattgcatacaattcgtggtgagatgatgaattcaaccgaagagctgagctcagattcaaccaacaatggcaccgtcgagatcacgtacaaaaccatcggcccagctctggcgtctcaaattcgagtggcgtctcatatcagagtaaa

SEQ ID NO: 19129 - DNA, 560 bp, Arabidopsis thaliana
gaggatagaggatccccctctaacgaagaaccggatttggttaatggttgcagtttgttagcgagaatgttgagtggttgcacatagatatggctggacgggtgtggaacgagaagaagaaagctgcgactgggtttggagttgcgacacttgttgagtgggtacagaacaattcttcttaagatgtaggcaggtgatctttgtgctcccagttcttatttaacattctcagaggttttaatgtaggtaaaagggtttttatttgcttgtgtgaactgtgaagtgtgacgcttgaatatgacgagttacccatttgaaagtatttgactatttgtagatattcttgtgttccgtaacatcacttacctaataacacaaactattaggagcacaagatgaaggatacaagtcgtcaatcttatgtttcagtggtcatcaataataacacaaactattaggagcaaacaaaacaatttatttaaatctcttttgaatatgttttagctcaaatcaataaataaaggcgccgagaaaaaaacagagctcatttgcacaacaat

SEQ ID NO: 19130 - DNA, 1095 bp, Arabidopsis thaliana
ctttcctatgatcacttcttagaatattctttttctttacaaaactgaagaaagtaactttgagactcgaaaggaaagttcataaattttgaaatttatcttagactatgagtcaaaccaatgcatacatttttatgaatgatggggatacaactttaatctgtcttaatccatatttttgattatatattatgaaaatttgatgtagcaaataccaaattttctaccaccacacacaaataacaactgcaacgccaccgcaaaatgacggaagtgttattgttgccgggaactaaatcggagaattcaaaaccaccgcacatagtggtgtttccattcccagcacaaggccacttacttcctctacttgacttaactcaccaactctgcctccgtggattcaacgtctccgtcatcgttactcccggtaaccttacttacctctctcctcttctctccgctcatccctcctccgtcacctccgtcgttttccctttccctcctcatccttcactctctcccggcgtcgaaaacgttaaagacgtcggaaattcaggaaatctcccgatcatggcttctcttcgtcagctacgagaaccaatcatcaactggttccaatctcatccgaatccgcctatcgctctcatctccgatttcttcctcggatggactcacgatctctgcaatcaaatcggtatccccagattcgctttcttctccatcagcttcttcttagtttccgttcttcaattttgcttcgagaacatcgatctaatcaaatcaacggatccgattcatctccttgatcttcctcgcgctccgattttcaaagaagagcatcttccgtctatagtccgacgaatctccaaactccgtcaccggatctcgaatcaatcaaagatttctccatgaatttgttgagctacggatctgttttcaattcttctgagattctggaagatgattatcttcagtacgtgaaacagaggatgggtcatgatcgggtttatgttattggcccgctttgttcaatcgggtcgggtcttaaatcgaattcgggttctgtagacccgagtttgctgagttggttagacg

SEQ ID NO: 19131 - DNA, 1020 bp, Arabidopsis thaliana
tttaaatatattaccggagctttagtgcctcgagctttcaagagattataaacttcaacattcccataatacgcagcatcaacagccgcctgaacaatgtcaaaaatgtcaccttaaggatgcatccaaatccaaacactattaatacaggggaagaagagaacacaccgtactaccccaacgatcacgagcatcgatattagctctccggctaagaagaaccttaacaacatcataatgaccttcacaggaagcaatgtgaagagcagtacgaccatcaagatcaatgctattcacatctattccttcattaagcagctcctcaacgccattaacatcacctttactcgccataaagagaagctgcatcgtcgaatcaagattctcgggtacagacatatgcggctcgcagctaagagactcaggactacgtctgatcggatcaagcgaagattgacgaccgaagctgaatctcatgttgttacgccgtggatcgagagaattttggcgcgtgaattgtcggcttaatgttcgtctcattgatcctgtcgagaattgtctcgatatcccacgcttcaactgcgcggcaatgttgtccatgattgatgatgataatgaatcgcaaagaaccaagatcagtcaatgatcaaaaccacattgtatcttccaaggagagggacgatcgtggtgagctttttttttttttaattgtttgtcgtttatggattatccataaacagatttgacaaaagaatagtttcgttggctcaaaaatgtcgttttgagcagtaaaacgcgggtaatcactattttctaatctctttatttattggatccatacataattagatgaactaattagaacttatataattaaccaacgccattgataactaagcttaatttaatatgaaaatacatcgtggagattgggttatattaattaaaatgttgacatttttgtaggtataaccggtccaatttagcaaaattaatcatcactgcactaattaaagatga

SEQ ID NO: 19132 - DNA, 1309 bp, Arabidopsis thaliana
tatttaaatcaattggtttataccataaatggtttcatggtcatcattgtgggatagatgcatgttttggcctggacttgaaaatttgtagcattacaaaatattctctccatttctagatgaaagattttgggttgacttccctaaacaccaaatatagtgtttattgtttatacttacttttttgtggtatggatatctttgaagcattaatatataatttattatcagaattaacttgatttacagattgtattagattagggatttgatatttcagagatttattaggttgttatgtattcttttaaaaacaaaaaagaaaagaaaagaaaagtaaatctcatcagttttagttttaattttaagaaatacaagccgaaatggaaatataagaaaggagagatatatccaattgagattgaagggataacttttgactagaaatttatttaaaataactactttcaagttttatttactcagtggcaaaaagccgaaattagtaaaaagcaatatcttctatgtacgcacatcggtatatgttacattatttttggtagattgtacgagatttttctcctacattttatttaataacgaaatataaattttattcaaacattatgtgggatcgatatctcactaacatcctctatcataaccagataaacttcctccaaacatacattaaataactgaaaaccaagcaatagagtaaacacatagtaaactaacttggcgatcaaccttcatatacacatgagtaatctggactatctagtctcttgagataaagtcatgacacaagcgtatcagggttgttagcgtaaaaatatccctaatatctaactatattaaaccaacaaccaacgccgaatccatctccaacaccacccttctaaatattttctcccaagctacaacaagccattaatacacagcccacaattccgctaataggctgagcaaacaccaatattaaaaacaaaactacctaaccacgtcccatactcatcacggatcacacctcccgctgttgccttccccgggtttccatgcgaggctccgtcggtattgattgtaacccatccctcacttggtttccaaacagtcggtttgaaggttataagttcgagaggaattaggtgaaacgatagaggttaattccttgggagacaaggcatttcagatactactgttacttgtttctcagttttggctttatggatgatgtaaaactctatttacttcacagatgacgagagagagattaaggtgttcgagctagacaatggcatggaagtaa

SEQ ID NO: 19133 - DNA, 653 bp, Arabidopsis thaliana
tgaaaatcataaagttttgccctctcagaaatggattccacctctgccagatgaattgaaatgcaatatcggctttgcttggtctaagaaacatcaactctcaagggcatcttgggtggttagagactcacacggtgaggttctgctgcatagtataagatcttttactcaggtactatctctttttgatgctaagatgcaaagttgggaatgggctttagactgtatgtctcatcatcattttgataaattcacattcgcctcatccacctatgacattattcaagctttgcacaaaccaagtgagtggcctaatgttttgggtcatattactgagcttctgcttctcactaaagacaagccaaattagtttctcatgatggaacgtgctcactgtaatagaggcgcttctgacatagcaacaagtgtgatcacaggtttcagatttcaatcttacgtggcaagaggataccctttgtggatgacaatggttttactgcagagagaggtaattagaatggtgattgggatatttttgtgtcttgttagattttttaagtttaatgtttctttagatttgggttttgtttttgcggcttcttttttttagcctttattttattaatgtttactttaggttattcatttatagg

SEQ ID NO: 19134 - DNA, 1030 bp, Arabidopsis thaliana
ttcagcaattcagaccctgtctcacctacataccggtccggtttaaattcctccggttcgtcaaaaacattagcgtctctcatcacaagcggctgataaccacaaagaagctcacctttcttgacctcaaaaacagcatcgtgtgaacttatctgaaaatctttcctcgcacgtgcgaattgcagcggaaccggaggactaaaacgcagcgtttcgtaaaccacggatttaaccagctccatttcgttaaccgtcttgaaattaagatccgacccggatccgcaaactctcctgacttcggttctaatcctctcctgtaaaccggaattgtcgccggttattctcccgatcaaagaaggtaagaagacggaaaagcccccgtaggcattaaaacctaaaacaaagagaagattttgaatagcctcatctcgggtcaacccgaattcttcttgacctaaccggagacaatctccggcgttctcgtcgatgaaattgtaaagctttttgtaatttccggcgattaagagagaaggataaggccaagtatgaagtaaaatctcttcaagaggctgaggaactacgccaagtttagcagtgggaataacttgcaacgcaagccaagtattgattgttttccaaccgttctcagcgatgtccggcgatacggaagcgtcaacgccggcgagagaggcgcagaggaaactgaagatgcaacgttggagagggaagatatatgaagcggcaccgtttttggagatttcggattcgattgttccccagaaaatgtttaggtttgaacgaagctcttgtagccatacttttgagcttcgttttagtgtttccatagcgaaaccttttatctgagtttataacatgtaacagacataaaattcacatgtaaaaatttgagttcattagtatttagtattatagtattcaactgtaaagagacaacaagcattctactgttcatcgattacaatggtgctcactttttgatttagtggaaaacgccaaattttgtatcacg

SEQ ID NO: 19135 - DNA, 1068 bp, Arabidopsis thaliana
cccccattcttgttctggaagaagtaagcttatagaaaatgtatgttaaaaaatatatccgaaaatgcagaaagtatacctgtaatgataagataaagtttacagcatcaactaaatgctcttcaggcatgggttctccaactaaattaaccggcatttgtgacaatagcaacgccgcctataacaagaaatttcaacatctttagcttgttgagaaaaaaaaaacatatgaggagattaacaaaaaaacatgtaagagttgcatatttagttaagtaaccttcaaggcttcagcagtacaatcagagacaggccatggattgtctccagtggagaaaccccatcctcccttgcacgggtgtcggtaccacaaccccggatctccacttgtgtctttccttatctatttcaggttacgaaacaagagatcaatgaaataaatcagatcacaagagaatatatagtctatatgattaagtgaacaaagtacttgagtgttcttgatgtagttatgggctttcttaagcatcaaaccatagtcatcaaccaaattcgtcgccaagattgcttggaccgctaaagtcacgtcccacagctgagatccgttgtatccctatatggacattatatacttgtgaaatatggttcatatggaccaaaaaaaagaagaagaagaatgataatgtacctgcattttcattccatcctcagccacccacaaatagtctttaatccgcgagaggtgagatttaaatgcctcggaattcgaggactcgacccaacaacaaagcatattcaagaccttaaatcccacaccaacccaacatatatagtgttagccaaaattagtaatttaagtttactggtgcattgagatatatgtaacctactttgttgacaggaccgatacaaatatagtggctgttttggtcttcatagtgaatgtgttgcattactgtctgaagagcatggtttctgaggttattcaatggccatctttcaagaagaggctctccaaatttattcagacaactccaaaggacgtcttgaatctttggatgtggatag

SEQ ID NO: 19136 - DNA, 857 bp, Arabidopsis thaliana
  unsure (1)..(857): unsure at all n locations
agcatttcttgaggtaatacgtgtacctatagcattagacaaaaactttaattagccaaaactgtaatcatggaattggaatatataatccataaaattacaagagatctgaatcaatataatcacatgcgtggatttttttgaaagcgaaagaagaaaagagtaaacatttggttacttgatcacaaagagaccaatgatgttagtgttaaacctttaagagtgacaaattacgtagagcgagaaaatgcaagaactatactaattaaacatctatcattgttcttgcatatattaacgagaagagttttgttcatcctcaccgagtcacgaaccacaagagaaggaagagcattgaagttgcaaaggtctaaacaaacttccatcccggagtttccacatcctacaaccaaaatcttcttctcactaaatatttcaccgctcttataggagcttgtgtggaggataggtccaccaaaatccgggattccatcaatctccggcatcacctcctcggcattctccccggtcgccacaacaagccaccgtgatacatactccattgtctcatccttcttccctccggttgtcctcaccctccataacccacaccgcctatcgaacttggcgttctccacggtctggttaaaaacgggctttaggtcaaaatgttcggcgtaagactcaaggtattggacgaactgttgctttgtagggtaagtagggtagcttgaaggaaaaggcatcaatggaagctcacagaaatctttagggagatgaagtcgaagagantcatatgttttgtgctgccatagtgacgctatgcaagtggaacgttctagaatcaaactagggat

SEQ ID NO: 19137 - DNA, 538 bp, Arabidopsis thaliana
ctctgtaggcaccgaaagtgacgtttaataaaccgatagggagtgtgagtgtatcgggccacaaatttgtcgggtgtccaatgccatgtggtgttcagataacaagaatggaacatatcaaagtcctctccagtaacgttgagtaccttgcttcaagggatgcaacaatcatgggaagtcgtaacgggcatgctcctttgttcctctggtacaccttaaacaggaaaggttacaaaggattccagaaagaagttcagaaatgcttgagaaacgcgcattacctcaaagaccgacttcgtgaagctgggattagcgccatgcttaatgagcttagcagcactgtggtctttgaacggcctaaagatgaagagtttgttagaaggtggcagcttgcttgccaaggtgatatagctcatgtggtggttatgccaagtgttacaatcgagaagcttgataatttcctgaaagaccttgtcaaacacagattgatctggtacgaggatggatctcagcctccttgccttgcatcggaggtagg

SEQ ID NO: 19138 - DNA, 441 bp, Arabidopsis thaliana columbia
tatctcttctggacaaccttggtcctgagaatagggtaaaacgttgcttgagcaccccgcttcgacaaaagggatgctattgctatatgagtctttgcttgtattgcaactcaactcgcatcctaccatttttggctttatatacatcaaagacactttgctgttgcaaccagccgctatgaggctgtttgatctgtcaatgaagaaagggctacccgtgaagttcatttttgatccgcctccagactcttttccatcgttgaaacatccggcggatgtaatcgggaacttgacacgaactaagccaaatgattcatgacgttcttgatcagatacttcataagcaaaatgactatctgcactcggaagagagatactcacaacttctttattaataaaagaaagtaaaggaacaagctttcttgaagttgtgttacgaca

SEQ ID NO: 19139 - DNA, 811 bp, Arabidopsis thaliana
tccagtttcaggaatatagtgatgtattttactcggtaccatgttgatgtttttgtcaatgtttgtgctaattatacaaatttgtgttgcttgctcactggttgcttggtcatctgagaatacatgttgttgttgtttttgtctccccattgtttaggtagtgtcttatggtatgtgcccaaatgttcccttactctgtagcttactattgatattgatgagtcatgagggttttaatatgttttgtttggttctagtatgtgcaatgttctgttttttattaagttatactattttaatggaactatttggtgtgcgctgatactgttttgacattgatgctgtgcatagccatacaagtagagagattggtcacaccgatactgtttttttttttcagtttccagttggacgaattcacaggcaactgaagacccgagtctcggcacatggcagagttggtgccactgcagccgtctacacagcttcaatcctggagtatctgacagcagaggttcttgagttggctgggaatgcgagcaaggatctcaaagtgaagaggataacgccaaggcatctgcagttggcgattagaggagatgaggagctggacacactcatcaagggaacgattgctggaggtggtgtgatcctcacatccacaagtctctcatcaacaaaaccaccaaggagtgatgtgtagctttttatggtgtttgtatttctgtagtcttggactcattttcctttatccttttcttagttctttgactagtgttgactcttctggacatcctcaggtgtacattag

SEQ ID NO: 19140 - DNA, 733 bp, Arabidopsis thaliana
  unsure (1)..(733): unsure at all n locations
ctaaagagaacgaatttaaaccgcttcaccttgaaaaaactacatttttttcatcgtgaaatggacagaggataaattgttcaataacggattatccccgctgacgaaagcgccattttcgaccatcgtcacgccttttgtctgcagaaaattaaggcagtaccttaatttaagcgtcaggtggatgtttttgctcttatttcgatcaatgaataaacaggaaaacaggggggttttatatcagcaggatctatgtgaacgctattcaggacgggtcacacgcgcaaaaaaaagccagcctgtttccagactggcttttgtgcttttcaagccggtgttacatcgcttttttggtcaactcgataacgcgcagtgcganatcgctttggccagttccgcagacgcctgagcgtaatctacgtcgccgtgagagctgctaatgtgctcttcagccttacgtttcgcttccatggctcgcgcttcgtcgagatcctggccgcgaattgcggtgtcggccagaacggtcacgttgccaggctgcacttcaagaatgccgccagacagatagataaactcttcgtgaccgtgctgtttcacgatgcgaatcataccaggcttaatggcggtgacagcggtgcgtggccagggtagatcccagttcacttcgctaccgttacctggatttctcgacagccagagaacatttgttctctcgctgacgacgccaggtggt

SEQ ID NO: 19141 - DNA, 616 bp, Arabidopsis thaliana
tcagactacctatacatctctgttcactagtcatgacttaaagaaaatataaatgtatttattgtccatacctggtgaaactgaatccctcgcctccatggccaggttacagccgaacattccctttgccctagtgaaagtgaatatctgatttgtaatatcacgccgtagatcgctagtaggaagaagtttctccaacactttgaaaaaatcttctttcaaggaagtgaggaactttatctctgggttatactgaatactggggttcaagaatgctgctgctgcatgaagaggtgaatgcaaatgctcacaccagttagtatcaactatgtcagaaaagaccttatgcttattctcatccatgatgtagtatgtccgtattgactccttggccttggacattaactcgtatatagaacctacagcgggctttccagtagaaacttccctcaacactttcaggataggctcggaaatagccacactttcttccacagctctccagaaatcattatcctctaggatattcacgcatgaaatgctctgtggtttgttagtatttgtggtatactctgggcaattgaacatgtgttttagccttgccttttgtttcatc

SEQ ID NO: 19142 - DNA, 935 bp, Arabidopsis thaliana
gttcttcatgtttaaacattagttttcacgtaatttacttgcgtatttctcatcgattacatcaattctaacgattcactatataaaatgtcgaaattataaacttgtttaatgaatcagttattagatgatcgttccactgaataaaaacccaaggttaagtttcatccaaaaaaagtttgagagaagaaaaaaaaattagtaactaaaagtggattgtgacaccgccgtgtcctccactctcaagccattcctccgatcaccgccggtggatcatcccgggcaagaccaatctgatcatcataacttccaaacggattttcaccttcgtaatttcccggtgggttataaacacaaatcgcataaacgccgccgttcgaacaatccacacttgcgcatccgaccttggtactatctctccacacgatctgcgtgtagtgcccacacatgtgttgcggctcacacgtgttacctttcacgtcgtagaatttatcctcatcggcccacacattaacaatatctctggggctccagttattctttccggcccaaaatatgttttctccatacggcccgttagagtgaacaagcctacaatcacccacgcgctgattcgcccacgtgcgcgcgtacgccgctaatcttccgtcccattgaaacggtggttctcccacgcgcgctcttacgaggttatgtgcgattaaaaactctctgctcgctctgttgactctgttacgacgtcgtattctcctccacctgaacctgaacgagaatcggtttccggtgaacgaaggtggtgacaacagaagccgagtactcgtcgctgacggagagtttttaacggagggttttgtggaagagtcttcatggttaatttgggccgtcccgaccaaagctgaaggaggaagaacgttatgccgacgaagatatgtaat

SEQ ID NO: 19143 - DNA, 918 bp, Arabidopsis thaliana
ctgtatgtagatttctggttgaaacatctactggtccaccattggactttatgggccttactacatttttgggcccaatattgtaatttagctgatggatccaaaaccggaatcggatctgtacccgctccatcgtgaggtctctcacagcgaaagaagggttttgagggttttcacacctttcgctgtttcctcgtcaatttctttgtttggttgttctttcttcgcatccaaagatgaagctcgtcaggtactgtttcgttctcagttcttcttttctttagaaaattcatgttgttcttaatcttagttagctcctggcatggaatccattcccaatattgagcctgagctgatttgtgttatatggttttgattggatcgagtaggtttttgatgaagttaaacaatgaaactgtgtctatcgagctgaagaatgggactgtggtccatggaaccatcactggtaagttcttattgttagcttccggtttctttgtagctcttctcatcttttcttctctctcgatttctccgttgctaggtcttatacaagtcgcgatctgttcccttattttcaattggccctaatcgcgtccttgtgatcacatgaataggttgagtaaacacacagttagagccagtagtcataaaggtatatttattgaagtttaagcttgatgatttgggcaggtgttgatgtgagcatgaacactcacttgaagacagtgaagatgagcctgaaggggaaaaacccagtaacacttgatcatcttagcttgaggggtaataatattcgctactacattcttcctgatagcttgaacctcgagactttacttgtggaagacactcctagagttaaacctaagaagcctgttgctggtactgcttcattcatttttggtgtttgtaata

SEQ ID NO: 19144 - DNA, 922 bp, Arabidopsis thaliana
atgacttcattggttcatgtgagattgtggctccctcgtctcttgggttttgaaacttgtagaaacactgttttcgtatgcgtcgttattagaagctgtgaataattgtgtcatcttcaaagattttactctttagttgttttgttttggttctcctgatctgtgattgctggtattcttcaacatccaaatcttagtagcttcctgatgttccttagttgttcgatatctctgttattggggtttcgttatatgccagttttctaagatgcatggtaaatgtgaactgttaatgatactttttagtcgattgctttctcattcagtttttgttttatttgttgattttcttcagccaagaatcttatacttgctggtgtgaagtctgtgaccttgcatgatgaaagagttgtagagctatgggacttatcaagcaactttgttttctcggaggatgatgttggcaagaatagagcagatgcttctgttcagaagttacaggatcttaacaatgctgtggttgtctctagcttgaccaaaagcttaaacaaagaggatctttctggcttccaggtttgtagacaactcatttgtcttgttattggttctatatggtctgagtcttttgtgtactgtatcgttctgtagattacttgtgagtttatgataacactgtaactgaatgagtaacataagagtgggttgttctattttcgttgcatataagagatgggttttgtctcatttagtgttaggctatttctagtgtttattgatattgatatggaagattggtgtacacttttctcattggtgtgtgtttcttgttggcgggttttacgctgatacatctacttttgtgccaaacaggttgttgtaatctctgacataagcatggaaagagcaatcgaatttgatgact

SEQ ID NO: 19145 - DNA, 863 bp, Arabidopsis thaliana
gaggaatttaggtgttgttatggatttagtaacgatgagatggcttgtcttcgatcttatccgaatcatattgaaagtctcatgtctcttaggaacatcatgtgattatgtctttcatgtggtttaggttttattgtaatctttttatatttatcaacctctcatttgagggtgtgttatagtgtcatatagtttataaagctaaacttgtagatttgatgttgagctctagttatagccatggtgaatctaactcttgaactcaacattatctctgcaagtaaccttgtgaacgtcaatctcatcaaaaggcgcaaacctccgtcgattgctaccgtgaatttggtttcggattaagaatcagctaggtgaatcaaggaacttgaagaaaatatatctatagtcttaaaccagaataacgaatagatgaacaaaactctttttacctatagagttgatgatagatacaagcagcgaaagataaagacctaagaaatgttttggcttaaagcccaaaatttggacagaacgaacaaaaaaacacatgcaaacacagtaacacaacactacaccgataattcaatttcatctaatcccaaaaagagatctgatcagaggatacacaatacaactacaaacgtgaagcaaaataacttcactgatacaagagaagtgtaaagaaactcatcttgatgacttctttcgccattgggttctccacgattgatctcctgaccattttctgacaacctcaggatatgcaagaagtgactctcattgtgttctcgtttgcttgacgtggtagatccgttcgtcccagtaagctttgagccacctcattgggggttcagaggtggtaagtg

SEQ ID NO: 19146 - DNA, 801 bp, Arabidopsis thaliana
taccttttttgttcctcccatgtgatttgccctacttaacctcacctttacgcttcaccttttgctctttgcttcatcagccacagagtttaaaagccgtaacattctatttcgcttttgggtcatcattgtttgcttcttctttttttctctgtaaaaactttatacagtacctacaattttcttgttcttttttcttaatatcagtcgaagcctaaatgacataaccgcatacactacacacatgtatcttggagatcaccataaagaaaattgctgatcgcatagaatagaacagacacggcaacttgagaacaaaaacattttttttatatatatagcatcacagcatgtgggagatgatgatgatatgatgatatgttattataagttcttccatgtacaaacatgagcatgcaatttaagtgttaaaacagatacaaacgaagcgaaacatcatgatgagcatttgaaacctccacaagcaacaacccaaacgatgagaataaaagagaaaacagcaccagccaccatcagcttcatctgcagactctgtagccacatcttccttcttaactgccttccttgtctctggaagctatctgcctggaactgtaggttctcggttttgtcaacagaagttcgatcttctctcctctgtccagaacctgttaaaataacatcaaagataatcatcaaaaaggctgcaaatcctctccgtttcattctcataatcaacatctattggcataagctagttcagtgaaaatgggcaaccccagcgtctattggagatgatag

SEQ ID NO: 19147 - DNA, 1352 bp, Arabidopsis thaliana
tctagagaatcgcctacgtgagtacatcaccttttctttttgactatgatctcgaatctcaacgataactgatttttaactgaaattttagttatagcttctactatgctgcttttttattttaggtctttcctgctgagagagagagaccatgagggacccataaagtttggcttttttgtctaaattccaagttgaattctgtgagaatgtgtctctttcatgatgattttatggcccccaactaatttttttttgtactagcttttgcttgattggtctgttcaattcctgtttggttagagatcatatttgatgatgtttttttgtgtggtatggctttcaagatgatcccttttttacattcacttttagtagtcaactgtttggaattggaaattatagtttcaagtgactttggttcaaattgtttgggaattagctttgtgtgagatctgatctgtgtcaatagggttaagggtgatctaatgtaatctctcggatgattctttggtgatggtcactattaattgcatgactgttcttgtgacttttattaattgatgctccaaagtgtctaatcctgtctcatgcactctgtgcaggataattgctaatcgacagtctgctgctcgttcgaaagagaggaaggctcggtatatcttggagctcgagaggaaagttcagaccttgcaaactgaagctactaccctttcagcacagttgtctttgttccaggtttcttatacattctccttctttgcacatttttcagttactgcaataacattcagtttctcatctacggcctaataacttgcttcttacagagagacacaactggtttgtcatctgagaatacagagctcaagcttcgtttacaggtcatggaacaacaagctaagttgcgagatggtatggattaatctctcaatccctcactttatatgattatttggggtttaaggtcgtttactaatgagttccctcggcagcactgaacgagcaactgaaaaaggaagttgagaggctgaaattcgccacgggagaagtctcacccgcggatgcttataacctcggaatggcacacatgctatatcagcatcaaccacaacaatccttctttcaacatcatcatcagcaacaaaccgatgctcaaaacctgcaacaaatgactcatcagtttcatctcttccagcctaacaacaaccagaaccaatcttctcgcacaaaccctcccaccgctcatcagcttatgcatcacgctacttctaatgccccggctcaatctcattcctattcagaggcaatgcatgaagaccatcttggccggttacaggggcttgacatta

SEQ ID NO: 19148 - DNA, 1097 bp, Arabidopsis thaliana
atcttctctttgcagatgactctttatttttctgccaagctaacaagaagtccgtccaagaaattaaaagcatcttataccaatatgagcaagcttcgggtcaaaaagtaaatactcgcaaatcagccatcacttttggtaaacgcgtttcagaggctaccaaaacgcagattcggcgatgtctacaaatattaaatgatggagggtgcagtaaatatcttggaatgcctgagcaatttgggcggaaaaaagttgaactttttcaatacattgtcgagaaggtcagggaaagaactaacgggtggagcaataaattcctttctcagggcgggaaagaagtccttttaaaatcaatagccatcgcaatgccggtgtactgtatgaattgcttcaagctcccgaggagtatatgtgatgagatagaaaggcttatggctaactactggtggcaaacaaaccggaatgattcaccgactcattgggttgcttgggatcgactgaaacatctgaaaaaggaaggaggattaggcttccgtgatattgaaaaattcaatgagtctatgcttgcaaaacaagcatggcgaattcttcagaatccatcttgcttgctagcacgggttttgaaaggcaggtacttctcctcttcaaacattttgacggctacaagaggttcaagaccatctttcggttggcaatccattctattagggagagatctcctaaaaaggggtcttcgcttcaccataggaaacgatactacaatccaaccatgggtagacccctggctcccaattcacccacctcgaccaccgcgattaactagtccaacgtctatcactcgcgtcaatgagctcttcctccaccatcaagcagcctggaatgaaacactaatcagagcagttgtccaccccgacgatgtgtcccatatcctacgtattaagatcagctctcaccaggacaaagactaccttggctggcattattcagatacggggatatattccgtgagatcaggttattggctagcgatgcatctaccggatcaagaagtcttgccactcccaccgcatggagacccgcagttaaaacacagtatc

SEQ ID NO: 19149 - DNA, 542 bp, Arabidopsis thaliana
gagcgccgcgacgatccccgccgcaaaactcgccgctacatgcgttcctatccctcccggcgttccacggccaccagctaccaagatttctttgacgtgatcatacgtagcgagctgagaagctgtcacgatcatggcacggttcacggttagccatgagccacgccataaacttgaaacgccttcttgccttgcgatcctgtcgatcgcgtccacgacgctcttgtagtttctgcgacggtttaacggcaagcttccgtcggcttgcattctcaccatcgccacgtcagcaggattcccgacgactgatccaacggctcctgcgatgagtccagctgtgatcttggttaccaatgggaagttacctgtttggaattatcgtttacgtttaatttatttgatcttttgtgtaataatatggaaaaaattcgaaccaaacaaaccgaaactgtttaagatcgaaaccgaaccagcatttgtttataaaccattggttttcttatttaaaccaataaccgagaactgtaaacgacttttagtgt

SEQ ID NO: 19150 - DNA, 856 bp, Arabidopsis thaliana
  unsure (1)..(856): unsure at all n locations
cactgttctttcctggaataggattcccaagtcagtcctacagcttccaataagtcaacgcaaaataatttaactatgaacgtaaagcaatcaccatcaggactaggaggcctaggacatatatccgggagcaaattgggctccccgggcatcccatatcctacatgtaccatcatcagacgatctgcagagatataacaaaggctcagcttataaagataccaatgaaataaagcaccttttccaaacacacaaatagaatctccagacaacataaagacacgagttatgaaatagcagagatagaatccacagcttaaataataaattccatctgagggtgtatgaatcagagtgcatttaactttgcagcttgtgaccacaaggttagttgattcaaaatcacaaaacaataacataggcaaacaccaaaccaatagtgtgaaaacaagtgacaaaacataatgatttattaagagggaaaataatgcaacatttagcgtacatgatgccaaaaaagaaggaagaattcttacgagagaagctggtacggggatccaggtctgggactaaaggcaatagcagtaacagctccagtatgtccacggagaacagaaactggtaagccatctggcaatcgccactacaaaaatccagatgggtgaagtcatcaagaggctaatatgtggaagtcaatcatatacagaggacgatacaagaaacttacaacgcggatcacacaatcatttgatgcggatgtatgaaaatgttgttcgaactacagcaagatcagttatgtcaccttacaaatgcaccanaacaattttaagcacacttaaagatcagtacaaaatga

SEQ ID NO: 19151 - DNA, 533 bp, Arabidopsis thaliana
caagaagtttcttgcaagacctagagaggatatgtgtggaccatttcaagaaaaggtgttgggggatggggattagttttggtttcagagttgttgcactcgatcctaattttagaaagctttcaataccgtgcattgtgtcagactacaaaagggcgaaaagcagagcgatactgttggattatgatggcactctgatgcctcaaaactccatcaataaagctccaagccaggaagttcttaactttttggatgcactttgcgaggacaagaagaattcaattttcattgtcagtggaagagggagggaaagtttaagcaagtggttcactccgtgcaaaaaaattggaattgcggcagagcatggatacttcttaaagtacttttcttctctactttttatgaccacttgtttaaaaatataaaattctcctacttaagggttagtaacatgccttgtgtctttttcttaggtggtcaggcagtgaagaatgggagacatgtgggcagagctctgattttgggtggatgca

SEQ ID NO: 19152 - DNA, 1561 bp, Arabidopsis thaliana columbia
gggatcataatgacattattcatcaaacttttactttcaagaatagtacccatgatgtactttccagattttggttacaggaaacttcaagagagaactgcacaattgctttgacagaatctccaagaaggggagcaggagattcaatcagctcatcaaaaatttcaaaagcaagtatagcaacatcctcctctccagatgcaatacattttccttgatacatccaatatactgggaatgaaatctcggaacttcacctgacagaaatgacataagcatatattccaaatcagtctttaaattaaacatgtatataacattaacaagaaagtgagaaagtggctaaatttaccacttcatctccgtcgttggtgaattccagaaaagaaccaaccgccctgataaattacagaagcttgtaaaagagtagagataaaggtccaagaaaggagcaacagttatcaattccagagaaaaacaaattacttgagagcagcaactctgacacgactactgctttcatcctgcatacacttgagaagaagagcctgcaagtctgcaaagtatggcctaaatgtgttcccaatcgtttctgtcaaagagctgaaaaggatcaatgctacctacaaatacaaacaacaaaataagatttttaaacaaaagaaccataaatagacaaaatgagacagagaatttcaaagggaagttacttcacgatgatcttcttgagcactctgactacactggaagagaaaggttaataaatcaggccactctccagctggaacagcgtacttggctactacactcacaacattagcactcgcacgtctcaccggtggactgtaacaactccaataagaaatcaaaaactcaaatcccaattgaaaaaatagaagagcaaaagagagagagagaaacagacctattctccacagtgatgctctcgattaaggattgcttaacatgctgtttaagctgaggagaaagcttagcccaatgtccggtaatccttttgcggaggagaacggcggcgagctggcggacgttgggggttttagcggtgcggagatgctgaacgagagcgggaacaacttgaggatctttggcaagacgtttgatctgatcctctgcttgacgccgagcatcgttgtctggcatgaggaattggatcaacagaagttcgagagattgcgccatagtttgtttgttgattgatctctcttccttcctcaagcagagacagaggctgctctagttgtagcagcaactagcaagacagcgaatagggtttttcttattttttgttcttttatttaatttgcgagggtttttgtttaattcacttttcgattggtcggtatcttattatttttggtggtaaaactttattatggagttttgacttttgacttaagttgtttgactttactccaaattcttacaacagcaaattttgtaagcaattacggaaatttctttcacttaagtatggaactgaaaattctaacagaataattttatgtagaaaaattgcttaacaacaaaacagcaacgaatg

SEQ ID NO: 19153 - DNA, 932 bp, Arabidopsis thaliana
taagaggcgttatatcaggcagagttacaggttccgcagatatcgcggtgattggctatgacgatatcgaactggcaagctttatgacgccaccattaaccactatccaccaaccgaaagatgaactgggggagctggcgattgatgtactcatccatcggataacccagccgacccttcagcaacaacgattacaacttactccgattctgatggaacgcggttcggcttagatttacgctgtcttttgatcaaattattaccatcggttgttttcagaagcatgaacattgctgctgaagcaacagtaataatgcccattgtgataaacgtatagtggaattgttcgacagtcgttgtgccttccattccttcataaacgcgaaggacggccgcacttacagcaacgcctaaactaatcgacagttgctgcgtgaccgccagaacactgttaccgctgctggcattgtcatcggtcagatcggcaagtgtgatggtattcatcgcggtaaactgagtcgacatagccatccctaatataaacaacggcaagatcagcatccatatagccattgctggtgattgcaaagagaactgagcgatcattagcccaataatcaccgtgatccccactaacgtatggcgatacgcagacgacgtaagacttgggtaaccatcgattttgcaataatggaacctaacgctgtcggtgccatcatacagccagcaataaacgcctgataaccaaatcctacctgtaacatcaatggcataaggaacggtacacagccggtccccagacgggttgcaatattgcctacgataccgatcgagaaagtgcgggttttaaataaatctaatgaaattaatgggtttggcgtgcgtcgtgcatggagaatatagagaagcagtaacccgatgctggtgacaat

SEQ ID NO: 19154 - DNA, 589 bp, Arabidopsis thaliana
acgatattcgccggtaaaccatgagaatcccaatccggtgattgttcttcatcagcaaccgctggtgaaggagaaaacaatttcccccaaaatccaccatcatttccatctccaccaccacctccaccaccaaatccaccgaaattcccatctcctcctcctccaccaccggtcagaaccgacggaagattcgagattcggaacagaaagaatgaagcagcggaggagactgaggctacggctagaggtttagctaggtttttaaggagagaatcctttgaggaagtctctgtatctcggttaggtaagcttttgctgcattttatcgatgggacacgaggagattgagtggagatgcgagggagacgagacgaggaaggagagagaaatttccgacgggaagagagagaggtggaagcagtggagcttgttgccgtcgggataagctgcccgttgacggagaaggcggccatgggcggagaagataaggtttcagagagaagaagaagcaagtgaagatttttggcttcggcgaaaaaatgtacttttgggttttaagcaggtagagagactttcattttagactaca

SEQ ID NO: 19155 - DNA, 1614 bp, Arabidopsis thaliana
ctcactagagacatcatcttcatagaagctctcatgttgtggcaaatcttcgggggttcactaattggttctcttcttcacctctgccgttatcttcttcaccactcggctgttgagtcggcgtttcaggaatttcactacttaagcacaaagtgggttcatgcaaatcatttaactgattcgaagaatatgatcttgttaccaaattattggcaaaatctccattcagggtatcagattgttcagtctcaacttcagaagacggtgggaatatctgagtaggatcaaaatcctcacacaatgattcacaaacttcatgctcaggcataggagccgtatgttcatcttcatgtgcagctgtttcaagcaaagcttgactatctgtttctgtaggagattgagttattaaggaaatgccttcatcaattatcctcctttgtgatgcagtccgcaccatccctggttgcttcagtctaattttaggcagagaagcaccttcatccgcaaggaatgaagtctccaacgataagtgataagctgcaaatacagcgtactgaataacatgtttaaccttctttagctcctcacgacaacttccccgaagcacaacctgcacaagtttcagaaaagtcagtaaggaagttaataaatttaagatagcagacttcttagctacaaaggttcaagctatgcaaaacaagaactgtgaaaccaataaaggagcataccgtgcaacctaggcgcctaggacacccttcaaagtacatcaatgtccttgatggttttctgtttgactgattgccagcttcatgttgctccaacactctctcagtccggaacagctcacagtgacccaatcgagcagtactaatactatctagtgaggggcaaagaacagcaccagtgcaacgggctatacggtccagcaatgaccttttcacattgagcaccaatgaaatttccttctctagaaggtattgctgggcatatgaagatgcacttttctctaccagcagaacattaggacgaagggactctatttttgctattatcgccttcatatgttcattttcctgtccaacacacataattcagttgttcagtttgttaatcagagattttatgcagccatcataaagaaacagtaacacaccaacctgttgaagcaacgtgttaaaggatgctaattggcctgcaactctctgatactcaagagaaccagctaaaagcatcacccttggatttttgtactgcgatatcattcgcttgtgcgtaatgttcttgctacacactattcccctgatgagaatgctgcagaaacaaggtattcatttagtaactatcacccaaattagtaatcatcagtcagaggacgatttaaacaaggtttcaacaactagttatacctctcattttgatttccagatgctacacattttatttttacataattcccgggatccatactgccgcctgcacgagtatccggctttacaaaatttgcagcttgccacgctaaagcagtgacaatatccagccactccccggcactgccatcatcagatggactaagctccccccacgtaatagctctgcaacaagagctcggaagtg

SEQ ID NO: 19156 - DNA, 505 bp, Arabidopsis thaliana
gtgtgctctaaagactttacgcacgccctcaatatcgtgtgcgaatcggcctaggaacatgccgtcgacggctttccccagacccccagggccccacagaccggggccagcactgcctccatacagaatgcgaacgtctcccgatctccggccgattaaagcgcgaagaccatccacaacagcagagatgtggtccacacttgcgggcttaggctttccaatggcccagacaggttcgtaggcgaatatgataggtgcatcggccggaatggcattcaatatcgctcgaacaagtggttcgcattcccgtactgcaagtccaactgctgccgaagccactggaccagaggcgctgatttcgtccaatcacactaaaggcacattccttgagcgcaggctgcggcggccttgcgtgctgcctgttcgtctgtttcaccgaagatggagcgacgcccgcatgagctaactcaacgatggagacacccaaggagctaagagacagtgg

SEQ ID NO: 19157 - DNA, 529 bp, Arabidopsis thaliana
gaaagaacagctgtcatctagacctttgtttttaaatatagaagtatgtgtgtaacatgacatgctctaaagcaaccacaagtgtaatggggcgtgagagtgatgaacacgacatcccaaccaagaaactggttcaaaaaacatccaaacactatgtgatggatatgtgtatgggcatgcataacatagtgttgtatatagactccctaatctacatatatctctttctataaatatgtaacggtagttctaatgggttcatcacatttatcaccatctctatcttgaaaaggagaaataaataattaatcactaagcgaaagagatttgatctaaagtaatacaaataaaccttgattgagattgtaaaggagaagagtttaaaagcatggatacagagagaggatcaataagttcatcagaaatatccagaactgctcatctacaagatagaacagttgcttgtcttcctccttcgtacggacaacttgtgaccattcttagcatcgatggtggtggaatccgtggg

SEQ ID NO: 19158 - DNA, 1555 bp, Arabidopsis thaliana
gttagggggaaatacgagtctctttagggttcgaaaagtcgccaagagcgggagtttctttttgagtcacgtggtattgacacgaaccggtcggatcctatatccaatcgggtcctatgatgcccttgtggctgcgcatgagagcaattattctctgcggactcacaactattctcaacgtgaactttctaacttgttctccaatatccaactatataaggacacgtgtcaatctcagagacacataaatatctgcggctaaaaatatcttattagccgcctatttcataccaccgtttgattactttagccaccgttgttttacgtctataattaagtatcttccactaatctcatatttcaaactgtacttttacctcgagctctctccaattttctcatagctctattgttcgaaaattctgaaacgaacgttaccactatggacactaagatcggatctatcgacgcgtgtaacccgaccaaccacgatatcggcggtcctccaaacggcggagtctccaccgttcaaaacacaagtccacttcactccaccaccgtcagcccctgcgacgcgactcttggccgttacctagcaagacggttagtcgaaatcggcgtcaccgatgtcttctccgttcctggtgatttcaacctgacgcttctcgatcacctaatcgccgaaccaaacctcaagctgatcggttgctgcaacgagcttaacgccggatacgctgctgacggttacgctagatctcgcggtgttggtgcgtgcgtcgttacgttcaccgtcggtggattgagtgttctgaatgcgatcgccggtgcttacagtgagaatctgcctctgatttgcatcgtcggtggtccaaactccaacgattacggtaccaataggattcttcatcatacaattggtttacctgatttcactcaagagcttaggtgttttcaagctgttacttgttttcaagctgtgattaataacttagaagaggctcatgaacttatcgatactgcgatttcaactgctttgaaagaaagcaaacctgtttatatcagtatcagctgtaatttaccggcgattcctcttccgacgtttagtcgtcatcctgttccgttcatgcttccgatgaaggttagcaatcagattggtttagatgcggcggtggaggcagctgctgagttcttgaacaaagctgtgaagccagttcttgttggtgggccgaaaatgcgggttgcgaaagccgcggatgcttttgttgagcttgctgatgcttctggctatggtcttgctgtgatgccttctgctaaaggacaagtacctgagcatcacaagcattttatagggacgtattggggagctgtgagtacagctttttgtgctgaaatcgttgaatctgcggatgcttatctgtttgcaggtccgattttcaacgattacagttctgttgggtattctctgcttctcaagaaggagaaggcaatcatcgttcagcctgatcgggtgactatctgtaacggacctgcgtatggatgtgctcttatgaaggat

SEQ ID NO: 19159 - DNA, 1074 bp, Arabidopsis thaliana
tccgtatctacctccgatctcaatcgatcactcttcctctaacctactctgctttcttcgcagtattactccacattccgattaactaccttctcgtttcttctctcggtctcggccttaaaggagtcgccttgggagcaatctggactaatgtcaatctcctagggtttctaatcatctacatagtgttttccggtgtttaccagaagacttggggaggattctcaatggattgctttaaaggatggagatctctaatgaaactagccatccctagctgcgtctcggtttgtttagagtggtggtggtatgaaatcatgattcttctatgtggattgttacttaacccgcaagcaaccgtggcatctatgggaatcttgatccaaaccaccgctttgatctacattttcccttcctctctgagtatcagcgtatcgacacgtgtcgggaatgaattaggtgcgaatcagcctgataaagcgaggatagctgcgagaaccggacttagtttaagccttggtttaggtttattggcaatgtttttcgctttgatggtgaggaattgctgggcaagattgttcacagatgaggaagagattgtgaagttgacttcaatggttttaccgatcatcgggctttgcgagctaggaaactgtcctcagaccacattgtgtggagtgttgagaggaagtgcgagacctaagttaggagcaaacataaacttgtgttgtttctactttgtgggaatgccagtggctgtatggttaagtttctttagcgggtttgacttcaaaggactatggctcggtctatttgcagcacaaggctcgtgcctgatttcgatgctggtcgtgttggctaggactgattgggaagttgaggttcatagagcaaaagaactcatgactagatcatgtgatggtgatgaagatgatggtaatacaccgtttttattggattctttggatatagaagaaaatcttgtcttctagttttgatttattggcactaacgagattcgttccgcatccgagatatcaacccgcaactcattcaccaggggatcgatctctc

SEQ ID NO: 19160 - DNA, 949 bp, Arabidopsis thaliana
caaaaatgtgtgtgcttggtttggaaatccttaattatgtagtctagaagatttatgagaaacatagaaagttactgaatcaatcagtaatgaaaatttatagataacatgaaggtttttaatgggctagttttgcatcgtaagtctatgggagacgggctgtgggccatccacccatgcgactaggcgacccaactgctccgattggtctagtaatgttaaaccctccagacgagcaagaagcttcagtcgtcggaccggtccgaccattaacgtccagagtccgttctctcctccttagacgctccctcttgagcagagtccctaacttatcttttcccgattttcccttgtccggaacaggtatcatctccagacccatcagctttgcaacaacccccgtcttgcaccataccacactctctccggccactgtccgtggcaggcgttttgtctccaagctcatctggctcgatctctttgatgtccgttgatccccgcagtgggatctccgcccaccctgtatcgtcatgtcagcactggtgccaagatggcgccggaaggatgaccggtacatagcgtccttaccgtccagtgagaaacgtgggtactgattcaacgcgttccttgctgaccttaacggcagacaaacagaagttgatattagtattgatcatagtatcatacacaataaaattatttctgtttcttccggtaattccttaaatatcactacagatttcaccagtatacgaaatctagaaaattcaaaaaaaaaaaacaaaaaaaacactttaaaatgtagtcatataacttgtttcgtacattcaaatctacaccggtgaatatcatattatcaatcatgaaaccaacgttatttctcctcttgaatacgttatattcattattcaatattcatcttaattactaacgtggcatgtcaaaaaaa

SEQ ID NO: 19161 - DNA, 938 bp, Arabidopsis thaliana
  unsure (1)..(938): unsure at all n locations
aaaaaccaattattcaattcgttaatttcagctggagtcaatatacatgaatctgaggcatggataaacaagagcattgatactgctagatgagtttttactacaacggattattcttcaggatatctcctccacttaatatttgtctntcaatctcaaacgtatgaagaaatcagtcaacgaacttcaagcaactttatcgttgatgagtaagatattcatcttaatgaagcaattcgaagatccttggaagaagtaaaaatcaatttcatacctgcaagtaatggtgcaatcaagtctttgatcatatttatacaaaatgttagtgtaatactaacaattgtaagaacgcgcaatgcgttatttgtttgtcacatttttatttcggaacaaaagtagtcaaattaagttgtggtcataggtttgattacacatgtattgtaaaatggctacagactagtcatatatgtccaatatgtaggtatgaattaccaatgtaattaacgtatttattataagcgaataaactattaatttatttagtttctaatttcaagacttaaagtatgatttaacccagaaaatataatccatgtcattagaatattacgaaactttttgatccagaaatgaaaatctaataaaatgtagcacgaagataaaaacacaagcaaatgtagcacgaatatggggtagtttcagacggattcctaagatggtatggagcaaattctcttttcatcctgagatgatatgtgattcctagaaccgaattcaaccctatcccctttcatattcattcgttcattcactcccatcttcatcttttaagtactctgttttgctaaccaaaacagagcctccttctctacatagcttccgccctcatcacataggcgacaacaattgtgaagaattacatagacctacagttttag

SEQ ID NO: 19162 - DNA, 1187 bp, Arabidopsis thaliana
agaagatccccacaagcttgttttgaaaagcaaaattattcgttgctgtagcaatcgtgctaagctcaaagagaggcaactcccggcttcttgatttgtcctcaagctcttcaagtatgaatgagtcttcaagatcaaaagagctcggagcgaacgttgatggagcttttctaagcctgttagactctgcacttgtgaaagtgttcaatttgttagctgtgatctaagcaagcaaacatataatcttaaaaaatcatcatcagagaatttcttacgtgttcgttgtcttcgcttccttaaataacagtgaaaactgatcagtagtaacatcacgactgcaatcaaactgatgagaattaaaacaagtctcttcttccccgatgcgccatttccattccaccgcgctgaaacaagcaaacaaatcaaattgctaccacctttgttgcaatgaaacagaacaagttgcagagtatatgtatattagtacctaactctgacttatctacgcgtaaatagaaatcctgtcctgagctcaagtatgtcctagtatccaacatattgccgtgccatgtcaagcaccctttagctccatcttgactctcgtggtaagcactcgcataagcaacacatgagcagttcttcaagcacctctgttcacattccttcagtgttatgttcatatccacattaacagctgatgtattgggaatcttcactcgcttcaactttgcaaacccttctttcccattacatatcgaatctgcttttatcctcgtgcacccatccgaagcatctctcaagaaccaatctcgaggtgtcttaggctcgtaccccggtaagcaagagcactcaaacttctctgtactggtggaatcacagtaaccgttaaagccacagtggttgtagatgtcacacttatcttcgggagctgaccagaacccgatccatttcttatctctcccgttccagcgaaaccgttgcagagttcctgtctcgtttagcaccattcttgttgtaaccgaagcatctaacactccataagtgattgatacttcatctggattattcacaaacgagatattgaagataaacttgtttgtcatttcaggcacaccactccatctttgccctgtccatgacccagtacgccaccaaagagtcagacacttgtacatcatcatctgcgg

SEQ ID NO: 19163 - DNA, 622 bp, Arabidopsis thaliana
agtagataagtatgaatgatatgagttttgacattattcttgcaggctatattggcactgggtaatgttgcttatcatccaatacaccgtgactatgttcttcaatgtggggcattgacgccactgctgattaggctgtacaaggatactaacttgccgatgctcagagctgccattcggactttggctttcttgtgtcgtggcatgcctccgtctaccttcaacgaggtcttcttaattctctctctctctgtttcctctatttgtatgcgtccaatactttcaacatatgaagcattgattaacaggtgaagcctgcacttgaaatacatcttaattcaagtgataaagaaatcttgagatatgtttgcttggcaatttcgcatctgtgttatggttcagtagatggaatccaacgtgtgattcaagctggttttgtccaaaactagttagcgttctccggttagtatttctcaaaatcctttgtgacatctgacatgtttggatactgaaggctgacagttttttcttttttcagacgcccttccccagttttatctgctcctgaacttcgtaccattgggactctagttactggaaataatcccagagccaagtatgt

SEQ ID NO: 19164 - DNA, 584 bp, Arabidopsis thaliana
tgagctcgatgagctaccactcaactgcttcaaattcgggtcgtcgttattctcctccaggagtcccatcttcatgctggtgtggaacgaaaatcatcacttacacttcgaagacaaaggaaaatccattccggcgactctatcgatgcgagattgcaattcaggagcattgttttacttggtccctacaatgttgattgaatagagaacggcgtattcattcatcgaaatttatatatgtagcgggaaaacgaagagaacttgttcgaatgggttgataaagctctaatagatgaaattaggatggtcgaggagaagagaaagaaagttgtcgatgatgtcaatgatatgaggatgtaggtgatggctactatgaaactccaaaacaaaaagttaaagaagatggaggatgcgatgggtaagaagatagatagtgaagtgaaggagctgggtaatgtaatggctaagtcagctttgaagacagtaggtgttgcctctgtaattctttgctaaattgtatggatgtagggaagagtgtaagtgttgatgctttggaagaaaatgtgcttccttgttcctttgtt

SEQ ID NO: 19165 - DNA, 965 bp, Arabidopsis thaliana
atcaataggttcaacaggtagaacataaccattgaacttgagtaaaccttggtacttccaacttcaagttttattcatcatgttaattagaatagcacaacttcaaattttcttgaaaaccatatatacacatctctcattgctataattagatactaagaggagatgtgtctaaggctttggcctccatttgaacacatcctcctccactaaactccttggtgtcatcatcactcttgtaaacatacttactcgctgcccacacgaaaagtcccatgttcactatcgaaatcaccactagaaatccataatagtaatcaagcctcgaatcattcaaattattcccaatccaactcttccctccacctttactcgtgatcttatcaatcattgtcaccaaaaagctgttcaagaaattcccaagaccgattccactcgtgaaaaacgttgttccaaggctctgcatctcctcaggtgactgatcatagaaaaactcaagcaaaccaattgcgttaaacacatccccaatgcctagaagagagtactgagggagcaaccagaaaatgctcataggcacaacttgtgtcggactagttatgtgaaattcctttatcacgcgcatcctcttgacctccacagccgaagcaatcgcgattgcaacaatttgtatcgcaaaccctacccctagtctttggagtaaagtaatccctctagggtttccggttttcttgcgcatgaagggaacaaaggattggtcgtacatgggcacagagagaagcatggagagcgtaacaaagcttcccaatgaagccgcggggatctggaagttggatccaatttttcggtccagcgtggtcccttgtttgacgaagagagtgttgacttgtgcccacaaggtgcttgggatcaaagtgacaagccatataaagataagtcctagcacacgctttgccacttccactttt

SEQ ID NO: 19166 - DNA, 583 bp, Arabidopsis thaliana
  unsure (1)..(583): unsure at all n locations
gcttattgcttctcctaaagattatgttcgtgagcaggtaagtattttactacgtgtagatatgagaatacttgtcacagactcacagatatgagttttgacattattcttgcaggctatatggacactgagtaatgttgctggtcattcgatacattaccgtgactttgttcttaactctggggtattgatgccactgttgcgtcttctgtataaggatactacactcagaattgctacttgggctttgcgtaacttgtgtcgtggcaagcctcacccggctttcgatcaggtcttcttacttctctctctgtctctgtttcctctgttttgtatactttttaacatatgaagcatgattcaacaggtgaaactgctcttcctgcgcttgaaatacttcttcattcacatgatgaagatgtcttgaaaaatgcttgcatggcactatgtcatctgtctgagggttcagaagatggaatcaaagtgtgattgaggctggttttgtccaaaactagttcaaattctccagttagtacttctcagaatatgtatttacccttttgtgacatgtntggataaggaa

SEQ ID NO: 19167 - DNA, 1013 bp, Arabidopsis thaliana columbia
ctgacagtcggtcagttattcgcccagcctacccgtatatcgagtatatagaacattaccaatttaagatcaacagagttagtgatcatatgttaggatttaaaaagaggttttcacaggtcgtggaatcacactctctattcagcatcaaaagagttttgaagttaacgatttacaaacagagaaaagtagacgtgtaggatttataggaggtacaacagctagagatgcaacaagttggatatgaagttccaacccatcatccaagtcttcttatctgaaggagatgcaaagttgagctcaaacatttctttccttatggtctctcccgagtcacagaatccgacaagcttagccacgatctccgcactctctctcacgtgttgcatgttgtgaggatctgtccagagtttgttgatgaactgttgtctcctctgttttcccaccggcgggacatcccatttcaggtatagcatctctctttcctctgctcctagctttgtgtttacccgtttcgccaaatactctctctcctgcttcaaagctcttatactgcagcacaccaaagacatatatatgctagtgaaaaatggttttaactcatagaattgaagaaaaggaaagctcttgtactacctcgatgctacgtagcttgctggttcatcaccaagcaatgcaggactcgcattcccaagctcagccaagtgctgttcgagccatgtcagcctgcggagtcaacctccatgtagatttgatcagctgggtctcctttgaataacatgtagaattgtgttctgtgaatgattgaaatgtggcacagatgccataacattatgatttgctttctctgctcttcaaaacacaatggccaatccatctgagattcatcggttgcatcgtactccgaagcagcgcctgtctcgtttgcctccagttctagcacctaacatgtacaagctttttaagttactgattactgatgaacaaatttgtaaatgaatgagcataagtca

SEQ ID NO: 19168 - DNA, 678 bp, Arabidopsis thaliana
tatcgccggccattaggggcactcctaaatacttgcgtaaggagcacaagagcagttcttcaagcacctctgtttgcactccttcaatgttatgttcatatccacacttgcatctgatgtgtcgggaatcttcatgcgctttaacttcacaaacccgtctttctcactgcatattgaagctctctttttctttgtacacccgccagaagagtccctcaagaaccaatgccggggaaacttgggctcaaaaccaggtaggcatgtgcactcaaacgtttttgagctaggggaatcacagtaaccgttagggccacaatgagcgtagttatcgcactgctctttaggaactgaccagaaatcattccatctcttgtccctcgcaatccatgtaaaccggtgcatggttccagtctcgttcaccatggttcttgttatgaccgaagcatctgtcacaccgtaagtgaaggatacttcgtcctcattattcacaaatgagttattgaagatgtaccctattggcatttcaggcaccccgctccacctatgcccggtccatgacccatacgccaccatggggttacacctttgtacagaatcaactgtggaaacctctacgttccatccgcagtattaagtctccagaaccagggtcaccatgagacttccatgatgttagag

SEQ ID NO: 19169 - DNA, 629 bp, Arabidopsis thaliana
tcgactctagcacattacagtttctttgatccttaagtttctgcaaccaccaccactaaagctcgctcttctgatggctgtgtctgttcttcttcttgtggaactgtttcttcttcttgtggaactgtttcttcttcctgcgggagtgtttcttcttcttgctcattctcaacaggctcaacttcctcgggagttagctgtagattttgtctcctataccgaaatatcaccaggatgataaaaactgcagaacatgaaagacgtatacgttatattttgatacaaggcaaaccaaatactctgtcaaccattggttaggtaaattacctgcaaatattcgggttcttatgctcgtcaagttccaaaacgctgtcaccgcagagccagccaagatcttcttgtgtgagcagactccccatgcttcacctattctcgttttcacgtctttcaactgcacaaatgaaactcaaaccagttcaagaatttaaacattggaccagttaaagacatctacaaacacttgactattgattctaacacaattgacaatatgtgaatgggtgcattcattattcttcacctttttggctaatctgatgcgtgtacatgaatacagctttgggatggtg

SEQ ID NO: 19170 - DNA, 583 bp, Arabidopsis thaliana
ctaaagcctttagacccttctggcaatttatcccaatggatataagccttttcatctagttgaactttagaaacatcgaaagcaaatttaatatttacccagcgttgaacaaggacagcaagaatgaacatcccaaggatagaagctcctttagtgatatcttgaaggataccaccagacatatctttagtgatttctgatccagccttgtatccaatctcttgaacataccacaagaatgacatacgaatcaagttccatgcaacaaagaagaggagtggccccaagatattgccagtaagggcaagtgaagcaccgagagatccaaggattgggcgtactgtaaaccagaatactgggtcaccgataccagcaagaggtcccatcataccgattttaaccccttggatagcagcgtcatcgatttccacaccgttagcacgttcttcttcaagcgcaagagtaaccccatgactggagcagctacgtatggatgagtgttgaagaactcaaggtgacgctcaagagcagcgatttgatcgtcttttttagtatagagtttttgatactggaatgagtgtat

SEQ ID NO: 19171 - DNA, 573 bp, Arabidopsis thaliana columbia
cttttttatacccaacacgcaactttttcaagtcccttctcatgaccttttgtaaattagtcttatcaagcttctgtattaatcttaacactccaaaatttctgtaaccttccaaacccatagaacttggctaacctctaaaccaccacgctcgcatacgcgattagctctcccagggtcagttggttgtttgttaccggtacaaactctacaggctagacgcttaacaacatcaacatcctcaaactcctagaaagccactaacccgtccaaatgaattttgtcagtcatcctctctccatgatcccaaacttggctaacgaaagtacatccaaaaaacttgttttcattcatgaacactatgtcagttattgaagaactagtaatttgtttctcatcggtaccatgaatcttccttgcataaaaatcccatcacttctttccttcactgtagtacaaagcgttcctgcaccttctagtagactcacttcactagccttttgtagattcatcccaagatactcccctgtacactcatcacactcacagtcaattgctaagaggaggaacgag

SEQ ID NO: 19172 - DNA, 1068 bp, Arabidopsis thaliana
aggattgtaattgcccttttgttttgtttgttttctccatttcctttgggcttagtttccggaaatttgtttgtgtccgtcggtgacaacttcaaaaaatatcgacaagtcataactttttatcaaaattttgactaagttgtcaagcccttagtcgacactcgacgcccctgacattaaaagtattgactccagtgccctgtgccggcctaaaagagggcctattttgggactcttttgctggcaaattgcgccatatgtagtggagtaaatgtgtaaaaaaacagttgaatcaacataaccattatttgatcagaaaagaaaacaaaaatgtggtgtaatgagaggaggatacggtatgtggaaacttgatttacttaatttcaaaggagacctacggagtcaaagagagagttagaccaactaattgtccagagggattgagattggaggaagggtattatggtactttacgaatactattacgttgattaatttggatactttgtcttcttcttcgtctctctcccctcgcgcatcttcggtgctataaaacaaactcacgactagatcatttttggagtgagatttacgtttgatagactactacaatgaaggagccaacgacggagatagagattgaaacttcagctgtcgcaacgatcctgcctcctcctcttcctccgacggcgtcacctcatcaagcgttagtcgagaggctcaaggattatggacaggaagatgttttctctctctgggatgaactctcaccggaagagcgagatctcctcctcagagatatcgaggtgaatcggagaataacacagttccagagtttcgtttatcgtttcccatcttacaaatatgctttgcattatcaaattcagctaaattagctgaagatcctgcaaataatgtggatcgttagttcgatttcgcatttgattagattatttaagttagatgtgttgattttctccagaatttggatctccaaggatagatcggatcatcagatgctcacttcattcacaaggtttatctcttgacttctagatatgcatttag

SEQ ID NO: 19173 - DNA, 880 bp, Arabidopsis thaliana
tttttcttgaaaccaaggaatatagtctagtttgctcccaataatttaccatatgaagaagtgttaattgcttttgcttttcatttttacctgttctgttactcaccaaaacttggcaattgtagcctgaccgtgtcatggagttctgcaacaacaacgatcttcagttgattgtacgagcacacgaatgcgtaatggatggatttgagcgttttgctcaggggcatttgataacgctcttttctgctacaaactattgtggtatgtacatggactcactaagtgccataaccggattttgatattttgatggggttatttctgttttcttaatagtttttatactaaatctcaggtactgcaaacaatgctggggctatcttggtactagggagagatcttgtagtggtacctaagctcattcatccgttacctccagcactttcatcgcctgaaacttcaccagaaagacatatagaagacacatggatgcaggttcatattgcttcatttcattactgaatcttagtccatagttattgacctgaaacattggtacttagcgtagtatgcacttttcgcaggagctgaacgcaaataggccagcgacgccaacccgaggacgcccacaaaattcaaatgaccgaggaggttctctggcttggatgtgaggcagataaagaggcactcgtgcacatacataccgctccaaaaaacacttgtaacatctgcctcctggtgttcctcatgtgtacagaaaaagatgagccatagacgagaaacgatgaggcttgaagatatcagggggtgtgtaattaagatgttaaaggctagagaagtcagttttggtggtggtttagtagtgatttgtagagtttat

SEQ ID NO: 19174 - DNA, 964 bp, Arabidopsis thaliana
ggtggcttcctgagtatgacatctttacattctttcttgctggttggtatacagacgaaatggcgcaaatgcaagtgttctaatagcgagattaacatgccgtaatacatataggcaaaagcctttccagtataagatgattgtaaaatgtagaatcctcattttacgtcgttttaccttttgtatgaaaccaatactacgttacgttgaatagtaatattcatttttctcatttgctgagccattcattatcgtttcaacaactcaattctgccacttgagaacagatttgtactcatcagtggaaacaaagagaagcaagaaaacacaatccaaaagaaacctaaagcagaaaggcaaatttgtttattttctactcaaaagttcaaaacaaaaacataatgaggcggagatgtaagaaaaaaaacatataaggagaatataggtccaggaaaaaataaaaacatgtaaaatatagtggactctacaagtctagtactgacaaaaaaataacaacacctgaaattgctttagagaaagcagagatcaacggctgagattttgtcgtcaaggtatcaatcgattttgacagaggaaaagagatagtggacgaagtaaaaggaggtgaggaagccaatggttccagtggcgagcatgattgcaattgccataagcagagagtagccaatgtaaagcatagctgagacgggtccgctcagactttgtagatcaaagaccaaatagttgatggagtaagcgaaaacgtacaatgcgactgaaccagatgcatagaaggctttccaccaccacctccagtcttcaacgcagaggtgcatgtaggtcaagaccactgatacttctgcacacacgactaccaaaagaagcagaactatgagtaagacccaaatacatagtagaatctccctaacatatgctggagaagatgaagaacagttctatgaag

SEQ ID NO: 19175 - DNA, 555 bp, Arabidopsis thaliana
tcacaggtacaacctgtgaatggtcagcaacatcaacagcaaaacccaaatcctcagcatcagcaacgtgatgctaacaacccagcagggtgagcttttcttgtctgctctataactctctaatgaattctgtttcccactctgtgacaacctaaatggttcttttttgtttagactcctttctatagcagaggaggccctagcagagttcctttccaaggctacaggaactgctgttgactgggttcagatgattgggatgaaggtaatactttctggcctgaatactcttaaagttgtataatctgatttctattctttagttgtgtctgaagatgaagttgtttatgattatttgatgaaccttcattgctggtgtagcctggtccggattctattggcatagtcgctatttcgcgcaactgcagcggaattgcagcacgtgcctgcgcgctcgtgagtttagaaccatgaaggtaaagagtgcgatttgttacgttctggcttgtgtgtataatcattagcatacgctagtcttgatttgaaacaaatata

SEQ ID NO: 19176 - DNA, 602 bp, Arabidopsis thaliana
gtttgaggtcaggttgagcatcctgtcactgagtggattgccgagataaatcttcctgctgcccaagttgctgtggggatgggaattcctctctggcaaatccctggtataatctacgtccttatttcttacaggcagcggttcctcttctttatccatgcacacgaataatgtactgtctgtttctctttaatttcgtagagataagacggttctatggaatagaacatggtggaggttatgattcttggcgaaaaacatctgttgtagccttcccttttgattttgataaagctcaatctataaggccaaaaggtcattgtgtggctgtacgtgtgacaagtgaggatcctgatgacgggttcaaaccaaccagcggtagagttcaggtaatgtgatatctgtggaatgcaaagtgaaagttcattcactgagaactctgtgggtacacttgtatgaacttgcaacaggagttgagttttaagagcaagccaaatgtgtgggcgtacttctctgtcaaggtaattatatctatagagactctgctatataagtgtttccaatgttttaaatttacgactacttttttacagtctggtgga

SEQ ID NO: 19177 - DNA, 523 bp, Arabidopsis thaliana
ttctatgcgacagattaggaatttttgtcgacggaggcttgcaatgcataggaaactccaaggaactgaagagcaggtacggtggatcatatgtcttcacaatgacaacatcttcaaaacatgaggaagaggtagagagattggttgaatctgtctctcccaacgccaagaagatatatcaccttgctggtactcagaaatttgagctcccaaagcaagaggttcgaattgctgaggtgtttcgcgctgttgaaaaggccaaagccaacttcacagtctttgcatgggggctcgccgacacaacgctcgaagatgtctttatcaaagtcgctagaactgctcaagccttcatttctttgtcttaaaagctattttttacagttatagggttctctttcttgggtcaaaattctatgtcttgaaacacacgcaaacttaccaccatcttgagtctccttgtgattgctgctatgagaatcaaagaagcttctgagatcccagaaccatatgtgttattactttc

SEQ ID NO: 19178 - DNA, 722 bp, Arabidopsis thaliana
gctaagagtgttaactatgttgagctgctactgttgagtatctctatagtatggacactggggagtactacttcttagagcttaaccctcgcttacaggtttctttccatacacaccatagctacctttccttttcgaatgaaagattttggtcttgaaaatcgaatgttcgatgtcaggttgagcatcctgtaaccgagtggatcgccgaggttaatcttcctgctgctcaagttgctgttgggatgggaattcctctctggcaaatccctggtatggtcttgcatcctggggcagtggttttttttttctaggctatatgcttatgtaatgtactgtttcgcttttgtttgatagagataagacggttttacggtatggaacatggtggaggatatgattcttggaggaaaacatcggttgtagcctctccttttgattttgatgaagctgaatctttaaggccaaaaggtcattgtgtggctgtacgtgtgacaagcgaggatcctgatgacgggtttaaaccaaccagcggtgaaatacaggtaatgtgatatatctgtggaatgcaaaattttaaagtctatgataactgtgcgggggtgacacttgtatgaacttgcaacaggaattgagttttaagagcaagccaaatatgtggtcgtacttctctgtcaaggtagtttatatctacgagatgctttgctatattacgtgttttg

SEQ ID NO: 19179 - DNA, 498 bp, Arabidopsis thaliana
gtcaagtttcttatctgaacttaggtaattagtaattttacatatattttttaatagtcctccaatagttaaaaagttgtaaatacataaatgaaaatacaaaattcttgaatcatctaactaaaaaaaggttggaacgacttataatctatagaatttaaagcatgtgttagcttcgataatttacatgcatgcttttgttagatataaaattaagtatgcatgtaatttttggtaacgacagattcttggacagagcggtgatttcatgcgattcatatgaagttgaggaagcaaaagctgtgttgagtctcattccaatttggttgtgtagtttggtgtttggcattgtgtttgcgcaatctcctactttctttacaaagcaaggatctacaatggatagatcaatctcatcaacactccaagtccctgcagctacactccaatgcttcataagcctagcaatcctcgtcttcatcccaatctacgaccgtttat

SEQ ID NO: 19180 - DNA, 741 bp, Arabidopsis thaliana
cctatcaccggcgcgtacaagccactcgctgttctctctgctcatgtcggctctgtttcttccttagcgctctgtggtgagttcttgctgagtgcgtctcagggaaaagatatcatcgtttggcaacagcctgatctcaagatctttgcgaaattcggacaaggtgatgggtctgtgaaggctttggtcagcgtgggaagcaaagtgttcacggcgcatcaagatagtagaatcagagtttggaaagtttctcggagaaactctgagaatgctttcaggcttgttgatacacttcccacgactaaagactatctggggaagtttatgaaacagagcaattacgttcagacgaggaggaaccataagcgtctctggattgaacacgccgatagcatttcgtgccttgcggtacacgctgggataatctactctggatcgtgggataagactctcaaagtctggagactgtcggatctcaagtgtcttgaatcgatcaaggctcatgatgacgcaatcaatggtcttgtcgccggagatggcagggtatactctgttccgcagatgggaaggtcaagatatgggggaaagagaagagaaagcagattgagtctacttcttcctcttcctcttctttacatgttttgaaggctacgttggagggtcgtgcagaggtgtcagtgaactcggtggtggtttccggtgacggtaattgggtatacggaggaggatcagacgggtttg

SEQ ID NO: 19181 - DNA, 644 bp, Arabidopsis thaliana
cgggatgagaaacgataacttaagggtggctatagaagcttggaaccaatgcaacgaggtcggtgaagaagctacaaacatgggaagccctcgaatggcagattgcttcgatatcgataactctagctttcccggtaaaatcataatgttgttatgttcttacttctctgttttaggccttaattccgcatttacgctaacatatagaaaaacaaacttcatacttatttcaaaacattttcttaaagttgttaccttccgggacaggcaaacgaaacagagacattaaacctcaaactgaaactgatttattgtgttcatgggacttttttagtgaagataatccacaaagtcgacgaaagagacaacaggcttggggtaggaaatggaacctacggaggaataagcgctggagacaacgcagatatctacgcagcgcaaaaggaggtatacttaggaaacaaatgtcaagttgtggacaagccaaatccatggcagttttggatgataatgctaaagaacggtaatacggatactttagccgcaatttgtcccgaaaacgggaaaaaggcgaaaccatttcctcctacggggaggtttccatgttttgggaaaggatgtatgaacatgccatcgatgcatca

SEQ ID NO: 19182 - DNA, 665 bp, Arabidopsis thaliana
cctgtgagtaattcaaggattaggacgccaaagctatagacatcagctttttgggatattttgcgagcatcagtgatttcaggggcacggtagccatcaatacggttaggtgcagatgtagaactaatgatgggagcaagaccgtaatcagagaccttagcttcataggagtcagataatagtatgttcgaggacttaatgtttccatgagaagttgtcccatcacgcgaatgtaggtagctaatcgctcttgcagctcctaaggctataccggctctggtttcccagttcaacggagttctcccgtttcctttgttccctacaaatccattaaaagagcttcaaaaccgagcttgaagacacataagataaactaactatgaaacaattcagtaatcagtgtcaattttagccaaaccaggtccatcaagatcacaaactagcatcagctaaactaagaaccctaaaaataaacaaatgcacaaatggagattactattctataccgtgcaatatcgcagacaagcttcctttagacatgtactcaaagacaagaagcttctcgtcacggctgaaatagtaagcgatcagagtcacgagattggcatgactcattgatcccaaaacatgcaatctctctctgaactctttctcaggcacacaac

SEQ ID NO: 19183 - DNA, 1337 bp, Arabidopsis thaliana
atttttttttcttcaaaaattcctccattgttattacataaaggaaaaaagaaaggtctctgagattttcaaatcaccatcatcatcatcgttgaagaagacgaagaagataccttcctctttatcttctccgatttctcaaccttcccgtctgcttgtcgtaaagaaatggcgccgagtagacgggatttacagcttactccggtcaccggaggttcttcttcccagatcagtgatatggaagaagttggtcttctcgattcgtatcacaacgaagcgaacgccgatgatattttgactaaaatcgaagaaggaagagatgtttccggtttaaggaagattcaggtcggagtcaccggtatgacttgtgctgcttgttctaattccgttgaagcagctttgatgaacgttaatggcgtcttcaaagcctctgttgctttgttacagaatcgagccgatgtcgtcttcgaccctaatttagtcaaggtttcatcattttggatttttgagatcttatatatatatatatatacagtagttgttgaaatttattgctccaggaattgatttgatttggagcatttattattgttgtatgtttttaggaagaggatattaaagaagctatagaggatgctggatttgaggctgagatattggctgaagaacagacacaagctactttggtgggtcaatttacaattggaggtatgacttgtgcagcttgtgttaactctgttgaaggtattctaagagatcttcctggagtgaaaagagcagtggtagctttgtctacatcattaggagaagttgagtatgatccaaatgttattaacaaggatgatattgttaatgcgattgaagatgctgggtttgaaggttcgcttgtgcagagtaatcagcaggataagcttgttttaagggtggatgggattttgaatgagcttgatgctcaggttttagaagggatacttactagattgaatggggttagacagtttcgtcttgacaggatatctggagagcttgaggttgtgtttgatccggaagttgttagttcgagatctttggttgatgggattgaagaagatggatttgggaagtttaagttgcgtgttatgagcccttatgaaaggttgtcttcgaaagatactggagaggcctcaaatatgtttcggcgttttatctccagtcttgttcttagtgtgagtaacttaacttatttgaatgcactcaccatttatgatacaatcatttgtcttgaatctgttatctaatgtcatttaacagaaatgattttcttttccagattcctctcttcttcatccaagtaatct

SEQ ID NO: 19184 - DNA, 1960 bp, Arabidopsis thaliana
ctagaggatcactgtcccagtcatatgtggtatctacctatttgagaccggttaaaaagaatgtatcagagccacaagacagctgcagcaatgcgatggcatgctgagcaccaatcaaaggagggagaaatgaatcatccttcagatgcggcagagtggagatatttccaagagttacatccctggtttgctgaagaacctcgtaacgtttatctcgggttgtgtactgatgggttcaatccttttggcatgtctcgtaatcattcgttgtggcctgtgatcctgactccatataatttaccccctggtatgtgcatgaatacagagtacttatttcttacaattttgaatactggaccaaatcatcctcgagctagtcttgatgtcttcctccaacctcttattgaggagctaaaagagttgtggtctactggagtcgatgcgtacgatgtatcattgagtcagaattttaatctaaaagcagtgctactatggacgataagcgactttccggcttatagcatgttatcaggatggactactcatggtaaattgtcttgtccaatttgtatggaaagtacaaagtctttttatctacccaatggacagaagacatgctggtttgattgtcatcgtagattttttcctcatggtcatccatcccgtaggaacaagaaagactttctgaagggaagagatgcttctagggagtatccacccggagtctttgacaggggagcaagtttattaacgagccggttggctagtgtaatccaagcaaaaacaaaggacgttggtgggaacggtcatgaaaagaagatgccaggctatggaaatgaacataattggcacaagaaacgcatcttgtgggagttgtcttactggaaggacctcaatcttcgacataatattgatgtgatgcatacagaaaagaattttcttgacaacatcatgaacactctcatgagtgttaagggtaaatcaaaagataatatcatgtcaagattggatattgaaaaatttttgttctcggtcagacttacatattgatagtcagggtaaagctccattttcagcgtatgcattaaccgaagaagccaaaaagagtttattatcatgtgtgatacatgaggttaagttcccagatggttattcttcagatttggctacttgtgtagacatggagaatggaaagttttcaggcattaagagtcatgattgtcatgtttttatggagcgactactgccatttatctttgctgaactcctcgaccggaatgtccaccttgcattatcaggtacaatatatgttttttaatttgccacacttttttaaacctctgatttaacttaaacatatatatatatattagggattggagcatttttccgggacttatgttcgagaactttatagaaaagtcgggtacaaattctcaaacaaaacatagttttaataatctgtaacttggaaaagatcttggaaaagatcttggaaaagatcttggaaaagatctttccaccatcattttttgatgttatggaacacttacctatccatctcccatacgaagctgaattgggtggcccagtccaatataggtggatgtacccattcgagaggtttttcaaaaagttgaaaggaaaagcaaagaacaaaagatatgctgcaggttcaattgttgagtcatatatcaattacgagattgcttatttttcagaccactactttgccgatcatattcaaacaaaatcaaggtaaatatatttaattatttaacgattagatattcttcgatattaattcacttacatggatcaggttaacaagattcaatgaaggtgaagttcctgtatatcatgtccctggagtaccttatatatttatgcacgtcggccgtctaagtggtgaaatgcatgtagattggctttcagagaaagactaccaaagcgcacatgc

SEQ ID NO: 19185 - DNA, 1687 bp, Arabidopsis thaliana
attcaaataccactgacttcttggagctactttccccacaaaaccaactccagcttccacaggtacgagatcaaacccatatgatctaccatttgctgtcttgaacactacgtaaaccgagtaatgagtcccttttgataacattccacaacttatctttccccgaacctcaaaccaacacacattacgcaactccgctactttctcaaacctgaattcacatatagacaagattaagtaaacaaactccaattgcacaaaatcagaaacagagtagtaagaacaaaaaagatgagatctttacttagattcaggaactgtaatccatttccaataagcaggagaatctccccaaatgatcgtcaattccatcgctgataacatataacacttcttcccactagctttctccacccaaaagctctgattttttcacaaaaatcaacacacaaaatcagataattatacgattataaacaaaaccctagtttcacattctcgaatcagattcaaattcgttacctttttgccattttcaaccaaaacagagttatcagcgagagataaaaagatctcctttttcgataaatgattcgctgattgaagaacaagagacgagtactccgacggaagaaacatctcccaaaccaaatccgattgcgccgcagatttcaccgatttcgaaaccgaagccacaacacaagcgtcccgaggactcgtatgtgaaatcaccttcgagatacaatcttccggcaatgcatcgaaacgcgacgctctcgtcacagaaatctcatcgttccggctacttcctcctcctccgccgccggaattcgaatcgccgccgtgaatttgttccattgttttcgaatctgaattttggaatcgtatcttatgaaacggtgtgttttgttatgtagtgagcgtggcaatgaagtggatatttatatccttcgtgattcgcgaaagacttagaggttaagattttaatgtgatatatcgataatacccttataagtgttaacgttttttgatgatagaatctcaaaagttttgcctttatctaatcaggcaaagcaagtgacttttgttacgtgtttaacttacctatgaagtctttgttacgcgacttgtgacgagatattcttctataaattatatatagaattatattccaaagtcaataacaattctatgtctttatcaagaccaagtacatgtaaatagatttagacttttagtcatgtaacattctatttctatagatttttctcaacactcctaagtaaagtcatacaaaagcatttttagatgataagaagaatataaaacacaaggatccaaaaaaactacttctatattacttcttctttctaagtaaaagtctacaaaagcattgtagatgataatataagaaaatttgttggagttttctcatttgagaatgatgacaataacactacaatccaaaaaaaaccgatcaaataacccaagttcacaaaacattacaatccaaaacataaaacaattcatgttacaatacaacaaagtttctcacttgcttagatatagaagtgatgaagcacaacatataccaaaatcatcgaaaccgggtagtactactttactggcttttcgtagggcggaattcgattccttgaatgatcaaccactcttccaagaaggggac

SEQ ID NO: 19186 - DNA, 1593 bp, Arabidopsis thaliana
acagaaaggctagcccagactgaagatcctacagaagatgactggtatgagatgagaaaaaatttaaatggcaaagcagagtcatagaaggattatcttcaagagtgatgaagctgaaaaatcaactatggatgtttgaaaaaagagttaaaaagtttttcaaatggtattgacccagagaagacggaaactgcactagccatcaagggggacaaaaatttcacaacagaatggtttgcaccagaagatcagaaaggagttcacttagaggaaagaagcctagagagcaagttgttgagtgaggaggaaacccctactctgacatattctccaagagtgcttaaacagcccactaacccctctactgaagaagaacacttgacacttggttctgttactgaagaacttctggaacacaggatagaatacaaagctcaagaggataccattggggagctatcttacaagatggaaggactgaccatgcgatcttggaacttcaagaaatggttaaaggctaccccagttttgaaaatgaggattggtcaaagtagcctggttcagaagaagaagactactctgctgatcagaaagaagtttatgttgaagaaaaatcaaatgaatactcatcctaccatatgtcaagagaggatgcagagtatgattcaggcactgaaaattcaaccactgaagatgaggacttctctgttcctctcttcaacctttttcctgactaagctctgtatgagtcaagcttagtgacttaaaacaagctaacttgggaggaagtcccatgtcaatccatgtatataactttctatttcccttgttatttttgatgtttttgtttaactgttttaggtttattttattgaccatgagatggtcaacggtcaagtaaattcaaaccaactcaagaaagatctcaaccgttgagcgactaattgtgggaaatcaccttcaccgtttgattgagtgatcaagggagaagcattcttcaccctttgatcaagtcttgcgcacatgctcgatcctttactcaagcttgaatgattcggcgaccaaggagtgaggtcgagtggcccacatgttccccctcacttcaattattcaacagacaaaccacttacccaggcccctcaccatttccaactagcttttactatccttccaaagagaatcccaagaccatcctcctccacccattgaaatcgacaaaccacttttgaaactctatctctttcatcatctcattttcgcaaactctctcacaaagcttcaaaagtttcattccaaactctccctatcactcttcacgaattcgttctcacttcaccatacttcaccaaagttactcgatcacttccaagtccatcctcaaattttcaatcggtttgtaagctcaatttccatcactaaaaagcgaatcctttccactttgatacctcttggagagttgtttttactgctttgttgaaattcccaccaatttgcatggattcaagaagaaagagttcatctcgggctagaagatcctctattgataatgaagaagttgaggcttttgacatgagtgacatgagtgaacgccaa

SEQ ID NO: 19187 - DNA, 554 bp, Arabidopsis thaliana
tggtcgttcgggtcacgagaaaaaggattgttggcaaattgtcggttttctcgagttggattgaacgtaatggcggggtcgtggttctaacacccgtggcagaggaggtcacagttctggtcgtggctgaggacaaccggtgacagctcacgcaacgagctctaatccatctaccttattagaattttcgcaagaccaattgcaagttctcgcatagatgatcaagggacaaatgggcaatccaagttatgataaactgtccggtaagacaaaatttggcaatgttattctcgatattggagcatctcatcacatgactgggcagctctctcttttgactaacattgttcctatacccccctactcgatgggatttgcggccggtagcaaaacctttgctttgaatatgggtgtgtccctctttcaaataaagtcgccctaactaatgttcttcatgtgcccaagttgatgtgtactttgatctccgtctcaaaaattgtgaaacaaaaaactgtattccacttttccaatcaatttgcgttttcaggccattt

SEQ ID NO: 19188 - DNA, 1840 bp, Arabidopsis thaliana
gtagagaacctgcgcacgtctggagcccatgtacggattaggtatttgggcctgataagcccgcttacctaatgaagggagataagcgaataacaacctaggaactgacaaggagatattcgcggagcggacatgatatctcagaactgacctgccgaatatccaggaaaatccctgcggatctcggatggagctacccacgtgcgtagagctatataaggaagcaaggacgacttggaagacatatacattcagcttaacactaacacctatacttttacacttgtaatctcattctacattgtaaaagttctactatcatcaatacaaaagtccattcgttcttagcaatataaatctcaaagttcttgtgtagatctagccctcctttcttataaatctatttacaaatctctagtgtggatttcagaacccacatttggcgccgtctttggggacggaaatagatccttccaacaccaaaactaataaatcaattgtgacaacgatcatggatcccagttcatccactttaacgagatctaacgtacctgcttagatcccaaatgataatgtcacggacgggcacctcccaacggatctccctttttaaattcaggccgatgctatccatgacactccttcgaccccccggccggcgtggcaaagacagtaccaggatcctcctcgagacctcgcggaaacgtatctttgttgctcccgaactcgtccaaaccaatcggcgttccctgctcatcgacattcatcggacgcaccactaacatctccgacacttccgggatatccagcttgctcaaagtgaagtccgacacctcctttaatgtgcacctcgcctccacatcatctatctccgcttgaaaccgaggtttctctacggttaggtcgacagcagccttcacgatttgatcgatcaaagccaagtttgactccacctcggctgcttgactttccagcacggtgaactccttcttggcgacccacttgtccttgatcccacttagcaacttcgaatacgaggcagccagttcaaccttagcatcgtgaaccgccttcttcgctccctgcgcagtggaagtcaggtccaacactcttttagagagcttgtccttcttttcattcaagcgatggatctggttcctcgctgtctgcttatctgcctccaatcccccgatcttaatttccatggctccaatcttctcagcataacctttttcgagatctttcgaaatggatagctccattttcaacttctcgttctccgcctgaaatcacaaccaggtcagaaccatcacatcatcggtaaaatataaacaaacaaatcataatcgaggcatacctagaacgagacctcacgttcctgaccagccttcacactcgctgtcagctcctgaatgagaatcttctcttcttcaagctcgtttgccgagggaaccttgctcagacgttgctcatagagagcaaccagcttgttcgtagcagctatcgcctaccaaaggcaaaacagagattagaactagcataaaaatggaagtagaaagaggcagttatcgattattacctggccctccttcgccatcatgtcggcataagcgccgcctcggccatattcttcacaccgggaacctggcagttgctccctttgatgtggcgaacgagattcgccaatccggcctcgtcctcaacgattggatgatcacgatcgtgagtgtaagaccagtggaagggcctgctttccgcagaccctcaccagagttggacgtctgtctcacttcttgagaccggttcagaccttgggaggaagacctgccccactcttgat

SEQ ID NO: 19189 - DNA, 1400 bp, Arabidopsis thaliana
cgggtcatgatgcttcaagtaaaatattgtttacttttattttcctcctttgtatccttcaaacaaatatttatgggaatttcatattgtctttgccttcaaaatgttcattttcgagatatatcataactcaaccgtataatagaataactcagccgctaagtaacataattcagatataactcaaccgtaaacccacataactcagtcgtaaagtaacataatttagatataacttagtcgttgagccacccacatagctcagtcgtaagtaacattggttagatataactcaaaagtaaaagcacataactcagttagtcgtaaaaccacataactcagccgtaacatgtaaaatgaccgaacctttcaacttccctatttatataactcagccgtaacatgtaaaatgaccgaaccttttgactttcctatttatataactcagccgtaacatgtaaaatgaccgaacattttgacttccatatttaaataactcagccgcaacatgtaaaacgacaagacattattgcaaataactcagctgggacgttaaagaaattgcaaatattacggtgcttagagtctacaatgtcacgaatacatatagcggttaccaaaaaagggaaagaagacacaacacatacaattcgtgcaaacaatactatgcacgacaagttttaacattgtgcccaacttctattcatcgagaacatccgtgttccttcctagggcgtttattctcaacagcgacttctagtgctgatttcatccttagtttcttgggccagtctggctggttcacaacaattggaggcaagcacggttggtcaattacaattacagggacatggacttttgtatctgaaggcatgattgcaccagcgtacgcattgacaaaataattgctcgtatagtaagcactgcactgggatatacgagacacacccatatgctctgcagctgcgattgaatggatgcatggtaatttttctttctcgaaaagatggaatgtgcatttttttgcatccacatttacaacatgcaaagatgttccataagttacttgtacgcggaaagcatcaatcgtttgtacatccataagtcttgacgttgtgacacgttcctattagtgagatgaaaaaaaaaaaaatacgttatggctgagttattctcattatgaccagtttatcattatttgaggactgagttatgcactagttatagctgagttacatgtaacagtttatcaacactacgtgtgagctgagtatgctgcgtgctcgcatcaactctccgttcagcaaaccatcttgtcatcatctgtcttatcgcttctaacagtcaagctatgggaagatttctggcttttgacagtgctcttttcattgattctgcta

SEQ ID NO: 19190 - DNA, 979 bp, Arabidopsis thaliana
catgtatatcataagttataatccggactctcatgtacaatgaagtcactctaataacaacaaatacaaagaataatgtttgatccaaaaaaacacaaatcatgctgtgttgcaaaggatcaaccatatctctatttggatttctagtagaagcttctctgaagagagacacaaagggaaaaaaaatgctatatatctttcatgcttctgtatggtggaattggattctacacatttgtaatgatcttccaagaaatctgtcttcttctttttcctatattgtacaagaaggctaaaaaaggtttgaatcaatgttgttgtatttgtgttcactgtgtttctttcttctatcttgaagcactcttcctccatctatctgactctcttgatttcaaaagttgctcaggctgagacttgttacatatgcaatctggttgtgggttcgcgtagaaattctcttctagccgagggaattcaccgggcagtctcgcatatggcgctccaatcctgttgttatgtaatctcttcacctctgatgaaaactcatcccatgacatgacaccttcgtctaaatgatctataagtcttacaaaatttagcctgccattcacaaacttcatatcagtaaacaaagttaaaggcagttgcaaaaagaagaataatgattgattcaaacctgtctggattgatagttttcttaaacccttcaaatcttcggtgcccttgtactgccttagccatattcccatcatatgtatatacaaaaacatcgctttcaagtgccacaatgtaatccagcgcacgtaaccggttctggtatggcttaaagggctctaactcttcctcagttgctaagtatgaatgagcaaagacgtttgggtactcttctcgaaaagcatccatactgtttcgtccatatatttcacagcaactatgtatacagtcgtcgaggatggatatcgattgcgttaagaaatat

SEQ ID NO: 19191 - DNA, 1075 bp, Arabidopsis thaliana
  unsure (1)..(1075): unsure at all n locations
ttagctcgggtatctccgaagtgaaggtgagatttgttgaaaatatgcccggttcatttcggatattaaagacgaatgatttcgtatacgagataaaacttagttttattgatttgattattatagagactgaacccgaagtgcgggctgcctacgtacccaaaggtagggatcaagtcttacgtagttcaaattacaaaagtgcattaaatgtaaaaacgtttgaggtgagcggcgttccacgctctgcgaactgttttgccttccatgtttatgagacaatctccgttccggactatgtgagtgattttgtaaggaccttcccagctgatccccaattttccggctcctttttccgctgtgttttgatggatccgacgtagaaccaaagttccaacatcgaatgatctgctccggacatttgaattataatattgagctgcggcgttatgatagttctgcatccgaactagcgctcgatttcggcgctcatcgatagtatcaatcacgtcgaccatcattttgttgttcgcagcttcattcttgggatttcggatcctcctcgtccttgggactttgatttcagcagggataactgcttccactccgtgaacgagagcgaaaggagtttcaacggtagctcttcttggagttgtgcggattgcccataatacgtttggcaactctcagaaccaagctcccttatattcacttagctttttcttgaggtttgaaatgatcgttttattcattgcctcggcctcaccattcccttgcggatagcgaggtgttgatcgattgaggcggatttgccattccgcgtaaaaagctttgaactgctcggagatgaactgaggcccattgtcggtaactatttcgtacggcaaaccgtgcctacagatgatttctttccaaatgaagtggcggacttgtacttgagttatataggagtaggctgcagcttcaacccacttcgagaagtaggaatctgactcctcgagttgaaacgtggagtggtcaacgatgtccatagaccatttcatgaacggtaaggggctgatacganagtgaaaag

SEQ ID NO: 19192 - DNA, 1790 bp, Arabidopsis thaliana
agaaaaaacagctttttttatttcatcaatggtgactggtcttgttaaatcattgttcatatccgattgtactcttttctgaaatccctgaaaaatgtttctgtaatctgactctgtagcaggctttgacgtgaaaaggttgtaaaaataatttgtggccgccgctgctatctgcgagtttcctcgtctataaactccatctttatctataattgagatgattctatttctggatcttcgggcttgtgttgatgtgtgaaagtacttagtgttgcgatctccagtagctaaccaggtttttctgctttttaattaccaaaagacttcctcttcataataggatgcattaagctcccttttaagccgttctttttctgccactgttgcattgcctgtagcgatagctctatccaaagcgaaccagatagtcctgattttctcttctcaattgtgcatgtggtatttcttccatctagagatttgttgtctacaggacgttagacaatgagagagtgactcttggcggggttttgtattccaaccttgaataaccgagtcacggaattcttccttatccatgtgtcgaccatcaaatctgaaaattcctcaatgatcttcacattcatcagcaatgtgagtaattaatggccggtgatccgattcaccaaactcaaggaactctgtttctgattggaaaaaaagcgaatgccaagcattgtttgccattgtgcggtctaggcagcataaaacatgatgatcaccctattttccaacccatgagaaacgatcactagtggatttaaggtctgagaaatcacaagtacgaaccatttgtctcatttgcatgatagacgctttcggcttgattctacctccttttttctcatgattgcctaacagttcattgaaatcacccagaatgaaccatggctgaccatttttgttgtttgctagtctttcaagacgttcccagagattgttacgatgacttgggtttggatgaccatagacaaaagacaaatttaaacccacttcattactttgaacataacaatctacaagattaggggaattgaaagaaatagaaacattaacagaagacttccaaagtacaactaaaccaccacttagacctgatggtggcaccattacaaagttactaaaacccaactcacagcacttgcctcgcacatagtcattgcgttgttttgttttggagatgcaaattatgtctcagagatatttgtgatttatctccttaaggcgtcgaaccgtcaagtctataccaagcctttgacagttccagcagagtatcctcatggaggatgagccacttccttcacctctctcacggacggttaccttctgattcccctggttctcattgacctctagcatgtcttctcgtttccacttaccacgatcattggtcacctcatcctcaggattgatcacaacttgagagtccataagagcaagaaggtgaatgggctctgaataagctgcgtagcttggattccctggatatcaccacaagagttctcaaatattggaacaggattaaagagctccctgtcattcttttcaccgatgaacatatcataatgttcatagtcaacaagagcatcatggtgaggatcaatatctgacagaacttcatcttctgcattaacaccgccattatcttcttccggaactccattagcatgagcatcaactgcctgattttcgccattttgattccagatctccatgtgctcaacatcatcaatctcacggagggatatctg

SEQ ID NO: 19193 - DNA, 1762 bp, Arabidopsis thaliana columbia
gtagtgaggctcctctcattccatctagggataagtttctctaagatcctttgttgaccttccagactctgttccagcaatgattctatcttgcttctaggtgcaggtggagggggggcttggtaagaagcaagatcatagttccttgtgaacctgaaactattgctattctaaagtggttgctgaaactgagaattctcagtgtagctggttggaccattcccataggaaactctatagccttgttggtgatcaaatctttgattcggaaaacctctgctacgaacataatcgacatcctccacaagttgattgtggaccgcgttaagcttagccatgatcccagcaatctcactctcgttcatgtttctcgtttggtcctggttctgtgattagacaaacacctgaaacacacaagaaaaagaaaagagaaaaactaagtaaataaaaaaaaaaaaaaaagcttagacaaaatcttaaatcctaatccaatggtgaattgtagagaacttcggcaacggcgccaaatttgatatatatcaaattgccataagaccactctctcaaataagaaatcaattgtagaacttaagggttgaattccacaaagctctcggatcacacaatagataaggttttgaattaagctaagtaagatagtaatgaaaataaaaagaaacaaaaggaagcaatagcagattgtgaggttgtaagacaagaaagtaaaacgttaggcttagggtattctcaggaaactattggttagtagatccagaaatagctaggttgttatcgaaccattcttaaactcaaactctaattatggaatccccggtggtgttccgcgaaactccctatgcctatagctaagaataactggagaagccgagagatctttaacctaaacatgcattctaaacgagttcagttgttcaccttagtagataggccaatttttattacacacctataaaccaggctcatcaaataatagatccaactacaaataacctatggtggggcatatctatttttctgtattcaagatctagttaattagatctagcattaagaataatcaaagatgaagaattatacagataacctaacaggggggcgatctacgaaaccatatgcatccctaatgagaaacctattcctaacaagcacactactcagacatattgattgaagcaaacaacatatttgatatagaaagcataaacacagcaaataagataaaggaaagaaagagatctcttcaatgtctttaaaactgaatgaatctctgaagaacaggggatgaatagcttatgtctctcaaaatagggtttgcaaaaagcttgataatagaaacttaggtctaaacaatgtataaaaaccttatgaaaagtcgagggactaataatgcaaataaggaagtcttctagagcaaatttcctcttctataaatttgaaagcgtcatggactttgtgcgccgaaaatggtgtcgatcgacaccaggagtgtgtcgattgacactctctccgattcctgaatccaaaattgtctttagctttcttttccttagcttttgctccaaaatgtctcctcatctccattgttgtctcattgcatagaatacctgaaaagacactaaaaagactcgagaaataacataaagactcaaaatcatatacctaaaacatagataaaatcagtgaaaatatggatatatcaagaatgattacaaatacttattctaataacacaagaatttaa

SEQ ID NO: 19194 - DNA, 1565 bp, Arabidopsis thaliana
atctcacatttgttatcactattgcatcatattaccatttttttatattatttctcatcatttgtcatcactttgcatgtttaggatagttttgcatgcatgttgcatatttgtgttgctttcaggatatttggagctattggcgagttaattggaagaagcggacctgatcatatcaaaccactcgacctacctagtcgagtacatggcttaacgacttcaacacaccacctgacaatcactcgatcacaccactcgaccccctggtcgagcatccccatcacaatcactcgatcactcactcgattacacgaccgagtcccaccatcatcacacactctacgatcactttaacaccaagccgagtaccaccatctcaatcactcgacttcttactcgacttccagctttagagtcttctccattccgtactcaaccaacactcaagcacaaggaagagaagaagactccagcttatcactcgacaaattactcgacaacctgggtcgagtaccgttcttaatccgtcccaatattgtgtcgttttgagtattagggtttcataatatttcgctatcagtaccatgtattttacattttcgtttacctaagttttattttccgcagacactgtgttcttgacgtttttgtaatccggatttctcttaatctattcagtattcagtatttgcttttgatttggtttaccaagttgttcatcctattatcatcctgctattactttgttgctatcatgttgataagtgtgtattttgcaagtttgagcataccatttgtcatcactttagcaccttatcatcagtgttttataccattctcatcatttgtcatcactttgcatgtttaggataggtttgcatgcatgttgcatatttgtgttgatttcaggtgatttagagctgttgacgagctaactggaagaagcggacctgatcatgtcaaaccactcgaccccgaggtcgagtagaagcttcaagacctcaacagaccactcgaccccctggtcgagtaggggagttccaatttcatctcatcactcgaccctctggccgagtaccaccacgagagatactcgatcacctcactcgaccacctggtcgagtgtattcacctccacaacctgaccagtcactcgatcacatcactcgacccccaggtcgagtgtcttcaccaccaccactcgactacatactctatggcgagcttcagagtcttcttcatttctgcattcaactagacactcgagcacaagattgtatagaatattccagcatttcactcgacctttcactcgaccatcagggtcgagtacagttcttaatccgtcccaatactgcgtcattttgagtattagagtttcagaatattttgctataataagcatgtactttacattttcgagaagaggtttttatctagttttattccgcagacactgtgttctagaccttttgtaatccggatttctctttatctactcagtattcagtatttgttcttgatttcgtttattgttgttcatcctgttatcgttttgctattat

SEQ ID NO: 19195 - DNA, 571 bp, Arabidopsis thaliana
tggaacctcatgaagcagaaacgtttgtgaacaagagaaccctttatgctcccattgagccatatagcagtggaaatttaaaggtttcagatgttcacactctctactgggagcaatcaggcaaacccgatggacacgtatgtaaaaccatcattgttattgaatcaaccatcatgtgttcaagtttctaacttttccattgtatgatgggaattaacatattgcagccggttgtttttcttcacggcgggccgggaggagggacggctcctagtaataggagattcttcgatccggagttttatcggattgttctgtttgatcaggtcggtttgtgaattttgtggacactttgaatacattgatccagcttgtatattcatctttaagtttttattgtcttgttttcttctagagaggtgcggggaagagtacaccgcatgcttgtttggaggaaaacaccacatgggaccttgtgaatgatattgaaaaactaagagaacatttgaaaatacctgaatggctggtgagagattttcttccagagatatggttcttgatgttgttgaga

SEQ ID NO: 19196 - DNA, 667 bp, Arabidopsis thaliana
tgttgatccaaaacacaggtaaaaccatggtagctcgagttctcgggaagctgcttaacacggttggaattttaccaactgataaggtaacagaagtacagcgtacagatttggtgggtgagtttgttggccatacaggaccaaagaccaggagaaaggtgaaaacactgttcataatcttctggttttacttgtgggtttggtttcaagaatctaaaactttcaatttctggacagatccaagaagctgagggaggaattctgtttgtggatgaagcatacagattgatcccgatgcaaaaggcggacgacaaggactacggtctagaagctctggaagaaatcatgtcagtcatggacacagggaaaattgtggtgatatttgcaggatacagcgagcccatgaagcgtgtgatcgcatcaaacgaagggttttgcagaagggtcacaaagtttttcaatttcagcgacttcagtgccaaggaactggcgcagatactacacatcaagatgaacaaccaaggagaggacactctgttctatggtttcagattgcatgagtcctgcactttgcaggagatagcgtcactgatagaggcagaaacaacggaaaagcagaggaaagagatgaatggaggattggtggacacgttacttgttaacgcga

SEQ ID NO: 19197 - DNA, 549 bp, Arabidopsis thaliana columbia
ggttagagcagcagggcatgtaggtgccattgtctcagcctcgtctcgctcttttcctcttcacccacttcctagccaaccactctcttccctcctctccctcttaattttttttccacttatttgcatgaggtacattttgtaaacatcattatttgcgttttttattgataggtggtatttgtttctgttttgtgtgtagttgttacgtattagaagacaaatatacatctttttcttttaatattaattaaaaataaagtagtacatggagatcaaacttgattggctgaaaatgttttccaaacctcttcgctcataaacaaatctctagagtccccattccctacaaatatacaacaaacaacaacaacaaaaagaagttatataacataacgttgaaccatgtgaattagaaactaggagaaagatttaaaacaacatacttagctttatcaccaaaccagtggtagacggatttgacggtagaggagacggagtccacgacaggacgggcatgttcatcgaagaatttggtaaagtcggttg

SEQ ID NO: 19198 - DNA, 1158 bp, Arabidopsis thaliana
tgtggaactggaaaacgacaaaattttgaagccgtgggataaatagattggactaggtgtccaaatgatttcttcgaccacattaaaatattcaagaagatcaaactagtgagatcacgtctaatttgtttttgcgatatgattgaaccgaataacacgtgaaattaatgtcgatttagtcatatgatgcaactaatcaaacactattgacgttgctttatatttttttgaaatttttaggtatcatggaaaaggagagagatttgtgctgtcgagtgggagagaccatgcgctagtgaacaaagcgtcggactttttgaaagagcatttacaaattccaccgttttggcgtcaagacgcgaataaaggaatggttcggaacagtgaaggtcgttggattcaagccgagcgtctccgttttgaggatcatcattctcctgatatccaccaccatctctctcagctccgtcttgatcatccttgttaatcacacgcacatatatataatatacacattttccctaatttgtaaatgacgcatccatcttttgaaaataaaatgtcacaatcatctcacttgcatgctttggtcaacgtacgttccctattaataaaacttattacgtttacgaggcgattgggttggttacttgggttaatcaaatgcaacgactaaattaagtattttcattgggaaagattggttttgatcttgcatttgaaattttcacctattatatataccccatccttttcactttcgtttctcattcacacaaaatcttaaaaatttctaaagagtgaaactaagaactactatttcaaagaatgggaggaaaaggcggtagcggtagcggtggaggaggaaaaggtggtggtggtggtggcagtggaggaggaagaggcggcggcggcggtggaggagcgaaaggtggttgcggtggaggagggaaaagcggtggtggtgggggcggaggtggctacatggtagcaccagggagcaatagatcttcttacatttcaagagataactttgagagtgatcctaaaggttactttgataatttgcatggtagtggacagggtaacaagtgaagtgaatttgatctgtaatgaatagctatgccatggagatggttattattaccaaatctagta

SEQ ID NO: 19199 - DNA, 369 bp, Arabidopsis thaliana columbia
cggagctgtacggagcattgggtggtggtggcagggagacagaagaagccggggtggacgtaacgccggggtgagaatggtgaagccaagaagacatttcgtcttccagaatgaaaagattctgatgatggaggggaggtgaaggctgtggaagtggaagcggggcatttaattctccgttgccgcttccgctaccacgaagaatgggtggtggaggaagagatggtggtgtattggaggagggtctctgtgtttgactggttctaacgacttggccactcttccataagagctccactatatcatcttcacccctagtctcaaaccaagtccttaatcatcaaacatgtcgagataaaacttgcaagt

SEQ ID NO: 19200 - DNA, 606 bp, Arabidopsis thaliana
taacggttgccagtgtgctctaaaggatgtcgttagatgaacacgatgcccagaagaagaccgctgacaactcggccgcgctggagccgcaagcctctgagcgacctacaccaaccgcccctgccgcccccgcagctgctcctcttccaccccagatcgaagacttcgatacattgattagcaaggacgttgggaatttcgtgcaactgggacagaagattggaggtctcgtcgcagagcaggtatgatgccaggtgtcataatagttgctgaatgccttgctcatttgtttttaagtccaacgctgtccttgaagccttcaaggcggacggcacttacctctatgtctcgaccaaggcgaagaagccagaaatccagcctccggagcttatgaccggactccacacggcatccgatgccatcaacaatcttcgggagtctaacagggcatcgcctcttattgaccatctgagtgccgttgccgaagtatcgttgccctgggctggttttttgatccaaacctgccgatttcgtcagcgagatgctcggaggtattcagtactacggtaacaaggtgctgaaggaatacaaagagaagtatgcgtt

SEQ ID NO: 19201 - DNA, 1962 bp, Arabidopsis thaliana
cccacttattcccccaacactcctttactcgatggacaaagaaattacccatgctcctcaccatttccaatcaacgtttctatctcttccaaaaacaaaccaaagaccattctcctccacccattgaattgaattcgccaaacccttttgaaactctctctttcatcatctcatttttgcaattctctatctctcacaaagcttcaaaagtttcatcccaaactctccctatcactcttcaagaattcgttctcaccttcaccaatacttcaccaaagttactcgatcactcccaagtctatcctcacacatttaatcggttttaagcacaaaatttcatcaccaaagaaaccgaatccattccactttgataccccttggagagttgttcttgtttgccctgttgaagctcaccaccaatctccatggattcaaggagaaagagttcatctcggggtagaagatcctccgttgataacgaagaagttgaggcgtttgacatgagtggcatgactgaacgccaaatttgccaagatcgttgtgctcaaagatcaagcttgattctaggtggaagctcaagccgctcagccatgttaagagaagaagtagctcggggaaagagggttgttgaggttgaggaagtacaccgtgaagaggcagtcttcgaagaagcggtcatgaggaagaggttgagatcatcggggatgatacactagccccggttggcaaaagaaaccgaccaaggaggaagagagagccaaccccaagtgagtactatcaatacttgaaggagttaaagtttgagcttggtatttgtggtgatgtggaatacttcatggaattggccaatcttgcaacgttcatgagctgccaatgtggaggatttaaagaggagagctgccaactcctttcaaccctcaaggttcacttttgtgttgatgattcggagaaagaagaaagaggagggcttggttacataaatttcaaggttgggggtgtcgagcttgatattagccaccttgataccatttttgggtttccaagtggagaaagaatccgccaagactatgaccaagatgagataaaatctctttggacaacaattgccggtccaaagccctactcgcccgccaagagcaagagttcttcaattcgaagtctcgtgattagatacctccaccaatgtatcgccattacccttttcccaaagaagactaccagattcgtttatgaaggagagctattcatgattgctcaagctttggtcttcattctgagagagaccgaggatgggaggaagatggcgggtgatagagtagacacttcgttgactgtcgttcttttggaccacctactgagctatagagagtatgttgcaaccatccatctctcggggatttgcggaagtctttgtgttggtggtctcttaacaccaatcttaggagcttcaaggatacaatttggaacccctgacgtgttccccaagttcatcgacctcaactatctcaaggggaaggattttcttgaaaagaagactccggcggatcattatatcttcaagttcaaccatccaaagcttggaccttctttgttacctctaccttgcgagaaccggacttcattgaagacaaggcacaacatcaacttcatgccatctccctcttccctgaacatcgacatcgaaggagctagagaagatgaacaagagtatactcaagctgactatgagcaacaagaatattatactcaagctgactatgagcagcaagtcgagttcgagcaacttagcgaacaaccggagcaagagaccaaagaattcaagcaagctcattatgaagcagatgctgatcaaggaggagatgagataactgaagtttacaagaagctctgtgtgcttgaagagcttgggaaccttcacagcaaaacgatgaagggttcaagaagaagatgagaaccatgaag

SEQ ID NO: 19202 - DNA, 1478 bp, Arabidopsis thaliana columbia
caagtgtcaattttatcgatctgcaagatgacagggcagaaaaagaaggcgaggaagagcgtcagaccttcctcctcctccgctgtccctcaccaccgccagcgcttctccaccgccgccagtctcctcccatcccaaccggaatcccaagctgcagcccctcaacctcctgttcatcgatttccgtggccaaagcttccaaatgagagaattccttctcaaagggtttgggagaaagatgtcaacaaggaattcactaaaggtgactattcaattgccctttttctccatattgggatgattatgatactctgttctataatgcctggatgagtgtagaaattttacctactcggtttgtggatttcggtttgatgtagtgtttgcagatagagaaatctgttttaggactgctagatgacataggtttggaaaccatctgttgtaggttgtactttttgtatcctgagctggttaaacaattcatggcttctgttagggtatcttatgtgaatgacaggaaacacaacgctcaggaaggagctcttatcttcttcattcgcggtgtcagatacagtttaccagtgcgagatttgtgtgacatctatgggtttgacaatgatatcactggagtttccctgcctggtcagtttaaggattctcagattttctggagctggtttggtaatggaatctatgattccaaggacgcagtacactcagagatccgtcaccctgttctgggatattttgttaggctgattagtagcacactgttgtgcaagatggagcctggcaagatgagactttctgagttgttattgctctataatgctcttcatgacttctttctagacaaccttggatttgagcaggttgaccgtaatgtcaactttggggctgtgttcgctcatcactttgtttctctcaagaccaagccctttataggtagaggacagaaatctgagagagttggcagtcttctcactcccatattcaagcatttctgcatcaactttaagggcgaagaagtcaacaccacgtgtgtcattatggatgaggcttaccggaagaactctcactcgcttaaaggcaacttaatgtggtgcttcagagatgatacatgtcagcacatgattcggttacctcgccctgcacttacagagattacaggagagcatgaggagataggctttcatcctgatccttctcttctgcatgccaaaccacgcacaaggcgacagagagtttcagcttcaggatctgcgcctacacaaaccgaggacgagttcattgaccctgctgggagtccgaacgttggatcttcctcatccgctcttccatatcagttgccttctcctccacccatcccattggagcaacaggtctttcagcagtacgcgtcgacaatttcaagaggtcgagaacgccatagctacactttctcgctgcgattgtgttgctcccactcgtcgtcg

SEQ ID NO: 19203 - DNA, 1220 bp, Arabidopsis thaliana
tctggtgttttggctctcagtccccgctttcaaacctcacttccagcttgttcttgattgtttgcttgagggcaagcaaagactaagtttgggggagatgataagtgtgtattttgcatgttttgagcatccatttgtcatcattttagcatcatatcatcactgttttataccatttcacatcatttgtcatcactttgcatgtttaggatagtttttcatgcatgttgcatatttgcgttgatttcaggtgatttggagctgttgacgagctatctggaagaagcggacctgatcacgacaaaccactcgaccaagaggtcgagtaggagcttcaagatctcaagagaccactcgacccccatgtcgagcaaaggacatcaccacttcacttcaccactcgaccacgaggtcgagtgccttcacctccatcatcagaccaccactcgacctcgtcactcaacctagaagtcgagtatcttctgacaccactcgatcacatcactcgacccccaggtcgagtgccttcaccttcactgccagaccactactcgacctcatcattctacctagaggtcgagtatcgccatcacaccactcgactgcatactcgatcacaagcttcagagccttcttcattccgcacttaaccagacactcgagcacaaggaagaaaagaagactccagttattcactcgacctctcactcgaccagatgggtcgagtacagttcttaacccgtcccaatacttcgtcgttttgagtattagggtttcgggatatttggctataagtagcatgtacttcacattttcgcaaaagaagtttttacctagttttatttccgcagaacttgtgttctagactttttgtaatccagatttctctttatctattcagtattcagtatactgttgttcattctgttatcatcctgctgttacactgctgttatcatgtcttcaacctgttcaacgtttatgctttctgttatgatgtctgagtagtgaataggtttctgaggatgggttagagtagtgtagaattctcagtatgctaggtgattgagtattgattgataaatcccttctcaattagttgttcttaatgcctattgctttctgatcaactggaatttgagcccagacatttccgcgcccaaaaggtgttcgatgaaatgtttgaacactaatccagagatcgtgacctgtacaaggta

SEQ ID NO: 19204 - DNA, 1461 bp, Arabidopsis thaliana columbia
ttccaaaaaaccctaaacccactactaactttccgagacctattaatacttgttttagacacgaaaagagttgtgctcttcatgcatctcccttgtgccttcaccgagaagcttagaagcacaagaaccatttgtctcttggatctaaagctccaaagacaccaaatccctactttctactctttgtttcttatagatctattaaggtgaattcttacatcttgtattcgacaattagagaaataatctctaaaccctattgataaggttcaaattaccttaagaactactctctcaaacaagagatcaattgcagtatttaaggatcgatttccacaaagttcttttgttcacacaatgaattcaatatcaagattaagctagcagggaatgattgattggttataaacgatgaaataaagagctaggaacaaggtgttctcaggaaactattggttagtagatctaattaaagctaggttgttatcgaactattcttaaactcaaactctaattatgaaataaccagtggtgttccgcaaaactccatatgcctatagctaagaataactggagaagccgaaagatctttaacctgaacatgcattctaaacgagttcaattgttcaccttagtagataggccgattcatattacacacctataaacccggctcatcaaataatagatccaactacagatacctatggtgggcatatctattgtctggattcaagttctaggtgatcgatctagatctagcattaagaacaattaaagatgaagaattctaccgataacctagtaggggcgatctactaaaccatatgaatccctaatgagaaaccctaaacctaacaagtggattactcagacatgatcaaagaaacacaactcatagtctgaataagaaatcaataatagcaagagaaagagtaaagaagatcttctccaaagggagtctccatagggttttgctcccaaagtacaaaagagataaggagattagcctctctaagcttaggtctaaacaatgaccttaaaaactatatatatgacctaaaaacgtgatgggccttctttagaaataagggaaagttctcggccgaatttggaaatcttcaaaacatcaataagttgcgtcttcgaatcgccatcaggtattggtgtctcttgacaccaggggtggtgtcgttcgacacctacgcggattttggtctgcgaattgcttctgcaacttaagttgtctgttttgctccagaatgctccataatctccaaatgcctgccaagcatgtaaagacctgaaaaagactataaaagactctatagaaaagactctataaataacaaaaggactctaaaacctataccttaatcatagctaaaagcagtaaaaatagagttatatcagtcaccacaaaacctaattcccttcattcctcaacctctttcgcattga

SEQ ID NO: 19205 - DNA, 1746 bp, Arabidopsis thaliana
aatctcgacgaagtatccgatcttacctcgaccgactcgacttacaggacgcaagaactgccgaacgcatcaacgcgattgtcgctgcccaaaaggcctcgcagaatcagatctagcaactccagtcctctgcagctcgcgccggtcgacaacttagcgatgccgttacagtaccgccccagcgaactgcaatcgcagaaagaccggcgaaccgacgcaacaggcatgcttccatcgtcgttgggtctatcgacgagcacacccgtgaaaatgcgccgaaccgtgacaaccagccaaacatcgacactcggacacgccgaatagaagatgacgatatcggtgcgcgcgatcgagagctctaaaaattacaaattactatgaaggatataactctgctctgcaccagagttagacctttcttcaactggatcaactaacatgatgcaaggacggccgagcacctcaacataaccgttgaaagagtagggaatcaagcatacccctcaagccgacccggttactcacctgcacctgctatcttccttcaaaggctgccaagacagactattccaatctcgataaaactgcaaccaagaggacttacctggacaaactcgtcttaaacgacctcaatccgactcgatagccaccatctccttcgtccagctcgttgcctagccgccagttcgtcgaattgcagcaagctcgtcgccaagtagccagctcatcgcctagaagctagctcgtcgcttagctgatagatcgtcgcctagtagccagctcgtcgtccaactgatcgttcgtcgcctagcagccaactcgtcacttaccagccagctcgtcgcctaactgatagctcgtcgtctagctgcctagtttgcctaaccgccagctcatctcaaaacggcgtaactgctgagcttcaacgtcatgagaatctcgtccatctcatagcacacatagtcttatgcttgctaattagctcgtcaatccgatatacatgcccgtcaacgctgatctcgtcaatttgacagttcgtgctcaccaactatcaggtcgtcaacccgagaattcctattcgtcaactgtcagctcgtctatccaaaagttcctgctcgtcgaatgttaaatcgtcaaccccgacagttcgtgctcatcaactgtcagctcgttaatccgatagttccagctcatcgactgtcagctcgtcaatccaaaagtttcttctcgtcaacagtcaactactcaatctaccagttcttgctcgtcaaatgccagctcgtccaactaccacatcgggctcgtcttcaagcttttcacatctcctcagcaactatctcctcgtatacatatcggttcgttacttaattgcaaagctcgtccagctcgtctagctcgccgacccagttaagaagcaatgccaaccttagaagaagtcttaccgaccaagtcaagtaacctcatcgaccttttactcggagaacttgcgatcgagtaacttaaagaccacaccaatcaggtgcaagaggccttgccgactcgaccaactagtcgacccgacgacttgaagttgctccaaccttgggaagtaatagcgtaaaaccagtcaaaaggtctcaccgaccagagaagaagtcttgtcgacaaggcgccaaacacaaaaatctttgaagtacaaactcattggagcaacgacaatcggcaatatcacatggccaaacatctcaaaagaaagagggaaagatt

SEQ ID NO: 19206 - DNA, 2085 bp, Arabidopsis thaliana
tatcagagatagagtagataacaccagtatcaagcagtttcaaaatttcttttttcactatttctttcaaattgggatttaacctcctctatggttcaatgctagaataggattcgttttcaagatggatcctatggttgcataaagtaggtgaaattcccttaatgtcggataatgaataaccaatcgctctcctatactttctaagctcaaataatagcaggttcacttcatcactatttaactcagcattaatgatcacagggtaagtatagtttggaccaaagaatgcgtaccttagacctttaggaagtggtttgagatcaaccttcggtgctttaagttcagaccagtcatctgaagttggaatgatcggctccccagattcgttggcagacaaggtcgagtggctggtcgagtacgtcctcgagagtgcaggttgaactcgtattgacccttcttcgctcataaccattacctccgttgccggtccatccaattcctcaaagggttctgattcttccagcgctttatgggagtctaacagcgtctggtatcccaaagtttccaaatgtagaaatccatcttcgccacttttggttaaagcactgttaagatgatcttcttctgccagctcttcctgtaactcatcagctaactgatccatttcttcaatccaaaagagttgcccttctatggtaggcttcttcattgcgtcttcgatgtcaaaggtcatcctaaagtctttgccaagatttagatcaatcttccctttcttgacatcaatcatagctcctgcagttgctaagaaaggtctccatagaatcaaagggtccttgagctcttcatccatctccaggactacaaagtcagttggtatctcgacagctctaatcctgattggtaggttttcgagtaaaccatgagggattcttacagtcctgtccgcaaggataagggatatgttgcaggatttgtattgagtgaaccccaatcttttggcaatagagagcggcatgagactgactgacgctcctaaatcacatgggcattagttgaaagccaatggacctaaagagcatggtagagtgaatgaaccaggatcactaagcttcttaggaatgatcttcttctgtatgatagcactgtattcatgactcaatactaccatcccttgcattttttgaattctctccatgatcaagtctttcagaaacttgtgagaatccgggattagtgctagagcgtcaacaagaggtatccgcaactcaacttccttgatgttcttggcaaacatagctctatacttatttgccagtgctttcttgtgacggccaggaaatggaagctgttgtttgtaaggaggaggaacaaagaccttttctttgttcgtgacagtaacttgttttggagcagttggtgatgttagtgggaatggtggtcgagtaacgtggtctagtggatgctcgagtggttggtcaagtgactggtcgagtgcctgctcgagttgtttttcgacttgatctttactgagactgatatcctccccatcattatcttcactgtcctcagtgactgttttaggttcctctctgattggaagtgcttttccattatgatgggtgataccatgagcatcagcataatcttttggattctgaatcgcttttcttggaagttggcttgtctgtttctgagcggaagtagatgtagaatatccctccaaggatcggactttggaattcagtgtctccaccttgacatttatatcattgtagctacagtccagcttattgtgtaattcagatatcttcttaacaatctccatggagccagatgcttgtccttggagtagctgttgtagcatttgtttcatgtcagtatcaagagcagaaggaccttggtgttgccgaggtgcaaacccaagtggtggttgcggctggtagttcttctgaaatggctgcttaggagcaaagccttggttgtagggaacaaagggtttgctctcaccatgcacttgttgtggaggatacacttcgatcctgatggattagcaacattggtgcctcggtaagagaggttggg

SEQ ID NO: 19207 - DNA, 956 bp, Arabidopsis thaliana
cttttactcaactgatggcctagagatcgagtatagtggtcgagtatgagtgatgtttaaaaacctaaaaaattttaatcatcattttactcgaacaagagaagctacaaagtcttccagggagtctttcaagtttacagaggattgcaggatttcctggagtttttctagtgaacagagaatacagagaagagacaagaagacaacgagggacccgccgctgacgcccatgtcttccatgcaagagaccaagagacatggaatctcttcactcccactcgatcaccacgcaaccccaccttcactcgatatcacctccatcactcgaccttgttttctcctccataaccaaataaactcgaccccatccttcttaaatcaacgctccctttttcttcttctactcgacctcgacgccatcaccatccccacacctattaaactcgaccccattccccttattcatcacaaccaacaaacccatcctcatcaaagccaggcacacgaccgcttctcactcgcctcttcaccaccgtctcgagctaccactcgaccgctcctcgccatctctttcaagatcgtctctcatcaccaaacactcgacttcgtcattccccaacatcaacaacgtcactcgactccttatcaccatcgttctctcatctctcgagtccagccatcactcgataacaccaccgtttcatctcttccgcgagctcaagttcactcgaccgctcctctccttcctttcaaagccactttacttcgccattacacaccgcctctctatctcattatcactcgatctctagaatcaccaccgcagctcgtctcaaacccactagttactcgaccgcggctccttcacagcttcatcgctctcaccgccatctctcaacatactcgaccttgcgtagtcactcgatctcgccgcttctcaacgcctctccatcgtt

SEQ ID NO: 19208 - DNA, 1403 bp, Arabidopsis thaliana
actctatgactcagattatcacttcctgtttactagaaactattctggctttttttctctatcaataggcaaatagttttcgatgttttcaatgtatttcattggttgcagtcagttgcagtgtgctacaatgaatgttgaaaatggtttcagtttttgttatgccttcgattcctggtaatgctttagatgacctctaacaattagcttgatgttctgtcgttcatggagtaggaagcatactatttttgctcctttcaattgcaagttttgtagtagtcagagctatcaaaggctgacttgatatatgaatagcatgactcgagaatcgagatgtgttggttgtggtgtgctttattttctcatcaatggactcctgacgtatacgaaagagttttgttctgatgattgtttcaaatcctggaaaaagttggattctttcatggttaatttagtggagtatctctataactatttcaggtatatgcacttggagggtttcttgtcctgaagtgggcctgggcaagatggaatgaaaggaacgagagaagtgacaaaaaggaggcgacgggtgatgatgatcagaaagatgatgatgaggatgatcaatcatctgatgggcatgaagactagtcatattacttgaacacgatgaaaatgttacccactttggttctgtatagcaaaaacaccataaacttcaaaatgaagatttcttattttccattgtatgtacttgaatcttgagtctcatctccttatctaaggggactcgaaatctcttctcatgctggcaagaagttttttttttcttactggacaaatctcttgttgttgctgtgcagtgtctctttagttcgtgacttgtagttagatcattgctagttaagtttcaagagatttgtcatgttaaatatcataaaccgaacaaatgaacacacaaacattatcaacaaatgggatttcaacaaacggtcctataatgaccaagttatgaatcacatacataacttttgcctcttctatacagtattttgacgttacacaaagctgatattagtctacagtgtatataacaaccaccacactctacaaagatccaacaatcatatcacggcttcacaaggatcaacagaatcattctcgcctaaataagccatcatctgaaccactagtagtagacagccaaacgggcgtgtctgctacggagtcgaatacaatactctactgcttagaactcaatcaggatacaagctccgagtaggtgtcacaggggtattatatatacttgacgatacttggttaccttcaaaaccacgatgttctaccatgagattgcactgcctgaaactcttggtatgcctatattaagtctgaatcctggaacatctaccatcggtgga

SEQ ID NO: 19209 - DNA, 869 bp, Arabidopsis thaliana
gcaagtgcaccaaaaccattagaaggagaggattcatatgtcagagagatgtatctgaagggacggaagtatttcctctatgttcacaggtttgtcacctcttacgtctctcaaagagcgaggcagttttaggctattctatgtcatctgtatatcttctagacactgtactagttagatatttggtcttccttccatgctagcacacatttttattaattcaaaatctttaatgtgaggtgttattggcttttttcgtgcttgtagttacctacattacggattactggccgctcgagcgaatggttttgtaagtttctgaagattcagagaacccctgcatcgtggcaggctatgatggtaagagattattgttttgtcatgagagctgttttttttttcttaaactagagttctctgaaattctcctcgtatgacacatgttttcattattgccattatcttcgccatccttttctagaaattctcttagcatattggatcaacagttttcgatttcatctaagatactttaaacactgtaggtatgtacaagtatggaggaaaagaatttaaagcccctgcttcacaatcgggtgcgagtcttgacgagtgccgaaggataaccatcaacgcactaaaagtgaatgatacactgtgtacacacatgaaatgcacattcggaggagtctggaatggtggtcgaggtggtggtcaaaagaatatgtttgttgcttcttttttcttcgatcgtgctgctgaggtaattcaaccaaaaacacagtttatcaaatctttcactcacaacaggtttctttgctagtctcggtataatggtgttaattattatgacacaggctggattcgtt

SEQ ID NO: 19210 - DNA, 1785 bp, Arabidopsis thaliana
cgagggtttacacacttgtatgaaccatttttgaatataatcataagaatatcaccatatgaatgatcctatattttacagctcttagattgaaatgtcttagctgcacaaacagatacacgaaagatgagtaacaccaaatctaaacattgttcaccaaaatcaaatacaagaacacttcattagttggagaacatatattcaaagagtaatggacggattcctatagctgacagtccgcaagtacgtgttcatatatgatattaagaagtagagatgtattcatgtaaaggagaaggcactttattatataccaaatcaaacaaaatccctagacccggttaatcaattgatggtttaatgtgggaaggatagaattgtccttttatcctccaaaaacaagagaatattacacgtaaaggcactattttgaaactttggccacaaataggcactttaaaagcattagtcactttaactcagtagaattacccctttaccctgaaatcgttagtttaacaaaacctaacaaatttagccggttttcggtttaattttttaatctcaatctctaaactaaaaccaatttgtgagaaacttctctttctcacccaatccttcacgacgattttacagtttcatttatctgggcagttaaaatcatcacaacgccgataacatcatctcgactccggcgatcatcccgacgagttttctaccgacaaagtcatttcctcgtccctctctcgtcgttatcgtcaacaaagctttcaatcggctgacattaattcgtcctctcccgtcgtcgtcgtcaacagttgttctcccgtcatcgtcttcattttcttgtctctcaatcgattcgtcgtctccggcgtgtgctagtaacttctactcggtcctcaaatgtaaggtattaatcttctccaatcattttatttgctccaattattcaatcgtgtgctaattttatttataatatccaacattgtgaagagctaataggtgaagacatgaatgctacgttaggtgatatttcaaaaatgttaatcacaagaccttatcttcttaccatagacttcggcttgcttatctcctcattgttgacggtgtcctcatatcctcaaaccaacctattacgtctacattaaaatatgtagagatgttggcagatttggagaagttccttaactgactgaggtctacataactgactgtctatacacatgtggataaatggtcaaagaaacatggataatatactttggattgacgtttattgttcatgtataaacttatgtattagtatgaaactatcatgtgagtctttagatgatcatggactggactgcttggacaatcattaatggacaaatatgtctttgatttgctgcgaatatgtttatagctcgataaaattgtatcaacatgtctatatacatgtggataaatggtcaaagaaacatggataatgtactttggattgatgtttatttgtaaatcttaatataaatgtcatccagtcatagtgaattatccaatcagacaaacgaattaatacagttatgttgtggatggattcatatggatacattaacaattatctttatctttcaacatgaaaagcgtttgatatggatacattaaccatatcgataatcttatctctatattgctgttgaatgttttagtggtttgtacatattatttgtttgttccatccatacaacatttttcaagtgcactacatttgatacagttacaatgcggagaaaataataattt

SEQ ID NO: 19211 - DNA, 659 bp, Arabidopsis thaliana
  unsure (1)..(659): unsure at all n locations
catgatttcttttcatcatgtcaatgatcattgaaaaaggaatcgatattcactaatcccagttgctccaagcaattgagattaggacacaagtagaaaaattaccgtgacagcaatggtcttatcttcgttatagagtggttgatctccagaagtggggtcaacgatagccaaacgctcatgagccaaataacaatcctcataacaatgtagaccactccagtcaggacctctatgcctcaatctacataacatttcaacagatagcatcatcagtttacccattcaatcaatatttgaccaaaacatctccacaagatagaaatcgagtaaaggctcttcatttaacaaaatcaaatcgttttaaccataaagttggaaacttttctcttccaaaacaatacccaataacctttagaacattgcgcacgcaaaaacaaaaccaaggagatcgaaaacaaagaattggatgagagacattaaatgtgtttgatttgagtatcctgcgagagagtttgatgatacgggaacgtttagcttgagagttatcgcgcagcctacacagcgagaacccacacatggtggtggtgcggcaataagagacacaacggcttcagagaaatggatgctgtgaaactanaaagatgactttataagat

SEQ ID NO: 19212 - DNA, 1616 bp, Arabidopsis thaliana
tataatttagtcccgaaaaatacagacgacgggacacgacaacatataagcaggtttgaatcttggaaaattttgtatacataacctatataaatactaatgttctggttgggttcaaaagccttttcaaaagttccattttttaaattcaaggacattttacataggacataagttgagtcataaaaaataatggttattttgtaaggttttttttttgattaaaacgcacatattaagaagttagttttttttcactaccaaatatcaattaatttaaaaccatgcaaccattcataaaacaatactattaaagaatataaataatcacaaaatattaaatacacttaaaatttacatataaatttacaaaacatctaattaattgaaacagaaaggaaaaggtaaaatatatcataaaatgagacatatatcctataaaacaaaaatgaggcatatgaagtaaataataagagacatgcatgtaagcattcggttaattaatcgagtcaaagatatatatcagtaaatacatatgtgtatatttctggaaaaagaatatatatattgagaaataagacaagatgaaaatggaaaatggtatgtataacaagaaaggagtgtgcgactcttgtgtctcgtccaaaagcagatccaaccacagccccaaaagaagcatgatggagcctcagcctcaccatctcctcatggattggaacaaagctaatgatcttctcacacaagaacacgcagcttttctcaatgatcctcaccatctcatgttagatccacctcccgaaaccctaattcacttggacgaagacgaagagtacgatgaagacatggatgcgatgaaggagatgcagtacatgatcgccgtcatgcagcccgtagacatcgaccctgccacggtccctaagccgaaccgccgtaacgtaaggataagcgacgatcctcagacggtggttgctcgtcggcgtcgggaaaggatcagcgagaagatccgaattctcaagaggatcgtgcctggtggtgcgaagatggacacagcttccatgctcgacgaagccatacgttacaccaagttcttgaaacggcaggtgaggattcttcagcctcactctcagattggagctcctatggctaacccctcttacctttgttattaccacaactcccaaccctgatgaactacacagaagctcgctagctagacatttggtgtcatcctctcaacctttttcatgttgatatattatatatagatgcataaagattcgatccaagattgtatgggtgttttaatattattattctaagatatatgatgtacaattgtgtaccaagtttctttatcttgatatcatatgcataaataattggtgaataaaaagaagatattgattgtaaacaaaaaaaagaagatattgattgttaattagggtttgatcattctgtatgaaagctttggcctgcaaattaattttcgatatatatatatatatatggagaatatatatcaaatacttttttaatttgactataatttgtatcaattatctgaatctgatgagtgtaggttatatatggattagcaaaaaagaaaacaaccatta

SEQ ID NO: 19213 - DNA, 1799 bp, Arabidopsis thaliana
gctaagtcactcactctttctctttactcaattaatttcgcactttgctacttctctctagatatctcaagattttactctcacttctctctagaattcccagaaattgaaccataatttcttactttctttccatacaaagcatttcaaaacctctcttaaagcttttgatcagttgaaaatttcaaattctcttctactttgacctactttcggttcttttgggtgattatctgcagtaactcaccacaagaccatggattctgaagaagcaagaagaagcaagaagaagagcctctactcgtgctgtagatagagggttgccatgatcaacaagaaatgtccggtttggaatcaggaagctgtgagtcctggttttactcggttgacaggccgagtacagtggctgagtatgactccagaatcttctgtgggtcgttctgctgctgccagggaggaagttgcaaggggaaagagggtttgggaggctgagccagctacaatagaggagtagcctatgttagagagggaagcatctgaggaagatgtagagattgctgaggaggtcttgccagttcttgtaagaaggagaatgaacaatccaaggaagaagaaagagcccaccattgaagagcactaccagtacctaatggagctgagttttgaagggacaagatatctccataggccaaccatacaagcattggggatctgtagggatgttgaatatctcatggagatgaccaagctagagacattcttttcctacaagtgcgagggatacaaggaggagagctgccagttcctagccaccttgaagctccacttccatgccgatgagagacagagaaagaactacataaaggggtggagtatatcacattcatggtgtatggaaatcactaatcccttgctattgggcagctagatgttgtattcaagttccctaccaagtatggaatccgccagaactttaacaaggaagagctccatgatttgtggttaacaatagccggtctgcttctctacaagtcagctagggctaagagttcagcaataaggagtcctgtgcttaggtatctccacctttgtattgcaaatgccttcttcccaaagaagacaaccggccatgttattgagggagagctgaagatgcttgatcttaccttatgcttcattttgggttacacaaagaagaaaatagagatggaaggggataggtctgatacatctctttcggtggtgttgatagatcatttgataagcttctgggaatatgcaaccggcattcttcaatccggttatggaggcagcttgtgtgctagaggagtgatcacacatattcttatagctgctggagtctctcttcatactctcaatgtcacagccaattacattgatatggagcatttgaggaaaaaaggcttcctggataggtcagctccagctgatcaatttcagttcaagtttaagcaccccaagctaggtctctctaggctagcacttccatgcaaggagtacaccacagttagaactggaaacaaaattgactttgatcctcctccatcaatcttagtcaatgtccatgtgcctttccacgacgagccaagcataaggagtgagtcacaagaagaagaagcggagttcaaccaagcggaagctgaacaggaagaacatactcgaccgagtatatttcagcaggccgagtatggccaggccgagtacgacctgtccgaattcagtcgagccgagcagtttgatgagaaggaggattcgtgtgaagctgcagcagaatagta

SEQ ID NO: 19214 - DNA, 982 bp, Arabidopsis thaliana
catataatcacatatctctccaagttcatcaaggtcagtctctaatttatattattttgtaactatttgattattttaggtatattttcagaaatatatagccacaagaaattgacaaataattaatacaagtaagaaaaaattgatcttcaaaactagactaagtgcatatatccagtactatacatatttaaatttgttaaccacacacatcgtgtttttgtccaaagttttaacgtaaacaatagtaagattttttgtttttcttagaaatatttctattaatttctgttaatctttttaatggaaatatctaatagaaagattcaaatttctatgcatgatgttacagaaaataatataaacacacacatacaagaactgaagaatgagcagacccggagattggaactgcaggtcatgcagccatctcaacttccagcgccgtgactcttgccagcgatgcggtgactctcgttccggccccggtggagttggtggcttagactttggtaatttcggtggcagagccatgtctgctttcggattcaccaccggctccgacgttcgtcccggtgattggtactgcaccgtgggaaactgcgggacacacaacttcgccagtcgctccacctgcttcaaatgcggcactttcaaggacgagaccggcgctggaggcggaggtggtggcatcggcggtccggccatgtttgacgccgacattatgcggtctagagtccccggtaacggtggtcgctctagctggaaatccggcgactggatttgcactaggtaccaaaatgaatatacttggttgatataactcgatttatgactataatatatagtttttatacgtacctatctaaaattttgattgataaagattataattgaacttgaaaacaggattggttgcaatgagcataactttgcaagcagaatggaatgcttacagtgcaatgcaccaagggacggggat

SEQ ID NO: 19215 - DNA, 580 bp, Arabidopsis thaliana
aaagcaatttcatcaacttaaaccaaaataattagaccggagctatgtggctttacctgtacgccaaggcttgttttataacctaacaaaaaccctagaggtaatccaaaagcgtagtaacaaaacaagtttatataagccaccggtgcttgccatcctcctcctactgcaactcctgatataactggttgtaaactgttgagaatcatcgttataccgagcaggtacgcaagatcagctaccgcctttctcatctcttcactctccgtaaaaatcacagcaaagtcatctcgtgttatcagaattacaattgcacacactactccaatgacgagagactctatcaccgttacgatcacggagtatttcgcagctcgtggatgtcccgatcctagctcattcgacaccctaacactgaaagaaacatatatataagtctaacgccttcttttagaagacacaaagattgcttttgctttttaccttatagctgcattgattcctatgaacaacattccttcccatccattaatgttcatactgagagaaagaaaagtgttatcagatatagaagaaaatg

SEQ ID NO: 19216 - DNA, 1299 bp, Arabidopsis thaliana
agaatagcccaaaaacgtaaataaaagaaaataaataaaaagaaaaatcatactagtgggttgcctcccactaagcgcttgtttatagtcaatagcttgactatgttgggtttctagaatcaggaggatcagatggtggcaagaaataccgcggagaaaaacctctcatcatccatggtggcgtataggcatttgccgtgtgaggtctacaaaggaagtgcggaacttcagcagtgcagaacagaggtatcggtggtctactccttttacctgcacaatcatcaaaaaaaagaacaagcactcgacgagaaactcgtggtttgcttaatcgtaaaacagtttttggaaatttgaaactcttattaatgaaatcaagaggtttaagaggaggagatgagtaccttagccgtttaggaggtggatcaaggagtagaggtgcagtgggtgacttgactatagtgcctggagtatcaacagtgaactcaacacaaaaactagctctaataaagaactctagctccgcctgtgtgggggtgtcgatcgacataggtggtggtgtcgatcgaatccatccctccagattgattctcagcaactaaatcatgacttgctttttgtagctgcccgcttgtaccatgaaccttatctatcttaacactagtgtctatagagtgctctacagagaatgcctgaccatctatggtgggtggcttcttcaacttgtccatgtcaagagtcataaccacatcacactcattcaaaacaattggaatttctgtagatatagagcaatcgagtacacaactacctggataggtggcattgattatttcagagataggcattgccagcttgtccttcatcgtccgtggagcatcacacatcagaagtgtaatgatttcggcattaagcaagcttgcctccttatcactgacaccattcaaaattaactcccagatatattcatgaagtatataccataggttcgtgtagtcaacataaggtaacttttctagaagcaaatcacacagcgcaaaacatctctcttcaaggatatgctgttcggtccgtatagccactagaatctcaacaaaatatggcgcagtccttgtccattgttcatgtgcactatcatttgttgttgacgctttggtgtcgagctcgctcgatttcgctccgtcaaacgttgaatcattgattgttcctgatgagtgtcggtcgacaccgaggtcatgtcagtcgagactgagacttggtgtcgagtggttctgtaaatcagtgtggcaagcaagcgtgatg

SEQ ID NO: 19217 - DNA, 1091 bp, Arabidopsis thaliana
ttttgtcctttatttactttacttttacctcctctgcttcacacaagttttgaataagagattctccacaaatatcctccacaaaagcctccatgttcttatccgaagatcctccttctctacccgcttccatcgctaaacgcttccatttctttgcgttttccctcaactccaccgacttctcctccatcacggcttccaaacacctcctgatctctcctctctccaccaaaccatccttgttctctcttaccctcacaccagtcttccaactttcttccagtagcttcgcgttcgtcggttgatccgaccacatcggaaacgccacaaccggaacgccaagaaccaaactctccagcgtcgagctccacccacaatgagtcacaaaacaacctacggctcggtgacttaaaacctctatctgcgaacaccacgacacaatcatcccaacctcttcaagctcgtgtctgaatccagctatcttctcaatctctgtctcttcttctccttctgttttcgtttctctgttggatttatcagttataacccacaaaaacggtcgtttcccttctatgagtgctctcgctagttcctctatctgtttcttggacaactcaaccattgttccaaaggaaacgtaaataacagaggactctgttttcgagtctagccaaagtgtataactactactttgatctttaactgatttgttggtgcttcctgagaaaatctccgtgggaagtaaaggaccaaccgccaccatatcgatattcgggaaagccgttaaggcctctggttccagcgaatcgaaagtgttgatgagaattttcggtttggtttcttttatgagaaactccatcatttcttgaaacgcatcgtatgcgcctttgtttgtgttggaaggtgtgaggaaagatggaagatctctgatttccagagaagacagattaggtaactcgaaaacggacttgtttcccatgaaatgagtgtaatagatgttgaaaaccaaagccggttggatccagagaagagcggagggaagttgaaatctacgtgctacttttggagcccgaattgagaagaatcgtgta

SEQ ID NO: 19218 - DNA, 1201 bp, Arabidopsis thaliana
ccaccatctctcttcctcacatactcgaccaaacaagaactcgcccctcactctgtttcactcgacctcaccatttgctacaacacaagctctcttcaccgctgaacacttatcacctgcaagctcatcatctcttcattcgagacatcactcgaccatagctctcttcgcctctccatcatcaccgcttgctccctctcttcaaggaaacaactcgacctcgccatttcactcactcgacctctgtcagcaagccgccttcaccacttctagctcataaccactcgaccaaggtgccatctcccaaatccattcatcactcgaccatcgcctcttcacttgatcgcgtctacacaccatctaccatcactgacctctttcaaaccgcttcactatctttcgcctctcaaggtcactcgatcgcaagcacactccattcacacaaccaaggaatcacttgacctcgagttcaccaaactggcaaagaaaaaaataaaaaaataaaagaaaaatattttttgtacactcgaccagttttctctgttggtttgtgtttttggttttgttgggactaacgtattaacgtttatctttaagttacatttgttttcaggtttcatcatgagtaactatagtggagaatcctcaatggatcctgattataatgtagatgaagctgagtcttggtccactagagcagagagagaaaaacacgtttacgagagtttcagagatgaatttgaacgttcgcagcacgacgtaatcagagaagagctgaaatcgccagaggaaagagagcgatgtgcgagtagatatgagatgatcgatgaggacatcgaaactgagtatgagccagagtcatggcgcaaggagacaaagctgctgaacaaacccgacgaggttacagtggaggagtatatccgattctttgagatgaatgacttctggggaacgaggtatccctgctattagactttaacctagttggggttactggaggacgtgcaacatctgttcgagaagtgtcatctggagacactcatgtcttacccttacgctgcctgtaaggagaagacaattgaatttctttccacactgcaagtggagatgtatgaggatctcacggactttgagctggataccatggggttagggttcttgacgttctcagtggctgaacagtggtatcagctttcgatta

SEQ ID NO: 19219 - DNA, 2148 bp, Arabidopsis thaliana
tcttcccaaaccttttcaagctctattgtaatcttatttttatttcatcttgtcttggttgctcttctttggttttctctttgtattacctaaactcattttatatgatatttacaagtttagcaaaaaaaacaaactatatacttaaatacagaaatcatacacattttagaatcatatactcttttctccaatttaccgattccatgggtatgtgatagctccactctatctagttatttctcgaattttgggcttagtctcataagcatcttatcttctttatttacacaaattcgtgaggcccaaagctctgtattcaaaagagaattaaatattattttattgtttcatgagatattatcacataaagtgaagcgtgatccactctacttttatcggttaccatcccaacaataccaaacccaacaattaagtcactttaattaagcattttagactgttctttatcctatcaaaatattaattctattttttaaagaggaaaaatgtcattaaaatcccgaactttgctaaaacattgatttaaatcccaaactttagttaaacgaaaaaaacatcgaacttttgttgtcttttctaataaatcttaaacttgtgttgaccgcgccattttagtcttgccgttatctgggttaacagacttaattgacagggttaattaggcgttaacagagacataatttgcaaacgacacagtttcggttttagtaaacgacgtcgttttatcaaaaagactgaacttccccaattcgatttgaaaaatcacgagccttaaaaaacaaaaattctcaattctcttttgtcgatcgaggaaggaaaattcgaaactgtaatgatgagaaagaagctgcctgctgatgtcgacccgcctcctcctgttgttgagccgcctcatgttgttgtcgagactccgtctgcttctatcgagcctacgtctgcttccatagagcctccgtctgttgcctacgagcctccgtctgttgctgagctacgacgtgcttctgtcgaggctcctgctattcacgagccttctactaggccgtctcattctgtcgttgacaataggagaagaaaaaaatcgaaacagaatggtaacaggttagatggtgacaatagaaggaaaaaatcgaaatccaaacaaaatggtaacgaatcagatggtgagggcttgagtgaaaatgactgtaatgttaccggtgatgatgatttcgatgaagttcactatgctgacgaagaagatggtaatcggttaggtgttactgaagaaaattgtgaagactttgaagcacactctggaccagcagctagagatgatggagatgtgagtgatgcggacagtggagacgatatttaacttatgtccaattactttgcagggtttagttaaagctatacacaaccggattccagcagctgaacatcgtcaatgtgctaagcacataatggacaactggaagagaaacagtcacgacatggaactccagcgtctgttctggaagattgcaaggagctacaccattggagaatatacagctaatctggaggaattaaagacttacaatccaggtgcagctgcttctctaatgaacactaaaccaatggaatggtctagagcatttttcagaattggaagctgctgcaatgataacttgaataatctcagtgaatccttcaaccggacaatccgacaagcaagaagaaaacctctactggatatgttggaggatataaggtctcagtgtatggtacgcaatgagaagaggtacattattgctggaaggtggaaaagcagattcacaaagagggcacatgaggagatagagaagatgattgcggggtctcaattttgtgaaagaagcatggcaaggcataataagcatgagatatcacattttggtagaaaatattctgtggatatgaatgacaatacatgtggttgcaggaagtggcaaatgacaggtataccttgtgttcatgcagcctctgttataattgggaaaaaaacagaaagtagaagactatgtgagtgactggtacacgacgaggatgtggcagctaacttacaatgatggtattgcgccggtccaagggcagttgttgtgcctagagtgaataggttaggtg

SEQ ID NO: 19220 - DNA, 1608 bp, Arabidopsis thaliana
acattttagtatgttactatatgataacattttataatttaaacggctctctatctctaattatcaatgttcaaaatcctaaataatgattagttaaaattaagaggtgtggtctgaaacatgcgccccacgtcccatcttccaaaaaaaggaagcaaaagaagaaagctccacaattttctcaaagccaaaatcactgtaacaattaccctttattgttttgcggctcgattagcttctccttcccttttgattctccccatctcaagagaggcccatttgatcctctctctttctctctctctcctctctaattctctattgccatcaagagaccaggaatggttcgtgcttcggaacaagaacaggaaacctataggagcaggctcttcaatttcaaatggaggaacaacgacaacaatagtgctacgagacacaacaagagtctcagcgtcgagaccggtttagatgaggctgccaccggatcccatgacgctgaaccattgaccattattcatcctagtcagggtcaccactttcaagatcggctgcggatgaagcagtcctcgccgccctcgccgcctcacaggctagagaaaggcagcttttggcagacatggagcagatgaaagagcgcttctccaagctgttgctgggagaggacaattccggtggaggcaaaggagtatcctcgtgtctcgccctttcaaacgcaatcacaaaccttgcaggttgctttaggaccctcttttgttattacacttagtttatattaaccagcaaccaatatctcatgtttatcttgttggtatagcttccgtgttcggagagcaacggcgcttggagccaatgcctgcagaaagaagagcaagatggagaaaagagattgattggcttctctccgtgaccgattacgtggttgagtttgctccatctcagcagaaaaataaagatgggaccaatatggaggttgtctatctgctgctgctgctgcattatatttcatttggtaacatacaatgattcccttattctgttggtattgatttaacagataatgaccacacgccaacgtactgacctccacatgaatatccccgcattgaagaaactggacgccatgctcatcgtaagacctctctctctctctctctcgttgaccaaatatcaaccctactttaataatttcatttaggatattcaaaagcatcctcttatcccccttttctacctaggattgtctagaaaatttcaaggaccaaagcgagttcagctatatctcaaaagactcccctgacttagacggtaagagaaacgacgaaaaatggtggattccgaccgtcaaagttccaccagatggtctatcagaagcttcaagaaggtttttgcagtaccagaaagattgtgtaaaccaagttctaaaggcagccatggccataaacgcacaggttttgttcgagatggagatacctgagagctacatcgactctctcccaaaggtaaaaaaaaaaaaagacaccaacaattgatgttattgattagaagagttgatgaagaataatactcacttgtttagtttgtaataaataattaaccagaccgggaggg

SEQ ID NO: 19221 - DNA, 1854 bp, Arabidopsis thaliana
cagtgtgctctataccggtaaagactaattttttgaagtttcattaaattatgattttattaatcagtagttttaatactcaacataaggggtataatttgtataagaaataacatcacatcaaattttgttgcaaattaagcacatttgttacatttgtcatagttgtacctttacaaaaccaagtttaatcaagttttacaaaaccagagagtacaaaaaacacgaatttagagacatacatagttctaccatttaaaaattaagtttaaccgagttttacaaaatctgaaagtacttaaaaacatgaatttagagccatacatagttctaccattagagaataaagtttaaccgagttttacaaaatctgaaagtacttaaaaacacgagtacattaatttccgcttgtgtattggccactcccctggctatcactttcgtggtttggaaaaaaccagctctccaagtttctgcctttcacacgcttattcttggggcgacgttctccaactgatgggtgtctagtttcttgaactcttccctttttaacaacatgaaccggaggatatgcaaacaattcttggatttcacttggaataacccactctgacttatgcggcaccggataaatggttctaacatatgccataacccacatctcaacaaagtaatattttgtgatcaaatcatataaacttttgacctcctcggatctatctttctgtttcaagtgagtcatcacagccgctattgagtgtacacaaggatacttgtccaagtcaaaacaacgacaataacaacttttattcctcaagtccaccacataggtcttaccatcgcgaccaatgacactatattgaagctcgtaggtgttaagctctatcaccggtaatttttgtgcaacttcacatgtttcatgtatctcgttctccacaaaaggaacaagtctatgtgcatttgatccacttaaggcttccttcctattattgcagctccattccgcaaatttcccaataattgcatctatcataggtaatagcgcataccctctcacatccctaaacacaccattcatagactcaaccgcattactagtgtcaatgttgtactttactcccggaaaatgacatcttgcccatttttccaaatcagtgttttcatcaagataggtggctaccttagggtgccttcttctaaactctgcatattcatgttcaaactcagacactgaacaaatggatgcaattcttctgaacgttttagcaaccccttctttgttgtatgcaactttcgttctcacattctgtgacaaatgatacacacagtttccatggtgagagctcgggtacacctcagccactgccttgatgaggctagaatttctgtcagacataaagaccaattccgaactgtctggtataacggttttgagagttttgaaaaaccacttccaagtaacatctttttcgccatcagctacagcaaacgctaagggataatggtgatgattcgggtcttgagctgtggcaaaaatgagcacacctttatatacagtcttcaaaaatgttgcatccacaataatcacttttctcatgactttaaatccttcaatggcagcccccaaagcaacaaataggtacttgaaccttttttcttcatctaataccacactagtctttgtgccaggattcaccttctctaacaaatacaaatattgataaaccatcttgaaactctcctcgggactagcacgaatatcactaacagctagttttccccctattagtagtcgagtatgacacagttgtccatgtttccctgaacaaggcaatgagacttttaggagttggg

SEQ ID NO: 19222 - DNA, 585 bp, Arabidopsis thaliana
ccttcaagagcttacatgcgagacgcaaaggcaatggctgctacaccagctgacgttatcgagcacccggatgcgtacgttttcgccgtggacatgcctggaatcaaaggagatgagattcaggtccagatagagaacgagaacgtgcttgtggtgagtggcaaaagacagagggacaacaaggagaatgaaggtgtgaagtttgtgaggatggagaggaggatggggaagtttatgaggaagtttcagttacctgataatgcagatttggagaagatctctgcggcttgtaatgacggtgtgttgaaagtgactattccgaaacttcctcctcctgagccaaagaaaccaaagactatacaagttcaagtcgcttgagtttgtttgtgatcgtgtttttgtgttttaatgaatgtaatcgataagcaactacctcttggtgttcgttgtaaaatgaaataaaaatagttttctctgttcatatttgtctttgtgttcaatcttcaaatcaatgaagtttttgctctcttgaaccatccatgcttatgaggcaaaaataggaccacaacaaaaaagacaccgaat

SEQ ID NO: 19223 - DNA, 2297 bp, Arabidopsis thaliana
agtaacgaccgcgatgtaaatgggctggataactcgtcaggattttgggatttcaagttttgtttttctttgaggtacttgtatctcttagtcagttagtcttaaccctggtgttcccttgctattgtagataattgcagttatgatgagtgactaagatgcaacaaccagttgatattttattcttgttccatgacatagtgcgattctcattgctcctgatttcggttgattatttgatagacaagtttttgctgtaacactacttccttgccttgttgattatccatcctattgtcaaatatttttcgaaagaggtaggccatattacctacgaagtttagcatcttatgaatgttaggagtgtatgctctcagttttgcttgcgaagaggttcccatgtttttgaagtgacatacagaaccagctgtattgtagtgtatagatcattaaggataagttttagtggaacaggatgatattgatatcttattacaggtaaaacaagcagcaacaagtggtaggtagataatacatgatagttagagcagtgagaaacactaactctccatgatttgttcaaattcttgaagtacacttaaaaattcgggtctcttttatctgctgaagctgagctgattaggccgcctctttgactgcgacacctccttgattgcaacagcctccttggcctcggtggcttcgctgctcttctccttggcaggttcctctttggcaggttcctccttggcaggttcttctgggactataaaagctgtgaccgggaaagtcctggacagtgtggtcggtgtcttgaacgtgatcttggtagggggtcctcggtatagatctcattgatagtgacccaaataagaagttccttggctttgactccagtgagcttcttgatttcccggtctcaacaatggctgtgacttcggttccataggagacaagcttatctatctctgtgaacttgtgagtgatgctcttcttctgcttcagccatacaacacctgactctctgtcatacccaacctcttctatatccttcaatggtaatagaccattgggcatagatatttccttgacgaaacactttgtcttctctctacatatctcatctccggtgtacatctctgccttagctctcacctcctctgtaaccaaacccatctctgtttctttgtatttagttttagctgtcttaaagctgaagttgtgttgtggagaggtaagggacttagcctagtgatatatagctgacgtgttgtgggtttgcccttggtttcctgatcttattacggagaatgccaccatgtttagaaattaaattgtatgtgaaatacactcggattgagaagatacctttgacttcatacaattttggcaaatttattagttttggtatcaaattgagaccaaccctattataaaataacggtaaaaaacatcactatcgaaaacgacgtgatcgattgttcttctactacaagaaatttgaaaaaccgacaagaccataatgtaaaatctaaactcttgattcttgaagatgaggtgcatgtaaaatcattaatggccatggttgggcaggtttatgggtacgtcttgtcagctctgtgttccagtttcgggttaaaccatatatctcttacatgatcgttcatatggctatcatcatcacaatattaatgatgatgattattgtgatgtggtgcatggccccgtccatataaatgcagtgcctatcatttcacattctctccacctgctaaccagtaaccgacggcctcctcaattattttttatatgattttaatcgaatagaacatctatttcttgggcgtttagtgttacgtgttaaggatgacatatactatttactgtatagtgcattatttatttcttctatcataaaagcaaccataaccaataaagactaaagttcacataactataagtgttccaactcctaacttattgattgtgatatgtgacctttctcgtagtaactcgatgtcttttggttttgctatttacaaattccacacttcagaatgcgtaagatttcttcaaaatgctttgatacattctatgagtcaaacgcaaggaacaggagtttacgtttgaattattatcaatgatgtttaattcaaaacaatcttcttgggttacggttcgtatgcaagcctttaaccttgcaaagagaaactggcgacgttcgcgcagagttatcatggcagtgattattcaacaatgtctctatgtgtttgatctcgttaggcattgaccctgtg

SEQ ID NO: 19224 - DNA, 432 bp, Arabidopsis thaliana
gcacgttccggcggcaggtaaaaatcgacaatttccgggaactgtttttgcagaatcggcacaaacacttcgttcagtgcgacacccagcaccgcgggctcatctggcggacgcccggtataggtggaatggtaaatcgcatcttcacgctgggtaatatgcgtcacggtaaataccgggaaactatcgacttcattatagtaaccggtgtggtcgccatacggcccttccggcgcagtttcgccttgttcgatatacccttccagcacaatctccgcactggcgggcacttcaagatcattggagatacacttcaccacttcggtcttggtgccacgtagcaatccggcaaacgcatactctgaaagcgtatccggaacgggagtgactgcaccgagaatcgtggcgggatcggcacccagcgccacagaa

SEQ ID NO: 19225 - DNA, 627 bp, Arabidopsis thaliana
atgttgctgttttctataagcttcataggattctggtaattcatattggcactaaaaaaggcaacacatagtatgacattagctaagaatctaacaaactagtttgtattcgtaataacaacaacatgttattgttactatacctcaacgtcatttaggaaaacgaatttccatccgtgaaggtgagcacgaaccgcaatgtccatatcctcgacggtagttctctcgagccaaccaccggaatcttccaaagctttgatcctccacacaccggctgtcccgttaaacccgaagaaattcaagaagacactattcacttgttgctcaacctcaaagtgaaaagccaagttaatattctgtaatcttgtcaacaagttctcttccttattcacaaaagaccacctagcttgaaccaatcctatttcctcattgtcctatcaatgaaaacacaactgatttagtatacaatcttttcttggatcaaattaaccaattattaccttaaaatgaggaatggtcttcttgaggaaatcaggtagaggttgaaaatctgcgtcgaaaatcgcaacgaattcgtagtctttaacataactacagttcatagcagacttaagattccagctttgt

SEQ ID NO: 19226 - DNA, 1006 bp, Arabidopsis thaliana columbia
tactgatcatattacttgtttggagacactctgtcgtagtaaccctgagctgcataacctgtcatggatgcaggctggtacatactctgccaagaatagaatgaggctatcagatacagggattcagatagagaagaagacttatcatacaaaactgacttccatatcataccgtgtaatgcgaattggagctagagttttgattcctagtcgcaggtacattgttgttagccttagaatatgaggatgcaactccactgccagaaacagacctctgcacatctgagaagttagagccatcgtgccatgacacaggagtgtaaaacccatcatagctatacctggggtcctgataaccagcagcaagaccacctccaagagcactgtttccatacagtgcactctgattcaatggtttaacaggagctgatccattcattcctttagggataccagcagatgcagagttggctgctttgtttgtagagagcttgctctgagtagaggcaggaacagacgaagcgaaaggcccactactggctgtgagaggaaaaggatactggtactgctgagcaccatacaactgtccatcaccaccaagttgtggagcagggcttgttgctggtgagtaaggaaaggcagcatacccggtatccctgcggataaacaagagatgcattctctccgtaagctccctggagtgattaccaaatgactaagtagggcaaaaggtaaaagagaggctaaatagtctggacacgagttgcttataagaaaatattaacgcacgtactgatgtcatatcaacactctcggaattggtataacctgtgtagtcatcccataacctgaaagattatacaaacggttgtgttatagatattacaataattctagacagtagaaggctgaagatatataaatgaaacttaattatcaccataatagtagggctgctgatacacattaggaacatagaaaacagaaggatcaaggcatcactggg

SEQ ID NO: 19227 - DNA, 547 bp, Arabidopsis thaliana
cagccattcctgtcttttatcctccgaccattctttgaagaaccaatacctaagtgcgtcgtgatggcatccaagacatcagagtgtctttcagattcttgacggatatcaagtttcacaagagcaaggccaaatgttgacacttggcgtaagaaatcaagcaggcttccatcagcaataggtctgtcaccgcaatcacagagcgacctgtaacaaagctcaagtggctccaaaaactttggatagaaacagaaacaatcaaaggttagaaaattataaaatcaatcaaacaagaaacaaacaacagctttgatcttagagtggttcaatccatattttggttctcttttggtttgggattttcaaatttagaaaaatagttaccaaataaactatgcatcagtatggtatagcttccatgtttaatcaaatacgattctaattttcaaaggaattgaagttgcagttatatggcttaaacatctctagttgatctgcaaacagcacgaaaacacacctgatccacacttgtgaaaaccgctcctct

SEQ ID NO: 19228 - DNA, 1667 bp, Arabidopsis thaliana
cgtatcgatgatatcgacaaccttcacagcttgatcatcgactccttcgtcttcacccccttcctcacccgatggattctgttggtgcaggaattagcacctccgacaataccaatttaaaccaaggaataacatgaataaaatcgagaattcgattgaaccggggaatccggttagcctgttaatgggcctaagtcatgagctcgccagaagatttaggtcgacaatcgagatcgccataggcggcttctgaggtcgtgtgaagggaaaacttccatttaaaagaggggaatctcatgaagaatggaagtaatggagatttagacctaagataattagaagtttatcatattttggtatgttcgacccattgtataaataggggggggtcaaactccccaaaggatcatctttaacctaatacaagagactacgattatagagcaaaccctagctttctgttcaaacaactttgttctctccctttgattatttgtgagctaagagaggagtgaatttgtctaaatcccttagtacaaattcattgtttgattacagaatcaacaattggcgcgccaggtaggggaatataaacaaattttctctacgctcctttaatcaaagcaagcatggttcaaatcgtcatcgaccccgtcattcctccagtcaacgatgatggaacggaatcaagtctcctccacggaggagatccaccatctaccgtcgaagtagcggccaaaacgaccgtgaatcaaccaacacacggggagacccctgtcgacccactatctttctcattggaagacctcaaagccatcctcacaaccgtgacgaaagatctctcagaatcggtcatggagactaatcgccgactcgacgagctggctaaaggaatctcccaacgtccgatctctgaaataaccccgccgcgagtcatccatccgcgtgggcttagcttcgacctcacagatgcacaatccaatagggtgaaccccaggttcccaggttcactccatcctatgaaccaagaaggcagaccgcctatgcctccctcgacgttgtcgggtcatgtctcgagacccgcaaccttagatcacgatggacagttagatgatatctatctgaaactccgagaaatcggatcccaggtccacagagccagcagttcggctccagagatcgaccgaatgatcgaagaaacccaggactcctttcacagatcgggttacacgcacgagaatcctctaagtgaagcttaggattccgatctatgagggcggaagcgatcctaaacagtatgacttctttcataacagtcgctaaagctcacttttcggacgaactccgtgatataggctgctgccagctcttcgtcgagggacttaccggaaacgctttaacctgcttttccagattagaggcgaactcaattgataacttcacccagttgtcaactgccttcctgaaacaataccgggtatttattcagccaggggactctagttccgatctatggagcatgactcaagaaaatggcgagacactgaacgactacctaggtcgtttcaaagaaatactgtctagttccatcacggacgaagcgcggtggctgcttttaggaaggggctgctccaaggatcccgctgagaaaagcctcgcaataagag

SEQ ID NO: 19229 - DNA, 558 bp, Arabidopsis thaliana
ttgaaaaccaaaagcagactcatgatgtaactaagcaaatagagatttaggatggaactaaacaaagtggttcctgtctccaagatcaaaactaagtgaccatctgaccaatgatcgaccatgcgtgaatacatatcgagatgacagaacatgaaaagactacaattgccaaactactggtaataatctaagttttatgcggtggcataagagtaattgcttatgaatgatgtaggcatcacatcagtaatgatggtggaatcatccagatcgaaaaagccgccttcgtcacagtcaaagagtatgacattgttagggcacagtccgggaaaagagctagcaaggacacaaaaaggttcagactttgaaagacacatgcagagatctccaatatcttgagtgtaaccgcgtttccttgttcgtcaagcttgaacaccattaaagcttgtgtttacatttgcgccatacccatgatgatcttgcttgaagtattcttgtaccactaaccaagaacgtttcaccagctggtgctcaacaagtgctcgctcttgcacatga

SEQ ID NO: 19230 - DNA, 838 bp, Arabidopsis thaliana
tctcttcctaactttcaaatccctcatgtataatctctttctcttttctaagtttttctcttcttgaaaacgagacttatggtgaaatatagggatcgggaggaggattgatgaaccaacaaggacaaacgcaaacgcaaacgcaacctcaggcgagcgcgtctacagctactggtggtacgagtcgtccgccgcagagtaggactaaaatccgagctaggagaggtcaagcaactgatcctcatagtatcgccgaaagggttagttgtttttgttttttattttactttgttcgatgcattaatttgtatcagttaccgagaaaggtgtcgaaattgaattttttttagctttttgaagaaaagatttgagtattttctggaaaaaatgtttttatgggacagttacgaagagagagaattgcggaaagaatgaaagctcttcaagaactcgttcctaacggcaataaggtaaatttttattcaattcattttcagtttagtttccaaaaattaagattagttacaatattaaatggatcattatgaaaataaacttcactttccatcattttattcatcatccactcttgattcgtgcgatccataattccatctaatttacaatttaaactccatcgtctatttatagttctcatcttctagacctaaaattgaaaaaatacaaaataaataatgaaaataagtgtcgaaatgatcaggaactttcttggagctagttgttcaagagatagttttacgctgtcaactagaactttcaggagttaacaagtaaattcatatctccagtcttactcatataactggtggttgtgtag

SEQ ID NO: 19231 - DNA, 697 bp, Arabidopsis thaliana
tcatttgaaaaaaaaatatactcaactgaacataacttgtttcatccacactagttacaatagagataaaaataaattttagacaaaaccctgaagaattaatgtcaaaaaacacattcaaccgttaaattgtaatgagctgaattttaataattttgcgcttggcagcaaaaaaaaaagaaaatagttatatgatctctaaaacgaatcgttgccaatgagccaaagccaacccaaacaaactccagcgaagatccctcccaatagaaacacacacatcaaattccctaatgcatttgcttccggtccctatacaaatttgatcgatccagattatcatttcggtcgttgtgttcgacctctattatggatttctgaccacattttccatagggccctcttatctcttccttctccgagctcgggttatggacgaaggagaagaaggaaccgagaagaaagtatcagcaacaacaggttttattgcgggacagctcatgatgttcatatcgatctattatgcgcctctgcatttagcattgggtagacctcatacaataactgtcctagctctaccgtatcttttgtttcatttcttctggaacaatcacaaacacttttttgattatggatctactaccataactgctaggcctggtgcttacctttcaacacatcaaaacataaatggtaattt

SEQ ID NO: 19232 - DNA, 879 bp, Arabidopsis thaliana
tctaatcttgtaaatcctcaataacaacaaaaacttttctctttttccttttctttggcgatttttagtcttaaaaactaatctttcaaaaatattgatgtgtataatctacaaatcgtatacgtacacaccaatgttactgtttttggtatatgatgatcactgcaaaactctattactgagattagattcatgttgctttcctgaatctgttcttctgtggctttcgtgtctcttttcctgacttgtgattgtttccagaagcttccctttgttttccgaagcttctgttaccggggcgctgtggtcctgttctactttgattaatgtcggaagcaggtgtgtgttgttgatatgttctcttttgccgtttgaatttgttgccatcttgtttggctgtagtttctgatgaagcttctctgtaatttcttttccgcggcctgtaagaaagaaccaattgttattttgtatgcatataatgagcaagcagtgatttgattggatgtgttcttgatctcgggattataattgatgttcttaaggatcttaccctctggatggatcgatggatgtagtctgtgactcattggtctcttctttgtcttttgatttccccgaacggttctgcacattgagatgaaagttgcgaaatgatgcagacgtttctttcaatttatactattcgaatcttcaagcaaatttacagaggagagagaggaacctctaaaactgtctcgatgaaactcttgtgcttgtctggtgtggctaactggactgcgcgggtgccgcacttccttaccataatctcaactatgatcgttacctatatgcacatttttcgtaaggcaaactacccgttttgaggaaggagaggaactg

SEQ ID NO: 19233 - DNA, 700 bp, Arabidopsis thaliana
ccctcaatgatatattttgtggatcttttgatggtatttggatgtttaattaatcagcacaaccctgacaagaaaaaagcttaatgatggtattgcatgtctactttgtatagagaagctgtagtggaggaactagccatgttgggagcaagagttcacacatgtgccagagacgaaactcagcttcaagaacgcttacgtgaatggcaagccaaaggatttgaggtcaccacttctgtctgcgacgtctcttctcgtgagcaacgagagaaactcatggaaaccgtttcctctgtcttccaaggaaaactcaacatcctcgtaagttgatgtatatatataatagcatagaaaaaaatcaagtgattttgttgtgtctggtttaagtctatatatacacatataggtaaataatgcgggaacgggtataataaagccgagtacagagtatacagcagaagattactcgtttctgatggctacaaatctcgagtccgcttttcatctctcacagatcgcgcaccctttgttgaaagcctctggttccgggagcatcgtgttcatgtcctctgttgctggacttgtgcataccggtgcatcaatctatggagcatctaaaggtatatcatatatgtatacattcaaacaattaatgatgcatggcgttgttatgagacttaactagctaatgtatgtttta

SEQ ID NO: 19234 - DNA, 1013 bp, Arabidopsis thaliana columbia
caaagttcttttgttcacacagtgagttgaatgtcaagatttaagctagcagggtatgattgaaataataagaaaacaaattaaaaagacagcagattgattggttgtaacaattaaataaagagataggaacagggtattctcaggaaactattggttactagatctaatgaaagctaggttgttatcgaaccattcttaaactcaaactctaattatgcaataatcggtggtgttccgcgaaactccctatgtctatagctaagaataaccggagaagccgagaaatctttaacctaaacatgaattctaaacgagttcaattgttcaccttagtagataggccgattcttattacacacctgtaaaccaggctgatcaaataatagatccaattacagatacctatggtgggcatatctattgtctggattcaagatctagttaattactctagatctagcattaagaacaatcaaagatgaagaattctacagataacctaacatgggggcgatctactaaaccatatgaatccttaatgagaaaccctattcctaacaagcaaactactcagacatattgaatgaaacaaacaacataattgagatagaaataataaacacaacaaataagataagggaaagaagggatctctgcactgtattaagaactaaatgaatctctcaaggacaaaggatgaatagcttatgtctctcgaaatagggttggcaaagaacttcctaaaagaaacttaggtctaaataaaatataaaaagcctataaaacgtccagggactaataatgcaaataggaaagtcttctggagcaaatttcctcttctgtaaacttgaaagcgtcttggaatttgctgggccgaaactggtgtcgatcgacaaggggctctgtaacgcaacacaacctcccaaccataagccttaagcataagaatctaaaagatctcatatgcggcttatttccatcactcacaccattgactaatactcatatga

SEQ ID NO: 19235 - DNA, 1813 bp, Arabidopsis thaliana
ttgcccgcatcccggattgtatgatgcccattcttgacatcgccaatcaaggtgtcgaggtattctgtaagacgaggaggatttccaagtttgcctgctccttcctctttcttgttatcgaacacacgtttcaaaacataatcgcccacaaagaaaggtctgctttgacttttgaattgtaataccgagctattgcatgttgataattctgaattaggatcaaggcctgatctcgcctctcgttgatggtatccagcgaatcgttgagcattgcagaattctctttttcattcaaaggagcttccgttcgatgaagtcctggtacattgagctcggctggtacaactgcctccatcccgtacaccaatgaaaacggggtttctccggtcgagcgcctaggagttgtgcgatatgcccataagactggctgaagttcatcataccagccccctttcaaatgacttagacgtttcttaagattacttagaattgtcttgtttgcggcttcggcttgaccgttctcttgtggataccgcggagtggaataactaaccttaatcccccagtccgagcaaaatgcttcaaactcgtgtgagataaattgtggtccgttgtcagtaactatttcgtatggaacgccatgcctgcatatgatgttcttccaaatgaaagtctttaccgccgaatctttaatgtttacatacgcttcagcttcaatccacttcgaaaaataatcagttagaaccagtaaatattgtacacctcgggtcgacctatgtaacggtccaatgatatccattgaccatctcatgaaagggtatggggcggagatcgaagagaataactccgaaggttggtgaatgagtggtgcatggagttggcaacgtttgcatcgttgagcatacttaacgtagtctgtgatcatagtaggccagtaatatcccattctcttgatcttgaaagccattgcccttcccgaggaatgacttccacacaaatcttcatgtacttcgctcataacgatctcgacttcgggcccaaaaatgcaaagtaagtagggatcacttacacctcgtctatacaaagaattctttgatagacaaaatttcgcgctaacgattctcattttcctagcttgccatctgttctttgggagctcgcctgtaacgatgtaatgctttattggctccctccaatcagccccccaatctttagccagaatttggtcgatttcgtgaaatactcgagcttctgattcaggatgttcatttggcgctagtatatcttcttcaacccacggttcggtttcagcttcgactgtggtatcgggagtgatttcttctactggttcgagcccaatatctttctgcacagtaggcttaggtacagttgtttcttttgactttcgccttttgataggtggtaattcaatagcaggttcgccgcaatctcgggctgcagctcgggatcttgtgatgacgaatgtctcctttttgtccataatactcctttccgaaatacactctactggaatgattcttttgacttcatgatcggatgttgatgtcagggctgcgagtgcatctgcggtattgttttctccctgcggtatgcgaatgagttcgaatttcctaaagtttctagccaagtctttgaccacctcaagatatgcctccattcgtgagtcttttgcttataatcaccattaaactggttaacaaccagttgggaatcacagtaggcgaccacttcatcggccctaactccttgtgccaacctaagtccagcaattaatgcttcgtactctgcttca

SEQ ID NO: 19236 - DNA, 1339 bp, Arabidopsis thaliana
tctctttaattctttacccagcttgtacgtctcaccacctaacgcagggaactcggattcactgaagtgacaatccgcgtatctagccttaaatagatcacccgttgttggctctagatactttataatggtggagaatcaaatccaacatatattcccatcctcctctgaggtcccatctttgttctctgtggtggagcaattggtacatatacggcacacccgaatgtccttagatgggatatgtctggctcatgacccgttaacaattgggatggtgaatatctgtgttcactagatggcctgatacgaataagttcttatgcattaatacagcatgtccccaagcggctactgggagcctcgacctcatcagtaatggtcgagctatcaattggattcgtttaatgaaggattccgctaatccgttctgtgtatgtacatgtgccacggaatgttccacacttacccccatggacatacattagttattaaacgcttgggacgtgaattcaccggcattatctagacgtatagtcttaagcggaaaatctggaaagtgggctctcaaacgtatgatctgggccaataacctagcaaatgcttggttcctagaggacaacagacaaacatgcgaccatcttgtcgatgcgtcaatgaggaccatgaagtatcggaacgtcccacatggtgggtgtattggtccacatatgtccccttgtatcctttccagaaagtttatggtctctttattgacctttgccggtgatggccttactatgagtttcccttgtgcacatgcagcacacgtgagcttctttgggataactctcttttcttttagggtgtgcccctttgaacttatcattagttttcacatcatgttatgacccggatggccaagccggtcatgccacaaagtgaacttctctatgaactctttgttcattgccaaattagcttcgatcatgttgatcttagtatggtaaagaccagtggacaatgcgggtatagtttctaggactctcttatgtccttgggcgatctctgttacatgtaggaattctctattcccttcaccctttgtttcaacgtggaaaccattaagacgtatgtctttgaaacttaacaagctcctctttgagctgggtgaatacaaggcatcacttatttcaagatgtgtgacgtttggtaagagtacatgggcttggccgtagccctcaatgagactcgctatacccgctatagtgctaatgttggcatttctcaatgttagatttatgaaatatcttttgtctcttaatatcgtgtggcttgagtcactgtccactactagtat

SEQ ID NO: 19237 - DNA, 1791 bp, Arabidopsis thaliana
atgcggattaaaaaaggatcttagagtgtctagggttaggccagtaagctcaccgtataatctactcctttgtcgcatgtgactacatattcacgatcgaatgagtttagctccaccactttcagcttctcggcaaaaaccaacaaatcatgcaaataattctcgaccaaagtcaccatcttattttctaaggatccagacgcggcttccatccgatgttcattaaaccaaacgaagatttttgtgatgatcgcatcaagcattggtattaacgagtatttccttgcgtttttaaacacattgttcaaagattccacacaattgcttgtgtataagttgtatctttctccgggaaaaccacaccttgcccattttttttcacggttgtatcctccaaatacttggtcgccttatgatatctcaacttaaacccgtcatacgctcggttgaagtccgcacgacgtagatccgacttaactcctgaaacttccatgcgagtacgtctcgattggtgtgagtagcatgacttttcacattttaggacaaatgccaaatacaatacccgtgatgagccgcggtatacacgttccgtatggcctttatgaggcttgcatttctgtccgtcatgaaaaccaattctaagtatcgggtacaaccgtttttagcttctcgaaaaaccactcccaactagcatcattctcaccgtcgagtacggcaaacgctatgatgtaatggtgacggttaggatcttgagccgaggcaaacactagcactccgccatatccgttcttcaaatgtgttgcatccacaattaaaactttcctcatcactctaaaaccttcaatgctagctcccaaagctacgaatacgtactgaaatttatcattctcatccaatttcagataagtaactgtaccatcatttaccttcttcaacatgtataaataacaattgatatccttgtagctttcttccgggctaccttttaaatcataaatcgcatgatatttcccccttagcgctgtcgagtatgatactttcacacctaatttcgtctgaactagctccatgatgatacttggaaccggagtttccaactgtcccggaaaatgatcatgaaggagagctgcgactaattgggggttgccttttcttttcctgagcctactactacctttacttagccgagtgcaactatgcatcttattgtaccttctaatcgagaatatatcagtagtactaatattggacgctcgtaaacgccaagaacagctctctttggcacactttaggacatagcgctccttatccaacttcttaatcacataaccaaaactgttagcaaatgcagctctatccaccacctcgtgcaatgccgccttgtttggaaattcttgacgtaaggtcaacccaattccgtcttcccattcttttttaaatatactcggttctacagcaggtggcgactcaacatactgttccccccctatcagaattatccatagactcatcatagcgtgtttcatcttcttgagtcccgtgatcctccactattgcctcaagttgatgttgagttccttgttcctcttctaataagacgatgagtgcaccatcatccactctcatttcatcctcctctgaattcaactccgtatagttctcaccaacagaacttttaccaactctagacaattgctcgggcaattgctccggctcgggcggtttagagatttcctccacaaccaaaacacttctccggttattttttgcaaatgttacataaacaaagac

SEQ ID NO: 19238 - DNA, 799 bp, Arabidopsis thaliana
gagactctactgatccaaaagtgatgagcatagatgatattgtattgtcatgtttagttatggaagaactaactctgtttgtgtgtgtcatgaatagggaagctgtggtggaggaactagccatgttgggagcaaaagtccacacgtgtgccagagacgaaactcagcttcaagaacgcttacgtgaatggcaagcaaaagggtttcaggtcaccacttctgtctgcgacgtctcttctcgtgaccaacgagtgaaactcatggaaactgtttcctctctctaccaaggaaaactcaacatcctcgtaagtatacatatataagcttcgtcctcctcggtattgggatccacaagaacccaattatgttgtgttttttgttgtggatctatacatatgtaggtcaacaatgtgggaacgtcaatattcaagccgaccacagagtatacagcagaagatttctcttttgtaatggctacaaatctcgagtcagctttccatctctcacagcttgcccacccattgttaaaagcctctggctcagggagcatcgtgctcatatcctctgctgctggagtcgtgcatgtcaatgttggatccatctatggagcaaccaaaggtaccgtatataagtacatccttaacacaatatgttcccatgggttatgatgcttacacatatattaactcgttttaggagccatgaatcagctggctagaaacttagcttgcgaatgggcgagcgcaacataaggacgactctgtttgtcttggtatacacaaacctttaagtacgatgt

SEQ ID NO: 19239 - DNA, 1444 bp, Arabidopsis thaliana columbia
gtaagcttatttttgacgaggagaagagattcggtgtgtgttgtaatcggaaacgtagggtcaagaatggcaagattcactgtgaatgcatagtacacataattgaggaggataataaagtgacaaaagtggattttgcagcatctaagttgtcatatctgccacttttgttcaattatgttccaagtttggttcaaatccagtgactttggagcttggaggcaacatataaagaggcatgtgaatcgttactctatcttttgtagttttctttatttattctggccatgccctttgaacaatttatagatcgacattcacttaggaagttttattatttaacgtctcaactaccatacgtagctaacatacgttaaattcatgttttcttatatataaaactgtgaagaatatgatgacttgaagttcaagaaaggtttcaaatgtttaaagcaaagatccgttgagacttaactcaggtgaagtaaatcaaaccctggttgagttagcttttggatcacattcatggtgaaccggcaaaaggaaaattgccgccactcagccatagaggacaagtttgtctgtatgtggtgctagctgttaaggagtgctttaacagacgcggtttcaagactgtacctttggcgtttccatggtgcaagagtgtccgcgtcagcacaagggagccctagttatattcagtataaaagaggtgctctaggttattaagagatgtagagagaactaaggcggctgagagatattagaaacttgttattatcataagcttgtaacagagtttcttaggtctaggagagtgatatagagtgagcttgaatactagtgaagggtatcgagtggtcacttgtaattctccttgtaaacactatctctgatttagtggattccgagaacagtctcgtcccagacgtagcatctattgatgtgaactgggttaccaaacttgctttgtgttctctgtttgtgttcttgcactttctgtgtttctctttaaagtttgggtcttgttgtgtgttctgtctcaacactctgtccaacagagaggttttcttgcttgtggtgttgtgtttggtttgttctcaagaaaagtcgacgttttgagtgggcaaatccttacagattggtattagagccttggttacagtccgtttgtggttccgtagtgttaacaaacggttaaaccatgtctggagcaagaatagaggttgagaagtttgatggtcgtggggattacacgatgtggaaggagaagctcttagctcacattgatatgttgggcttaagtgctgttctaagggaatctgagacgccgatggggaaagaaagagattcagagaaatctgatgaagatgagaaagaagaacgagaaaagatggaagcttttgaagagaagaagagaaaagccagaagcaccatcgtgttg

SEQ ID NO: 19240 - DNA, 742 bp, Arabidopsis thaliana
gtgtcacactctccaccttttcttttacatctttatcaccgaggaactgaaacattttcacataaacttcgtaagaaatagttaaaccattttttcatactataaatgaaatgtattttcttattcattgtcttacatctttagttgacggagttgtaatgaaccatggacaaacagaattagcccttatattatcactcgcccactcgcatgctaaatttctcgccagctgattcatggctcctagaatgcgtatacatttatttaagtcgcgatagaagcaaagaatcataaattgttcgagtatgcgtataattatacctttggttgctccatagattgatgtattacccaaatttacaactccagccacggaagacatgagcacaatgttccctgaaccagaggctttcaataaaggatgcgcgagttgcgagaaatggaaagttgactccagatttgtagctattataaatgagaactcttctgctgtacactcagtcgtcggctttagtacacctattcccacattgggtacctatacaaacgaagcaaacaaaattcaacatgattttggtcattgtcgatccaagctcatagacgaggaggaggagaagcttatatatatacacacacacacttacgaggatgctgagttttccttggaagagagaggaaacagtttccatgagtttctctcgctggtcacgagaagaacatcgcaaacagaagtggtgacttg

SEQ ID NO: 19241 - DNA, 2261 bp, Arabidopsis thaliana
aatctgcttattaggaatagagtttctcattagggattcatatggtttagtaaattgtcccctttgctaggttgtctgtagaattcttcatctttgattgttcataatgctagatctagagtaattaactagatcttcaatccagacaatagatatgcccgccataggtatctgtagttggatctattatttgatgagtcaggtttataggtgtgtaataagaatcggcctatttactaagatgaacaattaaactcgttaagaatgcatatttaggttgataatctctcggcttctccggtcactattagctatagacatagggagtttcacggcacgcgcaccggttattccataattagagtttgagtctaagaattgttcgataacaacctagctttcattagatctactaaccaatagtttcctgagaatgccgtgttcctaactctttatttaatcgtttacaacccaatcaatctgctgttttcttactttgtttacttactatttcactcataccctgctagcttaatctcgacatttaacacactgcttaaaaaaataactccgtgaattcgatcctaaaatactacaattgatctcttatttgagagagtagttctaggtaattttgaaccatatcaccaagctcttgcatagtttccttgtgagggtatctagttccctcaaacttcaactccttcaagtattgatagtactcgctcggggttggctctctcttcctccttggccagtttcttctctcaacaagggttggtgtatcatcctcgatgatctcaacctcttcctcagaaaccgcttcttcaaagggtgcctcttcatggtgttcttcttcagcttcaacgaccctctttccccgagctacttcttctctttgcttggttgaacggcttgagcttcaaccttgaatcaagcttaatctttgagcacgacgagcttggcgaatttggcgttcagtcatgccactcatgtcaaacgtctcaacttcctcattatcaacagaggatcttcttgcccgagatgaactcttccttcttgaatccatagagattggtgatgagcttcgacaggggaaacaagaacatttctccaagaggtatcaaaggggaagggaattggtttctttggtgatgaaattttgagcttgaaaccgattgaatgcttgaggatgaacttggaaatgatcgagtaactttggtgaagtatgatgaaggggaacgaattcttaaagagtgatagggagcgttttaggggaagggtttggaatgaagacttcaaagctttgtgagggggttgcggaaacgagatgatgaaagggagagtttcaatgaaggtttgtcgaaatcaatgggtggaggagaatggtgtttggtttctttgggaaaggatggaaaagttgattggaaatagtgagggactgggtaatcgctttgtccattgagtaaaagagtgttgggggagcaagtggggtcacgaagttatgtcttggtcttcaaataatgagagcccgagtaaagaatcgagcatcttcttgagttgcacaaaattcgatccaacggtggagagctcctcattcttgcttactcgatcaaacagaccaaagtaatcttcaggaattcactcgatcaaacggtggtgatgcttctcccatttggtcattcaaatcaacggctcaaaatactcctcctcattctactcgatcaacggttgagatgatccttggcttggtttgaaattactcgaccgttgactctattagggcactaaaacaaacctgaaacacttaaacaaaaacatcaaaaataacaacaaaaatagaaagttatttacatggatagacataagactttctcccaagtgagcttgtttcaagtcactaagcttgactcttatagaactcagtcagaaaaaggttgaagagaggaacaaaggagtcctcatcttcaatggttgaattttagttcctgaatcatattctgcatcctctcttgacatatggtaggatcagtactcatttgatttttcttcaaagtaagcttctttctgatcagtagagtagtcttcttcttctgaaccaggctcctttgaccaatgctcaaatttaaaattggggtagcctttaaccatttcttgaagttccaagattgcatggtttagtccttccatcttgttagttagctccccaatggtatccttctgagctttgtattctatcctgagttccagaagttcttcag

SEQ ID NO: 19242 - DNA, 1777 bp, Arabidopsis thaliana
gatggacataatcggacctatgcatgcctcgaagcagaaaaagttagttttcatcttaaccgattatttatctaagtggatagaggctgaatcttatgccagcatcaaggacgctcaagtcgagagtttcgtgtggaaatatatcttatgtcgccacgggataccttacgatattgttacagataacggctcacagttcatatcaagccgcttccaaggcttctgcgataagtggggaattcgacttagcaaatcaacaccacgatatccccaaggaaacggccaagctgaggccgcaaacaaaacaatcctcgaaggtttgaagaaacggctcgatgctaaaaagggcttgtggtccgacgaactcgaaggtgttctatggtcgcattggacgactcctcgtcgagccacgggagaaacctcattcaccttagtctacggaacagaatgtgtaattccacccgaaatgacgataccgagtctgcggtgaagcttgtctcccgagcacgaaccagataatactcggaggttactcgacaaactcgatctaatagatgaacgaagagattcagccttggtgcgaataaaaaattatcggaatgagacggatcggtattacaactcgaacgtccgacagcaaagatttcacgaaggggaccgagttctctgaaaagtttttcaaaacaccgccgaaccgaacgctgggaagctcggggcgaattgggaaggaccgtacctgatctcgaaggtcgtacgacccagggtatatgaacttgttgacctaagcggcaaagctattccaacatcctggaacgcaatgcacctaaggcaatactacaactaaatccgaggtgactaaacttgaactacgaggtggcttgatccctgaaaggggtacgtaggcagctcgtcttcggacgagttcagctaccccccccccctcatttttaaagtgggggagtgggtccgtatattcatactcccatttttattatcttgtaggttttcgaaccgaaacatgaataaaaattctttgcaactttttactcggctaatacaatgagcgacggcttggagtatccattacgcctattcggctacagcgcgctatacaaatacgaggtgaaatttatcagattatttctgataagaaatttttatcttcagaaacccggttatacttttaactcggccatgaagcgattaagattaacctcagcatcggcgaaatcttttaaccactcattgacctgctccttctctctctccagaactccgccaccttcgagcacctcgatcagctgcgtgttggctcgcgcttgagacaagtacatgaatcggtcattgaccttatcaaggagcgatactttgtgctcggcggtccttattttggcaatgaaggtctcggaaacctcccgcctcgtctgaatggcccgagccacctcgctgtcacgaagccctctctcctcggataacatccgcttaagacggacgatctcagaattcgccttgagattctgctcggccatcttgatggcattttctttattcacaaaggccatcctctcgacctcctccctttccagcttcgctgcggcagctttggagagtgcctcgtttttctctcgctcgacggcctgaatccgagactccgcctcggctaacttaccagccacctccatgtttccgcatagccgaatcatacgaatgtaccatcaggttcatcgaagcgacagcctggaaatgggaaaagttagatttacaatgacaacaccaa

SEQ ID NO: 19243 - DNA, 628 bp, Arabidopsis thaliana columbia
  unsure (1)..(628): unsure at all n locations
tnnnnnnnnnnnnnnnnnnnnnnnctaaagagaccaccattcagacccagcgcgccaccctgcttctgtttcggaaagaagaagctgatgtttgccatactggatgcgaagttcgcgccacataagccgcatagcagagagatgatgatgaagacgctataaggcgtggaggtatcctgcacggcaaaacccagccagacgcaaggaataatcagaataccggtgctgaacgccgtccagcgacgaccaccgaagataggaaccataaaggagtatggaacacgtaataacgcgccagaaaccgaagcagcgcagtcaacataaatagctgatcggtcgtaaaattaaagccgactttcggtaggttcaccgcaacagcgctgaacaacatccatacgcaaaacgccagcagcagacagggaacggaaatccacaggttgcggctggcaatacgttgaccgcgttgttgccagaacgcaggatcttccggtcgccaatctgtaatgacagctccagtagccctttcgggggcggatgagtgactcatagacacctctgatactcgtttcgatgtctgcaccttagtgtctgtagctanaggcaatttgatgtaaatcaacgataagat

SEQ ID NO: 19244 - DNA, 481 bp, Arabidopsis thaliana columbia
ccacagatatgcttcctcgcttgtagtcgcttaactatctcatatttatgctctgaaaccgttttcatgaataatttggttaaaattctgagttggaactacgctggataaagttttcatgagaaacagatagcagaacagaattgttacctaggaaaaacatccagctaaagccagtcggcacttttctataagatcatcgatgggtaaggcaccaatagactcatccttgtgctgtccaagcaaagcagatgaggggtacatgttggttcccattcctaaacggcggccagtctcttttcctatagccaactgatcccctgtagaaagccacaaacatttagaaaagaaaaatgaattcggacaagaagagaggcaaaacaacatcattgatgaagaatcataagactgtcaagattaagatgtgtcaattagaataaggatacgatttcaatatcaggagaatgaagaagaaaaaaga

SEQ ID NO: 19245 - DNA, 599 bp, Arabidopsis thaliana columbia
atctaaccttgttcctcctttgacgacgaagttgtcttggtctggccgacgacggtagacaaaatgtccagatttctcaacagatgtgaaagcattgtatgagcgtgggtactttttagtgcaaaccttattagccatgcaaggagatgatggtctatctgttccacaaggaccatgcatcatgtgtttttctacaagctcaaatccgagtgggtctgtgattttgttgggtagttcagcagagatgattgcatttatttcagcagcggttgggattttagatgtcttctctagccacatgagtatatgtgcgtgaggcagtccgcgtttctggaactcaattgtgtgtagcactgtaaaaaattttaaaatattttaataacaaacttcttgaagacagtaattggtggacttacaaaaacttggtggacttaccagcaatagatggactgaagaatgtgcctttctcgaggtctataagcaattcgtcaagtttcatcttgaagacacggcattcaatatcaagtctctgattagctgaggtgccacataggttccaaatgttctttattctggtcaatagtgtatcagcattgtga

SEQ ID NO: 19246 - DNA, 553 bp, Arabidopsis thaliana
cttttagctttcggttctcattgttttgcttttcaccttgttccacagggcaatctgtttctcggactcctgatatagggcttaatacagttgtggaaaagcatgtcgatattgtggaaactcccccagggagagagtcgacaatggttctgccatttgtaaagaagtcacagctttggaaagtccttgaatcaatggaggtcttcaaagtcgtgccacagagtccacatttcagccctctgctagagagcgaagaagagtgccgtgaaggagacgccattggtagaatggtgatgtttagttcgctgttagagaaagtcaacaatctacaagtcgacgatccaataagctcgattaacaggatcgacgagtgtttcctcaagcttgagaaacacgggttcaatgttacaacacctcgatctaggatagccaagatactgtccattaaagaaaggcagacatgcgcattggaggaattaaaagctgttgaggaaaagatcacagagaatgacaataaaagaaggaagtatgaagaagatattgttgaattgca

SEQ ID NO: 19247 - DNA, 598 bp, Arabidopsis thaliana columbia
gaatatttttttttccttaaagaagaatttacatgcacacaacgagtaataacttgccaaatgaaatgtctctattttggcgggcattgaactttccaagagtgtgcttggaggggttgtatgttcgggccaaattatcgaacttggttttcacctagagacatttgctccacataatagcctgacttaaccgtgtattttccaaattcggtaaagtgtcaacccattatataaggtttgttgttttttcctatgggtagtataaataccaaaggaagatccttgagatcaagaatattctgaattaagtcaatatcccaagtgtttatccgatcatcaatcaaaattattgaaaagaagagattggttatgaatataaccattgtttaaggctggcctcggggtttgagctggtatccaggggtcattccatactgaaattgaccctctggagcctactcgttcaataagtcttttttgaaccagaggtcgagcagatactatagtcctccatccataggaaggtaagtatgatttaattggatccattcgatgtaattttcgataatacctccctttaaagacattagcaaataag

SEQ ID NO: 19248 - DNA, 466 bp, Arabidopsis thaliana columbia
ttttttcccacccaaaaaaaaaaattaatttatgtttttggtgttttagccatgttctcaagacttcacaccttacatacatatgaaatgaattctagttgatattttgtccttccttaatccgagtgtgtttccaagtcaacgtcccatcccatgtgtccctagcttggctatatatatattaaagactaaagaggagaagtgacattgtcagaagaagaagagaaagaggaagaaaatggttgacaatgagaagtcatatgtttacaagaaccgggaagcgccagtggaggccgtcgtaaaggaccttctctctcggatgactctggctgaaaaaatcggccagatgactttgatcgaacgtagcgtcgcttctgaggccgtgataagagatttctccatcggtatacacaaccacagaccatttctaaattttgttttggtcaacgccaaacctttgttagat

SEQ ID NO: 19249 - DNA, 552 bp, Arabidopsis thaliana columbia
cgggtctacattatgatccaccattccatcaggaaacatagcttcaagttctgaaatcttgaaatcaaatttgccatcttttggagcaacttcaggcttaaaagcgattgagttcagcatctcgctcaagccaaattcaatagaaacctgaagcacacgatcaagcttcttaaattgacttatacagtacgtacactataacactacaaacaacaagtctcttagcataatgtaactagaacattcaaacacgttgtaacgaaaaacaaatgcataggactttcaatgacatagagacaacatgcacgacgattaactgttcttaagatctatgaaaaaatctgaaaatcttccatagtttaacataaacacatatatacgtagatggtcatttgaccttgagcttaggtttgtcgaaggaatcagacgaatttgcgtcggggtcagaaagggcggcgataacttcggaagcggtttggatgcagcggaggaaaggggagacaaagacacggtgaatgggaaaatggatctgagatcggatcatctgaccgg

SEQ ID NO: 19250 - DNA, 529 bp, Arabidopsis thaliana
caatatacccgtgtgtgtcaaaccatactgcatcccaataattgatcttttaatcattctttattatcttatccttggtattgtggctagtggggtattttcaaaagacttttttgacaaatcaacatcacactattaaaaaagggatctcgacggagaccaaccttcagctctctggcaatggcgtatcccggttcgcctatcttgatgaagctcctcgtcttcatctttttatcaacttttgtagtcactaacgtgagctcggaaactaagtgccgggagttcaaatcgatcatcagtttcggagattccattgccgacactggaaacttgcttggcctctcagatcctaaagatcttcctcacatggcgtttccaccgtatggagagaacttcttccaccacccaactggtcgtttctccaacggccgcctcatcattgatttcatcggtacttttgactttacagttttacttaaggtgtgagtaagtaagtgtgtaaaaaggtgaaactaaaagagttattaaa

SEQ ID NO: 19251 - DNA, 580 bp, Arabidopsis thaliana
  unsure (1)..(580): unsure at all n locations
tagagggtgggtaaggtaacaagaaaggctcgttttaaacgatacaaatacaaaattttgtaggtcatagaaagtaaattgccttgtcccacctttctttataaggcaacaagaaaggctcattgagtcatcatcattgatcactaacggtacattccaaaacaataatatatataaagtaaataaaaagatagaaaaacagaaagtcactctggaccactcccatggcgtcgctagattctcatgtgttgatgaaactaggtagcctctttttatctactctttttgtttctatcgtaagctcggaatcgcagtgccggaacttcgagtcgatcatcagtttcggcgattcgattgccgacactggaaacttgctaggtctctcagatcataacaatcttcctatgagcgcgtttccaccgtacggagaaactttcttccaccacccaaccggtcgtttctctgacggtcgcctcatcattgacttcatcggtacttctctttatttatgtgtaaattgactgttttggcgcagttttgttaggttaaatttacatanaagcattctaattttgtgtgt

SEQ ID NO: 19252 - DNA, 826 bp, Arabidopsis thaliana
tcaaacttcattataaaaaatgcaaacgagttttacccaccactaacggaggaagagagaataacagacaaggctgatttagctaaagaatcagccacaacattacttaaacgagggataaagaaaaaacaaaggtgagtaaaggaaacactcaattctctaatgtcatgaagcagtcctcgcagttcaacgatactttttcctgagttgagaagagagattaactctttacagtccgagaagacgttcagctgtcgcacaccggtagataacgcatccaccaaagccaaatgcacagcgagagtctcagccataagcgcagagccgacaaagctactcgaagattggttctccttaatcttcactttgtatggatcctgcaaaaaccaacccataccacaataacctgaagtagtccaagctgcatcaacaaaacaacttgtaactttcagatttggagtgggagaagggtaatctgaaatcggggaagggtgatgtatcagcaactgggcttccatccaagcacgagcatccaaaatggcctttagaacaagaccttcttccgaacagctatgattatcaaagatcaaccggttacgtgctttccatagatgccaaagcaaccacggatacaggggagcagaacccaatcctgttggtgggagagcaaccattcgcttagcatccaccaagaggagtgctacagaagagtgggtagcctcagaaggattgaacaaaacaggagcaagttcccagaccttcttagcgtatggacagaggagcatcagatgtagcgaagattcagtctgaccacatcttttgcagg

SEQ ID NO: 19253 - DNA, 600 bp, Arabidopsis thaliana columbia
gactcggccgccagtgtggtcacaagcataggtgacgtgtccaactttaattggataagctgacgaaggagcagagcaaaatttcacctccaaagaaaaaaattatcagactttcagaagaagaaaaaacgaaggagaagaagaacaatttcgcggattcaagagacagagagcttcttctgcgtaaagtttgatcctttgaaaatgacggaagaaccagagaaggtgtcttcttcagtattacatcaaccttctggtgataagaaacctgaagatgttgggatcaaacctcaggtctgtgacttgctcaatttttcccctttcgctggatcaattcaagggtttgcgaatttcatttctgggtgtttgaattaacaggatccagcgtcttcttctgggtttcgagcttatcctaatggtgattcccaatgtaccggttttttaccgggtcttgttccggatcaatcctgtacagtacgaggaacaaatgaaccgtggagctgggatctatgcggttcctgttcatcaatttggaggacatgtcgctggtcttcctcaaattatcttatcctctcactgacaatgtccaacgtaagtaaa

SEQ ID NO: 19254 - DNA, 974 bp, Arabidopsis thaliana
  unsure (1)..(974): unsure at all n locations
cattactcaaggaaataagcaatttcataattaaaactaagtaagaagtgttaacactgtatttaccagatccacggggtaaaaagtcctttcccacgatgctctccaggactgaagacttccctgagctctgtcaacacaataaggatacaacataaacttaatgccacatagaattatcaaagtacagaaacccctctccacaacaatcgtagcttaaattaaatggttcaagaccaactagtgaaaaaatatccaagtcaaagccaagtcaacattcctcaataccaattgcttgcaaagctagttcatagtagaagctattaaactataattcctcacgatccggatgttgataagcaaaaacaacgaagtttagggcaaatttatccgaatacctcagctcaatatcaattccgaatcgcaaaaaaaacgaacgaatcgtgagatagatcgtcaagcatataatggaaggggaaggagatcgagatgcaaacctgaccaccaacgacggcgatcgcaggcaaggaatcccaaagagtaggtaaagcgctggagtctccatggtctcctaaagccgtgcaagctctctgtatcttgttaaccagagagatcagattttccatcgtcctctactcctcgtttccccaatatcaaatgagaagcccaaaatacagtagctgctacaacagatcggcgagatctgatacctccgccggtaaaatttattgcggaaggagtagatctgcgatgcgacggtgagctatggaaccagagaaatagagatagagagagatgagtttttgaatttgagtcgatgaagaatttttgcttgctagtgttgggaaaaagtaaaggggaagaaagcggtttatataaaagccaatacagggtcttttctttccaaagaaaatttgaaacggcatggtgtttattcgagaatcanagacgacgaggagttgaccaaaacaaaa
